United States Patent Application Publication US 2004/0123343 A1 - sequence listing, part 40

SEQ ID NO: 119307 - protein, 1662 aa, Oryza sativa
  Clone ID: PAT_MRT4530_22536C.1.pep
MASHEDPRDRHRDEGGATTDEEPIEDLGGASEEEDDEDAIVVDFDEAKKHIDTQYVAIGKFFSRRTFSAKGLFEAMQKAWGLRQGMEYKRLHDNRFLLEFQSAGDFRFATGGGPWIYQGDAFLITEYDGKSRPSDVKLNSLPVWVRIYDLPLSMMTETMGKLIGARLGEVRKVAVDDQGRAWDDFMRVRAEHPVDKPLTCWLKLKDKESSSVVQRYDVKYERIPRFCFYCGHIGHMERECDLPSDKQTVRFGLNLRASPYKQFEHRSWALPGKVDNNAKRNLWFPGENQSKPAPAGSQNKDGPSGKEDRKKNSPEENAPVKENFANRDEIEAEIPTVQEELKGLNARNPGKSREDGEVRKLAEQWEHMGKTQEDQPTFHAASQQAKEGQIRSETAGETWVSSKDSINQYEQLDEGAGNGREEVDEHVPPLSTIHEDISLINQLRDEELGEGHKENIDDGVKPVLGKRSMDKSLLGPGYDGPSFDVLVGGDKIGAAELCSSAWRRNGEGGDGLALFWDDTVQVDLLSYNFRYIDVLIKDESCPVQWRCTFVYGEPKASERHNMWTLLRRIKSNSTAPWCLVGDFNEAMWQFEHFSDHKRREKQIMDFREVLSHCDVFDLGFTGAPWTFDNKQKGRNNVRVRLDRAVASQSWSSLFPAAEVIHLTVSSSDHSPILLQASRVDRIKKGDRCLRLGAVINLVKLAKILKKQGIDWQSFRWQAGVLVIKTISIYPGSWILLYREEMQWLQRSRISWLKEGDRNTSFFHRKAAWRHKKNKINRLQRSDGTWCDKREEMEDMTSNFFKELYTNDPSVEPEPLLDLVQPRVTSEMNKLLCKEFSDDEISNALFQMGPLKAPGPDGFPARFFQKNWDVLKRDIIAAVKLFFEQRRMPQGVNDTAIVLIPKKKEPKDLKDYRPISLCNVIYKVIAKCLVNRMRPLLQDVIVPAQSAFIPGQMFTDNALIAFECFHAINRCKSVESQFCAYKLDLTKAYDRVDWRYLEGALLKVGFCSQWVQLLMTCVTSVSYAVRFNGSMLESFKPTRGLRQGDPLSPYLFLFVADGLSTALSEAERSGRLQPLKVCRRAPGISHLLFADDSLLFFKSNMEQTNVVKSALTLYEQSTGQLLSPAKCSLMFGKHCGDALQSDIRSLLQVQHTSFEDKYLGLPTPMGRLKAGRHQSLKERFEKRLTDWNEKYLSMGGKEVLIKSVLQAIPTYVMSVFKLPAGLCEEYMQLIRKFWDLKLFNQALLAWQAWRLIQFPNSLCAQILKAKYYPNGDLCDTTFLVDSSETWKGVVHGLELLKQGLIWWIGSGSKVRIWRDNWIPREHTLRVLGKTVRLRIKWVSDLMVPHQQIWNEELVRRIFYPPDAEEILRIQLPHSPEEDFIAWHYDKVGMFTVFSAYKLALQAQIRADEEVAQCSNGDGDRKLWKNIWNVQVPQKIRIFAWRVSRDCLATQHNKHRRQIVQKPNCEICGAEVEDAFHATVACTKAAALRAEMRQNRWLPGEQEFSQLGPDWLLHLINRADDQTRALIFLLLWNSRGEVLLSSWKFLRRCVSAEEAELLACYEGLKLAAEWIPMPVMLEYDCATAIARLLSTTEERSRWSFLLRAARSVIGLIKEVRLMHCNRECNRVAHELAQIAIRSGQSAVWRNNAPNCVMQCLQHDCNPVT

SEQ ID NO: 119308 - protein, 48 aa, Oryza sativa
  Clone ID: PAT_MRT4530_22537C.1.pep
HAIRTIKYAPPGLDNTTLKCLTPGNLNRLKPTRSHNSRITVYSPTLLN

SEQ ID NO: 119309 - protein, 386 aa, Oryza sativa
  Clone ID: PAT_MRT4530_22538C.1.pep
MASSSPSSSSSPPSAAGASSYWCYSCDRFVRAPAPHDDSAVACPDCGGGFLEEMSAPPPRAAYLRRPRAHHANDLRLRRTRRAAAAAAAGDRSPFNPVIVLRRSPAAAGDDDSLAAATSFELFYDDGAGSGLRPLPETMSDFLMGSGFERLLDQLTQIEAGGLARARENPPASKASVESMPTVTIAASHVGADSHCAVCKEPFELGDEAREMPCSHIYHQDCILPWLALRNSCPVCRHEMPTDAARPRPSNAGTEEETVGLTIWRLPGGGFAVGRFAGGRRPEERELPVVYTEMDGGFNNGGAPRRISWGSRQSRSTERSAIRRIFRNVFSCFGRSHSSNSQASSSHSRPELNDASDRSAVFSHGSRSRSTSWRLEDGHADAMVQR

SEQ ID NO: 119310 - protein, 323 aa, Oryza sativa
  Clone ID: PAT_MRT4530_22539C.1.pep
MRALAVVVVATAFAVVAVRGEQCGSQAGGALCPNCLCCSQYGWCGSTSAYCGSGCQSQCSGSCGGGGPTPPSGGGGSGVASIVSRSLFDQMLLHRNDAACPAKNFYTYDAFVAAANAFPSFATTGDAATRKREVAAFLAQTSHETTGGWATAPDGPYSWGYCFKEENNGNVGSDYCVQSSQWPCAAGKKYYGRGPIQISYNYNYGPAGQAIGSNLLSNPDLVASDATVSFKTAFWFWMTPQSPKPSCHAVMTGQWTPNGNDQAAGRVPGYGVVTNIINGGVECGHGADSRVADRIGFYKRYCDMLGVSYGANLDCYNQRPFNS

SEQ ID NO: 119311 - protein, 606 aa, Oryza sativa
  Clone ID: PAT_MRT4530_2253C.1.pep
MADGARDAVVEVAKHMGKSLAVSKNAADDMMRVLSRYEGEAPMFPLSHPEVDQAEEEEVFAAAEDIIRRCNSVSSPSEMVDYLYAVDDAIAATALQGELASRAAETVQAAMPRLEEEVRALLGSSARRLSLDSFEDLDDAGAATTPDGSPPRRDALSPEAAASASGVADRMLRAGYGPELAQVYVAVRRDALAESAAHLGVEAVAIEEVLRMEWGVLNQRIRRWSHAVRAVVKTLLAGERRLCDEVFASDEELGHECFADVARGCLLQLIGFADAVAMSTPATEKLYRMLGMYEALTAVEPDIESLFTGDARDFFSSEVAGVAAQLGSTIRHTIDQFVNVIHGESSRRPVLGGEIHPMTRYVLNYCGLLAECRVTLDMVLADNNTSNHDTNDDDHDGGGGGGASSTPSGRCMREILTHLLRNLDEKSRLYDDAGLKNIFLMNNIYYIVQKMMVEFPALRELLGDDWVRRHRGQIRQYETGYLRASWMSVLASLRDDASPAAAHGHGGRAALKEKARSFNAAFEELYRSQTAWKVTDPQLREELRIAVSERLIPAYRSFVGRSRQLLESGSSSGRHSSSAAKHIKYSLEDLEDYMLDFFEGVQKFVR

SEQ ID NO: 119312 - protein, 53 aa, Oryza sativa
  Clone ID: PAT_MRT4530_22540C.1.pep
MAAVESFGSTVSAALRRRRPTAMTEGTAAPDWTPTGCGDTKNHAEATLEKAAG

SEQ ID NO: 119313 - protein, 192 aa, Oryza sativa
  unsure (1)..(192): unsure at all Xaa locations
  Clone ID: PAT_MRT4530_22541C.1.pep
MRRSDEEERRIQWRQGAWTGVMVACSTSTGDCRREAMRRRIRLPLCAPCARIRLWRHGSGAVAGXPSADPAPPSSRVDSARVKTTGRRRDSGDLRGGELVLQHPWSSRDGGIEHASLRVFHFHLLHRRKERPLPIVSVVNLETTESHLFFHSTNPVGEESYQDQQHHQSIIFPDFGWTLCYLISPMCYLIIC

SEQ ID NO: 119314 - protein, 78 aa, Oryza sativa
  Clone ID: PAT_MRT4530_22542C.1.pep
KLFFFHSKSPESLTHSVKSTPDLQKRSKLIQYTPCGGPDVFAQNPTTSFLTAAKIIYAIGAGITAAAGTRLALQWFPR

SEQ ID NO: 119315 - protein, 276 aa, Oryza sativa
  Clone ID: PAT_MRT4530_22544C.1.pep
MVVDKKASTLLTKMLLGHRLIHPSSFLTHQPQILSSLFSKRLFCIRAVPVSASTSQNIKTTGWAPCMASSSVGRRATYSTQSVSTNEPVVSVDWLYDNLKEPDIKVLDASWYMPDEQRNPIQEYQVAHIPGALFFDVDGIADRTTKLPHMLPSAEAFAAAVSALGIENKDDLVVYDGKGLFSAARVWWMFRVFGHDRVWVLDGGLPRWRASGYDVESSASSDAILKASAATEAIEKVYKGQTVGPLTFQTKFQPHLVWNIDQVKKKKKERPQNSEL

SEQ ID NO: 119316 - protein, 34 aa, Oryza sativa
  Clone ID: PAT_MRT4530_22545C.1.pep
PGVLNNPTGGSSKPTTQRSRPTLVNLPLFWPYGD

SEQ ID NO: 119317 - protein, 55 aa, Oryza sativa
  Clone ID: PAT_MRT4530_22546C.1.pep
LEGCLRRVRAQHQRRPQPIPFVKYPDTAGLARRGVSGRNPIGYWASNAASDRTRG

SEQ ID NO: 119318 - protein, 85 aa, Oryza sativa
  Clone ID: PAT_MRT4530_22547C.1.pep
RAASGGRGRKRYGRSRLPNRRGPHPHTMSGPKIKDSPGPHVGDSAAREAEAVGEQRRPTAFVAAYWLDHMWASFSWDLGDVSGAM

SEQ ID NO: 119319 - protein, 32 aa, Oryza sativa
  Clone ID: PAT_MRT4530_22548C.1.pep
VYPPSAATYTEGVMRALWFTSPRFPSHCRADY

SEQ ID NO: 119320 - protein, 30 aa, Oryza sativa
  Clone ID: PAT_MRT4530_22549C.1.pep
ELAYDHTCVANEFFTALIIILRYEGSVRVR

SEQ ID NO: 119321 - protein, 87 aa, Oryza sativa
  unsure (1)..(87): unsure at all Xaa locations
  Clone ID: PAT_MRT4530_2254C.1.pep
SDNIDLNKGSRKRSLGPFLQPCSYCNSYANAGLKCCXNPYHKATDIPTKDDEIREEIFRAKGSTILTTLHTEIHEYTAGAAKGKLKR

SEQ ID NO: 119322 - protein, 87 aa, Oryza sativa
  unsure (1)..(87): unsure at all Xaa locations
  Clone ID: PAT_MRT4530_22550C.1.pep
IFSFFFSNAYVRQNTLERTGVQTVHVLTNSVYRTKIHLLSTYIYMYYIFATLSILRTLRTLLRDTGTHTRCANSPTHHGVPVLXVPL

SEQ ID NO: 119323 - protein, 116 aa, Oryza sativa
  Clone ID: PAT_MRT4530_22551C.1.pep
FGGRGPKTQKGDPQGGPPFKTSPGKPANGARKKGEKRKRTGARGPAKGTGPLGGNPPPPPVKGPLQGGVPFPFRVGHLLERRSGRAPFLIPPPGKRGSASKAFNWGTPGVFPSPRF

SEQ ID NO: 119324 - protein, 80 aa, Oryza sativa
  Clone ID: PAT_MRT4530_22552C.1.pep
GVGLEHLDESFTTVGSDGWGDEERSRRRKRRQRGARGGGKGRGGAGGATVPVGTRRKRRWRGAGGGGQGRGGGSGASGGV

SEQ ID NO: 119325 - protein, 75 aa, Oryza sativa
  Clone ID: PAT_MRT4530_22553C.1.pep
CCMLGYATCWNEWSSNYVFLGYASMSSFNSGAHFSARSCMSACRTTVGTSQAVAPCVQVQSNLFTRSLESDNKCF

SEQ ID NO: 119326 - protein, 51 aa, Oryza sativa
  Clone ID: PAT_MRT4530_22554C.1.pep
CLNIIGSISGSLVAFKISKPASATIRRGPFLGVFRAMDLLSPIMINRFTSS

SEQ ID NO: 119327 - protein, 115 aa, Oryza sativa
  unsure (1)..(115): unsure at all Xaa locations
  Clone ID: PAT_MRT4530_22555C.1.pep
KTARPRTSLPQKHPQHPERRVPSPASAPPPSASPHPRRPRPPLRFARRPPEHRRPRPPEPRRRLPPLRSPFPSSPSTYGRRRRPXGRGRAASRRPRRRGRLRARPASISYLSNMG

SEQ ID NO: 119328 - protein, 284 aa, Oryza sativa
  Clone ID: PAT_MRT4530_22556C.1.pep
MALAAIYSLFIINKSGGLIYYKDYGSAGRTDTNDSLRLASLWHSMHAISQQLSPTPGCEGIDLLQAHNFDLHCFQSLTGTKFFAVCETGAQNIETLLKVIYELYTDFVLKNPFYEMEMPIRCELFDLNLAQVRLPPPHGLTSQGSPNRFRRGYHHLTRLNGYRKVVAFVSFVNHQAALSAMSALNGTVFDPDTGDRLHIELAKSSSRKRHGDGGVYRVVDKRLKRKERAADHENAGDGGNDDDAWGEDDNGGNDVVVIDDWCFLSCTVVVNQGLSSIGGNLFQI

SEQ ID NO: 119329 - protein, 149 aa, Oryza sativa
  Clone ID: PAT_MRT4530_22557C.1.pep
MSSGWEESSLMSDTNISGVKRQRDSSEPSQNGGGGGGLAHQFSLPKTSSEMAAIEKFLQFQDAVPCKIRAKRGCATHPRSIAERVRRTRISERIRKLQELVPNMDKQTNTADMLDLAVDYIKDLQKQVKGLNDSRANCTCSAKHQQYSG

SEQ ID NO: 119330 - protein, 523 aa, Oryza sativa
  Clone ID: PAT_MRT4530_22558C.1.pep
MAEGAPIIYLDPATVAEARRRGDDPRKLEECTKYLMTHIYGLLPGPPVPIAAARTHAACAAAASDGVDRISALPDAILRNIVSRLPVKDAARTAALSRRWRPLWRSTPLVLVDAHLFPRGRSFGVSASAPTRADTPGIVAAVSRILAAHPGPFRCVHLLCGFMGSYQAQLEHWLRFLAAKGVDDLILVNRPWPFEAALPAAILRISTLTRLYIGMWKFPDIAGLPTNTAFPNLRELGIYAVAMEKEGREVEFIVARSPVLETLNIQGGNTQVLRLRLEHRSLRCVQICSCCVENLAVVDAPCLERLVLYDSLSKDDSCVRVKIVHAPRLRLLGNLETGFHMLEIHDTFVSAGIRSSPSALFTSVKILGLNVNFGVRHDAQMLPNFLKCFPNAESLHVVCAKCSEATSLVSPNFWDDAGPIESIVSHVNVLTFREFKGEANAISFLKYFVQNAQMVKNVAVVLANPQFTSYSIDTLWTAKILKSVRWASKISSMQVYRSDDSEGGLIWSFQRGSDYSIRDPFVY

SEQ ID NO: 119331 - protein, 89 aa, Oryza sativa
  Clone ID: PAT_MRT4530_22559C.1.pep
INKTEHVLTNYSDCKKTLHGKDTSNYQLDSTNLKTPFLLIRGESGHLPCIQAMRQNGYYKFSCKGGCRPLFAPLDANAQASGTRPKNSC

SEQ ID NO: 119332 - protein, 120 aa, Oryza sativa
  unsure (1)..(120): unsure at all Xaa locations
  Clone ID: PAT_MRT4530_2255C.1.pep
LYGXAFPSLETRQLLLVVWLXPLLXDYLWLLLGCWWFVRLVFVVGIGLTFLSLPLVDQQSILLSWLGXFLRGGDRCPCLLSAFVVRWRXSFVWPFAVLSAGSSPLSVWCWCPLVAVVCLS

SEQ ID NO: 119333 - protein, 99 aa, Oryza sativa
  Clone ID: PAT_MRT4530_22560C.1.pep
MPGGAVSLRRQGDGGLGAGGTRGAAALRRSIARRETGRRQRHEFGGTRQGACGGRCAALGECGERGAREASVRKRGASEAARERGRVAGRQSVPPRSFA

SEQ ID NO: 119334 - protein, 103 aa, Oryza sativa
  unsure (1)..(103): unsure at all Xaa locations
  Clone ID: PAT_MRT4530_22561C.1.pep
GGGTTFHNKAAFVXKNLSGKGEREAQWGRAXQKTLPGVNQFSPSSALFKEKTGYPELSEIPEQAPKQTEVAQLRGLPPPKGPVKSVVKLKGVDIDPIQQRYPG

SEQ ID NO: 119335 - protein, 93 aa, Oryza sativa
  unsure (1)..(93): unsure at all Xaa locations
  Clone ID: PAT_MRT4530_22562C.1.pep
RRASPAARPLPRAPKLVALAPSRLTPGDAPSXSAAAPXPTRSQPAVSLPAQAHRPSGHHVPPRPAAPLPSTPPSRPPAPDPAPLPRMRAEHRS

SEQ ID NO: 119336 - protein, 69 aa, Oryza sativa
  Clone ID: PAT_MRT4530_22563C.1.pep
SHADAHQFTHAGSSIIAQHRHKAFRFAPPRHILAAPGGVAQGRMHSLHADFAHLPRDTVWSESPMITDR

SEQ ID NO: 119337 - protein, 579 aa, Oryza sativa
  Clone ID: PAT_MRT4530_22564C.1.pep
MAGARAMAFVALCALAAFPVAVTGAQVDPLYSSKQVLDWSSQANIKLQNFSLTEEDGLQLLKLRERTRIKKKIEPVQQDDEALVKLENAGIERSKAVDSAVLGKYSIWRRENENEKADSKVRLMRDQMIMARIYSVLAKSRDKLDLHQDLLSRLKESQRSLGEATADAELPKSASERVKVMGQLLAKARDQLYDCKAITQRLRAMLQSADEQVRSLKKQSTFLSQLAAKTIPNGIHCLSMRLTIDYYLLSPEKRKFPKSENLENPDLYHYALFSDNVLAASVVVNSTIMNAKEPEKHVFHLVTDKLNFGAMNMWFLLNPPGDATIHVENVDDFKWLNSSYCPVLKQLESVAMKEYYFKADRPKTLSAGSSNLKYRNPKYLSMLNHLRFYLPQVYPKLNKILFLDDDIVVQKDLTGLWEVDLNGNVNGAVETCGESFHRFDKYLNFSNPNIAQNFDPNACGWAYGMNMFDLEEWKKKDITGIYHKWQNMNENRLLWKLGTLPPGLLTFYKLTHPLDKSWYVLGLGYNPSIERSEIDNAAVIHYNGNMKPWLEIAMSKYRPYWTKYINYEHTYVRGCKISQ

SEQ ID NO: 119338 - protein, 41 aa, Oryza sativa
  Clone ID: PAT_MRT4530_22565C.1.pep
SSCLRLRTPRSIAGFYAMEHRKTERTGQLAQMFQCLEFKTE

SEQ ID NO: 119339 - protein, 82 aa, Oryza sativa
  Clone ID: PAT_MRT4530_22566C.1.pep
MHPFPGEPEYEFLSSHLEQIEGVQERLFGEARRLKHQVCHAVLVGHTLVASAKHHRRKGVHGPRRRWLALWKNCTGRGVRVD

SEQ ID NO: 119340 - protein, 172 aa, Oryza sativa
  Clone ID: PAT_MRT4530_22567C.1.pep
MSSSLSFSSSCSPSLPSPSLFLFTCRFRASRRRAPPRARAGASWNPTAAAAGEGRRQRRRSMSRRGTRADRAAAPVACGDPSGASGEGVEECGGGSSDSSGSVRRPQEPLQAARLGHLRHHRIPKVEAIEFRHAATSAAAANPRERERSTVEMDGAGRGRDRGGRGRGSGRA

SEQ ID NO: 119341 - protein, 192 aa, Oryza sativa
  Clone ID: PAT_MRT4530_22568C.1.pep
MVFGVMLLGSISEVSGEREFSGMLLERSYPSSKAANSTNQQNLRRPIVSLEKENKDNTSGEYWLRTRKTVLKFCTILVLGESSDELTMYKQKRKGQSHNNNDKWTSEIDGGTHRRSFRACPANPPLQTRIIPDEEKLKILATQTGYADLVEPAVIRAVHQLTQHQVVNQVQFFSRRKSLKSNHKTEQQTAEQ

SEQ ID NO: 119342 - protein, 183 aa, Oryza sativa
  Clone ID: PAT_MRT4530_22569C.1.pep
MEWSDEWLAADKLQHVLACFLIALAGAALAGRSSRSPLRRRPAALGCAASLAAGAAKEIADEAGFFGSSGASLRDAAADLVGATLAAVALAILRRLRRPRGEGKARDADHRAGISMSSGTLLVLRLCQAMAKLRPPLVPSNEKVEAEMTDLPVLFCKWQSPISGNYIHNADKSYNFFSRYVYL

SEQ ID NO: 119343 - protein, 80 aa, Oryza sativa
  Clone ID: PAT_MRT4530_2256C.1.pep
RTFTIHTLASSSSSYSIHGTRTHGDTRLPCFVHSEGEGTTHAYRQLYLGYICTNENPPSTPAGCPRATEYYTGHRPRTRK

SEQ ID NO: 119344 - protein, 301 aa, Oryza sativa
  Clone ID: PAT_MRT4530_22570C.1.pep
MARGGEGGTARGEDGEARCEEGGGATREEGGEERMSGAQNQRYQQGNNNRVPDDPYSKVKFKIPSVLGYYDAEKYFDWEMTVEQKFSAHLVPEQHRVRQATKQEDKSVHDYYGELQKGLMRCSIVEGTEDSICRFYSRLRRDIQDIVDYMEFNTVNQLFQFAMFGEKELQGRDQQKVCPSQRAYAATEDGYISTSDVEDDEEEEKKDEEQKDLSIAPCMLEECSIGQAPIIYEDENKGNGDGATTNQDKDKFNTLHDKVKPRTVSNQEGEDDENTTSSDITMTSLCINQPKAHMFYQRRKG

SEQ ID NO: 119345 - protein, 124 aa, Oryza sativa
  Clone ID: PAT_MRT4530_22571C.1.pep
RRRRTAGAAATTAARGLTGLGRYGRRRTKMRVATGSGGLGGPFIGVGRRRRRPTATGDGEGRSRVWGERRIRFEIESTDFQTKLADDSKREKVEEIPKIISPLLIPPETERGGRIWKETAARLG

SEQ ID NO: 119346 - protein, 229 aa, Oryza sativa
  Clone ID: PAT_MRT4530_22572C.1.pep
MTVVAAVLEVIIADEEIQGDRYLRKCPSTRSIFSYMANAYEHGPCKVLAWAKEKRPSMTVEQKFSAHLVPEQHRVRQASSGFKEFAYIWWSRLDVGRALPTTWKELKVAIRDRFVPPCYYRDLSKKLNRLEQGDKSVQDYYGELQKGLMRCSIVEGTEDSICSFYMGLRREIQDMKVFPSQRAYIAMEDGYISTSDVEDDEEEEKKDEEQKDLSIDPCMLEECLITKRL

SEQ ID NO: 119347 - protein, 290 aa, Oryza sativa
  Clone ID: PAT_MRT4530_22573C.1.pep
MGGAQNQRYQQGDNNRVPDDPYSKVKFKIPSFSGYYDAEKYFDWDMTVEQKFSAHLVPEQHRVRQASSEFKEFAYIWWSGLAVERALPTTWKELKVAIRDRFVPPSYLRELSKKLMRLEEGNKSVQDYYGELQKGLMRCSIVDGTKDSICRFYMGLRREIQDIVDNKEFNTVNQLFQFAMLAEKELQGRNQQVKNKASMYTLRAKPSSGLPKPISFWTTPLASKRPIAPGVSAAPKPPHPRPADSGKGSSQKVCLSQRAYVATEDGYTSTSDVEDDEEEEKKDEEKKTYL

SEQ ID NO: 119348 - protein, 193 aa, Oryza sativa
  Clone ID: PAT_MRT4530_22574C.1.pep
LEIAGAAALPLLQLAGRTQPLLDGGQNQDSSGGYCSWQSVARSACPSMKPHSTPSCVTRGKPYRALNGEVSIPLLLSQHEQSGRNGITGCSTRSTEARQKCKGNGGRGSAVAAHQYCHTGHALSHDRELLRLLSCLRTLPSPIKQGNVGARRIFRDRSNATNMCAHVEYAPGPCILISLICSPTLLLLLLLLL

SEQ ID NO: 119349 - protein, 242 aa, Oryza sativa
  Clone ID: PAT_MRT4530_22575C.1.pep
EGNLGKCAQLAQFDEELYKLTGDGEEKYLIATSEQPLCAYHLGDRIYPAELPIRYAGYSTCFRKEAGSHGRDTAGIFRVHQFEKIEQFCVTSPNDNESWEMHEEMIKNSEDFYKEIGLPYQLVSIVSGALNDAAAKKYDLEAWFPASKTYRELVSCSNCTDFQARRLGIGYGQKKNDEQSKQFVHMLNSTLTATERTLCCILENFQRENGVEVPKALQPYMGGIDFLPFKLDSIQVAQLQIK

SEQ ID NO: 119350 - protein, 50 aa, Oryza sativa
  Clone ID: PAT_MRT4530_22576C.1.pep
MSKRGGKAKPLKAPKAEKKEYDESDLAYLQKKKDEEKALGGSGLKKSGKK

SEQ ID NO: 119351 - protein, 257 aa, Oryza sativa
  Clone ID: PAT_MRT4530_22577C.1.pep
MTGMGGAQNQRYQQGNNNRVPDDPCAKVMFKIPSFSGYYDAEKYFDWEMIVEQKFSTHLVPEQHRVRQATCEAIIKVAQAYLFLGVSTKEQATGYIWSLYSAETTFPTTRRFRIQCHRYHGFGHVQKVCPSQLVYVATDDDYISTSDVEDDEEEEKKDKEQKDLSIAPCMLEECLIDQAPVISEDEKKGNDNGATTTQDVEIDKDKFNTLHDKMKPRTVSNQEGEDNEDTTSSDITMTILYINQPKVSFLQKYLKSA

SEQ ID NO: 119352 - protein, 151 aa, Oryza sativa
  Clone ID: PAT_MRT4530_22578C.1.pep
RPIQALRIASLGGGGGGGVYGLHLLRPPAAPPRPATFARPVALLPFHAAAPPRHPRAATASLTFHAAALPLHPLAEAAFLPFHAAAPPLHPRADAAPLPFGAAAPALTLPFRGAAPRLHPHSRGDPPLSSRRATPAPPRSTAPLTLLFSWP

SEQ ID NO: 119353 - protein, 477 aa, Oryza sativa
  Clone ID: PAT_MRT4530_22579C.1.pep
MAMQAAFAASMFPQLAQRRGSDRAVVVAPPAPAPVRVAMRSGGAAAAAARGVRCRASLIEPDGGRLVELVVPEEGGRREAARREAAALAHRVRLGRVETEWLHVLSEGWASPLRGFMREAEFLQALHFNAIRGGDGAMVNMSVPIVLPLGDAQRRAIEASGARRVALVDAADRPLAVLSDIEIYKHNKEERIARTWGTTAPGLPYVDEAITNAGDWLIGGDLEVIEPIKYNDGLDQYRLSPAQLREEFARRNADAVFAFQLRNPVHNGHALLMTDTRKRLLEMGYKNPVLLLHPLGGFTKADDVPLSWRMKQHEKVLEEGVLNPESTVVAIFPSPMHYAGPTEVQWHAKARINAGANFYIVGRDPAGMGHPTEKRDLYDADHGKKVLSMAPGLEKLNILPFKVAAYDTKQKKMDFFDPSRKDDFLFISGTKMRTLAKNCQSPPDGFMCPGGWKVLVEYYDSLTPSADSSKLREAVAA

SEQ ID NO: 119354 - protein, 113 aa, Oryza sativa
  Clone ID: PAT_MRT4530_2257C.1.pep
MGEVKHLCLVKFKEEVLVDDILQGMTKLVSEMDMVKSFEWGKDVLNQEMLTQGFTHVFSLTFASSEDLTTYMSHERHQEFAGTFMAAIDKVVVVDFPVVASKPAPPAAPAAAA

SEQ ID NO: 119355 - protein, 211 aa, Oryza sativa
  Clone ID: PAT_MRT4530_22580C.1.pep
MATAMMAATATSCSPRRAPVVASSSVQPPRRQQQQQPRRGLKQLPGLVATAAVAVAAAPLPALAEQMEKAALFDFNLTLPLIATEFLLLMVALDKLYFTPLGKFMDERDAKIRAELGGVKDASEEVRQLEEQAAAVLKAARAEIAAALNKMKKETTQELEAKLDEGRRRVEAELVEALANLEAQKEEAVKALDAQIASLSDEIVKKVLPSA

SEQ ID NO: 119356 - protein, 82 aa, Oryza sativa
  unsure (1)..(82): unsure at all Xaa locations
  Clone ID: PAT_MRT4530_22581C.1.pep
SAHAAPFHVSHDAIDPPTPPSSTVAPLTPPSSIXPPSSAANPTPPPSTAADPPTPTSSTAAVLDDPPTPPPSTATNRPTPSP

SEQ ID NO: 119357 - protein, 91 aa, Oryza sativa
  Clone ID: PAT_MRT4530_22582C.1.pep
QIILWKNFMMHHMEGIILKLACLQVDSRGSPEWILTKHARWIFHEIIFLHFPELRKKGALHGSAEPLVRSTHGLGRPYTAFVHVVPRRPPS

SEQ ID NO: 119358 - protein, 412 aa, Oryza sativa
  Clone ID: PAT_MRT4530_22583C.1.pep
MAFDAFTDKNAVFRRLKAKPENKMCFDCSAKNPTWASVTYGIFLCLDCSAVHRSLGVHITFVRSTNLDSWTPDQLKMMAFGGNNRAHAFFKQHGWTDGGKVDAKYTSRAAELYRQILQKEVAKSSADNVLPSSPVAASQPQNPSDDFPEFKLPEAPAENTNGKQEPDVTNSQKAPTQTPKAPTHPTFATSVKKSIGAKKIGGKTGGLGVKKLTTKPSESLYDQKPEEPKPAAPVMTTSTTKSGPSLHSRFEYVENEPAVDSRNGGTQMTGHVAPPKSSNFFQEYGMDNGFQKKTSTAATKTQIQETDEARKKFSNAKAISSSQFFGNQSREEKDAQMSLQKFAGSSSISSADLFGRRDMDDSNLDLSAADLINRISFQASQDLSSLKNMAGETGKKLTSIASNFISDLDRIL

SEQ ID NO: 119359 - protein, 384 aa, Oryza sativa
  unsure (1)..(384): unsure at all Xaa locations
  Clone ID: PAT_MRT4530_22584C.1.pep
KLACLQVDSRGSPPINDFLRDDMLLYVTDSNAWYANTVNFMFAGFIXQRENERRLIYENRRYLWDESYLYRVCXSFLRRCVLAAEGNQIILXEKFHDAPYGGHYXSSLHACRSTLEDPQSGFFXPTIYEDTKEFIRICWKCQKHGDITTQDAIPLTYNFQVELFDLWGPFPKSHDCEYILVPIDYVQMVISNGGYHFIDKIFQNLLQELEAQHIIAISYHPQTNGQSRNLQQINQEHTVKDHARNGEGMKEQATKCTLPRTPFSMSPSXLICRKMCYFRIALEHRAHXAMRMWNXKGGRHKQMLLSELQEXREKTNYNDKIYEERTKRWHGKIIKGKEFMARDKVMLFNSXVKLFGHEKLRSKWMGPFTIIDTSAHGVVMLQDG

SEQ ID NO: 119360 - protein, 196 aa, Oryza sativa
  Clone ID: PAT_MRT4530_22585C.1.pep
MASRGSGSGSGKGKGKKASGGTRGKGRMPLDGEITERISTLRMANTPRTERLRRNLASLVLRQALQGVYSEILGGYIQSYELDYQDQDGCSFVQGRIFMESPRSGEEGFIQHDATFVVMDEDYETGRIMAQKIYDTTIKFHGYNDVIADIYLVAYCETLGKWVIGYEPFCQYWLESTLAPFYESDTTISAYWRDKI

SEQ ID NO: 119361 - protein, 75 aa, Oryza sativa
  unsure (1)..(75): unsure at all Xaa locations
  Clone ID: PAT_MRT4530_22586C.1.pep
MTPPPPPPPPPAPSXMGRRRSSAPTPPPRAAPRRRRPVHRCTPPSPSTHPQVGPLALPARPADPMPRFSQSRVIV

SEQ ID NO: 119362 - protein, 47 aa, Oryza sativa
  Clone ID: PAT_MRT4530_22587C.1.pep
DKFCGLIFTITRRGQTCHYAHLIGLKEIHLSSSDVTEIRPRRLALSD

SEQ ID NO: 119363 - protein, 98 aa, Oryza sativa
  unsure (1)..(98): unsure at all Xaa locations
  Clone ID: PAT_MRT4530_22588C.1.pep
XDXXXMPTPXGXXXXXTXXXXXXQXTLXXVXAXXQWXNXXXTXLXPRATXVPXGXRXXDXXXXIDRPSXCXPILXXXWYIVHVVFXLXSRKPLVXVAL

SEQ ID NO: 119364 - protein, 83 aa, Oryza sativa
  Clone ID: PAT_MRT4530_22589C.1.pep
MRDPLDLLEVVARKVDMPATEELEEATATWELDEAGEKGARHAVPIWPSPPQSPPLCSLAGNTFTEPPVDLLFRAQTHTPSIP

SEQ ID NO: 119365 - protein, 58 aa, Oryza sativa
  Clone ID: PAT_MRT4530_2258C.1.pep
KFPNNERGAQKPTRGHQFCWGSGFRIILRFPSWANPFKRTPKPPCLKAPPGGKFPGAA

SEQ ID NO: 119366 - protein, 350 aa, Oryza sativa
  Clone ID: PAT_MRT4530_22590C.1.pep
MAGFSLRGGGGGGGGGGGVGGGGGGGRGGERGGGGDHAIGADSLFLYARGAAAAAADTAGSGGGGGGIGFQLWHPQQQAAAAAAAVPHTSQFFSSGVATGVVLGFSSHDGGGGGGHMGGPGGGAGGGRAGTSCQDCGNNAKKDCSHLRCRTCCRSRGFSCATHVKSTWVPAAKRRERQQQLAALFRGAAANNSAAAAAAAAASKRPRELVRTLGRLPSANTAMGDGRFPPELSVEAVFRCVRIGAVDEADAELAYQTAVSIGGHTFKGILRDHGPADEAAGQLPPSSAEYHQLTGQGREESSPAGSSEGVGGGHGAATAATSAAVLMDPYPTPIGAFAAGTQFFPHNPRT

SEQ ID NO: 119367 - protein, 308 aa, Oryza sativa
  Clone ID: PAT_MRT4530_22591C.1.pep
PGLQESARGPDLDKDDDLPEPGEHSADKDERSEDVGVFEDEERKERSQEDQEKTFHGDNVSSAVSHDPPSAEQDELVRRAQDKILYVDDGSTAVPHDNQEAERREEEARKAREMTFRGDDVSSSVDHDAQVTKPLPEEQLKSMDSIFEGTTNLSNGITFRGPGVNESTAARELGAIPADASSHPNTSTVSESNTDTAPVNLDGNHTGSDQANSTSLKGQQEQQANSTDVLNNQIKLFIDLTSAAELNYRPNGTLASASTDAENATSVDRGHDGNTGTNKAEEGDTGKDLDLSTKIMNKAISEDEVVLE

SEQ ID NO: 119368 - protein, 97 aa, Oryza sativa
  Clone ID: PAT_MRT4530_22592C.1.pep
MSTGGGADKSGGGGGGAVKTPSDFLKSIRGRPVVVKLNSGVDYRGILACLDGYMNIAMEQTEEYVNGQLKNKYGDAFIRGNNVLYISTSKRTLTDDA

SEQ ID NO: 119369 - protein, 1090 aa, Oryza sativa
  unsure (1)..(1090): unsure at all Xaa locations
  Clone ID: PAT_MRT4530_22593C.1.pep
EKPYVAWHRCKKSFVIEVISFPDDPEEEAEEGPTAHGPQLDEPSIXMHARSGVRFPKYNTIKVVTIGNHDFVINFVALPLSVYDIILRAQWLCSLWPILWDFANQSLAFGPPTDRVVWTSIDAPASPSQAATIDGTPGELMTELVDTFQDLFVEPHGMPPGRHLCHRIRLEHGISAVAVRPYRYAHVQKDELERQCDEMLQQGVIRPSSSAFSSPALLIKKKDGAWRFCIDYRALNDKTIKDKFPIPVAEELFDELRGVKFFTKLDMRSGYHQVRMHPDDIHKTAFRTHQGLFEFLVMPFGLTNAPATFQALMNDVLLPFLHRFVLVFFDDILIYRSSWSEHLRHVRTVLQTLQDHKLRLKRSKCEFGLSAISYLGHVISAAGVAMDRSKVQAVLDWPQPKNARAVRGFLGLAGYYRRLIRDFGTIAVPLTALLRKEGFRWSDDATAAFRQLQQALTAAPFVVECDASGSGFGAVLHQGFGPVAFFSKPIAPRHAKLAAYERELIGLVQAVRHWRPYLWGRRFLIRTDHYSLRFLLDQRLSTVPQHQWASKLLGFDFAVEYKPGTANVVAYALSRRDEHLAETLALSAPQFSLFDELRREVLTSPELTAIRDDIAKGSKPPAWAFTDGLITFKGRIFVSASSPSLPAILELAHGLGHEGTQKTLSRLRADFHLARDRAVVQEHVRACFTCQQNKTEHLQPAGLLQSLPVPSAVWADIAMDFVEGLPRVHGKTVILTVVDRFSKFAHFIPMAHPYTATSVAAAFFSEIVRLHGVPASIVSDRDPVFTSTFWRELFRLAGVRLNLSSAFHPQSDGQSEVTNKIIAMYLRCLTGDRPRHWLRWLPWAEYCYNTSYQSSLRTSPFRVVYGREPPTLRAYEPGSTRLLAVQQAMQDRDEFLREIRDRLEQAQQTHKSAYDGKHRALEFSVGDWLWLRLLHRPIASLGVTGRGKLGPKFYGPYRVAERIGSMAYRLQLPPGARLHDVFHVGLLKPFRGTPPDSVPPLPPIQHGQVCLQHAAVTQSRLARGVREVLVQWKDKPAAEASWMPLDEFRTLHPDFQLEDKLLFQGGRDVMWGLQYKRRSNRRATARHDEE

SEQ ID NO: 119370 - protein, 129 aa, Oryza sativa
  Clone ID: PAT_MRT4530_22594C.1.pep
LLYPGMEVCPHDKSTGASHRATTTMYLPGSPRAAQHLAAAAARGAAEAEGHGRRGGGAGGRETLQLFPLQPTFVLPDHKPLRAGSACAAVSPTTPSASASFSWESESSDSPSSEAPPFYDFFGVHSGGR

SEQ ID NO: 119371 - protein, 116 aa, Oryza sativa
  Clone ID: PAT_MRT4530_22595C.1.pep
ARWWAASWGSESGRRRRRGGGRRRGRGRARRRRRCSTSGTTGRRRTSRWPRSPTWRSTRSRRRPPSPPPPGSPPPRPRGAATTAPSPSSPPPPPSPPRTPCTPGSPPRSQSRLGRG

SEQ ID NO: 119372 - protein, 210 aa, Oryza sativa
  Clone ID: PAT_MRT4530_22596C.1.pep
MDQSIVGQILEKQVLSVAKAVEDKLDEQIAALDRLDPDDIEALRERRILQMRRAAERRAKWRALGHGEYGEVPEKEFFAAAKASDRLVCHFYRDNWPCKVMDKHLSILAKQHVETRFVKVHAEKAPFLTEKLRIVVLPTLALVKNTKVEDYVVGFDELGGKDDFSTEDLEERLAKAQVIFLDGEGPAHASKQATKRSVRQSDTGNSSDSE

SEQ ID NO: 119373 - protein, 526 aa, Oryza sativa
  Clone ID: PAT_MRT4530_22597C.1.pep
MAATRSTATAALALSRTLARRPAASSSSRRISLELSAPRGTNPFQSAAFSSTTTGDPPPPTMDSPIKVVSHIGGSGGDGGGGAIDAGRSARKPLSLWPGMYHSPVTNALWEARSSIFERMIDAGAAGKQQQQPPQTELLTKTPAGSRTSIVYKFATDDILREQYRDPWNEVRIGKLLEDLDALAGTIAVKVSKIILPMDDRIIALTFIHFEFYMHCSDEDSTTRPLLLVTASVDKMELKKPICVDTDLKIAGAVTYVGRSSIDIQIEVTQVDQDSDMQSDPIALTANFTFVARDSMTGKSAPVNRLSPETEKEKQLFAEREARDKLRKRKREEQKGVFENGINKLHVEAERLNSLLAEGRVFSDLPALADRDSILLKDTRLENSLICQPQQRNLHGRIFGGFLMHRAFELAFSTAYAFVGQRPCFLEVDHVDFLKPVDVGDFLRFKSCVLYTQLDNAEQPLVNVEVVAHVTRPELRKSEVSNTFHFTFTVCSDALKNGLKIRHVVPSTEEEARRILERMDAEGLFD

SEQ ID NO: 119374 - protein, 61 aa, Oryza sativa
  Clone ID: PAT_MRT4530_22598C.1.pep
IGINTYEVRKGSFHNTFLSSFYIFSLKKADPCPLERCKNNSPLTLPSNRYIHWSIVFSWFF

SEQ ID NO: 119375 - protein, 1044 aa, Oryza sativa
  Clone ID: PAT_MRT4530_22599C.1.pep
MDAISSEAPVGVFAIGPSTALGRALALRVLLCGSLGRLRHRLAAALRAALPVAAGWLHPRDNTRGILLAVCAVALLLRVRGRGGGRAGVRARVQSAYRRKFWRNMMRAALTYEEWAHAARMLDRETPRRATDADLYDEELVRNKLRELRHRRQEGSLRDIVFCMRADLLRNLGNMCNSELHKGRLQVPKLIKEYIEEVSTQLKMVCNSDSDDLPLEEKLAFMHETRHAFGRTALLLSGGASLGCFHVGVVKTLVEHKLLPRIISGSSVGSIMCSIVATRSWPELESFFEEWHSLKFFDQMGGIFPVVKRILTHGAVHDIRHLQTLLRNLTSNLTFQEAYDMTGRILVVTVCSPRKHEPPRCLNYLTSPHVLIWSAVTASCAFPGLFEAQELMAKDRFGETVPFHAPFLLGLEERVGATTRRWRDGSLESDLPMKQLKELFNVNHFIVSQANPHIAPLLRLKEIIRAYGGSFAAKLAELAEMEVKHRCNQILELGFPLGGIAKLFAQDWEGDVTVVMPATLAQYSKIIQNPSYAELQKAANQGRRCTWEKLSAIRANCAIELVLDECVALLNHMRRLKRSAERAAASQGHGPTIRLCPSRRIPSWNLIARENSSGSLEEEFLISPRTNHHADGGIAGPSNKNHHVQQNVHDGSDSESESIDLNSWTRSGGPLMRTASANKFVSFVQNLEIDTEFRTISSREDRTDVVTPNANFLVSQAIGRESVDNSAMPITPDRSLGNSGSDPHDSNVPRSPFGCSTSIMVSEGDLLQPEKIENGILFNVVKRDTLLTPTGGVELQGTSQEPDVETIQTECLDDASDDDDVGLNAGDEAAIDPRANMSSQNTQHQGSSLENINLSSSVDCEAETITSKSKGSSLFDIGMEIRPTILSTESSMYERSSAKIGLRTVHAEFISNPGAGKGEVDSGAANKEFSYFSQTADTVIFSESCETGQHHEVNVEALTSYPVSVLEDDRSGGFNLSEIMATTFIAEADAPISRRDEVEQHNGSPVETFLDTETVQAGPCSSTLEGNNTNNSEEMQVVCTSGTN

SEQ ID NO: 119376 - protein, 84 aa, Oryza sativa
  unsure (1)..(84): unsure at all Xaa locations
  Clone ID: PAT_MRT4530_2259C.1.pep
GGGGGGSGWWGGVGAAGSRRSXAGRGAAAAAAGAAGGGGRTAAARSCGSRRSSAARGAPTWRRRRRAGSPETARRTPKAKASLS

SEQ ID NO: 119377 - protein, 554 aa, Oryza sativa
  unsure (1)..(554): unsure at all Xaa locations
  Clone ID: PAT_MRT4530_225C.1.pep
RIPSAAPPSAPPPPTPSTHPPPPPPCCRRPSTAPPPPPGPPPRPPRVQPSGSSSSSSPPPRPPPHPQLPPLLSVSSPRPQPPXPPPQPSPLPSASSPPPSPLLLTAAPCRHSPPPRPHHHRCHSPPPRPHGHRLPPPPTASSPPKQPPLPSASSPPPQLPLPTTSSPPPXPSPPLPTPPKSSPPXFGPASSDQRPPPPPFALPSPPAPPLPHPXPRTRPRRPAPSRRRQAAPPXPAALPPPXPPPPPPGSSPXSTPPSSPPRSPPPTASARTAGIPCSPAPRAASAPPSXPPTSPPVRPQRPPPPPTFAAAHPEPSPPSPPPPPPPPRSLAASPAPPPPPPPHQPHRHPKKPAPPPQPRTTPPPHPPPPLLRRTPQPPLAPPPPPXLPPPPPAPPPPLLPFSPPCHAAMPSVSTTPSAKESPPTRPRPRPRLDRLSRTCDFSATPPPPPPARPRAPSXPRPPPPPTPTSSTPPSPVPLALTRPMSAPMCLALRRRPSVYEMRQRRLENLTCEHSRRMLSSFVFHSLHAGTFPPREELSDLSGSEKVSKNLSTNV

SEQ ID NO: 119378 - protein, 452 aa, Oryza sativa
  unsure (1)..(452): unsure at all Xaa locations
  Clone ID: PAT_MRT4530_22600C.1.pep
MAAPPTPSSPLVASTRRFVAPRLRSLLPAAAVSMSSTSSSSISAPSNGRPVSGGAGEQRPPPSPLLPHESLEVAGARCGLLAGFDSLRRPYRAFPIVASNRHVETIFAAFARSLPAVALRRECLRTPDDGAVALDWVSGDDRALPRDAPVLILLPGLTGGSDDTYVRHMLLRARNKGWRVVVFNSRGCAGSPVTTAKFYSASFTGDLRQVVDHVLGRFPQSNVYAVGWSLGANILVRYLGEETDKCVLSGAVSLCNPFDLVIADEDFHKGFNNVYDRALAKALRNIFKKEFIKFXHALLFEGLEGEYNIPKAANARSVRDFDEGLTRVSFGFKSVDDYYSNSSSSDSIKNVSIPLLCIQADNDPIAPSRGIPREDIKANPNCLLIVTPQGGHLGWVAGEDAPFGCPWTDPIIMEFLEYVHNEKNSSTKGSISYEQQSVTQTSAPDVSVHVQR

SEQ ID NO: 119379 - protein, 62 aa, Oryza sativa
  Clone ID: PAT_MRT4530_22601C.1.pep
GSVGRGICRQVLFQSCRSTVVAVNVCNSVSNACCRGQGSLSVHVPVGGQELPGCHTGPLSMC

SEQ ID NO: 119380 - protein, 90 aa, Oryza sativa
  Clone ID: PAT_MRT4530_22602C.1.pep
GLGTETRCRGFLELLQASAIAVLLPHWLDIILLCSLESWCPDSSLISSGEGALSSMLIVSKYVFVRPYRLTHMINVLSCKDMNFNTFLLL

SEQ ID NO: 119381 - protein, 246 aa, Oryza sativa
  Clone ID: PAT_MRT4530_22603C.1.pep
MAVAAVRAAAADAAVTFLWVLCVSTLGASTAAVTSYLRIHEGIHYALLVTVSLLSVLLFAFNLLCDALGGASFNPTALAAFHAAGLSSPRHSSLFPLALRFPAQAAGAVGGAMAISELMPEQYKHMLGGPSLKVDLHTGAAAELVLTFVITLAVLWIIVKGPRNPIVKTWMLSISTVCLVLTGAAYTGPSMNPANAFGWAYVNNRHNTWEQFYVYWICPFVGAVLAAWVFRAVFPPPAPKPKAKKA

SEQ ID NO: 119382 - protein, 256 aa, Oryza sativa
  unsure (1)..(256): unsure at all Xaa locations
  Clone ID: PAT_MRT4530_22604C.1.pep
MRHVVNPAPLLEGGGTGQIRAAXPDLAVEQPAAGLSGAAAVSGGGGSGVEALAAAAEETARSAPGSGGTATGGGVCARRSGGRDGGGDEFAVTAAWATTVGRLRRVSSKLDDRDKVREDDKMAAGMEGXQRLLWWRRRWRGDGVGVANLAAPAAEPTPEESVCRGDGGDELAATAARATTVGGLRRVPLELDDGEKGREDGEMAAGMEGQQWLWWWRPSPRYGEAWQSRTASGGMADSRIRRRTVFRGGVGGRLGT

SEQ ID NO: 119383 - protein, 383 aa, Oryza sativa
  unsure (1)..(383): unsure at all Xaa locations
  Clone ID: PAT_MRT4530_22605C.1.pep
MAAVGDGAGEALDDNHSRFNKILSDLRSVDSAYDINYSQSKISRHFLIGLDMYIWEMKVTSIHESIDMSTLTLDSLYTKLKTHEINILSHKVDSKSSALISSSSSLDVGASSSNSTTLTLINAMSDEQLERFEEENLVLAANKISRAMNNVRNRKRGGPTCCFEYGALDHIRSHCPKLGRGKKVTKEDEINKKEKKKSLKQRLIRELIEAFDTDESENEEESKDVDESDSDSEEKLSYHQLEHAAFKFAKILKTCSNMLDEKDHTIEILNAEIDRLKSSIPNDDDCKYCEVLFSEINVLRDVNSVSHKKLESEIEKSKKLESSFALGFALHARVVDELVFTKGFLTKYKVAFCASTLLNFXCPKRAKQNKDVLVSQNCSKCFL

SEQ ID NO: 119384 - protein, 125 aa, Oryza sativa
  Clone ID: PAT_MRT4530_22606C.1.pep
CLHPQIQPITHDDELTHHQSKVKSEFSPPAARGQVTGQTGMARAPRQRQKPTRLRRGAQPLERKRAKGKPNQPRMHALRKSTAAAAIKSMQETAGQKHSFELGHGGGHGRAEAAELASLNLAIAD

SEQ ID NO: 119385 - protein, 347 aa, Oryza sativa
  unsure (1)..(347): unsure at all Xaa locations
  Clone ID: PAT_MRT4530_22607C.1.pep
RHRSSGCRQSCAATRTAAAGLCPRARAWEGDLLEGGGTGQIRAAXPDLAVEQPAAGLSGAAAVSGGGGSGVEALAAAAEETARSAPGSRADGGSSARRSGGRDGGGDEFAVTAAWATTVGRLRRVSSKLDDRDKVREDDKMAAGMEGXQRLLWWRRRWRGDGVGVANLAAPAAEPTPEESVCRGDGGDELAATAARATTVGGLRRVPSELDDGEKGREDGEMAAGMEGQQWLCWWRPSPRYGEAWQSRTASRGRGRRPHPAGTAVFGGGVGGRLSAERRSRWQRRPARRERRRWRPAWRERRSRWREVGLAREARPVEEARLAREARPAVEEATFGGGRGRSLAHEG

SEQ ID NO: 119386 - protein, 52 aa, Oryza sativa
  Clone ID: PAT_MRT4530_22608C.1.pep
LLLLSFLLPLIKKLLTTGSGQLSLPAIPIAYCRSLVPKWLYICIRRLICSIC

SEQ ID NO: 119387 - protein, 40 aa, Oryza sativa
  Clone ID: PAT_MRT4530_22609C.1.pep
LGGGLSRHHQHGDELIGDGGGVDELSGDGGDALRCGGRTR

SEQ ID NO: 119388 - protein, 319 aa, Oryza sativa
  unsure (1)..(319): unsure at all Xaa locations
  Clone ID: PAT_MRT4530_2260C.1.pep
MGKQMAALCGFLLVALLWLTPDVAHAQTQILFQGFNWDSWKKQGGWYNMLKDQVGDIASAGVTHVWLPPPTHSVSPQGQQAMHLLHLVTLLFVACYMPGRLYDLNASKYGTKAELKSLIAAFHAKGIKCVADIVVNHRCADDKDGRGVYCIFKGGGPRGCLDWGPSMICCDDTQYSDGTGHRDTGADFAAAPDIDHLNPLVQRELSDWLRWLRRDVGFDGWRLDFAKGYSAAVARTYVQNARPSFVVAEIWNSLSYDGDGKPAANQDGQRQELVNWVKQVGGXPATAFDFTTKGILQSAVQGELWRMRDKDGKAPGMIG

SEQ ID NO: 119389 - protein, 225 aa, Oryza sativa
  Clone ID: PAT_MRT4530_22610C.1.pep
MAAAAAEFMELALEQAKFALDNLEVPVGCVIVEDGKVISSGSNKTNATRNATRHAEMEAIDILLREWQGMGLDQPQVAEKFARCDLYVTCEPCIMCAMALSILGIREVYFGCANDKFGGCGSIMSLHQSSSAELSGEEIPGPKGYKCTGGIMAEEAVALFRNFYEQGNPNAATCVHVIVIIICSQMNVQERYWINPDKMVLEILHAESRSKQEMALLLCQNFITI

SEQ ID NO: 119390 - protein, 100 aa, Oryza sativa
  unsure (1)..(100): unsure at all Xaa locations
  Clone ID: PAT_MRT4530_22611C.1.pep
RFDPAFAVAWALSRWRAVVKRQCVGEGAPVGAVDEQLRQDCCRQLAAVDDSWCMCSALTHMXXGXGGGVXXPYXFHPMAXVFPGCRRGVLDRAAASLPAF

SEQ ID NO: 119391 - protein, 407 aa, Oryza sativa
  Clone ID: PAT_MRT4530_22612C.1.pep
MARRKIPIGLIAHRQKRAATYAKRKESLRKKAEELSTLCGVRVAFVCAGPVVPGGGGGAAGKEEVWESEEGVLAEYRALPPEARAQHAHRVYLEEEVGKERAKLARVRQDGAFPSWDAALDGITADEARALLESIDAARAAANARREALGLPDDGNGVDDDGGLDLQQQQEHVPPGGSDAVVVPVGHGVLQYTGSGGGNQMQTTPAADGINCADLYGAVPWDDTFQPQVMRTGDHFVPMDGYLWQAPGNGWPDLATGCTNESCSCNAAAAAAAMPAMYPPTLDTVHGSFLAAPAQPIPIAFSTSTDFIDAPNDFLTMGLCGGFTNVGDYSAAQPQSSADGGFQLGDTFAAEPGDTQSQNWGSFINVVSDDSAQCNCNAAIHLDQMYYLFGGTGGGEPSDTQSRHWGS

SEQ ID NO: 119392 - protein, 80 aa, Oryza sativa
  Clone ID: PAT_MRT4530_22613C.1.pep
MAFLVARSSRCEHDCMRVGSSPCFPFPSFFFPFLFSPPPPSHLCLVIPVNFIPLNTKVSNPFEYFQKKTPLLVVVGVLDY

SEQ ID NO: 119393 - protein, 153 aa, Oryza sativa
  Clone ID: PAT_MRT4530_22614C.1.pep
RTHFIVLLASIPIFEFWIHENVTTMLLLPPSPLTTHAIIGDPSYPFSAMGSLPLHNIYVLGDSTVPEVDQPVGEGDHRHISRSSLPVTPVGDHRRIYRTVCFISDQFHVGSYYWSSAETRKTRKAMSGIKMADSEPGDAHERSTSMVPFSAYH

SEQ ID NO: 119394 - protein, 354 aa, Oryza sativa
  Clone ID: PAT_MRT4530_22615C.1.pep
MSSATAAATATIAAAAAKLAATPAPAPSRRRLTLRGNPTARRCVAAMAVSTPRSAAAAAFLERRESERALHFVKYQGLGNDFIMVDNRDSAVPKVTPEEAAKLCDRNFGVGADGVIFVMPGVNGADYTMRIFNSDGSEPEMCGNGVRCFARFIAELENLQGTHSFKIHTGAGLIIPEIQNDGKVKVDMGQPILSGPDIPTKLPSTKNEAVVQADLAVDGSTWQVTCVSMGNPHCVTFGTKELKVLHVDDLKLSDIGPKFEHHEMFPARTNTEFVEVLSRSHLKMRVWERGAGATLACGTGACAVVVAAVLEGRAERKCVVDLPGGPLEIEWREDDNHIYMTGPAEAVFYGSAVH

SEQ ID NO: 119395 - protein, 170 aa, Oryza sativa
  Clone ID: PAT_MRT4530_22616C.1.pep
MAWHGVTLEKSGALKSDRTVRCASPPAASVFNPRSPFLPPDAPIPRLASIHTLHSRRPARARTGRRAVAANREAATAARAGSRAAGVEVPDGDQRRARQPPCHFVSRAHVSPPPRQAGETPGCRAAASGEGTGRQPCEARAGALPCHRHPWRWRQPAVGVPMEAMGFHAV

SEQ ID NO: 119396 - protein, 91 aa, Oryza sativa
  Clone ID: PAT_MRT4530_22617C.1.pep
AHRHPPRRRRRCRRAPPSSSSVAASPPSAATGRRSWLTSPSPLPSSPPLPATSPPPTAGSSRRERGASSRSGRARVAAAPGCHLSATKPTR

SEQ ID NO: 119397 - protein, 343 aa, Oryza sativa
  unsure (1)..(343): unsure at all Xaa locations
  Clone ID: PAT_MRT4530_22618C.1.pep
SSPRCSPSSEAVTLQNQLVVLIRGCLDNVSKERTTETPPSPSAKLHCSTAIKTSAGVWVHCTGAPAGQSPHAATSPGSASTDITSRCAAITHRPSSTSPAKPTRVGQLPAATPSASRHHLRRRGLPAEPTSPANRNHQLLRLRTPSPAHVATSSASAASCPSATVTVSGASAPSHVPSPASAPSHRRRQPLPPSPIATAGCSSSGQIQPSQSRTSPATAPPGATVRRQQKTPPPATYLPDPGADLVVTSTTVITSKRRCHLCQTSPPHRTTTPMPPTSSPLDPAGRHGSGRFRRPKRRVAPLPLRXRDESVIFDLAGHELEEEDYPVVDYESELQTAISTTVR

SEQ ID NO: 119398 - protein, 238 aa, Oryza sativa
  Clone ID: PAT_MRT4530_22619C.1.pep
YTTMPISACPSMTGNENAVATNQDDSMSKDPPAEAENGTSTTSELEKDSNAAKPCRSDKNREPTKMTSEATRSSATRSKRPLPQRTRSSHQLAMPMVKTLNGGNRLIEPPLHLAALAISEITSTAAGRHDAHETMRIVIRAMADSIPTPTTTLSSSSSHSSSSSSSSSYSSSSSSSSYSSSVSFSLLSFPWIVPGPPVTVDPNFNFCSIDDFLLPAFCPAPLITAVVAPSNLCEIVAN

SEQ ID NO: 119399 - protein, 715 aa, Oryza sativa
  Clone ID: PAT_MRT4530_2261C.1.pep
MASSLINLLLTEVAAIVSIVLLALLVVLSSYRRRSGHPALRLFVWAASTLFLPLVSYAVSAAAKWDAARVPLLLAWTVFLQMLRNTIDTARSSSSTIGNGSGSSKFRPSVEQLARMGWVAFLIVSSDGTAGSPQLTGVLLWLWVLSLAKLVHRLVAAELAKNSFAVGLNAYLISDYMKQLYGQDQGDHDVQAPPLLVMGEEKLQIEARPQGYRIGRTSPPPLCVDAGHVVTMDRICRLFSSGDPLVASNPQIKDTCLSFALFKLQLRRFVGCPIAEAGSRRSVAFVLDGLLGESHERVFRVIETELSFLADFLYSKLTVFYASGWWFPVLNSMLVFATWVSCLAAGGAIVHDMTCHGTTLASNYDNLREYLQNHDTVFHIIVGLDVLVTVSFIVAIVFTEGWEIATYVRSDWIKVSAICEYARRPSWRKSPWTRRNVGRVLPLKPMQRWDDRFGQTSILQLRPCYCGCVSRQVDRIAKSSATVPAAVKTAVVDTLRTNQGNLGNGVLSLQRNGVADKLAWACHHAGDERSVSEQILVWHVATRLLEIMRSEGAHGRHDDGDGDGGGDSDTVVVATRLSRYCAYLVALKPELLPDHPAWTEELYEGVVEEVSRVLARFAGAVVRYERAATCLGGSTNATLRKAAKLGRQLAEELGGDEELPWRVLADFWAELVVYLAPSENVTAHSKALRRGGEFITVLWALLGHAGIVSRPDTDV

SEQ ID NO: 119400 - protein, 95 aa, Oryza sativa
  Clone ID: PAT_MRT4530_22620C.1.pep
METVRRDGRASSGGDGSRETGRRELGRVPIPASALSCNRAINRLILGFHTDPIDHPTSSPLDVSIFFTPTRPCRSTSPPPSHLESTSISAPRKGK

SEQ ID NO: 119401 - protein, 265 aa, Oryza sativa
  Clone ID: PAT_MRT4530_22621C.1.pep
MVKRSDNMDSSSECSRGAHKRLLQDSRSYDQENAMKKVCIGTRTEYTYAPYHDGYQWRKYGQKMIRGNSFPRCYYRCTYHQDHGCPASKHVEQHNSEDPPLFRVIYTNEHTCGTSNSASDYMASSMQIQQIADASLRKAQAAERLRKAEVETPRLMHSPPPRCSGGYNMAMKEEKDVIVSSLLTVIRGCHIAESAGNNSAAALPVNRPPPAVARSDHYSCSYAISPELLPASDDLTLDFMLDSVLDPHWVEPLDLAWLKESTHTG

SEQ ID NO: 119402 - protein, 329 aa, Oryza sativa
  unsure (1)..(329): unsure at all Xaa locations
  Clone ID: PAT_MRT4530_22622C.1.pep
HLSIIGHRLSVRPGSGWVFTHRPPPTNLPQLHCSTAIKTSAGVWVHCTGAPAGQSPHAATSPGSASTDITSRCAAITHRPSSTSPAKPTRVGQLPAATPSASRHHLRRRGLPAEPTSPANRNHQLLRLRTPSPAHVATSSASAASCPSATVTVSGASAPSHVPSPASAPSHRRRQPLPPSPIATAGCSSSGQIQPSQSRTSPATAPPGATVRRQQKTPPPATYLPDPGADLVVTSTTVITSKRRCHLCQTSPPHRTTTPMPPTSSPLDPAGRHGSGRFRRPKRRVAPLPLRXRDESVIFDLAGHELEEEDYPVVDYESELQTAISTTVR

SEQ ID NO: 119403 - protein, 87 aa, Oryza sativa
  unsure (1)..(87): unsure at all Xaa locations
  Clone ID: PAT_MRT4530_22623C.1.pep
EVRHQRSSTKSLHYEPTRTRTRGRCWDIVDKYKVTIFYTGPTLVRSLMRDGTEYVTRHFRKSLXVLGSVGEPINPSAWGRFYNIVGD

SEQ ID NO: 119404 - protein, 84 aa, Oryza sativa
  Clone ID: PAT_MRT4530_22624C.1.pep
WAVPCTQGVGGGGWKDTEDTSETPAIDVCKGLIGDKAKVSIYDPQVTEDQVQRDLAMSKFDWDHPCHLQPMSPTAIKQVSCAWD

SEQ ID NO: 119405 - protein, 54 aa, Oryza sativa
  Clone ID: PAT_MRT4530_22625C.1.pep
MAYNESEDVENADTVNTICTRIADALVEIDKDNIVLVKAEDLSYEQKADTEQMM

SEQ ID NO: 119406 - protein, 50 aa, Oryza sativa
  Clone ID: PAT_MRT4530_22626C.1.pep
LNSIMSSLAAEADSSMSLIIPSVASLLWIPGLPTSSQNGSRTCSMLMSFV

SEQ ID NO: 119407 - protein, 62 aa, Oryza sativa
  unsure (1)..(62): unsure at all Xaa locations
  Clone ID: PAT_MRT4530_22627C.1.pep
CKCKWFLINNLFIGSCPIXWGXTVLYYSAXSIVTCAVSIVGIVXFDQHXCCRDFXIHKGFNK

SEQ ID NO: 119408 - protein, 44 aa, Oryza sativa
  Clone ID: PAT_MRT4530_22628C.1.pep
MVTQVFILVQALEKRAPASFIQSQAAGANQGPVSSQSGYLPSIT

SEQ ID NO: 119409 - protein, 51 aa, Oryza sativa
  Clone ID: PAT_MRT4530_22629C.1.pep
VTWSRVKNVMDFSVRLSFSFYTHLLFCFRIVWKWNRMVGDLYWEKKKKKSG

SEQ ID NO: 119410 - protein, 74 aa, Oryza sativa
  Clone ID: PAT_MRT4530_2262C.1.pep
KQYLFQKPGLFMPPHQFLGKPHLSLIWPRAFPPKKIRGNKWVAPPPPGGFLQNQNFLGVNNPQAPHQKSPFVYK

SEQ ID NO: 119411 - protein, 182 aa, Oryza sativa
  Clone ID: PAT_MRT4530_22630C.1.pep
MASAPAASSAVLLVVVLVASLAAGGANAATFTITNRCSFTVWPAATPVGGGTQLNPGQTWTINVPAGTSSGRVWGRTGCSFDGAGRGRCATGDCGGALSCRLSGQPPLTLAEFTLGTSGGNRDFYNLSVIDGYNVAMSFSCSSGVTLTCRERSCPDAYQYPSDDSKLRSCNGNSNYRVVFCP

SEQ ID NO: 119412 - protein, 1052 aa, Oryza sativa
  Clone ID: PAT_MRT4530_22631C.1.pep
MDAASCCRVFSTQRCRFPLRRLAPPISRRPFGTESTSELFAASTSKRRSRGPVMAAKKAAEGAKQEEGKYKHTVDLPKTTFGLRANSVVREPELQKLWEENQVLKRVSERNTGATFVLHDGPPYANGDLHMGHALNKILKDIINRYKASSSLYPMETPYVYKKLVLKSLDKETLNALTPIKLRQKAAKFAKATVTTQMNSFKRFGVWADWDNPYLTLSPEYEAAQLEVFGQMVMKGYIYRGRKPVHWSPSSRTALAEAELEYSENHISKSMYAAFKITNLSKPGLLEEFLPNLCLAIWTTTPWTIPANAAVAVNPELTYVVVELQSVLESESTSGGNQRKLGSILSPGSQKPFIIVAADLVSALESKWGTKLIIQKSFPGSALEHCRYIHPVNGNECSVVLGGDYITTESGTGLVHTAPGHGQEDYITGLKYGLPIVSPVDDEGNFTAEAGQFSGLSVLGAGNAAVVNYLDEQCSLILEEPYKHKYPYDWRSKEPTIFRATEQWFASVDGFRNAAMDAIRRVSWIPSQAENRIVAMTSSRSDWCISRQRTWGVPIPVFYHVDSNEPLITEETIEHIKGIVSKKGSDAWWYMTIEELLPEKYRDKASEYRKGTDTMDVWFDSGSSWAAVLAQRDGLNFPADIYLEGSDQHRGWFQSSLLTSIATTGKAPYSSVITHGFVLDEKGFKMSKSLGNVVDPEKVIVGGKNSKQEPGYGADVLRLWVSSVDYTGDVLVGPQILRQMSDMYRKLRGTMRFLLSNLHDWKPENSVRYSDLPKIDKYALFQLENVVTSMKDSYENYQFYKIYQILQRFAIVDLSNFYLDVAKDRLYVGGRVSFTRKSCQTVLSAHLLYLVRAIAPIMPHLAEDVWQNLPFQHTLDDGSVAEFVFNLKWPVKNEEWLSVPKDDVDFLSVILELRSEVNKILESARTGKLIGSSLEAKVYLHAENANTVSKLKELVSATNDADALHRLFITSEVEILPSVSSETTSGVSYTGTFSSERTGNIWIGVTRADGEKCERCWNYTRDVGSFLDHPTLCARCHGVIDLPPVPAAAAVS

SEQ ID NO: 119413 - protein, 111 aa, Oryza sativa
  Clone ID: PAT_MRT4530_22632C.1.pep
MVPALAILALSVAGLAVAAAAAPPTRRGQEVHLFEATVRVADDGVEDPDEYNYRLLATVLGSVEAAQSVTYETYPGTFSAFLTNNQARRLSKVPGVLEVRQRDDPVPTDGQ

SEQ ID NO: 119414 - protein, 244 aa, Oryza sativa
  unsure (1)..(244): unsure at all Xaa locations
  Clone ID: PAT_MRT4530_22633C.1.pep
DFWARRPFGAESTSELFAAGTSKRRSRGPVMAANKAAXGADHDEGNYTHTVDLPKTTFGLRGGCVVRXPELQKLWEENQVLKMVSDRNTGATFVLHDGPPYANGDLHMGHXLNLVLTDLINRYKLLQNHKVSFIPGWDCHGLPIELKVLKSLDKETLNALTPIKLRQKAAKFAKATVTTQMNSFKRFGVWADWDNPYLTLSPEYEAAQLEVFGQMVMKGYIYRGRKPVHLESXSSRTALAEAEL

SEQ ID NO: 119415 - protein, 123 aa, Oryza sativa
  Clone ID: PAT_MRT4530_22634C.1.pep
PRKKKKKKKKKKKKKKKKKKKKKKKKKKKKKKKKKKGKGKKKKKKKRGPPAQGDPSFRPRAGKVKALFWGPQIPFPGRGFPPGGPGKPRGFPTLSAWEKTPFRPGGELEKGPDRGAFPNIGPP

SEQ ID NO: 119416 - protein, 58 aa, Oryza sativa
  Clone ID: PAT_MRT4530_22635C.1.pep
MEYAYLWGTNLDDIPIGLSIIWEDGRRTRTDGRRVHPTIPSRHPCRPVATNGQIIPID

SEQ ID NO: 119417 - protein, 70 aa, Oryza sativa
  Clone ID: PAT_MRT4530_22636C.1.pep
CAATQSCRCDAPSVLPDSVRLELSCTSSGQPDSTRRCFSSRAPLSGELPHVDGRTGHEHHQSATYKRCRP

SEQ ID NO: 119418 - protein, 47 aa, Oryza sativa
  Clone ID: PAT_MRT4530_22637C.1.pep
MAFAARTKALRGMPPTVSHSRSGGRRFIAQIDKDGLKLGPFSTSNSG

SEQ ID NO: 119419 - protein, 58 aa, Oryza sativa
  Clone ID: PAT_MRT4530_22638C.1.pep
IAHRKIARCNSFLANHVTEQRRSIMERLLVVCAHLFAEIRQKDYHDYFICDETFQIDT

SEQ ID NO: 119420 - protein, 568 aa, Oryza sativa
  unsure (1)..(568): unsure at all Xaa locations
  Clone ID: PAT_MRT4530_22639C.1.pep
LRSGRGASHKAPPLPSPPPPVKIEADADADDVGMRVTVFFGTQTGAVDGFAMAMAEILQRRXVWLVYLVVGLDXHEPKDEDFELKLRKETIVLLFLATYGDGEPTDNAARFYKWFTEGKEKEVWLKDLKYAVFGLGNRQYEHFNKVAKVVDELLEEQGGKRLVPVGLGDDDQCIEDDFTAWKEQVWPELDQLLRDEDDTTGASTPYTAAIPEYRIVFIDKSDVSFQDKSWSLANGSGVIDIHHPVRSNVAVRKELHKPASDRSCIHLEFDISGTGLVYETGDHVGVYSENAIETVEQAEKLLDLSPDTFFSVHADAEDGSPRKGGGSLAPPFPSPCTLRTALLRYADLLNSPKKAALVALAAHASDLAEAERLRFLASPAGKDXPSRIHVTCALVYGPTPTGRIHQGVCSTWMXDPTTPIIMIGPGTGLAPFRGFLQERLALKQSGVELGNSVLFFGCRNRNMDYIYEDELQNFIQEGALSELIVAFSREGPAKEYVQHKMTEKATEIWNIVSQGGYIYVCGDAKGMARDVHRALHTIVQEQGSLDSSKTESYVKSLQMDGRYLRDVW

SEQ ID NO: 119421 - protein, 532 aa, Oryza sativa
  Clone ID: PAT_MRT4530_2263C.1.pep
MASSSKLLALTLTSSFLRSSLLPAPSRRLPTGPLLSLRFCSAAGDVADAPAAAAAPDHPWPEWGDFLEKLRAKGYFEQPTLASRADAAEGEVAATAAAAAAAAGEDPGASADNYPSKDLNRLKNACLKFGRERFDLLSVLPKQDIRAIVECGCPNIFRKPVNSAKRLREFLQIDEGDACSACKLRGSCDKAYVIPNAEDEARTVDVMRILLNYAIDPTSLSGENSVNGGVQESARKLLSELTMLSDTTIDPSIPKPVFQTSSKTKTFDKGIAKPKFSAGKGRETTETEMKKGDWLCPNCAALGQEATADDQAQGEPSSDDVNSTRKAHLLDDIRLWLTMVLEDYDIMVASFIVYFTVIIFIPHPQCHFMNFARNKMCFKCEESRPKRQLIPGEWECPSCSFVNFRRNKVCLKCKHEGPENDTHDSQHGHNRWRNTRGADRSRSFDDSFDREDDGSDPDEGERRRAKVRTRAASTLGRSTGKSKIFDSIHEDGNGREDDSEDVLPYEGQRRHIVSKRATPAQRRFTAGRSEDI

SEQ ID NO: 119422 - protein, 403 aa, Oryza sativa
  Clone ID: PAT_MRT4530_22640C.1.pep
PTRPLANGSGVIDIHHPVRSNVAVRKELHKPASDRSCIHLEFDISGTGLVYETGDHVGVYSENAIETVEQAEKLLDLSPDTFFSVHADAEDGSPRKGGGSLAPPFPSPCTLRTALLRYADLLNSPKKAALVALAAHASDLAEAERLRFLASPAGKDEYSQWVVASQRSLLEVMAAFPSAKPPLGVFFAAVAPRLQPRYYSISSSPKMAPSRIHVTCALVYGPTPTGRIHQGVCSTWMKNAIPSEYSEECSWAPIYVRQSNFKLPADPTTPIIMIGPGTGLAPFRGFLQERLALKQSGVELGNSVLFFGCRNRNMDYIYEDELQNFIQEGALSELIVAFSREGPAKEYVQHKMTEKATEIWNIVSQGGYIYVCGDAKGMARDVHRALHTIVQEQGSLDSSKTES

SEQ ID NO: 119423 - protein, 172 aa, Oryza sativa
  unsure (1)..(172): unsure at all Xaa locations
  Clone ID: PAT_MRT4530_22641C.1.pep
DSIRVSTTGSTCHGVKERTSRKTYPRNGPFWXAEVEKLIPEGDRCATFLFLFYFLIFFSHLELTRTNHIKNKLKRMKYVACGIFQSSTKKLLSSKTQSCKRNLEVLITSNPAKXVRIGCNFFCTCLWIYYFPDSESGGASXMAGAPFFLPCRFACAMVVGGRHQRGWRRPVG

SEQ ID NO: 119424 - protein, 115 aa, Oryza sativa
  Clone ID: PAT_MRT4530_22642C.1.pep
ILQAQLQQPQVVVQAQLQQTQPSVQSHTVLQGGLQQIQLLQQQQPHVQHQQIPQQLHHQQQQTQQLQQPQQPLISEQQKMLLDLQQQVINSQSAPQQCVQVTNQVGMSFLIQNQT

SEQ ID NO: 119425 - protein, 151 aa, Oryza sativa
  Clone ID: PAT_MRT4530_22643C.1.pep
MRRRKTPSPGAAVNVPSGVVTAAVVTGSRRESPSPHRWEPPATAAGALRPPSWLTGTGTVKIFHRSDGDAVVIPDVGKASEQGSKGVDESRADANASDEVRRGALRAAAAHGRLRLGGRSVVKSGTGSDVTGRSRLPGVLWRRVRRSGTLD

SEQ ID NO: 119426 - protein, 1047 aa, Oryza sativa
  unsure (1)..(1047): unsure at all Xaa locations
  Clone ID: PAT_MRT4530_22644C.1.pep
MSEVIDGYDKLLAMLHKATKRLNDQKLVRIAELQDKNARPKKEVARLQGRPPPGGARIRTMSRKSTIALLRIQLTPRNPPLPPPPAPPVAPAPALVPMPALESALSFVPNSAYKGPAGGSGGWLPASPSGGRVIISSSSSEAGSGDTYEQEYSRSRSEGSDVFLQMVNTRNGGRAAGNRSNSEERIDGGHPNSACGNGPPPLPENPMLAQVMAHQTQMMMAMMXQMQQQPLQMHQRMQQQADQQQQQFGPPPPXSKLLEFMRVRPPTFSSTTNPMEANDXLHAIEKKLNLLQCNDQEKVAFATHQLXGSCSAWWDNHMATRPPGTDVTWAEFYRSFKKAQVPDGLVAQKKREFRALNQGSKTVTXYLHEFNRLAXYAPEDVRTDAEKQEKFLVGLDDELTNQLISRDYADFEKLVDKAIRQEDQRNKMDRKRKAAQFRAHQGGHQRPRFTPGQQGGPTTMIVRQHHPNPSGNFHQGASGSQNHQGGQPNHSAAPRPPMAPAQPAPSAQAKKETRAKPGPCYNCGKHGHFADKCPKPRRAGPRFFQARXVNHASAEEAQAAPEVVLGTFPVNSIPATVIFDSGATHSFISKKFVGTHGLRKEELSTPMRVHTPGNSSTSVSYSPLVLIEIQRSQFLANLILLESKDLDVILGMDXLTKFKGVIDCANRTITLINEKGETVVYKSLASPKQGASLNQIEVENSVNAKEKSSRKLEDIPIVCEYPEVFPEDLTTMPPKREIEFRIDLAPVTAPIYKRPYRMAANELAEVKKXVDEQLQKGYIRPSTSPWGAPVIYFEKKDKTKKMCVAYRALNEFTIKNKYPLLSIDDLFDQLKGAKVFSKIDLRSGHHQLRIREEDISKTAFTTRYGLFECTXSFGLTNAPAFFMNLMNKVFMEFLDKFVVVFIDDILVYSKSEEDHEQHLRLVLEKLQEHQLYAKFSKCDFWLSEVKFLGHVITVQGVAVDPSNVELVTKWTPPKTVTQIRSFHGLAGYYRQFIENFSRIARPMTQLLKKDEKFKWTAQCGPPCRDRKNCLFPNASVLIPVPGKAGVH

SEQ ID NO: 119427 - protein, 1037 aa, Oryza sativa
  Clone ID: PAT_MRT4530_22645C.1.pep
MASSGGGGGGGEEGEGRGATKVNQELWYACAGPLVSLPPQGSLIVYFPQGHSEQADPDTDEVYARMTLQPVSNVTQCDKETLLASELALKQTRPQTEFFCKTLTASDTSTHGGFSVPRRAAERIFPRLDFSMQPPAQELQARDLHDNVWTFRHIYRGQPKRHLLTTGWSLFVSGKRLLAGDSVLFISDSMHIGILAAAAHAAANNSQFTIYYNPRASTSEFVIPFAKYQKAVYGNQLSLGMRFRMMFETEESGTRRYMGTITGISDLDPVRWKTSHWRNIQVAWDEAAPTERRTRVSLWEIEPIIAPFFIYPSPLFTAKRPRLPGMTDDETEMDGLLKRAMPWVGEEICKKDLNIQNSVVPGLNLAQWMNMQHSSSLPGTVVQPELLNSLSGKPVQNLAAADLSRQISFHPQFLQQNNIQFNTALVPQQNQQTEQLAKVIPTPNQLGSVIIPQKVVQDCNSEQRQHVVTQPVQGSQPNINIPQPQLVVQAQLQQPQVILQAQLQQPQVVVQAQLQQTQPSVQSHTVLQGGLQQIQLLQQQQPHVQHQQIPQQLHHQQQQTQQLQPVQQVQQSVQEHQQIKIQPVHVSMDASMNTQVADHQMKLQLLKALQPQQPLISEQQKMLLDLQQQVINSQSAPQQCVQQKVQSHQVQDLTGNVIPNSKSDIATSMGASSLHVAGGRQLLKTDDVPSTSTSPSTNSNPVLLQSIPSSSKNQSLTTAGKTSQSSVVLGPTIEQDTKPYQNVKQTVMIPKTTEQRPATGQDCINNNPQMDYLDTSSSATSVCLSQADGSLQQNFPPSSFHQHHLLKDTVPDSEFEVTDPRNNLLFGVNIDGQLGLPLNADLLANDIGTDKYMDQLPGNGISNFISSKDSQQELSSSMISHSFGVADMAFNSIDSAINDTPFLNRNSRSAAGPAHQRMRTYTKVHKRGAVGRSIDINRYSGYDELKHDVARMFGIEGQLGDQNRVGWKLVYEDHEKDVLLVGDDPWEDFVKCVRCIRILSPQEEMQMRLVGDFGDSFLPNQACSSSDGGHPWRITGD

SEQ ID NO: 119428 - protein, 1096 aa, Oryza sativa
  Clone ID: PAT_MRT4530_22646C.1.pep
GATKVNQELWYACAGPLVSLPPQGSLIVYFPQGHSEQVAASMRKDADAQIPSYPNLPSKLICILHSVTMLADPDTDEVYARMTLQPVSNCDKETLLASELALKQTRPQTEFFCKTLTASDTSTHGGFSVPRRAAERIFPRLDFSMQPPAQELQARDLHDNVWTFRHIYRGQPKRHLLTTGWSLFVSGKRLLAGDSVLFIRDAKQQLLLGIRRANRQPTNLSSSVLSSDSMHIGILAAAAHAAANNSQFTIYYNPRASTSEFVIPFAKYQKAVYGNQLSLGMRFRMMFETEESGTRRYMGTITGISDLDPVRWKTSHWRNIQVAWDEAAPTERRTRVSLWEIEPIIAPFFIYPSPLFTAKRPRLPGMTDDETEMDGLLKRAMPWVGEEICKKDLNIQNSVVPGLNLAQWMNMQHSSSLPGTVVQPELLNSLSGKPVQNLAAADLSRQISFHPQFLQQNNIQFNTALVPQQNQQTEQLAKVIPTPNQLGSVIIPQKVVQDCNSEQRQHVVTQPVQGSQPNINIPQPQLVVQAQLQQPQVILQAQLQQPQVVVQAQLQQTQPSVQSHTVLQGGLQQIQLLQQQQPHVQHQQIPQQLHHQQQQTQQLQPVQQVQQSVQEHQQIKIQPVHVSMDASMNTQVADHQMKLQLLKALQPQQPLISEQQKMLLDLQQQVINSQSAPQQCVQVTNQAISLHNSNTIQYPTQQKVQSHQVQDLTGNVIPNSKSDIATSMGASSLHVAGGRQLLKTDDVPSTSTSPSTNSNPVLLQSIPSSSKNQSLTTAGKTSQSSVVLGPTIEQDTKPYQNVKQTVMIPKTTEQRPATGQDCINNNPQMDYLDTSSSATSVCLSQADGSLQQNFPPSSFHQHHLLKDTVPDSEFEVTDPRNNLLFGVNIDGQLGLPLNADLLANDIGTDKYMDQLPGNGISNFISSKDSQQELSSSMISHSFGVADMAFNSIDSAINDTPFLNRNSRSAAGPAHQRMRTYTKVHKRGAVGRSIDINRYSGYDELKHDVARMFGIEGQLGDQNRVGWKLVYEDHEKDVLLVGDDPWEDFVKCVRCIRILSPQEEMQMRLVGDFGDSFLPNQACSSSDGGHPWRITGD

SEQ ID NO: 119429 - protein, 133 aa, Oryza sativa
  Clone ID: PAT_MRT4530_22647C.1.pep
SPLPRLLGFPFPIRSRDFLRVSTVAAPPWVLHRSPFPSPDRYIPFTRAVSIAAASLSLYPVEPKSLPSLISTQSSATVVLSHRPAILSRPAGVHLHWLDTPSPTGSTGAHGCRSARPFTASLNIGQAMFRPQP

SEQ ID NO: 119430 - protein, 86 aa, Oryza sativa
  Clone ID: PAT_MRT4530_22648C.1.pep
MKELKWNGQKPTLTQISSNARSGSSGSRDRNFRPAFYARRKLELGSKKLASFRRGLDSARLELEHRHRALYGTVAAGVRLRLYVAP

SEQ ID NO: 119431 - protein, 48 aa, Oryza sativa
  Clone ID: PAT_MRT4530_22649C.1.pep
SAYCLHKRSLCRLYDVISYICLVIFLRPPGSTGCWCLVTAAANRLVMR

SEQ ID NO: 119432 - protein, 132 aa, Oryza sativa
  Clone ID: PAT_MRT4530_2264C.1.pep
MDSPDGGEAGGARRGEEELRMGRSTDGVDDRPWEEREEELQAMMMCEKEGTSPSIYRRREVGSKKRRRRRTWRRRRGEEDDGADSFFPLDDSVGDPWRRRQYGGGGSLEKEKTAEEEGKARQRRRRTNTARA

SEQ ID NO: 119433 - protein, 132 aa, Oryza sativa
  Clone ID: PAT_MRT4530_22650C.1.pep
MRAKRESPVYLRNPQRSAAVRLICSERPEEIFHLGWPYSRLPAAANGGWGRDGTALPSPNGPNWAVHADKERNRTSSQRLRFGATRLSRCANETSHAYYLLLLLACAVRKCPCTHAIELIDAHRTCSPSALS

SEQ ID NO: 119434 - protein, 41 aa, Oryza sativa
  unsure (1)..(41): unsure at all Xaa locations
  Clone ID: PAT_MRT4530_22651C.1.pep
TFHRTPXYLGPHGTTLTHRTTQPLGVTVPGTLTLXLNXDTA

SEQ ID NO: 119435 - protein, 158 aa, Oryza sativa
  Clone ID: PAT_MRT4530_22652C.1.pep
MPSPAAAAAALATVLASGGARARARLRDRPRRQPRPSATSPRASSPAAAAPAPASATSPRTSSPAAPAPAFATVLGGARDRPCRQPCPSATSSEHPHRRRLRPRPPPRVSSAAAAALCDLPASVLAGSGCARSPPRNCPRHSPSQRADATEEDDNVRE

SEQ ID NO: 119436 - protein, 172 aa, Oryza sativa
  unsure (1)..(172): unsure at all Xaa locations
  Clone ID: PAT_MRT4530_22653C.1.pep
QSPYRNTIYSGHYLLVFLTTIDKSANTRNTVVVLHFRVTPKGYRTQGTIARTGFRAVTTCRLPLTNPXYTQQTNKKFSKPGAKCTDSSGTSLEFLLGSYTRRGRSRMSAKLRGTSPKLPLTLYLILMYKRYNRASCNLAQSCVLXMNERSSIYSLHMTVTGKGNDQTTLQPS

SEQ ID NO: 119437 - protein, 76 aa, Oryza sativa
  Clone ID: PAT_MRT4530_22654C.1.pep
MDDEEDANPLPSSITAVAVALRALKPHLLVVGWEGRGPSELTTAEARERRELAMVELKLPATVADLWLDPGGAVEL

SEQ ID NO: 119438 - protein, 307 aa, Oryza sativa
  Clone ID: PAT_MRT4530_22655C.1.pep
QRQAEDGGTQGAEPVGGGKGGPRAAVVGDGGEGQSGARWAASSKLMVAWLRAGGWRNLAQSRHTVWEPHEPVSAIARSRASLSSSFYRAALSRAPPPHHHRRNRHCLLVVMDRAITARRCPPHVPMLLYPSLVPALRPPVFPRPSPCATAHRLYATTCPRGTPKRESDEQRQSTAAGVRLVLGLRRETTQPLAHLLYVGVTDGELPSSARVEAIRVAEGEAAGRCRGGRAALGAEGGWRQSGCEAGAEDSDQWAGAVAEAIGAVEGEPRAAVDGGGGGGNSGLPARGSSSASATRCMHPLACLLHGI

SEQ ID NO: 119439 - protein, 72 aa, Oryza sativa
  Clone ID: PAT_MRT4530_22656C.1.pep
MAARRGQSQLGVAKGGRGRRWSATEAKANRERGGTPKRESDEQRQSTAAGVRLVLGLRRETTQPLAHLLYGG

SEQ ID NO: 119440 - protein, 195 aa, Oryza sativa
  unsure (1)..(195): unsure at all Xaa locations
  Clone ID: PAT_MRT4530_22657C.1.pep
MLLYPSLVPALRPPVFPRPSPCATAHRLLYGGXRGVGRRQSRRWRGSCHRRRGHXVVGVTDGELPSSARVEAIRVAEGEAAGRCRGGRAALGAEGVVDDGGXGGGVEVVGAVEREPPSLXGWRQSGCEAGAEDSDQWAGAVAEAIGAVEGEPRAAVDGGGGGGNSGLPARGSSSASATRCMHPLACLLHGISFLH

SEQ ID NO: 119441 - protein, 136 aa, Oryza sativa
  unsure (1)..(136): unsure at all Xaa locations
  Clone ID: PAT_MRT4530_22658C.1.pep
DAXGKEIYQGXINPKEGVYKTXGXKRXXIXXPPPKKPXRGTQKKKTNQXEGXXXRXXAXGXRGGTRPPXLKPXQXGKPDGDWPLXRXGGAQKXXSFKEGKRGRKKTVRXRSVPXFKGXKXWAFRXRATRXFEEDVD

SEQ ID NO: 119442 - protein, 182 aa, Oryza sativa
  Clone ID: PAT_MRT4530_22659C.1.pep
MSSQVVGPPPVPPPTAPPLPPERQLSGEFVDVELGNVSSTVVDVDRLRAHAPPVPPPSAPPVPPETMNPPPRRQLTGEFVDVELGNAGLSTVRRRRRQRTTARSADDEDGLCSMWCPRIQQGYNWCRDLTKSWQQTDYSIHFASDGEYSKLNTKCCCQNLRLEEDPDLLLSDFESLTCGPTG

SEQ ID NO: 119443 - protein, 122 aa, Oryza sativa
  unsure (1)..(122): unsure at all Xaa locations
  Clone ID: PAT_MRT4530_2265C.1.pep
AAPRQVPGSANDKTSEKRVAIELEGEGERWRRRRQVRAGATPRLGRRCAGGQARRXNHARSVAAPGQLREARPDGAKVATGGGTARFKLSPRALFLCGIFSTFTYLAXSSMVAPNNYVVAGM

SEQ ID NO: 119444 - protein, 80 aa, Oryza sativa
  unsure (1)..(80): unsure at all Xaa locations
  Clone ID: PAT_MRT4530_22660C.1.pep
MQLAMDLALSLRDSDNHSLXRXEPIVLLAKPVLGLMGDRTLQADAVDVYDRGLRTELLALAMTDVQLLPGASAYINAEKR

SEQ ID NO: 119445 - protein, 143 aa, Oryza sativa
  Clone ID: PAT_MRT4530_22661C.1.pep
MSTQVVGPPPVPPPSAPPLPPERQLSGEFVDVELGNVSSTVVDVDRLRQLVTPSAPPLPPETMNPPPRRQLTGEFVDVELGNASLYTVQRRQPQTTAQTAYDDEAGLCCSVLCALVIFLSIAIMVLIFIGVIVVLIDKYVFGI

SEQ ID NO: 119446 - protein, 40 aa, Oryza sativa
  Clone ID: PAT_MRT4530_22662C.1.pep
QACDSRLGSTCLFCMFIFGPVNNSMGLIHKKKKKKERPPD

SEQ ID NO: 119447 - protein, 103 aa, Oryza sativa
  unsure (1)..(103): unsure at all Xaa locations
  Clone ID: PAT_MRT4530_22663C.1.pep
TWREERVGRRPRLNRHQCVAPQPSLAEFNAARXRDRIVTGLSSGTSDWTGGSAPTSRLVLGGVGAGGMTGVSPVSSGGRRWAPLDDGRLLSFRAKARTVVGSK

SEQ ID NO: 119448 - protein, 36 aa, Oryza sativa
  Clone ID: PAT_MRT4530_22664C.1.pep
EPAIRTRPTCLHIPYRLQQCHSVKITRLLCLEALWT

SEQ ID NO: 119449 - protein, 113 aa, Oryza sativa
  unsure (1)..(113): unsure at all Xaa locations
  Clone ID: PAT_MRT4530_22665C.1.pep
MIASRAMQKMGHPDGEFSTGWAPLAEGTIMTLSYRATXSFKDVVSTGPEIRLLLLYVYNDMNVTVQLVIRAERAWFNAIRLTIDTPILVPRVSDIKNRYVLSTYWILKNLKSL

SEQ ID NO: 119450 - protein, 54 aa, Oryza sativa
  Clone ID: PAT_MRT4530_22666C.1.pep
SGVIQPSETLFNFISYNLISFCLSSTQSGNILESLCYFLDLFSYSSKSLNKLLN

SEQ ID NO: 119451 - protein, 423 aa, Oryza sativa
  unsure (1)..(423): unsure at all Xaa locations
  Clone ID: PAT_MRT4530_22667C.1.pep
CPCSDCKNETMFKXREDIHAHLIXRGFMKGYACWVKYGEQESGSGAVADTNSADNHEERDEDEHDMFIPSPFGGEMVDVDPDLLQDMSRDVEDPTYNERDFMKFSRLVSDSETLLYDGCKPKHTKLSATLDLMKLNTSSGWIDKSFTXLLGILKAMLPEENTLPETTYEAKQVMCPPGLEVRIIHACPNNCILYHKQYADSDACPVCKTSXYKRKKSAGEEKKSKRSGPAMIVWYLPIIDHFKRIFASPKEAKLVRWHATERRNDGLLRHPADSIQWRNXIDRMHKHFAADPRNMRICLCMDGMNTFGDMSSSHSTWLVLIANYNLPPCLCFKRKYIMSCLLIXGPRQPGNDIDVFLEPVIDDLEILWKEGVKTXDAYGQENFKLXVLLFFTINDYPALGNLSEQTVKEKKACSDCMEHTRNR

SEQ ID NO: 119452 - protein, 108 aa, Oryza sativa
  Clone ID: PAT_MRT4530_22668C.1.pep
MGKRKSRVSKMLATAKKAAPKLETAFSCPFCDPGGAVECSIDIKHMIAEASCFVCQARYSTTAHALTEPIDVYSEWIDQCELAKAAAAAGDDDDDDHHHHHRKTKRRS

SEQ ID NO: 119453 - protein, 69 aa, Oryza sativa
  Clone ID: PAT_MRT4530_22669C.1.pep
QNPLPEKWRGLKNNDLSNDMGIPGGVFVQMRGFFGGNKRYKGALKMPKTATKCCLNVRRRLQSVTPGPP

SEQ ID NO: 119454 - protein, 61 aa, Oryza sativa
  Clone ID: PAT_MRT4530_2266C.1.pep
LQKMIVIEYINSQLDTIHIKIAKSILCLVVSDSPCFDGDGSNSRYEFTQNKGNILVLEVYI

SEQ ID NO: 119455 - protein, 50 aa, Oryza sativa
  Clone ID: PAT_MRT4530_22670C.1.pep
IFYVAFVSGKIKGRRWRWCGPSTVENTSQDSRTTRDPFSMGCSPVKLVRF

SEQ ID NO: 119456 - protein, 106 aa, Oryza sativa
  unsure (1)..(106): unsure at all Xaa locations
  Clone ID: PAT_MRT4530_22671C.1.pep
ALSSRRNVEGVARVSVEEVVDRSNSTFSFSCVLIAVLSNXSAPQTSSTSTGSMTRXSKVHRTPIQIPIRSSCTLGCNPKTPFQSTCQQRPLAERIDPPDIHKDHIG

SEQ ID NO: 119457 - protein, 87 aa, Oryza sativa
  unsure (1)..(87): unsure at all Xaa locations
  Clone ID: PAT_MRT4530_22672C.1.pep
MAAFRAPTVEPEPEERPKVGAVAAAHGEAAEEKVVFPMTWTDDDESCPEGTVPVRRTTKRDVLRSNSSLCFXDEAASCRRAAGVVRV

SEQ ID NO: 119458 - protein, 80 aa, Oryza sativa
  unsure (1)..(80): unsure at all Xaa locations
  Clone ID: PAT_MRT4530_22673C.1.pep
FSXFGRSFXFXGQVPTXEGLXFDXXGXLAXFXGGFXXLRXLXCXXFTPXPXXXXIXXIVWXXFXFFDXXXXXXXSCXXLY

SEQ ID NO: 119459 - protein, 55 aa, Oryza sativa
  Clone ID: PAT_MRT4530_22674C.1.pep
TISHSIILTLFPSFYFNFPSQYLFAIGLIPIFSVRSHLPPIIIFMQQSQAVLLLK

SEQ ID NO: 119460 - protein, 867 aa, Oryza sativa
  Clone ID: PAT_MRT4530_22675C.1.pep
MALFDRNQKQRSSLCSTATVVVFVALCLVGLWMISSPETIPAAAANVSKKPDVVAVKEEDSSLDATNNVKQNSANVVAETAAADEAAAADEDDNPAKPAAGEKAAAAAASSKDQTFDDENGRTEGGALVKPESGGGDEAASDVKEIGSLEQAAIDMKDTTEHSVGDTTKEPGVVQDKSSEEITMAASDARESSDGGGGGGAAKNKQTFDDENGKLDGVNLVKDVENKTMSEEGAKPLPEETTTVSSKNSIVAAAAMSDEKLTDNNGEQAQPVEALPNGQAELLTERAAQNGSFTTQAAESIKEKKKRAEKKKKKKKKVKAASVAAAAEEEGGGGGAASLGWRLCNTSAGADYIPCLDNEAAIKKLKTTAHYEHRERHCPASPPTCLVPSPEGYRDPIRWPRSRDKIWYHNVPHSELAAYKGHQNWVKVSGEYLTFPGGGTQFKHGALHYIELIQSSFPEVAWGRRSRVALDVGCGVASFGGYLFDHDVLTMSLAPKDEHEAQVQFALERGIPAISAVMGTRRLPFPSNVFDAVHCARCRVPWHIEGGMLLLELNRLLRPGGFFVWSATPVYQELPEDVEIWGEMVKLTKAMCWEMVSKTSDTVDQVGLVTFRKPADNACYMKRRQKEPPLCEPSDDPNAAWNITLRACMHWVPTDPSVRGSWWPERWPERMEKTPYWLNSSQVGVYGKPAPEDFVADQEHWRKVVRNSYLTGMGIDWKTVRNVMDMRAVYGGFAAALRDMSVWVMNVVTINSPDTLPVIYERGLFGIYHDWCESFSTYPRSYDLLHADHLFSKLKSRCEVLPVIVEVDRILRPNGKLIVRDDKETVDEIKGVVRSLQWEVRMTVSKNREAMLCARKTTWRPTEAEAR

SEQ ID NO: 119461 - protein, 103 aa, Oryza sativa
  Clone ID: PAT_MRT4530_22676C.1.pep
AVLDLSPGIRALRPQKVINLGRGLLGWVDLWHGILIFNARDEQPQIQYVPLPEPMPLNKESFRPSNRSESCPMLFRDVICSSSGEIKFVELDHRQRKIQPIPS

SEQ ID NO: 119462 - protein, 629 aa, Oryza sativa
  unsure (1)..(629): unsure at all Xaa locations
  Clone ID: PAT_MRT4530_22677C.1.pep
MAAALSSSRRALHALHRRLLLHPLPSRHAPPIPRHHFPSPPSSSSSSSRFFTTTRPDARLLQLHARRLVVGGARSFAAGVGGGGSSKLAPLGQGVKGLGLGRPLDAAKNAAARYREAVGLQVEAFWRRNYMLLVGAGAVVAXIAHGRATRGVTSTFVGLSEGMAKYGFLALATAMVAFAGMYTRSRFTINPDKVYRIAMTKLNTSAAILEVMGAPLAGTDVRAYVMSGGGVKLDLVKFIRHETTVSDYKXLDPTEKATLLTCHCGTRXADMKLLSDNIPKKSGPDQRLFLVGDEQEYKVGGGLISELRDPIVKAMAAEKEFDYLDEREDAEDEAREREEAERRQQEEEAEALRREEERLPRQLYTAYISNQIYTAIEIGNLAPQTTQFEIRSIGDLNSGPLGTQVNPMKHELIHGTLLEPFEEMEVYNSTPKVEFWSNFPQNSCQFARLQAFFGAKSAAQSQFGRSRCIEDGCGYERKEQVKWGDDYDSVPCRCLEVVSWVDDKMERSDEEDKIDFKGGNVHVISNKENWDHKIAEANKDGKIVIANFSAAWCGPCRVIAPVYAEMSQTYPQFMFLTIDVDELMDFSSSWDIRATPTFFFLKNGEQVDKLVGANKPELEKKVAALADSA

SEQ ID NO: 119463 - protein, 82 aa, Oryza sativa
  Clone ID: PAT_MRT4530_22678C.1.pep
MKAQVSYEHGPTTDVGEVLADATALHVNMVGKRSAGPVGSLQLIPLSTCASMGSPVKFIVRSCNRCSSVGLRSSRTPRSTLE

SEQ ID NO: 119464 - protein, 114 aa, Oryza sativa
  Clone ID: PAT_MRT4530_22679C.1.pep
RGTSEFLHLFHKNMVSKTRETLIILGKHTNTLEQVRLQVRPKLGRQIFGKAGKARHQLPAVGGMFQRLEETGREGFRRRRRLPKVHPSSPGQGSGETTLPGNNWGGWPGTNSAV

SEQ ID NO: 119465 - protein, 283 aa, Oryza sativa
  Clone ID: PAT_MRT4530_2267C.1.pep
MASSEPAALTSWPVQEVLHKFHQAVRLGWLHFDLLNILRVWPVLDSDRGALFRPRLKLKLFLLPVDMETDTPRSHVNVGSCGAKERTPQNERRLLLHVHVQHHKVNRDEEIPYLDWHIVHYPCRERVVEDLGPDGNGIPPPFNNFQDRIDYAVQHALINQSGVLVNTLTNMVKSLVNGIIAKHQATGPVYLPGGVFPNYRPLVTGNQQGSSNVPPVQPAASVSAPAPTAPSSAQRQMTNPRLLTREQPQHGGQNVNRLTQEQVAAMFLPNPPTADPVQSLPNQ

SEQ ID NO: 119466 - protein, 168 aa, Oryza sativa
  Clone ID: PAT_MRT4530_22680C.1.pep
ADSLGIPRGYEQGPAPPPHHGASTDGACITLQYISNIIIHNIHIHDCVPAGNANVHALPTHYGWCTHSDGDGISLYSARDVWVDHCALSRCADGLIDAIMGSTAIIVSNSYFSHHNEVMLLGHSDEYLPDSAMQVTIAFNHFGIQLVQRMPLFADVCHVLGLFADVGK

SEQ ID NO: 119467 - protein, 291 aa, Oryza sativa
  Clone ID: PAT_MRT4530_22681C.1.pep
MEALTNAEKCFSPARAMSPLPLVRPPPSPGAAGQYLAELLQEQQKIGPFVQVLPICGRLLNQEIMRMSAIVSHLGVREHDRLPIASPNQMHPLPQVPNFCGNGFNPWTGTLPEKNGFPRGTMGWEGAAHDPSYIVKKIVRLEVPTDAYPHFNFIGRLLGPRGNSLKRVEASTGCRVFIRGKGSIKDPIKASLFVTFKEEQLKGRPGYEHLSDPTHILIEAELPADVIDTRLAQAQEILEDLLKPVEESQDFLKRQQLRELAVLNSTYREDSPHQNGSASPFSNGSTKLGKQ

SEQ ID NO: 119468 - protein, 525 aa, Oryza sativa
  Clone ID: PAT_MRT4530_22682C.1.pep
MAGPVESTRITLLLVAATLLLLPPPLAASLNSSLPDPAAVVADFHSKVATSRRRMQEAGGGGGGGGGGCLTGNPIDDCWRCAGTDWRQDRQRLADCGIGFGRNAMGGKGGPVYVVTDPSDGDPVNPAPGTLRYGAIQEGPLWIVFAGDMTIRLNEELLVNSYKTIDGRGANVHVGAGGACITLQYVSNVIIHNIHVHDCVPAGNANVRASPTHYGWRTRSDGDGISLYSARDVWVDHCALSRCADGLIDAIMGSTAITVSNSYFSHHNEVMLLGHSDGYLPDSAMQVTIAFNHFGIQLVQRMPRCRRGYFHIVNNDYTAWEMYAIGGSASPTINSQGNRYIAPADPNAKEVTKRVDTEEGQWAGWNWRTEGDMMVNGAFFVPSGEGLEAIYDKASSTDPKSSALVDQLTAGAGVLGGPSGAFKLPPPVAGGAPLVELLSAPLPRPGWVERDLRDNGEAAAYAGVNYAGVGTGGGGGGGAGAGGMGYGYLGMVYGSGGNWSCRADLTLQLTSLFLALFALICLHPL

SEQ ID NO: 119469 - protein, 87 aa, Oryza sativa
  Clone ID: PAT_MRT4530_22683C.1.pep
MASYHFGLRDDDDIFSATLPGKLAWWRGGGVGAPWAGPAAGGRGGGVASWRRGELEAGAAACGVCGGGGEHRQGTAREDDGVSAGLP

SEQ ID NO: 119470 - protein, 127 aa, Oryza sativa
  unsure (1)..(127): unsure at all Xaa locations
  Clone ID: PAT_MRT4530_22684C.1.pep
PPLDEVRRGHPWPAIVXAGLLRAVHEIAVFPAKKRFGGQPLVRFFRRRRGRYNLSLPPSSANKGTAASANPSKYFSWNGIHSPKPPTRVIARGIVKGRYPVPPKTLAGIFKRLKKPGPKFEGIFRVF

SEQ ID NO: 119471 - protein, 247 aa, Oryza sativa
  Clone ID: PAT_MRT4530_22685C.1.pep
MDRGNGEGGATKAREKRDGSRRGRDGSTARRLDGGARQRGATVRRLDDEDARAHGRRCPRPRRLQPPPSSALSPATQAPASTFVGRAVTRRNRRCRPRPLLSSAPSPAETATVGCAIASLSSQRLLLVLICTPTPSSSIYRHSAAVVSILVQRGREGAAAGRLDAFATASAASPSSAPSPAATSAAVHDLCRRPRRRRPRPPPSATLSPCFPHFRRRLARAGARAEDWREGEEEEREGESHVGSIGY

SEQ ID NO: 119472 - protein, 48 aa, Oryza sativa
  Clone ID: PAT_MRT4530_22686C.1.pep
GYVRYSVFPISTPLFCIHVSSQTTKWYIFVKVLYRKIVFLKKITIIYF

SEQ ID NO: 119473 - protein, 92 aa, Oryza sativa
  Clone ID: PAT_MRT4530_22687C.1.pep
EAHAVPLHEIESLCMRCGDNGTTRLPMTMIPHSRQEALKALQCPHCRERNKQDYIAAQLHPNGRCYTLGGPARAERQSEPPGLGYPDSPTTQ

SEQ ID NO: 119474 - protein, 101 aa, Oryza sativa
  Clone ID: PAT_MRT4530_22688C.1.pep
VLNAGGARLENAAPAAFKNWLKERGWNPKKKRATARGALFGKRQRRGAQGATVTDETADGCYRAKVVKKDGEARVFAKTSGGEEFHGAKCIVTVGVWTSKL

SEQ ID NO: 119475 - protein, 109 aa, Oryza sativa
  Clone ID: PAT_MRT4530_22689C.1.pep
MAICPTGPGPCGDPPLQGQGRAARRPATAHGEVRRRAAMDYGMRRHNAPLEADGDSKSGESNKQETLQCDTGRYNIVRFGLGRGGGVTAFGNVWASGVVISPASVTTRR

SEQ ID NO: 119476 - protein, 105 aa, Oryza sativa
  unsure (1)..(105): unsure at all Xaa locations
  Clone ID: PAT_MRT4530_2268C.1.pep
EVPAIVVVVALLDVGGGGDGGRXGSRRGRGAAVESSRHWLRPLDRLGFMGWSGGGGDEPRSLCSCPVPSSTPLYMAQCDGGPPAIGLGAPDQGAGQGPLEPGRGE

SEQ ID NO: 119477 - protein, 84 aa, Oryza sativa
  unsure (1)..(84): unsure at all Xaa locations
  Clone ID: PAT_MRT4530_22690C.1.pep
TSLGRGSQGASGCHVTPLRPPRXLAPRPSPDRHVAGGASGEETQAKPLPMRAVPQQSVTGLSSVTSDWTGGRTPTSPLYPAEWR

SEQ ID NO: 119478 - protein, 113 aa, Oryza sativa
  Clone ID: PAT_MRT4530_22691C.1.pep
YLSLSLLSHFPHHSLSRADEAKRQRRRAPCLHLSSSGPKAATSSSERQRHRTPRLHLSSSGPEAAARPKLRPHRAELPVWRTAASSPRPASSLGGRHGSGGIAAGADLGGRGG

SEQ ID NO: 119479 - protein, 45 aa, Oryza sativa
  Clone ID: PAT_MRT4530_22692C.1.pep
TLTPTRIAHSFLPYLPKASSPRCGGHFDLTMRSHNFSSSSPPPFF

SEQ ID NO: 119480 - protein, 52 aa, Oryza sativa
  Clone ID: PAT_MRT4530_22693C.1.pep
SNHALKYYLLNKLVPANNLYLQTSPSPAGYYYSTPAALALAFLPPPIGAVAA

SEQ ID NO: 119481 - protein, 233 aa, Oryza sativa
  Clone ID: PAT_MRT4530_22694C.1.pep
MMPKMEGGRRPDDGQDWRRVQCASPESRSTATDAPEASGLEVTTVKNLYGYENVHTDVVIFRNVQIDDLMCFKNHVLCKELVCTCGQPVFSHEPGEELHSWRSCIVPDEIPVGTVSACASMRGCIPGRLPLACEHLAVRPSGQAATGKTVIKQNKMNLWHGSRSTCGSHKGSPGQKARGSSYKEPGTAQELPHQLLHKSKAMDMFAQMLQVKWMWCYYWVMLLCDALGSSCCC

SEQ ID NO: 119482 - protein, 60 aa, Oryza sativa
  Clone ID: PAT_MRT4530_22695C.1.pep
MDIGDGLLLGPDKDIIGYLCRALSWGPLPIGIDWGSLLWCLLGFTVFWGALKQFSSVGRV

SEQ ID NO: 119483 - protein, 1121 aa, Oryza sativa
  unsure (1)..(1121): unsure at all Xaa locations
  Clone ID: PAT_MRT4530_22696C.1.pep
MHFLLLLLHLLSFSSSTAASASSEVAFLTQWLNTTAARPPDWSPSASSPCKWSHVGCDAATGSVTSVTFQSVHLAAPLPPGICAALPSLASLVVSDANLTGGVPDDLHLCRRLAVLDLSGNSLSGPIPASLGNATAMASLALNSNQLSGPIPASLGNLAASLRDLLLFDNRLSGELPASLGELRLLESLRAGGNRDLGGEIPESFSRLSNLVVLGLADTKISGALPASLGRLQSLQTLSIYTTMLSGSIPAELAGCGNLTNVYLYENSLSGPLPPSLGALPRLQKLLLWQNSLTGPIPDTFGNLTSLVSLDLSINAISGAIPASLGRLPALQDLMLSDNNLTGTIPPALANATSLVQLQLDTNAISGLIPPELGRLAALQVVFAWQNQLEGSIPASLAGLANLQALDLSHNHLTGAIPPGIFLLRNLTKLLLLSNDLSGVIPPEIGKAASLVRLRLGGNRLAGTIPAAVAGMRSINFLDLGSNRLAGGVPAELGNCSQLQMLDLSNNTLTGALPESLAGVRGLQEIDVSHNQLTGGVPDAFGRLEALSRLVLSGNSLSGAIPAALGKCRNLELLDLSDNALSGRIPDELCAIDGLDIALNLSRNGLTGPIPARISALSKLSVLDLSYNALDGGLAPLAGLDNLVTLNVSNNNFTGYLPDTKLFRQLSTSCLAGNSGLCTKGGDVCFVSIDASGRPVMSADEEEVQRMHRLKLAIALLVTATVAMVLGMVGILRARGMGIVGGKGGHGGGSSDSESGGDLAWPWQFTPFQKLSFSVEQVVRNLVDANIIGKGCSGVVYRVGLDTGEVIAVKKLWPSTRNGADKDDVAGGGRVRDSFSAEVRTLGCIRHKNIVRFLGCCWNKTTRLLMYDYMANGSLGAVLHERRHGGHGGGGAQLEWDVRYRIVLGAAQGLAYLHHDCVPPIVHRDIKANNILIGLDFEAYIADFGLAKLVDDGDFGRSSNTVAGSYGYIAPEYGYMMKITEKSDVYSYGVVVLEVLTGKQPIDPTIPDGQHVVDWVRRRKGAADVLDPALRGRSDAEVDEMLQVMGVALLCVAPSPDDRPAMKDVAAMLNEIRLDRDDYANVDLLLKXAPPPPRRLAPPPPPRRRRRARRRAAAASPAHPP

SEQ ID NO: 119484 - protein, 74 aa, Oryza sativa
  Clone ID: PAT_MRT4530_22697C.1.pep
MVSWSWDGNGGPAFEQQQQQWDGEAAAALGAGGGWWRCLALWKVAKAVAALTAPSQGHGSGNSSIIRARGGQIQ

SEQ ID NO: 119485 - protein, 177 aa, Oryza sativa
  Clone ID: PAT_MRT4530_22698C.1.pep
MAPRSDSATGGAAAAQAHGSDFDSIDPLFHVLRVLPFSFLRPPRTRLRLPSNLALPSPMTVFALILLTYFAVVSGLVYDVIVEPPGIGSVQDPATGAVRPVVFLPGRVNGQYIIEGLSSGIMFVIGGIGIILLDLAVDRNRPRSLRVSFGGSGVAAIVIAYAMAMLFLRIKIPGYLW

SEQ ID NO: 119486 - protein, 87 aa, Oryza sativa
  Clone ID: PAT_MRT4530_22699C.1.pep
GTIYPRGATPKSGNFQCTAVHQVGISRFFLATPVATSSTPGSYSASSKMHTTKHLKHVGATPEYPAIHSLVVRKPCANPRALDAQTG

SEQ ID NO: 119487 - protein, 101 aa, Oryza sativa
  unsure (1)..(101): unsure at all Xaa locations
  Clone ID: PAT_MRT4530_2269C.1.pep
FFFFFFFFFFLFFFFFFFFFXKNQKPXGIGKXTIHFHNHXTLPNXCHFFFAPQXDRNSSIXTHKPHLLMLQXFSKXYHYYFFSPFFDSFFFEGLAHYPALF

SEQ ID NO: 119488 - protein, 108 aa, Oryza sativa
  Clone ID: PAT_MRT4530_226C.1.pep
NSCVWGNGCADWIEAYALFRLKQFFLLYWQLVIWCHVFRFGVFTQPVVRVHATIYVRQKTLYACFYGHLSIYLLSIYLSTPSVSKCLTKKKKKNSRLVLSSCRIPAAR

SEQ ID NO: 119489 - protein, 87 aa, Oryza sativa
  unsure (1)..(87): unsure at all Xaa locations
  Clone ID: PAT_MRT4530_22700C.1.pep
RSGRACASEHLSDTFFALGLAPITAQHRRRRELHDRLSRPLQLFCVXRAHAHHFIXSSFSADAMFNLGVLGSASLNTDHCDHFPPLH

SEQ ID NO: 119490 - protein, 84 aa, Oryza sativa
  unsure (1)..(84): unsure at all Xaa locations
  Clone ID: PAT_MRT4530_22701C.1.pep
GEDGCYSVTPRTNFKFEGDRRYSCRVHDLRGATGWLQGNMPHGSRWNARTGGADRGRPXPISAELAPTWRLRGAYVADMRAGGR

SEQ ID NO: 119491 - protein, 154 aa, Oryza sativa
  unsure (1)..(154): unsure at all Xaa locations
  Clone ID: PAT_MRT4530_22703C.1.pep
MARALAPRPTFSVVNISAPPRAFRSAPPPARRSSPTSPPRRPPHRPPLHRRPAPSRPRPQRALCRSGGPLPPTTXRTPSPPPPPGGRDPSLLPPXRPPSALPPPGGSVSAAPRGMTASSPLSTMLWTPPPSPATXPQSYSVPSPPLPRRPPTCP

SEQ ID NO: 119492 - protein, 79 aa, Oryza sativa
  Clone ID: PAT_MRT4530_22704C.1.pep
MARSLERFSSNVAFLSFALAKLHLYRVPQVTTKISEDYALHPPVHTTRDKYKFGMRVIEEMRSSANKKTSIAITGNSTK

SEQ ID NO: 119493 - protein, 67 aa, Oryza sativa
  Clone ID: PAT_MRT4530_22705C.1.pep
KDSTHARVFLCPDVPPGIGYPLPMVICRVSHQSIALKKNFFFVPLYQVLIYFCGGRTIPPFVDHKNL

SEQ ID NO: 119494 - protein, 176 aa, Oryza sativa
  Clone ID: PAT_MRT4530_22706C.1.pep
MALLIQWKSGGNRFMERCNGALEAEILACVEGIALALHWTMLPFEVETDWLTLTQMLQSREKDLSASAHLVREIRRLIDGDREISVRKIHHAQNQLLAHHLRLQLPAAHHLRHLLQQRWRQLQTWRAVVREVLPKNLITRLPGVDLRRRVLVETVELNFHLGNELHQTTTEQWTVP

SEQ ID NO: 119495 - protein, 82 aa, Oryza sativa
  Clone ID: PAT_MRT4530_22707C.1.pep
PFFLPSFFFFFLLCFFKFFLRSNTSFFKTQKKTKCLCPKKNPSKLNCHNPETLPTKNIGTKISPIPPIRILLIQHNTPHNFF

SEQ ID NO: 119496 - protein, 340 aa, Oryza sativa
  Clone ID: PAT_MRT4530_22708C.1.pep
MGRAPCCDKNNVKKGPWSPEEDAKLKEFIEKHGTGGNWIALPQKAGLRRCGKSCRLRWLNYLRPNIKHGEFTEHEDRIICNMFASIGSRWSIIASQLPGRTDNDIKNYWNTKLKKKLLGSSAVAAAAPPRIQRHQQSHHRSSLLLPNSPSLNPGGGYPGFFSGAGGFHPQEPAMPLTLPTTTQEFMLGTHSGLPMVSASALLNHLHGASHHHQLLVKEEISSNMIVFGSDQQSCSSSDGLAAPHSHNHHGNREFILDGYSYGVGYGSSCIDQVDNDKLFQHHHQQDQAQEQQQQLVYNYDEIKQLLMNTSTTSNSINAGQDHGGSMEAGLIGSQGKVTMM

SEQ ID NO: 119497 - protein, 117 aa, Oryza sativa
  Clone ID: PAT_MRT4530_22709C.1.pep
TREPRVENDHARQATADIEHTSIVDNISDHDIHMVMVDAVAIAEDILCWGTTEHLYYIMPMAPARLRAQLRRRWIGGPTLYYPYGNLIDVRSHTGVHPAVRLRKNDHVIATFFATTS

SEQ ID NO: 119498 - protein, 80 aa, Oryza sativa
  Clone ID: PAT_MRT4530_2270C.1.pep
FFFFFFGEKLHLRGVVLHLHGVFNGEGGSKGMGNGRAWVNGQDKMLAYKALGQFHFTRERIITGYKLATQKLDYPYKHTG

SEQ ID NO: 119499 - protein, 281 aa, Oryza sativa
  unsure (1)..(281): unsure at all Xaa locations
  Clone ID: PAT_MRT4530_22710C.1.pep
SGSPGCRIGTRRVFGADPTGFGCLLIKKSVIGSLQGRNGCNASGMVRIVPVFPQYLSDSVDGFDAMDGLEDDSGVHKDEKPASDARNGSQLPAFPGVYTSAQVREAFESDPGRDSSSDRDGXSTIFEETESISVGEVMRSPAFSEDCSSENSFWVDVGQSPLGSEKGGHFKKGKLGSPLPSSWFAGRKSNKRMSPNLTSRISRSPLYDGQVISFDAAVLSVSHDADCLKEDPEEEIYENGRRNHFRQVSEIQEEPEVEEVVCQHAMNGGGDHKESAIRRET

SEQ ID NO: 119500 - protein, 138 aa, Oryza sativa
  Clone ID: PAT_MRT4530_22711C.1.pep
MDGSDPPAAASPSAAAAAGDDDDERAAAPAAQPERCEALAGAIAGVLGGALQEHEACAAATARSQGELAAAVDRLNGELDKLLENAPSPVIMQQATRICSIRKRVLALNMLLRSIQRRIDNIDRIVSTGVTSGIALLR

SEQ ID NO: 119501 - protein, 64 aa, Oryza sativa
  unsure (1)..(64): unsure at all Xaa locations
  Clone ID: PAT_MRT4530_22712C.1.pep
YMLIKKAVSVXKXLERNRKDKDSKFRLIXIESRIPRLXARYYKTVGVLPPTWKYESATASTLVA

SEQ ID NO: 119502 - protein, 144 aa, Oryza sativa
  Clone ID: PAT_MRT4530_22713C.1.pep
FQGGVTRITWIITKFLVFEPGLRPDMCLAPTLRTANCPLLGNWLSKGQRHQGALHLIVPGCSLKFGCQALWPSSTGHSPLHAFAVCPPAVVLWLPGVTPDNPQNLAHSPVNCLCVRPWEFRTLYLAVTYQAFPIVEVVIRSLWR

SEQ ID NO: 119503 - protein, 91 aa, Oryza sativa
  Clone ID: PAT_MRT4530_22714C.1.pep
QPPRQALDRRPPARGCSLVACARSCAAPPPPPPLRRLPRSRLPAATATPLCFTDRRARTPPPSAAVAAPPSASPASPRPPRSHAASVLRLV

SEQ ID NO: 119504 - protein, 113 aa, Oryza sativa
  Clone ID: PAT_MRT4530_22715C.1.pep
MTIHATDTGRARQLGLGSVSTRRKKALAPTKVPWGLRALELEGVKAEDGAARRGFWFWTGRVVVTVTRPAGLTGASSSGSAFWLLAGGGIDEDILHYYPLAKTQKSGGDRVSL

SEQ ID NO: 119505 - protein, 114 aa, Oryza sativa
  Clone ID: PAT_MRT4530_22716C.1.pep
MVMSPGGLELATPEEGSDEAGSRRPKTPGNLLHEHTGSSCTYIPGPGPRRYKLQRFHFTMYYHWALNRCRSIIFPDNSYMISIHDDKIEKFSTLKNRTGISSAQNNTRLDKNWR

SEQ ID NO: 119506 - protein, 70 aa, Oryza sativa
  Clone ID: PAT_MRT4530_22717C.1.pep
LVRASGEACQEGHPKPPSLRQIYTASGCICAFEDPPSMAALFRSTQEHGCSIISARGMKKFGGNSSLHHG

SEQ ID NO: 119507 - protein, 87 aa, Oryza sativa
  Clone ID: PAT_MRT4530_22718C.1.pep
MAAGQLGKSKVIGNWEDKAQRVLLSLLLQCALSMVMKGQRDGEPSCSSPDCVQVSNLIPVGIRLGTWVSWLGVRPGTRMYQAWIIQR

SEQ ID NO: 119508 - protein, 108 aa, Oryza sativa
  Clone ID: PAT_MRT4530_22719C.1.pep
YSAVFLILSLSYFSLICDLSVLHGVAILAMCCCPSWLRVSQHLHTLNQVLVGAIVGSAFGAMWFALFNLLVQEAFASSVPVQIAVTIGTAILCIGFVIHVVRHWFKDE

SEQ ID NO: 119509 - protein, 121 aa, Oryza sativa
  Clone ID: PAT_MRT4530_2271C.1.pep
MELSEHEEDAGDVGGGCSSPPTPPHRVLTSAAPETIRCRYHECLRNHPAASGGHVVDGCGEFMPASTEEPLACAACGCHRSFHRRDPSPGRAGAARLLQLHLPASINSRAPPALLLPPAAA

SEQ ID NO: 119510 - protein, 71 aa, Oryza sativa
  Clone ID: PAT_MRT4530_22720C.1.pep
LPCTLFFNHFAHPLSLIHTFQYPEHPPTGCGNCSSVSQIVSSPRDKIPPILGLAPVSSGPAKFWKTLQLCS

SEQ ID NO: 119511 - protein, 91 aa, Oryza sativa
  Clone ID: PAT_MRT4530_22721C.1.pep
MVEGASEANSMANTMMQKFWDSALALQPAEESDARSEESRMATSDNAEGKHIPPHVGNSFSFKLQDRKGRMHRFSCVSESLDELVSAVSYS

SEQ ID NO: 119512 - protein, 91 aa, Oryza sativa
  Clone ID: PAT_MRT4530_22722C.1.pep
MYKQGADASTEAEANEKGEQPAVAAAGPLVKRERRGRRGRLPHVHTHTKIFAIYWDGKKTNLSFFYSSFPFSSSRRSCQCVSGQPWCGNAA

SEQ ID NO: 119513 - protein, 474 aa, Oryza sativa
  Clone ID: PAT_MRT4530_22723C.1.pep
MGRGLLCLLLLQLVGLVVAGGGRWRWQEEFLRLPSSDETTRWAVLIAGSNGFYNYRHQADVCHAYQIMRKGGVEEQNIVVMMYDDIAHNPDNPRPGLMFNHPSGPDVYAGVPKDYTGDDVNVNNFLAVLLGNRSALTGSGSGKVVASGPNDHVFVYYADHGGPGVLSMPADGEYLYADDLVKALKKKHAGGGYKSLVVYVEACESGSIFEGLLPSDISVYATTASNAEESSWGTYCPGDDHDAPAAEFDTCLGDLYSVAWMEDAEAHQEGRLAETLRQQYRTVKNRTSDEGTYTLGSHVMQYGDMALAPQSLDLYYMDTSPATANDHKLAAAGAKGSHSYTVSVNQRDADLLYLWRKYRRAGEGTAEKVEARERLVQEMGRRSRVDRSVEMIGGLLLGGAKHKQQVVRERAALVEDWECLRSMVRTFEDQCGSLGQYGIKHMRSFANICNAGVPHHAMAKAASLACPSPPPLHL

SEQ ID NO: 119514 - protein, 151 aa, Oryza sativa
  unsure (1)..(151): unsure at all Xaa locations
  Clone ID: PAT_MRT4530_22724C.1.pep
HEGIAYLAQIFPDINEIFEPLLTEGKIYYLAYYRVKPRNKIYRPVANKFAISLTKWTKVEEYLEPPSSFPXYVYTLKSFNEFPSLVDKKDSFIDTIGVITEITSITSVRSCTRNADSLKRNVHMRDAKLDLSASYKYIALLILYISDMTCF

SEQ ID NO: 119515 - protein, 504 aa, Oryza sativa
  Clone ID: PAT_MRT4530_22725C.1.pep
MEMVLDWRSVGSLLATIMVFRTAMRDFLPPEAEIFLRRLLTRLAAAFRPHVGTILIDEADGASGGANDLYDASQLYLGARCLATAPTVRLHKPHQAPRPVASLPDAHTTHDVFRGVLVKWTARPVERGASAGGGGGGVFNPYNPYGRGGGGGEPRRLELQFPRQHRELIHGHYIQHVIDEATKMRLRSRERRLYTNRAAAPGDDHHRLWTSHAFSHPSTFDTLAVDPALRDDIRADLLRFAARREHYARVGRAWKRGYLLHGPPGTGKTSLVAAIANLLEFDVYDLELTTVPTNSHLRRLLVSTTPKSVVVVEDIDCSLDLSDRKNKASDDENAAQLSIISPAAAAAMAAMGRESISLSGVLNFVDGLWSSCVGERLMVFTTNHPERLDPALLRPGRMDRKIELGYCSPPALRVLAKNYLGVGVGDEGCEDAADDPDTVSGLMADAEGLLAAGVLITPADIAEVFMGCDGAGATAALRKLADELRRRRDAPAVPVTEEAAMTTE

SEQ ID NO: 119516 - protein, 462 aa, Oryza sativa
  Clone ID: PAT_MRT4530_22726C.1.pep
MRAAAGGRGFLLHPRPPWRAPAPPPSPPPAAATALARRLHHRRFPEGILSTLEQGVSTLHLCRWVHSATCGVTLDDRSQAEPVNGAKSDLVQKHEKVGAFQRIPMVMPATDILMSAQRKSRNVPPTKGIANIAKRERNKGAKQLDALMKEISVPLRTYTENFPKRRDLHPYERSLIELTFGEGYYEKVIARVDALRKKINSVGKQHASVCAKSLTKREAEERLSEGRKKLEEAFEHGKWVIDDLVNIAKTLRSMPVVDPHIPTLCLVGSPNVGKSSLVRILSSGKPEVCSYPFTTRGILMGHIVSNHERFQVTDTPGLLTRDDDERNNIEKLTLAVLSHLPIAVLYVHDLSEDCGTSVADQYITYKHIKERFGDRLWLDVISKSDLLDKKTSSEFDDADDEVGRYRRFGPECAIRVSVQGQVGVKELKEKVHQLLTSQMSRIKAGTIYQETQRTDDNAPGQT

SEQ ID NO: 119517 - protein, 44 aa, Oryza sativa
  Clone ID: PAT_MRT4530_22727C.1.pep
IKWRRLYCGLMMTRRSMSLGAERSNSSTAYLHMPPTLYLLHRLP

SEQ ID NO: 119518 - protein, 217 aa, Oryza sativa
  Clone ID: PAT_MRT4530_22728C.1.pep
ADSNSDHLDCHGGDAFGVALVGTDVAGTTHAALYSSATDAWSGPASIDHHPDAFVQARRPSVLVGNALYFLCDNNTSIVEFDMATMTLSVIPSPPLPEDVHGALLMTAEGGGLGFAAVLERSNLHLWSKSMDQWEHLEDVRDLKTLLPRGSISMMNNVLIGFADGGVRVVVVRSYHGPFIVELGSTGPARVALRRSGIYAVFPYTSFCTPAAATTTE

SEQ ID NO: 119519 - protein, 195 aa, Oryza sativa
  Clone ID: PAT_MRT4530_22729C.1.pep
SSVPLQPRRLLRPRLRVIKPCAGRVSPSSKDRRRSRSLAVRLRRPRAVSAALVRLCRSHASSRGGKDLSLVALVLVLSVSPRTRCADGVRFRRPADRLCVPGPPWSLRLTCGVSLHPSPPPPLEATGDEFILIPIRRRRRPTAALVLVEALVHGADVGLEVLRVGLHAPAQRRRPPGALLGALCGDYGYPIPTRH

SEQ ID NO: 119520 - protein, 218 aa, Oryza sativa
  unsure (1)..(218): unsure at all Xaa locations
  Clone ID: PAT_MRT4530_2272C.1.pep
MSSNSHYFQDMRRLAPPLSCGCRREYAIGARISFVPCHSVSSVHSSVVFSARRRSPPVPVSAAPASVRHRHRPSSSASVVVIVVHGSVGAEGRSPPPPAPASVVGIVVVHRPRRARPCQPQRCLFAVTAIVVLHRPRIASSGWSMSARVPCPRPPQLPPHHHGRRPPXVHSRRIPPRPTIHKGLLPHPFPAAAAAPFCSRSRFARSRSRRFARRRSRC

SEQ ID NO: 119521 - protein, 78 aa, Oryza sativa
  Clone ID: PAT_MRT4530_22730C.1.pep
MFHANEGHDSSEGKGMIKSCGEVHQLLDLAVRWRRGRPEVGLSCAESGSDSACEQRLWFDEGDEGHDVGCKRQLAGER

SEQ ID NO: 119522 - protein, 90 aa, Oryza sativa
  unsure (1)..(90): unsure at all Xaa locations
  Clone ID: PAT_MRT4530_22731C.1.pep
VGSCLDVMKVMEFPPQWINWVKLILESASKTDLLNGVPGEFXSARGVDPLSPMLFALGADILQAIINKGYQMGLFQMSILGAPHVLEERE

SEQ ID NO: 119523 - protein, 49 aa, Oryza sativa
  Clone ID: PAT_MRT4530_22732C.1.pep
CSPVAVPMQGGLSRSSLSPLMVSVRSVFSLSSPSIHLVVLSDKWKKTRG

SEQ ID NO: 119524 - protein, 147 aa, Oryza sativa
  Clone ID: PAT_MRT4530_22733C.1.pep
MPCLCAAPKSSLSPSVFPVSAAEAAREASSAATAIVASLVFHYHQIKVDSLGGDGWSEYKSGSHPPTTATSQCTVASPTLPLLLPSASSSLHTRALPTLHKVKTGEGWSVLRKKIFAGLCRGLKILVTSSGLCLKDMSNAPSAKKYK

SEQ ID NO: 119525 - protein, 182 aa, Oryza sativa
  Clone ID: PAT_MRT4530_22734C.1.pep
MARLGPGAITRLADNIGVGVYFNPFVEWRDKRIKYGVVRMKDLAMDVLTWDRFYLSGRLQKPYDLYAQICSLSYMGDLRMLFAEDKNKDCGASATNELFSYLPWTIQRRLQGRFASNCEEMPTRASVSSKDVAATCVRKALRRRVMVSSARQAMSGLLASGGAVAARYLGKKISKAWKSRTV

SEQ ID NO: 119526 - protein, 341 aa, Oryza sativa
  Clone ID: PAT_MRT4530_22735C.1.pep
MKGLSEKSQPRRKKHANSRRSGGSRRRRPSRVAPPAISSAPPLPEAAARAIHRMRPAEEAARAAALAGPLGELLPPVDFCCAYGSTLLHARPEASSMVDYILGVPDPLQWHSENLERNPDHYSGWMARLGPGAITRLADNIGVGVYFNPFVEWRDKRIKYGVVRMKDLAMDVLTWDRFYLSGRLQKPVHVLVDNWDIRKINTINLKMATSASLLLLPAEFTEYDLYAQICSLSYMGDLRMLFAEDKNKDCGASATNELFSYLPWTIQRRTQGRFASNCKEMPTGAAVSSKNVAATCVRKALRRRVMVSSARQAVSGLLASGGTVAARYLGKKISKAWKSRT

SEQ ID NO: 119527 - protein, 221 aa, Oryza sativa
  Clone ID: PAT_MRT4530_22736C.1.pep
MSRRGDWVYENNGGTCVAIAGADYCVVAADTRLSVGYNILTRDHSKICELADKCALASSGFQGDIKALHKNLAARELLYQHQHNKRMSCPAMAQLLSNTLYYKRFFPYYAFNVLGGLDSEGKGCVFTYDAVGSYERTGYSAQGTGSALIMPVLDNQLKSPSPLLLPARDAVTPLSETEAVDLVKDVFASATERDIYTGDKLEIVVINKAGTKREYIDLRKD

SEQ ID NO: 119528 - protein, 73 aa, Oryza sativa
  Clone ID: PAT_MRT4530_22737C.1.pep
KLNYSRNLITLRSMFGAAENGPPGEPQGNISNSLKAPQEKHFNRSPGNFRNVYTCKDFIYIFFVKALSVLFFR

SEQ ID NO: 119529 - protein, 95 aa, Oryza sativa
  Clone ID: PAT_MRT4530_22738C.1.pep
LIFLPFNASTAYADHLFLQILLPVSPRRRLALSGDDIAIAGHQLQISPTERWRLLLECSGSKHREGLAAVGPRPRRPLRLMLDSCLNPLIKCSPL

SEQ ID NO: 119530 - protein, 138 aa, Oryza sativa
  unsure (1)..(138): unsure at all Xaa locations
  Clone ID: PAT_MRT4530_22739C.1.pep
MIGSRLWSRGPSPLPPLSPSPPLSKTRAPKAGEMATPQEEATLTNGSSLITEFHLSWSQLRKQGVXGLWACNFVWDPXPKWRPCGVRPNLVEHDPRDHXVVLPPPXIARNKVDLHRLAQQPMERCIDRKGATQHLVRL

SEQ ID NO: 119531 - protein, 176 aa, Oryza sativa
  Clone ID: PAT_MRT4530_2273C.1.pep
LARGEVCDVLVGLLGDQDMAVRLAACSSLCYAFRVFGIWEVDLLECIPTCWVMCFKLIGAVQEFDSKVQVLSFILVLLFFVGGVRCLPVVRVLPPVCLQTWEESSGECLLQIELLDAIRTFISSLGYNSPLCYGMVLPILQYGMDVHSPNPLNLLEDTVLVCGASPSFFLFLPTKL

SEQ ID NO: 119532 - protein, 63 aa, Oryza sativa
  Clone ID: PAT_MRT4530_22740C.1.pep
MARQLKEAEEMEVLERMAKELQSQVAAEAPDESKEEKRERVHHELQKLCRPTSAIAASIKEKV

SEQ ID NO: 119533 - protein, 49 aa, Oryza sativa
  Clone ID: PAT_MRT4530_22741C.1.pep
IPFLLRVCSPTHPFLLLFYEHFTIGLGHLIFTATYYIVIFNQTLGLPTT

SEQ ID NO: 119534 - protein, 137 aa, Oryza sativa
  Clone ID: PAT_MRT4530_22742C.1.pep
MATTVVAVPTVDSAAPTATRVAAASRAGSDGYDGGGGFRAEAAGGSARGEAVGAGWRRRVEMVQPAAGGGIGGDGCALPSSSAASGGIGDVQREERRPLGGALPPPDPARGRAPEPCHLTILRATTECAEIRDRDRD

SEQ ID NO: 119535 - protein, 129 aa, Oryza sativa
  Clone ID: PAT_MRT4530_22743C.1.pep
MATTVVAVPTVDPAAPTATRVAAASRAGSDGYGGGGGFRAEAADGGARGEAVGTGWRQRVETVRPAAGGGIGGDGRALPSSSAASGGIGGVQREERRRSEVPFLRQIRQEKGLRSRAALPSSAPSSNEP

SEQ ID NO: 119536 - protein, 92 aa, Oryza sativa
  unsure (1)..(92): unsure at all Xaa locations
  Clone ID: PAT_MRT4530_22744C.1.pep
MPQVDLESLVCGVAGAGAGDRKVSCETVIAAGESGDASPPRXPPPPPPPDPDFPPESITIPIGDEVAFSELNPIYDRDDSTKGSTNPKXGGR

SEQ ID NO: 119537 - protein, 139 aa, Oryza sativa
  Clone ID: PAT_MRT4530_22745C.1.pep
MACHMDDDMGTLPSGAAGDTSPRVHQARRCLPPRPPPPSSPHNSGAGPHVSVVGNPSPWARSVQARPAAIELAPALLVASPSFFSFRRTPPISGHSSPRGRQRDQLPPKADRERLLAEEQIVSVEDQLPALTVARIRCS

SEQ ID NO: 119538 - protein, 273 aa, Oryza sativa
  Clone ID: PAT_MRT4530_22746C.1.pep
DASYCLDGGKAKQVPHAPSPEKKRASFAAGAAAVRAKVCDARWPASAAAACPAPYGFRGGVATRSVAFDEMTPRRASVDVPNPLRAALSSDDTESATSSAGSPDGDADADAKLAARARPSPRSIMASPARFSRDAMGSRSERFADHSTPFMSRTPRFLASPSPKTTPTAPPPPTTTKKKSVKSLFNGLLSSPFTRPSPKQPPPTKPAAISPASPSPARCSATAAASAVPGRLQAQGKAEEEHQLRLLHNRHLQWRLANAVAGAAISAQELNAE

SEQ ID NO: 119539 - protein, 101 aa, Oryza sativa
  Clone ID: PAT_MRT4530_22747C.1.pep
ATATIWTDREDFAVELINPFPKKCAITAHILFACLMHPADTFMIIYRHKTLMNYLQSPDAWAWGYRPITAKIIYSIKLINMLSKTECVSTSKWCMCICRER

SEQ ID NO: 119540 - protein, 56 aa, Oryza sativa
  unsure (1)..(56): unsure at all Xaa locations
  Clone ID: PAT_MRT4530_22748C.1.pep
GGVGDGAQHSVALSLLGWYGGYGYDYADNVGVVGVKTPPXLKLNPPFXVVVLGRLS

SEQ ID NO: 119541 - protein, 42 aa, Oryza sativa
  unsure (1)..(42): unsure at all Xaa locations
  Clone ID: PAT_MRT4530_22749C.1.pep
CLWVGHVSCRNQRVLTYLLPXLSLTMACLLSTSRVSMLMVVK

SEQ ID NO: 119542 - protein, 682 aa, Oryza sativa
  Clone ID: PAT_MRT4530_2274C.1.pep
MEVVSSNLEDNFWDPPGIDCDSTEPFYSVASCSRTTRIACHASLLPHGAALRALATAMATPTPMPHTPISSQTLTLAPHVSRRRCGGSVRARTLALPATPASACSFRLRATAARDSPLPSLFDEAFPFVAVEWKTIVKGWACAAAAVYCLSRAVPAAGRLPRALAACGGGAAEAFKGGFALAGLAAARSAAAYVQQALLWEAALRAAGRLRERAFEGVLARDLAFFEGSGGLSAGDIAHRITDEADDVADAVYSVLNTIVPTSLQLIAMGHQMVTINPLLSVVAATVIPCMWLVIASLGRRLRQISKEAHISLAMLTVYLNDVLPSMLTVKANNGEGKEISRFQNLVIVDLKNNLSKKKMKAFIPQVVRTTYIGGLLVLCAGSIAVSGTFFDGEGFLSFLTALTLAIEPIQDFGKAYNEYKQGEPALDRIFDLTRFIPEVRDKATAVHLKYVKGDINFHDVTFQYIDGMPPILDGVNLHIRSGETIAFVGPSGGGKTTLAKLLLRLYQPQSVASWSATTEGENMLLSGTIAENIAYGDPMGAIDMSKVESAAKIANAEEFIKMLPGGYNSYVGQKGSSLSGGQKQRLSIARAIYQNSSVLILDEATSALDSRSEILVKEALTNLMANHTVLVIAHRLEMILMADRIVLLEGGKLREITKSSFLSRDSQFSSPQGSSPKLGEV

SEQ ID NO: 119543 - protein, 100 aa, Oryza sativa
  Clone ID: PAT_MRT4530_22750C.1.pep
MVQRRRRCGSHKNDRHMYFGAPGAACVSKLVMVIDVQPLPLLLTQHLPHPSPHDELKHRLHETMMTRAMISSRSKRTISYTETETRPRLLREVAVGNFPQ

SEQ ID NO: 119544 - protein, 126 aa, Oryza sativa
  Clone ID: PAT_MRT4530_22751C.1.pep
MTLRTLNIISLNENSPIFHSAITTANQQQQQQRAGSSDRITAAPLPDDVPAPSPPVPRPPAREGREDGPATDIPTRRLALLETRFDDGNVEERREGGRPRQELGFCSRAATADACRCRHPTLPRGT

SEQ ID NO: 119545 - protein, 340 aa, Oryza sativa
  Clone ID: PAT_MRT4530_22752C.1.pep
MSAPFIHQAAAHRLPLIREKEKEADKYTKKNGAWTKVRPSHNANAFATNGRSSSPYYAQLYYQMKQLGHKMYDQDSPSSDSGQSHQEESAMNDSSPNERHTSTQSDNDDGHQMPDQDKTKSVSSLGNPGALPPKLNYSQSFACIPYTADAYYGGVLTGYSSHAIVHPQQNGTANSRVPLPVEPAAEEPIFVNAKQYHAILRRRQIRAKLEAQNKLVKGRKPYLHESRHRHAMKRARGSGGRFLNTKQLEEQKQQQEEEAASGGASSGNRTCLQNGTGSAPSASSPSEIASVSTSREFLGNHEQSHFPSAGFLPTMSFRAQNGGDGKLVANAIHQRVSMMR

SEQ ID NO: 119546 - protein, 120 aa, Oryza sativa
  Clone ID: PAT_MRT4530_22753C.1.pep
MDGSIFFLPVEEERFGQVGGQVLARGTGEACGPWSTPSAISLYTASVGCVPSHETYVDGSSHTVHPALPHGTLWFPQQDPSAGQELDRRRRASDNRAAAQSSGGFHRSSVEWLPRERPPS

SEQ ID NO: 119547 - protein, 113 aa, Oryza sativa
  Clone ID: PAT_MRT4530_22754C.1.pep
MSVASSWKGRTGGPLSAGGDSTSPRQHRRRPPSAPAPMSAVSSGWSTPTRGGARARGLMSALALLLALASLRAHTTLWTTATMDADEDGRCRRRMDAGAADKGAGTGGGGLAD

SEQ ID NO: 119548 - protein, 174 aa, Oryza sativa
  Clone ID: PAT_MRT4530_22755C.1.pep
WIPGLRNRHEPPGPLLLSLSPLSLRRATAAAPSFPPPGLLLLVGDDLSHTTTRHPLLPAVSSPLSHSVAASLPRPEDAPPSDLAVARVWLGVVACSRPDAGAQRRCSSWRSRSMRKAAGRRWGRAEAASTRSVRAQQQLATAQCTGAWSRPGLLLLLLLLLLLYSSAHMLFLIS

SEQ ID NO: 119549 - protein, 68 aa, Oryza sativa
  Clone ID: PAT_MRT4530_22756C.1.pep
FTIEGRQCQKKVIFFSYRPPYRRLDQPDWTKPNTYPSQQEAFNAPAKPKKANQSNSPVTHFKPQLNFS

SEQ ID NO: 119550 - protein, 54 aa, Oryza sativa
  Clone ID: PAT_MRT4530_22757C.1.pep
SHLSIELCVVLALVGEIDASYHVICVGVACRLLAGSCRIINGPAPSMPCTCHHN

SEQ ID NO: 119551 - protein, 106 aa, Oryza sativa
  unsure (1)..(106): unsure at all Xaa locations
  Clone ID: PAT_MRT4530_22758C.1.pep
MASRAWKGILAQGSTAPNDSPGKRISGVPPAGALILSTLMLRRMCNLHVLITRTIGXILTYGSTETVASXTDTMSTTSEVQETDTRTPTRQAQEACTRSATCAVHR

SEQ ID NO: 119552 - protein, 113 aa, Oryza sativa
  Clone ID: PAT_MRT4530_22759C.1.pep
SVLELLSSISPPWRLWQCQPGSGPPSTAASGAPASLAIDTPHVWWLSAHRRRCSGGWPSTAVFSWDSVMLSCRLHKGQSEIWKNRTEFTNRVFLTVQKMQIHRQWPVIKYGLA

SEQ ID NO: 119553 - protein, 39 aa, Oryza sativa
  Clone ID: PAT_MRT4530_2275C.1.pep
MAVDVPISRAVARVGSLHSKVEMKSGRWLGLALYIARWR

SEQ ID NO: 119554 - protein, 115 aa, Oryza sativa
  Clone ID: PAT_MRT4530_22760C.1.pep
MVSAKYKKTTSSWIMLRIGQVGVSSGRWQLQVCCVRPEVSDAGHRFLLPLLEVRSDRPCPKEYILIVVDRAALVVAINVDKPDEAVVATAHGTALLLYLPPMLKARRVPFGALCS

SEQ ID NO: 119555 - protein, 110 aa, Oryza sativa
  unsure (1)..(110): unsure at all Xaa locations
  Clone ID: PAT_MRT4530_22761C.1.pep
YPDELQHSPYRYHLSRGGARDYASFRDASSEDDATIAHLARMMVRRGMVENNMKILELRQENLQLKKDLDAVEAQLHQLKIAQGEDCRPKRXCRSQKITARKSTSRPELV

SEQ ID NO: 119556 - protein, 465 aa, Oryza sativa
  Clone ID: PAT_MRT4530_22762C.1.pep
MLRACGGASPAAAAAAVPALVRARLAKQASSAAHAAATATASASSSLSALGEVAAGRKGLARVVLKKGKTQIFRDGSPMVYSGAVDRIIGRPPPKTGDVVLVADGAEKPIGWGLYNSVSMFCVRLMQLEEEAKRDPTCALNMERLLEARILSAVDLRRSLGLPSVHTNAYRLINSEGDRLSGLIVDIFADVAVVASSAAWVEKYRHEIQFLVNKVSDVNHIKWRSSTDILKEEGLDVSEQKDPESSSHCGTVEVMENDVLYLVSLEGQKTGFYADQRENRHFISTLSKDQRVLDLCCYSGGFALNAAKGGANNVIGIDSSASALDLANKNIILNKLDTQRISFVKEDATAFMKGAISRNEVWDLVILDPPKLAPRKKVLQSASGMYRSLNALAMQVVKPGGLLMTCSCSGAMTQSGLFLRTIQGAASMTGRKVTVLRQAGAACDHPVDPAYPEGRYLSNYLLRVT

SEQ ID NO: 119557 - protein, 55 aa, Oryza sativa
  Clone ID: PAT_MRT4530_22763C.1.pep
ATVFVLLEDQGPMQMVFKYATEGTSNFYVAPQVAKTFFTICKTPPKITKRMPSRV

SEQ ID NO: 119558 - protein, 185 aa, Oryza sativa
  unsure (1)..(185): unsure at all Xaa locations
  Clone ID: PAT_MRT4530_22764C.1.pep
IQAVPSVAPTTQPTAPASTPLPPIQQAVQPIQQQAVQPIQQQVVQPVQQTPPRQQLLQPIQQTPLRQQIVQPIQHPGSVSASAGFAAPGGQPVQHFVNRVVPEHLVHHVQPDGTVMPQVVPEHLVHNIQPNLHNYQGGNLSYQYXPPSPQAQYQPGGLAQPQFASQYGQFEPMQQQPQAAAQQRP

SEQ ID NO: 119559 - protein, 150 aa, Oryza sativa
  unsure (1)..(150): unsure at all Xaa locations
  Clone ID: PAT_MRT4530_22765C.1.pep
MLVCCPATLAMGTTDPYXQYMMQXTLGMGSSTARFISQPMAPLQQHMLHAAQGMMPQCNCGXTSYQMMQSMQQVICAGLGQXQMMMNLPMPDAMTWCNMAPVNFQLLLACGFFDQTGLHGLLVIRCCILCGANTRMKNLESSINQLQTAK

SEQ ID NO: 119560 - protein, 189 aa, Oryza sativa
  unsure (1)..(189): unsure at all Xaa locations
  Clone ID: PAT_MRT4530_22766C.1.pep
MRPAGRRTSRRRSTSSCGGPTSRGRSPPAPSSSPRGGPTSPPPWTPAAAGSRSGGPPVARRQAGPPRRSACTMTTLEGKMALEIIEKNKIIEEKQRRLDEAEKALSELRTVYIVWSNPASEVLLTGSFDGXWTSQRRMERSERGTFSLNLRLYPGRYEIKFIVDGVWRNDPLRPLVSNNGHENNLLTVT

SEQ ID NO: 119561 - protein, 44 aa, Oryza sativa
  Clone ID: PAT_MRT4530_22767C.1.pep
TLSVWLLKSYCLSNVLIACSFVKPKKKRAAPYYKECLHSLIVTV

SEQ ID NO: 119562 - protein, 92 aa, Oryza sativa
  unsure (1)..(92): unsure at all Xaa locations
  Clone ID: PAT_MRT4530_22768C.1.pep
PEIEIIVCWVLVHFRPHTTLRMKDXIALEPSELHLVSARLKAVVFIRDNYWIYCNAASFSARNVLVAQVLYIFRAQYTYYGQVELYYPVRFW

SEQ ID NO: 119563 - protein, 542 aa, Oryza sativa
  Clone ID: PAT_MRT4530_22769C.1.pep
MEATITRFLVFFFLLLVVAVRGDDPYRFYTWNITFGDIYPLGVKQQGILINGQFPGPQIDAVTNDNIIINVFNNLPSPFLLSWQGIQQRRSSWQDGVYGTNCPIPPGGNFTYIMQFKDQIGSYYYFPSLAFHKAAGGYGGIRVLSRPGIPVPFAPPAGDFTILAGDWFKLNHTDLQGILDSGNDLPPPDGLLINGQGWNGNRFTVDQGKTYRFRVSNVGIATSVNIRIQGHSLLLVEVEGSHTVQSTYTSIDVHLGQSYSFLVTADQPPQDYSIIVSTRFTNPVLTTTAVLHYSNSNGALSTVAPPPAPTIQIDWSLNQARSIRWNLTASGPRPNPQGSYHYGLVNTTRTIRLANSRASINGKLRYAVNSVSFIPADTPLKVADFYNIQGVFALGSMPDNPTGGGAYLQTAVMAANMRDYVEVIFENSENFVQSWHIDGYAFWVVGMDGGQWTPASRQSYNLRDAVARYTLQVYPQSWTAIYMPLDNVGMWNIRSESWARQYLGQQFYLRVYSPANSWRDENPIPKNALLCGRASGRRTRPL

SEQ ID NO: 119564 - protein, 397 aa, Oryza sativa
  Clone ID: PAT_MRT4530_2276C.1.pep
MELYPGYLEDHFNIHKLSISSASPPEYMTSASTQFAAPVRMGAYDRPPPVGMWSHEQFKVDNGQATSASTIMEAEMKFENRLEEIPQVVLEEGRNVDQEASKPPDKVLRRLAQNREAARKSRLRKKAYIQQLETSRLKLAQLEQELQRARQQAVYANGSLREPNLGFTGPIDPGALGFEIKYSHWVDEQNRNTGELRNALLQGQTTDQDLELKLLVEAGLDNYNRLFEMKEEAANSDVFYIMSGMWKTPTERFFLWIGGFRPSEVLKNLRPQLEPLTDKQVVEVGGLQQTSMQVEDALSQGMDKLKQTIADSLTAADPFDSPEAYMVHMANAVEQLRSLVQFVTQADHLRQQTLQEMHRILTTRQAARGLLALGDYFQRFRALSSLWAARPRDSGIS

SEQ ID NO: 119565 - protein, 61 aa, Oryza sativa
  unsure (1)..(61): unsure at all Xaa locations
  Clone ID: PAT_MRT4530_22770C.1.pep
GCPIYVSDKPWNHNFYLLRKLVLPYGSELQTRLRGXPNDNGFYSNRGATDXSLLKIWNLNN

SEQ ID NO: 119566 - protein, 103 aa, Oryza sativa
  Clone ID: PAT_MRT4530_22771C.1.pep
GYPPERYNENIWEMSLEATHGTRQRWEGLSDIWSSRDFAPISQDTLKRYCGPWPWEEKDVRKIVKETSAVNTEWMPSLIQPILIDCHPPGRPWVKLEMLRLWS

SEQ ID NO: 119567 - protein, 122 aa, Oryza sativa
  Clone ID: PAT_MRT4530_22772C.1.pep
PPPPPPPPPPPPPPPFSLFFFFFFFFFFFFFFLEKICLNPPTFFFLGFKQGFFDQNGVFLPAPQRSNFGEPPRRFNPGGSQPPRPPGGPQIFLVGVFPPNPFDFVFVYPPNPKGGGPWVLAP

SEQ ID NO: 119568 - protein, 80 aa, Oryza sativa
  Clone ID: PAT_MRT4530_22773C.1.pep
PVERIREGTADGEWLEAAGGETTTGGGGRRDEAGGDGGGPRNEGWRRPVSRRGLDEAVCSAGHRAREGTRRRVLLERQRR

SEQ ID NO: 119569 - protein, 71 aa, Oryza sativa
  Clone ID: PAT_MRT4530_22774C.1.pep
PPSGCPTPSHASTDTKPSIHPSISRLRFFLRILYYINSSILIVRTYVRVFQTRRVCVYVYVKVTTNVLVLN

SEQ ID NO: 119570 - protein, 53 aa, Oryza sativa
  Clone ID: PAT_MRT4530_22775C.1.pep
NSNTSRHLAEFWMIEPELAFADLNDDMACASSYLQYVVKYVLENCKEDMDFFN

SEQ ID NO: 119571 - protein, 329 aa, Oryza sativa
  unsure (1)..(329): unsure at all Xaa locations
  Clone ID: PAT_MRT4530_22776C.1.pep
WRFSSRSTAAATEREREVEPRPSPTPPPPLLPWISTAIAARSTSSPPPPWTSTSTATATGAATEPRSSPPPATGAGGAASSGISPRTSSPALWAASGTPAPPPGPACCPAAGATSGNGCPASSXSLPSPTTPAPCAPPSPPSPCTRPPASTSSTSPPSIHSATPDATASXSASPRPSSPESFSSATGARFRSTCFSTRYSAIPSKKEARSSSPASREPPRFGCAWGFFAYRSLPPSGVFAALRELHLVFVRFNGGELTLDDTMMPFLEGVEIWCSRGLASLTIRLKHLISMNLYAVRGVVWAQCRGAETHSSLINPSWSIFDLLYTQLI

SEQ ID NO: 119572 - protein, 846 aa, Oryza sativa
  Clone ID: PAT_MRT4530_22777C.1.pep
MAGEVNQNSEEWPEVRYINSHAVFKEYLSRVVAGLGVLIFTWSTVVLLGGFVSLLDKKDFWCLTMITLCQTKEASGAITGGVIEGFSGVTRLLATAFSTPKSPPTSTEQKAEITADTLAYSSLRKIETDPAETPAETPAKTPAKIVAEWLKHYILDHGPIVAYATLQLFRLLVFTTIVVPLVFVYTLGMYISTAISLFRLTRRDLGFGMANAAADGGANLQKPALRVLYLMALAQGVLYFYGMTFITTGRKMERKVADKYNLNYGAKSPVREYAVETMAGCMKDPSFVRGRNMVTHAIGLIESSSIDTDNFINGVRIIDSLVQSQLQGHHALMRQLLTGSASSSHILVKLLEAATRCSPTQNNMTKSAARIVEYFAVDIHLKKLPGGIECISDMLELSTTGPQLEQFKDTLKLDQCMEMLHWGLKILRILAAHSDNCRVICDTEGLLSRIMAPMSSDLLHRIDHEVWHSVVEESMQLVALLVVAPGVTGVRLRREISGNKEAVTTMDSIPKCSKCKPLLQIMAIKILSQLAFDKSLSMSTSVASREELAKYMLCIFTDDNKDMSVRKSAAQALAMLCVESQSIAVVILQADGNVVGVLKDMLLHSKENESRISAAEILAHLYNHYTYDDEYLGELNKVIKDVMPKVLGEMFGCGDIQTAGTKADKAMFSPPGSVSIEVQDGDNWLRVDSKLLEAFLYLITTVFDVSQDQDLVQLVDVVFPGDATFTPIGKLKEMVCIYILPNYELTAHWLRIVKLIFMMFISMLRLRSSSYAKEEENLKELMGYLSEVSIQMYGVDGVLSLADSNNGAKPPLKTLVSLFIEAQEIVDGQKEGIIYLRGSVEVNPMA

SEQ ID NO: 119573 - protein, 880 aa, Oryza sativa
  Clone ID: PAT_MRT4530_22778C.1.pep
MAVGDALRRLCEEARWSYAVFWKAIGAADPVHLVWEDGFCGHASCSAGSEASEAGCESGGAVCTLVRKIMASQVHVVGEGTIGRAAFTGNHQWIVHETANDHGLRSEVAAEMNNQFRAGIKTIAIIPVLPRGVLQLGSTSVILENISSVQQYKKLCCQLNNRSSMVASASAKNDLSQKVQSRSLHGLPSIHPYEQCYGHDARALSSSTSANTGRNTSLLKVAQRNDQAIREQVLYAPDMRFRQQLPYSDRRVDINTHSSAMSSGFISSISASVEKYPLLTNNIGQVEHGNMEESSGPRNVLLKSLSCRNPVVHENTNTSLFHGGDEVPAFLNSHGSFDFLQAGPRVVEANLYNNGTSSQVLDQRCSSTSGMAGYKPSVSYKFPHSAQFIVKMENPRRQSFQDPAAPSSGSDVQVSSGLKTTTRQFNPEHMCQNKKTNEVNDSSAAVSTQDVKNMDRHKILDISNERTSSFVMDPSTENDLFDIFGTDFHQLHRSLDGDLSWNTAKPQSSDRDAPESSIYLDSSPAFGAQEDEFSYSGIFSLTDTDQLLDAVISNVNPGGKQISGDSASCKTSLTDIPSTSYCGSKETKQCKSSGAPPLLIKNELAVSNFVKQPCFLEKAEDGCLSQNNGVQKSQIRLWIESGQNMKCESVSASNSKGLDTANKANRKRSRPGESPKPRPKDRQLIQDRIKELRELVPNGAKCSIDALLEKTIKHMVFLQSVTKHADNLKDSNESKIHGGGENGPLLKDYFEGGATWAFDVGSQSMTCPIIVEDLDRPRQMLVEMLCEDRGIFLEIADFIKGLGLTILRGVMEARKNKIWARFTVEANRDVTRMEIFLSLMRLLEPSCDGGGGGVGDNPNNVKIPPGIVQHPVIPATGHLR

SEQ ID NO: 119574 - protein, 210 aa, Oryza sativa
  Clone ID: PAT_MRT4530_22779C.1.pep
MPTPGSRPVDRSDLSPPKTPSDRDTPTPGSRPVDRSDLSPPKTPGDRDMPTPGSRPVDRSDLSPPKNSSPGDRDTPTPGPRPVDCSDLSPPKNSSSGERDMPTPGSRPVDRSNLSPPKTSSSGDRDTLTPGSRPRSLTTITPTLDIEIIVPLRQSDKPPRNLREFRLGTPRADKLLSDPKEPNDHVKPGHIIPFNAVEDSMSLRSYSGID

SEQ ID NO: 119575 - protein, 58 aa, Oryza sativa
  Clone ID: PAT_MRT4530_2277C.1.pep
MTTLAYPNRIMVRYLDQRRRSSSQATNVDHLTMECAGYVLELEGKQRPWCTLQFREIE

SEQ ID NO: 119576 - protein, 198 aa, Oryza sativa
  Clone ID: PAT_MRT4530_22780C.1.pep
MSQSPAAPAPKAPAAAGPAPKATAPAGPARKAPAAAGPAPKATAPAGPAPKATATAAPSSKAPSPAAPSPEAPSPVAPAARPSYSSVLRLVSNNSDEDFDREVYRLAHLRPLVSKAASQRSQAMVDDFTNFSSDDEFEYSSGVLVDSVFDVLCDDFSDEDFQYEEVDARYYRVSKRTLKAGGLVGLEGGKLGTAYYRA

SEQ ID NO: 119577 - protein, 424 aa, Oryza sativa
  Clone ID: PAT_MRT4530_22781C.1.pep
MDSVASWGLTPLAAADPLVHDLLEREKRRQRSGIELIASENFTSFAVMEALGSALTNKYSEGMPGARYYGGNDVIDEIENLCRDRALAAFRLDAASWGKISATSIYFESLPYKVSAATGYIDYEKLEEKALDFRPKLIICGGSAYPRDWDYAKLRAVADKVGALLLCDMAHISGLVAAQEAANPFEYCDVVTTTTHKSLRGPRAGMIFYRKGPKPPKKGQPEGAVYDYEDKINFAVFPSLQGGPHNHQIAALAVALQQTMTPGFKAYAKQVKANAVAIGKYLMSKGYKMVTDGTENHLVLWDLRPLGLTGNKVEKMCDLCSITLNKNAVFGDSSALAPGGVRIGTPAMTSRGLVEKDFEQIGEFLHQAVTICLNIQKEHGKLLKDFSKGLVNNKDIENLKLEVEKFATSFDMPGFTLDSMKYKE

SEQ ID NO: 119578 - protein, 276 aa, Oryza sativa
  Clone ID: PAT_MRT4530_22782C.1.pep
MASAAVTLPRVMLAAAAVRAAMLALGEWQDAHLEVRYTDVDYLVFSDAAASVAAGGSPFARATYRYSPLLAYLLVPNSLLHPTWGKLLFSAADLLVGLFIDTILKLRGVPDSTRIWSVVAWLFNPFTFTIGTRGNCEPIVCAVILWILICLMNGRVLQASFWYGLIVHFRIYPIIYAIPFVIVLGKNYAGPAGRPILTQWTSKQHLQSDKSSPSVERATSLLTNLWNFLTSLITRNTILFGLLSGSMFFLWTGVFFYLYGWEFLNEALLYHLSRTD

SEQ ID NO: 119579 - protein, 471 aa, Oryza sativa
  Clone ID: PAT_MRT4530_22783C.1.pep
MDSVASWGLTPLAAADPLVHDLLEREKRRQRSGIELIASENFTSFAVMEALGSALTNKYSEGMPGARYYGGNDVIDEIENLCRDRALAAFRLDAASWGVNVQPYSGSPANFAAYTALLNPHDRIMGLDLPSGGHLTHGYYTAGGKKISATSIYFESLPYKVSAATGYIDYEKLEEKALDFRPKLIICGGSAYPRDWDYAKLRAVADKVGALLLCDMAHISGLVAAQEAANPFEYCDVVTTTTHKSLRGPRAGMIFYRKGPKPPKKGQPEGAVYDYEDKINFAVFPSLQGGPHNHQIAALAVALQQTMTPGFKAYAKQVKANAVAIGKYLMSKGYKMVTDGTENHLVLWDLRPLGLTGNKVEKMCDLCSITLNKNAVFGDSSALAPGGVRIGTPAMTSRGLVEKDFEQIGEFLHQAVTICLNIQKEHGKLLKDFSKGLVNNKDIENLKLEVEKFATSFDMPGFTLDSMKYKE

SEQ ID NO: 119580 - protein, 205 aa, Oryza sativa
  Clone ID: PAT_MRT4530_22784C.1.pep
RPGEPNPGVRDPATNLTYDNMLYAQIDAVYAAMKAMGHADITVRISETGWPSKGDDDEVGATPQNAAAYNGNLMKRIAAGEGTPLKPAVPVDVFVFALFNEDMKPGPSSERNYGLFYPNGTPVYNIGFDAASFSPSPTTSTFSSSSRPTSTFLMGVVSYSPHSSSDNFLHKYIARMIWDCFLTDIVRFVVGCIAQKSRYIVLTSR

SEQ ID NO: 119581 - protein, 80 aa, Oryza sativa
  Clone ID: PAT_MRT4530_22785C.1.pep
MIRQPPSSRELDLVADVLGRGRESSPHWGEVDPAVPLAGVGQVTGIEGRESGHREAGLLGRDEETKGGWERGSICPLGSV

SEQ ID NO: 119582 - protein, 65 aa, Oryza sativa
  Clone ID: PAT_MRT4530_22786C.1.pep
QEFGTRGNNTFGFNSPAQPAGFSTSVDGSTTQPSATSTIFGSKLPQSEGTMPQPSKSSPGSQFSS

SEQ ID NO: 119583 - protein, 58 aa, Oryza sativa
  Clone ID: PAT_MRT4530_22787C.1.pep
MDEDVIFLLSITSPMKTDRLEVVFAVDVRKGMLQGLAKLDVRPKNLAIMVTLCTSEIC

SEQ ID NO: 119584 - protein, 246 aa, Oryza sativa
  Clone ID: PAT_MRT4530_22788C.1.pep
MWGDTRRRSTSSRPSQRRRQCSPGPSRRSVDARQLSPGMDDYGMDNRHMDGLEGDGDDPTEQSIIEANDDTVLSLPGGKAEPSTPSAGRADCWQHIEKIRLVMKEMFQDYCRAKNKLVRMFGIDVKHRWNTTYLMLHQLKGYEKIISVFIDSLHFRSNDTDEDGDENRHDRVLAYVVQPMEEKFLKYFTAIPHLYCFALVLDPHKKLEVVEAAFIPIVMQWVLIILKLINMLEMSCSGFSVCTRLS

SEQ ID NO: 119585 - protein, 204 aa, Oryza sativa
  unsure (1)..(204): unsure at all Xaa locations
  Clone ID: PAT_MRT4530_22789C.1.pep
TGLDPAPKLGSFFPKPNIAIPINPKPPPFPFPFPHSPPSHLPPTFPPPPPPXAPVAPPPGPSPPPGPPPPPPPAPAPPPPPPPPTPGPAGLARLAPPPPPPPPPPPPPPXPPPPPPPPPPPPPPPPPRPGGPRPPPAPGARRRGFCPGAARRPPPPPPXPPRAPLWLRPPHPPRGGLGPSPPPPCPPPHPSPSLAWRPPARPRR

SEQ ID NO: 119586 - protein, 87 aa, Oryza sativa
  unsure (1)..(87): unsure at all Xaa locations
  Clone ID: PAT_MRT4530_2278C.1.pep
GAPVDFGFGEMAAGLPLLLANPTAAAATKSGSXRRLLAAAGDRNMXQPTGSWRGLPPARFRHKGNGGRGGARPCGADGGGGAGSRQM

SEQ ID NO: 119587 - protein, 872 aa, Oryza sativa
  Clone ID: PAT_MRT4530_22790C.1.pep
MRPDEEGRGVATRPGALWERKPPANAFNAPDDDEDVEKTDQLLEPLNKPKRRDAGKKKRPRKKKVDQENIKTHRHNANAVKGKMLVNDKVSKTEKKQREENVDRYPDLPENEFAAKCPYCRKNCNCKACLRMRGVEEPPRKEISKENQIRYACHVLRLLRPWLIELRQEQMAEKELEAKIQGVSVDQIKVEQAELRKGEIPGGEEVEILDPEERDKDYAFGKILSDGENQRDSLKCRSDTQNSESNKGMASDENQKKALLLWKANSNGSIPCPRKEKEDCSFSSLDLKCLFPEKLLPELEDRSEKVFWSETFAKELGRTSELCPCFDHSGKIRSDSKKLRQAANREDSSDNYLYCPVATDIQDADLLHFQMHWAKGEPVVVSDTLKLTSGLSWEPMVMWRAVRERTKGKAEDEQFAVRAVDCLDWCEVEINIHMFFMGYTRGRTHPRTYWPEMLKLKDWPPSSSFDQRLPRHGAEFISALPFPEYTDPRYGPLNLAVKLPGGVLKPDLGPKTYIAYGFSEELGRGDSVTKLHCDMSDAVNILTHTAEVPCETYDAVQIKNTQKKMKMQDDMEIYGMIESGSELKPSACPVELGNKAVGEAPKASCSKENVHTLKDKSNGWWRKYTFGLDINASPPDDAGGDARDEALSYESVVHSDVAQCPNHNHETNNSDDARIGAQRCQKKAKGRPPKTGSGVSEHQESGGALWDIFRREDSEKLQDFLRKHAPEFRHIHCNPVKQVIHPIHDQAFYLTAEHKRKLKEEYGVEPWTFEQKLGEAVLIPAGCPHQVRNLKSCIKVALDFVSPENVGECVRLTKEFRRLPSSHRAKEDKLEIKKMAFHALNEVLNFLDPPSSEGSKEAAEKPRRGRGRPRKH

SEQ ID NO: 119588 - protein, 83 aa, Oryza sativa
  Clone ID: PAT_MRT4530_22791C.1.pep
MSLCSIAVGRSRELPSLLANTRVKGVNALLKEISTTMSNIVKRASCWGPPCFSDAFATRDEDGVDVGSQTKCVVPLLVGSGKR

SEQ ID NO: 119589 - protein, 169 aa, Oryza sativa
  Clone ID: PAT_MRT4530_22792C.1.pep
MGRLTCGPPRQRLDEGSSGGHRGAAEPGRGRRAAAARPRQWEDEGNGGGGPRCRSSSSSSWLPAWSPTARRGRGHFQLQLRPLAPFSTGAAGLAAMLAAGAALLVLVCAASLRCSTAPKKLLSGGVSIEEPRAGGGGEECDMFNPLYASRDCPFLDVGFRCSDNDRPDE

SEQ ID NO: 119590 - protein, 46 aa, Oryza sativa
  Clone ID: PAT_MRT4530_22793C.1.pep
MALMYMWKKPCAHMHNVRYHDKEQGKARMEWGEHLTPNGRGGHALI

SEQ ID NO: 119591 - protein, 136 aa, Oryza sativa
  Clone ID: PAT_MRT4530_22794C.1.pep
WRPPPPPADPPPPTPRSLASPSTPPPGIPDLTPLPPMATPPPSTRRRWTSSSRSTGPPSGSSPSTPSPSSPTSPSSPARTSTPPSPSPLSSAPTSSRDRGYWELGPRLLQFPILVMILRGLAGQLLIEVQGGGWML

SEQ ID NO: 119592 - protein, 901 aa, Oryza sativa
  Clone ID: PAT_MRT4530_22795C.1.pep
METSASARRSAAPDPKKPRLAQHPAPRDPRSYPAAANGNAPAVDQAQVDELVAQYRTALGELTFNSKPIITNLTIIAGENLHAAKPIASLICANILEVPSEQKLPSLYLLDSIVKNIGKDYVKHFSARLPEVFCKAYKQVDSSIHNSMRHLFGTWKGVFSPTSLQVIEKELGFQSSTNGSSGAAPSKPDSQSNRPSHSIHGQGILGAGAKTTTISDSGDDIERTSRTAVDRGAGRRLDALNPRTNVQRAQRDPFSNPIHEKQDRDMRVLGFSNISQQAVVGTGLVRAKPKGQDGSGGPYYTAGVGSSEEQFDRRSNFYANKDVRPSGSVRLDGALLPTPVSNSDRIGRPSSNKSWKNSEEEEYMWDDVRSQGADYGGTSSTRKREWIPDDGNTIGQQKNRYWSTSSPPVQSPSASFARQSSPSPVELDYSSKPFSQLGQNSLEDYNQRTHALAQNLALSQGRPNLLGAPSHASQQIEKHPSLLQSKPHLRTLDQPQANFSPENSSSVFKSSIQLPISVGVGHRQPEEVSLSSDSTLMSSDHLSASSLLAGLIKSGFKPNDPNDLASLRAQPPLPSGPPPHVSTSFSAASSSLHLPASDTLKSQAPNSLRPPLPPGLPLSSPFVCPTTQTSEKAAPLSSLLSSLVAKGLISSPSADSTVAIPQQPCKSELNTPDDTASAPSLPFVQPSVKKETSNQNSSAPSKVLVHQPVEIKKEPAEIKMVDLIGFDFKPEMLRKYHAHVISTLFDDQSHQCNTCGLRFSLEEELSVHTACHGSKQSETRKTGIAPEKWYPSKNNWVDRSHEVQNSALESASSVADLSSEEEVCEFMVPADESQIICALCGESFDDIYSIEKDNWMYKDAVYFDSSKTEGSSGDSAESKERVPIVHARCMSISSNDGMEVD

SEQ ID NO: 119593 - protein, 283 aa, Oryza sativa
  Clone ID: PAT_MRT4530_22796C.1.pep
MDLGKSTSTNASLKKLQEDGALPGRGGMEREVGGLNSETVERRVGQLMISGPTTASDIPIPLCEKEVADREAAINVLPLTDVIGPLVDHQAVASLKEGVAQEASNAAAAAAAATSGSRPPRRGRKFTSVLGSRWKASSPTASDVSPPPPRRQKLVTLGEKWARAKAAQDGSGETSSASPTAASTDVVVAPRSREATPHGLSGDLGPVRGPPADVLSWGELQVGMGHLLEAGARGISRDIAEARTVAASACTQLEGVGLRIDEALKQECRRSSRYAGGHVLACI

SEQ ID NO: 119594 - protein, 72 aa, Oryza sativa
  unsure (1)..(72): unsure at all Xaa locations
  Clone ID: PAT_MRT4530_22797C.1.pep
QFXGRFQQTYKHSXPRFFXXKHGTMXXXALVRXPPXATKXIXYLNAKGALXYTDXXGDPVLYXNLPPREIPM

SEQ ID NO: 119595 - protein, 693 aa, Oryza sativa
  Clone ID: PAT_MRT4530_22798C.1.pep
MAGAAVTTAARGYTVLGRYRRREAKARVAAGSGGLGGPFIGVGRRRRRPTVTGDAKERLGFGGKGSIRIELESTDFQTKLADDSKREKIENSDPVFVVPEEQPDKISSWTAKPTLTPALRFFVEAIDDLRVRGLSGYEVAANFVGLNSETVERCVGQLMINSPTTASDIPVPLCEKEAADRETAINVLPLTDVIGPLVDHQAVASLKEGVAQGASNAAAAAASATSGSCPPRRGRKFTSVLGSRRKASSPRREATPHGLSGDLGPVRGPPADVLSWGELQVEIGRLLEAGARGISCEIAEARTAAASSANERADKLERKLVEVREDLQKMRELVAGIERQRRGLEDRMAELESNLSELRGSLRVTFTGLHQLAGQCGVTTTIPANPDEFSLTSSLAELATAMEAIPSKHAARIRKETSNGIYTGACHVLACVKLAHPKLDLQRILEQGATNDARRGVMEEVGDLGESVLPLFEDRRFSFPQHFLSRALVVLCRDVDVEDVQQRGQPESSVILPDLASEEPMSLNDVDEILPARMGTATTSLDLENALADQDHRIQYWKTKFEVAELERAMLEVKKEQAVETLRGREVWFNSYLKSCCTSMARVCRELRVLRGDPEESAAGYISWLNGACTQLEGIGKRIDEALKQECRRSSRYAGGHVLACIRDHRPQLHLEFLHEGFARSRRTPVEIDHLAK

SEQ ID NO: 119596 - protein, 691 aa, Oryza sativa
  unsure (1)..(691): unsure at all Xaa locations
  Clone ID: PAT_MRT4530_22799C.1.pep
SSRRPWQQPCFSRGGDCHRLICRHHGRRRRCQPAGGIRALRPHDRRTLAGGLRRSPCVKSKGYIVNRLWLSGYEVAANFVGRRIQPLQARAHPAFDYSGPEDTTRVSPRGLNSETVERCVGQLMINSPTTASDIPVPLCEKEAADRETAINVLPLTDVIGPLVDHQAVASLKEGVAQGASNAAAAAASATSGSCPPRRGRKFTSVLGSRRKASSPRASDASPPPPRRQKLVTLGEKXARAKAAQDGFGETSSASPAAVSTDVVVAPRSREATPHGLSGDLGPVRGPPADVLSWGELQVEIGRLLEAGARGISCEIAEARTAAASSANERADKLERKLVEGLEDRMAELESNLSELRGSLRVTFTGLHQLAGQCGVTTTIPANPDEFSLTSSLAELATAMEAIPSKHAARIRKETSNGIYTGACHVLACVKLAHPKLDLQRILEQGATNDARRGVMEEVGDLGESVLPLFEEDVDVEDVQQRGQPESSVILPDLASEEPMSLNDVDEILPARMGTATTSLDLENALADQDHRIQYWKTKFEVAELERAMLEVKKEQAVETLRGREVWFNSYLKSCCTSMARVCRELRVLRGDPEESAAGYISWLNGACTQLEGIGKRIDEALKQECRRSSRYAGGHVLACIRDHRPQLHLEFLHEGFARSRRTPVEIDHLAKXMAPLAEKVFQSMDWRWPSW

SEQ ID NO: 119597 - protein, 155 aa, Oryza sativa
  Clone ID: PAT_MRT4530_2279C.1.pep
DAWADAWADAWASPRPPPPPLLPTAAARMPFKRFVEIGRVALVNYGKDYGRLVVIVDVVDQNRALVDAPDMVRCQINFKRLSLTDIKIDIKRVPKKTTLIKAMEEADVKNKWENSSWGKKLIVQKRRASLNDFDRFKRGGAIRQELAKLKKTAAA

SEQ ID NO: 119598 - protein, 508 aa, Oryza sativa
  Clone ID: PAT_MRT4530_227C.1.pep
MEAVRCFVVLCVAVAAALASLGGGAVDAAAAAAAAQEMRRGFSAAHDRSYSQFEQVLSDPTGVFALGFLRVNSTMLDLAVVHLPSSFPLWSSIPDRPAQWSAPASLSFDGDLVLTDPAANKVLWSAGAAAGAGGDRVVLLNTSNLQIQSGGGGGDGGSSPGIVWQSFDAPSETIVQGQNLTSAAALYTSDRRFSMRMGTSYFGLYIEPPASSSGGGGVAAAMYWKHTALQAKAAIVDGGGPTYARVEPDGYLAMYQKEGPPAEVLSFDTFNHGVRALRRMTLEADGNLRAYYWDSTGSRWVLDYTAITDPCGLPSTCGAYAVCVPPSGRCACLANATDGSGCAAANVGGGGGLCGRTGGEVGGLYWEVRRQRVEPANKEFLPFEHSPSAADCEVRCARNCSCWGAVYSNGTGYCYLMDYPAQMMVAADERKVGYFKVRSLEEAAAASGGGRAAGVKAALLAVGVTVLVAAAAFGAYRVWKRRCRRRRQGKGRRRRPLIGRGRPKLRWR

SEQ ID NO: 119599 - protein, 672 aa, Oryza sativa
  Clone ID: PAT_MRT4530_22800C.1.pep
MAPFLAMEPWREKLKIENSDPVFVVPKEQPDKISSWTAKPTLTPALRFFVEAIDDLRVRGLSGYEVAANFVGLNSETVERCVGQLMINGPTTASDIPVPLCEKEAADRETAINVLPLTDVIGPLVDHQAAASLKECVAHGASNAAAAAATATSGSCPPRRGRKFTSVLGSRRKASSPRWARAKAAQDRFGETSSVSPAAVSTDVVVAPRSQEATPHGLSGDLGPVRGPPADVLSWGELQVEMGCLLEASARGISCEIAEARTAAASSANERADKLERKLAEVREDLQKMRELVAGNERQRRGLEDRMAELESNLSELRGSLRVTFTGLHQLAGQCGVTTTIPANPDEFSLTSSLAELATAMEAIPSKHAAWIRKETSNGIYTGACHVLACVKLAHPKLDLQRILEQGATNDARRGVMEEVSDLGESVLSLFEDHRFSFPQHFLSRALVVLCRDVDVEDVQQCGQPESSVILPDLASEGPTSLNDVDEILPARMGTATTFLDLENALADQDRRIQYWKTKFKVAELERAMLEVKKEQAVETLRGREVWFNSYLKSCCTSMARVCRELRVLRGDPEESAAGYISWLNGACTQLEGIGKRIDEALKQECRRSSRYAGGHVLSCIRDHRPQLHLEFLHEGFARSRRTPAEIDHLAKSMAPLAEKVFQSMDWRWPSW

SEQ ID NO: 119600 - protein, 180 aa, Oryza sativa
  Clone ID: PAT_MRT4530_22801C.1.pep
MGGRKDNHDSSNADKGFHGAYPSGYPGAYPLMQGYPNSPGQYPTPGGYPSAPPGQYPPAGGYPGAQYPPSGYPPSQGGYPPGAYPPSGYPQQPGYPPAGYPGHGHGPPMQGGGHGAGASGYGALLAGGAAVAAAAVGAHMVRPGGGGGHGMFGHHGGKFKKGKFKHGKYGKHKKFGRKWK

SEQ ID NO: 119601 - protein, 192 aa, Oryza sativa
  unsure (1)..(192): unsure at all Xaa locations
  Clone ID: PAT_MRT4530_22802C.1.pep
MTIKDQFTGNPXRLTMLTTGGSTGGEGGRDGVGSAGVSGCLAAGFTTAHEGTAHSXVRSGGETLEWCGWLGEGYAKGLVMISPFAVPCSGGWLGLLQHGVALDSDXLILLNXYLNCFTSFNLCSXMPALCKXTFSLLWLYLTSYLLFRYDLLSTMDSSLALXPHTRAEVLASWSFLGEVGFVAAVKLRNSGS

SEQ ID NO: 119602 - protein, 79 aa, Oryza sativa
  Clone ID: PAT_MRT4530_22803C.1.pep
MEEEVPLLKGDYHQGCPGCAYDRKKEVYRGLPYKEFLYLWMICLTAVPYGFGRCSVMSMIPVPVGKSLILYNSRLTGPS

SEQ ID NO: 119603 - protein, 73 aa, Oryza sativa
  unsure (1)..(73): unsure at all Xaa locations
  Clone ID: PAT_MRT4530_22804C.1.pep
FFFFFFLREXGQQGXRERFLXIWAPVKTYAPGLPWVHIKYAARGEIRNLXLHVHTHSPXMVIPRSGQRNFDRR

SEQ ID NO: 119604 - protein, 47 aa, Oryza sativa
  Clone ID: PAT_MRT4530_22805C.1.pep
DRAGVAGASRLVRWRWAEGVGRATARQDSKARASGPEADVRRNGARL

SEQ ID NO: 119605 - protein, 85 aa, Oryza sativa
  Clone ID: PAT_MRT4530_22806C.1.pep
PRVRPRVRPRVRPRVRPRVRINWAEKESHVDEDEMAKVKTAFVGNLPANVTEEYLRKLFEHCGEVVRAAVLWKGQYPVGFCYFVQ

SEQ ID NO: 119606 - protein, 128 aa, Oryza sativa
  Clone ID: PAT_MRT4530_22807C.1.pep
MVFFLNRKLQVKEFHPDVCKDTENADLIMRRVLEAYEILSAHASSQGHYDDYNVQLAVGQCPRKCIYYVTPCQRTILEEILASVLMTPYDLSEAAVLDSLLSKAMFENNRYKKPKRETKSSSDYVDWM

SEQ ID NO: 119607 - protein, 89 aa, Oryza sativa
  Clone ID: PAT_MRT4530_22808C.1.pep
SISTKNDKYMLPAIRVYKFKAEKKNNLMDDFKVSFLKKILYKRQVIQRTKCYMPKFLSFVSKPFLCKTSADLEVRKTCSNFQYSVASEV

SEQ ID NO: 119608 - protein, 70 aa, Oryza sativa
  Clone ID: PAT_MRT4530_22809C.1.pep
LGEMDAPDRPPRPVGVQASGPEDREGSERVHRISKRYVLVEGTLYRRAANGILLKCIPREQGVVLLADIH

SEQ ID NO: 119609 - protein, 232 aa, Oryza sativa
  Clone ID: PAT_MRT4530_2280C.1.pep
MEGEKKSVVLINCAVSMYGNRVRIALARKGVAYEEKPENLAAKSALLLSSNPVHGQVPVLLVGGKPVCESLVILEFIDEEFAGVGEPLLPAGPYERAQARFWASYIDAKLAPCAGRVWRSPAGAAGAAAVEAARGELVAAMRTLEAELGGRRYFGGGGEALGYVDVALAPFTAWFATYERFGGFSVAAECPELAAWAARCVRENACVAASLPDPEFVYQFACGMRKHFGLDG

SEQ ID NO: 119610 - protein, 63 aa, Oryza sativa
  unsure (1)..(63): unsure at all Xaa locations
  Clone ID: PAT_MRT4530_22810C.1.pep
WTMWNLPMFGCTDATXVVKELEEAKKEYLDALVSIMGLDKVRQVXLISFIAYKPSGCEESGGK

SEQ ID NO: 119611 - protein, 267 aa, Oryza sativa
  Clone ID: PAT_MRT4530_22811C.1.pep
MDEGSSPASTSATAAAAAANLESTSFDDGRSHSSKITPIELVVVNPEEPPPASRSRGHGPRRRSWRRRPCPPLAKKAAAEFVGTFILIFAMLSTIVTDAQRGGVEGLVGVAASIGLAVAVLVMSLAHVSGAHINPAVSVAMAAFGRLQPAHLLPYAAAQVLGAVAAAAAVDGIFHPASRGWMVKELIAVAVGGTAMMNVLVAGYACEILLCIYNVLVAGPSTGASMNPARTLGTAIVAGNYTQIWVYMVSTPLGAIAGTGAYFAIKL

SEQ ID NO: 119612 - protein, 69 aa, Oryza sativa
  Clone ID: PAT_MRT4530_22812C.1.pep
MEGVPAAGANASREVGGAAAFPTLTRTNYTQWSLLMKVMLQARGLWHPLEHGECDEQEDRMAMEAMGIL

SEQ ID NO: 119613 - protein, 201 aa, Oryza sativa
  unsure (1)..(201): unsure at all Xaa locations
  Clone ID: PAT_MRT4530_22813C.1.pep
MATIVRERFLMLGDVNAKTTPPRRGTTPNGVVVMPAHGLARLSPVIPSSVTTATASTQATHAGFLLTQTPARHGHVSLRASCIAVHGVTVTPPASPSRRHQHGHAAPHLPSMPSCPRRAVATSCRASPSAPLPTPAXVIFALATKLHRRLRLRLGKHRIHLREHRIRRSLAISSRRGDAPSSRAEDEFRGPPCPRRRLHCH

SEQ ID NO: 119614 - protein, 162 aa, Oryza sativa
  Clone ID: PAT_MRT4530_22814C.1.pep
MATIVRERFLMLGDVNAKTTPPRRGTTPNGVVVMPAHGLARLSPVIPSSVTTATASTQATHAGFLLTQTPARHGHVSLRASCIAVHGVTVTPPASPSRRHQHGHAAPHLPSMPSCPRRAVATSCRASPSAPLPTPAAPRLGLSRGAAAETGSGSSRSSTTAV

SEQ ID NO: 119615 - protein, 291 aa, Oryza sativa
  Clone ID: PAT_MRT4530_22815C.1.pep
MATIVRERFLMLGDVNAKTTPPRRGTTPNGVVVMPAHGLARLSPVIPIQRSTQPSCTTTIVGPPHQPFSTQTQSMTVTPARHGHVSLRASCIAVHGVTVTPPASPSRRHQHGHAAPHLPSMPSCPRRAVATSCRASPSAPLPTPAAPRLGLSRGAAAETGSGSSRSSTTAVIFALATKLHRRLRLRLGKHRIHLREHRIRRSLAISSRRGDAPSSRAEDEFRGPPCPRRRLPGLPPGFLAASSRGGKVSRIGSVVQRDSNQPKDEFSLSSLAVPVGDSHNSVWALGSMAKA

SEQ ID NO: 119616 - protein, 226 aa, Oryza sativa
  Clone ID: PAT_MRT4530_22816C.1.pep
MGLNEKPLVPPLSPTPVDFRAHQVFPSKHHDFDTSKSRNISGSVAIGSDSEEEYLATSLLMLAHGIRDETKDIRGMGDVKGVGVDTLELVKPSQRAYECSVCGKVYWCYQALGGHMTCHRNLFAQVVAGDELSSDRTMVVKGHKCSICRLEFPSGQALGGHMRVHYVGGVEGGSVKEKNVVKTKVTGALKLVLKDFDLNVPVVATMVGDEAESSHSEAKARMMTLP

SEQ ID NO: 119617 - protein, 71 aa, Oryza sativa
  unsure (1)..(71): unsure at all Xaa locations
  Clone ID: PAT_MRT4530_22817C.1.pep
ALSSVSFAFSGAGRIFNGPAFALGHEVIDEIYNXADHVEPWMTGNCRSPSSVLCLLYXWDPMKLTVKQWCA

SEQ ID NO: 119618 - protein, 609 aa, Oryza sativa
  Clone ID: PAT_MRT4530_22818C.1.pep
MDLGKSTSTTVTLKKLQEEGALPGRDKAEREAGVLNFYGLSLLHLNPSSIAFLSVFVHLCEAYIGVEPFLDLFRFYYELRWMEPNRVSGCVGFRLRDGMKLRYVPFQCPSSRSKWRNRWFYLEIKDSNPVLVVPVEQPDKILVWTAKPPLTPSLQSFIDIIDDLRERGLSGYEVVADFVGLSSDGVERRVGQVMISDPTTASDIPVPLCERGAVERDEAINVAASLKEKVVQEASDAATTSGGKAPTKARKFSSVLGNRRKAETPLASDASPPPARRQRIVTIREKEARSKAARGKSGGTSSASPVTASTDVVPVVGSREATPSDSVGDPVGGRGLSEAVLTWEELHVEMGSLLEAGARGVGREVSEARAETAAANARAERLVRELAEAREDLMKMRELVAGNERQSKGLEDRMSELGDNLSEIRGSLRVTYTGLHQLAVECGVKSMIPENPDEFSLTSSLAELASAMGEIPSKHAARIAEETSNGIYTEACHVLACVKLSRPELDLREVLDQGAASDARKEVMEEIGDLGESVLPLFEEDADDEDVQQRGQPESLAMILVLEFEPRASHDVGDETLDAEVEVAATAVGVFRDALATQDRRIQYWKTKF

SEQ ID NO: 119619 - protein, 175 aa, Oryza sativa
  Clone ID: PAT_MRT4530_22819C.1.pep
MHGVLTSPCLRPPPLLRRAFPSPATRLLPPQTLALRPLPLPRGLRSSPPPPRAAAEAAASAVGGLLAPLSTLEVGLRSVNLAPLRAPVAAAMSAVVRWLGVYREVLLVGVLFSWFPNIPWDRQPFSALRDLCDPFLALCREVMPPVFGRKLDLSPLIAFMAIDIIIMILRPQPRM

SEQ ID NO: 119620 - protein, 165 aa, Oryza sativa
  Clone ID: PAT_MRT4530_2281C.1.pep
RSTGPGRLVPLCLSASPRPPPPPLLPTAAARMPFKRFVEIGRVALVNYGKDYGRLVVIVDVVDQNRALVDAPDMVRCQINFKRLSLTDIKIDIKRVPKKTTLIKAMEEADVKNKWENSSWGKKLIVQKRRASLNDFDRFKVMLAKIKRGGAIRQELAKLKKTAAA

SEQ ID NO: 119621 - protein, 72 aa, Oryza sativa
  Clone ID: PAT_MRT4530_22820C.1.pep
ARYRYTQPFIEGRKKKAQSTFTIQLRTRRSFDYICIHRSVMQQIPMLGSYWQMLASKLRVGNLSRHLSTWIP

SEQ ID NO: 119622 - protein, 57 aa, Oryza sativa
  Clone ID: PAT_MRT4530_22821C.1.pep
MEATVFAPHQVAILALPAQDHRVEQEWTRSYGSLTGILNRSTTLGGIESDHGSLMIL

SEQ ID NO: 119623 - protein, 189 aa, Oryza sativa
  Clone ID: PAT_MRT4530_22822C.1.pep
AATPGSGLPAPAAPAPVPPRPSPAARPPRPGRAPVALRPRISWRGGAGASSAPLPPPGGRRLSACCFLTAAAPRVAVGAAFGWLLRLRRGPGCGHQPLFFVLSCPRSPVRGHWSPNHWSLFSFGRFLMPERDSILLKVHGYLLHLRHSSVSEGDFVYGTGRSTASNGELQELFFLEGKFAFIVRTVQEL

SEQ ID NO: 119624 - protein, 80 aa, Oryza sativa
  Clone ID: PAT_MRT4530_22823C.1.pep
TTTSRHDRPPSHHPPPMAASTITTCDYRHVVRFVRLPLRGDASSRWSLCYSYMQVMSMTPNWFSLDPCVSLSPLQDRSSI

SEQ ID NO: 119625 - protein, 89 aa, Oryza sativa
  Clone ID: PAT_MRT4530_22824C.1.pep
RCVADMATKLIADYDGGPPVRSIKAGSCNYILYPGSACFQDTCNTFCQRMQDSATRQRVRLWPLHFPGMRVFISAQIIDVILKGITPVN

SEQ ID NO: 119626 - protein, 130 aa, Oryza sativa
  Clone ID: PAT_MRT4530_22825C.1.pep
MDKPETWHGEGVSYDTCCRDASSSASGAVPMCIIFKASTVRGAHARKGTSNAPPVRIPNDQSVAADSLTPPIGRNLHWQANAFALFGLFLVVVDMGGDKFERCLKILEFWKLRSMNIWTISEQYCLLNDQ

SEQ ID NO: 119627 - protein, 56 aa, Oryza sativa
  Clone ID: PAT_MRT4530_22826C.1.pep
YKVTNKLIRSKLIYIKLVVIFLTNVLFISSQVKYLSRDISRHARNLNYLFFGDNHE

SEQ ID NO: 119628 - protein, 482 aa, Oryza sativa
  Clone ID: PAT_MRT4530_22827C.1.pep
MAYQGIDLLSTKAAGDDHGENSSYFDGWKAYDTNPFDLRHNRGGVIQMGLAENQLSLDLIENEQDHPEASICTPEGVSQFKRIANFQDYHGLPEFRKAMAQFMGQVRGGKATFDPDRVVMSGGATGAQETLAFCLANPGEAFLVPTPYYPAFDRDCCWRSGIKLLPIECHSFNDFRLTKEALVSAYDGARRQGISVKGILITNPSNPLGTITDRDTLAMLATFATEHRVHLVCDEIYAGSVFATPEYVSIAEVIERDVPWCNRDLIHVVYSLSKDIGLPGFRVGIIYSYNDAVVAAARRMSSFGLVSSQTQYFLARMLSDEEFIGRFLQESKCRLVARHERFTSGLREVGIGCLRGNAGLFSWMDLRRMLREKTAEAELELWRVIVHQVKLNVSPGTSFHCREPGWFRVCHANMDDETMEVALGRIHDFVRQHQQRRVKAERWAANRQLRLSLPHHHHLSPAHLSSPLALLSPQSPMVRATS

SEQ ID NO: 119629 - protein, 42 aa, Oryza sativa
  unsure (1)..(42): unsure at all Xaa locations
  Clone ID: PAT_MRT4530_22828C.1.pep
LDASGEYICGDGPGVDLVGRRCPWWSDIMRDTXARVQCTWLV

SEQ ID NO: 119630 - protein, 47 aa, Oryza sativa
  Clone ID: PAT_MRT4530_22829C.1.pep
KEVKLSTRKLGCLGLRLHQCPLGAWPLCASLPFQARACARIFSFKMK

SEQ ID NO: 119631 - protein, 76 aa, Oryza sativa
  Clone ID: PAT_MRT4530_2282C.1.pep
GEGLTRGGPVVFRAWGRVGGPKSFPLFFSTKEIVASPGKGVMLIPYIHGVRFLKVSSSFFLVTPIVVEGPLVRTLA

SEQ ID NO: 119632 - protein, 60 aa, Oryza sativa
  Clone ID: PAT_MRT4530_22830C.1.pep
KFPFDYPRVHGWPRTALIQVQGFNLPIIYSGNPTALGDDDDDPGLNFKGYISKFAQNPYI

SEQ ID NO: 119633 - protein, 76 aa, Oryza sativa
  Clone ID: PAT_MRT4530_22831C.1.pep
NFIKRKKKEGLQVFTRSTLSYRGEVKKSEQGLQVIILSKNVWSGGNFNMLLFLARYWLDSELLRCVADDTDVDNSL

SEQ ID NO: 119634 - protein, 134 aa, Oryza sativa
  Clone ID: PAT_MRT4530_22832C.1.pep
MALNLRSGKSTTSPKDRAMSVERNSGFIRWYQSFRCSKVRNHEKEERDMNDPPIPLFALKLEASPLSEEDIKGKVNGAEINQGESVVNEVNLSIFHVKVEQPLVESNVEIPLSQVDLLAVPCDKEEFYDNASLI

SEQ ID NO: 119635 - protein, 106 aa, Oryza sativa
  unsure (1)..(106): unsure at all Xaa locations
  Clone ID: PAT_MRT4530_22833C.1.pep
YSTSIRFTNLLXENNHKVKENRHQLKRXINRTMSRIRLMHEWAKNSELTRXIGPKFTSLRKRAMEETTCRFWARLGRPMVRPNPPQRRLIQVSPGWLRWLPNDGWW

SEQ ID NO: 119636 - protein, 231 aa, Oryza sativa
  Clone ID: PAT_MRT4530_22834C.1.pep
MNDADVGKQIQQMVRFILQEAEEKASEISVAAEEEFNIEKLQLVESEKRRIRQDYERKAKQVDVGRKIEYSTQLNAARIKVLRAQDGVVGEMKEDAGKSLLRVTKDATAYRKVLKGLIVQSLLRLREPSVVLRCREADRGHVESVLEAAKKEYAEKAKVNLPKILIDGKVYLPPPKTARDAHGPFCSGGVVIASQDGKIVCDNTLDARVEISFKQKLPEIRKKLFSQKVSQ

SEQ ID NO: 119637 - protein, 213 aa, Oryza sativa
  Clone ID: PAT_MRT4530_22835C.1.pep
MGVMQEFNIEKLQLVESEKRRIRQDYERKAKQVDVGRKIEYSTQLNAARIKVLRAQDGVVGEMKEDAGKSLLRVTKDATAYRKVLKGLIVQRKDSEIIDQIQSLLRLREPSVVLRCREADRGHVESVLEAAKKEYAEKAKVNLPKILIDGKVYLPPPKTARDAHGPFCSGGVVIASQDGKIVCDNTLDARVEISFKQKLPEIRKKLFSQKVSQ

SEQ ID NO: 119638 - protein, 84 aa, Oryza sativa
  Clone ID: PAT_MRT4530_22836C.1.pep
MKGGFDRGGGALTEVWSGFCPLQGGKFNHVQNIDPEIKQHAPIPPCIHMVTLTKTNWQRDYYIHIAKINILSTFSILKHVGDDM

SEQ ID NO: 119639 - protein, 35 aa, Oryza sativa
  unsure (1)..(35): unsure at all Xaa locations
  Clone ID: PAT_MRT4530_22837C.1.pep
FFFFFFFFFFFFFFFFFFFFFFFXTGNQLEFKHRE

SEQ ID NO: 119640 - protein, 345 aa, Oryza sativa
  Clone ID: PAT_MRT4530_22838C.1.pep
MSKEEEEREKVTAAAAASEVVVVNGGGGEEEGEGVRALHARVEAEWGPVMQSACQTAAARALWGRAVRDPAAGVLAGGRFLAALRERMRRDEEAGAREVHGVMIAVRTLWFDARVEAAVASLGGAAQVVLLGAGMDARAYRLSCLKECTVFELDFPELLEMKTDLLHEAMSSANNQKLTMMAKSLTRVPADIRDGDWITKLQSYGYVPERNTIWVLEGILYYLHHVHAMQVLETIVACRTSVHTVLLADFMNKNAVSLSRAMYHFYHDSPDLLLPSIGFSQVTLSQIGDPQAHFGLLSHPQNLFDKLRRLPRSVETNPEDGTPCCRLYLVEASAFPDDQITKQGI

SEQ ID NO: 119641 - protein, 73 aa, Oryza sativa
  Clone ID: PAT_MRT4530_22839C.1.pep
DGFVSVRTEKGSTKDDLRLPTDDNLLREIKDGFGEGQDSVATAMPAMAYMLPCDGADFSRKLSYPEPWAQYSY

SEQ ID NO: 119642 - protein, 54 aa, Oryza sativa
  Clone ID: PAT_MRT4530_2283C.1.pep
APPSSNYKDRWRQDMPATEFYIMVNSLYLPAWWEIRPLNRIVTTPLAVFYGVLT

SEQ ID NO: 119643 - protein, 868 aa, Oryza sativa
  Clone ID: PAT_MRT4530_22840C.1.pep
MMVTWPWRALPLAAVLFLFLSPAASVDTVTMEAPLAGNRTIVSAGGTFTLGFFTPDVAPAGRRYLGIWYSNILARTVVWVANRQSPVVGGSPTLKINGNGSLAIVDGQGRVVWASPVMSASVLSAGSAKAQLLDNGNFVLRFASAGVAWQSFDYPTDTLLPGMKLGIDFRTGLDRYMNSWRAADDPSPGEYSFRIDPSGSPEFFLYRWSTRTYGSGPWNGYQFSGVPNLRTNTLLSYQYVSTADEAYYRYEVDDSTTILTRFVMNSSGQIQRLMWIDTTRSWSVFSSYPMDECEAYRACGAYGVCNVEQSPMCGCAEGFEPRYPKAWALRDGSGGCIRRTALNCTGGDGFAVTRNMKLPESANATVDMALGLEECRLSCLSNCACRAYASANVTSADAKGCFMWTADLLDMRQFDNGGQDLFVRLAASDLPTNSVSDNSQTAKLVEIIVPSVVALLLLLAGLVICVIKAKKNRKAIPSALNNGQVTPFGQRNHTASALNNWEITPFWQRNHVAASNDAQDNNSMRPAGQGNHQDLDLPSFVIETILYATNNFSADNKLGQGGFGPVYMGRLDNGQDIAVKRLSRRSTQGLREFKNEVKLIAKLQHRNLVRLLGCCIDGSERMLIYEYMHNRSLNTFLFNEEKQSILNWSKRFNIINGIARGILYLHQDSALRIIHRDLKASNILLDRDMNPKISDFGVARIFGTDQTSAYTKKVVGTYGYMSPEYAMDGVFSMKSDVFSFGVLVLEIVSGKKNRGFYHNELDLNLLRYAWRLWKEGRSLEFLDQSIAGTSSNVTEVLRCIQIGLLCVQEQPRHRPTMSAVTMMLSSESPALLEPCEPAFCTGRSLSDDTEASRSNSARSWTVTVVEGR

SEQ ID NO: 119644 - protein, 246 aa, Oryza sativa
  Clone ID: PAT_MRT4530_22841C.1.pep
MVKEFVQDEEKQRLLLDEHTEKHFTAGEVVRDIIIGVSDGLTVPFALAAGLSGANAPSALVLTAGLAEVAAGAISMGLGGYLAAKSDADHYHRELQREQEEIDTVPDTEAAEIADILSQYGLGPEEYGPVVNSLRSNPKAWLEFMMKFELGLEKPEPRRALMSAGTIALAYVVGGLVPLLPYMFVPTADRAMATSVVVTLAALLFFGYVKGRFTGNRPFISAFQTAVIGALASAAAFGMAKAVQSI

SEQ ID NO: 119645 - protein, 594 aa, Oryza sativa
  Clone ID: PAT_MRT4530_22842C.1.pep
DLLPCVLAAFLLHVLLLEMAMALALSCGRRQRGKKGGGGGGDCGGRHFHVHYHLPRRVCASSFVPNLLPRFFSLLSACVLVPPVLFLAVLAFLVLFLWFTLLYFIRSLWNKDINGETFERSSNDHGSDADKRLGEGVAEEGKAEKKTLKISSEDCARRFEIEEVLHVNSDDSQNLPSMVSSDGCLNCKMHTDDEKLIKEVTVFEIKRRESGAAIVCSDGLSQKRQPRDMSVDWFEEETKSGDIIKSGDSSPTVLSTFSSEFHDFSDNNEVVGLATDFLDVNNQNKAVLLDSSSHRGIMDNHCKCGEEFSSDKEAPAYHLFENYDFVDKHETKEVVLGDTVVLTFVDDLANDDSEYREDISEQKDPNNLSGLLDNVADIFYQQQEIHKVVVSDDNKPPEVLFLSGKQTVSSSGEFSSPNENGTSGFPFDSVCEDKNGTVAYPSVASHYNIGIEDDKCEDHTDNNIEEASSIASTNCGSADKHQTIQVLPVCLANGDNIDDVASLGSSICEDVEDKDNKSNANCISEVMGGTLGQQKTLDAHPNPVLTMKKYLTVWIELSAILSQERKLQLTVIDFEREMELEMLVDLLYSVYYML

SEQ ID NO: 119646 - protein, 62 aa, Oryza sativa
  Clone ID: PAT_MRT4530_22843C.1.pep
MAESLASPATASRTLAGGVRVAAATGGEAATASHDGDADGEIQPSQTSTGQPQVDRWLGSDT

SEQ ID NO: 119647 - protein, 81 aa, Oryza sativa
  Clone ID: PAT_MRT4530_22844C.1.pep
SSTWCSRAMWRGTLRPLPPAASSSGSCGRWSPRPELFQARHQGRRIIVPAPVPEMTRYHDRQCVVTCVHHGSNSKIACMSL

SEQ ID NO: 119648 - protein, 40 aa, Oryza sativa
  Clone ID: PAT_MRT4530_22845C.1.pep
KKLQEKLTFIKTDPGANKGKISFGGIFLRDHLKRGKLNPF

SEQ ID NO: 119649 - protein, 509 aa, Oryza sativa
  unsure (1)..(509): unsure at all Xaa locations
  Clone ID: PAT_MRT4530_22846C.1.pep
MAEIVVAPRAPAPAGRWGAAPPQELVERLKDYGQEGAFALWDELAPEERDFLVRDIERSLDLARIDRIVRCSLRSQGVPLPAVEPVPESSVSTVEDRTPEDKQRWWKRGLKAISEGKLAVVLLAGGQEMKSHISSFSPISDXGTRLGSSDPKGCFKYFWSIGLPSGKSLFQLQAERILCIQKLAAQSTDGTPQIHWYIMTSPFTDEATRKFFESHRYFGLEPDQVTFFQQGTIPCVSADGRFIMETPYKVARAPDGNGGVYAALKSQRLLDDMAGRGVKYVDCYGVDNVLVRVADPTFLGYFIDKGVSAAAKVVRKAYPQEKVGVFVQRGRGGPLSVVEYSEMDAAMTTEINQGTGRLRYCWSNVCLHMFTLDFLNQVTNSLEKDSIYHLAEKKIPSIHGYTAGLKLEQFIFDVFTYSPSTALFEILREEEFAPVKNANGATYDTPDSARLMLLRLHSRWVVAAGGFLTHSVPLYMTGVEVSPLSSYAGENLEAICRGRTFHAPSEISF

SEQ ID NO: 119650 - protein, 153 aa, Oryza sativa
  unsure (1)..(153): unsure at all Xaa locations
  Clone ID: PAT_MRT4530_22847C.1.pep
CLCILLEIPVSIIHSTPYAELIMWVARRQRFPTGLFFHPVMWSSVSAVDGDGLLSTKGYRKTEHLVLGKSEPLVSELCCNYATFGHHISPPYRKMQNGVGRSTCKQXAQGSRSGERVPTTLHLQFSLFPWMHLGIRHYWLLCRDSVLSCAPKR

SEQ ID NO: 119651 - protein, 380 aa, Oryza sativa
  Clone ID: PAT_MRT4530_22848C.1.pep
MAHDEAVATQKIGKTTSPPKDQPTPCPFPDWSAVQAYYGPGVLPPTYFAPAIASGHAPPPYMWGPQPIMPPPFGTPYAAMYPHGGAYPHPLMPMMANPLSMEPAKSASSKEKGSNKKLKEVDGAAVSTGSGDSKKTMTSSGDYSAEGSSDVNDLKVGKTGRKRRLDDGAGAETSAAAKMENALPPSHILGSTAILPNHSFPAQVIRPSATNVANSRALGTPISPPPGVIVPSHTGVSTELLIKDERELKREKRKQSNRESARRSRLRKQAETEDLATQVESLTAENTSLRSEISRLSESSEKLRLENSALMGKLKDPAASTQAETSLQKTTTASSPRVVENFLSMIDNTNKTSVRHTEHAEPKLRQLLGSGPATDVVAAS

SEQ ID NO: 119652 - protein, 617 aa, Oryza sativa
  Clone ID: PAT_MRT4530_22849C.1.pep
DTACRRLTASWVRDRAASDPDSTPLCDFFESFDRAAAAGDLASYMPPGVYTLADLRALGRDRGICPYFLARQMVKYANVVVYSYQYLIDPKVASIVSREMQKECVVVFDEAHNIDNVCIEALSVSIRKQTLEGRFKATDANRLRAEYNRLVDGLAQRGNLPISDAWLANPALPEDILKEAVPGNIRRAEHFLAVLRRLVRFLDGRLETENVENEMPVAFVASIHSQAGIDQKMLRFCYDRLHSLMLTLEITDTDEFMHIQTICDFATLIGTYTRGFSIIIEPYDERMPDIRDPVIQLSCHDASLAIQPVFERFQTVVITSGTLSPIDLYPRLLNFNPVISRSFTMSLTRDCICPMVLTRGSDQLPVSTKFDMRSDPGVVRNYGRLLLEMASAVPDGIVCFFVSYSYMDGIVNSWNEMGILQDIMQHKLVFIETPDVVETTLALDNYRKACDCGRGAIFFSVARGKVAEGIDFDRHYGRLVIMFGVPFQYTLSRILLARLEYLRETFQIKEGDFLTFDALRQAAQCVGRVIRSKADYGMMIFADKRYSRHDKRSKLPGWILSHLHDAHLNLSTDMALHIAREFLRRMAQPYDKTGSGGNKTLLTEEDLQNMAQDAMEM

SEQ ID NO: 119653 - protein, 596 aa, Oryza sativa
  Clone ID: PAT_MRT4530_2284C.1.pep
MGGLCSKVSAVDKSPSDTTLVRDQIVDPEPALTKRAKSPVVEEATAKRVEDQQQSFASLGEHAGQAGSRTPQLARTLSQKAGLGKTKAGAAKVSEVSSLLGRAGTVGLGKAVEVLDTLGSSMSSLNTSSGFISAAKGDKISILAFEVANTIVKGSNLMRALSKTNIKHLKEVVLYSEGVQHLISKDMDELHKIAATDKREELEIFSKEVVRFGNRCKNPQWHSLDRYFEKCSLISALYLMKIGIGTNSSASPERRCRISDAAIDYLCAIYSCDSLHMLKQDVKSQTKHVKSLKKRSLWSKNLEEVMEKLVDIVHFLHLEINNAFGLADSEAPQEPAKHHNRLGPAGLALHYANIINQIDTLVSRSSLIPPTTRDTLYQGLPLTIKSALRSKLQSFELKEELTASQIKAEMEKTLRWLVPIANNTTKSELNCKLSGQMDLTRIETLYHAEKEKVDGHILELVVWLHHLISKSKNANGGVRSPIKSPVRSPTQKGITLMPDKSNSSSPILTQEDKDMLKNVKFRKFVPGISKSQEFDTKSRHSKQIRLIKSNSQSPTSGSRKDMLSLRRSSMLPVIDFQMDRTKALDLIDRLDGLKKQ

SEQ ID NO: 119654 - protein, 46 aa, Oryza sativa
  Clone ID: PAT_MRT4530_22850C.1.pep
AGEGRPGTAGCLACLRTRVNYYVNCCSHLQWHQSHIHGVTPLDRIP

SEQ ID NO: 119655 - protein, 175 aa, Oryza sativa
  Clone ID: PAT_MRT4530_22851C.1.pep
MRLLVPAAAAGGGGGGGGAVGLEERSDAAEDSLVSVLAVYDGFCNLKQINLELKVCGGSSIRKTLVKEAASYGAAHLILGVAKNSLSFSRSSSISVAKYCAKRVPTGCSVLAVNNGKILFHKDAVQQEPYHSASTMTETPRRSYRKLLTSVIGEKLRDECEQDNRSIFRAVTMPP

SEQ ID NO: 119656 - protein, 759 aa, Oryza sativa
  unsure (1)..(759): unsure at all Xaa locations
  Clone ID: PAT_MRT4530_22852C.1.pep
MAAAIAVVYLSLLLLLLDGAAPAVLGYTRGDFPEDFVFGSATSSYQYEGGFDEDGRSPSNWDIFTHQGRMPGRSTADVAADGYHKYKDDLKLMVDTNLEAYRLSISWSRIIPNGRGDVNPKGLQYYNDIIDGLVKNGIQVHIMLYQLDLPQVLEDEYDGWLSPRILEDFKAYADVCFKEFGDRVAHWITIDEPNVASIGSYDSGQLAPGRCSDPFGIRKCTVGNSSVEPYIAVHNMLLAHASVTKLYREKYQSCGALSRVLRPLVFGDYPQVMKNIVGSRLPSFTKAQSEDVKGSLDFIGMNHYYSLYVNDRPLGKGTRDFVADISIYYRGSKTDPPPGYGSSNDTVHDNDRVDYLKSYIGSILTALRNGANVKGYFVWSFVNVFEYLTGYGXSYGLYRVDFADESRPRQARLSARWYSGFLKNRELDVDQSKFKKNQTEFLTKFDQIFSGIWAGRPASACNLHTTTYTLMHPQETNVDESIYALHRSPYPPRGFHLPPTPPNKHYSLRFTMRAIVEELAGFGVRVHTCSRHDADLQDCLRRWNAAGEGGGAAALVTGSVCDVSVRGDWEALVAAARAALGGRLDMLVNNAGQVVVGPAAETAPEEYARLMATNLESCFHLAQLAHPLLLGAGGAAASVVNISSVAGFIAYPALSVYSATKGAMNQLTRSLAAEWARDGIRVNCVAPGGVRTDIAGSSGVALEPGAARAMEEREAARVVMGRIGEPEEVASLVAFLCMPAAPYITGQVICVDGGRTITA

SEQ ID NO: 119657 - protein, 120 aa, Oryza sativa
  unsure (1)..(120): unsure at all Xaa locations
  Clone ID: PAT_MRT4530_22853C.1.pep
WIYSGATIXHACNCLKAFRSTRTTQRSERSIRVANEAKVEAVGDLXLELVNGFTLLLRDVFYVPSLQRNLISVSKLDFDGYDCHFGNGKFELWYNNACIGLAVLSSSARGFLVLGEPLWR

SEQ ID NO: 119658 - protein, 51 aa, Oryza sativa
  Clone ID: PAT_MRT4530_22854C.1.pep
KFRVIRYREHVQFFCRIRLVKLAAKGHKDNHKLFRTCISVCVNKGFASTSQ

SEQ ID NO: 119659 - protein, 128 aa, Oryza sativa
  Clone ID: PAT_MRT4530_22855C.1.pep
TTQLICSPGVSCSRRHPGRVTALNLFKLSLSGTISSSLGNLTFLKALNFSSNHFSGKLPPLNHLHRLKVLDLRHNSLRDTIPEGLANCSRLRVLDLSSNSLVGEIPTKLGLLTNLSSLCLSNNSFTGT

SEQ ID NO: 119660 - protein, 646 aa, Oryza sativa
  Clone ID: PAT_MRT4530_22856C.1.pep
MAEPALLDPTAAFDLRLYPAHLFDHELPLAGGGGGDDDDDLPLDGLEFDLPGDFSVEDFLLRSPERDDSGEGSAAGSGPTASPSSSPTTSASNSAVANGSGGEVKHEESDEGRSGGGDPKWSLKRKQASPGPSSDAAKCRRSGDGDVSPSASASRTAVDSDEGGTVCEEEEDERRAARLMRNRESAQLSRQRKKRYVEELEEKVKSMHSVINDLNSRISFVVAENATLRQQLSGGSVNCPPPGVYPPAPIPGMHFPWMPGYAMRPPGSHVPLVPIPRLKPQQPVPSSKVVKKPESKKTVENKSKSKTKTKKVASVSLLGLLLIMLVFGAFIPGFNHNFGMCGQSDNAMFRNFGQSHARVLSVSSQDKSSLNNSDMIGVDVGKMTGNTDGPGKKHQPAHNSSEILPALLYVPRNGKHVKINGNLIIHSVLASEKAVAHKASKDDSDQSARDHKETSVAIARYLSLPGKDVNRQETSSADGPLPQWFREGMEGPILNSGMCSEVFQFDISTASSNPGGIIPASPVVNSSSVNATEKIPAHSAAYHGKLKNRRVMYNEAIPLTGKTANNTEPFNRTSESSSKLPDSKPASSVVVSVLADPREAGNGDGDPRVSPKPLSKIFVVVLVDGVRYVTYSCTLPFKSSSPHLVN

SEQ ID NO: 119661 - protein, 377 aa, Oryza sativa
  Clone ID: PAT_MRT4530_22857C.1.pep
MAASGVKRPPRPAPASSGGKLFVIFELNMEEVPRVRKLILALAVFLPALLYSQLQPPPPKICGSPGGPPITGTRTRLKDGRYLAYLESGVPKEQAKYKIIFVHGFDSCRYDALPISPELAQELGIYQLSFDRPGYAESDPNLASTEKSIALDIEELADNLQLGPKFYLMGFSMGGEIMWSCLKHISHRLAGVAILAPVGNYWWSGLPSNMSWHVWNQQLPQDKWAVWVSHHLPWLTYWWNSQKLFPASSVIAYNPALFSEGDKLLLSKFAFRTYMPQIRQQGEYGCLHRDMTVGFGKWSWSPLELEDPFAGGEGKVHLWHGAEDLIVPVSLSRYLSEKLPWVVYHELPKSGHMFPLADGMADTIVKSLLLGDQPPQA

SEQ ID NO: 119662 - protein, 108 aa, Oryza sativa
  unsure (1)..(108): unsure at all Xaa locations
  Clone ID: PAT_MRT4530_22858C.1.pep
ALCLETHRCFIGVLADKLSGRCIGLQGLHPIGFYWTILLLXLYYQQSIAFIXLFISSVRIYIRIIADSSKPYPNRLGQTDWHARISSTFGPVLKLSRSLRPVCVFRIN

SEQ ID NO: 119663 - protein, 139 aa, Oryza sativa
  Clone ID: PAT_MRT4530_22859C.1.pep
MPSGCRRLRRAAGRATPSGGRGCDLQRRPNEDFSFSSPSQQFHHSHGVPMQQQQRASSTPMGTPPTPPLSTSSTAAGAGHDLFEAAEGSAKERESEATRRDGGAATDGNAATPRRCIGRGSGESIWPALGMWLWLARFS

SEQ ID NO: 119664 - protein, 83 aa, Oryza sativa
  unsure (1)..(83): unsure at all Xaa locations
  Clone ID: PAT_MRT4530_2285C.1.pep
AKEGISFAKQVFFLSHXRQIGNGSAPVLACHASHISVKFPKLVTKMPTPSAKDMDKGHEFVMTVVGGMVTPSTHKYMVVDTFS

SEQ ID NO: 119665 - protein, 93 aa, Oryza sativa
  unsure (1)..(93): unsure at all Xaa locations
  Clone ID: PAT_MRT4530_22860C.1.pep
LRLHRWPVSVAADWCLXHGWCAPPSLLTAISSSSTGRLVCRRLVSXWFLHFHGCMILPVLIGLIVFIAGRLVDIVIFIMSVAFVVLDYFLHLH

SEQ ID NO: 119666 - protein, 301 aa, Oryza sativa
  Clone ID: PAT_MRT4530_22861C.1.pep
MAIGGDAASMVAVGLVWGTTNALMRRGALVWDHRLRSLPATSSSVTGVLRRWAELLLTWQYSAPFAVNLAASAAFFSLLGAAPISVAVPVTNATTFAATAVAAALLGEGTRAAPAALGTALIVLGVWLLEMMNELWSNLFSTVAVLGILEIEQTKCEPVSASDSWNSMISVDESSEEDPNAVYKCNMYCNLEKAGNNFDMQQVISWRAHMHLLPPSWTHLAGWMARIDDQQAPPPMDYGCLIIRVKAEEKSQIHNSQLPAGMGRQHAWLMVLGSYHPKIQSEMFAAASANSSTWADGHMAA

SEQ ID NO: 119667 - protein, 79 aa, Oryza sativa
  unsure (1)..(79): unsure at all Xaa locations
  Clone ID: PAT_MRT4530_22862C.1.pep
VPAERWETGVSWARCTRSAELSLAAFSDDVADDVRSLLRRYKXGWLMRDYGSDMDNAAAAGAFLAWKEQPVVWTSAWMP

SEQ ID NO: 119668 - protein, 77 aa, Oryza sativa
  Clone ID: PAT_MRT4530_22863C.1.pep
INLFSLPIIVWVLMIFCMQEKKIAESVCYNLLSNPFCCSFCCIVPSTSFVCGSFWSWCILISVLSMSVNNATHHIHS

SEQ ID NO: 119669 - protein, 135 aa, Oryza sativa
  Clone ID: PAT_MRT4530_22864C.1.pep
MVATTLEERNRDWEMWLTMARWNQRASYGDVEDGGHRETMRELCSLLHARCPRAHLFIHVRHHHRRTPCPHCPSLPTCFYSSSGYLLSPSAHVVRVAELRLNNFRNNLSPFPAVDLEVAAEEGGKAEIGGGGGDN

SEQ ID NO: 119670 - protein, 294 aa, Oryza sativa
  Clone ID: PAT_MRT4530_22865C.1.pep
MFIVFYHKYISDTAIKKINSTLDDPFTRFLEPEKFKSLRCYLSKLFPYIFARGPEGSSVDLDIRSGSNTRHVVLKRQTVTLNPVRSRMCEIPGAKDNSKVGYIKLTTFNQNAAGSVKEALQKLRENNVKSFVLDLRNNSGGLFPEGIEIAKIWMDKGVIVYICDSQGVRDIYEADGISTVAASEPLVVLVNKGTASASEILAGALKDNKRAVIYGEPTYGKGKIQSVFALSDGSGLAVTVARYETPAHTDIDKVGVIPDRPLPASFPTDEDGFCSCLRDSNSACNLNAAQLFTR

SEQ ID NO: 119671 - protein, 670 aa, Oryza sativa
  Clone ID: PAT_MRT4530_22866C.1.pep
MERVEDPDLEDPNPDVGELFSHYDGLYFRGALAGAGFSVQWSSPPSRMAGSFGSCTFGKPDNTITLSETVLKYRSSIDMKNALLHQMIHAILFVKHHRKDCRGHGPIFRAWMTAINTCSIDDHQRPPDGYNITTRHDFSPDKSTRSLSGFLWKCEYCGNTLVRATNIGAPSDACCIENVDNCSTCGNMLCHWHNHKMNCGGTYTKMGTSTSAEVQNNVQGTKRCPTDMKMAKSQRTIRKPESPDSDGLQEKATVMKQKAEGELLALVAGSNLKLTGSNSSKKGVKRHRPEDTQDTNAMLSTPLKNLKLGLDLVSSGKHRVSSIVGSNNTKSSRGSASRKQRKRHSPENVQKSSVLPALSQKKLKLKEDLVVSGKNEPLSLVNFSNGKSAGSNSSKKVSKQHELEGVQKSCVQPASPPRKPRQDLVASVKTEISCLASRSDAKVLRGSSSKCAGNQHEPADIQKSIALPSASESKLKRQNEISSSTKAGMQDKPRGTQKTIDLPASPQTKLKQSVLQKQKRQCGTRKSANEQFAVISAWLNYYESEGSSGSTEPLVNKRTERRRIARNRITYTRSRKQNARGNASIKSQPSEDDSSQAKAAAPCLEIVVSTPSEQVVNQSPGCQSQSPAPYLAIVPFDAAHDMVPLQSADPPGLTDDPTITSGIIDISDDD

SEQ ID NO: 119672 - protein, 57 aa, Oryza sativa
  Clone ID: PAT_MRT4530_22867C.1.pep
PRLKKSKNGPPPMLSMLGFLVQAMVTGKGPLKNLADPLADPVKNNAWGYATNLVPGK

SEQ ID NO: 119673 - protein, 96 aa, Oryza sativa
  Clone ID: PAT_MRT4530_22868C.1.pep
WVFLIFWFFFFFFFFFFFFFFFFFFLANTGNLFRNLFPKTKNVLGPGVGKKWNKKNPLFFRGEPTLVSDHPKRWGPPACFKKPCKEKFFWFKKKTG

SEQ ID NO: 119674 - protein, 77 aa, Oryza sativa
  Clone ID: PAT_MRT4530_22869C.1.pep
YIHVYGTRTYIYWTVYTHAHFPAETHIVCNLASLAEGDASPWQHGGGGPHLPATKLVGDAQALLFTEITRSTTRFSR

SEQ ID NO: 119675 - protein, 32 aa, Oryza sativa
  Clone ID: PAT_MRT4530_2286C.1.pep
MKLVLIIKVIPKKKTVEIQFTTIPYYNSKIHP

SEQ ID NO: 119676 - protein, 61 aa, Oryza sativa
  Clone ID: PAT_MRT4530_22870C.1.pep
MQAKLLHLLSIHAATVLVPTVASLPRIGDGTVSAPLRLYGQWLPPLRASAGGGATHSRAAG

SEQ ID NO: 119677 - protein, 133 aa, Oryza sativa
  unsure (1)..(133): unsure at all Xaa locations
  Clone ID: PAT_MRT4530_22871C.1.pep
WQAAGNKRIHLHRPRDRRSGKDGGPEAAARMAARVARRRARTWPGSGGGGEDGSTHGAAARTHAARGRRWRRGRRRGXTRTAAHTHVDRARRRRRSALRISSXYSKARAVVVTGGFKLGITASQYASRSKTSQ

SEQ ID NO: 119678 - protein, 114 aa, Oryza sativa
  unsure (1)..(114): unsure at all Xaa locations
  Clone ID: PAT_MRT4530_22872C.1.pep
GRPRARRVAAAWGPAVSRPCPRAYYAAVQGRLRFRHHSASSIADWLCRRXCCYTAIDWITDIVIFVNILSSLFNIAYSTAIDGQLRHYSRSSLLLLIIITVGLVCRRRIFSSSS

SEQ ID NO: 119679 - protein, 79 aa, Oryza sativa
  Clone ID: PAT_MRT4530_22873C.1.pep
LPETLSSASASLQYFLIEQCPLLRELPNFMQHLCNDTDHQRVFIKDCPAINSRWVKEDYHLSSCRSNKACARKQPRKEY

SEQ ID NO: 119680 - protein, 34 aa, Oryza sativa
  Clone ID: PAT_MRT4530_22874C.1.pep
ARREDRRGRGERYGQVLLLSRPRLMCCCTSPTSA

SEQ ID NO: 119681 - protein, 80 aa, Oryza sativa
  Clone ID: PAT_MRT4530_22875C.1.pep
MDSGGGGGGGALRPSALDLVAALLTGRGRPEEEGWPPSLAENRQLMSLLTTSLAMLGRWRDPLLVRRCYISGPGVRAHEL

SEQ ID NO: 119682 - protein, 96 aa, Oryza sativa
  Clone ID: PAT_MRT4530_22876C.1.pep
KCLKSVPVSHSTGGIGGRWPAGGGPPAREDEDGAGRLSDSRCEGGHMRRTWRSRRKMAAATAEAAMEDFQATKASADGGVCSAWKRRRWAPLYGGV

SEQ ID NO: 119683 - protein, 79 aa, Oryza sativa
  unsure (1)..(79): unsure at all Xaa locations
  Clone ID: PAT_MRT4530_22877C.1.pep
LSTSDRCVFILAFGPFSTLPLGNFQKNARFGAPKLGXLLPPVSGCCPPPVVDEPTGACRRLIHRKDFGGSYRSRKPLCS

SEQ ID NO: 119684 - protein, 240 aa, Oryza sativa
  Clone ID: PAT_MRT4530_22878C.1.pep
MASERPLPPPTSLLLPPTQPESAHPRRLPRFLPRGQPLPPGARPIGRVAAGGGGVHHGADVGGHKTSVGVSLHHLEQLRRVKAVVCLRSSGIDWMLAGSNITCSCGSNLKEHFTKLLEVMQAEADAGLVPNGCRPAVAILAAADAVNDDVLALVVFKSGVSDPGGLLAPWSEDADRACAWPRVSCDARTGRVDVVALPAVGFFGRLPRSALLRRPSVVAPEREERGERREERDGQRGDWE

SEQ ID NO: 119685 - protein, 92 aa, Oryza sativa
  Clone ID: PAT_MRT4530_22879C.1.pep
VQALCCTLTHLWRPLRIPDTTYAYSPTDPYRYLLMYNFMECVRNCNEAMEKDRELRAYSKLLVRALMRICVSLNQDYACVMDYNPTIMALQY

SEQ ID NO: 119686 - protein, 74 aa, Oryza sativa
  Clone ID: PAT_MRT4530_2287C.1.pep
MENSRDTRTAVEAATATFGRRIGSGGGGAWTMDQQRGQRGVGADGGCGIVADGGGGGDVFLAAEGAASRMEGAK

SEQ ID NO: 119687 - protein, 90 aa, Oryza sativa
  Clone ID: PAT_MRT4530_22880C.1.pep
ITLKIPVHNQIRKQWLKARLKVTFSNRDASNVWSEYRAVTTGRWSKVDKYNTQFIAIQILTSKLKNYELIRAHLIVTMINHVYTALFKWM

SEQ ID NO: 119688 - protein, 416 aa, Oryza sativa
  unsure (1)..(416): unsure at all Xaa locations
  Clone ID: PAT_MRT4530_22881C.1.pep
MRLVNLNGLRFKQLKLVCLALLVVLLTWKWEKGSLRNRGELLRSEPLALSHPVQSKYIDHDISKEEIFSSLDPLVQLVDEVGREATAASPPQSVVHEAENVTGKREASPPEKKECDYRNGRWVPDDSRPLYSGLSCKKWLSDSWACRLTQRKDFAYEKFRWQPEGCDMPEFQASQFLKRMQDKTIAFVGDSLGRQMFQSMMCMLTGGDDHSHVEDVGKRYSLVVARHAKRPKGWAYRFRRTNTTILYYWSATLCDLEPLRRSDQATGYAMHLDRPPAFLQKNLHRFHVIILNTGHHWNRGKMKANRWQMYVSGAPSHDRDIAVIWKAKNFTIHNVVRWLDDELPRYPHLRXFYRSLSPRHFFNGEFGVSEXSDDAEAEEAVRGTAIKLLHITAISRLRDEGHISREIYYMVSGYRI

SEQ ID NO: 119689 - protein, 377 aa, Oryza sativa
  unsure (1)..(377): unsure at all Xaa locations
  Clone ID: PAT_MRT4530_22882C.1.pep
MRLVNLNGLGLKQLKLVCLALFVVLLTWKWEKGSLRNRGELLRSEPLALSHPVQSNYVDHDISKEEIFSSLGPLVQSVDEVGREATAASPPQSVVHEAENVTGKREASPPEKKECDYRNGRWVPDDRRPLYSGLSCKKWLSDSWACRLTQRKDFAYEKFRWQPEGCDMPEFQASQFLTRXICSGSDQATGYAMHLDRPPAFLQKNLHRFHVIILNTGHHWNRGKMKANRWQMYVSGVPSHDRDIAVIWKAKNFTIHNVVRWLDDQLPRHPHLKVFYRSLSPRHFFNGEWNTGGTCDNKDPLSKGNSVFRNRSDDAEAEGAVRGTGIKFLDITAISRLRDEGHISRYSIKGRGGVQDCLHWCLPGVPDTWNEILAAQL

SEQ ID NO: 119690 - protein, 53 aa, Oryza sativa
  Clone ID: PAT_MRT4530_22883C.1.pep
GIKLLDITAISRLRDEGHISRYSIRGRGGVQDCLHWCLPGVPDTWNEILAAQL

SEQ ID NO: 119691 - protein, 111 aa, Oryza sativa
  Clone ID: PAT_MRT4530_22884C.1.pep
PPLPIAGAVPVIAHIKSKIHHVITFRSQGNASSPPLVLLPLLYPHLDLHIYYCYHYMFYATSTGPVNTPSLYCTVPDQTITCCNVTVCYNIMSAGTPCRQKKKKKKLEGGP

SEQ ID NO: 119692 - protein, 349 aa, Oryza sativa
  Clone ID: PAT_MRT4530_22885C.1.pep
MESTLGHSRRFLNLIVGMSGVKSLCCIDLMHQPLFNPTTPTTQPPNGNGSQSVPQTPAALMMEQLVVPASSFSFQASPSAPNYDQRKIECFPLTGRQDWGSSLFVIERFPKSEVSYQVEAFVYRHPSPARYSRTWHCELLPPPPYLHEPNKYNRRLEICSYAALGSSSICISVNGISTYRLNIATQTWEEVGKWTLPFHGKVEYVPELNLWFGLSAESHHLAAADLSSLELDSQPQLLVGPWKELHLPEEWKECEDSQLVSLGFGKFCVARFLHPNDRIHKGELGDEELSSQNCITVLTGVEVVPRVPNANVNSNSSGSVSSNGISELRMIPHKSRCHTSNGTIVHTVF

SEQ ID NO: 119693 - protein, 114 aa, Oryza sativa
  Clone ID: PAT_MRT4530_22886C.1.pep
WACSTTGVSRRTVRGNDGYGRFCPWRDEASLESIRRPKYQHREMRTIKNHDRVCSIQRYRHLRNLTQFTPSNSTFSITTTRNIIHRWEIWPLGFRLEAGPAGTRSLGFWRMTRV

SEQ ID NO: 119694 - protein, 123 aa, Oryza sativa
  unsure (1)..(123): unsure at all Xaa locations
  Clone ID: PAT_MRT4530_22887C.1.pep
NECIMPRGKXERFNYCHSSCRNVIKRSFGVLKNKWRILFHLASYSQKKQSKIIVACXIVLHNFIKDSQLADTEFNHCDQDENYDPLAGKMSSPSNDATDYLDSQVMNQYRDWVADGLWSLNQM

SEQ ID NO: 119695 - protein, 41 aa, Oryza sativa
  Clone ID: PAT_MRT4530_22888C.1.pep
MARGVHRYLHQEDVGEVTCGFSGEIGIRKELASDSLAGEVV

SEQ ID NO: 119696 - protein, 109 aa, Oryza sativa
  Clone ID: PAT_MRT4530_22889C.1.pep
MTVNPAAVDLAMGSSSAADLALGSSTTANPAGSPPRAHVDLAVGRVLATARASALTSSRPSSTKTKPVCSSLRRLWLRAANRDFAYRMMLAVLFLCSDSDTPVKHGCGN

SEQ ID NO: 119697 - protein, 106 aa, Oryza sativa
  Clone ID: PAT_MRT4530_2288C.1.pep
LASGSSQSLAGSLSRSPLAPARLGSRGGGGGAAWRRGRGTPVWGGRRAWAAATATGAAASSGPTSRDGDGLRSQEARKHGGVVRADDRRMRVRVDTDRASLAHAHQ

SEQ ID NO: 119698 - protein, 51 aa, Oryza sativa
  Clone ID: PAT_MRT4530_22890C.1.pep
MSCASSRLDELVRPILLDGLVPDLRGIFLSRESLNQPNSLIPKPNTPKNGT

SEQ ID NO: 119699 - protein, 613 aa, Oryza sativa
  Clone ID: PAT_MRT4530_22891C.1.pep
MGSSARLPPSLSVACGSGGRVAAASGAQQLRDGAGARSYATTDDDAPEPVNPAARSLASYSGHAIAAKRSRRIVGCDGEYHRRHPRSAVFQKSSVPKSMAIFIGCICSLALLLLCSHVFQLLSDARRRLPPGPRPLPVIGNLLDVAGELPHRSLACVAERYGPLVTLRLGTMLAVVASSPATARDVLHRHGASITDRGTPDAWSTDGHDGNSIFAFPTRHHRWRALRRLGAEQLFSPRRVEEQRPLRRDAVRGLLRHVAELAAASGGGGAAVVDVGRAAFAAMASLLFGALFSAGIDAATSCRFRDAAREFALLTMTPNVSEFFPVVAMADLQGLRRRTARHITWMYQLIDGHVERRMRGRETAGGCGAAHGEKEKDLLDVMLDMSEKEEQNDDSSLTMNRGVIRAFMADLLMAGSETSSAVIEWAMAELLQNPQTMTKLQEELKKVIGSKTCIDEEDIDQLPYLQAVIKETHRLHPAIPLLMYKAAVPVEIQGYKIPKETTVIVNTWAIHQNSEVWIEPDKFIPERFLQKEISLSSGSTNMELIPFSAGRRFCLGYPVANRMLHVMLASLVHQFQWTLPEVVKKNGGVDMAEKFGITLSMATPLHAIAKNIV

SEQ ID NO: 119700 - protein, 66 aa, Oryza sativa
  unsure (1)..(66): unsure at all Xaa locations
  Clone ID: PAT_MRT4530_22892C.1.pep
CLGKSLPQRLMVSXDQINWHANTPEGELWTCTGVKQISQASCFSSTPRRRHRVTRRLDAAHGRCPA

SEQ ID NO: 119701 - protein, 42 aa, Oryza sativa
  Clone ID: PAT_MRT4530_22893C.1.pep
MDGAATHGKGEETATQATAGNRKRRETHRKGKRGAGMGKQKG

SEQ ID NO: 119702 - protein, 105 aa, Oryza sativa
  Clone ID: PAT_MRT4530_22894C.1.pep
LETVTGKKPAGSEFRQGLSLREYVKSGLEDEVMEIVDMRLCMDLTNGIPTGNDATYKRKVECIVLLLKLGMSCSQELPSSRSSTGDIVKELLAIKESLSGDEHKM

SEQ ID NO: 119703 - protein, 197 aa, Oryza sativa
  Clone ID: PAT_MRT4530_22895C.1.pep
LPGRQAVADLAKIASSLLPPEAAEAEAAGFTEEAVAFARDAATRPELWLDFPLLPDDDDDFDMTDAQQDHALAVESVAPELADLRIELCPSHMSEGCFWKIYFVLLHPKLSKDDADLLSTPQILEARKKLSHNLQSESKPDSNEDMVAASSSNIDGNVPSPVEVVGILKNEDESARAESFNNNFLLTLTRNFGNAMG

SEQ ID NO: 119704 - protein, 88 aa, Oryza sativa
  unsure (1)..(88): unsure at all Xaa locations
  Clone ID: PAT_MRT4530_22896C.1.pep
PASAAWXKNKKNKKRKKKKKKKKKEKKKKKKKKKGKKKKKKKRKKKKKKKKKKKKKKKKKKKGGRFLRVQILFPLVCKFLFFFLCPLI

SEQ ID NO: 119705 - protein, 236 aa, Oryza sativa
  Clone ID: PAT_MRT4530_22897C.1.pep
SSKSSHCGSSGSETRVVPSGTRLSVARFTVRREHAARARIWGRDAVHARGSRGCGCGGPTRSLMAHGGPRARAGQRGAADRGRLDPVLAELAPTWRLRGCHTGRREVEDGAGQNGRRTAATNGGANHGDTGGSGHTGWLHETRGDDPTARIRRRELDGGGLRRRQPSAREGGNGDGATGGRFGRARASTRLRESVSSVRLDGDTTREAGDVWALPSTGGDGGEHTASGGNGRGGAS

SEQ ID NO: 119706 - protein, 34 aa, Oryza sativa
  Clone ID: PAT_MRT4530_22898C.1.pep
MAVNGDHRGARWLRASTVAQGGWRRRKTTPNGGT

SEQ ID NO: 119707 - protein, 77 aa, Oryza sativa
  unsure (1)..(77): unsure at all Xaa locations
  Clone ID: PAT_MRT4530_22899C.1.pep
GRGRFRGGSRWGIPGWPTGCPPFGAPGSRRPGFAPEPRRPAPFXXGGVIPEEGGSSSVPPPFLRVGFLLGKGKGVIP

SEQ ID NO: 119708 - protein, 508 aa, Oryza sativa
  Clone ID: PAT_MRT4530_2289C.1.pep
METAELCCLLALLPLVYCLLTLFHGSRESDLRLPPGPWRLPLIGSLHHLFGRTLPHRALRDLARLHGPLMLLSFGQAAPVVIASTAIAAREIMRTHDDNFSTRPLSTVLKVCTRYGAGMTFVPYGEHWLQVRKICSLELLSPRRILKFRSIREEEVARLVLAIASSSTPTPTPPAPVNLSKLLSNYMTDATVHIIMGQCFRDRDTLVRYVDEAVRLASSLTMADLFPSWRLPRVMCATTLHRAEVFVESVMEFMDRVISEHLEKRSCQGGDREEDLIDVLLRLQAEGNLEFELSTSIIKAIIFELLAGGSEAPITTLQWAMAELMRNPDVMSRAQAEVREAYKEKMKVTEEGLTNLPYLHCIIKETLRLHTPGPFVLPRKCQEQCQILSYDVPKRATVVVNIWAICRDAEIWDEPEKFMPDRFEGSAIEHKGNHFEFIPFGAGRRICPGMNFALANMELALASLLFYFDWSLPEDVLPGDLDMTETMGLTARRKEDLYVCAIPFVQLP

SEQ ID NO: 119709 - protein, 44 aa, Oryza sativa
  unsure (1)..(44): unsure at all Xaa locations
  Clone ID: PAT_MRT4530_228C.1.pep
FVTQYPLTHIAEVRFHWTGGHTAYHXRRITPRGRLTKKCIPSAL

SEQ ID NO: 119710 - protein, 70 aa, Oryza sativa
  Clone ID: PAT_MRT4530_22900C.1.pep
TPSVTAVFANGVTTTPLHGVCPRLLFPSVHSSNQVFPPADLPLVSVLSSAVQGTESVSWPMAILYRSQAS

SEQ ID NO: 119711 - protein, 69 aa, Oryza sativa
  Clone ID: PAT_MRT4530_22901C.1.pep
LQQKCMCGCAYSCSQSPRMFSSNINAFQAMACVNQSNSSETCSFAFWPRYDVFSDAFVATSFSVHSFAR

SEQ ID NO: 119712 - protein, 54 aa, Oryza sativa
  Clone ID: PAT_MRT4530_22902C.1.pep
MATTTGTYGRDPIGASDFAAHGTTSRPPGASSSMAPTRRRVPPGCRLPFSPPAT

SEQ ID NO: 119713 - protein, 51 aa, Oryza sativa
  Clone ID: PAT_MRT4530_22903C.1.pep
KGFLSLPPVGPIILFTSLLIWDFFYQTRYKAGFLMWVQHTLIHPFRSQALI

SEQ ID NO: 119714 - protein, 181 aa, Oryza sativa
  unsure (1)..(181): unsure at all Xaa locations
  Clone ID: PAT_MRT4530_22904C.1.pep
FFFFFFLGRKAVRTLDVRKDGPVGDENASVDENRRKRKRGHTAGASFVLTAMGDAGQCASFNSKPAKGKQVTVDATQKKQAQRAAQAWETLPEFPWARATQVNIRXQVVEAPPKXSIPSRWQEGFSTLTREMLKKQRRMENXRNIRVGTSRPGLQLPTLAENKSMVTIYFISSHGILRANF

SEQ ID NO: 119715 - protein, 221 aa, Oryza sativa
  Clone ID: PAT_MRT4530_22905C.1.pep
MFVVVHYIELLGIELVLVLVVVSKSVSTIEGHFSHVPNVTSRLASLPLMYSLRLASSGSTGLGFALGRLGGRSGGGGGGGGLAPASASSSSVVSARTRRTVSVTPNAAAPTPGEQGVAMEQGKQQHQPPPPSQPQPQQEKRGSRDDDMHKTTGDVMTHSFGEGYSTRSDEEGFGGVYGQNDPVFNPGTEVHPSHPEYDTSQGSEVKEKEKARHHKDDKHAT

SEQ ID NO: 119716 - protein, 84 aa, Oryza sativa
  Clone ID: PAT_MRT4530_22906C.1.pep
AKNSLDRTHTPPQLRDIHTCTGETATAGAGRGYHKGPHGTLVGTILERVVGLTCRGQIWGGMPRRCWQRGREQGPKKFSKGPLP

SEQ ID NO: 119717 - protein, 56 aa, Oryza sativa
  unsure (1)..(56): unsure at all Xaa locations
  Clone ID: PAT_MRT4530_22907C.1.pep
VGTGISSGALADLLREGAIIAQSVVGVIVXAGPIQDRSIIPVGHLDLQGTEAGQGI

SEQ ID NO: 119718 - protein, 35 aa, Oryza sativa
  Clone ID: PAT_MRT4530_22908C.1.pep
MAGFPKPPGPGLPRLGGGYRDFSITVPRGNRAVID

SEQ ID NO: 119719 - protein, 54 aa, Oryza sativa
  Clone ID: PAT_MRT4530_22909C.1.pep
RLCLAFLALSCVGYAIPFVMCAAICCCFPCLISLLRLQKDLGHTRGASQELIGA

SEQ ID NO: 119720 - protein, 454 aa, Oryza sativa
  Clone ID: PAT_MRT4530_2290C.1.pep
MAHGASCLITLSPQLKDYEDTFSLTGKIQNFRELLYYSDGLNSEEKRGSRWLGTAANDKDYLMASSLSRRFAEDLLRGAMDLQDSLTMLEKFQTASRSMRVSNKKRRPEGCERSPDTSGFRGALSEASNAKKMVGRSASSGLDGELTNSTDELKRVIKDSFYRKNILSVYPNDEQASMSQSLHYMPNKNSLSKPNEQKKAAPRSLPSCAPGQSEKSKSPSLVAKLMGLDGLPTHNSNTFKKDESMKTVSSPRALFDIEMPKAYELHREFIQVDGPSTEHSATPSDESCQSVVDWDTEPSIDELIGIGEPGHLINRYKGIRKAQMGNHELFVDTATEQLERKHRQRNSLCYTGIWSQKCRTAPYFSLEALLTDIRDATRKLSIYTEDDDGCTTKDTLYMKLEKDLRCTDASINSVWDMGWEDWIFMEETQCFIRDVGESILSGLIEEAALDMWVH

SEQ ID NO: 119721 - protein, 285 aa, Oryza sativa
  Clone ID: PAT_MRT4530_22910C.1.pep
MQGGRGRRDGFFGFGDPFPGLGSFGQPGSLMSSFFGGANPFDDPFFTNPFGAMMGPSLLQPSMFGSFGSSMFGPHGNVNGLSNTGGFLQQAPEPSRPRGPIIQELSSDDEDGADVNKEDEKRNDNPRKHPRMAQMPYVEDPDEDTEDNKRSRHEQFERGYARASTSRPQPHTFMFQSSTVTYGGPNGACYTSSATRRTGGDGVTFEERKEADTTTGKATHRISRGIGNKGHSLTRKLSSDGNVDTMQTLHNLNEDELARFEESWQRNAVQNLSGWDPRVNMLGTA

SEQ ID NO: 119722 - protein, 348 aa, Oryza sativa
  Clone ID: PAT_MRT4530_22911C.1.pep
MGMVTEDRLIEEGLMCSGGEKEGMSAAPRRQLLVPLAAPITACMPPGSPHRLPPAHRPARRLHTALLTTAPPRALVHSSLPAHLAASCRRFATLPDASREKGEKQRLEAEGEGRWSVEHWSRGRRSDLQGRIVRVSYAHDRGSRAGGYGGGGYSGQGTYGGGGGYGGGGYGGQDAYGGRGVGGYSEGGRGYVGGGYGDGNNYGGYNTSGGYNSEGGRGGYSVFEGGHGYGSGGTGYTGGSGGYNSAPGNYSSDNFNQGGAAPGAYEGANYGGGNNYMNNATSDDSTGKLDELLNDLKVDGDGKEDGEGKADGAGLVNEDLKGDDGQDELLQNDFKDEDVSDDYANKRR

SEQ ID NO: 119723 - protein, 494 aa, Oryza sativa
  Clone ID: PAT_MRT4530_22912C.1.pep
VVKPAHLNSKRHESNNNDLAEIRNDNVPASIPQKQKTSKAERRAIQEAQRAAKAAAKEAGTGSGANPAMPKQAKSSKVSQKKDVPQAASTAASEKKVTERPSERDRKKDAPHPRMQFDDVHRVEKAWIPALLDQSEARNRVELFRHLPQYVHGTQLPGLESKFFQLEPMHPSVYKVGLQYLSGEVSGGNGRCIAMLLAFQVAIKDYSTPPKKTLSRDLTAKISSYVSFLIECRPLSISMGNAIRFLKNRIAKLPLTLSESEAKASLQSDIDRFINEKIVVADKVIVSHAITKVRDNDVLLTYGSSSVVEMILDHAHELGRKFRVIVVDSRPKLEGQGLLRRLVEKGINCTYTHINAISYIMHEVTRVFLGASSILSNGTVYSRVGTASVAMVAHAFGIPVLVCCEAYKFHERVQLDSICANELGDPDVILKVPGKADLGHLKNLADNENLQLLNLTYDATPSDYVSMIITDYGMLPPTSVPVIVREYRKEQLWI

SEQ ID NO: 119724 - protein, 48 aa, Oryza sativa
  Clone ID: PAT_MRT4530_22913C.1.pep
MAKVGGPVLRNSDNLHCCWTVGRLRFCDGFSKIFTPASQLASLLPLLR

SEQ ID NO: 119725 - protein, 144 aa, Oryza sativa
  Clone ID: PAT_MRT4530_22914C.1.pep
GRAPILLPAVHHFVPTRVIPPHGRRLGRLGFVGRRRAGDRLSPPTPGSPPPPVAPGYPAPAVTIPSSPPVASRPAWTPRNPLSVSPRRLPLTPLAEGVNMSDSALKDLNLAQCWDFTCDFEIDYGSEERASIVYKTLAVDKEAL

SEQ ID NO: 119726 - protein, 241 aa, Oryza sativa
  Clone ID: PAT_MRT4530_22915C.1.pep
SIIMALSKVEVNLLRLLEAAPRQQNQAKLVHYVTTARELLEQLGAETTPEGISSVSKAKISEYSEKIEALAARLAVPEPENEVPVDENREVESSYEGEKPGSPISLSSGLRRRPIAHTDVGPSSHARKDRDIGAPIKLDAEAQAHIEKHRKLQEDLTDEMVELARQLKESSLTMHQSVQETEKILDSTERAVEHSLASTGRAATRAAEVYSLASKTTCFQWLLIFMMTCMFIMVVLLIRVT

SEQ ID NO: 119727 - protein, 173 aa, Oryza sativa
  Clone ID: PAT_MRT4530_22916C.1.pep
MSDRELRPLRSIRITGDGRCLFRSVAYGACLRRGKQSPSDSIQKELADELRSKVADEFVRRRGDTEWFLEGDFESYVRQIRKPHVWGGEPELLMCSHVLRMPITVYMYTKGSDSPRIIAEYGQEYGKDNPICVLYDGYGHYDALQPSLERNTDNRRLRYLRLFSRTVSRSSAT

SEQ ID NO: 119728 - protein, 261 aa, Oryza sativa
  Clone ID: PAT_MRT4530_22917C.1.pep
MFCENQIILQGWPRFLTFAGTGVFVILIMVLSKVEVNLIRLLEAAPRQQNQTKLVHYVTTARELLEQLGSETTPEGISRLLDANFVYMMLLVCFGGCVSKAKTSEYSEKIEALAARLAAPEPENEMPVDENREVESSYEGDKPGSPISLSSGLRRRPIAHNVVGPSSHERKDRDIGAPIKLDEEAQAHIEKHRKLQEDLTDEMVELARQLKESSLTMHQSVQETEKLWYILDSTERAVEHSLASTGRATTRAAELQPDKAL

SEQ ID NO: 119729 - protein, 99 aa, Oryza sativa
  Clone ID: PAT_MRT4530_22918C.1.pep
AYERALGQGLSARHRRQQWRAADVFTWRADMATQKPTCGTRRGTTAYFPEKEPVPQETTRRKASPPPSTLLTNVQKLRLLTTAEKAVLLSGADRSWLTL

SEQ ID NO: 119730 - protein, 195 aa, Oryza sativa
  Clone ID: PAT_MRT4530_22919C.1.pep
RPGHHFVPTRVTGRDGRRLGRLGFVGRRRAGDRLSPPTPGSPPPPVAPGYPAPAVTIPSSPPVASRPAWTPRNPLSVSPRRLPLTPLAEGVNMSDSALKDLNLAQCWDFTCDFEIDYGSEERASIVYKTLAVDKELQPDKVKREMSVSGGKLVVHFEAVEARFLRASFSAFVDLTVLVTKLVEEYGISKEGEGSI

SEQ ID NO: 119731 - protein, 550 aa, Oryza sativa
  Clone ID: PAT_MRT4530_2291C.1.pep
MASGGGGVRLKAGTRPPWVGLAAAVWVQMAAGNAYTFPLYSPAIKAALGYTQQQLAVLGVAKDVGENFGVVAGVLCNSFPPWVVLLVGAAFCFVGYGALWLAVSGAVVAMPYCLLWIVLAMATNSNAWFLTAVLVTNMRNFPLRRGVVAGLLKGYIGVSAALFTQVFSGVLHRSPTSLLLLLATGLPTICLATMYFVRPCTPATLDAATTDADTEEDGHFAFTQAVSVVLAVYLVTTTVLGNAIKLSDATSYTLFIVTVLLLLAPLAIPVKMTLFRSSPRRRSTETTEEPLLIPPHVVVDSGGDGDEEESDKVDLLLAEGKGAVVRRTKRRRPRRGEDFEFIGTGVTVLNNLAQIGVAAGIGDTTVLLSLFALGNFFGRLGGGAISEKFVRSTLLVPRPIWMALTQTVLVVAYLCLAYTLGPAVAYACTATVGLCYGVQFSVMIPTTSELFGLKNFGLFYNLMSLANPLGAALFSGELTGRLYDEEAARQQHSGGVCLGPGCFRAAFVVLAGACSVGTAVSLVLAARIQPVYMALYSGGSFRLPNASQQH

SEQ ID NO: 119732 - protein, 295 aa, Oryza sativa
  Clone ID: PAT_MRT4530_22920C.1.pep
MFCENQIILQGICLFISVSLHRDLSEGFRERHIDILNLPKGLTPRSVHVLILWPRFLTFAGTGVFVILIMVLSKVEVNLIRLLEAAPRQQNQTKLVHYVTTARELLEQLGSETTPEGISRLLDANFVYMMLLVCFGGCVSKAKTSEYSEKIEALAARLAAPEPENEMPVDENREVESSYEGDKPGSPISLSSGLRRRPIAHNVVGPSSHERKDRDIGAPIKLDEEAQAHIEKHRKLQEDLTDEMVELARQLKESSLTMHQSVQETEKLWYILDSTERAVEHSLASTGRATTRAAE

SEQ ID NO: 119733 - protein, 93 aa, Oryza sativa
  Clone ID: PAT_MRT4530_22921C.1.pep
MQHDEHQEAPEVEQERRRGRHARVVRECRLRHGGQRPRGGSSAPSPPDLEEEGEGKGWSGCGEEVASPPPLATQPRPPPPLAPPPTSPPAHPQ

SEQ ID NO: 119734 - protein, 111 aa, Oryza sativa
  Clone ID: PAT_MRT4530_22922C.1.pep
MGSGGGGCGRNGAVRQYIRSKVPRLRWTGELHCSFVQAIEFLGGQDKATPKLILQLMGVKGLTISHVKSHLQMYRCSRLVSHGTGRRSEMQPQLQRKHSCGADEQVPREFL

SEQ ID NO: 119735 - protein, 248 aa, Oryza sativa
  Clone ID: PAT_MRT4530_22923C.1.pep
MAAESETPRITELHVRMDCNGCEHKIRKTLRAIDGVSEVYVDAASQKVTVVGIADPERIVKAIRKTKRVPTIFSHTDPAAPPPPPAEGEAAPPPADAPPPEEAPAAEPAPSEAAPPPPAEADQAAAPPATDATVIHMVHDYPYTHDHHHGHGHHLFGRDHWPASHHPAGGMVNYGGGAPYYAAHSYSHRASPYVSEYGYVGSPAHHEGRFYSSHDYYYPAAAGGRGKGDGSQITSMFSDENPNACTIS

SEQ ID NO: 119736 - protein, 152 aa, Oryza sativa
  unsure (1)..(152): unsure at all Xaa locations
  Clone ID: PAT_MRT4530_22924C.1.pep
ATHKVNYILNRREKHYPTGGRGVNGTVAHQSXMERRGDKTTAGIEPKDXAKRGKDYGYHAPTMRGPVPGTPTMEPTESESKDELDRCWDALSSIREKIAENERGKADANNNVLKRAPHPPKLLMNDPWTKPNSREYAAVPAGRLQSAKNGPT

SEQ ID NO: 119737 - protein, 59 aa, Oryza sativa
  Clone ID: PAT_MRT4530_22925C.1.pep
CHHHSLVIWRKSLSAVIVIVMGVCPFQFPPRWLSVIGIGPSWLCQSTFPPCFTFGIKTL

SEQ ID NO: 119738 - protein, 82 aa, Oryza sativa
  Clone ID: PAT_MRT4530_22926C.1.pep
GVLYPNGQLGPGCLLTGRAGSHRQRAGRPRAPSTACSGRTTTCADYIQWRLLSWVDRGAAARTTTWPGDNYTTNRVTIEVRT

SEQ ID NO: 119739 - protein, 119 aa, Oryza sativa
  unsure (1)..(119): unsure at all Xaa locations
  Clone ID: PAT_MRT4530_22927C.1.pep
TSVSGDPPGTSSPRLPPPDLRAPPVDSPPRIRIPRARGRRGGGGAVDXKETAGIMARLRHGFACQRRYSRDLADDDDASGHGDPSDRLEVHRRRSPPRYSGQQASGSDEELRATAYEVL

SEQ ID NO: 119740 - protein, 410 aa, Oryza sativa
  Clone ID: PAT_MRT4530_22928C.1.pep
MTKSATSLLLGAALATVFFLLYTSVCRDLGDGPPKSSPPRWAHAQEQGTATVTPATRVVDAEQGTGRPGRQEEEVVAPREEKQTKDEAASRSGHGGGSVEQQQNQRRIVMPTSQQEINRKETPSSPPQRQQQDLGELLRRAATPDKTVLMTAINEAWAAPGSFLDLFLESFRHGEGTEHLVRHLLVVAMDGRAFERCNAVHQFCYWFRVDGMDFAAEQSYMKGDYLEMMWRRNRFQQTILELGFSFLFTDVDILWFRSPFPHLSPDAQVVMSSDFFVGDPTSPGNYPNGGLLYVRSSASTVRFYEHWQSSRARFPGKHEQFVFDRIVKEGVPPHVGATVRFLDTGHFGGFCQHGKDLGRVVTMHANCCVGLHNKLFDLRNVLDDWKTYKERVAAGNMDYFSWRVPGRCIH

SEQ ID NO: 119741 - protein, 164 aa, Oryza sativa
  Clone ID: PAT_MRT4530_22929C.1.pep
LKGKWRRRRRRRERESSPEHSACSPPAADPAVSLGRGHLHARRVSFPTAPTLRRKPEKMEVPLVAGRGHGSGGSCRLGLSASLAASRLAPSTTLLYSMDAADDGVLSFLRHHDWDILVMEAHLHVPSDDDKQKTLKIDLIDCPDHPSRVSDCESIPWERQEQES

SEQ ID NO: 119742 - protein, 126 aa, Oryza sativa
  Clone ID: PAT_MRT4530_2292C.1.pep
SQNLMASSLSRRFAEDLLRGAMDLQDSLTMLEKFQTASRSMRVSNKKRRPEGCERSPDTSGFRGAMPNKNSLSKPNEQKKAAPRSLPSCAPGQSEKSKSPSLVAKLMGLDGLPGQQNSLASANRGI

SEQ ID NO: 119743 - protein, 223 aa, Oryza sativa
  Clone ID: PAT_MRT4530_22930C.1.pep
MAAAAAAAGARKLAGTLRLLAAGRGSGCIPRARASPCETSFLPHRSYSAAKTGENGGATGGGKRSRIRRIVSIGVISIAGGVALSALNDLAIFHGCSSKAIKKATENQEVVEAIGVPIVRGPWYDASLAVGHRRRSVSCTFPVSGPQGSGIFQFKAIRNGDDGVLSFLRHHDWDILVMEAHLHVPSDDDKQKTLKINLIDCPDHPSRVSDCESIPWERQEQES

SEQ ID NO: 119744 - protein, 95 aa, Oryza sativa
  unsure (1)..(95): unsure at all Xaa locations
  Clone ID: PAT_MRT4530_22931C.1.pep
VXRWXLTEXLVERRXPXXPVVGGDEAEPHWXRRTTSXSTSPSXTPSRPRPRTLXAXXSSSXSSSSSPHSARGKPLGTLGASGAXRRGGGEGXGGG

SEQ ID NO: 119745 - protein, 86 aa, Oryza sativa
  Clone ID: PAT_MRT4530_22932C.1.pep
MHGVNSLEVDKDSNSGGYKRRKECERADRDEKKEKSVDNVHMDKYGDCIIELFLSSSTNRVSFIAMAGDEPGDAVKHAVAVPLPCN

SEQ ID NO: 119746 - protein, 367 aa, Oryza sativa
  Clone ID: PAT_MRT4530_22933C.1.pep
ATSSFLRRRGPPLPLRRGPPSHVGEVLLSHTGELMFPQPTSSPPHAGELLFVLVSSPSSAAATSGCRHRASSRRWSNLHHCGLQLVPSSAIDALRSPRLHHREREGDSLRLLERMEDGLAGTRRQWRRTNEWRTESMAPARTETEVAWDEKKFTSQWHILKVVRIEWQILKSTRIRGHILKILKVEGEIGWMDQSIQIEPPRHCVRCDLTSGAKGKTIRLAIWRKENVKEPKKIGKWAESGGSRRCPRCRRARQLTKEPSVGKESRWRERKEDGRGPGQDFTKFNRSSTIGSICKLYNSIKELGAMYEHGFAYSELAQFLHHRKILRMFTIYKTTIPRFSTKKKFFYVDWRRKKIFLNPYTSFYSYG

SEQ ID NO: 119747 - protein, 172 aa, Oryza sativa
  Clone ID: PAT_MRT4530_22934C.1.pep
MLNGWPGLAWDELGPRSGCQFGLNHRRLWVKAGLKCLYNKEILDVVPLQAQPSSPEVTPAVLQIPMAPVKKRDGKTVLYNPARRQSSRLLNANQELKFDQQMGIGKPRGKSAKKLKELAEDDINSDSSPSDCSLSLLQKMGVDLCGLNPEDVAESSLGGETRKKLPRPNMDD

SEQ ID NO: 119748 - protein, 36 aa, Oryza sativa
  Clone ID: PAT_MRT4530_22935C.1.pep
MGRNLGSHRKRADIFSARNGTNNLPLPLMTDQLLQE

SEQ ID NO: 119749 - protein, 87 aa, Oryza sativa
  unsure (1)..(87): unsure at all Xaa locations
  Clone ID: PAT_MRT4530_22936C.1.pep
FFFFLAENFSSIIFSSILHSARRPLVRGKRVKKDQKPIPPTRXRTSTRTXGXPLXTXNLSXXGNPGPLFFFXGPFQTRAVKKNPXFW

SEQ ID NO: 119750 - protein, 134 aa, Oryza sativa
  Clone ID: PAT_MRT4530_22937C.1.pep
SLFVSISTWVAMFLNVVIFFRRCSNLIELTIRLNRFSKLLCFSRRSFDLSFGDVPEISILSETDGLLPSGEVLLLSSVSSSSSSPNNWSSKFCPCTSLQANFLASELITTPFLLDSDFSKCGGIKFCFQEFFPI

SEQ ID NO: 119751 - protein, 160 aa, Oryza sativa
  Clone ID: PAT_MRT4530_22938C.1.pep
RATPRRRPRRSCRSRRRRRRRGRRSCRRRSGRRRSRPRSPRPRRGRSSRSRRRGGSSSTCGPGTSPAAEEAAAAWPPGAAPPTATPRAPTARRRPRSTARTAAAARTRRTRRRSARRGSPIPTAGGRCRASTSSPLHAMALTVPSARRRRSSSHMCTIRC

SEQ ID NO: 119752 - protein, 76 aa, Oryza sativa
  Clone ID: PAT_MRT4530_22939C.1.pep
MALRVDGLQTTETEESVESKILEFRSFHSYQETRSTRESKPARRCSVARIIFISQREISRYSWKIYAQGSRISPNN

SEQ ID NO: 119753 - protein, 775 aa, Oryza sativa
  Clone ID: PAT_MRT4530_2293C.1.pep
MTELRSGLGVAGTCAMAHGASCLITLSPQLKDYEDTFSLTGKIQNFRELLYYSDDLGGAISQLQACSRRTSEREACVLAKEELERIEKMHQDSFRSVVCRSLSKSLSSKTKESSYPEIAQCAVPCVVTLQPTVCRGCQGRDWSPSQSNREDMSMMLQKDYLMASSLSRRFAEDLLRGAMDLQDSLTMLEKFQTASRSMRVSNKKRRPEGCERSPDTSGFRGALSEASNAKKMVGRSASSGLDGELTNSTDELKRVIKDSFYRKNILSVYPNDEQASMSQSLHYMPNKNSLSKPNEQKKAAPRSLPSCAPGQSEKSKSPSLVAKLMGLDGLPTHNSNTFKKDESMKTVSSPRALFDIEMPKVQQNDAHMSSPYSRKSNVSLYDSTVVNEIGSMKTIRREKGIEQPQTRAAKDIKVVSHTSRKQQIKETTEMGRRSSDKQRPHSTYRNREGRKDTKSKTGSASRSSANTVKRPDKKSMIASSSSSSTCRTRKPVARKAPSNSREKAVSSRSRKNSTIDDIVAYELHREFIQVDGPSTEHSATPSDESCQSVVDWDTEPSIDGIREDLSESYEASVTTSSAERTDSANGDPFHPSTHLVSKNEVEIKDEMSLLLLSDQPFLTRAAELIGIGEPGHLINRYKGIRKAQMGNHELFVDTATEQLERKHRQRNSLCYTGIWSQKCRTAPYFSLEALLTDIRDATRKLSIYTEDDDGCTTKDTLYMKLEKDLRCTDASINSVWDMGWEDWIFMEETQCFIRDVGESILSGLIEEAALDMWVH

SEQ ID NO: 119754 - protein, 117 aa, Oryza sativa
  Clone ID: PAT_MRT4530_22940C.1.pep
LPRSFHRHLTKQHTANTQQAAAKTNHINTSLITTSTKLISTHGICYFSHNHHPCILHHLFPTLKHPHAHINIPQAFCAPGDFLSQAVSLPEPKLSSQHGITIACFACIFRLFKHQPS

SEQ ID NO: 119755 - protein, 75 aa, Oryza sativa
  Clone ID: PAT_MRT4530_22941C.1.pep
MAPPAASTDWGPIIVAVILFVVLSPGLLFQLPARARVVEFGNMATSAIAILVHAVIFFCLLTIFVVAIGVHVYAA

SEQ ID NO: 119756 - protein, 181 aa, Oryza sativa
  unsure (1)..(181): unsure at all Xaa locations
  Clone ID: PAT_MRT4530_22942C.1.pep
MGRGEGGNGGASAAVGEGWPEEERXHTEEERKEEGTKEEEMGGCRGDLRRCRXTGEVARGQTRRPPVRAPEDXQSRLAPLRRHADAGNPPPTHRRPHRRAXPPCTAERATSXAMTPPPHKPPDAAAVASSHDSSALCCPKTPPPAHRPDPATAVPHLPPLGRDPSPSPLPTAGENXHLPHA

SEQ ID NO: 119757 - protein, 35 aa, Oryza sativa
  Clone ID: PAT_MRT4530_22943C.1.pep
QSCVKLHVILSTLVMLPLLVLCRALLPSVFFNHFN

SEQ ID NO: 119758 - protein, 66 aa, Oryza sativa
  unsure (1)..(66): unsure at all Xaa locations
  Clone ID: PAT_MRT4530_22944C.1.pep
IGPKFTSLRSGEVQEATCRFWARMGRPWFXPNLPWRRWIQVLAGRRGSLPNDGWKAIPTIPTATTV

SEQ ID NO: 119759 - protein, 109 aa, Oryza sativa
  Clone ID: PAT_MRT4530_22945C.1.pep
YICRVQALARTNSRTYAGESNVPIYTRLTEIETRRRYLSSHDVLLAIVVILRPLFLLKIAGYYAIYLLRSVIDDINCMLFESLFVPRFVILISLLYGFVSFLIFSFSSF

SEQ ID NO: 119760 - protein, 99 aa, Oryza sativa
  Clone ID: PAT_MRT4530_22946C.1.pep
YFYVSNSAVVFFFVFSVCFVMCALFFRSGASRARLRGFELSRSCKDMNMFLCFVLICGHELLAKGYLCFQLDDVACKAELASCDTCMHALALVLHKSLV

SEQ ID NO: 119761 - protein, 67 aa, Oryza sativa
  Clone ID: PAT_MRT4530_22947C.1.pep
KRSLLPVHYSSCKLYELCLDLSLHHLSSLLPIMQDVNFTKMIHDCRCRIWLCLASLIFYQSVIVKRF

SEQ ID NO: 119762 - protein, 147 aa, Oryza sativa
  Clone ID: PAT_MRT4530_22948C.1.pep
QRAKRGKQLIKQEQTPHCKLSLLLGLAFVSCSVAAAASGGTVVIGLAADSGCGKTTFVLRLTSVLGARTAATAAAPPWGGNPDSTLVADVEREMVGVEAGEAGHAVGDVGGDDAEPSDDRPHPPAAARLPASGPLRRLALAARSWSV

SEQ ID NO: 119763 - protein, 168 aa, Oryza sativa
  Clone ID: PAT_MRT4530_22949C.1.pep
MTLLLVDGGDWVAAREARDAARPAMRAARRSGGRGDGKRRLEAVEAAVFRSEGRGAKKPAKKLARELRQAAAHGLAVKRAGGGARSLGRRGNIRGERGERFYSFGCGDRGRSGRNQPATAGKVGVLTWRRWARFRRRKLGKIGKEVEDVGQTASTPFGLGNGGEWWRI

SEQ ID NO: 119764 - protein, 225 aa, Oryza sativa
  Clone ID: PAT_MRT4530_2294C.1.pep
MATTEDGFRSCARRSGDGGMECNGDWCARLSSPPSATSHSCDEMRLPASSSSAAGLQERIWDLHDNLSHAILSLSASAHRCCRRRAPEGRVVVKGWRRQGGCGDCGLEQEAAAAATMADARSLHAVRAALEDLEGHLHFLHNIQLCQVAERDAAIARLQQSRILLATRLAEHRWKKHEVIEEALAFVDDALDKSRFVSPEDVRGTHTHSQSVENQCPKIHDSNFL

SEQ ID NO: 119765 - protein, 149 aa, Oryza sativa
  Clone ID: PAT_MRT4530_22950C.1.pep
SRLFLKLLDCLVCPLNKTGRMSRASSYPPGSSLLVSRKAPVKRIVGLAFRYWKLKLQIGITTLGFRATTSAPFFAHRGSFVTSPNAPRNRNQYPWPHNSNLPNYSTYIPNHYPPPQNESNPGQGPCNCTSMPNPMWVANYTVQILVASQ

SEQ ID NO: 119766 - protein, 144 aa, Oryza sativa
  Clone ID: PAT_MRT4530_22951C.1.pep
DAWASFLKGDLRHRNRSRESLVRVELDRISEESPMHNPNSHLSSNTKTKELTICKLKMRAVQLSTDHSTSVEEEVSRIRAEHPDDPQSVFNDRVKGQLKVTRAFGACFLKKPKFNDILLEMFRIDYVGTSSYISCNPAVLHHRL

SEQ ID NO: 119767 - protein, 110 aa, Oryza sativa
  unsure (1)..(110): unsure at all Xaa locations
  Clone ID: PAT_MRT4530_22952C.1.pep
MFPPPYSTFSHHDNVYITVQLPDAKEAKANLEPEGVFTFSDTAGTEGNLYESKLEXNDKVIGEESKKSVGSRTIFCIEEKAEAKWRKKLDRDEQKAPHSVKVDCDKWVDE

SEQ ID NO: 119768 - protein, 1044 aa, Oryza sativa
  Clone ID: PAT_MRT4530_22953C.1.pep
MVLGLGVANQPAMGNSTSRVVGCFAPADKAAGGGVGLEFLQPLDEGLGHSFCYVRPGAITDSPAITPSNSERYTLDSSVLDSETRSGSFRQEVVVVDDLAAAAMAGLQRPSKSFSETTFRTISGASVSANPSSARTGNLCVSLAADVQEPAAAFESTASFAAVPLQPVPRGSGPLNTFLSGPLERGFASGPLDKGAGFMSGPLDKGVFMSGPIDSGNKSNFSAPLSYGRRKAGLGQLVRSISRPMRSALSRTFSRSSQGTGWVQRFLLHPMAQLSLSRDAKGTSEDSHNGLEAGLPELEYSVTRNLQWAHGKAGEDRVHVVLSEEQGWLFIGIYDGFSGPDAPDFLMSNLYKAIDKELEGLLWVYEDSPEGSAQVSTLGEGESVAVPQDLPDGGDILFQADSVESEQLVNSEEQDVSNVKISDGGASQVQMDLNTSGQRDLVLQASSNQKLNAGEIVEEKVGADMGNNLQSTESYNSGRDISNTDVNTSFGCTSDVNTSTCCNEDVKSPKEIRSRRLFELLEMELLEEYNRNVSKLSPEGMKGRSIFNMQAGTTEESSRDIAELSRSSMAATGECLDDFENDKHSRSGDGVLGVDPKECNECSISSSSSGHKQILRRYLFGSKLRKMYKKQKLLQKKFFPWNYDWHRDQPHVDESVIKPSEVTRRCKSGPVDHDAVLRAMSRALENTEEAYMDVVERELDKNPELALMGSCVLVMLMKDQDVYVMNLGDSRVVLAQDNEQYNNSSFLKGDLRHRNRSRESLVRVELDRISEESPMHNPNSHLSSNTKTKELTICKLKMRAVQLSTDHSTSVEEGTDGAVVPSPELKLVRGQDFPVYHKPSQKPAFVFSLRLPSSQYQILFQIDQNQTQEVSRIRAEHPDDPQSVFNDRVKGQLKVTRAFGAGFLKKPKFNDILLEMFRIDYVGTSSYISCNPAVLHHRLCSNDRFLVLSSDGLYQYFSNDEVVSHVAWFMENVPEGDPAQYLVAELLCRAAKKNGMDFHELLDIPQGDRRKYHDDVSVMMLQKGMYKRDTSLFLRELKSLIMNE

SEQ ID NO: 119769 - protein, 215 aa, Oryza sativa
  Clone ID: PAT_MRT4530_22954C.1.pep
MVCIRQATIDDLLAMQACNLMCLPENYQMKYYLYHMLSWPQLLFVAEDYGGRIVGYVLAKMEEDPSEPCHGHITSLAVLRSHRKLGLATKLMSAAQAAMDQVFGAEYVSLHVRRSNRAAFNLYTSTLGYQIHDVEAKYYADGEDAYDMRKPLRQPQPKKHHHHHHHHHGPEGNGEAEGVGEPVGLASGALTLLIRSPAKSFPKETKDMYCDYVCL

SEQ ID NO: 119770 - protein, 42 aa, Oryza sativa
  Clone ID: PAT_MRT4530_22955C.1.pep
SSLPKICHCRIVPNFLCTLLSAVHDISLILCTLHCVYLSLTH

SEQ ID NO: 119771 - protein, 198 aa, Oryza sativa
  Clone ID: PAT_MRT4530_22956C.1.pep
MVCIRQATIDDLLAMQACNLMCLPENYQMKYYLYHMLSWPQLLFVAEDYGGRIVGYVLAKMEEDPSEPCHGHITSLAVLRSHRKLGLATKLMSAAQAAMDQVFGAEYVSLHVRRSNRAAFNLYTSTLGYQIHDVEAKYYADGEDAYDMRKPLRQPQPKKHHHHHHHHHGPGGCCSHDAPPAASGSSPPSSNSPEKTDS

SEQ ID NO: 119772 - protein, 171 aa, Oryza sativa
  Clone ID: PAT_MRT4530_22957C.1.pep
ETRRGRGGRGGVRPHEPDGGDGAVRGGEGRTWPGEAGSRRPTWGSGGGERGGIRKSNPGHLGRGRGREREGSGRGRCGARADVGDVARGRRRRGRGGGGCGRGGGGCGRGGRRGRREVGEGPDRRRTSGCDKAAVVRRGREMPRRRLSLSVHGGGGGGGRKIPAFGCDFGN

SEQ ID NO: 119773 - protein, 135 aa, Oryza sativa
  Clone ID: PAT_MRT4530_22958C.1.pep
IIKLLICSGGIYGEWIDRSEEFPITAGRRRRRRAGRLPEGLGLVEQPCPGHLDEPVSLLVDVLFDAVDLPEGRLGCQVVVHLLHRHLAGTAAADAAGGGGGGRSSSTASSSCSSLADDLLALPPAHLNLLSKLSY

SEQ ID NO: 119774 - protein, 338 aa, Oryza sativa
  Clone ID: PAT_MRT4530_22959C.1.pep
MAMRGGGATMLSWYLQVAAVSLLAMATGLEAQLRVGFYDNSCPAAEIIVQQEVSKAVSANPGLAAGLVRLHFHDCFVRGCDASVLIDSTKGNQAEKDAGPNTSLRGFEVVDRIKARVEQACFGVVSCADILAFAARDSVALTGGNAYQVPAGRRDGSVSRSSDTGGNLPPPTASVSQLTQMFAAKGLSQREMVALSGAHTIGASHCSSFSSRLYRAGTTAGGAGGGQDPTMDPAYVAQLAQQCPQSGGAAGGGALVPMDAVTPNAFDEGFFKGVMNNRGLLSSDQALLGDKNTAVQVVAYANDASTFQSDFAAAMVKMGAVGVLTGSSGKVRANCRVA

SEQ ID NO: 119775 - protein, 103 aa, Oryza sativa
  Clone ID: PAT_MRT4530_2295C.1.pep
EYQVGPCPGISLGDQLWMSRFLLHRVAEEFGAKVTFAPKPIPGDWNGAGLHTNVSTNETRADGGMKAIEAAMEKLSTRQAEHMAVYGSDNQLRMTGKHETAFY

SEQ ID NO: 119776 - protein, 192 aa, Oryza sativa
  Clone ID: PAT_MRT4530_22960C.1.pep
MAVLWAGLSGLGAYGHLNARKKITREMFSKIDLRMQCNHAEVRDASSAGGHSCESCPVVLELHMLREPAAFGLPTRSDIDYCQLIQDYGSAGATIGLRIRRVEDLSLQETEAAESGSCPPLYKRILQGSNRNVGHKLLVKDNAGCLRGQCAARARCALLPTPTPPVQPRLQVPPLVLMISMIFVTWLDIWIH

SEQ ID NO: 119777 - protein, 62 aa, Oryza sativa
  Clone ID: PAT_MRT4530_22961C.1.pep
QPSLSIAGAESSRRSRGHDERSIRLPSERYRERRVERPHSPHRRRPIDLCDTINQRRAARGH

SEQ ID NO: 119778 - protein, 71 aa, Oryza sativa
  Clone ID: PAT_MRT4530_22962C.1.pep
MANGRLGPSRTGRRREEAEERELQVSPFHWVTTRSTPAAFDRRGGGTAAPLRLRHSPLQGRQGPNSQALNG

SEQ ID NO: 119779 - protein, 68 aa, Oryza sativa
  unsure (1)..(68): unsure at all Xaa locations
  Clone ID: PAT_MRT4530_22963C.1.pep
ISSSCCRLVDQPADQLIRRLVEYSSFMYVWXXXXSXXXSVFFFLWMYFVLYXQNMCVYIYIFLFLCIY

SEQ ID NO: 119780 - protein, 536 aa, Oryza sativa
  Clone ID: PAT_MRT4530_22964C.1.pep
MCHCSSKVVAVAQCHQPLLPPPEACPARHDRPRSARGGGGAIAEVASIVRLAMPMVGAGLLMYMRSLVSMLFLGRLGRLPLAGGSLALGFANITGYSVLSGLAAGMDPVCGQAFGAGRTSVLAAALRRTVVLLLAASVPIAALWLAMHRVLVAAGQDPDIAACAYEFILCSLPDLAVQSFLHPLRVYLRAQSITLPLTYAAAAALALHVPRNVLLVHGLGLGIRGVALAAVWTNLNFLLFLVAYAYFSGLIRGDDDDDGGNGKAGEEGATTTTTTMEWGWLVKLSVHSCMSVCLEWWWYEIMVLLCGVLADPKAAVAAMGILIQTTSLLYIFPHSLSCAVSTRVGHELGAGRPERARLAARVGLACGAALGVVACAFAASLRGVWARMFTADATILRLASSALPILGAAELGNCPQTVGCGVLRGSARPGRAARINVSAFYGVGMPAALALAFWPARLDFRGMWAGMLAAQLVCAALMLLAVRRTDWDEQAARAREITGAVAGVVVGDGDVVVKGDHADAAKVKADSGLLVVTVLS

SEQ ID NO: 119781 - protein, 514 aa, Oryza sativa
  Clone ID: PAT_MRT4530_22965C.1.pep
MTRFGIFSSRYRQIAYRQEGLEVYTGLVGRKCYSDNLEQRGGGEGRRGSGSGEAATPAASGVPGYRTPREGSGRQRGLREWLERRAQDREPTGERELRWGLIWDEREGEKWKNGFAGVRQGISLLSEVTHVSTRVITRGDVVLRLRGSSVCAFKKPDRFVSRLRPNRCLSEPFGRSGTLVHITVIGYRGPRTSTLLQGLSREPADTGKKRKTRSSAADPSAQAPKMKVKSKKTKPTDDLPALDPSIEQALDEEEIGEDVDQAADESDQTPSAVESHHIEEEEQPAVPAIPALADLFSFDIKDYLDEETEEDTTSKSLVPLSDDVKKTLEDISHRLEASSLDNLVVNCGPIRTRLHKIQPLIPDELADVFTSAVYLEQHQFKLEKAKLRLAERRERKDIQVNRLLVHEEKSKLDQLSEGPIKSNIDRLEARKIELLAQLEECNAELDMEHKKLADLPKSIEEQKARLKLAIKNVADLTKSLKVIPGTDTQDAQVIEEVEQIRQRAISAIQQYLSQ

SEQ ID NO: 119782 - protein, 276 aa, Oryza sativa
  Clone ID: PAT_MRT4530_22966C.1.pep
MHPSGGALSVPPGFRFHPTDEELLYYYLRKKVAYEAIDLDVIREIDLNKLEPWDLKDRCRIGTGPQNEWYFFSHKDKKYPTGTRTNRATTAGFWKATGRDKAIFLANACRIGMRKTLVFYVGRAPHGKKTDWIMHEYRLDQDNVDVQVGGWVVCRVFMKKSYQRGLNPADMAAVDDDDLLHHHHHPFPPAQLHGGAADHKHDGAGGHHHHHLMQPHHHYDDFPSFDPSMQLPQLMSADQPPPPPPSLLPGGTASSLQRLPLQYLGCEAADLLRFSK

SEQ ID NO: 119783 - protein, 375 aa, Oryza sativa
  Clone ID: PAT_MRT4530_22967C.1.pep
HPSGGALSVPPGFRFHPTDEELLYYYLRKKVAYEAIDLDVIREIDLNKLEPWDLKDRCRIGTGPQNEWYFFSHKDKKYPTGTRTNRATTAGFWKATGRDKAIFLANACRIGMRKTLVFYVGRAPHGKKTDWIMHEYRLDQDNVDVQEDGWVVCRVFMKKSYQRGLNPADMAAVDDDDLLHHHHHPFPPAQLHGGAADHKHDGAGGHHHHHLMQPHHHYDDFPSFDPSMQLPQLMSADQPPPPPPSLLPGVPPSAAAALSSLDVECPQNLMKLTSAAAGGGATGLLHAGGDHRFATAATDWSILDKLLASHQNLDQLFQGRVIAGASSPAAMAAPSHHQHLMDQLAGGGGGTASSLQRLPLQYLGCEAADLLRFSK

SEQ ID NO: 119784 - protein, 98 aa, Oryza sativa
  Clone ID: PAT_MRT4530_22968C.1.pep
MEIVGGSGACSISRLVQQRLHRLIKFLRARGGVRRRAARSEALMGGWARVQPHARRSLFEYAYTKDGASGGCLCWPNSSHGPARPKQREKVDDDGLGC

SEQ ID NO: 119785 - protein, 349 aa, Oryza sativa
  Clone ID: PAT_MRT4530_22969C.1.pep
MMAGGDLRSLLAVVAAVAAAMSYVRFVARRLRPGLPRLAAFVPLLAVLPVIPLAFRALHLRVTSGFFLGWLAEFKLLLLASGHGPLDTSLPLPAFVAIASLPVRRRAQRDSENAPRPGLGLVTSAVMAALLATIVSVYPHKERMNEYVLLMLYSLHVYLALELVLAFAAAAARAVMGMDLEPQFDRPYLSASLREFWGRRWNLSVPALLRQCVSRPVRARVGGGVAGVAAGVLAAFLVSGIMHEAVIYYATLRPPTGEPTAFFALHGACAVAEGWFAAHKGWPRPPRAVATALTLAFILATGFWLIVPPITRTGTDRVVIAESEAMVAFVRDAGSWAAASVRSALTGHS

SEQ ID NO: 119786 - protein, 74 aa, Oryza sativa
  unsure (1)..(74): unsure at all Xaa locations
  Clone ID: PAT_MRT4530_2296C.1.pep
PLPFHNQLDLVWGRFICFSXSPPLSNNFSTIGDLIISYHITVTSTIRQYFPNSFIHQSLCYVFPSAFALIILLF

SEQ ID NO: 119787 - protein, 50 aa, Oryza sativa
  unsure (1)..(50): unsure at all Xaa locations
  Clone ID: PAT_MRT4530_22970C.1.pep
IQGNALATCCFQMSLYYVPGQGGRKCSXGLSPPLHLPQTYCGICSNHWQL

SEQ ID NO: 119788 - protein, 71 aa, Oryza sativa
  Clone ID: PAT_MRT4530_22971C.1.pep
RARPQRGSWAARHVGLPDAVVGVADGVGGGGAEVDAGGEGEEEGALEDKGVTGGGVDEAVGEEGPGLSQRH

SEQ ID NO: 119789 - protein, 94 aa, Oryza sativa
  unsure (1)..(94): unsure at all Xaa locations
  Clone ID: PAT_MRT4530_22972C.1.pep
RPPARWARASXXXSXXPGLATPXXXXXXXMXXXATPPPLQFFTSSFIVSSTYKNSRAETKMNRSMKTHQPKQSLNPAHTTAVHGAKVQADPRRR

SEQ ID NO: 119790 - protein, 113 aa, Oryza sativa
  unsure (1)..(113): unsure at all Xaa locations
  Clone ID: PAT_MRT4530_22973C.1.pep
KIDKIKWKNCYCSLLFIFGPEGPKLNFSGLCRSAYGXLCARASAPSPPPGRNLGLGRESRRRALPTWADFGPAAAGRPISXRVSIGRPGAEIGGSKTPLSRPAAENPSFSPLS

SEQ ID NO: 119791 - protein, 657 aa, Oryza sativa
  Clone ID: PAT_MRT4530_22974C.1.pep
MDPNFPYQSPSFTLGDFDPNYMSGFDGTSGSAPTPPSVEEVPVHTAVVEEVPVQAATASEGFSGTASGSVSTHTGSKRSRTSVVWQNFDEIKETCPDGREVSKARCRICRQILSARSSGGTGHLKRHAESCAKKQGIQLRQQQLMVNPDGTVRSWEYDPMVARESLVRLIARQDLPLNFGESPAFEHYIQQSHNPRFKAVSRQTSTRDLENVYHKEATALKELFSTCTFSVSVTSDIWSSGAREDYLSVVVHFVDDDWQLQKRVLGLRLIDVSHTGENIAERIREVINEFNLADKIFAVTLDNASANSRAIEILQPLFCVYAQSFLLHQRCACHIINLIVKTGMKRSRGGPRNSDGSSVLNEHVWAIVQKFHQFLETFYDCTLTLSQVYYPTANIILHNLLEIATLFKEYENDDVLTEPVFHMKQKYLKYWKNIPMLYAFAFVLDPRCKLRGLSAILSLVGDTIGVDYSSFYTEVRRKLYEVFRRYEVKFQEVRQQRPPPIPTTGKKKIQWGRIWGGSSSSSIQGGGSSSATSGDASSHVVAEELSGYLDSDAIHHEAQDFNVLGWWNDHKITYPVLSKLARDVLTVPVSTVSSESAFSLCGRIIEDRRTTLRSDHVEMLLSVKDWELARQHAQYTADNQELAAQFEQLYLDPDQPQ

SEQ ID NO: 119792 - protein, 535 aa, Oryza sativa
  Clone ID: PAT_MRT4530_22975C.1.pep
MDPNFPYQSPSFTLGDFDPNYMSGFDGTSGSAPTPPSVEEVPVHTAVVEEVPVQAETASEGFSGTASGSVSTHTGSKRSRTSGVWQSFDEIKETCPDGREVSKARCRICRQILSARSSGGTGHLKRHAESCAKKQGIQLRQQQLMVNPDGTVRSWEYDPMVARESLVRLIARQDLPLNFGESPAFEHYIQQSHNPRFKAVSRQTSTRDLENVYHKEATALKELFSTCTFSVSVTSDIWSSRAREDYLSVVVHFVDDDWQLQKRVLGLRLIDVSHTGENIAERIREVINEFNLADKIFAVTLDNASANSRAIEILQPLFCVYAQSFLLHQRCACHIINLIVKTGMKRVGDHIDAVRQAIAWLTASNPRIAAWKRFCNAAGVKARKKKIQWGRIWGGSSSSSIQGGGSSSATSGDASSHVVAEELSGYLDSDAIHHEAQDFNVLGWWNDHKITYPVLSKLARDVLTVPVSTVSSESAFSLCGRIIEDRRTTLRSDHVEMLLSVKDWELARQHAQYTADNQELAAQFEQLYLDPDQPQ

SEQ ID NO: 119793 - protein, 3647 aa, Oryza sativa
  Clone ID: PAT_MRT4530_22976C.1.pep
MKLKRRRAVEVPPNIKSFIDCVTATPLENVESPLKDFVWEFGKQHLSSLLASTDADIVEGSLETLRAFVNKSVGKSSIRSASLTSKLFAFSQGWGGKEGGLGLIACSLPSGCDPIATEIGSTLHFEFYRGADKSDKSQSIDNCHRLEIIHLPSIISCKENDLEILEKLVKDYSVPPSLRFSLLTRLRFARAFDSLAYRRQYTCIRLSAFIVLVQASHDSESLALFLNNEPEFIDELLSLLSYEDEIPEKIRRLGILSLVALCQDRSHQPTVLSSVTSGGHRGILPSLMQKAVDSIINGSTKWSTEFAEELLSLVSMLVSSTPGSLALQEAGFIPTILPLLKDTDTHHLHLVSTAVHVIEGFLDYHNPSSALFRDLGGLDDTIARLKIEVSQVDIGSKKSEEPQSMSKGKEVESSLPPPDMQTVHSEALISYNRRNLMKALLRTISLATYVPGSSARVDGSEENVLPPCLCTIFRRAKEFGGGVFSLAATVMSDLIHKDPTCFTVLDAAGLPQAFIDAIMGGILYNSDAITCIPQCLDALCLNSSGLQLVKDHNALRCFVKIFTSRSYLKALGGDTAGALSLGLDELLRHQSSLRSSGVDMLIEILNTISKVGCGGESSSCTESGNSSTPLPMETDVQGGTSRSEVGTSEVGSSEKMVDASLDATSSSIESYLPECICNVGRLIETILQNSDTCRLFSEKKGIEAVLQLFKLPLMPVSVSVGQSISVAFKNFSSQHSVSLARAVCSFCRDHLKLTNGLLGSVSGTKLVISDHVKQSPLLKALSSLEGLLSLCNFLLKGNAFMVSELAFADAEILRELGKVYIEVTWQISLLSDSKVEKQDMEQDDVPGDASVSNLSERDSDDDTNAASVTRHMNPVSVRTSSVSPWNMEQDIISAVRSAASIHRHGRHTLSRIRGRLSGAMDAAHTDIDSPFSPGESSQSHDTIKKSPDVVVSELLTKLGHTMRSFLSTLVKGLPARRRADSSLTPASRSLVIALAQLFLTALGYSGHSTAGFEMSLSVKCRYLGKVVEDMAALTFDSRRRSCNSAIVNSFYVNGTFKELLTTFEATSQLLWTLPFSVPTTGSDQASSISEKVSHNSWLLDTLQSYCKLLEYCVNSSFLLSPSHNQLLVQPMVTELSINLFPVPSEPESFVRILQSQVLEAVLPVWNHTMFPECSPSLITSLISIVSHICSGVGALKQSRAGVGAANQRLTSPPLDESSIATIVEMGFSRARAEEALRSVRTNSVEMATDWLFSHPEEFVQEDVQLVRALALSLGNTTEASKEDGCNKNGPSVVEDKGVILLPLDDILAVSTKLFSSGDDMAFPLTDLLVTLCNQNKGDDRQPVILYLFEQLKRFPSDSSVDAGALYSFARLLALLLSEDSSIREIGAENGVVPHVLNLLENLKSRTEKTDQTWNSISALLLILDNMIQYAPALDIEMPEGTSKVSSDASNADCKVNPSLFAEKKTETDYSATYPNVHVFEKVMGRSIGYLTDQESQKILLLCCEFIKQHVPAIVMQAVLQLSARLTKTHTLAAQFSENGSLASLLNLPKTCIFPGYETLASAIVRHLIEDPQTLQSAMELEIRQSLSTRGSHASRSFLTNMSPLISRDPVIFMRAVTLVCQLDCSGGRTNVVLLKEKEKYKEKQKVSTTESGALGNEPVRMTADTKTIDTVNRCSRNQKKVPTSLSQVIDQLLVIIMSYSSPKKEQRSDGYFMLSPMDVDEPNTKGKSKVNDEQNLDGSEKSALMSKLAFVLKLMSEILLMYVHAVGIILKRDTELSQLRGGDQVAGHSGLLYHVFNLLSSDRSADVSDNWMGKLSERASWFLVALCCRSTEGRRRVISEIMKAFNYFIDSASSTSRGSLIPDKKVLAFSELINSILSRNSQNNLPVLGCSPDIAKSMIDGGMVQSLSGLLKVIDLDHPDAPKVVNLILKALDSLTRTANASDQIQKSDRYAKNKLTGSHEQTNVANENVIHEQGTSNGHGTIDTVQSTRQQVQELSHDDGNNNAGQDQPVEQMRLDLVENTAGNSSTGGVEFMREEATVGNLMTTTTDAGLDFSAQHQADDEMVEEEDDLGEDGEDEDEDEDEEEIAEEGAGLMSIADTDIEDQENTAIGDDYNDDMMDEEDDDFLENRVIEVRWRETLTGMNRHLRVSRGRGDASGFIEISAEAFRGVGTDDMFNLHRPFGLERRRQSGSRSFTDRSRSDGNAFQHPLLSRPVQSRDGIGSVWSSSGTPSRDLHTFSFGTSDIPFYMLDAGLPPETSAPVFGERVVSTAPPPLIDFSLGMESLRIRRGLGDNLWTDDGQPQAGNHAAAVAQALEHHFITELNVSTFLNNAIPYTGNRVLDMQPDQTGDDVDDDLPSQDDDISEHVTTDSPALPTSSPQQFGTTNQANGNVCPMNDLICQQSADVADVRTEEEMHQIADDMNVIPQSNEDTADRQHVAHPDRDSLSGNLQSYDHVMQDEVEIPQRGQIGNDIRDPSDLESSCHALLTSTSAAPELSDAHVDSTTMNTDVDMNSIDISENQVENSAPGLYGNVVSVRLDEGAPQETMQPDQLNANNEASSTNEIDPTFLEALPEDLRAEVLASQQNRAAPTASYTPPAAVEIDPEFLAALPPEIQAEVLAQQRAQRIAHSQPIGQPVDMDNASIIATFPPDLREEVLLTSSEAVLSALPSALLAEAQMLRDRELSRYRARGSLFGGSYRLGARRLPTDNQTAVMDRGVGVTVGRRVISTVSAGAKGKDVEGTPLLDSSALKALIRLLQLAPPLSKGLLQRLMFNLCAHSVTRATLIGHLLNIIKPEAEGLNGWDCMTTYRLHGCQWNIVYAQPQSANGLPPLVTRRLLEVLTYLASNHPSVAGLLVYFDPSTSSNCMILKHGKELSQEGLQSDMMKTSSEGYTPILLFLKLLNKPLFLRSRVYLEQVMCLLEVVVSNAASKVDYPPHSGQMVSTSVDENRAPIETHGEPSTMEQVPIQENSQNKDVVVPASGPQQSINVHDILTQLPDSELHNLCNILALEGLPDKVYTLAAEVVKKLASVAVSHRKFFSMELASAAQSLSSSAVEELVTLKNTQMLGLNSCSMAGAAILRVLQVLSTLTSDMSGNSQDQAVGQEEQSILWDLNISLEPLWQELSDCISTTEAKLVHNSSFNPQVPLMDAIEVGASSSTSPPLPPGTQRLLPFIESFFVLCEKLQTSQAVVPSDSNVTATEVKELAGSSSSPSLKTGGVCNITFVRVAEKHRRLLNVFIRQNPSLLEKSLSMMLKVPRLIDFDNKRAYFRSRIRQQHDQHLSAPLRISVRRAYVLEDSYNQLRLRRSQDLKGRLTVQFQGEEGIDAGGLTREWYQLLSRVIFDKGALLFTTVGNNATFQPNPNSVYQTEHLSYFKFVGRVVAKALFDGQLLDVHFTRSFYKHILGVKVTYHDIEAVDPDYYKNLKWMLENDVSDIPDLTFSMDPDEEKHILYEKNEVTDYELKPGGRNIRVTEETKHEYVDLVAEHILTTAIRPQINAFLEGFTELVPRELISLFHDKELELLISGLPEIDFDDLKANAEYIGYSPASPVILWFWEVVNGFSKEDMARFLQFVTGTSKVPLEGFKALQGISGPQRFQIHKAYGAPERLPSAHTCFNQLDLPEYSSKEQLEERLLLAIHEASEGFGFG

SEQ ID NO: 119794 - protein, 384 aa, Oryza sativa
  Clone ID: PAT_MRT4530_22977C.1.pep
MASGFSVSPAQALDSHLVELELALLSVRHRRAGVRPSPASSILIGGGIVHGIWRGWAAGGGGLAAVLELVLTSALALLLALASLRAHATPWTTTTPTRMDDAGDGQTSARAVADWRTDDGLGVWDVTATMLRPSETSNTTSSLLWGHSELGYGKSRPSPMVAEEGAGVGANFAAPTSYARIRLERFEELAVGKIMDPNFPYQSPSFTLGDFDPNYMSGFDDTSGSAPTPPSVEEVTSSAMRSRVPRSKEYNSGSSNLCSSATSGDASSHVVAEELSGYLDSDAIHHEAQDFNVLGWWNDHKITYPVLSKLARDVLTVPVSTVSSESAFSLCGRIIEDRRTTLRSDHVEMLLSVKDWELARQHAQYTADNQELAAQFEQLYLDPD

SEQ ID NO: 119795 - protein, 789 aa, Oryza sativa
  Clone ID: PAT_MRT4530_22978C.1.pep
MEIARKATDFEPPTLEDESVSSETAESAFELDILYGFLDAEVGELDDMISTLETDIQNVEHMVCQDESGGKIKARLDAAMVSLKQMKELVSDIRKESAKFEKAIEFPHDKEGITGDAGYENGIVSSHTSMRTEDQRRNVLQMLEQSIASELDLEKKLSESRCIIEELKLKLHHHDQEKYFLEESIESLCGKTFAAENASEVLLGTSKELVDKVSTVECHLSASRCREGDLESKLGESLMGLSSLQVNAENIQEGSQHSGGTETHPSPELPSLQDKVKELEKQLRESDSQLQLAKASAETFQEEQNVLHAEISTLENIIKSLKEDVSRAESRAQNAELRCMQLTEANIELNGELNSLKSHGSEKTSLLERKLKESHTQLEHAKASLDATVEQQSMLRSTMSDMEHMIDDLKGKVLKAETRAENAESKCTLLTDTNLELSEELSFLRGRAESLENSLHEANHVKMSTVKDIGIRTKIITDLVTKLALERERLHQQAEKPVDPSNEEEKTRSSEDDDSGGEGTAEAVRTIQPSVLNWKYITVAFLILMDPNFPYQSPSFTLGDFDPNYMSGFDGGDSFGRIFRNRERKCFDTHRLEEIENLLQILSARSSGGTGHLKRHAESCAKKQGIQLRQQQLMLNPDGDHIDAVRQAIAWLTASNPRIAAWKRFCNAAGSSPAETPSYPHYSDAIHHEAQDFNVLGWWNDHKITYPVLSKLARDVLTVPVSTVSSESAFSLCGRIIEDRRTTLRSDHVEMLLSVKDWELARQHAQYTADNQELAAHFEQLYLDPDQPQ

SEQ ID NO: 119796 - protein, 291 aa, Oryza sativa
  unsure (1)..(291): unsure at all Xaa locations
  Clone ID: PAT_MRT4530_22979C.1.pep
MALAVLQLLGGKSMGMNPSHFSSSHTPHLVPSSVLSALFVLKMDPNFPYQSPSFTLGDFDPNYMSGFDDTXRIGSNSTICGGGHLKRHAESCAKKQGIQLRQQQLMXDLPLNFGEFPAFEHYIQQSHNPRFKATGMKRVGDHIDAVRQAIAWLTASNPRIAAWKRFCNAAGXVRQQRPPPIPTTXDAIHHEAQDFNVLGWWNDHKITYPVLSKLARDVLTVPVSTVSSESAFSLCGRIIEDRRTTLRSDHVEMLLSVKDWELARQHAQYTADNQELAAQFEQLYLDPDQPQ

SEQ ID NO: 119797 - protein, 53 aa, Oryza sativa
  unsure (1)..(53): unsure at all Xaa locations
  Clone ID: PAT_MRT4530_2297C.1.pep
LRAPPPLXPWLASWLSAKPSRAXQRLRRPIGLGPIWTVSPVDRRWTTHVVPVH

SEQ ID NO: 119798 - protein, 62 aa, Oryza sativa
  Clone ID: PAT_MRT4530_22980C.1.pep
LSATNALGSPSGSDLSDSSHHSFPSNMSSSPPHHHLPPHHVYHLITRARGVVVPSPPPLQRL

SEQ ID NO: 119799 - protein, 566 aa, Oryza sativa
  Clone ID: PAT_MRT4530_22981C.1.pep
MKNLVALNASNNRFTGQISDHFCSSSPSLMVLDLCYNLFSGGIPPGIGACSRLNVLKVGQNNLSGTLPDELFNATSLEHLSVPNNGLNGTLDSAHIMKLSNLVTLDLGGNNFNGRIPESIGELKKLEELLLGHNNMYGEVPSTLSNCTNLKTIDIKSNSFSGELSKINFSTLPNLQTLDLLLNNFNGTIPQNIYSCSNLIALRMSSNKFHGQLPKGIGNLKSLSFLSISNNSLTNITDTLQILKNSRSLSTLLMGVNFNDIMKTTNNFDKENIIGCGGYGLVYKAELPDGSKLAIKKLNSEMCLMEREFTAEIEALTMAQHDNLVPLWGYCIHGNSRLLIYSYMENGSLDDWLHNRDDDASSFLDWPTRLKIAQGASLGISYIHDVCKPHIVHRDIKSSNILLDKEFKAYIADFGLSRLILPSKTHVTTELVGTLGYIPPEYGQSWIATLRGDIYSFGVVLLELLTGRRPVPLLSTSKELVPWVQEMRSVGKQIEVLDPTVRGMGYDEQMLKVLETACKALSAERIRLALILHLFVETLFMLKLYRHDKKVETTSKRLERYQDILL

SEQ ID NO: 119800 - protein, 446 aa, Oryza sativa
  unsure (1)..(446): unsure at all Xaa locations
  Clone ID: PAT_MRT4530_22982C.1.pep
MDGGVETDAAAEGGGVVAEEEHLRRITSGVERFEELAVGKIMDPNFPYQSPSFTLGDFDPNYMSGFDGGDSFGRIFRNRERKCFDTHRLGEIENLRQILSARSSGGTGHLKRHAESCAKKQGIQLRQQQLMLNPDGDHIDAVRQAIAWLTASNPRIAAWKRFCNAAGXVRQRRPPPIPTTXDAIHHEAQDFNVLGWWNDHKITYPVLSKLARDVLTVPVSTVSSESAFSLCGRIIEDRRTTLRSDHVEMLLSVKDWELARQHAQYTADNQELAAHFEQLYLDPDQPHERKHEVVELTEVALRWDYDHCSCSRHRQNLEPPLKPAVLFVTVRSDTTIDGMGHLVPSDDLRWMLVPATDVTRILAMFQPARANLDENIVGEHDRRRVPIRHLVAEGGSAEVAEDNIEEAEGMGRGKALEGGAGTKAVKEDGGGARKLEARELLELGSL

SEQ ID NO: 119801 - protein, 122 aa, Oryza sativa
  unsure (1)..(122): unsure at all Xaa locations
  Clone ID: PAT_MRT4530_22983C.1.pep
MIEKSIEHMMVMPVRSKRGLMFYSHHLLNYIASPSLSNLFHCWASPMPSDTDHXPPIASTSALYTAVLNVTXGLPDTTRMASVGVWVTVNGHFKLPGTKHFLENGKEMQFTPLMNHSNAKNN

SEQ ID NO: 119802 - protein, 1140 aa, Oryza sativa
  Clone ID: PAT_MRT4530_22984C.1.pep
DCDRYSSKLPTISSLSLGLLLLISLASLTSSCTEQEKGSLHQFLAELSQDGNLSMSWRNDRNCCVWEGITCNRNGAVTDISLQSKGLEGHISPSLGNLTSLLRLNLSHNSLSGYLPWELVSSSSISVLDVSFNRLRGELQDPLSPMTAVRPLQVLNISSNSFTGQFPSTTWKAMKNLVALNASNNRFTGQISDHFCSSSPSLMVLDLCYNLFSGGIPPGIGACSRLNVLKVGQNNLSGTLPDELFNATSLEHLSVPNNGLNGTLDSAHIMKLSNLVTLDLGGNNFNGRIPESIGELKKLEELLLGHNNMYGEVPSTLSNCTNLKTIDIKSNSFSGELSKINFSTLPNLQTLDLLLNNFNGTIPQNIYSCSNLIALRMSSNKFHGQLPKGIGNLKSLSFLSISNNSLTNITDTLQILKNSRSLSTLLMGVNFNGELMPEDETIDGFENLQFVSIDDCSLIGNIPFWLSKLTNLQMLDLSNNQLTGQIPAWINRLNFLFYLDISNNSLTGGIPTALMEIPRLISANSTPYFDPGILQLPIYTGPSLEYRGFRAFPATLNLARNHLMGAIPQEIGQLKMLRTLNISFNSISGEIPQPLCNLTDLQVLDLSNNHLIGTIPSALNNLHFLSKLNVSNNDLEGSIPTGGQFSTFQNSSFVGNSKLCGSNIFRSCDSSRAPSVSRKQHKKKVILAITLSVSVGGIIILLSLSSLLVSLRATKLMRKGELANNRNEETASFNPNSDHSLMVMPQGKGDNNKLTFADIMKTTNNFDKENIIGCGGYGLVYKAELPDGSKLAIKKLNSEMCLMEREFTAEIEALTMAQHDNLVPLWGYCIHGNSRLLIYSYMENGSLDDWLHNRDDDASSFLDWPTRLKIAQGASLGISYIHDVCKPHIVHRDIKSSNILLDKEFKAYIADFGLSRLILPSKTHVTTELVGTLGYIPPEYGQSWIATLRGDIYSFGVVLLELLTGRRPVPLLSTSKELVPWVQEMRSVGKQIEVLDPTVRGMGYDEQMLKVLETACKCVNYNPLMRPTIMEVVASLDIRSPRLVTDYYHFRALSAERIRLALILHLFVETLFMLKLYRHDKKVETTSKRICNKVADRMASYGAVTVAPGSTCYWSQAPEFVTSLVSASPAICPRLLVNGN

SEQ ID NO: 119803 - protein, 585 aa, Oryza sativa
  Clone ID: PAT_MRT4530_22985C.1.pep
MVEVGQKAHRQHVSELEARKAVLAEIANEVEEERQAALIATTAMNETQDALRLQHGNWEAELRKKLDAAQGVLDAAAVREQRVAETEAASRRREETLEARAMVLEERASVVERDLAEREAAAIIREATLAAHESACAEEESALRLREDALTERERALEEAEAAAHRLADSLSLREAAQEEQARRNLECVRAERAALDQRAADLEAREKELDARARGGGAAAGESDLATRLAATSMDPNFPYQSPSFTLGDFDPNYMSGFDGNSGSAPTPPSVEESRGGPRNSDGSSVLNEHVWAIVQKFYQFLETFYDCTLTLSQVYYPTANIILHNLLEIATLFKEYENDDVLTEPVFHMKQKYLKYWKNIPMLYAFAFVLDPRCKLRGLSAILSLVGDTIGVDYSSFYTEVRRKLYEVFGRYEVKFQEVRQQRPPPIPTTGKKKIQWGRIWGGSSSSSIQGGGSSSATSGDASSHVVAEELSGYLDSDAIHHEAQDFNVLGWWNDHKITYPVLSKLARDVLTVPVSTVSSESAFSLCGRIIEDRRTTLRSDHVEMLLSVKDWELARQHAQYTADNQELAAQFEQLYLDPDQPQ

SEQ ID NO: 119804 - protein, 320 aa, Oryza sativa
  unsure (1)..(320): unsure at all Xaa locations
  Clone ID: PAT_MRT4530_22986C.1.pep
MGRDQQAVSGLQTGKDIKFSDLLALIKKKEQALAASPRRRQAFGWFDLELDSLLGLRRRKNAAAAAASPPRFEELAVGKIMDPNFPYQSPSFTLGDFDPNYMSGFGRIFRNRERKCFDTHRLEEIENLRQILSARSSGGTGHLKRHAESCAKKQGIQLRQQQLMVNPDGDHIDAVRQAIAWLTASNPQIAAWKRFCNAAGXVRQQRPPPIPTTXDAIHHEAQDFNVLGWWNDHKITYPVLSKLARDVLTVPVSTVSSESAFSLCARIIEDRRTTLRSDHIEMLLSVKDWELARQHAQYTADNQELAAQFEQLYLDPDQPQ

SEQ ID NO: 119805 - protein, 214 aa, Oryza sativa
  Clone ID: PAT_MRT4530_22987C.1.pep
MDPNFPYQSPSFTLGDFDPNYMSRFDDTSGSAPTPPSVEEVFGRYEVKFQEVRQQRPPPIPTTGKKKIQWGRIWGGSSSIQGGGSSSATSGDASSQVVAEELSGYLDSDAIHHEAQDFNVLGWWNDHKITYPVLSKLARDVLTVPVSTVSSESAFSLCGRIIEDRRTTLRSDHVEMLLSVKDWELARQHAQYTADNQELAAQFEQLYLDPDQPQ

SEQ ID NO: 119806 - protein, 168 aa, Oryza sativa
  unsure (1)..(168): unsure at all Xaa locations
  Clone ID: PAT_MRT4530_22988C.1.pep
HHNCTTQAGSFPTSSQPAAQRAARELAGVPPLPASDEGDGGGTRVHRPLLRGRRRRRESSTTSSAARKRWRGDDDRSMVPLLSRLAAVGKEAGDAAPRRRIENAEAXTDRGGQGGVSTTIPATVPWRLGTRRLCPRSCLHGAGAEDGDELGGTEAWDGDELGEPEREM

SEQ ID NO: 119807 - protein, 67 aa, Oryza sativa
  unsure (1)..(67): unsure at all Xaa locations
  Clone ID: PAT_MRT4530_22989C.1.pep
LVSSCMAIDRSDLASLAPPFLFQQSHTTWITPPMHHQKRVEXLHCTCVAIVTVPCELSHTPSCACVA

SEQ ID NO: 119808 - protein, 653 aa, Oryza sativa
  Clone ID: PAT_MRT4530_2298C.1.pep
MGDDTHPGEDRAGKGEGAQIAAVGGDRGAHTAAATTGLDKERASGIGYGGERGGGGGKTTSSATTDLGDGRDRGGGGDTAAASISGLDEAGGVGEHNGSGDARGSTGGGPLRSLAGGEVSGGNKGPNDGRGGKDNGGAPLTAWALDKLVCEPVAGTAGPAAATNHPVGNRTVVGYEPAVREGIGSPSRLIGPESVWDLQRGAKHGRKGKATGERPSNRSIQKEGLHVTIVKNRTEWAVEPEKTRTGHLDGSVQLKDRPCNRSAALVGLTYRSTNEICVEGGFRLQIDTSVTPGSDSKAYTTPSDTAVLTPPGLEAADPAPPPPDLAGERRWRGGRRLWTLALAEVRPRRWRPALAEARPRRWRPALAEARPAAGEAVFRGGAAAVVDAGARGGKCNDILVLLYVENVYYTCTITSRRKRKGKAGSGQLRPRGGGVEAAEEEGGLGADGHPAAASLRPAYPAREAIATNREAPDMMVGRARDDSTAMPRDMVDSHACRDMHAAHASKQIAHAQAGPLISGSVELSKRLPIQTETKPKQSKKTGIQTCSNDNSSTPAAQQVTSTTKLRANAVMFIRYNNYGCFSLYSSMPPSRHAATHTTPVQRNKEDTCLHEASKIRLIRSTSRLLLPTYQHNNAMMVLQPSFLTIYLRFCSKA

SEQ ID NO: 119809 - protein, 55 aa, Oryza sativa
  Clone ID: PAT_MRT4530_22990C.1.pep
MGKTQTINHFLVNKSWYLVDLPGYGMYHNDKIIDGIANGEKQSEKYNFALVFIGL

SEQ ID NO: 119810 - protein, 82 aa, Oryza sativa
  Clone ID: PAT_MRT4530_22991C.1.pep
MGRKKRLAAMVEVGSYGISGASPSDDNRREKSVEEGPDHSDLSPASPEVADLVRPLPLPCRSGDGGYREGESVVVVAKGEVR

SEQ ID NO: 119811 - protein, 42 aa, Oryza sativa
  Clone ID: PAT_MRT4530_22992C.1.pep
MGISHILFGIIVKVDVRVFYVEKSARPDSQDNIVIFSSFDRI

SEQ ID NO: 119812 - protein, 82 aa, Oryza sativa
  Clone ID: PAT_MRT4530_22993C.1.pep
IQFSDPSNGMIFREASKILNVWCLHLCFPRKIVISGPKPNLFFLEAPMLNFTCVGFSVCLINRYPPQVPLLSLLQLYLPGAG

SEQ ID NO: 119813 - protein, 130 aa, Oryza sativa
  Clone ID: PAT_MRT4530_22994C.1.pep
LGGKTITEFSNTKDQLHSLAVSIVAWSQKRILLVIKRVWEMLTAAKTVMDVTLHWSLMLKKCSRVEIFVMGVSECNPAITGGGDVPLLFHLFDGLLELFFRHVDHVVSGFIAPCPGKTDTIISKFLNHVC

SEQ ID NO: 119814 - protein, 342 aa, Oryza sativa
  Clone ID: PAT_MRT4530_22995C.1.pep
MQPPPMRERQRWRPEEDAILLAYVRQYGPREWSLVSQRMNRPLHRDAKSCLERWKNYLRPGIKKGSLTDDEQRLVIRLQAKHGNKWKKIAAEVPGRTAKRLGKWWEVFKEKQQRELRDRDRRRLPPPLDGDERGCAGGRYDWLLEDFADKLVNDHHRRMMAAPILPPWMSSSPSSSSSPSVTLSLASAAVAPAPAAPPPTWGGGGGGEVVVAELMECCREMEEGQRAWAAHRKEAAWRMKRVEMQLETERACRRREATEEFEAKMRALREEQAAAVERVEAEYREKMAGLRRDAEAKEQKMAEQWAAKHARLAKFLDQVAACRRWPPVEINGGGGGGPGGGR

SEQ ID NO: 119815 - protein, 342 aa, Oryza sativa; identical to SEQ ID NO: 119814
  Clone ID: PAT_MRT4530_22996C.1.pep

SEQ ID NO: 119816 - protein, 693 aa, Oryza sativa
  Clone ID: PAT_MRT4530_22997C.1.pep
MTNKRKQGCSIRKMKLSHEDINPPLIPADVARGGDDHVFTGRHTLPSALLRFEARRGEPKSIVGAFDHKILATPPPAHGKKKKKRLIVNIVDVHARAFVVGSWPMLQDVLLDPIIYIPIDEYRLFTLGSASFDMLYMPPPTYDDDDADDDANWKKNFSCLNLPKPAFQCDLVTSYAVHPDKQTIFVSSVEQSPGVVVPATFSFRTAEPMMWRRHGQWQLPFTGRGYFDPRLDAWVGLSGDLNTVGHICSCDVVSTDDTVASRPPALKISKEKLFSMVPAERHIGATLVYMGGGESNFCLLESIHIEDDIVADQLTDSDETNEVSSVDEVNEIDFDDSNEANDEDSADEVGEEDQLDPKCFLRLTTFSLQYDRNGALTTGNSRRVWYYSMPLQVTEAMLKYPVAFWMHLRGTLRPFTVQRAGIRPELPRWRVAQIHRHVTAWAHKTQARVTKVGHPFFGAIETGGVGNEVAVPCGRPGFAVRTESGGGSKGEPRAAAAIGCRSEEKRGDGNGGEEKRPAARRSSSSIRSQPHGGPHRRPVAGADAARDTPPSAAQRGPARRGEVEPPAPAPLGSCRQSSRRIVPRRRAAKLPPHRPSAGMEMDSRRRAPTDAAAQRRRRSGQRRKAEAWRLGENPPRQSAWSLSRAPSRASAADIPPPFEVDPSIRRPAGPPRPRPAVEGHGAAAAAPRRADAT

SEQ ID NO: 119817 - protein, 176 aa, Oryza sativa
  unsure (1)..(176): unsure at all Xaa locations
  Clone ID: PAT_MRT4530_22998C.1.pep
HSLSRPPPSSPPTSPPSPPRLPXPSPPPSPPPSPPPSPPSPPPSPPPPRPLHRRPHGRSSSPPSVHRLPRPPRPRPPRHRDPRRWDPRPPPPFLSPSPPPLPPRPXTPPPSPPPSAFPTSPTPGLMTPXPAPPTTSTSSPLPPRPRVRRHRDLGRLRPAPPSPSTPXSPSTPPPSP

SEQ ID NO: 119818 - protein, 578 aa, Oryza sativa
  Clone ID: PAT_MRT4530_22999C.1.pep
MARKRRAPTPPPPPPPPPEAESSADSSGEEEEEEEEEEEERESPVAPPPQKPSGRGAASSDEEEEEEEDSDTDTYAQGFQLRKVGGGDEEGEEVEGDSSESEPEPEPVKKESAKKAKAEAKKKRAAPEPAPSGKAKKAKPEKSSSAAAPEPAPSSGKSKKAAKAEAAKAAAAEPAPSTGKVSKYNLAPEPSPSSKSGKALSRWTTDDEVKILEVLVAHFKSHGTQLKVEGIIAAVGDSLERKSIKYSDMYEKVRRLKQRYEATAKKVEHGGDLPAKEDDLRMYQLSSEIWGKNAKDAGNSSKNKKGQAKKDKVSGDSKEAAKEDKVDEAAIAVNEKGGTLAENKKGKTNKQKTGMETKVGSSKEAALAASPTKGKKKGSHKDKLDEEAKSGTAKVTSTIATDDDDGTLGGSKREKAGKEELDGDTHIVMPKEATTTAASDDGTLVGSKKGKADNGKLDGDTHSVMPKEATAGTQNGGILTGGENHKEKVDKDANVPSIRREYAELQSLYPNLASFVNGIEAQHPCGSTFKRAFEFISDDKACTLESKIKKQKIAEVRMQLRLADTKKEVANALLGLLD

SEQ ID NO: 119819 - protein, 38 aa, Oryza sativa
  Clone ID: PAT_MRT4530_2299C.1.pep
RRGILNYGKSPAGASLACLINKDICTNSQSLTYKAFYY

SEQ ID NO: 119820 - protein, 54 aa, Oryza sativa
  unsure (1)..(54): unsure at all Xaa locations
  Clone ID: PAT_MRT4530_229C.1.pep
GCEFMYSCKFRWGCVHPFLGVEAGLIHYLKKCKGCTIWHSEVRFPEYGLLVNXK

SEQ ID NO: 119821 - protein, 81 aa, Oryza sativa
  Clone ID: PAT_MRT4530_22C.1.pep
MATGGRHGAGLGATATAMRRRRGAAVARGARRRRDGRQRRALPKFGKVENNIKVNRPCMRQKAQVPEFINVNYFEAQSVER

SEQ ID NO: 119822 - protein, 53 aa, Oryza sativa
  Clone ID: PAT_MRT4530_23000C.1.pep
RTLAAGRGKGKMKICPFQKARVEAESWARCCTGSQAHTLLALASTSGDLEAPM

SEQ ID NO: 119823 - protein, 994 aa, Oryza sativa
  Clone ID: PAT_MRT4530_23001C.1.pep
MVVSAYKGVIDSVLAKLRELMGGDMCANLIGVSSRDILFLRDELPAMSALLEKLDDAEELDSEAKNWRNQVREMTYDIEDCIDDFSNNITSVDAKTGFLYKASQFLKTCRAHLEAAWQIKELKTRLQEINERRKRYKVGHYISNTTSVTVDPRISAFYKETAGLVGIDSPKRELTKLVMDEETQLKVMSIVGFGGLGKTTLASQVYREVGVQFNCKAFVSVSQKPDMVRLLTSLLLQLKQHPSHACGVQELIDNLREYLMDKRYFIVVDDLWDVPSWNIITCAFPQNNQHSRVIITTRHGDVARTCSSDHGSINNMKPLSAQNSRELFFNRIFGSKDYCPSYLEEVSCKILKKCGGLPLAIVTVASILACQPTRLKEEWEYIQSSLATNKFARKSTLEDMMQILELSYKSLPHHLKACFLYLGAYPEDCVISKVDLIKRWVAEGFVSHSPGQDAWVVAESYFNELVNRSMIQLPYQGYYNEVSHCKVHDMMLDMILMRCKEDNFISVIQDPRAAIEVQDKIRRLTIDLNGAMGDTMDMNITRKVSQVRSLGVFGGSKWIPPLLEFKFLRVLFLEFFLREMIIDLTGINQLSQLRYLKVECKECLMDGDIPSQVSIVLPSQIRRLQHLETLELPWVSKCSIPSISGIIDLPRLTHLVLRQHKGGLPDGIRKLKSLRTLHGFNLPVSSLENIDALGELTSLADMSLHCGKQDTKSTTPGWMTALSCSIEKLGNLKGLYVRSNSPSCCADAMSSWFSPPFLNLEKLDLLDWTFSKVPRWIGQLHSLRELALGGKKILQEDVSMIGTMLPFLTHLSLRIVTCNIAVKESRIMIEGSIGFAALRFFCFDSNRMSHLEFGVGAMPQLKRLLLALDPWEWDEATPVGLKHLLYLEEIRVLTASTAVASAGSESMNGKSALVKGVFHDAANALQSRPAFTVLPRIRSLSDHLHINDAEGILVIGVPPNVTTYMGQESDHHGIFFHGFVGLNVSGFMGENVQE

SEQ ID NO: 119824 - protein, 82 aa, Oryza sativa
  unsure (1)..(82): unsure at all Xaa locations
  Clone ID: PAT_MRT4530_23002C.1.pep
MICGDQDYRLRHHRVSLSLALIALIFTKLIILLLYYNDMRILMLVIYAAGKTTILXNLKLTEIDTTISTISHNVVAGEHKNI

SEQ ID NO: 119825 - protein, 453 aa, Oryza sativa
  Clone ID: PAT_MRT4530_23003C.1.pep
MSPRLRLHHLLLSILSALPTCPLDHSTPTSAAAAAAATASHHHVVTTLPGYDGELPFRLETGYVAVDEEEHGAELFYYFVESESGDPRRDPLLLWLTGGARCSVLSGVFFEVGPVRLALEHHRPYDAGELPRLRYHPHGWTKAASVLFVDSPVGAGWSFSRHPDGYLVGDVSASLQLKHFLAKWISDHPEYLANPFYIGGDSYAGKIVPFLAQKISEDIEAGVRPIVDLKGYLVGNPVTGESIDFDSRVPYAHGVGIISDQLYETIMEHCQGEDYSNPKNAICRQALDRFNELLGESSGGHILYNYCIYDSDIDGSIQEKRKIPPFPPRECIGSVDEWLRCHNGDLPYSMDIKSNIKFHHNVTTKGYRALVYSGDHDAMIPFLGTQAWVRSLNFSVVDDWRAWHVDGQSAGFTITYMNNMTFATVKGGSHTVPEFEPERSLAMFKRWISNEPL

SEQ ID NO: 119826 - protein, 45 aa, Oryza sativa
  Clone ID: PAT_MRT4530_23004C.1.pep
LWKCWQFLVQEIENPTVTHSQSMISTLHCRFFFQPSCRIPAARGS

SEQ ID NO: 119827 - protein, 750 aa, Oryza sativa
  Clone ID: PAT_MRT4530_23005C.1.pep
MCDKDPGIKLFGRVIPLAPEAEAAAAADGSDQPEAAAAAAAEVEPAAQDEDHHKETEERKYDEMKVDVPQEEEDNEMKVDAPQEKKDNEVTADVPEEKGNDEMRVDASESIESIEPVSRSTLDNKKEDQGQMNNVEEKAASDSKDENEKTANDESGQDKEQNGTNAAAVPTGENQEDNSCISSITSHNVLPENAAQVDKNSTPVYCNGVGPVPQYYLGAPYMYPWNIGWNNVPMMVPGTSMPESASQSESCSTSSAPWMNMNSPMMPVASRLSAPPFPYPLVPPALWGCLSSWPATAWNIPWIRTNGGCMSPSSSSNSSCSGNGSPLGKHSRDSSLPLKEDKEEKSLWVPKTLRIDDPDEAAKSSIWATLGIKPGDPGIFKPFQSKERYRSIDEGLFASHLNPDQIFLYRSVREIPPNGVNRPPVRNTIPCIPAHAVIYTFAQGGGRGVRHNRMLKKIASKEPQNTAELFELADRVACKEKAWTWNSSGSGAAAATPELAARNERRKKRRKKRSARSNDEGHVLAAKGVSRPQRKGKAAGGKQKDTGTSSGGRSADKWCSVHNTSHHNLADCRSVKNLAKRVKKYEQERKEGRREEKAPAAPSNTRQSEAKEKAPIEEPDDADLGFQEPQHVITTIDGGACAHASRRSFKAMKHELLATVPTHEAARWSRWSEVKLTFDQIDHPASAARGGQLALLKMLGLGCPITVHGDVKIALACVELHASSLRSRGRRRKARGLNLTRPEETEDFER

SEQ ID NO: 119828 - protein, 367 aa, Oryza sativa
  Clone ID: PAT_MRT4530_23006C.1.pep
MASSKPHLGLVLSITCLLLQLLLVAANPPPPPPPLQRPSCDKSDREMRFMFSQWMSKYSKRYSCPEEQEKRYQVWKANTDFIGAFRSQTEISSGVGAFAPQTVTDSFVGMNLFGDLASGEFVRQFTGFNATGFVAPPPSPSPIPPRSWLPCCVDWRSSGAVTGVKLQGSCASCWAFAAVAAIEGLHRIKTGELVSLSEQVMVDCDTGSNGCGGGRSDTALGLVASRGGVTSEERYPYAGARGGCDVGKLLSDHSASVSGFAAVPPNDERQLALAVARQPVTVYIDASAPEFQFYKGGVYRGPCDPGRMNHAVTIVGYCENIGGDKYWIAKNSWSSDWGEQGYVYLAKDVWWPQGTCGLATSPFYPTA

SEQ ID NO: 119829 - protein, 159 aa, Oryza sativa
  unsure (1)..(159): unsure at all Xaa locations
  Clone ID: PAT_MRT4530_23007C.1.pep
MAIAARALRRTPPPPRPLPLAGLLRALAGRSRPGPCVRPGRRPHRAAARCWAWTARASRGPALSRPTVSRALTNSGVIGPXSSRVQEYRRLIRXCEVHIAQEWLDKLPPPSYEERYVLTRASRNRELNKHARLGCQVVLTPELQGMVVAVPEPKPWDIP

SEQ ID NO: 119830 - protein, 294 aa, Oryza sativa
  unsure (1)..(294): unsure at all Xaa locations
  Clone ID: PAT_MRT4530_23008C.1.pep
MSFFFRMASRLRPSTPEEVVRSIKDSFQALHTKNGARALEEVEKNLSSLRQMLSGDGEAEPNQEQVLQITLEICKEDVLSLFVQNLPSLGWGVRKGIXSCWCIQKLDCSVERXYTGIYRIAGLEKLALLNVHDKSVPIRIASFXVGNELXQIELQKVRIEDVAVERSLVAAASGARRQMTAFFELYTRLLTSPNYVTRRQSVKFLSEFLLEAPNARIMKRYITEVRFLNIMITLLKVFVANPNKPRSIIEALIENRRELLKLLQNLPTSKGEDELDEERNLIIQGIQKLACSSA

SEQ ID NO: 119831 - protein, 167 aa, Oryza sativa
  Clone ID: PAT_MRT4530_23009C.1.pep
MPASWWSAAGRGKPSRSTTVVANTESGSHCLKVDGFSRSKNLRPGECLQSSTFPAGGHRWRMYCQPNSDGTEGTEGFVSVYLVLDEDVTKPVRAEYKFTVAVKNRLPFFLSKKPPEVPSLTPRVNTSDFDSHGAWGFAKFLKWEDLEKAGYLKYDSLIIKCSITIIN

SEQ ID NO: 119832 - protein, 66 aa, Oryza sativa
  Clone ID: PAT_MRT4530_2300C.1.pep
AASISSPLMAAGPLSNVGARRSDGMESGLFSIVRECHGVRSIRVALETAADRHSSKPAWRFNQAPV

SEQ ID NO: 119833 - protein, 50 aa, Oryza sativa
  Clone ID: PAT_MRT4530_23010C.1.pep
HEARRAYRLAFVFHYPHYKRLIAVAEGGRARSQSQRDWMADDGAGGWRGP

SEQ ID NO: 119834 - protein, 275 aa, Oryza sativa
  Clone ID: PAT_MRT4530_23011C.1.pep
EAQATAAGGLAGEMEVEAYRRLFPLAFLERHLRESVRPDARRPAEARPTTVALAAVSSAHGSALVRLGDTAMLASIKLEVMSPSGEAPDEGSIAVEFHMPPICSPLVRPGRPAEVAPVISKNLEDILMSSGMLNLKELCLISGKASWLAYLDVYCLNADGSLFDAALISAVAAFTHLEIPLVSVGDDGRVFTVGGNEGKAKYELVNREKRKLTITNVPFSLTCALHKDNVLADPTAEEESIIETSVTIVLDSSDQIVSIQKPGGAVTSMTTIKVC

SEQ ID NO: 119835 - protein, 112 aa, Oryza sativa
  Clone ID: PAT_MRT4530_23012C.1.pep
MALDLHLVCSSPCVLHITLAAGRTTRTHGGKNQRTEEEEGKEETGKADLEPLAMAAAVHPSRHDVLTAGVLHRLGSGGALSSHPDVAPARSSLLRRCCICLTTIETFGRTHR

SEQ ID NO: 119836 - protein, 104 aa, Oryza sativa
  Clone ID: PAT_MRT4530_23013C.1.pep
NPPPTNLGATIKGGPKRGLVKSKQNLGGPQNPGARNPWEPHKQKKGPCFLEKHKRAGVLRPGKTALTKKKPLPFLGGSESGQKGKPRKGGKFGAPPPPGGPGKN

SEQ ID NO: 119837 - protein, 146 aa, Oryza sativa
  Clone ID: PAT_MRT4530_23014C.1.pep
WRNQSPESKMWVLVRDCAWTGLPAWWMNGLFGGGDDWGAAGEEWERRRKRMRGDSAAGGCGCGGGGGGGGGGGGRGRGNPSKCWSIKDRRLWPHMPVQPRDAACSRHVGPHARLLVAPAVLSAIGSSGRLRLVRRRSSGRRRFSQV

SEQ ID NO: 119838 - protein, 164 aa, Oryza sativa
  unsure (1)..(164): unsure at all Xaa locations
  Clone ID: PAT_MRT4530_23015C.1.pep
KAELYKSRAIARYIFRKYKPEFLGLGERGSLEESAMVDVWLDVEAHQHEAGVRPILWHXIINKFEGRDRDPGVEDESVPKLDNRLGRVQAKLSGFQVPPREPICLAGLKHFCNMRFXNASEYPQXGRPYLHPXILCEALSALPSVALGLALLPPICPLVVRQRY

SEQ ID NO: 119839 - protein, 362 aa, Oryza sativa
  Clone ID: PAT_MRT4530_23016C.1.pep
MLKAPPTSFLSSLDPGGWRRRPFRRSPPPISAALMTNPAYFEVGRYLGGYGFMNITSYPSSQFGGLPDVAGIQNLGLGYSPEEIERLRAQDVGEGEVNIRLYEGRVVQGPLKGTEALFKVYPGSRSGASEADLMAVNELRTHAFLQNDASDICENIQFLLGAFETATGEQWLAFRDDGRYSAADYAKLTSERKLKEQSGSISFWNPYDRAYKLELKRYFVLKLLYGAMCGLVHMHNHDRLHQSLGPSSVVLKYSSVGSGALSDGLWRRASAAGASTPLEKRAFGIADDMQRLLENTFRLDIYAAREYFLADDRLSEAVDFLDLGDGAGWELLQAMLNPDYRKRPIAEAVLNHRFLTGAVLWN

SEQ ID NO: 119840 - protein, 130 aa, Oryza sativa
  unsure (1)..(130): unsure at all Xaa locations
  Clone ID: PAT_MRT4530_23017C.1.pep
AFVQLLAFRDDGRYSAADYAKLTSERKLKEQSGSXPMCGLVHMHNHDRLHQSLGPSSVVLKYAAFSSFNIGYSSVGSGALSDGLWRRASAAGASTPLEKRAFGIADDIYGAGLLLAYMSFIPFCEAGTMD

SEQ ID NO: 119841 - protein, 96 aa, Oryza sativa
  Clone ID: PAT_MRT4530_23018C.1.pep
MWGGDMLKDTDIALAPNFPSDEGQKRLEHLHRVMRCMREVESIAYQGPKLDVSAKMLSRRDMIAGAINASALEACCLPIAYGYGGRYATANSSLSK

SEQ ID NO: 119842 - protein, 56 aa, Oryza sativa
  Clone ID: PAT_MRT4530_23019C.1.pep
MLHTEREIDKKGHILRYHEGNLAEKANQGGSALRVTDALSLMATGQATLTLDPLEL

SEQ ID NO: 119843 - protein, 76 aa, Oryza sativa
  Clone ID: PAT_MRT4530_2301C.1.pep
TFSLFTRISLQVLRNQPICSMSTVTSSDYIRELHQSFSTYSITSTLLIPITCSMLPTYHLLSSFASHPFLLQIFEK

SEQ ID NO: 119844 - protein, 440 aa, Oryza sativa
  unsure (1)..(440): unsure at all Xaa locations
  Clone ID: PAT_MRT4530_23020C.1.pep
MSFLRALADSLSSLLYSAAAKGGDMDGAAAAPSPAAVVGERVAVKLRGYFELAKEEIDKAVRAEEWGLPDDAAAHYRNALRVMLEAKAARVPDAVSSXARGGRLGSTRRRSQSGRLRWRNDSGCSARGKVVTNNPVNRNDRAASTSFHRPTSQPSPTFNRGGQASSHQKSSSGGAKPVQRAGANYDDKLVEMINTTIVDRSPAVKWEDVAGLDKAKQALMEMVILPTKRRDLFTGLRRPARGLLLFGPPGNGKTMLAKAVASESEATFFNVSASSLTSKWIDSVMSARLANENDASRRLKSEFLIQFDGVTSNPDDLVIVIGATNKPQELDDAVLRRLVKRIYVPLPDPNVRRLLLKTQLKGQSFKLSRYSGSDLRALCEEAAMMPIRELGPQNILTIKANQLRPLKYEDFKKAMTVIRPSLQKSKWDELEKWNEEFGSS

SEQ ID NO: 119845 - protein, 89 aa, Oryza sativa
  Clone ID: PAT_MRT4530_23021C.1.pep
ANRSRRPWLMQSFSSRQSVPGSLPECLSECSSNPWASTAEVASSCANGRYCSIGSWAIYTYAVKHSKVYHIPGTSYVPPTTIGHHIRKS

SEQ ID NO: 119846 - protein, 46 aa, Oryza sativa
  Clone ID: PAT_MRT4530_23022C.1.pep
MAPCTLGPQTLGHFRTVAMCSSWMDQALPMPPNPNIAHSSRARGGT

SEQ ID NO: 119847 - protein, 74 aa, Oryza sativa
  unsure (1)..(74): unsure at all Xaa locations
  Clone ID: PAT_MRT4530_23023C.1.pep
LKVIYIRTHSLPFWNINAHSVXYITQGRARVQVVNNNGKTVFDGEXRRGXLLIIPHTHVVIKHKESLIYVMNTV

SEQ ID NO: 119848 - protein, 69 aa, Oryza sativa
  Clone ID: PAT_MRT4530_23024C.1.pep
ITHLKSLLTKYGKPIHWCFLYTINKSINSCIAYFKVKRKKVCSSSGIFQCRGEKGEDLRQNITVLELIM

SEQ ID NO: 119849 - protein, 229 aa, Oryza sativa
  unsure (1)..(229): unsure at all Xaa locations
  Clone ID: PAT_MRT4530_23025C.1.pep
NCVKKRRSGSHPSHGSRAFYQHSSHCHGFPPQVHCHMHPSSLFFLSLVTSXSHNTQFTTAHMRRHAPLVHCIMVIGAXAQQHSTAHIIAHVAASIHTLSCXXPVRCHRPLLQHINLASISSILLTSFPGPHASVWHTHAPRFPXXCLARGTVXGHCLFSHSCLCPPLPIKHLRLAAGXXSXLASPNISIXASSSVIVPNWAHPTSHATLITLHGPKGKVGPGGPYRAPF

SEQ ID NO: 119850 - protein, 413 aa, Oryza sativa
  Clone ID: PAT_MRT4530_23026C.1.pep
MASPLPTMETAHATVLAIGTANPAKCVAQEEYVDWYFRVTKSDHLVDLKAKMKRMCDKSGIRKRHLCLTEDMIAAHPELLDRAAPSLDARLGIARDAVPELAMAAAARAIAEWGRPAADITHLVVSTNAGAHAPGADARLAELLGLRATVQRTVLYMHGCSAGCSALRLAKDIAESNRRARVLVACAEVFLIALAAPDEARLDALVAASLFGDGAGAVIVGTDGDDDPGAPVEHPPIFHMLSASQTTIAGTHQRVSLQLSERGLDYKISGEVPALVRAGIERCMEDALAPLGLAGCGGGWNHLLWAMHPGGRAILDSYEAGLRLEPGKLAASRRVLSEYGNMSGAAIIFVLDELRRRRRRRDGGEEEEEESDEYCEWGAMVGVGPGLTIETMVLRASATGGHVGDEVKKSTTA

SEQ ID NO: 119851 - protein, 358 aa, Oryza sativa
  Clone ID: PAT_MRT4530_23027C.1.pep
MAQASPFCGKLNEDASDHLQRFLDICSTYTMKGVSPDVVRLRLFPFSLLRKAKQCMGETAGVSGRLSSSWDGRWLILQSFYNGLKPASCDHLDAADGGAFFSKTVRGTVKLIKKMVSNMGWGAERLQTRQRGMHTVKETEMLAAKLDLLMKRSVAQRVTPGMTTLRPVRRKCSWGTTTGFVHKEAMGGASPAHTSKEATIITLSFNKMIEIQLAQLAALVATNESRRILGQPEPSLEYVKAITMSRGKSTRDPPYPNPAGTQSSNKEASPASPADTDKAAQPSKIVPQEYCDTSAASVSPKIQETALCDLGASVSVMPKEVFDKFNFTVLAPTPMCLQLADSSDRYLAGIAEDVPVKI

SEQ ID NO: 119852 - protein, 71 aa, Oryza sativa
  Clone ID: PAT_MRT4530_23028C.1.pep
KTEKNIIDADHLGPSDRITACLIRSTFKALFNHSVYNYCWTLKQRTLYLPQEAASDTGETEKMLRWFMVRA

SEQ ID NO: 119853 - protein, 263 aa, Oryza sativa
  Clone ID: PAT_MRT4530_23029C.1.pep
MTALRLATRPSPRRKTPWGAAPSPAPRGELGTTGDTSPRAPTHVALLPRPLYTNPRQPPPSRLHRSPPHPPPPPLRRTHVAARLVERVRRRMSSSRLDTWTLKEEVASMDKRWLVDLGHPLVNRVADSFIRAAGVGAARAVSREAYFVTVEGLGGDTAGLDNAVKRSNFSRGDDGQKSLDAVVKSAGKEAFQWGLAAGVYSGLTYGLREARGCHDWKNSAVAGAIAGVAVALTGDTGNADHMVHFAITGAALSSAASLLSGIY

SEQ ID NO: 119854 - protein, 388 aa, Oryza sativa
  unsure (1)..(388): unsure at all Xaa locations
  Clone ID: PAT_MRT4530_2302C.1.pep
MSITTQSATDKTEYYYMSPVSVVGLDRSQVQQPDSQARRRLTTSRVDTYSEQLSTRIVCGRVHRIIENNLDKCRVVAPNLPTKTDDLSHSTGHGWTIREKVVNGYFLANVVGLITRHDCERTSGYAIRWLRNNYDWSSTGIVTVLVPRLQMIERHLLTGSQPVNRSDLSCIYFKWSSYDYYLVLDQRCSDSPTTSTSTKLISVHNNAKCFTQRSLTTTTPSVETYAIVPLRRLDKASEEPKGSSXWGRPEPIRPCRIPPRDNQLPTQSTXSHNIEAYIRQNMPPDIDFRDRHGYSPTLSPDTVRRYESAISDLAGHGFEVEGYPMPDLLPDLGEDGCRQRFKKFLHFAHTRFLSQETKITRVCSVMRGLLGESTTRFHRCSTESQLLH

SEQ ID NO: 119855 - protein, 134 aa, Oryza sativa
  Clone ID: PAT_MRT4530_23030C.1.pep
GASWPELRPKWLRPDPDKAREGAPNPPRAGRSLVRSELRRILSWRPLVHLVSPASSAHPRVASVLPSSIRPRATGGAMAVATWWWTTTAAVYCNATIASSYLPVVCRALATPTRLAPDAGERHHAKLHRQHISN

SEQ ID NO: 119856 - protein, 627 aa, Oryza sativa
  unsure (1)..(627): unsure at all Xaa locations
  Clone ID: PAT_MRT4530_23031C.1.pep
MDASRATTEQLMESGEDAKTTEGAKWMAKKRKRAVESIAAFCYEAGIPFNILCIESFQLMLEEIGKFGPGFQGPSMDELRENLLQEHVSAITDKVRWLKDSLEFGGCSIILDTWLDENGRRLMMLGAHSIIGLTFIRSIHLSSEAYNDAYKFRLLDSCIDEIGEKNVVQVVSNIEPNSLMATMLTAKRPSIFWTQCAARCIDSMLEDIENITFIKNIIEDARLITAFIYGCAHLLDMMHKFTNQRDIVQTGITHSITSYLNLKSLYDKRFELKTMFVSRDWEDSKWSKEAVGEKFYNLVVNKMFWHRVLYAISSLEPIVDVLRSDSGVLSMASIYGDLANAKKEIALRFLNMEKHYLPIWNIIDRRCXNASLKTPLHLAGYYLNPFFYFHNKNEIENLGIFTDALVECMLNMYKDQSTQEKILDQLELYKTSHDVFFFQINAISKLILLSYVIDFWWMLHRALGELKKMAERILRLTCGSFGCERSWIEMVIIHKKKSSQFTWKQFYDSAFVMVNGRLKRKGEREHSDPILPYLPDEDEPYVWLAEADMHENDNALIDVHKDEIRVMLTAPSINGEEGPSHYSGKGSPCDASCPKQAKEPWHDGLSLEEEHEGRCEDEQTHCSKRKK

SEQ ID NO: 119857 - protein, 51 aa, Oryza sativa
  Clone ID: PAT_MRT4530_23032C.1.pep
LEITRNNHSLQNCFWLLFIKCELLLCLTPWLDVEQNCINFSQSSQHLDRFC

SEQ ID NO: 119858 - protein, 210 aa, Oryza sativa
  Clone ID: PAT_MRT4530_23033C.1.pep
MLNPIVTYKDHSSALFRRYEKKFDHFNVEKNQKLLSVGSSNLESHEIESSDLTLSRYCAYLVVFQPDLLPDYSENAEDLFQDMKTELKDMLGCYHYYFSRGRKRANAIVNPSPANNNDDDNNNSKKQGSVRKGAELATLLLQLQKDMWKLLAEVWTEIVVYVAASNEVERIMAHRNVLCQGGEFITVLWALTTHTGITRDRHEIVVEHHP

SEQ ID NO: 119859 - protein, 117 aa, Oryza sativa
  Clone ID: PAT_MRT4530_23034C.1.pep
MATAARRLLLPALRKSLPAANGAARGVSTERAVGAAAVVGSHTAKWMQDTSKKSPMELINAVPPIKVEGRIAACDGRQDKGRETGSLGHPIEYICLDLDQPAVCKYCGLRFVQDHHH

SEQ ID NO: 119860 - protein, 102 aa, Oryza sativa
  Clone ID: PAT_MRT4530_23035C.1.pep
FWCFKSSRVTINLVKNISMEIFGLYCPFQIVPQKGVPKGKIAPFINQLPLKALNRLSPSSVVFSLSVQSPFVCSTGNMCPLPWRTLFFQTLYFYSIRIQNCP

SEQ ID NO: 119861 - protein, 904 aa, Oryza sativa
  Clone ID: PAT_MRT4530_23036C.1.pep
MAKMGAIMYMVQLDDQLETKELPIPPEVQELIHEYQEVFAEPTGLPPKRQCDHRIPLVEGAQPVNLRPYRQLNNVTVKSYPVPIIEELLDELVGAKWFSKLDLRAGYHQIRMVPGDEHKTAFQTHSGHYEYRVMSFGLIGAPATFQGAMNATWASVLRKCALVFFDDILIYSPDLPTHLKHLRTVLQLLKQDHWQVKLSKCSFAQQQVSYLGHVIGREGVATDPKKIQDVLNWATPTTVKKLRGFLGLAGYYRKFVRGFGLPSKPLTQMLRKGVTFKWTPEAEEAFNTLKHALVTAPVLARPDFAKQFTVETDASDTGIGAVLSQESHPIAFLSKALGQRSRGLLTYEKECMAVLLAIEHWRSYLQHQEFVILTDHYSLVHLADQRIHTPWQQRAFTKLLGMQYTIVGGYEKDPLASQLLAELAVDPSAKPHFSLHQGLLRYKGRIWIGDNPELQQQLISEMHHRPILGHSGFPVTYRKMKGLFSWKGMKKTIKNQLQHCQTCLQAKPERVKYPGLLQPLLVPEGACQVILMDFIEGLPTSERHNCILVVVDKFSKYAYFLPLTHPFTAESVANAFMRNIYKLHSMPKVIISDRDKIFTSLFWEHLFTKSGTALHMSSSYHPQSDGQTERVWGRKKHHGKTWRSFAVDFLGHRLGGKLDSKEGRMLASLKTCLVHMGGHVMTTRRMTRCRDKAIAKKASSSSKGACVNQTPNILVRSGSCNDSGPRAHHGRGRCGVSAGPEGGEAAGEHEEQARHAEQLLAGGVPEVVRQLRRHHGRQGDSVAAGLAPQLLLPGGHWPPPVPSLRRGVRHGALPQEARRLRGPGVPRDQHPVPPIALKHRLAFRCDDVGGGDPPGASTMLLDVPLVLCLVRRFLCEGGKASASGCLQGGELLVVELCLANGIWK

SEQ ID NO: 119862 - protein, 100 aa, Oryza sativa
  unsure (1)..(100): unsure at all Xaa locations
  Clone ID: PAT_MRT4530_23037C.1.pep
AASPFLQTAELYLTNIHMWHQIALXAHHYHYHDINVDHDIAQQLQLQQVVDVYFDRSLTQALAVSAINVPSRSGIYPRYYGAPXSTITTLGCGSVCGTTV

SEQ ID NO: 119863 - protein, 54 aa, Oryza sativa
  Clone ID: PAT_MRT4530_23038C.1.pep
MAMDGDGHEGHGHGLISDGLLWLAIARCCKSTCMEPIQGCFLSRQIQFKVRRKI

SEQ ID NO: 119864 - protein, 53 aa, Oryza sativa
  Clone ID: PAT_MRT4530_23039C.1.pep
MAYSEPHMSARLAVAAVDVATENASTGPAAREVPRVATLLDTELCGLEQLHEP

SEQ ID NO: 119865 - protein, 109 aa, Oryza sativa
  Clone ID: PAT_MRT4530_2303C.1.pep
MTSSPAAQAPLVAGELGHGGANRGHQRDEHDAGNSQGAARPRTTMGNGRRRGRVSGGLRLDGVGGAPVGFGGNGGVDGVRLLLANPVIATATGGDHHGDGARRLKRLRS

SEQ ID NO: 119866 - protein, 142 aa, Oryza sativa
  Clone ID: PAT_MRT4530_23040C.1.pep
AQVNPITEIDPESIPTILLVATWNGRTRKACSVYPGRNQHHSTSPRSCWKDSCRQILIGQELHRTTLLLLGPPCTSYPGKRKAEYSHSSGIQLSKCYSIIMGVQGYLMHAVLFYLCRILDESSILACHRTVRGFRSSAEIKY

SEQ ID NO: 119867 - protein, 640 aa, Oryza sativa
  Clone ID: PAT_MRT4530_23041C.1.pep
MGCSSSKKVEEEAAVKTCHDRRSFVKKAIAQRNLLASSHVAYAHSLRRVSLALFYCLAEDEHLYFLQDTAASSAAPCRHRPCSPERKVLVMNWLRPDAGGVGGGAPVHPVVEVEQRWEENDVAAETVTVDGFFGADPGQLFHPSSYAPVNAMPASPPPPQPTTTWDFVSWDPFSSLHHDHQQYVSYGVEDDEERRRRSDDEDDEQMPELEEESDDAADDDDGDGDVKLQAEASPAAVERPMAEEEEEEKTVDRVKNELRVVASEEIEQQSTPGFTVYVDRPPASMAEAMRDIQGHFVKIVDTANHVSVLLEVVPYQRKVRPAAPSDGDDEEGGGEVSPEPFELFKSHKESLDRLYEWEKRLYEEVKAGERVRLSYERKCALLRSQDANGAEPSAIERTRAAMRDLRTKLDISITSVDAVSKRIAAVRDDELLPQLAQLIRGQEQCQSIHRSDLLRCFFLFFLLICLRCFRLARMWMVIADAHRVMKRTADEACALLSSSSAAAARAAAGGEGGVRGPPPPPGQAPAATVVGAIGAGAPPVGRGHRRGGRRRPRANRRPSGGGPVPRSGTATLAWPTHSAIPPPAAPLPHVPTLPGLPLRASGPVLSAASVPWLAPCAVAAATTDPRAPPGPLAGRPGRGL

SEQ ID NO: 119868 - protein, 331 aa, Oryza sativa
  Clone ID: PAT_MRT4530_23042C.1.pep
MGEPRACKLWLLVVAMAASWSCSSMAMTFTIANYCSHPIWPGTLAGAGTPQLSTTGFRLDPGQTAQLAAPAGWSGRIWARTGCVFDADGAGVCQTGDCGGRVECRGAGAAPPATLFEVTLGRGGGEDFYDVSLVDGYNLPVVAIPRAAAACNATGCMADLNRSCPRELQVECAGGGAIACRSACEAFGQDRYCCAGEYGTPAACRPTAYSAIFKTACPRAYSYAYDDSTSTFTCKAAYDYTIAFCLPTSGINKSDAVFLGAQIIDGDGGNAPPAYRGGGGGGGGSRPPIYYNGGGGAHEPETMTASSASTRCTQPWLLLLLLLLLLLVFLF

SEQ ID NO: 119869 - protein, 135 aa, Oryza sativa
  unsure (1)..(135): unsure at all Xaa locations
  Clone ID: PAT_MRT4530_23043C.1.pep
RLPPPQPPLPXSPLPSRHPPTPAYPRRAPTTQTAYRGSPRRRRVNSSPPLPRPPXPKLLEALDPPPARPGSPHRCHPSPPPPPDTAAGYIPSPSSPPSPSPPLNAAAGRYPAKSRRGSGGFLRRRQRLECRCHCH

SEQ ID NO: 119870 - protein, 633 aa, Oryza sativa
  Clone ID: PAT_MRT4530_23044C.1.pep
MSARLLRRVLQERETAPQDPAAAAAAAEVEREEEEEASPPRVAARNPFDLLDEEEEEEEEKEDEVYSEQPVSYNEQKHSVNKKPGNAVPETNKKSKKKKKKSKADKQVSTKSRDEKSLDSILEDLSIEKKPMQQRVNQNERASGKEIEIDETTPGTSSILSIDPKHLKAENEMRRIFGSKVVDSLENQRNVPSSSTSRLRGVRRVAHNPRKTLLVTPSSYWPPWDKSMSMDIVETKSGFNYFRYIYDPSVSHVQDLFEVAKSANDLNAIAAILAKYPYHPESLLTFAELFKYSGEHQSSADAVEKCLFALECAWHPLFSPLHSNCQLKYSHDTNKPFFTALFSHMKNLDRRGCHRSALEVCKFLLSLDSDDPKGALFCIDYFALRSQQYKWLEQFAEEYQCDNSLWLFPNFSFSLAIARFYVERDATNGEASDHSDKSTSVDLMKQALMLHPLVLRKIVDKAPLKDSSWTQILRNVFFGSAKPGSPSLEHMISIYVERHYIMWRFPELQNLLKDAALLVIESLKQDNREAQDWACVRKEAFSSDKNEYSHLLVSDFSDTTPSLPPEELRPFMVAPGMAHEMPPAEQELGIEVRPRAPREVAGRNPALVFLESLLPWVDYGDNHHDENDQNNDD

SEQ ID NO: 119871 - protein, 120 aa, Oryza sativa
  unsure (1)..(120): unsure at all Xaa locations
  Clone ID: PAT_MRT4530_23045C.1.pep
QWSDLHFYRVCRWRNGLLNLAAGKGGLGLPHMFTLRVNKAGKIPATKGPPHSXXFCXSAPGTGGXRPXGSXXPXXXXXKFWPXXNQXNGXCPKPXXXGXXSGSPVNSXPPSPXNLFXXXX

SEQ ID NO: 119872 - protein, 48 aa, Oryza sativa
  Clone ID: PAT_MRT4530_23046C.1.pep
MDHMNDGVVRRRDTREGGRQSHGGAGAGAAGEADKALAHVVFIYELTS

SEQ ID NO: 119873 - protein, 683 aa, Oryza sativa
  Clone ID: PAT_MRT4530_23047C.1.pep
MAAVVVDVLLACLALLLPASSCAAGAPTVAAAQTSAGAGGGYGAGCAKSCGDLTFDYPFGIGAGCARGHDFQLVCNTTTQPPTLFLSDGFTQVINSIGAAGYVYVNFSLDIPMRSGVDLYNVSWTVPGDSFSVRDSARVTIGHGNFDVYLLDAYSSKRIILCSLTQPTNIDDTSDEGECQRNIPIVRGFQLQFVHRHEHGEGQRTSVDSVRIENDGVRLGWAIVDHSTCAEAKRDKSSYACASKHSRCDDNLSFTASRAGYLCKCTDGYQGNPYAPNGCRRDVGLPDARYDRFPSKNNCSPSCGNISVPYPFGLEKGCSANQHFLLRCTYYKDNKSTNPDLLWWATRYTDEPSTPTKLVRIDISEGLIILAGEHYEEFLAMDGTASARVSDGSAKDFVVKNLHFAITNQTCKEAQQNTTGYACVSVNSTCLAVNTGDGYIGYRCKCKHGFEGNPSIKDGCQGIVIGLSAGFGILLPGLSAKMLFHKWKKASVSVFHRDVKSSNILLDANYTTKVSDFGTSRLVSIDQTHIVTKVQGPFGYLDPEYCQTECLNEKSDVYSFGVVLLELLLMKEPIFTSENGLKLNLAGYFLEEVKVRPLSEIVTTKIYEEATEEEINNVTLLAEMCLSPRGEERPTMKQVEMTLQSLRNVTQTTAVHRANASDQLSQRCYSLEHEFIASAELPR

SEQ ID NO: 119874 - protein, 188 aa, Oryza sativa
  unsure (1)..(188): unsure at all Xaa locations
  Clone ID: PAT_MRT4530_23048C.1.pep
PRVRIDPSVEFTCRDFRDHAVPIIEGILDRGGLPVIVGGTNFYIQALVSPFLFDDMAQDIEGLTLNDHLDEIGLDNDDEAGLYEHLKKIDPVAAQRIHPNNHRKIKRYLELYESTGALPSDLFQGQATXDADLHVLDRYVNERVDCMIDDGLLDEVCNIYDREATYTQRLRQAIGVREFDEFFRFYFA

SEQ ID NO: 119875 - protein, 450 aa, Oryza sativa
  Clone ID: PAT_MRT4530_23049C.1.pep
MAHLAASAAPLPSADPDAGEESSHSPPPPEKGLRKVVVVMGATGAGKSRLAVDLASHFAGVEVVSADSMQVYGGLDVLTNKVPLHEQKGVPHHLLSVIDPSVEFTCRDFRDHAVPIIEGILDRGGLPVIVGGTNFYIQALVSPFLFDDMAQDIEGLTLNDHLDEIGLDNDDEAGLYEHLKKIDPVAAQRIHPNNHRKIKRYLELYESTGALPSDLFQGQATEKWGRPSNSRFDCCFLWLDADLHVLDRYVNERVDCMIDDGLLDEVCNIYDREATYTQGLRQAIGVREFDEFFRFYFARKETGLHDDNLKGLLDEAVSQLKANTRRLVRRQRRRLHRLNKYFEWNLRHIDATEAFYGATADSWNMKVVKPCVDIVRDFLSDDTILASRDGSSVTGSPRMSSRELWTQYVCEACDNRVLRGTHEWEQHKQGRCHRKRVQRLKQKASTVISL

SEQ ID NO: 119876 - protein, 290 aa, Oryza sativa
  Clone ID: PAT_MRT4530_2304C.1.pep
MAATFSAAAAAAASPTYLHRPRTLAPPASTPARLSPSSSSRRPATPSLLSLRRTHAAPPPLRAAAADPKVVNGEDFPPMKDLLRLYKKAFLDGNDEALGGIESAIIAIEKERSNSAAQYESIATEITSGKDKFLRINADLENFRKQTEKERARFTSNIQVDVVQSLLTLVDSFEKVNQEITPETDKEQTISTSYQGIYKQLVETLRSLGVGVVETVGKPFDPSIHEAIAREESHQFKAGIVSHEVKRGFLLRERLLRPATVKVSTGSGTQETSSPSTEKPVEDSKEDAAV

SEQ ID NO: 119877 - protein, 181 aa, Oryza sativa
  unsure (1)..(181): unsure at all Xaa locations
  Clone ID: PAT_MRT4530_23050C.1.pep
KKKKKKNWGGGEKKKKKKKKRATNTKKTKTKIHNTYNKNKPFFFKNLKFNSPAPSYKQQSLLFWGCRGAQLNPLTTHPPFSNSLNTQNTPPFPPSQHFHTXNSQXNPPFTPSLTPPXXKXTHNPTPTXPNTFSPXPFSFFPPFFLFFFFFPPHFLNXPLPLXLXTNSSLHLXLFFFFFFFF

SEQ ID NO: 119878 - protein, 94 aa, Oryza sativa
  Clone ID: PAT_MRT4530_23051C.1.pep
IRPPPGRQGGRLQNSRPPPAAHLQAAPRTVQNRPSRGRQGGRLQISLTAVARERTAVCHVTFTATLELANLGSTSVESLSCTETIVISTLSRKN

SEQ ID NO: 119879 - protein, 140 aa, Oryza sativa
  Clone ID: PAT_MRT4530_23052C.1.pep
MDADVVGCRLLRSSSSYGALLLPFPSASTPVTSLPDPAAPVVEEDDGTNSREDCSIILGNLEPNSNMKNLKISGYAEFLLLKHLRLDNLHLPSEFLLLKHLHATAGSMHDSNLIFARRQQAAFFLAASAAAWSDDSPLLA

SEQ ID NO: 119880 - protein, 1989 aa, Oryza sativa
  Clone ID: PAT_MRT4530_23053C.1.pep
MANQGGGAWRGRFNPRPMRNFGEGRKPQAPTFSTGGESLQGIGGGALGDQAKTMAARGATKQQYRPIQHKEPAKETEKGDTSVLQPEQPLQSNPRAGNNPIPQRFFCQRCKNVGHLARDCNVSVFCINCAKPSHRTEDCLYDKQPRPVAKLVGYGAPGLGCILIQNTRPDSPKEHANPLAMVSIVFGREFTESQLEQGFTQQFKWNWQWKAKAMPNGTFQMRFPNKIKFEELSNFDYFNVKGTDVQVNVKEWTQESDAVGKMHTAWVKVSGIPDAMRGYQALYEVGSNLGTVMEVDMATFRASNVIRFKVGMMELESLPLKLILTTPKGLLYQAHFELEEVVEQGWFNESIFEEVQVGSESFLKSGQKSGQRDGKQIMEMGDKISPGILLRGNGSKDDPTDMLCPTTMIEESQIKCAQILRDRALAFQLQEAEAKSTTDCGIEVGMTSGETILTEETQVLLTQDKKWEQAGNRGMAVNTIDSEATEVGDEGIDREDERVHLGDSEDYMDSQESEGSFAKRLGINLVEDNTGSQEEEMRRSKRLKEKEDLKPQDMAMQRKEAQNAFVNKGQNTVPSIINESNVSLINMANILGVSLGCAIEDVESNLNLIKNLESARINLFMKEGEADKNAELKKKEMEGMSTDQEWGMGNIEKTGHLQDLIRDHKLDFVAILETVKHDFSTELLNKLSSGRNMHWCWMAARGRSGGILVGMDKDKVNVLNEKTGKYFIRLKLLNADNKNVWDFMAVYGAAQAEQKAEFLTELAKEFYSQGSPLVANLREVQMSGRQFTWCNFQNSPTLKKLDRVFINNEWEDIYPLTTVRTLVRAMSDHNPMLMETGQNMAPQSIFRFEQSWFLREDLTSVVEEIWNSDYRGDSMERWQKKLKFLRKKLKGWNKNWEGEYRRRKKEIMDKIEEIDILAETVGVDINIMNNRRALDAQLRYVVREEKIKWFQRCKEKEVLEGDCNTKYYHTKANGRKRKSLIHSLVQEDGVISGQQNLLSYITSFYKELFGHSKENNVSLNMEGVSKVKKEDIVELTKPFSLEEVKKVVFELRKNRAPGPDGFPGEFYMKFWDIIKNDLLELINDFHKGLLSVERLNYGIVTLVPKTKDAAQIQKFRPICLLNVTFKIITKVLMNRLDRVMMYIISKNQTAFLKNRFIMEGIVILHELLNSLHSKKQSGILFKVDFEKAYDKVDWVFVYRMLKSKGFPDLWCDWVMKVVRGGKVAIKVNDEIGPYFNTHKGLRQGDPLSPLLFNLEAEALTLLVQRAESSSLLEGLSVSENNKVTILQYADDTIFMIKDNMEHARNLKFILCLFEQLSGLKINFNKSEVYCIGEAVERENVYSKIFTCKVGSFPMKYLGLPIHKKRLLNKNWKSAENKMEHKMGGWQGKLQSIGGRLILTNASLSNVPLYMLSFYKIPQGVKERMDFFRRRIFWQEDQGIRKYHLVQWPIICSPRDQGGLGVLDLETMNTALLGKWIWNLENKEVWWQDILRDKYLRKKPLSEVKNKMGDSHFWQGLLEIKNTFYKFCTKKLGDGKRTLFWEDNWIGGRPLNEQFSDLYNITNTKHITVDKALQGGWDKVTFRRTLHGNRLEDWNRIKHLCANIHLQNGHSDKLWWNFNKNGSYTVKSMYRALKLQQFSCPLKKFWYIKTPLKIRVFLWLFLKNKILTKDNLYKRGWRKGDKICQFCCREESIQHLFFECPLAKLIWNVVICALNLKPFSNKTQLLGPWLFGFDKNTKNLMMVGITAVIWAIWKTRNRACFDYVLPKDPTEVIFLKSEANRMELGVWVACIHGGFSRGRYSDMNTWWKLTNDGQFSVASAYDMFFMATENCAFGELLWHSRAPSRVRFFMWLALKDRCLTADNLAKRNWPHDDLCSLCQRDDENCHHLFVACDYTAVWRSIKRWCNESFPIPADGDAALADWWLATRCRFQKSYRADFDCAFMLICWLIWKERNARIFQHVYKLPDQLAEDIKDEIAVWRVAGVFSQFRE

SEQ ID NO: 119881 - protein, 1015 aa, Oryza sativa
  Clone ID: PAT_MRT4530_23054C.1.pep
MAHQGGGAWRGRFNPRPMRNFGEGRRPQASTSSGGGESLQGIGGGAPGDQAQAMAARGGTKQQYRPVQHKEPAKETEKGDTPVPQPEQPLQSNPRAGFTQQFKWNWQWKAKAMPNGTFQLRFPNKIKFEELSNFDYFNVKGTDVQVNVKEWTQESDAVGKMHTAWVKVSGIPDAMRGYQALYEVGSNLGTVMEVDMATFRASNVIRFKVGMMELDSLPLKLILTTPKVEDTTGSQDEEMRMSKRLKEKEDLKPQDMAMQRKEAQNAFVNKGQNTVPSIVNESNVSLINMANILGVSLGCANEDVESNLDLIKNLGSARINLFMKEGEADKNSEIRKKEMEGMFTDQEWSDDDSSENDNSTLDEIEHMLKQVQSSMKKSNQRRGNLEIFKVTPKNSKKKGHLQDLIREHKLDFVAILETVKQDFSTEMLNKLSSGRNMHWSWVAAHGRSGGILVGMDKDKVNVLNEKTGKYFIRLKLSNADNKKVWDLMAIYGAAQSEQKAEFLTELAKEFYSQGSPLVNIAPQSIFRFEQSWFLREDLTSVMEEIWNSDYRGNSMERWQKKLKFLRRKLKGWNKNWEGEEYRRRKKEIMDKIEEIDILAETVGVDTNIMNNRRALDAQLRYVVREEKIKWFQRCKEKEVLEENNVSLNMEGVSKVKEEDKVELTKPFSLEEVKKVVFELRKNRALGPDGFPGEFYMRFWDIIKNDLLELINDFHKGLLNVERLNYGIVTLVPKTKDAAQIQKFRPICLLNSILFKVDFEKAYDKVDWVFVYRMLKSKGFPDLWCDWVMKVVRGGKVAIKVNDEIGPYFNTHKGLRQGDPLSPLLFNLAAETLTLLVQRAESSSLLEGLSVSENNKVTILKYADDTIFMIKDNVEQARNLKFILCLFEQLSGLKINFNKSDVYCIGEAVERENVYSEIFTCKDNWIGGRPLNEQFSDLYSITNTKHITVDKVLQGGWDKVTFRRTLHGIRLEDWNRIKQQCAAIHLQNGHSDKLWWNLTKNGSYTVKSMYRALKLQ

SEQ ID NO: 119882 - protein, 38 aa, Oryza sativa
  Clone ID: PAT_MRT4530_23055C.1.pep
MGARYIDAIQPFANCNDLFASSLRAHVFIRNMTPARQD

SEQ ID NO: 119883 - protein, 440 aa, Oryza sativa
  Clone ID: PAT_MRT4530_23056C.1.pep
MANQGGGAWRGRFNPRPMRNFGEGRKPQAPTFSTGGESLQGIGGGALGDQAKTMAARGATKQQYRPIQHKEPAKETEKGDTSVLQPEQPLQSNPRAGCILIQNTRPDSPKEHANPLAMVSIVFGREFTESQLEQGFTQQFKWNWQWKAKAMPNGTFQMRFPNKIKFEELSNFDYFNVKGTDVQVNVKEWTQESDAVGKMHTAWVKVSGIPDAMRGYQALYEVGSNLGTVMEVDMATFRASNVIRFKVGMMELESLPLKLILTTPKGLLYQAHFELEEVVEQGWFNESIFEEVQVGSESFLKSGQKSGQRDGKQIMEMGDKISPGILLRGNGSKDDPTDMLCPTTMIEESQIKCAQILRDRALAFQLQEAEAKSTTDCGIEVGMTSGETILTEETQVLLTQDKKWEQAGNRGMAVNTIDSEATEVGDEGIDREDERVHLGD

SEQ ID NO: 119884 - protein, 137 aa, Oryza sativa
  Clone ID: PAT_MRT4530_23057C.1.pep
KKKRRRRAPFGARRRRALRASTTTRALHSTMLPSRQRSIFHLREEGGGATNAEHLRADHCDSHGDTPYHQYPPATPSRRPAADRPRPDEAPPPSAARPCRTQAHADLSPRRRRARHRRKLHPCGDYLGASVICMLEL

SEQ ID NO: 119885 - protein, 254 aa, Oryza sativa
  Clone ID: PAT_MRT4530_23058C.1.pep
MAHQGGGAWRGRFNPRPMRNFGEGRRPQASTSSGGGESLQGIGGGAPGDQAQAMAARGGTKQQYRPVQHKEPAKETEKGDTPVPQPEQPLQSNPRAGFTQQFKWNWQWKAKAMPNGTFQLRFPNKIKFEELSNFDYFNVKGTDVQVNVKEWTQESDAVGKMHTAWVKVSGIPDAMRGYQALYEVGSNLGTVMEVDMATFRASNVIRFKVGMMELDSLPLKLILTTPKGLLYQAHFELDEVVEQGWFNESIFEEV

SEQ ID NO: 119886 - protein, 71 aa, Oryza sativa
  Clone ID: PAT_MRT4530_23059C.1.pep
TAHSILSPSTMTSREHDFFLPHRILYRKCIITMQFFWKFGEENQARERKDGVGCLLVACKIGQLNCKLVLS

SEQ ID NO: 119887 - protein, 84 aa, Oryza sativa
  Clone ID: PAT_MRT4530_2305C.1.pep
MAAVRMTLRRDGSYQPPLRRKQVCPSSYNDFLAMVTMKPGMYLAEADVPTPGVPTPAPARDECLEALIIPTGRGEACVRPPVAP

SEQ ID NO: 119888 - protein, 79 aa, Oryza sativa
  Clone ID: PAT_MRT4530_23060C.1.pep
MAPVAAMETSGSSFLSVAHEWPHGESQKAPKQVVNVPPTAPTMKPTPASRPRVAFAPSSLPQNLGFEQRGSSAWGVNWV

SEQ ID NO: 119889 - protein, 111 aa, Oryza sativa
  Clone ID: PAT_MRT4530_23061C.1.pep
MKKPWCCGPLAAYLDLSLFSLTNGLAEALIGLGMFFWPFLEGLLILANALAILNEDRFLAPRGWSMSEVSGNGRSKSLKGQIVGLIYATQFFRMPLIALNVLIIVVKLVSG

SEQ ID NO: 119890 - protein, 111 aa, Oryza sativa
  Clone ID: PAT_MRT4530_23062C.1.pep
MSLVNSRCDGLGMDDQWERQCHWQAAGVASSSASSGCGVFDVDEALEQRERWRFRRRCATSSGAAMATDLGPAAAATPTSSGLDLRQATAASPQSQHSVSIGDDFIDLIDL

SEQ ID NO: 119891 - protein, 107 aa, Oryza sativa
  Clone ID: PAT_MRT4530_23063C.1.pep
SEKAVSRTKTKEGVEGKAKDARSITFGDVWKIREVPQCLLSDAGLNLVNDWVRQALDLQTGEIQHNLEEHIAQTQEWQQTADAHFTNINNHPRSGYGLLDLSNGGEH

SEQ ID NO: 119892 - protein, 415 aa, Oryza sativa
  Clone ID: PAT_MRT4530_23064C.1.pep
MGNGGIKAYAAIVLIRLMYSGMHVMSKVALDQGMSPFVFVFYRHGSAALVLIPAVLILERPKAKQVTLKIAAKMFVHALYGIESMKLKKLHGNVKAAGILFCVTGVTVLAFYQGPMLGSFNHHHLFQQANSSDDPEGNAHSKTQWVLGIFLITLSNVLAGLWTVLLGPLIEETSKLMNTALQISWAAVQAFVVAVAVERDFNKWKLGWDVELATGVVVTALSYYMQMWTITKGGRIFAGTLLIGGLYNVLWGKNIEEQDEVNDIVADKPEFEMQGKEAQMPGDAGTKNSSSSGGSVSKDSDISLAPKLLGHQDYHRFKSLPWHICPFQILLNSLQLARRCRADSREARHIGQKCCLIEDCACRTLELQYFPGDSICLFAVELYVLDQSPEVDILSQMISLRYEEKVDVTNPSVGG

SEQ ID NO: 119893 - protein, 89 aa, Oryza sativa
  Clone ID: PAT_MRT4530_23065C.1.pep
MAALHHHHSHQIKAPTPTWLIVKAIPPPRDGAKKLAAAAYSPLLLSPSVWQRAQQASVWQASAPNSGGARPLLSFALPPVSAPSALPTC

SEQ ID NO: 119894 - protein, 556 aa, Oryza sativa
  unsure (1)..(556): unsure at all Xaa locations
  Clone ID: PAT_MRT4530_23066C.1.pep
IKHGRGLRQGDPLCPPPLXFILAIGPLHKILEKASECGFLAPLNGRTARLRTSLYADDVAIFIHPSVRDMRRLAAILRSFGEVTVLHNNMEKSQIAPIRCTDRIVHDILLVIPASTTGFPMKYLGLPLALXKLKKIHVQHLLNKCRMRLAPWQGKMMTMAGRAALTKSVLTAQPIYHLTALKVPNGSLPVXHSIDKMRRKFLWAGGEDISRGKCKNSWDKVCRPKDLGGLGVLDLNLFSRALRLRWLWFDWVDTDKPWSGTAILCDQXDKDLFKAAMAITLGDGKKANFWHSHWLNDMTPKEIAPAIFAASRXKNRSVCDALATNTWISDINLLLITEADHLXQYVHLWTLIQNIELHSEQTDTITWKLTQNGVNSTKSAYILQFKGAAGTIFNQTIWKYWALPKCKFFPWLIXETESXTTDILQKRGWANQHFCPMCRASLESALHLLANCRLLRRIWKGLQRWTNIDLQMKEWGTCTNVEEXWYKISRIPNVPRKALKSVIILVAXELWCERNVRIFRHTATTRTTILAKIKEETQAWIKVGATRITEIVPSGE

SEQ ID NO: 119895 - protein, 126 aa, Oryza sativa
  unsure (1)..(126): unsure at all Xaa locations
  Clone ID: PAT_MRT4530_23067C.1.pep
MPPSSPCQSLSVLMLQYNPTLGDIPSGFLLGWPASSSPARGRPTRSSPHADGRRAPPXREDCRRDPPHARMAGDLEGLPRPHDPLSDXCPGALPPPLRARAESLPXARCVASRRVHPPCAVVAALL

SEQ ID NO: 119896 - protein, 328 aa, Oryza sativa
  Clone ID: PAT_MRT4530_23068C.1.pep
MKRRPAMDSHNEQPPPPKSLKIYVKMMKTFTLNVNSTDTVDQIKSKLSAIEGIDKSKQEMFFAGMHLKNEDKLADYNIMTNSSVDLYVTDAIQISVRIPSVGKTTKLNMRKSNSIADIKAEIEQEEGILMNEQILMYAGQQLEDNQLLSQCDLRNDQTFHVLVCPNDKLHVFINVRGEKTIGLETKRWYTVADVKLMIENLEGLPACSQILTRMQSGVGVALTDGRMLQDQHVKNNDTLLLQQNVQFFVKSWEGKTLTMVLKTSDTGKQIKDRIAEKLRIKESLYYLCHKGRVLLTEDTLLDHEVESNSTVYIRLRNSAVVKPNAKKR

SEQ ID NO: 119897 - protein, 122 aa, Oryza sativa
  Clone ID: PAT_MRT4530_23069C.1.pep
TRRGRRCRWSRVHVPPPSRSPTSHIRRAAAAPPPPGSCRSSAAARRSCSAAAPSGWAPSSSCGGPPPSSSGPSPSPPSPSPTCCSPSPSSWRASRCSPSPSLPPAAPWRRGRRRPWRTGSRR

SEQ ID NO: 119898 - protein, 214 aa, Oryza sativa
  Clone ID: PAT_MRT4530_2306C.1.pep
MDNKKSSRHVAFPKLHELHLKGMMEWNEWTWEKHVEAMPVLSVLHVKDCNLSHLPPGLPYQARALKRLCVINARNLNSVEGFSSVIKLEVYGNPNLERIVDLPSLQNLTIVNCPKLMLLDGVASVQIMELGDHGMETLPEYLRHLTLRHLKIVCSLNLLRLMSTKHDASRSEWEKISHIMHVEGFASDNGDGILRWYMSYTRDPYNLETNITSR

SEQ ID NO: 119899 - protein, 225 aa, Oryza sativa
  unsure (1)..(225): unsure at all Xaa locations
  Clone ID: PAT_MRT4530_23070C.1.pep
MATMDTTIAHIMDQQEDIKIKSSKCWNLIRPPAXLLNSNSRRICIQPSFSVREYLXEGSLSPLSNGSILISEFHLVWMQTXKQGAASPRPSTCLWNPNLSCVFNSYLQNQITFILFLLVSLXACRNKVDQHRQDQQPSEWCIDRXGATQRLVRLXSGHQHFSQIVVISTHQKIGPNNSLERIEWSSRFIKWYQSFCCSRLVHLEFQVLVTVITTVAAAVFCLLSS

SEQ ID NO: 119900 - protein, 105 aa, Oryza sativa
  Clone ID: PAT_MRT4530_23071C.1.pep
PPFSLFFDPFSSSFFLTFFLLFSPSLLLSIISLIIAPPLYPLTFPVIFLFEFFTAFPFFPGFSFALDFPQSFIHLPIRLPFSPPGPPPESPPPPPPPPPHVSQLF

SEQ ID NO: 119901 - protein, 120 aa, Oryza sativa
  unsure (1)..(120): unsure at all Xaa locations
  Clone ID: PAT_MRT4530_23072C.1.pep
WKHVMMELGRLSSVKYFLERLRETSTSYWQFMTGQTYIDLMIHESRDPLCFLVVLVVVAAFRWWFIGRKVGYVQRQVRGPERECDCICNSDEVVFEEQGVDALHXDVEVEEEGEGEGDVI

SEQ ID NO: 119902 - protein, 128 aa, Oryza sativa
  Clone ID: PAT_MRT4530_23073C.1.pep
VFWFFFFFFFFFFFFFFFFFFLKEGAPKFIGGIAGAIYTPHSRGKEPKREDGFSRQHWKFVLNHMGDILKLGPSKPLFWNNVHFARLCLGMLEIPFNSDILEWGEHVSSENKGYRDTWWFKRGGGRKR

SEQ ID NO: 119903 - protein, 111 aa, Oryza sativa
  Clone ID: PAT_MRT4530_23074C.1.pep
TVESRWLRMYSSSSLSCARERWWRMGDGPVWCLTKCRSAARHGEVGASSLYAPIILGSGQQAMSASYASTAAGLMGVWVESGCLSSCGANVSWFNCTGVRSRNPLSSFPFL

SEQ ID NO: 119904 - protein, 101 aa, Oryza sativa
  unsure (1)..(101): unsure at all Xaa locations
  Clone ID: PAT_MRT4530_23075C.1.pep
AQRKKTLRSRRNSREEXTGSTFSSSCVLLAVLPCRSAPQTSSASTGSITRASNARRTPIRIPIRSSCILGCNPKTLFRSTRQXRPLVERIDTPGIHKDHIG

SEQ ID NO: 119905 - protein, 271 aa, Oryza sativa
  Clone ID: PAT_MRT4530_23076C.1.pep
SHVVVGVARRQPPPPHILRPVPPLRPLLLRRRAVPPARSAPTFPRRRRRRLLLAVLWDHLPPLPRVEIPVRRRSPSKASADENLVRVIDSEIECIVQSEEGAASAKQIDLPEDFPFEIIDNPGDQSITLKREIAGETIKATVYTNFDTQDLNEDGDDNENNEESFKPAIQMVVTVEKPEASILEFECHFNDDELAIESMRMLDQNNSDAENLYVGPTFQDLDESLQKALHRYLEVRGIKHSLHDWLCEYMMSKDEKEYLVWLKSMKEFVGN

SEQ ID NO: 119906 - protein, 260 aa, Oryza sativa
  Clone ID: PAT_MRT4530_23077C.1.pep
MAHANTGPSRGPNLRVQGGGEKQQSPTSSASSRPHPAGPPQTLSPPASPLLHGGGGHHRTMRSSPAASGTTPSNMDSGSESDSAPEELTAVQGVEKHDEISKVEKDSAIRVSQQEKERRRRWAQRRTSSKPDKKEPLEVEDKDIKQKAENEEDEESEETHTMPGMLPTNVIEMLAAREKQTFSSDSEEEITNQKVQKRKKRLKSSGPETILLKDVRSTQHVKNALAFLEQRKNQVPRSNAVLKNANKALRLLSSKGNFLS

SEQ ID NO: 119907 - protein, 282 aa, Oryza sativa
  Clone ID: PAT_MRT4530_23078C.1.pep
MSSSASRAASLLRRTSSALSRRCAHSSSAAAPSRPPVPLPRFRAAAAAASSSPSSGITSRRFLASKSPSSSSPSKASADENLVRVIDSEIECIVQSEEGAASAKQIDLPEDFPFEIIDNPGDQSITLKREIAGETIKATVYTNFDTQDLNEDGDDNENNEESFKPAIQMVVTVEKPEASILEFECHFNDDELAIESMRMLDQNNSDAENLYVGPTFHFPLTFEFLIMCFRDLDESLQKALHRYLEVRGIKHSLHDWLCEYMMSKDEKEYLVWLKSMKEFVGN

SEQ ID NO: 119908 - protein, 136 aa, Oryza sativa
  Clone ID: PAT_MRT4530_23079C.1.pep
MPKAELSTATKRRAQRRWRRSCMPGLQALNAYLCLGVPELYLLSAEAHAWFRRIIFEPSPHPSLGAVVELLPTAATQQPPPLSLLVTGHHTPLPRFSVWHPLRVHARTLMESVVLATMLRRRNEPFLLRFFALFAV

SEQ ID NO: 119909 - protein, 585 aa, Oryza sativa
  Clone ID: PAT_MRT4530_2307C.1.pep
MALALFMPSKLSLTLSMVVVAVVAPPLPSSSSSPSPTAASPQPPLRLRQHSPSPPLPSSRSRCSSSPPAYAERSKPAGDVTSGGGTLLPRHAQPGEPVREAVTVEMAPETVVQAALSRKKSANSSPHSGSAQESVSPSILSKASPGREGEGRKEERGRYKNDRFVTGLTPVTSSADNRAPTLRLLPAEWRGRVCFSKPSSSFVCAKLLPLSPMAERAVAHNLSPSASGDDGEQNPRRRARTPPPPSCQSLRREEALEGVERSATSPPTSDEEGRRDGERRLLVYGDGSTPQGALQAAGALLRHPPVVPDPETPARRWLDDVADLVMTAQQRLGAGGRSSATEASGAAAAGSMSSRRKARRAAAVARRSSAIPSSTPPTQEDVRGGPDARLDIECRRDARRAAHATEGASSSGAPLRSGHGGRPPVSPVGGAGCRAFVASLRNVRWPPRFRPTNYLEERRRRAALRAARYQQSLRRYHQRHVRARSLCVDDLVLRRVQTRAGLSKLSPIWEGPYRVIGVPRPGSVRLATADGTELPNPWNIEHLRRFYPYIFDFLRIVSVPSFPFEESWFELTRSCSTLPSVARAG

SEQ ID NO: 119910 - protein, 69 aa, Oryza sativa
  Clone ID: PAT_MRT4530_23080C.1.pep
GAGGGAEADGRRETGAERDSCAAVGGKYEALQSQFSDMVTASAAAAAPTRGAAPHARHARRRRRRLRRP

SEQ ID NO: 119911 - protein, 61 aa, Oryza sativa
  Clone ID: PAT_MRT4530_23081C.1.pep
LGFVPSIHAAAGRTRMPPFYIYPGQQDLFLPCEAVPPANDSRSFLLTVYKMQSAPDKFVRG

SEQ ID NO: 119912 - protein, 46 aa, Oryza sativa
  Clone ID: PAT_MRT4530_23082C.1.pep
MAFWGGLIDDERRGGGGAAGDAELEARRWLVSHGAKCGGSGGLSAQ

SEQ ID NO: 119913 - protein, 203 aa, Oryza sativa
  Clone ID: PAT_MRT4530_23083C.1.pep
DHAGNTVANVTVAQQPHYGRSVSPPSRVSSCSPPPPPTSSSSSPTTTVVLSPCAACKVLRRRCADGCVLAPYFPPTEPTKFTTAHRVFGASNIIKLLQELPESARADAVSSMVYEAEARLRDPVYGCAGAVCRLQKEANELKVQLARAQADLLNARAQHDNLVALVCHPEMVTLKRHMSGGRRHPETRTRSLPTRRTNHGGTG

SEQ ID NO: 119914 - protein, 149 aa, Oryza sativa
  Clone ID: PAT_MRT4530_23084C.1.pep
AIALLANVRMVHEREAAEGLLDLAAGGPRAQPQRPVVLLREASRGRARLAHAAAPDGRRRRRRGAAPRRPRAAAVPPPPPHLHRRRHAHASSNGHPHAARELTRERARGIRIQKQGNSTPHEAARSRRRSLDLKANESLATEPQPGDPL

SEQ ID NO: 119915 - protein, 50 aa, Oryza sativa
  Clone ID: PAT_MRT4530_23085C.1.pep
CGHVSGSGGPQASASPISRRPPRSPCLQPGTGSDASHQRSARRSLALRRN

SEQ ID NO: 119916 - protein, 894 aa, Oryza sativa
  Clone ID: PAT_MRT4530_23086C.1.pep
MASPPPPLGSETAISPAYGEEEEEEEEEQCRICRVPAEAGRPLRHPCACRGSIRFVHDDCLLRWLATRRTSHCEVCKRLISTCPLYAANAPARLPLSEFMLGLANKLMGWFFLLLSLLAAMYIWEFVMPFTTLWIWRLALARSFARVRHLLSLRIFAHAHGHGAPLYGLMPSPDAVFACVSIRRAFLRDLPHFRDLNPLARFAAHALAPFALWIARLETRLDRRFGGLDSLQVIALHTVEASLMVVLLDVMLACVFGFIPFSLGRIILFCTSCFSFGNMDRVHSYTSTSSILLVGYGFIFSLGVLFTGFHTFDQYSRGEHLTIAVFFKVLTNGMYRLFSPLRRLPGIHVMVQMALSFLRLFFRGIINLVTVANISVNLINVIAIWPLFFGWSVDICASQLFGETIYQKLELLFASSFASTALHWLIGCIYLMLLSIFSSPLCLVLGPGVTIPFVHFSGEESLIQLFREPFYKFSLKLLPGLFVSAVDVAMVILVPVQIAGQLAPKVFPLDITYFDPPTKGSAFWQAPRNYAELLSGALLLRFLICNTLKYLQPGPLLQKLLLYWSATTRRVLGLLDLLIAWSAGDGECEDGNGSTRKFHHGSTSEDEYKRRFAAVRLILLVVLSSSTLVIFNSAVLIVPVSIGRALLFVIPKLPIAGGLKYNDLFAFAIGFCIISTIIAASRDLFVYMASGRTHLLASVIYKWGITALKGSPLLFIWIVIIPLLIGLLVNFLLISPFLVTANGMFVIDLFCTWFLGLLLLKFWVKLVHWTTVTPFLVYFIDERWDWKLTRAREDGFSGLRALWVLQDVLMPITLKLLTALCVPYALAKGVFPNFGYPDAVNLTVYRFAWLGGFALCVLYDLAKVFCKVLVKLHDSIRDERYLIGQRLQNYVDNS

SEQ ID NO: 119917 - protein, 320 aa, Oryza sativa
  Clone ID: PAT_MRT4530_23087C.1.pep
MAPEAAAPPAGEKMAIRVLLRFACGSFSVVWGNYNLLHDGQVSTMIVRMWSELARTGRISDGLPINHDRSVFRPRSPPSYGAAIDAMFTAYDDGGRLVNALTAHDSFVERLYYIEAGDIARLRDAASAGAEQQRASRVQAVSAYLWKALAGVVAASCVPEERCCMGWWVDARRRVASPALVPAMCGYCGNVTSYALGDAAVGEVLERPLAEVAAMVRESIASIDYDEYLQELVDWVVGHKTEKTVFASFPLDTDFGFGQAALAMPIWDHGKMGCGTLAVGVRPGGDGSWLVSAYIWPRMAAALESDGVFKPLTAAYLGLV

SEQ ID NO: 119918 - protein, 81 aa, Oryza sativa
  unsure (1)..(81): unsure at all Xaa locations
  Clone ID: PAT_MRT4530_23088C.1.pep
FLSSDEEDEDEXDKNMESDEDDGSMPVEDDSDDDFVDPDSQWKKQKKEKSKKRNKRQPSKKGSSTTKRKEKIPHPKKKAKH

SEQ ID NO: 119919 - protein, 280 aa, Oryza sativa
  Clone ID: PAT_MRT4530_23089C.1.pep
MASPSRRSHHCCLVLVALSLAAMLLPMAMATTISMSPIGTFCWNPSYNEMSSGEAIARRRSINSVVSDLAAKARAGGGFATSSAGRGIDAFYGLAQCRGDVSGGDCDACLAQAAKQMVTNCNYTLDSRIWYEYCFMRYVDFNFFGEMDTRTDASVTLRQWPDMDNPMAFQKAVGKATGKAVAHAVTMGSGGLGRAKEQCTSFVNVYALAQCTRDLAPPLCAQCLSTTVSKFAEACGSGQGCQIDYSSCWVRYEIYPFYFPLEANRQAPTDLTKYTKVTMH

SEQ ID NO: 119920 - protein, 130 aa, Oryza sativa
  Clone ID: PAT_MRT4530_2308C.1.pep
MAIKEWFAGHPGRHTTLATSGNGVLSQSLDMVTCQAWRGDMPVDWRRWSGWWVGGGDVQRRWWPREVVGGLPIGDGVQIRPVSLLSLFVGLPPMARRSGWWVGGGGGGQGKRRQQQRVAKGSQLRLAAAD

SEQ ID NO: 119921 - protein, 56 aa, Oryza sativa
  Clone ID: PAT_MRT4530_23090C.1.pep
SLVQRRAFTMNIKFVFIGLEVVIRWFSQNTLCVFLYTCEQTLQLALQSHWIIIVHG

SEQ ID NO: 119922 - protein, 140 aa, Oryza sativa
  Clone ID: PAT_MRT4530_23091C.1.pep
LVQGFKCRKNGPPTTVCPLTFSVANELTRIFFFLKGPSGIGGLFFGGGQNQSPGWPNFFLAVAVVLTPPPRLALFNFWVCPRSISRLFPLFNALFGFFNGGFFGLDPIFFSPFLLGLTGLFFVLCPGGCLPGFQIRRGFS

SEQ ID NO: 119923 - protein, 349 aa, Oryza sativa
  Clone ID: PAT_MRT4530_23092C.1.pep
MTFSISVGMVEAEHLVDTALASHARRRRASLAWVPLSPRSIPQPLAPERLCEGINGPGRGGFTGAIVFYSSSLRCRKFYIVTKFGSWLIDCYCTCSKKSKLRKWKCRPLDITHLKNVGAVHGDNHAFHNELRRSLVHLVSFQPGNEKPFSVAAIPIVSVNGFCYMISHSKVFRQQDAANWQHRVIFPDEIIVMLRIEDVIIQGSLAAFSVNTTAELPNPVKFSEQQVSHNQEVHTVNFEGVMEPSLLVRGRVTHYLRLCSIWRQQTKEIEMHFSSWIKVSIWLVMSSSILTRDNLIYLKEGGRARIKDKTQGEKDCSGEPCWLLNKVAGEMFNTKFGWRFGSWDSQDWN

SEQ ID NO: 119924 - protein, 209 aa, Oryza sativa
  Clone ID: PAT_MRT4530_23093C.1.pep
MTTTEQTSSMVSTEAEDSPKNAARDVDTPSSSPMSLRRMIEGRPDRCRLRRRIFNHQRSSSFEWAKISMVQWAMTRPSRYTSVADNKSFKSDASPRLNCDSECESTSAVDTESMFSFSLYDISWPPNEVESLQEKYSSTCRLFTYEELKLATSNFSPDMLIGKGGTSQVYKAQLFDGTLSAVKILKPSVDAIQEFVTEVETLPSLQHDN

SEQ ID NO: 119925 - protein, 131 aa, Oryza sativa
  Clone ID: PAT_MRT4530_23094C.1.pep
MARQPSAVAAWVLVPASALPGVLVGWPRRVQDGRDGGGRGRMPRQGGAGESELLRCRGATKLGNDDTMQSLYWIIDASWQCTLDTALYLDAISSLSWNISNVPKLQQSLIEQMLSHNNEIPGLISGGFMKA

SEQ ID NO: 119926 - protein, 108 aa, Oryza sativa
  unsure (1)..(108): unsure at all Xaa locations
  Clone ID: PAT_MRT4530_23095C.1.pep
DDDDRXSCRRRGEPLXLCKLEVLSRAAFSRSHRISXLRXXLLDXKQDXRSWWWLWPHXREQXLNPPKRRPXWQAVPEGRXXAAXRXDIFFFLXRAKDLTKXEGDRCCC

SEQ ID NO: 119927 - protein, 68 aa, Oryza sativa
  Clone ID: PAT_MRT4530_23096C.1.pep
HRAAPDTAGATPTTAGTATVDALRSLGSTRPPRPRTAPSLSTPCVSGERQRAELFGLGALVRLLGVSS

SEQ ID NO: 119928 - protein, 70 aa, Oryza sativa
  unsure (1)..(70): unsure at all Xaa locations
  Clone ID: PAT_MRT4530_23097C.1.pep
MAATTSACLACCLVLLRHPPCPCPAWRLCCTPARLRPATRGRSXSYQARKASAATRIGGDRSGATLFWQR

SEQ ID NO: 119929 - protein, 57 aa, Oryza sativa
  Clone ID: PAT_MRT4530_23098C.1.pep
ELRNDDAAITIRWVLHIGNNATATFHDREDTCVMCYLTYYLYACRLLSISGMRLAKD

SEQ ID NO: 119930 - protein, 93 aa, Oryza sativa
  unsure (1)..(93): unsure at all Xaa locations
  Clone ID: PAT_MRT4530_23099C.1.pep
GXLARXXXGWAKKARWIXESXXXRALPELRGSXQLLXRVXSNXPGXNCSNQEEEXVVLRDRRPPPRAAXQARXAPLPSPPPPWLLHXXTXSLX

SEQ ID NO: 119931 - protein, 275 aa, Oryza sativa
  unsure (1)..(275): unsure at all Xaa locations
  Clone ID: PAT_MRT4530_2309C.1.pep
MGLEHSDAESPSLTDSTFLFLIIKHRCDPSLSTSFIPSRSRLDDSFMTGDCQSPVIIVPYGLGRVVLFLGHVVLARSCTCRVDTPSQKTAQAPLCRFGRGRYVRFFALDLRNVSEKERTRHGRRRQPEMTSDKQYTRLLLRSSALPVDARFNLHSMASDFLAMLALKPGMDLTGTDIPTPEVSTPAPARDESQEALIIPTGRGEACDRPPXGRGAPALGAETGVARPLGETEGGAATSPSGPTPQRGSGHVEPEGVADPSEGQDPQDFEQGKGRR

SEQ ID NO: 119932 - protein, 987 aa, Oryza sativa
  Clone ID: PAT_MRT4530_230C.1.pep
MAAAAVMVSSASGLLAMLQEPAAELKLHALANLNSLVHVFWPEISTSVPAIESLYEDEEFDQRQLAALVVSKVFYYLGELDDSLSYALGAGPLFDPSEGSDYAQTLLAKALDEYASIRSKSLKAAGEGDEKMDPRLEAIVERMLDKCILDGKYQQAMGMSLECKRLDKLEEAISRSDNLNGSLSYSIILSHQYVSHREYRCEILRCLVKIYQTLPNPDYLSICQCLMFLGEPETVGNILGKLLSGSKDDALLAFQIAFDLVENENQAFLLNVKNHLDTLSLQTSAQTLPSDQTAATEPSGDAQMTDDAITPNGNAHTVDPNEVAHADRLTKIKGILSGETSIQLTLQFLYSHNRSDLLILKTIKQALEMRNSVCHSATICSNAIMHAGTTVDTFLRENLEWLSRATNWAKFSATAGLGVIHRGHLTQGRALMAPYLPQSGAASGGSPYSEGGALYALGLIHANHGEGIKQFLRESLRNTSSEVVQHGACLGLGLAALGTADEEIFEDVKNILYTDSAVAGEAAGIGMGLLMAGTASEKAGEMLAYAHDTQHEKIIRGLSLGIALTVYGREEEADTLIEQMTRDQDPILRYGGMYALALAYRGTANNKAIHQLLHFAVSDVSDDVRRTAVLALGFVLYNEPEQTPRIVSLLSESYNPHVRYGAALAVGISCAGTGLSDAISLLEPLTSDVVDFVRQGALIAMAMVMIQTNESYDSRVGTFRRQLEKIILDKHEDTMSKMGAIMATGILDAGGRNVTIRLQSRSKHDKLTAVVGLAVFTQFWYWYPLTYFISLAFSPTAFIGLNSDLKVPKFEFLSNTKPSLFDYPKPTTQQTTTASVKLPTAILSTYAKAKSRAKKEAESKAQEKAEAPPSEDASTSMQVDGVAEKKAPEPEPTFQILTNPARVVPAQEKFIKFLEGGRYEPVKLAPSGFVLLRDLKPTETEELVLTDAPATQATNAAAATAGQQGSGAAAMAVDEEPLPPQPFEYTS

SEQ ID NO: 119933 - protein, 102 aa, Oryza sativa
  Clone ID: PAT_MRT4530_23100C.1.pep
SDGEETKIKILHLNELYNFGFVAAPIWARVLCPALRGELGGGQDGGAATTMWGGRRAKERGWSGVNAMRSGGAGQQRPRMMWKSAPCGDLVAVAVEQRQRDA

SEQ ID NO: 119934 - protein, 101 aa, Oryza sativa
  Clone ID: PAT_MRT4530_23101C.1.pep
MGKRRTGERRVSKGNEFFCTSKMVGDVPVDSETPVIICEVVLEMIGFSGDGHVHFYMDTMHLQFVFARFVGPTGGIPAVRPTTFRQSDRRGNDGQTGSDNW

SEQ ID NO: 119935 - protein, 414 aa, Oryza sativa
  Clone ID: PAT_MRT4530_23102C.1.pep
MACAETYIENMEDRCIYFFSRRLFAAKARNKRQPMRVANGGTWKASGGSKTVRSKKVGGIDVGQKLTMVFYERRFEGDQNPVKTNWAMHEYTKIIPSSKNQCIYNKEGGHRAGERCRRGVEHGQALHAGGTATAYATATAIAEHGRIIVGNVATATAIARPGWVVVDDAAGTATAAAWPARVVGGDVALPGLAGEMTSMADQANMASTSQASAPSSELPQDWYDEYEVAYGAAAPPSPSTISCAALPSSPTAWWPSSIGGPVQHDGYLGMADPASCNTLEHLLPSAAIPPEPMAPPKNSPAAPPPADAGGNYDHPELADYGGGVQAQHEHHQPQELTDGADGDAQLELGAAEFDSERVAEMISQIMDGEFVFKFEDDTIVSFNEVAAAPMLIDGGGDGDGDGADGGVGDDPFDN

SEQ ID NO: 119936 - protein, 202 aa, Oryza sativa
  unsure (1)..(202): unsure at all Xaa locations
  Clone ID: PAT_MRT4530_23103C.1.pep
VIGVRLITKNIAQPAHDRGHGYSNSFTLARGVPLYPQDTAPXMLPCTSIPPXTSERNCGNTPRTTQLTTVHHTWIIIXRGMDSPATPTDFSPLLSLAPHNELCYTKARDHTVAGARGLGRTNRGHLREEDDETNSPRGGTTTKDDLRRAPNGGEVGTNRLDGVGSAPAGFGFGQVVDGVQLLLANPMVATATGEGGCKGGAA

SEQ ID NO: 119937 - protein, 130 aa, Oryza sativa
  unsure (1)..(130): unsure at all Xaa locations
  Clone ID: PAT_MRT4530_23104C.1.pep
MDSPATPTDFSPLLSLAPHNELCKGRHDDEGRPTTSSERRRXSGRRGRRLSGDEQRQRRGGRASPRCCDAEGGGGTGRGRPRRRHGADGGEADRLDGVGSAPAGFGFGQVVDGVQLLLANPMVATATGEG

SEQ ID NO: 119938 - protein, 198 aa, Oryza sativa
  Clone ID: PAT_MRT4530_23105C.1.pep
GRDKDNVTLDDVLQPGTDMLAAGYCMYGSSCTLVLSTGNGVNGFTLDPSLGEFILTHPNIKIPNRGKIYSVNEGNAKNWDAPTAKFVEKCKFPQDGSPSKSLRYIGSMVADVHRTLLYGGIFLYPADQKSPNGKLRVLYEVFPMSFLMEQAGGQAFTGKQRALELVPRKIHDRSPIFLGSYDDVEDIKALYASESIIG

SEQ ID NO: 119939 - protein, 273 aa, Oryza sativa
  Clone ID: PAT_MRT4530_23106C.1.pep
MTLVVGYPDAPEYTTIPPLSGELPYRVRLEVHGYVGTCLANMAVEASGGTADHACQEAAYLMMARLRERHDYIFHDTAYRYHPRRAHGDGVSSFRPTAGENDTTFGHMCAVMRGLDRMHSDLHKATKALNDGKLMRIVALKDEVARLKKENAQLKGLPAPGGVRIRTTPRKRTTAPVRIQLAPRNPPPPAAPAAAPVPPAVPAAPAPAPAFTLSFAPASAARGSASGTGGWLSATPSGSGETDPSDSRSRSEGPGDEQEDAFDSTDRRSRSEH

SEQ ID NO: 119940 - protein, 48 aa, Oryza sativa
  Clone ID: PAT_MRT4530_23107C.1.pep
MAAAYPYIREQDDYPEADVSLQFSDLEYQKVFHGEGNALQVIRCKMKH

SEQ ID NO: 119941 - protein, 299 aa, Oryza sativa
  Clone ID: PAT_MRT4530_23108C.1.pep
MGCKMAGHPPNHRGEGMIDFVAELARMTLVVGYPNAPEYTTIPPLSGELPHRVRLEVHGYVGTCLANMAVEASGGTADHACQEAAYLMMARLRERDNYIFHDTAYRYHPRRANGDGVSSFCPTAGENDTTFGHMCAVMRGLDRMHSDLHKATKALNDGKLMRIVALKDEIARLKKENAQLKGLPAPGGVRIRTTPRKTTTAPVRIQLAPRNPPPAATPAAPPVPPAVPAAPAPAPESALSFAPASAARGPASGTGGWLSATPSGSGETYLPGSRSRSEGLGDEQEDAFDSTDRRSRSEH

SEQ ID NO: 119942 - protein, 259 aa, Oryza sativa
  Clone ID: PAT_MRT4530_23109C.1.pep
MAVEASGGTADHACQEAAYLMMARLRERHNYIFHDTAYRYHPSRANGDGVSSFRPTAGENDTTFGHMCAVMRGLDRMHSDLHKATKALNDGKLMRIVALKDEIARLKKENAQLKGLPAPGGVRIRTTPRKTTTAPVRIQLAPRNPPPAAAPAAPPVLPAVPAAPAPAPAPAPASALSFAPASAARGPASGTGGWLSATPSGSSDLSSSSSSGSQSGSGETYLPGSRSRSEGPGDEQEDAFDSTDRRSCSELSGRRARRR

SEQ ID NO: 119943 - protein, 98 aa, Oryza sativa
  Clone ID: PAT_MRT4530_2310C.1.pep
MAGAMKYVVGLRWQVGRDDSVFFEIVLDNTSSVDLAEASRWETSNHRYPRRRYLVARSISPDRQVNGADSDLVRGHTPVSTKIPLPSAPLSTFDVAIP

SEQ ID NO: 119944 - protein, 314 aa, Oryza sativa
  Clone ID: PAT_MRT4530_23110C.1.pep
MGCKMAGHPPNHRGEGMIDFVAELARMTLVVGYPNAPEYTTIPPLSGELPHRVRLEVHGYVGTCLANMAVEASGGTADHACQEAAYLMMARLRERHNYIFHDTAYRFHPRRANGDDVSSFRPTAGENDTTFGHMCAVMRGLDRMHSDQHKATKALNDGKLMRIVALKDEIARLKRENAQLKGLPAPGGVRIRTTPRKTTTAPVRIQLAPRNPPPAAAPAAPPVPPAVPAAPAPAPASALSFAPASAARGPASGNGGWLSATPSGSRDLGSSSSSGSQSGSGETYLPGSRSRSEGPGDEQEDAFDSTDRRSRSEH

SEQ ID NO: 119945 - protein, 440 aa, Oryza sativa
  Clone ID: PAT_MRT4530_23111C.1.pep
MGTFAQSTDLNVGSLVVKPGINQTQGRSAAPGTPRLDAYSGSPPHRAVAAVGFEWPRSTPSTPPQSRFAAGAPFPPCDGESRHVVPDPVRRLSTSLRHSSSPVIAAPSGFVRAVEDACGVVFPLQIKNMGCKMADHPPNHRGEGMDDFVAELARITLVVGYPNAPEYTTVPPLSGELPHRVRLEVHGFVGTCLANMVVEASGGTADHACQEVAYLMMARLQEHHNYIFHDTAYRFHPRRASGDDVSTFHPTAGENDTTFGHMCAVMRGMDRMHSDLHKASKALNDGKLVRIIALKDEIARLKKENAQLKGLPAPAGVRIRTTPRKTTTAPVCIQLAPRNPPPPAIPAAPALAPAPVPVSAPAFALSFALASAARGPASGNGGWLPATPSGSRDHSSSSSSGTEPGSGETYLPDSRSRLEGPGDEQEDAFDSTDRRSRSKH

SEQ ID NO: 119946 - protein, 126 aa, Oryza sativa
  Clone ID: PAT_MRT4530_23112C.1.pep
KGGWGNPKRKTFLFPARKEGRNRSFGPEINSRKGPIACQPAGRQADLIAGRDAAGAGVTLVVDHLPRERQKQRRQRQQQQRWREREPSDHSIGRLMALRSSPSLLCFGATRLGLVSCRIGAARGIH

SEQ ID NO: 119947 - protein, 112 aa, Oryza sativa
  Clone ID: PAT_MRT4530_23113C.1.pep
FHATPDHFFTSNGTTVGWYHDTATHTTNTFTLTDAPLPRHATGHGTLPTTTTWQPRKSTPRVDYKHFSTHLRHSGCHHRHGTPPVTHDCDTFFTPLFSDGWHTWADTHPHTF

SEQ ID NO: 119948 - protein, 314 aa, Oryza sativa
  Clone ID: PAT_MRT4530_23114C.1.pep
MGSKMAGHSPNHRGEGMIDFVAELARMTLVVGYPNAPEYTTVPPLSGELPHRVRLEVHGYVGTCLANMVVEASGGTADHACQEAAYLMMARLRERHNYIFHDTAYRFHPRRASGDDVSTFRPTTGQNDTTFGHMCAVMSGLDRMHSDLHKATKALNDGKLMRIVALMDEIARLKRENAQLKGLPAPGGVRIRTTPRKTTTAPVRIQLAPRNPPPSAAPAAPPVPPAVPAAPAPAPASALSFAPASAARGPASGNGGWLSATPSGSRDLSSSSSSGSESGSGETYLPGSRSRSEGPGDEQEDAFDSTDRRSRSEH

SEQ ID NO: 119949 - protein, 384 aa, Oryza sativa
  Clone ID: PAT_MRT4530_23115C.1.pep
MDGKKPYVIAIIIQVIYTGLYVVSKAAFDQGMNTFVFIFYRQAAATLLLLPLAIILERRNAPAMSLRLFTKLFMYALLGNTITMNMYNVSLKYTSATVASATSNSVPVVTFFLAVLLRLEVIRLRTLSGVAKAAGVALCLAGVLVIALYAGPAISPLNHHRALSGGVHGAESSVGTGTRARWMKGTFLMLLSNTTWSLWIVLQASLLKEYPNKLLATLIQCALSTLQSLLLAAAVVRADPAAWRLRLDAGLLAVAYTGFVVTGVSFYLQAWCIEKKGPVFLAMSNPLCFVFTIFCSSFFLAEIVHLGSIVGGVLLVAGLYSVLWGKSKEHNINMQLTLAAAASTEQVKQRQEEDHKMEIAGGDEQEEIKQQQQGKMAASPEQQV

SEQ ID NO: 119950 - protein, 388 aa, Oryza sativa
  Clone ID: PAT_MRT4530_23116C.1.pep
MSEATAGHSSAAAAESAPDDVIAEILLRLPPHPSFLSRASLVCNRWRRLARDPGFLRRLRAFHRTPPVLGFFHNSPDLPRFVPAEGVPGRVAAEAASLRRDGDDGMWWCVDCRHGRALLRSRDWAELLVWDPMTGERRCITVSSQIQEGALDLNAAVFCAASGGGDQDCHSSPFHVVVVFTTGQCHGRVFACVYSSGIDAWGDPISTPVTSPCELYEEPPVLVGEALYWLLDGSRILEFEFGNQCLCLALIDHPVENHAILKRNIRLVRMEDDDVLGLAFVKDFSLHLWAREVADDGASQWIPRRAIELDMILPLEGYRCRAMPIWICGFAEDGDVVFIRTVAGVFLVWLDTLKFKKVSGSLLMKTVYSYASFYVPNGMKNYASVPLL

SEQ ID NO: 119951 - protein, 58 aa, Oryza sativa
  Clone ID: PAT_MRT4530_23117C.1.pep
MEEEREGGRRRGIVLIITIKQMLLVISSKAIDISAFFFIENEKVRIQPGNEGGGRPGD

SEQ ID NO: 119952 - protein, 97 aa, Oryza sativa
  Clone ID: PAT_MRT4530_23118C.1.pep
MDLTANNLTCTNAISGPVLPYHTGQSSSRLQAMPFQQQQSNPIRNGFDLQDVYLLVMHVCVSERTGPVLKIILLMTETCCFLAFISTDILKDCATAQ

SEQ ID NO: 119953 - protein, 56 aa, Oryza sativa
  Clone ID: PAT_MRT4530_23119C.1.pep
MASPILLLLLLGGASHGGLYHPMTQSLARHELCLAMVRTYNIHALRQMQTELAYKQ

SEQ ID NO: 119954 - protein, 234 aa, Oryza sativa
  unsure (1)..(234): unsure at all Xaa locations
  Clone ID: PAT_MRT4530_2311C.1.pep
MELDAEAEREGGAGARWELSAAREYYDYRKSVYGDVTHRALLVDAVGTLVVPAQPTAKVYKSIGEKYGVKYSEDEILARYRRAYEQPWGGSRLRCESVYFEELYQYYMTEKAWKLCDPDAENVFKALRKAGVKTAVVSNFDTRLRPLLHVLKCDHWFDAVAVSAEVAAEKPNPTIFLKACESLGVKPEEAVHVGDDRXNDIWGARDAGCDAWLWGSDVHSFKEVAERIGVEVAK

SEQ ID NO: 119955 - protein, 767 aa, Oryza sativa
  Clone ID: PAT_MRT4530_23120C.1.pep
MAEEPQPEAAPAAVAATTEVAVAEKAPVEAEKEKKVEEETPAVEAEAKEEKKDEAAAAAAAGGDEAGAIEGTGSFKEESNLVADLPDPEKKALDEFKQLIAAALAACEFNLPPPPPPPKAKVEAAVEETKAEETKAEEEPKAEEPAKEEEPKAEVAAAAAAPPEAGTEEPKAEASSEEAKTEEPKAEAAADEPAKEESKAEAAPAEEAKPAEPEPEEKTVVVTEEEAATKTVEAIEETVVPAAAAPAAAATEEAAAPEPEVQAAAAPEPVLIWGVPLVGDDERTDTVLLKFLRAREFKVKEAMAMLRSAVLWRKRFGIESLLDADLALPELDSVVFYRGADREGHPVCYNVYGEFQDKDLYEKAFGDEEKRERFLKWRIQLLERGILSQLDFSPSGICSMVQVTDLKNSPPMLGKHRAVTRQAVALLQDNYPEFIAKKVFINVPWWYLAANKMMSPFLTQRTKSKFIFASPAKSAETLFRYIAPEQVPVQFGGLFKEDDPEFTTSDAVTELTIKPSSKETVEIPVTENSTIGWELRVLGWEVSYGAEFTPDAEGGYTVIVQKTRKVPANEEPIMKGSFKVGEPGKIVLTINNPASKKKKLLYRSKVKSTTATGRVSGCKKGCQYQDTTSSNVLVCAAGGFVTEVSLSFLQFSYTTDAAAPLAGAGQSSQCLQDCGRESRAAYRQSKDSYSYSATLPARVRDPQRGRWPEQCNRGWDSSVTWRCRIRRVWFMLRAAAAAAASVLRQFNTMPDLCNVQRAYEQIQCYVV

SEQ ID NO: 119956 - protein, 61 aa, Oryza sativa
  unsure (1)..(61): unsure at all Xaa locations
  Clone ID: PAT_MRT4530_23121C.1.pep
DAWADRLPRSRRSTNYGFGNLSNGXRIKGIQAWPIEGIKKFETLLYLPPLTVEDLLKHIEF

SEQ ID NO: 119957 - protein, 92 aa, Oryza sativa
  Clone ID: PAT_MRT4530_23122C.1.pep
FRYHGPRPCSALSPFLPFRALCLLHIYSRSPHPLFYEPLPSPIWLGVLVADRPLHRMPQVSCFNCLPYSFLDPFGLYILRRVLVANKRPKHQ

SEQ ID NO: 119958 - protein, 93 aa, Oryza sativa
  Clone ID: PAT_MRT4530_23123C.1.pep
MAQNVPSKGVKIPIDSSYWNDYNTRVVCDIFADQVATGLGLDDARKAVTTIAARWKQLKSDIAGCTKFMKVGLQNEELLEKMFEDIHNTDANH

SEQ ID NO: 119959 - protein, 60 aa, Oryza sativa
  Clone ID: PAT_MRT4530_23124C.1.pep
HPMLKLYITQSQTARSLHGQPLCEHAHAIFNHIHTVLTHIKTTHGLYVPPYTHTRWCLAQ

SEQ ID NO: 119960 - protein, 84 aa, Oryza sativa
  unsure (1)..(84): unsure at all Xaa locations
  Clone ID: PAT_MRT4530_23125C.1.pep
CLVFSFHHQARNTLKGIYISRACVKRINRPGFWIXPTNQVILSFWTXMALATRSTSPCMIWGREAVPNKIGEGVLSYIWYSHRL

SEQ ID NO: 119961 - protein, 119 aa, Oryza sativa
  Clone ID: PAT_MRT4530_23126C.1.pep
CFDSPEVRTASQLQMKFFYATACGFNLTYRLDVEPMNSDDGAHNGGSLSLSKRCHPTVELLPHHHHLEFNPQFWINPLMPELSTTPPDSRLSAPIHQIKHRASGLIPLTIDLHHHIPRS

SEQ ID NO: 119962 - protein, 45 aa, Oryza sativa
  Clone ID: PAT_MRT4530_23127C.1.pep
SENWEDFKYQTVRTGKTEEISGLYKLSKSEGTWSARRGAEIYNSE

SEQ ID NO: 119963 - protein, 967 aa, Oryza sativa
  Clone ID: PAT_MRT4530_23128C.1.pep
MAASPAPPGPTFLREVELRLLRCTLPSPATLPPPPSPPPRHPLAPVAASAVAAVDAGDYAAALASAAPHLLPPTAPAAPGSAARFYGDLAAAAEGFLRGDDGGAAAAGEGFECRCAVVLSAAVAAILAFTQQNVTGPPGKYSPFPFWTSSLDEGCYSNLEDEWDAWASAQLASIGSHVHGKFSLMQCNGWFNRVKHSGFMVFCILRIIMFIVFAELMLTSIKSLDPTDCCSVSWWLCRLSMVRQNIVDELSSTLFDQVQEYKNKTLAHFGELENVFSYWGPLLCDGEGSYFVSAAFLEAGIAEYKYGRIDQSSYMILIVCHMHGLEMGELNFGRQPDEVDAKSQMVLVANTSGPASGEGQVTELTGTQDDAAALKNARSSVPGESDEFCDILRMPRLVENDNDSGNDEKKDPSKKAVLTAMQQAAVLAECLHVSRRSRHDEMSGWEMAPFIESIDSQEDSYFVVRSLCDILRIRWESTRNRTKQRALLMMENMVEDVGNDFPVAAQRAKLVFGVQMPTIPALRKEYGELLISCGIVGEALDIFKDLELWDNLIYCYRLLGKVADATSLINARISVTPNDPRLWCSLGDVTNNDDHYKKALEVSNNKSARALRSLARSAYNRNDFHASKMLWESALALNSLFPDGWFAYGTVAWKTFSCKHFFKDLSSFTSFHSASTWMVIGYLDAVKIDKDLEKAVDAFTRSVQIDPENGEAWNNIACLLLSRHMIRGRSQAAVQAFKEAVKFKRNSWEVWDNYSKVLLDTGSIQQTLEAVKMVLNLSSNKRFNIDLLEKVMAMLEEQPTHLSDTQEAESSRSTSDDANQETRKYNQLLDIIGDILQQIVRSGGSNSEIWGLYARWHKTKGNLIACSEAMLKQVRSLQGSGLWHDQTKFTKYAQASLQLCKIYMEISSSTGSQRELFSAEMHLKSSLKQHALWCPLWHTLIPKPCLVFLSPWSAYFEFEKDNRGHVA

SEQ ID NO: 119964 - protein, 441 aa, Oryza sativa
  Clone ID: PAT_MRT4530_23129C.1.pep
MVALSITGVEQPRLSLPRATDDPVRSSLVAAPSDEVEQLLIPYQHKARWVVRGNSQQHGIDYDETFSPVVKPSTIQVVLSIATSCLWPIHQLDVKNAFLHGTLDETMYCQQPSSFVNLATPDVVCLLQRSLYGLKQDPCAWYQRFATYIRLLRFVALMSDTSLFVYKDQDHIAYLLHYVDDIILMASSMDLLRLITTWLHSEFAMTNLVDLHFFLGISPHLALVKRILRYVKGSLPAGLHIGTGFVKSLTAYSDADWAGCPDSWRSTSGYYVFLGDNLISWSSKRQTTVSYSSAEAKYRAVAHAITECCWLRQLFQELHAPIVSAIVVYCDNVSSIYMTANPVHHRCTKHNEINIHFVREKVALGQVHVLHVPSSHQFANIITKGLPMQLFTDFRSSLCVRERVGGIQDTSLSRCEESEKCNIAGADCSCNNLGKIWGVED

SEQ ID NO: 119965 - protein, 1344 aa, Oryza sativa
  Clone ID: PAT_MRT4530_2312C.1.pep
MAERAVAHSLSPNASGDDGEQNPRRRARTPPSPSRRNLGRGEALRKVGATPRRRRAVLRHRGLWRCRRRLHVVEAEGAASGGRYPPFVRHSLVNASDPRRCAWGAGCPPRYRAPARRSSRRPRNGGRFLVRSATSVRARGPAPVSPVGGAGYRAFVASLRNVRWPPRFRPTITEKYDGSVNPAEFLQIYTIGIEAAGGDDRVMANFFPMTLKGQARGWLMNLPPASVHSWEDLCQQFTTNFQGTYLCPGEEADLHAGGVRHNRMLEKIASKEPQTTAQLFELADRVARKEEAWTWNSSGSGVAAPAAPGSAARSGRRDRRRKKGSARSDDEGHVLAVEGASRAPRKGRPASDKKKEAGAPGRERPTGKWCTVHNTALHDLADCRAVKSLAERTRKWEEEKRQERREGKTPAAPAGNRRGEAKQKATAEDIDDGDDDLGFQEPEATVATVDGGACAHASRRSLKAMKRELLAAAPTHEATRRARWSEVALTFDQTDHPPRGCSPQHPFPRGIEANPEKIRAIERMRPPSKLRDVQCVTGCVAALSRFISRLGEKALPLFKLLKRSGPFTWTEEAERVFTQLKAYLSSPPVLVAPEPDEPLLLYLAATPQVVSAALVVERDEDNPHSARPHPVSTRPGREQGGEAPEPNGGPRPPTAGAGPPPACPTVPGAPDPQNGLGATAGRPRLSPSDPEVVGTKAECAPRGLSDEERPRDAAPGEEDRPRRKVQRPVYFVSEALRDAKTRYPQAQKMLYAILMASRKLRHYFQAHRVTVVTSYPLGQILHNREGTGRVVRWAIELSEFDLRFEPRHAIKSQALADFVAEWTPAPEPVSAPEASSGPSQRPHTVYWVMQFDGSLSLQGAGAGVTLTSPSGDVLRYLVRLDFRATNNMAEYEGLLAGLRVAAGLGIRRLLVLGDSQLVINQVCKEYQCSDPQMDAYVRQAYLADKTLPEDREGSERVRRISKRYVLVEGTLYRRAADGVLLKCIPREQGVELLADVHEGECGAYSASRTLVGKAFRQGFYWLTALNDAVDLVRRCRACQFHARQTHQPAQALQTIPLSWPFAVWGLDILGPFRRAPGGFEYLYVAVDKFTKWPEAYPVIKIDKHSALKFIRGITARFGVPNRIITDNGTQFTSELFGDYCEDMGIKLCFASPAHPRSNGQVERANAEILKGLKTKTFNILKKHGDSWIEELPAVLWANRTTPSRATGETPFFLVYGAEAVLPSELTLRSPRVTMYCEADQDQLRRDDLDYLEERRRRAALRAARYQQSLRRYHQRHVRARSLCVDDLVLRRVQTRAGLSKLSPMWEGPYRVIGVPRPGSVRLATGDGTELPNPWNIEHLHRFYP

SEQ ID NO: 119966 - protein, 67 aa, Oryza sativa
  Clone ID: PAT_MRT4530_23130C.1.pep
IVGGSRTGSHVPSVGVTKGIVGRQSTHQTAGQAHQPGGEAGHHGQDVSTSPGVVGECKRKVNKGKVR

SEQ ID NO: 119967 - protein, 57 aa, Oryza sativa
  Clone ID: PAT_MRT4530_23131C.1.pep
SANKVQTMQHMLEQATIWWSPPYYTHNMLKYFQGVYFGRGLNFMSLSDTRTYFPKAS

SEQ ID NO: 119968 - protein, 106 aa, Oryza sativa
  Clone ID: PAT_MRT4530_23132C.1.pep
APPPGTGGHPPCPRGPGKPGRGGPRKPLFAPAPPPGKGKPPAWGSKKGGGFFRPFPNRGTFPPQTTRPPPPGPRGPSFFFFGGPPGLFITKRPLLFLLGRNHSFGP

SEQ ID NO: 119969 - protein, 79 aa, Oryza sativa
  unsure (1)..(79): unsure at all Xaa locations
  Clone ID: PAT_MRT4530_23133C.1.pep
IQNIQNILLTLYIQAAGLKPSCRKQENSNACLETFETRVFHHKRKEEETRDSEHSAYIIATKLIAFLXRGIKTGSELHE

SEQ ID NO: 119970 - protein, 1187 aa, Oryza sativa
  unsure (1)..(1187): unsure at all Xaa locations
  Clone ID: PAT_MRT4530_23134C.1.pep
MAYCANALRLDKFSGIHFKGWXNRVTLWLTAMKCFWVSNGKSKGILIAEKQKKFINDRIGCIVSVLGNRLVEVYMHMIDTKELXDALNTKFDATDASNDLYVMEQFQDYKMIDNHSVVEQTHETHTKAKELELLKCVLPDKFVVGCIIAKLPSFWKNFNIAXLKHTRHEYYVEGLIASLDVEEKTREKDIASKXRTCFVCGLPGHLAKNCPQRKGMKAPAGXSSKSSNVTIGNTGDESGYGNLPTXFSVNQSTNWWVDTGANVHVCADISLFCSYQVARDSTVLMENRSHASVHXIDTVDLKFTSGKIVQLKNMQHVPTIDKNLVSVSHLCRDGFKLVFESNKVVVSKHGYFIGKGYECGXEANVWHSHLCHILLGLMSRLYSMCLIHKFSIVKGSKCHNCVQSKQPRKPYKAAGERNLAPLELLRLDLCEMDGVLXKGEKRYFMTLIDEATXFCYVYLLKTKDDGPDYFKIYKAEIENQLDRKIKRFRSDRSGEFFSNEFDLFCEKHGIIHERTPPCXTLTDMVNAMLDTVGLQAWWGEALLTSNHVLNRVPNRNKDKTPYEQWIERKPSLSYLCTWGFLVNVNVPITKKCKLGTNTVDRVFLGYAHYSIAYRFLIVKSEVPHMYVGTIMETHDATFFESFFPIKDTHSTSSQSCEIILSSITPPGQTEHTHEYITEEDXEEDDSETPWRSKKQRTTKSFSHDFTVYLVDDTPKSILEAYASPGADYXKEAIHSEMDSIIANRILEVTEXPYGCKHVGCKGVFKKKLWPNGTIEKYKDQLVAKGYTQKEGEDFFDTYSPVGRLTTIHVLLXLAASHGLLIHQMDVKTAFLNVELDEIYMDQPYGFIVEGIEGKVCKLRRSSYQRTPIPSXIRSTGIPRRQISVGFAVNDAKKYVYYHHGGGEGVIICLYVDDILIFWTNLELINDVKSFLSQNFDMKDLGVAAVILNIKLIRGEDGITLLQSHYVEKILSHFGYXSKPSPTPYDPSLLLRKKKRIARNQLEYSQIIGSLMYLPTTTRTDISFAVSKLSRFISNLGDDHWRALEXVMHCLKGTMELGLHCARYPALLEEYSGFNWISDVDEIKTTSGYVFTSGGGAVSXRSCKLTILMRSSIEAELMAEDTAIVEAEWLRVLLMDLSMVEKXNVKRQLNFVRRLRNSEVIPLDYIQTASNLVDPXTKGLSRNVIDNA

SEQ ID NO: 119971 - protein, 57 aa, Oryza sativa
  Clone ID: PAT_MRT4530_23135C.1.pep
TRSPPARPPTRPPRVRFIQFLFDDKTYNFLCRTHDWRVETMCSTQKIISFIQFLFDD

SEQ ID NO: 119972 - protein, 87 aa, Oryza sativa
  Clone ID: PAT_MRT4530_23136C.1.pep
FFSKPPYSNIVPCIIQRIHTLQRMGNKNFYTLTKAMVYFTRFITLDHRHKECFGRGLLSHGGSNTNSGCFGTIFDCFTKDRGVLFGS

SEQ ID NO: 119973 - protein, 99 aa, Oryza sativa
  Clone ID: PAT_MRT4530_23137C.1.pep
WWYWRCSEHCTHKYITEPMKYRWEQFFEHTYCINHFTTEHIKILMRASKLGASCIAKTTAWQQDYSRMMLIQQKRHSRKNQLEKPANLSITETSGCIEA

SEQ ID NO: 119974 - protein, 697 aa, Oryza sativa
  unsure (1)..(697): unsure at all Xaa locations
  Clone ID: PAT_MRT4530_23138C.1.pep
EAKLKFHMALEIIKQLEMAKECRCLSQAERRLRTALKCRVLGLANIKLPXKRQASRVTTIHEGDANSRFFKLKANARRRKNHRHQLSKRNGXATMHDEKVHLINDHFTSIMGRLAPRERELSWQALGIGPMELRYLAKPFTXKRRYAKLLSKLPIDKMLGLGGFMINFYKSSXDIIKDIVAAFNSMYELRXHLNLLNSANVVLIPKKXGVDKIMNSRPISQIHSFAKIHLKLLALHLRCLTHLLISVNKSAFISGRSIQDNILYVRNLIRSSQHKLLXLFKLDISKAFDSVRWNYPLLSLLHQRGSHSXWINWIVTILKSSYSEVLLNGILGEQIQHGNGPRQGDLLSPLLFILAINPLHSLLSMPTDMGMISNKLKGRAIRLRFSMYADDVAIINSQREDILVFTELLTKFGDETGLCTNIQKSXVAAIRCEKLAIDELLKXITRASFPMRYLGLPLLTPPTSLRQISNMDGXWRGKNLGMAGRSTLVKSVLTSQPVYLLIVLKASKECLEVIFHLGXPRHLMGGKCKVNWTKMFSPMTNRGLRILNLEKFARVLWIXWLWLEWKAKXWVGMEMPCDETEKILSVAATSITVGDGASIKFMGFSWLKGQLPKDLFSGVYNISKRKKPHSKKKLXNNYWLQDLDLPITQGMTVLLIDQLFNLWTAVQLVELTPXEPNEIKWKITVHGEYTETSAYMV

SEQ ID NO: 119975 - protein, 561 aa, Oryza sativa
  Clone ID: PAT_MRT4530_23139C.1.pep
MQLSCSGHDTILDHPVLGSCKVTAIYYRYRVINAILLVESSSNCPLQKLASTNVSTAVYEPQKKDGATIVGCSKDSIATNQDGIVGPRSCLNLSSHGSQLWYLVPPRTYMSALPPDCTVVAKGIPIPYNYDRNGPNENQYLDISNLKEKANKVINFGETAFTWHLNKITNACQGCEWNGHHCGFSSQRGQAFCQHQGSQVILIAATSSAATLVVLLLMVGTTIYLSLKTRYNEEIHLKVEMFLKTYGTSKPTRYSFSEVKKITRRFREKIGHGGYGNVYKGELPNGVPVAVKMLENSRGDGQEFINEVATIGRIHHANVLRLLGFCSEGTRRTLIYEFMPNDSLEKYIFSQGPNVSREFLVPDKMLDISLGIARGMEYLHQGCNQRILHFDIKPQNILLDYSFNPKISDFGLAKLCARDQSIVTLTAARGTMGYIAPELYSRNFGVISYKSDVYSFGMLVLEMVSGRRNLDPGIDNQHEVYFLEWIYEKVFTGQNLLIGTEMTQDEKYKVRKLAIVALWCIQWNPKNRPSTTQVVNMLTGRLQDLQMPPKPFVSSASESIP

SEQ ID NO: 119976 - protein, 156 aa, Oryza sativa
  Clone ID: PAT_MRT4530_2313C.1.pep
MSGWDEGAVFYSDQAQFPRGGPGGDPSADLTRHSALRKFKEFLRGFTGPTGDFPYRESLVHNRDHVTVAIEDLDAFDAELSDKIRKSPADYLPLFETAASEVLASLRSKVAGETGEMEEPATGDVQIFLSSKENCLSMRSIGADYMFKLGKIGGIT

SEQ ID NO: 119977 - protein, 165 aa, Oryza sativa
  unsure (1)..(165): unsure at all Xaa locations
  Clone ID: PAT_MRT4530_23140C.1.pep
KNKKGEEKPKWEDIYESLKAARRARGECFKCGEKWGPGHKCPKSVQLHVLDELLEVLMLQDGTXTSRKKKKKIMNNWXDSGSSSNFIVESLVSKLQLPTERMPASQGSTFQDTLKVLTIXGSNMILGMXWFEEFNPMWIEWERKKLTLVPMGNRIILLGLKQENK

SEQ ID NO: 119978 - protein, 77 aa, Oryza sativa
  unsure (1)..(77): unsure at all Xaa locations
  Clone ID: PAT_MRT4530_23141C.1.pep
MGMPSVQAALRCLLSQIWPHCATANPAXTLYWRCLLPLISLPRPPQPCAKIYVKGAEHKSVAYVAXHIGGQTWSKDD

SEQ ID NO: 119979 - protein, 65 aa, Oryza sativa
  Clone ID: PAT_MRT4530_23142C.1.pep
IVMCKIYQWLHFAQLEYPRDVPLIAATLVRIQCGQVVALSLDVALQLIRMPRRCRITCGVDIHLA

SEQ ID NO: 119980 - protein, 964 aa, Oryza sativa
  Clone ID: PAT_MRT4530_23143C.1.pep
MGAAEEEAEVLGEKVVELTTSINNILGSLQGLEKWIPCVDSGIRELNKAVDEIAVRVTQLEAVTPTTPSQAAQAPVGTASNRLTRVTHPKPSRLRSKPWSRALHPVETWAELVVAVNGKFGRDKYQQHLEELENLKQCGSVDDYYVKFVELMHRVLLVYNRSYDKTLFVTKFVRGLKPEVKIAIKLHKPRTVDLALSLAKTQEELLGELSASKAQQKVIVKEGFKGGIKPAYVAKGILGAHPEENKKGEEKPKWEDIYESLKAARRARGECFKCGEKWGPGHKCPKSVQLHVLDELLEVLMLQDGTADIQKEEEEDNEEELTLSKCAAAGTMGKKTIRLQGMIQHQEVLILVDSGSSSNFIVESLVSKLQLPTERMPANSVTIADGGKMTCDKCVQVEWWCQGSTFQDKLKVLPIGGYDMILGMDWLEEFSPMWIDWRRKKLREELVEAEDVPDQINEVITEFQHLFKEPTELPPHTQFDHRIPLLPNVKPVNVKDEIEKQVAQMLHQGIIQTSVSPFASLVLLVKKKDGSWRFCIDYRALNEVTVKNKYPMPVVEELLDELAGAQWFTKLDLRSGYHQIRLEECDEFKTAFKTHVGHYEFRVMPFGLTNAPATFQGLMNTIFAHLIKKGVMVFVDDILIYSRTLQEHVKYLGHVIGASRVATDPSKIKAVQDWPVPKTVKQLRGFLGLTGYYRKFIQGYGVITRDLTTLLKKDWYWGAFRPGRSTLEDPQSLFTWSSLRKDVHQFVQQCETCQRAKVEHGRTLGLLQPLPVPLQAWHTVCMDFIEGLPKSGKFDTILVELFRLANVKLNMSSSYHPQTDGQPKRLNQCIEAFLRCSVHATPNKWSQWLSQAQHWYNTAFHTALGKSPYEVLFAQKPTHFGVVDLGQSTVPDVQTWLEQRSLMQGLIHQQLLWAQQRMILEKVGKVAYRLDLPVSSLVHPVVHVSLLKQAVQPGVQRTRSRKLY

SEQ ID NO: 119981 - protein, 880 aa, Oryza sativa
  Clone ID: PAT_MRT4530_23144C.1.pep
MEEKKGGGRIHTHVRGEGNIFFLTEERRVILGPLDVIHTPSGHYEFRLMPFGLTNAPATFQGLMNTIFAHLIRKGVLVFMDDILIYSRTLQEHVSQLRIVLEILARHQLFVKKSKCSFAKQHLEYLGHVIGASRVATDPSKIKAVQDWPIPKTVKQLRGFLGLTGYYRKFIQGYGVITRDLTTLLKKDAPVLALPDFSQQFVVQTDASDIGIGVVLTQAGHPIAFISKALSKRSQMMSTYEKECMAILLAVEKWRAYLQHAEFLILTDHKSLSHLRKQRLTRTMQHKAFVKLMGFQYKIKYKKGSDNGAADALSRRSNSDELLAVSISVPRWLEIIQEEYQQDADTKKLLAALSLHPEGQGQAATYQQIISLFTWSSLRKDVHQFVQQCETCQRAKVEHGRTPGLLQPLPVPLQAWHTVCMDFIEGLPKSGKFDTILVVIENFSKFAKFIPLSHPFTALTVAKAFITNVYDIFGMPKVIVSDRDRIFTSALWQELFRLADVKLNMSSSYHPQTDGQSERLNQCIETFLRCSVHATPNKWSQWLSQAQHWYNTAFHTALGKSPYEVLFARKPTHFGVVDLGQSTVPDVQTWLEQRSLMQGLIHQQLLRAHLPYVQLSVANRACQKLSFCFFGPYKILEKVGKVAYRLDLPAGSLVHLVVHVSLLKQAVRPGVQHRLGDKPLFKGREIVMTTVVHQGLSVWASYGPRMRRRLSRLFKGSGSSSSHHDGSSTRSSADVSMQDAEAPRRLLNDTDLDLVSDRERQAYYMLSDREYAHTREYSPELLKKIDSKRARGRCRRLMSQFWYLYSMGIIGARVYARLRDNQLPRSSGVPPFPSEWRSTSSRWDLGEITRRMDTLDMQTGEIQYNHMEHIAQTQRMATIC

SEQ ID NO: 119982 - protein, 160 aa, Oryza sativa
  unsure (1)..(160): unsure at all Xaa locations
  Clone ID: PAT_MRT4530_23145C.1.pep
VLGEKVVELTTSINNILGSLQGLEKWIPCVDSGIRELNKAVDEIAVRVTQLEAVTPTTPSQAAQAPVXHGVESTHQGDASEAFKAKEQTLVKSKPQFHHSPVNFELGETSEKGVGGSSFSVRSASPRLPKTDFPKFDGDNPKLCKTNRYRARLVQTVKDA

SEQ ID NO: 119983 - protein, 104 aa, Oryza sativa
  unsure (1)..(104): unsure at all Xaa locations
  Clone ID: PAT_MRT4530_23146C.1.pep
QDVNPEGPFPPSRRCVRSSKESISMPLEQGCLLFSLEKNARQGSLFEQGYFSKGFSKKGFYGENQQQPGMTPVRVSRGRQYTGHLPSIFRVXPHQCSIFSPGQY

SEQ ID NO: 119984 - protein, 122 aa, Oryza sativa
  unsure (1)..(122): unsure at all Xaa locations
  Clone ID: PAT_MRT4530_23147C.1.pep
PRGFGGGPTPSWEGAAAATPRARSPSGRGSGVGNEVAAVWRERERSRSXRERKAAAALTIEMRRRRRRRRXRLRDDGEIRRRRRRGDALGSGGEGEADRDRGKXLLSVGGEYEGAHREYIYS

SEQ ID NO: 119985 - protein, 159 aa, Oryza sativa
  unsure (1)..(159): unsure at all Xaa locations
  Clone ID: PAT_MRT4530_23148C.1.pep
LTEQLVLRVLQYILEEVENDVLYLLIDGSGDVSYKELMAVVLXYIVKCGNVKNILVGFFHVKDNLSMHLKSTIDILFAEHKLSLGQVRXGANNMRGEFNGFLSPIMRENTLAYYVXICLAQLLELIVLAIIVKKHXKGIEEFFDMIXYVLLNVIGGSSK

SEQ ID NO: 119986 - protein, 131 aa, Oryza sativa
  unsure (1)..(131): unsure at all Xaa locations
  Clone ID: PAT_MRT4530_23149C.1.pep
PEDSDVCIGXTSVFIGISLLXPDDSKVDXKDGXSATQEPAIDANRPGKMQTEETEVDGTNSFTSSVKVKAKRILSKAKSACSMSLGLGEETISASSVLAMPMVSSRTTGFRGIATDRSKYIPLRSTDWDNL

SEQ ID NO: 119987 - protein, 62 aa, Oryza sativa
  Clone ID: PAT_MRT4530_2314C.1.pep
MGHTYLHSAGSRCNVGARLSTDDVTGVRPELARRLRLRDEFLEALIIPTGQGEACDRPPVAT

SEQ ID NO: 119988 - protein, 368 aa, Oryza sativa
  Clone ID: PAT_MRT4530_23150C.1.pep
MAHFYCVLDCDNPELLDESASCNNEPGSLPFLLIEMNLVSWSFLLEVLQRFGFETRWHNWVSNLLASSSKILLNGSPGEEIKHCRGLRQGDYLSPLLFILVMEPLQRMIRKAEELSILIPVSNKMSRFRCSLYDDDVAIFVKPTKQDLDMLCQILISFARAYGLHTNIKKTEIFPIACEGVDVQDITQVLLGSIKTFPCPYLGLTLHTCKLRKVDFIPLIDKFGARLPGWKGKFFTSENRETLVKSVLTVLPIYHMIGTQTPKLVIKHIDRFCRAFLWKRDDPENISAGNSLVNWSTVCMPKNLGGLGSVDLNKFSRAIRLRFSWFSWKEENKPWLGSELPCDNVDKSLFQVATEIVLGDGKKSVVLG

SEQ ID NO: 119989 - protein, 245 aa, Oryza sativa
  unsure (1)..(245): unsure at all Xaa locations
  Clone ID: PAT_MRT4530_23151C.1.pep
LQYLGLPRPSRIHYLQSSRRRCRARVTELALFSLADVVVPVLPTLGELTELRFPPARSLNRSRLVPATTPPTVARARSAAPPPDPRAWGGAPARSVWEEGSGGGGGDVAPLAHRLPATYSSAAAPPEVAEPTKPTTAXARRPLTNHPNLRQRAPXPACRSGSIAVMSSSSSRGSSGEPAXTVTRESQFCSARATSIHADARATSIHADARAAHIIVVVLVKRPPTREAXRSAAPSARRGPPHRRR

SEQ ID NO: 119990 - protein, 466 aa, Oryza sativa
  Clone ID: PAT_MRT4530_23152C.1.pep
MASLSRVPPPARGSRRRPPPSSPVPLSPRQEMLLEAASDGDLGFLKRVVRSLDGGRGRPAEAVEAVRECGAGALHLAAGAGKLAVCRVHLYTKFVFSALLGKQLLHQSQFSKGPSSGMEEMEGETPLAYAVNGANVATVRYLLDHGAHPEKADNKGFTPLHFAAEEGYCNVVELLLAKGAQVDSMSVRGTPLHLAATNGQHRVVKILLDHNADCNKIVSAVYTPLLVAIYGSSLKCVKLLIKAGADVNGVGNITPLIASVGSTEIMKCLLEAGADPNVPDEFGRMPIEFAVRCGTLKDVNILFPLTSPMPTVPDWSVRGIIRHVNTLPGQKDYESGLEKEVAGLKLQGVEALKRQDYLAASDLYTKALCLDFNDATLYSNRSLCFLHMGDGDKAYGDAYTCRMMRPDWPKACYRQGAALMLLKEYQKACDALLDGFKMDPGNSEIENALREAMESLKISDGAKLTT

SEQ ID NO: 119991 - protein, 91 aa, Oryza sativa
  Clone ID: PAT_MRT4530_23153C.1.pep
MAAEIQIGSRLAAPQKFKILRPSEQCVTASVRKGSVSYDMGNIQESSGTRETVEKRVRLAYDPTGNVDHTVLPLVGDKHGLAVLVKNFKKG

SEQ ID NO: 119992 - protein, 826 aa, Oryza sativa
  Clone ID: PAT_MRT4530_23154C.1.pep
MDERGAGDEPVLLREVRQVGESNPEAGEASQVLVVTGFMFNSIGHHAMGESSDCNLEGHNVEFRSDCEKFEQFAQSNIKATNQNAPCEQVPKVGMTFQSEDDAYNFYNSYARRVGFSVRKCHWALVNFLKAMSGKQPETIFTDQCAAMAKAIRIVFLSSSHRLCLWHITTEKNELEENDECPVCKESRWKEHKGKIKRVPRKVLRYFPLIPRLQRLFMNKEIASDLRYHSDKRVVEENVLRHPSDGEAWKDLDKRYPWLAQEPHHLRLGLATDGFNPFGTMSSSYSVWPVIIVVYNLPPWKSMKEPFMLMPLLIPGKKTPGRDIDVYLRPLVEELKLLFNIGVVTYDASKGDTFNMRAVVLWTINDLPALGTLFGYATMGYKACPICLDETYSESFRSKIGFLGHRRKASQKGMEIPGKNFTKQSILFELPYWKDLKLPHNLDVMHIEKNICDSLLGTLLNIDDKTKDTLKARMDLEDMNIRKELHLQHRGSSIVKPHACYTLSRDEKHEFLKFIESVCFPDGFATNISNGVNYKEGKIAGLKSHDLHILLQRILLIGMRGFLHEDFYQVLLQLGSFFRQLCSKTLKLDVLEKLEKQIVIVLCKLEMILPPAFFDVIVHLAVHLPEQARLGGPVQYRWMFFVERFLGSLKGMMSNRARPEGSIAESYIMKECSTFFSMYLHGIETRINMTPCVGMCSITVKNCNIAEDVYVLSYPNERQVVLFKCEWYDLERNKPVRIDNDFGSINLGKKWYIDDSFVLASQVNQVFYVADTKLKEEGGDVLLDETFEAIMLHRDDVRPEVVTDPKELAALKEQPISRNEYEEEAE

SEQ ID NO: 119993 - protein, 95 aa, Oryza sativa
  Clone ID: PAT_MRT4530_23155C.1.pep
MERGGATRFAGPPKPGGKRPKVFCCPPQNTPGPGGPPGNSGPDPGGAPFFPIGGRIKAGGNQGQSGSRGKIVTRSQSHTKNNPEPKRENPGGPKG

SEQ ID NO: 119994 - protein, 395 aa, Oryza sativa
  Clone ID: PAT_MRT4530_23156C.1.pep
MASEEGEEANAASSAEEVGRKKPPRHKGKHDKPKPWDDDPNIDHWKIEKFDPSWNEGGMLEVSSFSTLFPQYREKYLQEAWPIVKGALKEFGVACELNLVEGSMTVSTTRKTRDPYIIVKAKELIKLLSRSVPAPQAIKILNDEMSCDIIKIGSIIRNKERFVKRRERLLGPNLSTLKAIEILTGCYILVQGNTVAAMGSWKGLKQVRRVVEDCIKNIKHPVYHIKELLIKRELAKNPALANESWDRFLPKFKKKNVKQKKPITKEKKPYTPFPPPQQPSKIDLELESGEYFMSDKKKSAKKWQEKLEKQSEKAEENKRKREAAFVPPKEDTATPYESAKSTSNNDEIADMAKSLKKKAKEFRKSEAQENVRLESYVASNEGSRPKKKHKSSKSK

SEQ ID NO: 119995 - protein, 357 aa, Oryza sativa
  Clone ID: PAT_MRT4530_23157C.1.pep
MASEEGEEANAASSAEEVGRKKPPRHKGKHDKPKPWDDDPNIDHWKIEKFDPSWNEGGMLEVEGSMTVSTTRKTRDPYIIVKAKELIKLLSRSVPAPQAIKILNDEMSCDIIKIGSIIRNKERFVKRRERLLGPNLSTLKAIEILTGCYILVQGNTVAAMGSWKGLKQVRRVVEDCIKNIKHPVYHIKELLIKRELAKNPALANESWDRFLPKFKKKNVKQKKPITKEKKPYTPFPPPQQPSKIDLELESGEYFMSDKKKSAKKWQEKLEKQSEKAEENKRKREAAFVPPKEDTATPYESAKSTSNNDEIADMAKSLKKKAKEFRKSEAQENVRLESYVASNEGSRPKKKHKSSKSK

SEQ ID NO: 119996 - protein, 421 aa, Oryza sativa
  Clone ID: PAT_MRT4530_23158C.1.pep
MASEGDASALVAAAEGRKPRHKGKHDKPKPWDDDPNIDHWKIEEFDPSWNEGGMLEVTSFSTLFPQYRGKSPHPTPPSALSWFLPRSAIDWFCLVVKKYLQEAWPIVKGALKEFGVACELNLVEGSMTVSTTRKTKDPYIIIKANELIKLLSRSVPAPQAIKILNDEMSCAIIKIGSIIRNKERFVKRRGRLLGPNLSTLKAIEILTGCYILVQGNTAAAMGYWKGLKQVVRVVEDCIKNVKHPVYHIKELLIKRELVKNPALAHESWDKFLPKFKKKNVKQKKPLTKEKKQYTPFPPPQQPSKIDLELESGECFMSDKKKSAKEWQEKLEKQSQKAEENKRKREAAFVHPNEDIATPYESAKSIINNGEIADMAKSLKKKAKELRKNEEQENVRLESYVASNEGSRPKKKHKLSKYSQPE

SEQ ID NO: 119997 - protein, 92 aa, Oryza sativa
  unsure (1)..(92): unsure at all Xaa locations
  Clone ID: PAT_MRT4530_23159C.1.pep
DLEQDRTPIILLXNQAYRQGLLFNTLLLRIILILDTILINLHLLEAAYVASQLTDTQIREMEEQRRSVSRWWSGEEGEARPQGVRRNVSEEK

SEQ ID NO: 119998 - protein, 163 aa, Oryza sativa
  Clone ID: PAT_MRT4530_2315C.1.pep
DASDRDLLVRQMKQYDIPVLNFMGDKGIRREPFNITLEMQQVGIYSRLDQVFEAPPAVKDVLISQANLDRSYIGTDETHNRADDVPKLGISDFWTPDNHYRWSRSRYGGHLSAFVDAVNPSRLFMCNLDVIDSERLRSQKDKHIKDIDGMDEDLKKLLKEQRQ

SEQ ID NO: 119999 - protein, 261 aa, Oryza sativa
  Clone ID: PAT_MRT4530_23160C.1.pep
KPMSSEAGGAAASSASAPPPPRRTPLERTADAAEELYRLRDTFFPRDPVEKAAALRALADDALAVLDSLPPEQRKTPQQRAVYEFLRGKILDVFPDYHKEAEDHLSKAVKLNPSLVDAWLCLGNCIWKKGDLDSAMNCFSLALSKGADKKILCQLSMLERSMAQDQQETPHKTGEVGGGGSDREVEQSSVGEIDPYGHSTTHLFLMNNILELCKIPKQPVVIDLLWVRVGKHRLGDCRAATASRDEKGYRLGETNSDSFLN

SEQ ID NO: 120000 - protein, 87 aa, Oryza sativa
  Clone ID: PAT_MRT4530_23161C.1.pep
QTVGGRGGFRRRLTGGDKTGPTALAQTSSGSPLKDRKNFVMKKRQTACYLSLSCDFASQASDSKSKLRGRSFSHARRMTLVDQEFGR

SEQ ID NO: 120001 - protein, 87 aa, Oryza sativa
  Clone ID: PAT_MRT4530_23162C.1.pep
MGIKTQGGFKARKPPGPGETVFPFEKKQKGGFWPLDPKGYPIWDFGGKKLPGEKREIPKNPPVLKKTKFAPNTTGAGGGHTTQGSFV

SEQ ID NO: 120002 - protein, 124 aa, Oryza sativa
  unsure (1)..(124): unsure at all Xaa locations
  Clone ID: PAT_MRT4530_23163C.1.pep
PRVRGRVGGRTAMMGVVGMVARELLGKLGLIPAQTAIPWVQTDVIPHGATYTYWADPYTLFALELALGGLDEHCRLQDWDTPGSMGKQYLLGLEKYLAGSGEPAYPSGPFXNPFGFWTKSEAVM

SEQ ID NO: 120003 - protein, 105 aa, Oryza sativa
  Clone ID: PAT_MRT4530_23164C.1.pep
MSSCCRLGRAATAASEPAAPGHHRRSRARLSRQPLLLSPPPSQLAAITTPGLLLLLVVGATWIRPVARRAASASIRSLPAIASSVAAVASRAPAASCALGGKGRS

SEQ ID NO: 120004 - protein, 149 aa, Oryza sativa
  Clone ID: PAT_MRT4530_23165C.1.pep
SCSRRTSRRRRLPPPDPPPTPPRRHQPPRAQPPAQAQAHSRKQRRRQTISPPPPPPPPAERPANPASPPPAGHRDRDRGNRSPRGGSHAGGAQPRTRGWGTAPPPSCHGGAAAAGRGGSSSAPPCCRGTPPRGARRGAPAAPARRAPCP

SEQ ID NO: 120005 - protein, 326 aa, Oryza sativa
  Clone ID: PAT_MRT4530_23166C.1.pep
MTKTKKSNNDSTILVIGGTGIIGRHIVAASLDAGHPTLVLVRPTAASAAVDVDSDKAKLLASLVASGATIVYGDMNDRESLVAAIRQADVVISAVGHRGTVELDGQLKVVEAIKEAGNVKRFVPSEYGCDVEQAEEGTLEPARSIIAAKVRVREAVRAAGIPYTFVCSYWAHGFMLPRLGDPLVDRPPATVATVYGDDTQRAIFVDEKDMSAVAIKAMEDERAANKILYVRPPANKLSLGQLVRLWEKKSGNTLQKRYVSDLQLANQVQEAPFPVNFQLAMVHSTLVAGVCEQTINPDVGAEATELYPEMDFLTVDSYLDALLLHA

SEQ ID NO: 120006 - protein, 441 aa, Oryza sativa
  Clone ID: PAT_MRT4530_23167C.1.pep
MAPGGAPARSFVVVVLAVIALSAIVAVAGTKKALSTVDVEEELDAARAAIRRAARQHRRGGGGDVGSANWLRFYGGEADYDLLSRVYRNPAAFYRSYVEMERRFKVYVYEEGEPPILHEGPCKNIYTIEGSFIEQLELMSPSDAGGGVRTWDPTRAHAFFLPFSVSQMVKFVYRPPSQDRAPLRAIVADYVRVVAARHPFWNRSAGADHFMLSCHDWGPYASRGQPELYTNAIRALCNANTSEGFRPGKDVSVPEINLYDGDMPRELLAPAPGLESRPLLAFFAGGRHGHVRDLLLRHWKGRDAATFPVYEYDLPAAGDYYSFMRRARFCLCPSGHEVASPRVVEAIQAECVPVVIADGYALPFADVLRWEAFSVAVAVGDIPRLRERLERIPAAEVERLRRGVRLVKRHLMLQQPPRRLDMFNMILHSVWLRGLNLRLHR

SEQ ID NO: 120007 - protein, 44 aa, Oryza sativa
  Clone ID: PAT_MRT4530_23168C.1.pep
MACVLMSRESMAGDGLGVNLGEDDVPMIMISCGMIRLKSNARGW

SEQ ID NO: 120008 - protein, 247 aa, Oryza sativa
  Clone ID: PAT_MRT4530_23169C.1.pep
MLEHSESATEKIMSSIMDTIAENLPKQKSGKFDVGAASDKMKEKLFGRQKTIHRVLGGGKPADVLLWRNKKISSSVLALATAIWVFFEWLDYHFLTIVSFALVLGMVVQFVWSNFSSALSGSPSKVPRVELPEELFVNIAVAVGTQVNKFLSFLQDVSCERNLKHFVLAIVGLWAAAVIGGWCNFLTVIYIGFVSAHTLPVLYEKYEDQVDDFLYNILGLLRDQYQKLDQGVLSKIPKGNMKFKKSE

SEQ ID NO: 120009 - protein, 2030 aa, Oryza sativa
  unsure (1)..(2030): unsure at all Xaa locations
  Clone ID: PAT_MRT4530_2316C.1.pep
MAERAVAHSLPPNASGDDGEQNPRRRARTPPSPSHRNLGRGEALGEVEGSATSPPAGDGGGRRDGARRRLVYGDGGTPQGALQAAGALLRHPPVVPDPETPARRWLDDVADLVMTAQQRLGAGGRSSATEASGAAATGSMSSRRRARRAAAVTRRSSAIPSSTPPTQEDVRGGPDARLDIERRHDTRRAAYATEGASSSGAPLRSGHGGRPPVSPVGGAGCRAFVASLRNVRWPPRFRPTITKKYDGSVNPAEFLQIYTTGIEAAGGDDRVMANFFPMALKGQARGWLMNLPPASVHSWEDLCQQFTTNFQGIYPHPGEEADLHVRFCQVRNTIPCIPAHAVIYAFRGGVRHNRMLEKIASKESQTTAQLFELADRVAHKEEAWTWNSSGSGVAAPAAPGSAARSGRRDRRRKKGSARSDDEGHVLAVEGASRAPRKGRPASDKKKEAGAPSRERPTGKWCTVHNTSLHDLVDCRAVKSLAERTRKWEEEKRQERREGKTPAAPAGNRRGEAKQKATAEDIDDGDDDLGFQEPEATVATVDGGACAHASRRSLKAMKRELLAAAPTHEATRRARWSEVALTFDQTDHPSCVARGGQIAMVVSPTVCNVKLGRVLIDGGAALNILSPAAFDAIKAPGMVLRPSQPIIGVTPGHTWPLGHIDLPVTFGGSANFRTERVDFDVADLSLPYNAVLGRPALVKFMAAVHYAYLQMKMPGPGGPITVHGDLKAALVVERDEDNPHSAHPHPVSTRPGREQGGEAPEPNGGPRPPTAGAGPPPACPTVPGVPDPQDGPRATAGRPRLSLSDPEVVGTEAECAPCGLSGEERPGNAAPGEEDRPRRKVQRPVYFVSEALRDAKTRYPQAQKMLYAILMASRKLRHYFQAHRVTVVTSYPLGQILHNREGTGRVVRWAIELSEFDLRFEPRHAIKSQALADFVAEWTPAPEPVSAPEASSGPTQLPHTAYWVMQFDGSLSLQGAGAGVTLTSPSGDVLRYLVRLDFRATNNMAEYEGLLAGLRVAAGLGIRRLLVLGDSQLVVNQAYLADKTLPEDREGSERVRRISKRYVLVEGTLYRRAANGVLLKCIPREQGVELLADVHEGXCQFHARQTHQPAQALQTIPLSWPFAVWGLDILXGPFRRAPGGFEYLYVAVDKFTKWPEAYPVIKIDKHSALKFIRGITARFGVPNRIITDNGTQFTSELFGDYCEDMGIKLCFASPTHPRSNGQVERANAEILKGLKTKTFNILKKHGDSWIEELPAVLWANRTTPSRATGETPFFLVYGAEAVLPSELTLRSPRVTMYCEADQDQLRRDDLDYLEERRRRAALRAARYQQSLRRYHQRHVRARSLCVDDLVLRRVQTRAGLSKLSPMWEDSMDFRSGSSNDSGSASNPSGNTGFDASRPSSGSGSTMGGHARSILNAARVIPPNDDEKKPLWSYSRVKAHLLKIGTIGVATCKKVTVDILGQLQDEMTRAEAISARNLPKDIPLPTESVSRGKRRAVSAIESSFNLDARAKLDALIARMFYTSGIPFNVARNPYFRKAFQFACNNQLGGYTPPNFNKLRTTLLVQERTNVERLLNAVKSTWSTKGVSIVSDGWSDAQRRPILNFLAVTEDGPMFLKAIYTEGEIKRKEYIAEKMFAIIEEVGPNNVVQVITDNASNCRAAGLMVEQKYSHIFWTPCVVHTLNLALKSICAAKNSSGDAFLEFQWISEVAADASAIKNFIMNHSMRLSMFNDFSKLKFLAIADTRFASTIVMLKRFRAIKENLILMVASEKWNAYREDNQVQAQHVKEKILNDLWWDKVKYIIDFCEPIYSMIRAADTDKPCLHLIYEMYYYETWLEEAPNRQAPHMDEEISDMRNKCFRRYFSGDDLRKIKQQFAYFSLFGSGFNSFDSIEDRAHMNAKQWWGIYGNSAPELKKLALKLRTANIIFLCRKKLEHLCLRPARAEDLVFVHQNMRLLSRRSEEYYSGPSIMWDVAGDRYELFDGGADFLQQAELTLDEPDLERLLEDLGALDIQGDNGPSSTSVPMDEINNQFI

SEQ ID NO: 120010 - protein, 103 aa, Oryza sativa
  Clone ID: PAT_MRT4530_23170C.1.pep
DLFTSSRVKILLPDLLVSKNFTVRDNVDDSRTFISRSNGSFPNIYGPLYIFFRFGVCAIDGAIPVARHGSWACDRLCGPPRIGPFSDLILSKNLSDWKGPLYT

SEQ ID NO: 120011 - protein, 83 aa, Oryza sativa
  Clone ID: PAT_MRT4530_23171C.1.pep
FEYGDPKCKNADPNGVVPPTMENGPVYNPLYSQYKKCFQGVRVANCISPWQAKGSPPILSQVMTSASGLPDAILPINMGGPEI

SEQ ID NO: 120012 - protein, 298 aa, Oryza sativa
  Clone ID: PAT_MRT4530_23172C.1.pep
MASTTAPSRTNSRVNYSNEIHDLSTVQSVSAVPSVYYPEKSFADIFPPNLLKKVISEVVATFLLVFVTCGAASIYGEDMKRISQLGQSVVGGLIVTVMIYATGHISGAHMNPAVTLSFAFFRHFPWIQVPFYWAAQFTGAMCAAFVLRAVLYPIEVLGTTTPTGPHWHALVIEIVVTFNMMFVTCAVATDSRAVGELAGLAVGSAVCITSIFAGPVSGGSMNPARTLAPAVASNVYTGLWIYFLGPVVGTLSGAWVYTYIRFEEAPAAAGGAAPQKLSSFKLRRLQSQSMAADEFDNV

SEQ ID NO: 120013 - protein, 198 aa, Oryza sativa
  unsure (1)..(198): unsure at all Xaa locations
  Clone ID: PAT_MRT4530_23173C.1.pep
WAAAGPCGSGATTGERGGQRSAGCKQSGKGRRWGERGGEGEKGEQKKERKRKKRKTHNTKRRRKGEKEKTRKYRKRKKGAAKRXRAAGMDEEKKGQKAPRQQKKIGTEKEKRGDRGRGKRRRSGKEEKRTKKGKEQTVSREYWRRDKEKQQNQRQEGGKRQPRKKHNAAERKDKETKKKGKKKGKKKQEINSERKKRR

SEQ ID NO: 120014 - protein, 275 aa, Oryza sativa
  Clone ID: PAT_MRT4530_23174C.1.pep
MVCVPRLIPGRGFNAQISSEITSEFLGVTDDEEEAAEIEKHYKETKRKVKAGQLEDLDDCFLQSQRSEPTMQASDEEGNGTPYADNDEEELVEEIGSDGEVRMKSSQHPRYKKKACVPTFEPGMKFNCKKQLKKAITTYALAEKKVINFVRDDAKRVRANCDWGSYSPDVPPPKRTTTSHNLRNCVLVIRGPNKIYPSDLKIDTGAGWVFISDQQEGILNAVQKWALEAKHRNCARHMLIGRDTSMTSNSKRSFGSVQMLLAGCYLTLLGQNLFS

SEQ ID NO: 120015 - protein, 112 aa, Oryza sativa
  Clone ID: PAT_MRT4530_23175C.1.pep
MECEGYLQGIEKMDVSSGTAPPVWRGGWMEGSSGSAALSRGGGGTEELAVLVGERGGTRARTPLRRRAFLSRREQLRMAPPSPALAKESGPSALHARCATPHSKPPPSSLCS

SEQ ID NO: 120016 - protein, 130 aa, Oryza sativa
  Clone ID: PAT_MRT4530_23176C.1.pep
DLMLEYLHPGFDNDSFRIVSKESLIYLDKIANQSTQSGHAQDLHQAPFDDRCHCHFIPDMDRILGIQSRNDDEARWRNFASTVSKMHGSPEKFFHMLHMHQALTEAYPVLQEVFSGELKESFTGELHKIL

SEQ ID NO: 120017 - protein, 56 aa, Oryza sativa
  Clone ID: PAT_MRT4530_23177C.1.pep
KTIVNTTKLSYYYSSQVLPQYYYRSLLLIGRSLGPIYISRFNYILSPSPSAYTILG

SEQ ID NO: 120018 - protein, 589 aa, Oryza sativa
  Clone ID: PAT_MRT4530_23178C.1.pep
MMAQKMIEDDCEKVYVAISPIQSLCPPMLLWTLRNTPPGKTYSCCSAQTRLPAGFYTQEARTGEKMLRDYLHVCESQKFHAEVLTAEKENVELGLVELVSELKITTLIMGGGLYRYTHETPLFNDQEGGMKNMMLTDRTITVLEKADPSCKIFVLNRGNLFFIRERRITISTSTKNGFAPVEVSDFPTSSYHFLGWHPNDYASRSSISLSLLSETQSMTDDGCDSEQLDLMLEYLHPGFDNDSFRIVSKESLIYLDKIANQSTQSGHAQDLHQAPFDDRCHCHFIPDMDRILGIQSRNDDEARWRNCIKHKMTEWLHELRYVCTIVLSAHKQLMQWHLAVHDSLALDKLSKAVKEPITQLLTFASTVSKMHGSPEKFFHMLHMHQALTEAYPVLQEVFSGELKESFTGELHKILHTLKDGTKETLDQLRVQIQSYSSEDMPEGGGIHLVTTYLIRYIMSLTQNTGSLDAILAHSYEDHALAEERMMNTSGHLISMLISDLTSMLYRLSKLYMSKSEGLQWLFLLNNEHFILRKIEEADIRSMLPADWIQNYQHRVEQNKVNYIEATWALTLSYLKKGPKVPSISFILQP

SEQ ID NO: 120019 - protein, 117 aa, Oryza sativa
  unsure (1)..(117): unsure at all Xaa locations
  Clone ID: PAT_MRT4530_23179C.1.pep
RPLSFRLQFQAXKGQQKMGCSSFLPQSRFFLGDVGKGADMKLVGGXXLGSMMVSFSEGLLLSEKVGLDPNTLVEVISQGAISAPMFSLKGPSMVKAAYPTAFPLKHXXKDLRLALAL

SEQ ID NO: 120020 - protein, 750 aa, Oryza sativa
  Clone ID: PAT_MRT4530_2317C.1.pep
MAERAVAHSLSPSASGDDGEQNPRRRARTPPSPSRRSLRRGKALEEVEGSVTSPRAGDGGGRRDGAHRRLVYGGGNTPQGTLQAAGALLRHPPVVPDPETPARRWLDDVADLVMTAQQRLGAGRRSSATGTSGAAAAGSTTSRRRARRAAAATRRSSAIPSSTPPTQEDVRGGPDARLDIERRRDDRRAAHATEGASSSGAPLRSGHGGRPPVSPVGGAGCRAFVASLRNVRWPPRFRPTITEKYDGSVNPAEFLQIYTTGIEAAGGDDRVMANFFPMALKAVLSSPQHHTVHPRTRGDLRVQGGVRHNRMLEKIASKEPQTTAQLFELADRVARKEEAWTWNSSGSGVAAPAAPGSAARSGRRDRRRKKELARSDDEGHVLAVEGASRAPRKGRPASDKKKEAGAPSRERPTGKWCTVHNTSLHDLADCRAVKSLAERTRKWEEEKRQERREGKTPAAPTGNWRGEAKQKATAEDIDDGDDDLGFQEPEATVATVDGGACAHASRRSLKAMKRELLAAAPTHEATRRARWSEVALTFDQTDHPPCVARGGQIAMVVSPTVCNVKLGRVLKDGGAALNILSPAAFDAIKAPGMVLRPSQPIIGVTPGHTWPLGHIDLPVTFGGSANFRTERVDFDVADLSLPYNAVLGRPALVKFMAAVHYAYLQMKMPGPGGPITVHGDLKVALACMEQHADHLAAASKPAGGDERLSTSVPAAPRQRMVTCDEVPVKEVALGDGPSKTTRIGGLLDDK

SEQ ID NO: 120021 - protein, 58 aa, Oryza sativa
  Clone ID: PAT_MRT4530_23180C.1.pep
CYQIYRENRYVLIPHQKTMGKLYVSIYCPFVLCMSCQVTCSVLVVWINILSQHSLVLV

SEQ ID NO: 120022 - protein, 150 aa, Oryza sativa
  unsure (1)..(150): unsure at all Xaa locations
  Clone ID: PAT_MRT4530_23181C.1.pep
SHKAPPRPTAAAAAAAQRDGGLLGVPQLAGAGPPPPVGCFLTHCGWNSTAEAXVSAGVPMVAXPQWTDXPMNAEYVEPVWGPGSAQCRPGQPAXGLAARAEVARGIEEVMPARXGEYRRNAAAWMEKARAASREGGSSDRNIAEFVAMYG

SEQ ID NO: 120023 - protein, 257 aa, Oryza sativa
  unsure (1)..(257): unsure at all Xaa locations
  Clone ID: PAT_MRT4530_23182C.1.pep
MALSSPALAGKAAAKVFGEGRITMRKSAAKPKPAASGSPWYGADRVLYLGPLSGEPPSYLTGEFPGDYGWDTAGLSADPETFAKNRELEVIHSRWAMLGALGCVFPELLARNGVKFGEAVWFKAGSQIFSEGGLDYXLGNPSLIHAQSILAIWAVQVVLMGAVEGYRIAGGPLGEVVDPLYPGGSFDPLGLADDPEAFAELKVKEIKNGRLAMFSMFGFFVQAIVTGKGPLENLADHLADPVNNNAWAYATNFVPGK

SEQ ID NO: 120024 - protein, 145 aa, Oryza sativa
  unsure (1)..(145): unsure at all Xaa locations
  Clone ID: PAT_MRT4530_23183C.1.pep
RQRKTRLLISPVDRKRKSMGDSGMASMRIQKSLKDLXDDPPTSCIPCPVGHHMLHWQASMMGSSDSPYTGGVFIVTIHFPNDYPFXPPKVPFLTTVFHSNMNSIGSIXSDILHDQWSPTLTIANVLLSICTMLTDHDPDDPLAPE

SEQ ID NO: 120025 - protein, 266 aa, Oryza sativa
  unsure (1)..(266): unsure at all Xaa locations
  Clone ID: PAT_MRT4530_23184C.1.pep
MAAATMALSSPVMARAAPSTSSALFGEARITMRKTAAKPKPAASSGSPWYGADRVLYLGPLSGEPPSYLTGEFPGDYGWDTAGLSADPETFAKNRELELIHSRWAMLGALGCVFPELLARNGVKFGEAVWFKAGSQIFSEGGLDYLGNPSLIHAQSILAIWAVQVVLMGAVEGYRIAGGXPLGEVVDPLYPGGAFDPLGLADDPEAFAELKVKEIKNGRLAMFSMFGFFVQAIVTGKGPLENLADHLADPVNNNAWAYATNFVPGK

SEQ ID NO: 120026 - protein, 847 aa, Oryza sativa
  Clone ID: PAT_MRT4530_23185C.1.pep
MAGGGSDSAVLEGQRRAQRGWEARVLAEIVFVELLFVFSKIIFAAVGIGKIPQSLFALPRLENVYLQENQLSGSLEDIPYPLTSSLLCIDLANNQLSGPIPNSLFHLTNLNYLILESNKFTGTVELSSVWKQKNLFILSLSNNLISLIDDEGTLKYLDAVSLLDLSSNQITGAIPNWIWENWKGHLNILNLSCNMLTTLEQSPSLVNMSNLAYLDLSFNRLQGSIPIPVTTSSEIALDYSNNHFSSIVPNFGIYLENASYINFSNNKLSGNVPSSICNASKAIITDLSGNNYSGSVPACLTGSVNLSVLKLRDNQFHGVLPNNSREGCNLQSIDVNGNQIEGKLPRSLSYCQYLELLDAGNNQIVDSFPFWLGKLPNLRVLVLRSNKLNGTIRGLKGCHQNCNHFKRLQIIDLASNHFSGNIHPEWFEHFQSMMENDNDEGHILEHTTNTKIPLLYQDITVVNYKGGTLMFTKILTTFKVIDLSDNSFGGPIPKSLGKLVSLRGLNLSHNAFTGHIPSQLNSLTQLESLDLSWNKLSGEIPPELASLTSLAWLNLSYNNLTRRIPQGNQFGSFSNSSFEGNVNLCGKPLSKQCDTPGSTSPSASAPSGTNSFWQDRLGVILLFIFSGLGFTVGFILAVWSSGAIYKQCALCANLCGGPVAHSLEHLVALVVWWWKKRAMTKQTDRTGHPSSDPLIADCNICLKSATSGTLDTISPSSPPPSSSPPYNLMPHSGEVQVVAVITDWDVRDRLRWGRRTARGGSLAAAGGGAAAGPPGRHALQPSGRACTMQEREIVPSSPGGWPGEIPALVQTLPPLTRRCTSSIAGRVAGKAAGGGTWPRPRLVFAAT

SEQ ID NO: 120027 - protein, 125 aa, Oryza sativa
  Clone ID: PAT_MRT4530_23186C.1.pep
EPIESQKASESQTRHSGDSEISISSSKSATPAQTEKYKDKGSQPTSALLPHRGDLLRYPARQTQITCLLVEGSPRLLLHTGTNPIESLQSRILQNKIAVKKCEEKMRHSTHLKALTVLFLVIFCH

SEQ ID NO: 120028 - protein, 520 aa, Oryza sativa
  unsure (1)..(520): unsure at all Xaa locations
  Clone ID: PAT_MRT4530_23187C.1.pep
MGGVATGTGAVARGLAGGADDDDAGVARLASSETRRSTNGKIPQLLFTLSGLKYVEVIGNQLSGSLEDIPSPLTSSLSSIDLSDNQLSGPIPKSFFQLTNLNYLNLGSNKFIGSVELSSVWKLKNLDFLSLSNNLISLIDDEGETVSPSLPNIRYLHLASCKLTKIPGTLRYLDAISDLDLSSNQITGAIPRWIWENRTYQLNSLNLSHNMFTTVEQSPSLVNIAYLTYLDLSFNRLQGIIPIPVTTSSEIALDYSNNHFSSIVPNFGIYLENASYINFSNNKLSGNVPSSICNASKAIITDLSGNNYSGSVPACLTGSVNLSVLKLRDNQFHGVLPNNSREGCNLQSIDVNGNQIEGKLPRSLSYCQDLELLDAGNNQIVDSFPFWLGKLPNLRVLVLRSNKINGTIRGLKSGYQNSDYFTRLQIIDLASNHLSGNIHSEWFEHLQSMMNVTDDDQILEYRTKASIKSLYQDNTAVTYKGNTLMFTKILTTFKAIDLSDNSFGGPIPKSMGXLASLHGF

SEQ ID NO: 120029 - protein, 541 aa, Oryza sativa
  unsure (1)..(541): unsure at all Xaa locations
  Clone ID: PAT_MRT4530_23188C.1.pep
MVLRQSPHRAPVAWCCESPCAGTMGSSASLPTPPPPARPCHPSPRDRRDDGNDTSCRIYGGKIPQLLFTLSGLKYVEVIGNQLSGSLEDIPSPLTSSLSSIDLSDNQLSGPIPKSFFQLTNLNYLNLESNKFTGTVELSSVWKLKNLFILSLSNNLISLIDDEGXTVSPYLPNIRYLHLASCKLTKIPGTLKYLDAISLLDLSSNQITGAIPRWIWENRTYQLNSLNLSHNMFTTVEQSPSLVNIAYLTYLDLSFNRLQGIIPIPVTTSSEIALDYSNNHFSSIVPNFGIYLENASYINFSNNKLSGNVPSSICNASKAIITDLSGNNYSGSVPACLTGSVNLSVLKLRDNQFHGVLPNNSREGCNLQSIDVNGNQIEGKLPRSLSYCQDLELLDAGNNQIVDSFPFWLGKLPNLRVLVLRSNKINGTIRGLKSGYQNSDYFTRLQIIDLASNHLSGNIHSEWFEHLQSMMNVTDDDQILEYRTKASIKSLYQDNTAVTYKGNTLMFTKILTTFKAIDLSDNSFGGPIPKSMGXLASLHGF

SEQ ID NO: 120030 - protein, 416 aa, Oryza sativa
  Clone ID: PAT_MRT4530_23189C.1.pep
MHLLPPPCAVSFFPPESLAVAFIAAAAAAAAAAAAAAAVSTWTGSSLITTTDLSTSPDVLASSGGGEVAAGETITAGGVGGASPDLLLCSSMTGLYLQGSLGAREVLRRGGGGLVALDAATTAGVGGDLMLLSCSPSTSLVVGGGGGAADTVVNGGTSTTEMTSAAAPPSSTCDLAVWSTTSVTSTTAMPSSVLVLPSSTCAVAVWSTTSVTSTTAMPSSVLALPSSTSAVCSATSVTSTTELSSVAAPPSSTCAMSALSTTSVTSTTEMSSVVAPPPSTSAVCSPTSVTSTTESSSVVAPPSSTCAMSVLSTTSVTSTTELSSVVAPPSSTSADCSATSVTSTTEMSSVVAPPPSTSAVCSTTSPSQITTPALPISQLVSSWLAASMERSVVASISEAAGLCLISSPPPIESASP

SEQ ID NO: 120031 - protein, 75 aa, Oryza sativa
  Clone ID: PAT_MRT4530_2318C.1.pep
MRGGTGPKIGKRARNQGFLSRGQKKPPPKPPQKGRAPKIFPGGPPGGGLRGRGPREPKPKPVKGPQGGPPGGGGP

SEQ ID NO: 120032 - protein, 79 aa, Oryza sativa
  Clone ID: PAT_MRT4530_23190C.1.pep
MWLYGICFAREAPKTVPYDGQAMAQRRDTGEVRAAAGLTRVAGTVTTVRATRKKKWPARVDVADGAPGLAELGDDVAVA

SEQ ID NO: 120033 - protein, 85 aa, Oryza sativa
  Clone ID: PAT_MRT4530_23191C.1.pep
GGGGGGGGGRGGEMGDGRGGSRAGGLLCPPAEDGRRSTSDGAGSRGLPSWMGGGQRRWRRRRWLPRSLAWMGGSRRRQRRWRRTV

SEQ ID NO: 120034 - protein, 33 aa, Oryza sativa
  unsure (1)..(33): unsure at all Xaa locations
  Clone ID: PAT_MRT4530_23192C.1.pep
TTPILPFYYIKXXXXTNQKIHNLSKKIYTTNNI

SEQ ID NO: 120035 - protein, 56 aa, Oryza sativa
  Clone ID: PAT_MRT4530_23193C.1.pep
QGNAIKLPKTKEGQLNKQSKEKKSSPEILQKGPFGQQDGQSVTHGHQLNTDRVGEP

SEQ ID NO: 120036 - protein, 61 aa, Oryza sativa
  Clone ID: PAT_MRT4530_23194C.1.pep
FGRVGRPGNSGPVPAGVPAFPIVSRIRAWRNHGHSCFLCEIVIRSQFHTTYEPEALKCKAW

SEQ ID NO: 120037 - protein, 140 aa, Oryza sativa
  Clone ID: PAT_MRT4530_23195C.1.pep
MMDRTLHQVQNHTEYKNHDHAPLINKCLNCTNWSKNEEWMNTQSSIAMLVLKRERVLPLPHDLISYSHPSSCCYRHKSVHEVGDGERGGHERVRHRLVHHAAVDGDPPPQPPRRRLRRRRRSPHAPLAAFCWCVRSRLGN

SEQ ID NO: 120038 - protein, 67 aa, Oryza sativa
  Clone ID: PAT_MRT4530_23196C.1.pep
KKIMNTFEELGIFQLIKTACKIGLSNLSFAILSNLLRETVAVVFYSTLEKQIYYDLYALIKMIALYI

SEQ ID NO: 120039 - protein, 1592 aa, Oryza sativa
  unsure (1)..(1592): unsure at all Xaa locations
  Clone ID: PAT_MRT4530_23197C.1.pep
MASPLPFCSLSLALPSFWILSEYNVKSERRRGGAFEIGEGEGEEEEDASEETTGSMDRAKAAARKDKAAAAGKETAVSRAVALDDTALLLAAVGSFRKEGSDASRMLDQEMSTRLLHLACKHDAVQCARLLLEGGHGITASPVDARDQLTRTPLQVAAEAHSARCIELLLSKNARTDLKLVDGRPLLALEIALLSRRAQVKWSLDNSIEDLLSSLQEKKCHLVPCVGSECSEALAEKTREVGEVAYRYAMEGRVTVLAMLLLVAEEKISAPVSVVIEGVRTKKSIYYSIVDEALSIGDAPARDSNERRKALLSEIQLLNQFGAALWRDRNIDKRSLPPLLKAAKLPKWAIKDIERCCRGFLWKGQEEVSGGHCLVAWRVVCRPVECGGLGIRDIDRFGKALRLKWEFNRLEQEDRPWTMVRWKSDKDVRDIFNSVAQHIVGDGNRTDFWRGKWLPRGGSIANNWPILFSFVGRTKITVAQGLLNNRWVRDLQGSLSNRALVDYLALWDELQLVSLQSGEADSVLWRFSANGVFSASSAYEFLFSTSIKCPHGELIWKTKAPARVRFFLWLAVKGRCLTADNLSKRGWPHDPTCLLCQSAPEDCNHLLVKCPFTNRVWQQLKAWVNVTFPLPAQLGMELADWWHCARRCFQMRFRTAFDSLFMLVGDVNVTKMLLMGDVDVNEADPEGNTALHWCLSGSSSTQEPRIVWLLLKNGARVFQGNKLGLTPVHSAAAKGNYKALQSLLLHAQDCVDTPSKTKETPLFLAVKNGSLDCVKLLLRSGASTKXQRPIDVATSQDMRFILTSANVAPWGXKSKSHCAPKQGSKFVPRPNHWLKHDYTRKIFVGGLPPSVGAEYLTEFFTAEFGPMEEAVVIGIRMGDRVQSRGFGFVKFKREEDVISAKETHHVYMLGKRVEVKDAVARGSLPSEIQKTSSFRHHNQEVPKVTHHLLGGELKEEHYIRKRRPLPEKCLPSWFFIFRKWLPGFLADATERLGDRYPLSSLKGDFRAICRMELDHSTLGYPKLSDFMRSLPGICRMCVVPVGSGPATHKVLLPPVSRPKYVPLLVPFSFDHDELPESVSDHQFPMSPLTTNITEDSPRNTDSQHGDTCSESNAESQQDSASTDNGSQLYTSIEPVSTRKLDVVEPLPARTPDRVEPQKIGSDPARKTISLESGLGVQIFIGNGSANLSLQVDVKKDVEYMLMLYQKRTGISSRNIYFVYRGKRLRLNRSLLSYGVQKDSTVNVRSRILGGAGTSLEEYLHKHKNSLVKKTALYDGRFFPELTPRSSILLRTWVLCFTKAFKERHCWEPKCELSHFKVINGHVKVSTPAKGNLTTHFLQENLSFLAKTLKDFFRTIGTNLVSEYPPYFEYFMKFILKIDLPCVPHLQKVIIELNLCFMDSYMRGVLTVRLKQKFDSLPPKQRATLIDKINHITWDTSRMPNLSTIPVFDKIIKKAKDDGEPYFIENSVNFEFKAFNGFRLSRDAPIHAPQHRFDKTSVPWKENFPDNTIELMTPAYLGDLLPEIIWCFILNKVDITEELSQSQTPCCTMCHPIKTDVGEYPTTQQTTVQDKQPTMEDVGSSSSMQQNVWKKIW

SEQ ID NO: 120040 - protein, 1132 aa, Oryza sativa
  Clone ID: PAT_MRT4530_23198C.1.pep
MDRAKAAAREDKAAAAATGKETAVSRAVAEDDTALLLAAVGSFRKEAMGRLRKGSDASRMLDQEMSTRLLHLACKHDAVQCARLLLEGGHGITASPVDARDQLTRTPLQVAAEAHSARCIELLLSKNARTDLKLVDGRPLVALEIALLSRRAQVKWSLDNSIEDLLSSLQEKDLNAVRLLAEKTREVGEVAYRYAMEGRVTVLAMLLLVAEEKISAPVSVVIEGVRTKKSIYYSIVDEALSIGDAPARDSNERRKALLSEIQLLNQFGAALWRDRNIDKRSLPPLLKAAKVGDVNVTKMLLMGDVDVNEADPEGNTALHWCLSGSSSTQEPRIVWLLLKNGARVFQGNKLGLTPVHSAAAKGNYKALQSLLLHAQDCVDTPSKTKETPLFLAVKNGSLDCVKLLLRSGASTKVQNLRKQRPIDVATSQDMRFILTSANVAPWNRSSHPKKSVTNKESCKEFLEDFGDYDSDDLNESFTGLKTSASHRDFRSSNGSAQGGKSKNHCAPKQGSKFVPRPNHWPKHDYTRKIFVGGLPPSVGAEYLTEFFTAEFGPVEEAVVIGIRMGDRVQSRGFGFVKFKREEDVISAKETHHVYMLGKRVEVKDAVARGSLPAEIQKIAPFRHHSQEVPKVTHHLLDGELKEEHYIRKRRPLPEKCLPSWFFIFRKWLPGFLADATERLGDRYPLSSLKGDFRAICRMELDHGTLGYPKLSDFMRSLPGICRMCVVPVGSGPATHMVLLPPVSRPKYVPLLEPFSFDHDELPESVSDHQSPRSPLTTNITEDSPHNTDSQQGDTCSESNVQSHQGDECCGSNTESQQDSASTDNGSLLGEVTVSTPKPDSIESIPTGKSDLIELVPTRKPHLIDTVTTRKPDLIVTEPTRKPIVIEPVPTRKPSVIEPVPTRKPMAIEPVVPTRKPIVIEPVPTRKPIVIEPVPTRKPIVTEPLPTRKPTVIEPASLTQKIVSEPMRKTDLFESGLARRIGLIGSRPTTCFVDCPVERPAVTPSNCEADMRFSFFQSQWDRFLAPYPKSDYCIICRSYDAVMQLVPCLHKICVACMMRCNVRACMTCGTAGVMERASDQRCQLMVVCRGAEAIVRCSPCMHSIACRGCFLASVTLLKGCTTCGCMIEHFKFC

SEQ ID NO: 120041 - protein, 155 aa, Oryza sativa
  Clone ID: PAT_MRT4530_23199C.1.pep
MVHLLPCTHAHLPLPLFFSILLLIFSMEVAHSDARRLPLKLLEVGNIKEEPDETIGEKMEMEMEGRRLIGSRPPRCERVCMSCGHCEAVQVPIVPQVIQKTQTKAAAAAAAEQEQHVVVSATAISAAVFTYRVNGLSNYKPLSWKCKCGGIILDP

SEQ ID NO: 120042 - protein, 97 aa, Oryza sativa
  unsure (1)..(97): unsure at all Xaa locations
  Clone ID: PAT_MRT4530_2319C.1.pep
ASADSWADSWAPRRCPGYSFRDAILVGAAGLTLAXVRAVMADLAGDFPGDAYSLVSRNCNHLCDAACRRLVRSRIPGWGNRLGKIGVGFTWGIPVIG

SEQ ID NO: 120043 - protein, 291 aa, Oryza sativa
  Clone ID: PAT_MRT4530_231C.1.pep
MERFQDRHHVWLRSREHGLYLHADLADGSSVYLHPYRATARAAWAVHVLHHFDGRMLMLHSAANGRYLAATTSPWAATAARFGLGGGNRVTLRDLDRLPMFAAGWFPIVSASGDVLLGHASDRFLRAIDRGDGNGVTVEVSDSRRPNTPWVVEAIPPIESIPRLPHLVGIGHIARAIRFVRAERASTDGTFPHVAWACFEFTGRSLFNLRTELARRLNFAVVSDVIMCVRAGLFGRLTPLITDLPPNNVTMEIIVVTAGTIGEISFLCTCVLLVIAFSFHDSSIDYMLGIP

SEQ ID NO: 120044 - protein, 163 aa, Oryza sativa
  Clone ID: PAT_MRT4530_23200C.1.pep
LHPNRIGRPRSFQNKQTNRRTHAPTLTTPPLPPSTPSSTRPREPPDGSTRGCSTNRRWAAAPPRAEERANETDQNGAAAGSRCLRLLPSSRLLLTPPPRAATARVYRRRGGGPGAAAPPTRGRRIRRRVGIHRILHRRRHLSPLLFLSPLFLFFTLQPGDPLV

SEQ ID NO: 120045 - protein, 219 aa, Oryza sativa
  unsure (1)..(219): unsure at all Xaa locations
  Clone ID: PAT_MRT4530_23201C.1.pep
MAILVTGGAGYIGTHTVVELLNANKEIVILDNLSNSNQIAVERIHTITGKHAKFNLGNIFDRVIXRKIFAENQINAVIHFAGSKAVGESVFEPLRYYQNNVTGSIVLLEEMLTAGINTIVFSSSATVYGDPKTIPIVESCPVGQTTNPYGTSKYMVERILEDTVNANPQFSAVVLRYFNPIGAHPSGLIGEDPNGIPNNLLPYISQVAIGKLPQLSIFG

SEQ ID NO: 120046 - protein, 68 aa, Oryza sativa
  Clone ID: PAT_MRT4530_23202C.1.pep
MESEKHLHSSTYQEKGTGADFQVVGTHSENSEQNSTLVYKRAGDYLEIFAPRKGIHRFMLEQSTPKIE

SEQ ID NO: 120047 - protein, 83 aa, Oryza sativa
  Clone ID: PAT_MRT4530_23203C.1.pep
WPRVLLPHIVHDACDRCSRSWRSATHAQFLHRARTSTTKTWSYDAITKGQSDIMFKQFLSPLALLLLRATLYIPCLHNKSKKY

SEQ ID NO: 120048 - protein, 74 aa, Oryza sativa
  Clone ID: PAT_MRT4530_23204C.1.pep
KQLNTFPLCIPNKRSSQGALYSVSLMKLQCKILHVGTHIRTCGSLTKFQQCTILYVVACTVDVFHHSCSIDNHT

SEQ ID NO: 120049 - protein, 104 aa, Oryza sativa
  Clone ID: PAT_MRT4530_23205C.1.pep
QSCHLFRRTMPELRNIACRSDNLPGHWQAACQIDVRKPVSSFHRSYFARESSVAWVDFQKGFPRSVGVSSRALLLHAAGRSGVLTSVADGSFPHQGGSASGKLL

SEQ ID NO: 120050 - protein, 65 aa, Oryza sativa
  Clone ID: PAT_MRT4530_23206C.1.pep
QNCSETTWICGKHKCSNGQDSFREFCTPFSWLDKPSYHYFTLHTFWGNIRNFLKTWKAKHEAPCR

SEQ ID NO: 120051 - protein, 59 aa, Oryza sativa
  Clone ID: PAT_MRT4530_23207C.1.pep
MGRRRGDGWRMWWGKTRNKRLIRDDNRYPAKQVAKVRGGELGIGISSELVKRSDFDNDE

SEQ ID NO: 120052 - protein, 108 aa, Oryza sativa
  unsure (1)..(108): unsure at all Xaa locations
  Clone ID: PAT_MRT4530_23208C.1.pep
HRRGADLDRQRTIRSALMRCHSNASSRMRGASDIRDTLLALQMKXASRSGILRTEAMQTQVVVEKTVATTESYDDLLASLPENDCRCALYDTDFSTGENVQKSKTFLI

SEQ ID NO: 120053 - protein, 268 aa, Oryza sativa
  unsure (1)..(268): unsure at all Xaa locations
  Clone ID: PAT_MRT4530_23209C.1.pep
HLIKHPTLKALVFAQAKTTNALSKKLAVNDKVLENINVKLDGFASAFQNXLSFTKMIETQLAQLASXVPASESGRIPGQSDSSIENVKAITMRGGTNGIAKEAPSSNSADEEVQPEKAVLQEYCDTRLLPFPQWIRKPSVDEQFTRFVEVIQKIHINMPLLDAMQVPTCARYLKDILNNKRPLPTKEVVKLTEQCSNAILHKLPEKKKYSRCPTITCSIGAQXFDQALCDLGASINVMPKHVFDKFNFTVLAPTPMRLQRKYRIVWTK

SEQ ID NO: 120054 - protein, 343 aa, Oryza sativa
  unsure (1)..(343): unsure at all Xaa locations
  Clone ID: PAT_MRT4530_2320C.1.pep
MKPGMYLAGADVPTPGVPTPAPTRDECLEAVEAASVERITPRGFHAFTPAASPGAPGLVAVATRLAGSDYRHIEVIDMSDDKNAYFEDRRVVPSFSHDGKKIAFVGLPGMYVVNSDGSDEERRDIHTSIGPDFAIESTEVDVVAISLGDDDDKTISMKKLTVGDENNAFPSPPPDGKWLVFRSGRXGHKNLYIMDAKDGEAGGIRRLTEGPWSDTMCNWSPDDEWIAFASDRHAPGSGSFAIXDSKSLVFTSDYAAVSAEPVSNPHHYQPYGEIYTVDIDGSNIRRLTHNSFEDGTPSWTPYFLDPRDVGETLQASGRCAFQDCHWLNIEDAQPEELIYGKSC

SEQ ID NO: 120055 - protein, 393 aa, Oryza sativa
  Clone ID: PAT_MRT4530_23210C.1.pep
AIDCVVVLADPKIQRRRRSLRLKFLAGDERCRTHASPYGLSLLLLLSIPAVFLLAPRLLPPKTLPSIPDADETDDLALFRRAVLLSAAPDSSSASAGAASLFGRRPQPKVAFLFLTNSDLVFSPLWEKYFAGNHHLLNLYIHADPSAAVDLPATASFRGHVIRGTKATARASATLISAARRLLATALLDDPSNHFFALLSQSCIPLHPFPTFYRTLLSDSDNNGGSPRRPRRRRSFIEILDNEPTLHDRYYARGDDVMLPEVPYDSFRVGSQFFVLVRRHAVMVVRDRRLWNKFKLPCLTKRKDSCYPEEHYFPTLLDMQDPQGCTKFTLTRVNWTDSVDGHPHTYRPDEVSGELIRELRKSNGTHSYMFARKFAPDCLKPLMEIADSVILRD

SEQ ID NO: 120056 - protein, 121 aa, Oryza sativa
  Clone ID: PAT_MRT4530_23211C.1.pep
YSVLVVQLKQFHLYVPHVIGSVSYIVYDIYIHRMSRVASRTSSCVLYIDLFATLGLGVCTDSYRSPSCLSYEPRVRALYGCLVSMDKRLRVSSGRAAMIWSECPASTRSASLHRELPYSSS

SEQ ID NO: 120057 - protein, 179 aa, Oryza sativa
  unsure (1)..(179): unsure at all Xaa locations
  Clone ID: PAT_MRT4530_23212C.1.pep
XXFQGMKXPGPPWQGAXGRRCXXRXSRXVXGGXXXLARERIIIXRXETEVIAXPRXARCKMMGXXPXXVXKXAXXXXXXPXXXXXLGNCRXXGXXGXSLXPPXXLCIPXXAXXWLXAEPXXNRMCXGXYPXTYRRKYVCSGXPXLXESXKLXXXCRXXXXXIEXRXSRERYLGEXHXET

SEQ ID NO: 120058 - protein, 38 aa, Oryza sativa
  Clone ID: PAT_MRT4530_23213C.1.pep
YRKMVTTLLYEANYWLLMCVSWPLNNLCFLLCESMYDK

SEQ ID NO: 120059 - protein, 114 aa, Oryza sativa
  unsure (1)..(114): unsure at all Xaa locations
  Clone ID: PAT_MRT4530_23214C.1.pep
MGMQQRSRKPRWRQTRRIDDDEDLEVIKGIMPCFESTSELFTNFGKCSIMLIRCLEDDLAVVSHVFPYAIAEFPYKYLGILFSIKKLPXSSLQPLVDAVHNRLPAWKCKLLAMV

SEQ ID NO: 120060 - protein, 70 aa, Oryza sativa
  Clone ID: PAT_MRT4530_23215C.1.pep
NLYTLQNPSAADCPTISHRLDYVKKNPQQIILMWTMAEHGDNKVKMVKDTTYYTQVPRDHVIGNRPCILL

SEQ ID NO: 120061 - protein, 523 aa, Oryza sativa
  Clone ID: PAT_MRT4530_23216C.1.pep
MDAHLLLLARPRALALAAARAPGGVAGFRRPASARRVAPRRVVLRPVAALGGGGGFAEVGELFGRVEAFLYTVADAAVSASPEVVQGGGGGTKEAAGDWLSGITNSMETVLKVLKDGLSALHVPYPYGFAIILLTVLVKAATFPLTKKQVESAIAMRSLQPQVKAIQERYAGDQERIQLETARLYKLSDVDPLAGCLPTLVTIPVWIGLYRALSNVANEGLLTEGFFWIPSLAGPTTIAARQSGQGISWLFPFTDGHPPLGWSDTLAYLVLPVLLVISQYVSSQVMQPPQNNDPSQQGAQAVVKFLPLLIGYFALSVPSGLSLYWLTNNILSTAQQVWLQKLGGAKNPVKEYIDKLAKEESTNLGKPEPAIKSDPLPKVGKPPASQEPEPSGPQRGERFRKLKEEESRRKVFLEKAEQTEQAGTQAGIVDGKQNSDASGDNIDEQKLKFSVLLTNSKQESHENEPIIANGNGGLSHSTNEMIPNGSMKEDIIQESTDSHSSVIDPTSHDAHKSRDEENEQDAV

SEQ ID NO: 120062 - protein, 931 aa, Oryza sativa
  Clone ID: PAT_MRT4530_23217C.1.pep
MAETVRLPEQQRRRPLTIASLPEEIMSEILLLLPPKSILQCRAVCKAWRDVTSDRAFLLTHHRRQPPQRLLTFIRDVGSHHDDLDILDYCVEAVDFRTHQFQSLARFTGQDYDCSLEDSPFTVHASCDGLLLMSYNNYLHLCNPTTRQWLWVSPPALQHDKVVGLYAHGHPSEYRVLYYREFGLGRTFYITTVGSRKERRIWPHSSSESLRKWLTKGTEDTEFNKPFLFHGNLHWLPQSGRQNKIVVFDTLDEAFRWLHVPFKMHNVSSLLEIEGSLAMSNSHIGSSKVDLWLLQDYKHMEPNYQIDVIYGVMESKYPTGTADHARGEDLGGYGVCGEENTNRLRVREGAACRGAPQVHMGPATAAAAAAEAALARRAADPLPALRRRDALPLPLPARLFAQLHALVLTAGLARHSPNFSLLLRLASPLLPVSHRLRLLLSSPLPPTTFLANSLLLASSSSRCLPSALSLYALLFLSSSPPLLRPNAFTYPPLFRAAPPALALALATHSVKFLGAHAASCDRVLGAALLGVFARCGRIASCRRVFDRIAHPDLPAWNALLSAYARLRARDVACATSAADAILELFVRMLSLAIEPNEITLVAVIGACGELGAVSHGVWAHTYAVKRRLAVNCIVATALVEMYAGCGRLDLAEQVFAAASDRDTRCYNAMLHGLAVHGHGRAALSLFDRMHGAGVPVDGVTVLSVMCACAHAGLVDEGLDYFDRMEIEFGIEPRIEHYGCMVDMLSRAGRLNDAEKLIHGMPIVPNAAIYRSLIRACGIHGKLELGEKMIAELMRLEPDDSGNHVLISNFYATTNRWDDAKKARKEMKSMGIDKSPGSSLVDINGVLHEFLVGDKTHPASKEIYAMVEEIETRLSECGRRSSTSSALFDVEEEDKADALSYHSERLAIAFALIASNPGAPIRIIKNLRRNVL

SEQ ID NO: 120063 - protein, 415 aa, Oryza sativa
  unsure (1)..(415): unsure at all Xaa locations
  Clone ID: PAT_MRT4530_23218C.1.pep
VWDSKSKGNATSSHIHHPLESPGFHKAKKNRSHIGKLGAPPPSRPLWSWSIPRAPPVRHEVVCSSLLVGDDLDILNTSADDSRTDGLYDDTEVECMSRMFSGANASSLSLASTDSSYSSNYSTTNVLEDSYLKLKCEVVGASIVKSGSGMFAVYSVSVTDANGNSWSIKRRFRHFEELHRRLKEYSQYNLHLPPKHSFSSGQGVPGPRVCSGGSAMCLPNFLKGVLQVPXCIEVWDFLSVDSQTYIFTDTLSVIQTLSVNLDERSKEKNTKSFNSSQALNAYLVSAGHSWPAHSVVSPPGAKDKDFDAVDGLRSRKRNTEQNLGIGVGNTNANLHEDLSGSDPEQNEHSFIINSGNSKKTLSSETDYPPQSLESDGYSVAPNDWMAPNLSVPLFHLVDVVFQLQDGGWIRRQAFW

SEQ ID NO: 120064 - protein, 46 aa, Oryza sativa
  Clone ID: PAT_MRT4530_23219C.1.pep
CTYSMRKSWKGPTGRASLVIQHLPKWGCATRRLSLVMPGVSQTRRC

SEQ ID NO: 120065 - protein, 148 aa, Oryza sativa
  unsure (1)..(148): unsure at all Xaa locations
  Clone ID: PAT_MRT4530_2321C.1.pep
MKTTRTTRIVSILVSLVLLGQGDTYGYKYKXPYRRRGETDNQHRRHKARSQYKPTYAKTSCRISTSKICLDRPYSIPTEAGRKDLALSLISPDTNSRRKTTLLSTTSQSFRPPYRQQLDRLPQILYSLAYILVPMIPILCKYWNRDIK

SEQ ID NO: 120066 - protein, 63 aa, Oryza sativa
  unsure (1)..(63): unsure at all Xaa locations
  Clone ID: PAT_MRT4530_23220C.1.pep
MAGVDREWLYSMAHALALDTWTWPREDVPGLGLIDGGVDLSYGXQSPKNSRVKRAWPGAIWDG

SEQ ID NO: 120067 - protein, 194 aa, Oryza sativa
  unsure (1)..(194): unsure at all Xaa locations
  Clone ID: PAT_MRT4530_23221C.1.pep
GSPGCRFLSEAARLQLIELEELLQHFTRTDELDIRKNSKSLGTNLTSKEIYQARLPPGTASPNWIWIWDCKAPMKVKLFAWLLTRDRLSTKHNLLKKKIVQSDTCSICNSGPETGSHLFFSCTFATXFLLCFWAIWNHRHDVVFRGMEPSLQSCLQCCVSEAALWADILKPEDRFVISAWKAIFSTPLQTLNAL

SEQ ID NO: 120068 - protein, 261 aa, Oryza sativa
  unsure (1)..(261): unsure at all Xaa locations
  Clone ID: PAT_MRT4530_23222C.1.pep
MAGSGDERDAGSAEWPXPFVTRVELALGLKGLSYEYVKQDLVNKSELLLASNPVHKKIPVLIHNGKPVCESSIIVQYIDEAFPGAPAPAAALLPRRPLRAAAVARFXGLAYVDDKFVPGWGGGRAGGRREEXEKGEGMKQLMADVETLXGTRKDCSKGKPFXAGDTAANVDGAVDVPVWWLKATXGPLAPQVIDRDKALHFAAWALPVGALDFAERVLPGVDGALESAKMRPAXATAAAAAASKKPTSVRVCPSLLLPLCG

SEQ ID NO: 120069 - protein, 152 aa, Oryza sativa
  unsure (1)..(152): unsure at all Xaa locations
  Clone ID: PAT_MRT4530_23223C.1.pep
MWAPRAVAQGGGSGRRHARHGSSRPASHGAAAAARAVTGGDRRRGXTAAAGAKAAAAAEDNGARAEGGGAHGGEERKEERGFLTGAMAATGAGGDERRXALRKTADGSSATWEKAVKGLGRKEEPRHGEEKWPEMETMASSPAARGNRSSGG

SEQ ID NO: 120070 - protein, 93 aa, Oryza sativa
  unsure (1)..(93): unsure at all Xaa locations
  Clone ID: PAT_MRT4530_23224C.1.pep
ASPFLQSVGFQLRNNQVWQQLALVAQQFAYQDIYFVQAIXEKVQLQQFGDFYFDWNLVQAQALVAFKVPYRYGISPREYGGPRTISTLGGVLE

SEQ ID NO: 120071 - protein, 150 aa, Oryza sativa
  Clone ID: PAT_MRT4530_23225C.1.pep
MQYKNATHTTVEQSNSTAGGSETGGLSLTDNPDLEEDILPEKGKNTVGTESLKVEFSLDCTVTLVIFLSTLNPTKLQATEMLLVLLKKEIKGDKEQIFVISKSLENGITPDHPDPNQFTLLCICSVKEPGNRDKDRAFLENLDLASHVAF

SEQ ID NO: 120072 - protein, 70 aa, Oryza sativa
  Clone ID: PAT_MRT4530_23226C.1.pep
MAPFPFLGNLFLGPFPLICLPFKGGLTFNWFTKNGFFPPQKKKKKKKKKKKKKKKKKKKKKKKKKKKKKK

SEQ ID NO: 120073 - protein, 84 aa, Oryza sativa
  Clone ID: PAT_MRT4530_23227C.1.pep
FLNFDPLYSLLKRQLKIFSIFPTCQIKAKMSSQYRVGNLAYSNMIQAWICSTTHYESRPYCIVCAQGGMTQYLSTCFNEVFSHR

SEQ ID NO: 120074 - protein, 183 aa, Oryza sativa
  unsure (1)..(183): unsure at all Xaa locations
  Clone ID: PAT_MRT4530_23228C.1.pep
GRNGRSGGRRRLSPSGGGSCTGSGRGQRAAGAGGVNGRARLWRWASAGSGRGRSSAAAASGGRAADERGEWAKVGAAAMASACGGSSGGRGGAWWERRPWGGEGNGGRGNXAVGAAVASATTGNMGDGRSGEESARGGSSGGRGSAWRAATAGAAEASTRGGSGGDGISARWEQGRPRRRAAT

SEQ ID NO: 120075 - protein, 48 aa, Oryza sativa
  Clone ID: PAT_MRT4530_23229C.1.pep
MKRRHRPSGNRNIVFTWRLIAMKKNAITTPPRKETAPKGVAVVMPAKC

SEQ ID NO: 120076 - protein, 213 aa, Oryza sativa
  unsure (1)..(213): unsure at all Xaa locations
  Clone ID: PAT_MRT4530_2322C.1.pep
MCEEATRSRVLVVGATGRLGGCLVRASLAAGHPTFALVRPHHLAVPDSAPLTSLAGATVVKGSLEDYPSLLEAVRQVDVVICAVPTKQALEQKLLIRAIKDAGCLKRFIPAEYGLDPTKVQICGMDHGFYEKKIEIRHLIESECIPHTYICCNFLMRYLLPSLVQPGLDAPPRDEVKIFGDGNTRGVFVEETDVAKFTICTIDDPRTXNIRCI

SEQ ID NO: 120077 - protein, 345 aa, Oryza sativa
  unsure (1)..(345): unsure at all Xaa locations
  Clone ID: PAT_MRT4530_23230C.1.pep
MTSAMTSAMTSAPAAARRLGSTCSPANDGAKARTEGTNGXGRRGELTGDGVEVEGAEKIGSTAATVLRQSSATAKERTRMATTWRPRWRPSRATATTGTAAAHGWSGGDDGGARLHGARALTATRGDGEGGGGKRKGRGDPEDHFPSIDFTGNXGKDRPNLEGDGGAARLGFRAAAAGASFTSXGPPRGVTPASVCSQFNQFEPIQQQTQGAPQQRQWADMIADVMREQFGLKPKDTGNLYRHPYPEWFERVPLPARYKVPNFSKFSGQDNVSTYEHASRFLAQCGEASAVDALRDYIQRFRETRNRCYSLALTDSQLADLAFQGLIAPIKEKFSSQFAEAKKNF

SEQ ID NO: 120078 - protein, 65 aa, Oryza sativa
  Clone ID: PAT_MRT4530_23231C.1.pep
MKIKERKKNYRWERQPEGVAQSQEADGSDWKVELGAEYPCIASGGARTVAWTPPNRVLSDPIQVQ

SEQ ID NO: 120079 - protein, 568 aa, Oryza sativa
  unsure (1)..(568): unsure at all Xaa locations
  Clone ID: PAT_MRT4530_23232C.1.pep
MGTSGRQWALCGGEGNKKVGMWCKEWQLQRTFVELFLGIKASSQYPKAPPHVYAVESKGLDENRQVYLISSIQNKARELSCYPMLVTLCEEAVEMLSNMNHPAGDCPLCLYPLVKENDGSALPFMKLMSCYHCFHSDCIMRWWEWLQNDDTDSKKSSTAATTEVCRKVFDEKDIEHVRDLLGANTSQLTPQLQPQERSHSTRQTALVVPPSTTAVQVIEGDIDLMLQEDNHMGKGNLLGNNGRGKAETLHTNSRKGKKLLSSLLVVVSTTLTLKHTAASTSSLAFAALPGCPDKCGNVSMPYPFGTIDGCFRGPPFRVYCEDDHAVYLQEHKKLKVLRFELAQGEVLIQKRIATSCGVNLTGKAVGIPWVVHDGGLADDYPYLTISTKNQFAVVGCGITAIIVGQGENQPDYTVGCRSFCDDVDSNIVEDNSTQCNGNTGCCQASIPGNLKAFQPSFLKISGVNYSGVPCVYAFVVEQNWFKFKTSYAKSMELYSKYRNKGTGVPLVLDLVVDLAAXGYLCNCSQGYEGNPYLHGGCQGLIVGGLFFVGYNRKPGTNSIFHASLSDGS

SEQ ID NO: 120080 - protein, 396 aa, Oryza sativa
  Clone ID: PAT_MRT4530_23233C.1.pep
MPSPTSSASAAARGSAGAGDTLRNSCHDFARSLARLPASIMDGLSRSMARRSRRPRDTQPHPPLPPPLLPEELFFAEFERRYGGRHPFFYGCRLAEALGIARREGRLVFVYLHDAGGGGNPYADQFCTGTMCSDVVVEFLDANFVSWGAVAGRGEGAAMVAALRPGSFPFCAVVSPVSDESIVILQQVEGPVSPSELVDILQRTIDEQRASSRQSWPDEQLAAAVRASRADEEERMRSVALRLRQEQDAAYLESLRKDQEKERSRKSVQEGSAKPKASNVLRPRYPGQSAREPNKAAQARAPAQNQNGTVASHRAEANTKIMIRFPNGERRQQAFHHTDTIREIYRYVDSLGIPGIGNYQLVRSYPRKTYGRQQLEMSLQDAGFYPSVTLYIEQLQ

SEQ ID NO: 120081 - protein, 374 aa, Oryza sativa
  Clone ID: PAT_MRT4530_23234C.1.pep
MAAAAEAEEEVRQEVEAVASVYGDDCRVVRGFPPHLVVHVRPRTADDSSQQFVELFLGIKASSQYPKAPPHVYAVESKGLDENRQVYLISSIQNKARELSCYPMLVTLCEEAVEMLSNMNHPAGDCPLCLYPLVKENDGSALPFMKLMSCYHCFHSDCIMRWWEWLQNDDTDSKKSSTAATTEVIHASEGLDLSSSAKHHNVSQHKGLCPVCRKVFDEKDIEHVRDLLGANTSQLASLSIDLDEDEKEVLHSESEKIRQEKFASLFNLQQERNGLIEPKKDLSIQPGMYIPRPPSAPTASEGDTVDDSCEDTTTSTSGTEPLNQTNSTGGTTKHNSSSGHRRRHRSHASRRQPHGQGQPARQQWQRKGGDTSHQ

SEQ ID NO: 120082 - protein, 633 aa, Oryza sativa
  unsure (1)..(633): unsure at all Xaa locations
  Clone ID: PAT_MRT4530_23235C.1.pep
MPYPFGTIDGCFRGPPFRVYCEDDHAVYLQEHKKLKVLRFELAQGEVLIQKRIATSCGVNLTGKAVGIPWVVHDGGLADDYPYLTISTKNQFAVVGCGITAIIVGQGENQPDYTVGCRSFCDDVDSNIVEDNSTQCNGNTGCCQASIPGNLKAFQPSFLKISGVNYSGVPCVYAFVVEQNWFKFKTSYAKSMELYSKYRNKGTGVPLVLDLVVGNETCDEAKRNALSYACKATNSSCIDRPSRSGYLCNCSQGYEGNPYLHGGCQDINECDYPWLYPCKGLSIGIGVGSATGFICIVLIAMFLTRRIKHRRKIKLRQKFFILNRGQLLKQLVSQRADIAERMIITLDELEKATNNFDKARELGGGGHGTVYKGILSDLHVVAIKISNIVVPKEIDDFINEVAILSQINHKNVVKLIGCCLETEVPLLVYEFISNGTLYHHLHGEGPRSLSWSNRLRIAAEIANALSYLHSSVTIPIIHRDIKSSNILPDDNLTSKVSDFGASRYIPIEKTALTTAVQGTVGYLDPMYFYTGRLNDKSDVYSFGVMLVELLTXRKLFPYLSSEGDGLVADFVNLHSVGNLVQMLDSQVIEEGGTEIQEVSQLAISCIELRGEDRPTMRQVNCSLEGILSQINQK

SEQ ID NO: 120083 - protein, 63 aa, Oryza sativa
  Clone ID: PAT_MRT4530_23236C.1.pep
LTYDYFLDPGNLPPPHQNNNNNNNNNNNNNNNNNNNNNNKIKYNNCSSKEISSWLNICARIFR

SEQ ID NO: 120084 - protein, 75 aa, Oryza sativa
  Clone ID: PAT_MRT4530_23237C.1.pep
AALFFFFFFFLFLCHLFFFFLRFCLLQNIFFPPGFQSQCIREENNTGVKRLTQRELICWVLNGRKNPTLGWGGRG

SEQ ID NO: 120085 - protein, 89 aa, Oryza sativa
  Clone ID: PAT_MRT4530_23238C.1.pep
NSSPSRHTPAFLPPPLSLRRHHGHSRGSQPSPSIATGGSFPFCFFPVCRCVVREEKVQGHMKRRGIEEKGKGEGKWGIEEEGTNINQER

SEQ ID NO: 120086 - protein, 92 aa, Oryza sativa
  Clone ID: PAT_MRT4530_23239C.1.pep
VIRLWRGKGAMQSMSSGQGRGGRLRVSVDPPPTMGKHHGNVNPLSNLYIDSGRQAFYIHNPRMRISDQYRCVAHIDVVSKWPLHPDIFGYAN

SEQ ID NO: 120087 - protein, 720 aa, Oryza sativa
  Clone ID: PAT_MRT4530_2323C.1.pep
MCEEATRSRVLVVGATGRLGGCLVRASLAAGHPTFALVRPHHLAVPDSAPLTSLAGATVVKGSLEDYPSLLEAVRQVDVVICAVPTKQALEQKLLIRAIKDAGCVKRFIPAEYGLDPTKVQICGMDHGFYEKKIEIRHLIESECIPHTYICCNFLMRYLLPSLVQPGLDAPPRDEVKIFGDGNTRGLCILLLSFSPVCCLVPEKKKRGSFTFCIFNLNGELFFAGVFVEETDVAKFTICTIDDPRTLNNTLYLRPSGNVYSMNKLVDLWEKKINKFLNKIYITEEQLLKNIEVLAFVLPLALQLWMLEEHYTALSERSSGHNRHSRNDSSTKHKSGYEPSDTETEWHESPWNDAVLPSGRNTQIGARRQNLSPNHTREYPNEKTSNLRNSRTPPRFTEQVHQNSSHSGGKNELRKKSNRTPPRFRPSMESFSRSSIKEKFSQNRSISTPKLRPHEKEHPPRAPAFLGTNLISKQGEMDSADNIKEDSHAENCSQEINELIANGKWPNSRYNEYACTSTESIPTGDIFSRDCRAPIQRTPTKHNNDKSLTSETARAENYGTEANSNNLAQTPKSISAQTGLSRTIRNSNYGTSRHTQINSGATLSSQFNSGRYSGDSGKFSDFTGKLVGGVMKFTSNMQKAQNDSWLPCVTGKTCRKPKSPNSKTTDESESSFIQKALVVENIRLFWADKYRPRTLGGFTCHREQIEQLKQLVTSFRHLTT

SEQ ID NO: 120088 - protein, 411 aa, Oryza sativa
  Clone ID: PAT_MRT4530_23240C.1.pep
MSLADDLAAVERGGHMVPSKAAGVDGDGEPRRTGTMWTASAHIITAVIGSGVLSLAWGVAQLGWVAGPAVMLLFGAVIYCCSVLLVECYRTGDPYTGQRNRTYMDAVRANLGGTKVVFSQIPNLHKMWWLSTLASAMSLSYSAIGIALGVAQIVVLDMFEIEFAANGGIRGTITGVFVGAGAGVTSMQKDTVKPVAPPSTETKVMRKAVAVSVATTTAVYLMCGCVGYAAFGNDSPDNLLTGFGFFEPFWLLDLANAGVVVHLVGTYQVVAQPVFAFLDGRAAAGAWPGSAALGKRRRVLRVGSLAEIEVSPFRLAWRTAFVCVTTAASTLLPFFGSMVGLIGAASFWPLTVYFPVEMYIAQRRVPRGSAQWLSLQALSAGCLVVSVAASAGSIAGVVEAFKAHNPFCWTC

SEQ ID NO: 120089 - protein, 56 aa, Oryza sativa
  Clone ID: PAT_MRT4530_23241C.1.pep
FWFEAKSLALPMPNLIFSIFYSMLGSKLASNQIQLYPTKKFGSTKNLPRFWHYQHF

SEQ ID NO: 120090 - protein, 554 aa, Oryza sativa
  Clone ID: PAT_MRT4530_23242C.1.pep
MATAATLPSSSSSAAAAVQTISRVLSFPRRGGGGFLHLRRHPLAAAAAATRGRGPLLRLGPRRPFSASASAGDNGAAAGGDGGGCDYDYDLFTIGAGSGGMRASRVAASLYGARAAVCEMPFATVASDSLGGVGGTCVLRGCVPKKLLVYASKYSHEFEESHGFGWRYGTEPKHDWSTLMTNKNLELQRLVGVQTNMLKNSGVTIIEGRGKVVDPHTVSVDGKLYTAKNILIAVGGRPSMPDIPGIEHVIDSDAALDLPSRPEKIAIVGGGYIALEFAGIFNGLKSGVHVFIRQKKVLRGFDEEVRDFVADQMSLRGITFHTEETPQAVMKSDDGLLTLTTNKGSINGFSHNLGLEEVGVKMDKHGAIVVDEFSRTSVDSIWAVGDVTNRVNLTPVALMEGGALARTIFGNEPTKPDYSAVPSAVFSQPPIGQVGLTEEKAIEKYGDVDVYTSNFRPLRATLSGLPDRVYMKVIVCANTNKVLGVHVCGEDAPEIIQGIAIAVKAGLMKQNFDATIGVHPTTAEELVTMRSPTRKVRRDAVDEAKMKDEATSQK

SEQ ID NO: 120091 - protein, 82 aa, Oryza sativa
  Clone ID: PAT_MRT4530_23243C.1.pep
IKMNIENSCIVIFGASGDLTFRKLIPALYNLFKVGRLGEHFSVLGVSRSDLTHDSFRQKMREALIKYEQASGQFLDDFCNHL

SEQ ID NO: 120092 - protein, 143 aa, Oryza sativa
  Clone ID: PAT_MRT4530_23244C.1.pep
MVRADTPTDCSSYAKAWEMIQSSHIELLDLEDSKEGVYSTLDAWVAFEQEFPVASLKQALVALEKEEQWHRIVQLFKNLEACGRKPPSKDIVRKVEDTYEMLGLVEEKKELLEKYKELFDKPSSNDRKKGRQFKKAEKNTKTG

SEQ ID NO: 120093 - protein, 102 aa, Oryza sativa
  Clone ID: PAT_MRT4530_23245C.1.pep
MNPYSIIIIVLAHDRLGNIPLKVIRGLFDRKNTDDFVHGRDGKKIENRRPNRADWTGGFFGLELRRHFLGKSIPKVPQLVIELQNRSPTAKPDIRHLLTNQN

SEQ ID NO: 120094 - protein, 314 aa, Oryza sativa
  Clone ID: PAT_MRT4530_23246C.1.pep
MPMDILGQSIPTIASLFGLTLHGLCDGPGPQNYPHHYQSLLPLPHTNRIGLGSPSAAAAAPMLGHLRRSSQRLPVANLAVYSIQSSHIEDDVAIIEHIQNSTKELKQGPVGKNLSSAEKRKFLVNTLRDLEDSKEGVYSTLDAWVAFEQDFPVASIKQALVALEKEEQWHRIVQVIKWMPSKGQGKTIRTYEQLVCALEKDNRADEACRIWEFKIAHDLQSVPWRFCRLMLGIYYRNNKLDTLVKLFKNLEACGRKPPSKDIVRKVEDAYEMLGLVEEKKELLEKYKDLFDKPSSNDRKKGRQFKKVEKNIKPA

SEQ ID NO: 120095 - protein, 100 aa, Oryza sativa
  Clone ID: PAT_MRT4530_23247C.1.pep
CLPISVLDLICGVLSHHRRRCGSQHMNGPLNMLQHMDGFRHPSFTGYEEVIGFNFRSPTALKKGCGRKESRRHHLIILFRGTEDGVPTDDHQATTGNRRG

SEQ ID NO: 120096 - protein, 106 aa, Oryza sativa
  unsure (1)..(106): unsure at all Xaa locations
  Clone ID: PAT_MRT4530_23248C.1.pep
MQLNPKAITRRNKTKAKRTLSMCGNHLEAPQFNPMSYTKLYCRNRLHQPTXSDSDSADPXIVVDLDSSRFLLCSXIDLRLQLHFDLIFFSDANVTKFALADLYILG

SEQ ID NO: 120097 - protein, 84 aa, Oryza sativa
  Clone ID: PAT_MRT4530_23249C.1.pep
APVQINFPRNGSRPTEWHGFPSPALFQYIISTYGGMSLFQAFDGLKNNPSPWDWGIKDSMSKVFSWDAECSPLPWEAFSVIRKL

SEQ ID NO: 120098 - protein, 108 aa, Oryza sativa
  Clone ID: PAT_MRT4530_2324C.1.pep
MAGKAGGLKGVALIGGAGGYSAVVAALQFFQDPFTGYTQERGRVTALAPDLHGCHIHYFGDTTNGCNCAGAYFNSHNQAHGAPCADEGHLSYLGNISPGINGVAYIFI

SEQ ID NO: 120099 - protein, 129 aa, Oryza sativa
  Clone ID: PAT_MRT4530_23250C.1.pep
FWKVNGGGGCPPPIPGQGPEFCPKRGVPQRMDPQRGPDGPPPFFFCGSPFAPGAKLTAPFPGTQIPGPPRGPPHFFKPRGVKKAPAFSPTPKKPKVVFVNAPPPCYITVGGGNFSRLLFFSPGIFRGPF

SEQ ID NO: 120100 - protein, 463 aa, Oryza sativa
  Clone ID: PAT_MRT4530_23252C.1.pep
MDVSASRATDRDAGDDIAPIHGTGSPTHGGDTHPPARATEHDDACASDDFHISGQDSTTVDGGDSHSQYAARAPDDVSSFITDTPTDGGVSPADMESLRNHTASGAFPQTPRGRRKRCSVLHWTKPCDGVPPRRRRRGRSTGAGLDAELHQRVEAAEIGGAARAECVPNGRQEHRGLLHAPGSGWGPARLHQRAISPAGQPPPRAPGRGGRAGRPSASPVAAAALVPPHSRLRPCGLLSPPSLRGHDHGVLVLLHPRAAAVDGCNSYLHADENGRSVYHGNLRGGGGASLHNAVWAVEEVVAGGHPTRYVLLRGAYGRYLGTARPRRAGSGRCHHVARGPDIAGGCVVLLHDKSGRYLCGNQTFLARRPGVSVDGDVDNETTLRWEVVRVTPSQGRPELPIATEVRSSYPSSLLIPSSAKVVIGTSAIRAQKPSITIRGSLPAILVFVLCPLCNYTTRGFFWF

SEQ ID NO: 120101 - protein, 224 aa, Oryza sativa
  unsure (1)..(224): unsure at all Xaa locations
  Clone ID: PAT_MRT4530_23253C.1.pep
MPVYQWRTGQSWPLISAGLANKFHIPLQPRHTQQARGARGGVPQLVLSIAALFRLPINVVRSTRRQAATTEETPWALTRGPPSGEWDSGGIRGVQYLLPPGHGGLAPPPRAAGWHKLSQLVLDDPNVSRVFGKVGFRNEDIKLAILCPXPLFGCLPMCSCPPLLFLCSFAAADDAVIPYPTGNLAGXGEKNCRRIAKILSRGRNPMLVITGMRFNQGKEMQDAK

SEQ ID NO: 120102 - protein, 63 aa, Oryza sativa
  Clone ID: PAT_MRT4530_23254C.1.pep
VVQQRVSGLEALFVCRFLVPLPCNSQQGLSQLRRSVCINLHGFLMSSSVMDFMEQVITVLILH

SEQ ID NO: 120103 - protein, 491 aa, Oryza sativa
  Clone ID: PAT_MRT4530_23255C.1.pep
MDVSASRATDRDAGDDIAPIHGTGSPTHGGDTHPPARATEHDDACASDDFHISGQDSTTVDGGDSHSQYAARAPDDVSSFITDTPTDGGVSPADMESLRGRTGAFPQHRTTQYRTTEQGQGHFTIQNHTASGAFPQTPRGRRKRCSVLHWTKPCDGVPPRRRRRGRSTGAGLDAELHQRVEAAEIGGAARAECVPNGRQEHRGLLHAPGSGWGPARLHQRAISPAGQPPPRAPGRGGRAGRPSASPVAAAALVPPHSRLRPCGLLSPPSLRGHDHGVLVLLHPRAAAVDGCNSYLHADENGRSVYHGNLRGGGGASLHNAVWAVEEVVAGGHPTRYVLLRGAYGRYLGTARPRRAGSGRCHHVARGPDIAGGCVVLLHDKSGRYLCGNQTFLARRPGVSVDGDVDNETTLRWEVVRVTPSQGRPELPIATEVRSSYPSSLLIPSSAKVVIGTSAIRAQKPSITIRGLFLQFLCLCCVLYAIIQQEDSSGSS

SEQ ID NO: 120104 - protein, 511 aa, Oryza sativa
  unsure (1)..(511): unsure at all Xaa locations
  Clone ID: PAT_MRT4530_23256C.1.pep
MEVFQGVEFVALRVWCCNSYLHADENGRSVYHGNLRGGSGGGSLHNAVWAVEEVVAGVPPTRYVLLRGAYGRYLGSPDAPDREREGCCSLEAAQRDRDVLDVGAIMWRAVGCSGPDLARGCVVLLHDKSGRYLRGNQTFLARRPGVSVHSDVDNETSLRWEVVRVTPSQVRPELPIATEAACFPPLRRQIQFVTAGAGAAGNIDVFTGKSVQLLREKLAGILGYDEFTLCVRAGIHGRLTPLLIDLPRSRETLHIVLVRPNSEGKQTSSICILKVDDNFIASLCVYKVHXTTLLTKISTKLETLTKLSAPRSEKRXKSRNQPHRTRSPALAPAWAYRTWANVLLLLDRFGLQPAATEAHRTITXHEERTEPHMHADDEIWNKRQIGYVYILSTSLAVLFLARPFLPAGYDGWMLAAFASVWGLGNVCLPCGMFGERICKSLSRHVGHILYMTFSALVIYGIYLLAVHADPTHSASVPALALPSLGLTWEGVFGLIGVLVSFGHLFFWVKVR

SEQ ID NO: 120105 - protein, 112 aa, Oryza sativa
  unsure (1)..(112): unsure at all Xaa locations
  Clone ID: PAT_MRT4530_23257C.1.pep
QLYRWAPSSSLLADLTAADWFLCLLLNFLGVGTMHFKRCQTVMLYIAARXFFYIXVKALFGFIKQLIGYNIIAFCHPSTVFIFGKSTRETMAKMIEALGFGVIXFERRLSFR

SEQ ID NO: 120106 - protein, 84 aa, Oryza sativa
  Clone ID: PAT_MRT4530_23258C.1.pep
LFHLDKNISRVTVHLGLLHSPFKYFGESGLPVIHVTHFATSSCDFPCFDSRSLAYSVWLKWIFFMCNMCACLSVCHTLIYRDCY

SEQ ID NO: 120107 - protein, 72 aa, Oryza sativa
  Clone ID: PAT_MRT4530_23259C.1.pep
MKSNFSHLVLFFFCVASLLTSPSLAIRQGAFQAGGYRNLFRQLISLDYDPTIGAPPQIHSVPSQHERTGNHF

SEQ ID NO: 120108 - protein, 484 aa, Oryza sativa
  Clone ID: PAT_MRT4530_2325C.1.pep
MVGCEHMVLRVVLMTIKDRLRSGEKSTGVAGESMPLVFEGVIMIQERQQIQAAIEGGKIKFDDYKRPMKIDGNPFPINMKKYDKQQEKHYEEDDGGFDPHWGSDEAAADEAKRLAKGKSVVTALVNMVFTLSAEFGVKHDEVEEESAKLILSPEQAIFEKPEGTENRHLKPLYINGYVNGKPMSKMMVDGGAAVNLMPYATFRKLGRNAEDLIKTNMVLKDFSGNPSKTKGVLNVELTVGNKTIPTTFFVIDGKADEYYNLMADEREDLVQSKLRALAKEQLVVILPQYDDSPQPMEFGHSMIVVQGKKEEEEAVKETSVRQNRLESTSRIESVLLVKLDQINWHANTPEGELWTCTGVKQISQASALAPCDLASPSSPSLQPCFAVAPAVAVARGGRHRGRQVVAVLVRPFVVAEDRRSTIAAVDPIFSAASTSSPSPSVDLPPPFWSPHHRSPASVRRLSRRAVAGGDVAADVIGAVGREPP

SEQ ID NO: 120109 - protein, 63 aa, Oryza sativa
  Clone ID: PAT_MRT4530_23260C.1.pep
MRSSDVPTWVQYWLGARMVASCLSRSVKYPLSYGFAYSYVLTPVVHGERLRPLEARDLHRLRR

SEQ ID NO: 120110 - protein, 96 aa, Oryza sativa
  Clone ID: PAT_MRT4530_23261C.1.pep
LLKWCPMAGERVIILGLENGENTTWGVFVGFKQVGEIKMPKSGAIWFQIKRGGGGNRGGKKKKGFFFGGEEDRKKGGLKMVRLLVFLGTGKKKKKN

SEQ ID NO: 120111 - protein, 163 aa, Oryza sativa
  unsure (1)..(163): unsure at all Xaa locations
  Clone ID: PAT_MRT4530_23262C.1.pep
NVKCFKLYICVCNYTYVLLHMYVYIYTYICIYTYIYICIYTYICIYRYIYIRIYTYIYIYVYIHIYIYIXVYIRIYTYVYIYIYIYIYIYIYIYIYIYIYICNKQVHANKKNGVGVDPGEYIYIYIYIYIYIYIYISEHVHIYLYLSSKWQAFTVVKTECARW

SEQ ID NO: 120112 - protein, 122 aa, Oryza sativa
  Clone ID: PAT_MRT4530_23263C.1.pep
MLLCVYHSMGEETFTLFVKFDRLQIAKTRPYYRNENYFLLDKEGSVHIFIHKQAAATDILMSFIHGLVLAHLMQKSKSGHAEARQWIDEKYNTFISKLQVEGYSTERLLSHSIVWRAHWVHG

SEQ ID NO: 120113 - protein, 44 aa, Oryza sativa
  Clone ID: PAT_MRT4530_23264C.1.pep
MAVVARSCTRINANFQLHVRQYVVLLIVALQCYQILLANKSIPK

SEQ ID NO: 120114 - protein, 76 aa, Oryza sativa
  Clone ID: PAT_MRT4530_23265C.1.pep
LCAPPAAVLTPLYIGVDSASSFWVWRFWGRRGVTHNCSIPRLTTGYLCLLGVLIIIQCFLSNLSIFTRFSREISAV

SEQ ID NO: 120115 - protein, 104 aa, Oryza sativa
  Clone ID: PAT_MRT4530_23266C.1.pep
AHDYSSHRTQENTSGVTRCAQPLGRDESHCQSTCIRNLSDGHTDTRGGHPLHRNEMVVLLVNTTHSRFTGLKSVSEYIAATCIQTKQMDNDERPSGRNRRHMTL

SEQ ID NO: 120116 - protein, 133 aa, Oryza sativa
  Clone ID: PAT_MRT4530_23267C.1.pep
MGPGTRRGPAPTGAGAGAGVDFNPRGERSGGPRKTAAAPATRGQRAGDGGPARAATAATRGQRKQQPCAGGVGGLLRAAASTTRGAAICVGVSDASATATARASIASTAAAAAREGTSVVAAAREAHPRRWRQ

SEQ ID NO: 120117 - protein, 87 aa, Oryza sativa
  Clone ID: PAT_MRT4530_23268C.1.pep
SFLGVWWKFGDDADEKWRLVDEEAAVKASIKRCHATARVIRRTIAFTSFALEAAGLFVYGLWTARIKIVVNKMKKKQQLPRQQATPD

SEQ ID NO: 120118 - protein, 976 aa, Oryza sativa
  unsure (1)..(976): unsure at all Xaa locations
  Clone ID: PAT_MRT4530_23269C.1.pep
MQMLLHANSLLLLAPTTSRLSASASPGRSGTARPLPPPQGTRIPPAPPLAGHGGRPPSPQPRRGRDGVGEECAAAVASQGFVTDARAYWVTRSLIAWNVNDQDTSLFNVCPHEVSIEIHDLASLGLELHPIQVNSSDALVRQSAYEASKGRFTVPRRTTAVFKKKSILVASHKVPRFRHALSSLXKGIVLYCCDYHKQPKKDILMFTWKYGMLSXKNAPFVSKKKKKKKTVQLKELNGVWSVTVPRYPENQYYLYEVKVYHPSTSQVEKCLADDPYARGLSANGTRTWLVDINSETLKPASWDELSDEEPNLESFSDISIYELHIRDFSAHDSTVDCNSRGGFVHLHFRLFRLNLLNDFCSPPITKHPGRIMETVMQDSAGIRHLRKLSAAGLTHVHLLPSFHFASVDDNKSNWKFVDEAQLAKLPPGSDEQQAAIVSIQQEDPYNWGYDPVLWGVPKGSYASNPDGPSRIIEYRQMVQALNRIGLRVVMDVVYNHLDSSGPFGVSSVLDKIVPGYYLRRNVNGQIENSAAMNNTASEHFMVDRLTVDDLLNWAINYKVDGFRFDLMGHIMKSTMIRAKSAIRSLTRDVHGVYGSKIYLYGEGWDFGEVAQNKRGINASQINMSGTGIGSFNDRIRDSVNGGNPFGNPLQQGFSTGLFLEPNGYYQGNEADTRRELATYADHIQIGLAGNLKDYVLRTHTGEAKKGSDIYTFDGSPVGYTSSPVETINYVSAHDNETLFDIVSIKTPIGLSIDGECRINHLASSMIALSQGIPFFHAGDEILRSKSLDRDSYNSGDWFKKLDLHMNQPIGCRLLQEIRMKXNWHLIKPRLENPSFRPLKNHILSCFDNFVDILKIRYSSPLFRLSTASDIEQRVRFHNTGPSMVPGVIVMSIKDAQNEKCKMAQLDKNFSYVVTIFNVCPHEVSIEIHDLASLGLELHPIQVNSSDALVRQSAYEASKGRFTVPRRTTAVFVQPRC

SEQ ID NO: 120119 - protein, 51 aa, Oryza sativa
  Clone ID: PAT_MRT4530_2326C.1.pep
MEKWTQQHSRGHEAEAASRAGQSTGCRHWRNAHRQCPMVVMEAGVWSCGSR

SEQ ID NO: 120120 - protein, 977 aa, Oryza sativa
  Clone ID: PAT_MRT4530_23270C.1.pep
MAVGEECAAAVASQVRHRWLAAAFFSSVDVAIVAGLPRVPTNYRDAPTCGMWGPHVSRCFIATFFNKPLGVLLGFVTDARAYWVTRSLIAWNVNDQDTSLFLYASRDATMHVSDGAIHGYDSKIELEPEHASLPDNVAEKFPFIRSYRTFRVPSSVDVASLVKCQLAVASYDAHGRHQDVTGLQLPGVLDDMFAYTGPLGAVFSDKDVDLYLWAPTAQDVRVCFYDGPAGPLLQTVQLKELNGVWSVTVPRYRENQYYLYEVKVYHPSTSQVEKCLADDPYARGLSANGTRTWLVDINSETLKPASWDELSDEKPNLESFSDISIYELHIRDFSAHDSTVDCNSRGGFRAFTFQDSAGIRHLRKLSAAGLTHVHLLPSFHFASVDDNKSNWKFVDEAQLAKLPPGSDEQQAAIVSIQQEDPYNWGYDPVLWGVPKGSYASNPDGPSRIIEYRQMVQALNRIGLRVVMDVVYNHLDSSGPFGVSSVLDKIVPGYYLRRNVNGQIENSAAMNNTASEHFMVDRLIVDDLLNWAINYKVDGFRFDLMGHIMKSTMFTVMSICTISTIIKIKDVFADTLIRAKSAIRSLTRDVHGVDGSKIYLYGEGWDFGEVAQNKRGINASQINMSGTGIGSFNDRIRDSVNGGNPFGNPLQQGFSTGLFLEPNGYYQGNEADTRRELATYADHIQIGLAGNLKDYVLRTHTGEAKKGSDIYTFDGSPVGYTSSPVETINYVSAHDNETLFDIVSIKTPIGLSIDEKCRINHLASSMIALSQGIPFFHAGDEILRSKSLDRDSYNSGDWFNKLDFTYETNNWGVGLPPRDKNEENWHLIKPRLENPSFRPLKNHILSVFDNFVDILKIRYSSPLFRLSTASDIEQRVRFHNTGPSMVPGVIVMSIKDAQNEKCKMAQLDKNFSYVVTIFNVCPHEVSIEIHDLASLGLELHPIQVNSSDALVRQSAYEASKGRFTVPRRTTAVFVQPRC

SEQ ID NO: 120121 - protein, 313 aa, Oryza sativa
  Clone ID: PAT_MRT4530_23271C.1.pep
MATRPGPLTEWPWHRLGNFKYVVMAPVVAHGARRVMRNGWGDLDIAFSLILPSLLLRMIHNQIWISLSRYQTARSKHRIVDRGIEFDQVDRERGWDDQILLNQAKQLNGNGELFRQKYPKLGVRMVDGSGLATALVLKSIPSAAKTVLLRTGTSKIARAIAIALCDRGVQVIMNEKEVYHMLKSQIPENRASYLKLSSDNVPQLWIVHNIDDNEQKMAPKGTIFIPISQFPLKKLRKDCTYMSTPAMRIPEEMKNIHSCENWLPRRVMSAWHIAGILHALEGWNMHECGDEMMDIEKSWSAAIRHGFLPLTKA

SEQ ID NO: 120122 - protein, 132 aa, Oryza sativa
  Clone ID: PAT_MRT4530_23272C.1.pep
MLDGSYGVRGTTLQYQKNPKGLVKKRSNETAADMWAPHPTEKKAAASQRWRTWEATAAAHSSPTAIGVRGEAAATAGGLRVPRAAARAECACPCGGGSGRAVPDLPGEAEAESREVVGARRRRELAWSSICI

SEQ ID NO: 120123 - protein, 97 aa, Oryza sativa
  unsure (1)..(97): unsure at all Xaa locations
  Clone ID: PAT_MRT4530_23273C.1.pep
NLDPLKRPPLIFFFYTWSQLQVLCFLNSPLQFFLLGPMFXLLSMPYFHVTISMSFLFVCDNHNSTIQYPYGDDKACRNLGTLFDTTSMYFFSLKLYY

SEQ ID NO: 120124 - protein, 362 aa, Oryza sativa
  Clone ID: PAT_MRT4530_23274C.1.pep
MDKSEMDKINGTNPESTDQAPSLASRPDEFEEEESLVTPDALSARIGGFQIYAGSVNWGVFGSMKIVFLKSKLNVLIPCGFLAIFLNYMTQRYGWVFPLSMLGIIPLAERLGFATEQLALFTGPKGSILSNLLLVLGSAFFSGGLACGKTMQTFSKADAVVNSGLLLMAVMGLLIPAALHYTHSEAQFGKSELALSRFSSCIMLVAYASYLYFQLSNNRRRNEANVGASKAWNIPVAFISVVLLPVVGNSAGHANAVMFAVKDKLDISLGVAIGSSIQISMFGIPFCVVMGWMMGKPMDLNFHLFETASLLTTVLVVAFLLQDGTSNCVKGLMLFLCYLIVAASFYVHADPNSKASEKPPQN

SEQ ID NO: 120125 - protein, 161 aa, Oryza sativa
  unsure (1)..(161): unsure at all Xaa locations
  Clone ID: PAT_MRT4530_23275C.1.pep
AAVNPEADQSDTPADPTLSRPPSPGXSARGKLHYKPSRLTSPKGGGADRRDPRVSDSRGERGAAGRRAPPAAAPKGGVASAGLGSAPSWRAGYGERRRCTVTGDGNRRRRTARKAVASAEGNSVRAVDGSGHGRERKREEREFSPWGWPAREEATTNGDGD

SEQ ID NO: 120126 - protein, 1182 aa, Oryza sativa
  Clone ID: PAT_MRT4530_23276C.1.pep
MGRGVGFPCFPSPSRQVDVIEGDRDWDAWNGWMSRREKEIGRKREVRIARELERQRDARMAAAAKEEMEGVLRAMDRLPGRISDLLRSERGHAGLSVLARRGFVFTETELSSLVAALRQLLASAERIGPGHVDSQTVNHCAYLIDLARWIDDLIDGYAPDKAETELRELNLAWIEQLLLVTDAPPAAPDVVVDVGPPSILVGIDVPRKKLARWLTASDDGEAQLKVLSVVGPAGMGKTTLAMDVFRQIEGQFQCRAVARLSARPPHNDKLLRHIMSQITGSQADAATLDGDDCALAYDIKQYLQTKRRTAPIKEAAPIPEGARYYSGLQEPWLPPGPLTSPRSLDRVWKPQMVPERTESFGGLGRLRSPRIVPELMDGSEALVGSRDLERPRSPWLPSEPVNCSGGLGRPWMTPEPLGGSEGPGAASHDGGWLRYPEPSPQHGLNYIVNALYDLFLRYLIVIDDMWRTSDWEHIWDAFPSNRCHSRIIITTRIRSVARSCCSHPWPNGLVHEVKPLGATDSERLFSAVAHGWPRPANSGRVSNEILREEDYDDEEGDQSGVTMDISRPCVAAYLPSGIRELKQVEDTLSPSYDNLPCELRLLSLYMSTFPQGYVIDKHLLIRKWKAEGLIAVHTLQSGFEERAEECFSQLVQRCIIRPARTRRRACDCECNPCSYQVNHFMFQLLASKSADKNFVTTSCCDTGTLRGSSGLQIRRVFLHHGQQQQQPADQEVPAQMEEMFSFTRSLTVSGEVDGISLEMFPHLVVLDLQGWEKLKDDDLPRIFSSGKLFLLRYLSLRNTRISELPPEIGMLSSLETLDASHTRIAKLPPEVCTLRSLEELDLRSTRIQRLPERIDDLVALRHLRAGDGAASTRIPKGIDWGMLRDTLETLAAVDLRECSADVVRKLSLLRCLEVLSVSLSLRQCTDKEYQDNLSFLVQRLKCLRSLTIRCELGCSMEFLDFSPEDAPQNLRHVAMHARFLTVPRWIAGLNHLSSLHIRVCKLAPEGVKILGRLHRLECLELGLDFLPREAIVIQGQGFMSSSQNRSNRAPLNSKIHEEEEDGDDEKNGIIIYPFRELLRLSVDCRVPWLVFKEGAMPKLTDLELKLSTGPASHESPPSGIANLLSLEQVAVQYDAWYINSRSVRATVDAIRRQVAELRYTVKLVNNGVEEDVEAVINPRRDS

SEQ ID NO: 120127 - protein, 158 aa, Oryza sativa
  Clone ID: PAT_MRT4530_23277C.1.pep
MATGDATATVECRRDGDASMGRRGAARGLARGWVGLEAMRPETATARGSGEVTARGGSRREAVRHGARRGSDGDSARGGEGLETSGDTTTMRGDAMQRRQDATRGAREGARGSRATRRRGDTTARRREATRGGRAARGDGAGDDDGDTSGIGQEKEEG

SEQ ID NO: 120128 - protein, 148 aa, Oryza sativa
  Clone ID: PAT_MRT4530_23278C.1.pep
MASNSQMNNRGAGGGRGQGDDEEPTPTPPPAPPPETAPSTVGGGGDGVQLVMPEDGYEWKKYGQKFIKNIQKNRSYFRCRDQRCGAKKKVEWHPHDPGLNLRVVYDGAHHHGSPSSAAGEGGTSAAAAANQYDLSTQYFGGAGGPRSQ

SEQ ID NO: 120129 - protein, 178 aa, Oryza sativa
  Clone ID: PAT_MRT4530_23279C.1.pep
PAGSVHDASEFIFDSSPLLSFHRLTNHSPAAAPGPAGPVLDQACLTALLNMSDCLTYVQNGSRARRPDKPCCPELAGLVESNPVCLCELLSGAGDSYGIAVDYSRALALPAICRVSTPPVSTCAAFGFNVPMGPTPSPSPAAVSPSGEGPQFPGTSPFASPPSTATPSTNAGARSGDH

SEQ ID NO: 120130 - protein, 179 aa, Oryza sativa
  unsure (1)..(179): unsure at all Xaa locations
  Clone ID: PAT_MRT4530_2327C.1.pep
RKRELLRQRLGFAVDRVHGSGSREXTAEIDPSKTDGRDQSGLRRLTANGPDDVSGDVTSGGGSAARTAHARRRMMMLRHERKAPGRRARRGELTGDQNGGGRSTDGDGDEVEAAEKIGSTAATVLRRSSAMTKGRTRTTTTWRPRWRPPRATVTAGARAKHGWSDGDDGGARSHGARAL

SEQ ID NO: 120131 - protein, 404 aa, Oryza sativa
  Clone ID: PAT_MRT4530_23280C.1.pep
MASSSSSSSSSPPPPPPRRSVFDAAYIRAEFAAAGISPHFIPLIWKYVLQNPRCGDLDAVPSLPAAAYALLRQKFQPTTSTLTTAAESKDRTTTKLLIRLKLQFDLNLVTLLSDNKHNGESVEAVIMRYDTRLGKYDGKPRPGGVRSTLCVSSQVGCKMGCRFCATGTMGFKSNLSSGEIVEQLVHASRYSQIRNVVFMGMGEPLNNYTALVEAIQVLIGSPFQLSPKRITVSTVGIIHSINKFNNDLPNINLAVSLHAPDQDIRCHIMPAARAFPLVKLMNALQSYQNESKQTIFIEYIMLDGVNDQEQHAHQLGKLLEMFKAVVNLIPFNPIGSSNNFKTSSEHNVKKFQKILRGIYNIRTTIRQQMGQDIAGACGQLVVSLPDERSAGGATLLSDIEDIRI

SEQ ID NO: 120132 - protein, 110 aa, Oryza sativa
  Clone ID: PAT_MRT4530_23281C.1.pep
MGVSPWIIIFLLSVIVLVFVASADTNARHCWPQWDCRRLSSFGLSGTLSGDIQSLSELQYLDLSYNKNLRGPLPSTIGTLSKLQNLILVGCSFTGEIPKEIGQLSNLIFL

SEQ ID NO: 120133 - protein, 814 aa, Oryza sativa
  Clone ID: PAT_MRT4530_23282C.1.pep
MADQGFRPFSALMSAPSTAQQHVGSSFSTAVVQVAAAQQSHTDHGNICLADDDGYYWRMTGQSTTQGESSPTILSHYQCAQANCVVQKTVAYTADVETFYRGRHNHLRQSDRLEPMSQVGVLVEASDAAGAAAGPSVPETENGDDQSSGSSDRNEDDAGDVEMDEDAAAGDPNAMQRRKLKSKVWKEFKLVFKDGKLHTAICNHCKLRLVAETRNGTSHLRRHLKICPEKAGTSRVQKKRRSSTSQSQPDLPVSENLENGQENPSQNLENGQENPLEEFMRATVLKLCPFPAMYRASFASFLAGRNPAPNMVPQTTVEDKFISVYEKEKLKLKEKIIATPGGVFLSVNKWYSGSYETGIVCLTVHFIDEEWKINRKTIRCCLSESDGLDLNLFPHWQSEIANYEDDDKMVLKKVVRDWCLEPKLLGVTLEGSVDKKATISLEDDLTTGKNYLVAKCKLLTIPCMVDGLDDLMQYTVGREVRSMWSRYMTNTPERKLKCQEVVSQLQLDRPSFGSKYRYLTFYWCEAALQFIKSFPLSNGSERPSLDDLEATENFCKIARAIYHATKAFYEPYNLTFNSYFHVIWSLRATLQELPRIKNIERVIKVKNMQEKFDNHWKKWYLWLSIAVVLDPRYKLAFIELRFREAFSQDAGTYISEVRAKFYELYIQYSHVNEQSNEILNQGNNGSGTQISAPLHKQRTNYTIAQAALEEFKELFEYLGGGLCPQNDSFDILKWWKDNSAAYPSLAKMARDILAIPGCAVSAESAFNDDSDHRAELFNGKLGPETTEALICAQSWIIKSSGTADADNGNNITLS

SEQ ID NO: 120134 - protein, 108 aa, Oryza sativa
  Clone ID: PAT_MRT4530_23283C.1.pep
MKEKLKARFQIIAVLLAFAMVAQAMAIRGTGTTAEQDNTGGSTSAKHTLPQAVGSGTSVDNHHAIPRDQYSNHGGDDGGGSTGTGDTNNYSPNPENKLLLFMGIEESF

SEQ ID NO: 120135 - protein, 165 aa, Oryza sativa
  Clone ID: PAT_MRT4530_23284C.1.pep
YLEALLYPHEEKQLILRIRATDIKTTSQPVLSTLINTTYIFKSPLTSSSEINLHTSMIINSLVVCITSTSTATSIITPMVAVLITRDGMVVVHRGATSNSLRQGMFRTRAPSGVILLRRRTRAANRHSLSYHGEGEQDGDDLKPRLQFLLHGDQTYSCLEKSLLL

SEQ ID NO: 120136 - protein, 780 aa, Oryza sativa
  Clone ID: PAT_MRT4530_23286C.1.pep
MGTVENMEGREERSTDVERDGKQGKEVESDYEPARDSVSSQGEANSNEDTRAKRVSRVPKKLVKKDSKENSPRSGRINSNRQVQTKLQYISSNNLQSKSPKPNKTSDGAKTIEITKPDTVTVPSCPSSEVSEEMDDKPIENIVTDDKSIEDVADDKATEGTASYDKATEGKAADDTTVEDNTTDERSIESGTDDRTIAGIAADVKSSEEAKEIDILDEAPNCDQSTATDEEIADTEESIAYDGKSAAYEKSEELESKCERLEQELREVAALEISLYSVVPEHGCSSHKLHTPARRLSRLYVHASKFWSSDKKASVTKNFVSGLVLVAKSCGNDVSRLTFWLSNTVVLREIIAQTFGITRQPSLAMKAFSTNVNAKMLGKNSSPTRRKNNYSGKHARPAIWPLPDDWRETGTLVAALEKIESWIFSRIVESVWWQALTPHMQTLVKDISSPKAGSLLGPALGDQQQGNFSIHLWKTAFQDAFSRICPLRAGGHECGCLPVLAKLVMEHCVARLDVAMFNAVLRESANEVPSDPISDPIVDSRVLPIPAGDFSFGSGAQLKNSIGNWSRWLQDKFGMVAAAPEKHGQAGDESDDRSGAADFYSFKLLNELSDLLMLPKDMLLEKSIRKEVCPSIGIPLVTRILCNFTPDEFCPEPVPGMVLEELNAESLLERFTEKDVITTFPCVAAPVVYCPPSPEDVAEKVADAGGNAEPDLRASMVQRRGYTSDDDLDDLGNPLASLYDRSSPPSPCNGASRSTTRQGGSMSNARYELLREVYGRRGLV

SEQ ID NO: 120137 - protein, 33 aa, Oryza sativa
  Clone ID: PAT_MRT4530_23287C.1.pep
KPVYVWKTKVGVWKFICNLRKPFFEKDVIKPPV

SEQ ID NO: 120138 - protein, 134 aa, Oryza sativa
  Clone ID: PAT_MRT4530_23288C.1.pep
VVFGFASPSAEPAGVHRRLLAGSHRRPPPRRRLRPWLRVVKRCAGRVSPSSKDRRRSRSLAVRLRRPQAVSAAPVRRRCSHASLRGGKGASSRCPRPRPFGVAPRPLCGCRPRCPCTGVGSRSWACNFACVLRV

SEQ ID NO: 120139 - protein, 35 aa, Oryza sativa
  Clone ID: PAT_MRT4530_23289C.1.pep
NLKVCVHGHRGSTKDYTPSCDNNTLKCVGLSPNII

SEQ ID NO: 120140 - protein, 159 aa, Oryza sativa
  Clone ID: PAT_MRT4530_2328C.1.pep
RSFSDALGPSTLEATALEPAGDRPCAVNAPLVLVVGISLDRHECGLTLRRTSVQHRPAFTSSSSDVGCLATTSLHDQVGNFGLEHVGFSETGEAAAGVAGRAAGVTNGTLSRSHPSVELICFHMGTFLSAHYKNLSEPRSSILILDSIDLGTLWLCQIL

SEQ ID NO: 120141 - protein, 261 aa, Oryza sativa
  Clone ID: PAT_MRT4530_23290C.1.pep
ARGLSLACGLTLLLAVAVAPMEELAPELIGPRISFSHDGVVATAGAATPAARSDTSLVVVMSSWRRLPEPEFDFANAAAADVAPADRLFAGGKLLPVPPLPPVHPKPSPCKQQQATSGGGVKPTSYQRRPGSWTSPFTRSCSVNSATTAAPRSGSGSFSCPSFPLMRSRSAGSAAAAQGGGLGGVVSGGGHHRPPQHKKAGATAAAYYYGGSRNGSSGHGVRVSPVINVPSIGTSMVNMLSYLLCDCGNKTTKNRGFGLNC

SEQ ID NO: 120142 - protein, 319 aa, Oryza sativa
  Clone ID: PAT_MRT4530_23291C.1.pep
MAAMAMVSVQLTVAARPLRSRRALSVFTCAAPPRQRPPPGPTKHRRLRHDADAQPPRKRGHPPPPPPRRTRTRGPPARPQQSYTDDDEEEDDQDEEEGSFGGGTRAAAMPKPPAGFVLDDQGRCIAAASKRIVTIIDDTNNRPLECIIRRVFRSTLDHDCMLLCPVDMPVQVLKSANFSGWIAVDDDQIKEIIPSVAYALARVHMHFVESGFCYTARGGFCFPEDAIQEFHDSGDGGDSVPFEGVEICCFNLDGAHYMIYTPVDPLLFVAVKDKDGVLRIAEDELMDDPAVVGAIDEETEFTALVEEEEALLESVLGER

SEQ ID NO: 120143 - protein, 61 aa, Oryza sativa
  unsure (1)..(61): unsure at all Xaa locations
  Clone ID: PAT_MRT4530_23292C.1.pep
ATDCSRVFVFLFSPSRXXMCPGADTXASTSXPXRXXEPEAGFDXLDXDRRCISRETSSRST

SEQ ID NO: 120144 - protein, 212 aa, Oryza sativa
  Clone ID: PAT_MRT4530_23293C.1.pep
MRPGLVFCRGRSRWRPPWGSARGPTAGARAPAAAAAAASAGASRPRAPPPTTPPRIRRRSSSSSRGGLCRAACSTRTRARRRSCAPGRRAAAPGRLPRRRRPPRGASSASASSAPRTCTLHAPQIPRTPPPQQKSAAAGAHGSSRRAPPPTRSIRWWVSSATASGASAPPTWWSQSPCRRRRRGPRPRTRTRPATRKLRVFVAAGSWTGSRN

SEQ ID NO: 120145 - protein, 94 aa, Oryza sativa
  Clone ID: PAT_MRT4530_23294C.1.pep
CGSSAGHRGGSGVGRAGGGVGKEKEEDRAVQRIPTPPGGDWVVPCPAPPLPPRAVSPSRPRAAPPSRPRPAPPRPPHTAPPTFPVSYKPTFAAR

SEQ ID NO: 120146 - protein, 127 aa, Oryza sativa
  Clone ID: PAT_MRT4530_23295C.1.pep
SPPTTRGRGGSCATAARSSAAPAARAPADGGRPTTGTSGSATRAATTCAASSTTASTATSTSTPAARTCRAASLSAGPRSSSPPAARLPGGASSARRRGAAPTSAATTGRTAPTTSTARPCTCTWRA

SEQ ID NO: 120147 - protein, 63 aa, Oryza sativa
  Clone ID: PAT_MRT4530_23296C.1.pep
FWVFYFSTGYFFFIFFFFHGGGGNPGNTGPRPEGGPAYPIGRPIRGWRNQSKSRCREEIVIRL

SEQ ID NO: 120148 - protein, 249 aa, Oryza sativa
  Clone ID: PAT_MRT4530_23297C.1.pep
PKLPDFLPLLTPLFTKQLAAARELRRRQLGCLAPLVRARREFIRGGGERNADGNTVVGGVEMVSAPVEAYVDSLFDLEPPGRGKRLGEDELVTLCSEVMSAGTDTSATALEWAMMHLVLDAGVQDKLYGEVVSKVGTTARITEADVEAMPYLQAVVKETFRRHPPSHFVLSHAATRDTELGGYRVPADASVEFYTAWVTENPATWPDPEAWRPERFLEGGEGFDTDITVTRALRMMPVGAGRRICPAAP

SEQ ID NO: 120149 - protein, 566 aa, Oryza sativa
  Clone ID: PAT_MRT4530_23298C.1.pep
MVDMNDVLLVVSAAVLAAMWWRRCSRTGGADGLPPGPPGWPVVGNLFQVILQRRPFMYVVRDLREKYGPIFTMRMGQRTLIVVTDADLIHDALVKQGAAFASRPEDSPTRLLFSVGKCTVNSAPYGPLWRALRRNFVAEIVSPPRVKGFSWIREWAVGSHLRRLRAEFAATGAVRMMANCRLSICSILICICFGAKIPDELIREIEEVLKDVMMMTMPKLPDFLPLLTPLFTKQLAAARELRRRQLGCLAPLVRARREFIRGGGERNADGNTVVGGVEMVSAPGEAYVDSLFDLEPPGRGKRLGEDELVTLCSEVMSAGTDTSATALEWAMMHLVLDAGVQDKLYGEVVSKVGTTARITEADVEAMPYLQKIRVMGNWGYAELLTEMDGFAALDRRRAHVQAVVKETFRRHPPSHFVLSHAATRDTELGGYRVPADASVEFYTAWVTENPATWPDPEAWRPERFLEGGEGFDTDITATRALRMMPFGAGRRICPAATLGVLHIQLMLANMVREFRWVPPAGEGPPDPTETFAFTVVMKNPLRAALVERRVGGELATGGGGGAAASA

SEQ ID NO: 120150 - protein, 144 aa, Oryza sativa
  Clone ID: PAT_MRT4530_23299C.1.pep
MAMPWELAEYLMAVTWVPLGRLQPSLLLQELRECQHLDSTTVAASASATGSGSPDIEGMAQADFFFGPELDDLMQQLGDGDTGQKGMLPASSSLPSGVQRRKAGGAGRSGRMAAPRAAGRWGAAAGRVAERGDGEKEEVAHVLS

SEQ ID NO: 120151 - protein, 45 aa, Oryza sativa
  Clone ID: PAT_MRT4530_2329C.1.pep
VCHFHSYLVLMSPSVSVLQFPRILWENSIHVYKSSKHIPENDKNP

SEQ ID NO: 120152 - protein, 281 aa, Oryza sativa
  unsure (1)..(281): unsure at all Xaa locations
  Clone ID: PAT_MRT4530_232C.1.pep
GEQAPRHPGERRERGDAATRAAPARNHEPTREQPKRTNAKPRQTNTTRRRQIHNSRHIARARRQKATNKKPTKHRTAEAQTTARVARSKQRGSAPRRTRHHSSGPPPTARNATTTPETQPAQHHEQPPTHRRKAGNSASATEGATPRQHTPGRHTNPPRAQXRRPRAQAPRRRREIGRRPERAQDAPNRARGRETETGPTPATAKSAALFYRGRANCKSRDGPRKEYKTRPPARSRRAGTPGPRAADAKGAAAGATQGAMARSAGRRLVPNSASPGEPTKF

SEQ ID NO: 120153 - protein, 34 aa, Oryza sativa
  Clone ID: PAT_MRT4530_23300C.1.pep
MGLPIVGETIWSVHLASYCLSQYSISFFVVKKMD

SEQ ID NO: 120154 - protein, 63 aa, Oryza sativa
  Clone ID: PAT_MRT4530_23301C.1.pep
VIMVPRPYRTTHGNSHLAIRVHVHLDHTPLPDVHHQIVHQVQLLTRAHARPFLHFRLNQVKNM

SEQ ID NO: 120155 - protein, 49 aa, Oryza sativa
  Clone ID: PAT_MRT4530_23302C.1.pep
MALRGHCFSVEESMTKDELIARLRSLGEQLNRDVSLTGTERRTALRVQS

SEQ ID NO: 120156 - protein, 56 aa, Oryza sativa
  Clone ID: PAT_MRT4530_23303C.1.pep
MEKVVTLMLSPPSRYDDRCAWPPWVFKTDGSGHVPTNPTPYSQIPCQIHKNIGGDV

SEQ ID NO: 120157 - protein, 206 aa, Oryza sativa
  unsure (1)..(206): unsure at all Xaa locations
  Clone ID: PAT_MRT4530_23304C.1.pep
TSSTSPPTATCASRAPSTTSATAAWTSTPSHGRASAPPASAACSGAPASSPRGRRGPPSPGPTTSPTSPGSXCSPSPSPAPAAAGRRGGSPPTSGDSRRWSARCWGITCTTSGCWPGSSGARSPTLRGSSAPLSQPTRPPRGSPAPAPSSGSTCSSGRRSCCPSSSSPPTPMAMATSSSPPSTCSTPSSHSGPSTAPPSPSYVLPS

SEQ ID NO: 120158 - protein, 146 aa, Oryza sativa
  Clone ID: PAT_MRT4530_23305C.1.pep
SAHSSPSAIEGRRQVRGQAMAPCVNKQWRVVVQAEPRPYHLDVAAIAPAVAEFRCTSFYRLRACGSNLASALMMPTPDATAAAHLIRPPPLIPTVVPTARCCCRRSDCRGVPAHRLLLPRSMRQWLGVDVDDARTSTAHSHLPVAH

SEQ ID NO: 120159 - protein, 70 aa, Oryza sativa
  Clone ID: PAT_MRT4530_23306C.1.pep
MLAHIGLNSVPSTWAAVPILLLNICRMQCSNCGHCQPAGKNISDLIRFLWAEKLKAKFRDQAWLGGNPAI

SEQ ID NO: 120160 - protein, 645 aa, Oryza sativa
  unsure (1)..(645): unsure at all Xaa locations
  Clone ID: PAT_MRT4530_23307C.1.pep
MGENSAAAAGKGKEAKGKATTSASASAPNVEPDVAYLEAVTQKRIRQFEEIQAKQALERLNIGGEPIRITLPDGAVKDGKKWISTPMDIAKEISSGLANSCLIAQVNGTLWDMTRPLEGDCELKLFKFDSNEGRDTFWHSSAHILGESLERAYGCKLCIGPCTTRGEGFYYDAYYNDLTLNETHFGIIDAQAQKAVAEKQPFERIEVSRAEALEMFAENKFKVEIINELPEDKTITVYRCGPLVDLCRGPHIPNTSFVKAFACLKASSSYWRGKADRESLQRVYGISFPDSKRLKEYKHLLXLSPNIYNMQLWETSGHAANYKENMFVFEIEKQEFGLKPMNCPGHCLMFEHRVRSYRELPLRMADFGVLHRNELSGALTGLTRVRRFQQDDAHIFCRESQIKDEVKAVLDFINYVYEIFGFKYELELSTRPEKYLGDIETWNKAEQQLTEALNEFGKPWQINEGDGAFYGPKIDIGVFDALKRKFQCATLQLDFQLPLRFKLTYSAEDEAKLERPVMIHRAILGSVERMFAILLEHYNGKWPLWLSPRQAIVCSISSNSVEYAKQVRARIHEAGFHVAIDETDRTIQKKVREAQLAQFNYILVVGAQEAETGQVSVRVRDKAELATVSIDDIITRFKEEVAAYK

SEQ ID NO: 120161 - protein, 105 aa, Oryza sativa
  Clone ID: PAT_MRT4530_23308C.1.pep
TRPCAGSPPSTRRCAGFIGIALGTTHPFRSPGWDYGRRPDTCFDIMPAQPRGRTPVRRLDQPGRPGPVGGQAQPPARIHLQLPRHPHMRARQGPGQVLEDSTLRL

SEQ ID NO: 120162 - protein, 531 aa, Oryza sativa
  Clone ID: PAT_MRT4530_23309C.1.pep
DPRVRNDLTLNETHFGIIDAQAQKAVAEKQPFERIEVSRAEALEMFAENKFKVEIINELPEDKTITVYRCGPLVDLCRGPHIPNTSFVKAFACLKASSSYWRGKADRESLQRVYGISFPDSRRLKEYKHLLEEAKKRDHRLLGQTQDLFFFHQLSPGSCFFLPHGAIIYNKLMDFLRQQYRDRGYQEVLSPNIYNMQLWETSGHAANYKENMFVFEIEKQEFGLKPMNCPGHCLMFEHRVRSYRELPLRMADFGVLHRNELSGALTGLTRVRRFQQDDAHIFCRESQIKDEVKAVLDFINYVYEIFGFKYELELSTRPEKYLGDIETWNKAEQQLTEALNEFGKPWQINEGDGAFYGPKIDIGVFDALKRKFQCATLQLDFQLPLRFKLTYSAEDEAKLERPVMIHRAILGSVERMFAILLEHYNGKWPLWLSPRQAIVCSISSNSVEYAKQVRVRIHEAGFHVAIDETDRTIQKKVREAQLAQFKYILVVGAQEAETGQVSVRVRDKAELATVSIDDIITRFKEEVAAYK

SEQ ID NO: 120163 - protein, 110 aa, Oryza sativa
  unsure (1)..(110): unsure at all Xaa locations
  Clone ID: PAT_MRT4530_2330C.1.pep
VXNXXCXXXWKMATXWXPPXXXIXPXFKXRXAVAFXXXGNFXXGXPXXPYGPXXXGGXXXVXIXXXXXXAMXPXXXXGXXXFSPXXPPPPPPPSARSGRGAAHTXXDTVR

SEQ ID NO: 120164 - protein, 62 aa, Oryza sativa
  Clone ID: PAT_MRT4530_23310C.1.pep
GLQSARHARFPINSPMRSVPLIVTGLSLHSAEGVRIAESLSHVYSFGFCVEVAQSLDRLYVR

SEQ ID NO: 120165 - protein, 74 aa, Oryza sativa
  Clone ID: PAT_MRT4530_23311C.1.pep
FFFFWLQDLGVLMCFAFETNKLKNIFTYTTTATSDLPPPPPPRRGNSIDHIHGVVLVVAGRPVTRSAAGAEARL

SEQ ID NO: 120166 - protein, 93 aa, Oryza sativa
  Clone ID: PAT_MRT4530_23312C.1.pep
MSYYVDPRTSVPQYPLYLAYRYPPSTVARQVGGLGAQGSTTMTSSFVDNRVNTGPIQGIPASTMLVSTQVSEIVFLVYTTVPISAGPSITEPE

SEQ ID NO: 120167 - protein, 104 aa, Oryza sativa
  unsure (1)..(104): unsure at all Xaa locations
  Clone ID: PAT_MRT4530_23313C.1.pep
GSXXGNFSRTNGNXGXGESXGFXXGXPGPFYCFAXXFWRXXPGERXXLXXPXSPXXXXCLSXPEGXXXEVRXXVQXXVWGXXVETDXSPCRRSWGDGGXDXKGG

SEQ ID NO: 120168 - protein, 199 aa, Oryza sativa
  Clone ID: PAT_MRT4530_23314C.1.pep
MAGARGGGGGGGEDGQLGEFYEYMERLRNYERSGVPRGAGTDSDDGFDLGRMRRLLRRLGDPHTHFPAVHIAGTKGKGSTAAFLSNIMREQGYNVGCYTRSCSAELLRDLFGHAKEAIGQSIESEDGALTHFEVFTALSYLLFSQENVDIAIVEAGLGGARDATNVIQSTELAASVITTVGKEHLAALGGSLQTYILIE

SEQ ID NO: 120169 - protein, 328 aa, Oryza sativa
  Clone ID: PAT_MRT4530_23315C.1.pep
MGTTSITETDVLSIPRVRPRVRSRATMAARVLPLLLVVVVAAAMARAPTAHAWGKEGHYMVCKIAEGFLTKEAATAVKELLPGWAGGELAETCSWADTERFRYRWSSPLHFADTPGDCQFNYARDCHNTNGEKDMCVVGAINNYTNALEDSSSPYDPTESLMFLAHFVGDVHQPLHCGHVKDLGGNTIIVHWYTRKSNLHHVWDVNVIETALKEFYNEDVSTMIKAIKMNITDEWSTEEKQWETCRSRTKTCADKYAEESAKLACKAYEDDYFFAALPVVQKRIAQGGVRLAAILNRIFSGNKMLSKSTYRICRRSETILAIYRSSSE

SEQ ID NO: 120170 - protein, 350 aa, Oryza sativa
  Clone ID: PAT_MRT4530_23316C.1.pep
MGAISKPLLLAILCCIVCLYSSSGGAIVAAARELGGDAAMAARHERWMAQHGRVYKDAAEKARRLEVFKANVAFIESFNAGGKNRYWLGVNQFADLTSEEFKATMTNSKGFSTPNNGVRVSTGFKYENVSADALPASVDWRTKGAVTRIKDQGQCGCCWAFSAVAAMEGFVKLSTGKLISLSEQELVDCDVDGNDQGCEGGEIDGAFQFILSNGGLTAEANYPYTAEDGRCKTTAAADVAASIRGYEDVPANDEPSLMKAVAGQPVSVAVDASKFQFYGGGVMAGECGTSLDHGVTVIGYGAASDGTKYWLVKNSWGTTWGEAGYLRMEKDIDDKRGMCGLAMQPSYPTE

SEQ ID NO: 120171 - protein, 58 aa, Oryza sativa
  Clone ID: PAT_MRT4530_23317C.1.pep
PTKARPARSRREADAEDGAAGEVKAAHGEVDAKEGVTNEVKARCGEADDEDGGQQHQR

SEQ ID NO: 120172 - protein, 295 aa, Oryza sativa
  Clone ID: PAT_MRT4530_23318C.1.pep
MAARVLPLLLVVVVAAAMARAPTDHAWGKEGHYMVCKIAEGFLTKEAATAVKELLPGWAGGELAETCSWADTERFRGNRLPELSVHAMIDKTLRTIMYGYGYGDCHNTNGEKDMCVVGAINNYTNALEDSSSPYDPTESLMFLAHFVGDVHQPLHCGVVKDLGGNTIIVHWYTRKSNLHHVWDVNVIETALKEFYNEDVSTMIKAIKMNITDEWSTEEKQWETCRSRTKTCADKYAEESAKLACKAYEGVEQESTLEDDYFFAALPVVQKRIAQGGVRLAAILNRIFSGNKVQSS

SEQ ID NO: 120173 - protein, 112 aa, Oryza sativa
  unsure (1)..(112): unsure at all Xaa locations
  Clone ID: PAT_MRT4530_23319C.1.pep
KPNTSGILFLIQEGLVSTYGYXNMYTRGHCKLXSRSIQLLSAHRHPLYRGFYLSLAELXHLTWGYIGFRSLAKGXVLRSAGPGNCIGYIGVVEGCIASTSSIALVRLIYLPI

SEQ ID NO: 120174 - protein, 76 aa, Oryza sativa
  Clone ID: PAT_MRT4530_2331C.1.pep
AEVAVESIDKFGTSVVCVSRLDSSFKVDHIILVISKRNCSPVISVSYSNIVVTFNSRGRWLQSGGFPCAWRTSSLL

SEQ ID NO: 120175 - protein, 96 aa, Oryza sativa
  unsure (1)..(96): unsure at all Xaa locations
  Clone ID: PAT_MRT4530_23320C.1.pep
LILSSHLAITCSSLLFSIASTTERARRGGGGGXXXXXXTXXTAAERTAQCTRCRGRLHGCYWGADGATLSFTEWTSGMTRCKSTPWIRVKRDSRIT

SEQ ID NO: 120176 - protein, 353 aa, Oryza sativa
  unsure (1)..(353): unsure at all Xaa locations
  Clone ID: PAT_MRT4530_23321C.1.pep
MAKLVALTFVVLVSIGLANAGRVARYASAGGGGGGGGGGGGSNGGSGWGSGSGSGYGQASGGGAYASGGGGGGGGGXGQNGGSGIRYPRSWVSVSGQAGGYGPYGGGYAQGGGGGQGGGGGQNGGSGSGYGSGSGYGQAGGYGPYGGGYAQAGGQGGGGGGGQSGPGGSGERRPKARRRADAGLGDDDDDDKWRRRVLILSSTYPPQGEATKGETAPALVTTTTRNGGGESGRWSSSCGQRIRRRHRHLPHPAPAPPQSPPPLSRRGSSPSTPLSRRHRRSLPPPPQRHSRRLPHPVPAPPQPPPLPPSLPPSAPLSCRAGATSTATAPSLRAPQPSPPPLPPSTPSVTAAAP

SEQ ID NO: 120177 - protein, 182 aa, Oryza sativa
  Clone ID: PAT_MRT4530_23322C.1.pep
MASNNVLFIMLARESVPEGRGGREGGRERRRLRRRRHGMREAAAAALRGRREGAAVAAEGRGGRRSMPAEGRRRLRRHRRGMREAVVEPPAQARGRREEAAVAAPDPLTAARAPPPGLTAATPRHRRHQGRRRLAFCRLSLWWIRGGEDKNTLSPLVVVDVITKAGVGSPSRLWPPLPVVNP

SEQ ID NO: 120178 - protein, 287 aa, Oryza sativa
  Clone ID: PAT_MRT4530_23323C.1.pep
NTEVDMAVTLGARSWASMCTEAFRRLLLLRCSSCSLFSVVAVVIAACCCCFDAATTSSPSPPLSSPATASGKLGVREGFSTATDASSALPWPQTTLSPSDIHVGSSATPPLGQCVLAPAGIVGFSLSICSAVGPTPLPVPLSLMANTALLLPPMPRALDTNPVGCEADGPDGGQRCQCVGHACLCANLISREAPLHFPSRVTQTIQSLHLPFPCPHSHRCCHGMAVADLGPDSAAASCPTAAVLQEVVVLICLEPKKSVYMQGIINPTYKYMQIIHALLGSHCCGCT

SEQ ID NO: 120179 - protein, 69 aa, Oryza sativa
  Clone ID: PAT_MRT4530_23324C.1.pep
SPPQKKMRFKFRNKFFLSLFKIWQIKFLKYQTLSPGKFPPFFVSQKNTPKKLRFLFLPNITKLNPFVSN

SEQ ID NO: 120180 - protein, 382 aa, Oryza sativa
  Clone ID: PAT_MRT4530_23325C.1.pep
MEEQQVKPSDSHPPPATPVDSQDSTAPPVRTPDPVSQATSNDSATQFASTVHVAPSPAPVPNAVPIQDAAGREAQSSIFSTSGLSSWAKNLKIPQPSSGQESPTGKNTFSRLTSGLGLRLSPKGPQQDESAEGSTTPTTAQSGVFGSFTKGIVDSSKNAVKAVQVKARHMVSQNKRRYQEGGFDLDMTYITENIIAMGFPAGDLSGFYRNHMEEVIRFFEMHHKGKYKVYNLCSERLYDASLFEGKVACFPFDDHNCPPIQLVISFCHSAYSWLKEDIENVVVVHCKAGKARTGLMISSLLLYLKFFPTAEESIEYYNQKRCVDGKGLILPSQIRYVGKEIQKLLLISTVGEPPRRCMLRGFRLHRCPYWIRPSITVSNHNG

SEQ ID NO: 120181 - protein, 347 aa, Oryza sativa
  unsure (1)..(347): unsure at all Xaa locations
  Clone ID: PAT_MRT4530_23326C.1.pep
LKFFPTAEESIEYYXQKRCVDGKGLILPSQIRYVKYFERILTYFNGENQPPRRCMLRGFRLHRCPYWIRPSITVSNHNGVLFTTKKHPRTKELMPEDFWFSAPKKGIMVFALPGEPGLTEVAGDFKIQFHDRQGDFYCWLNTTMMENRVTLNPTDLDDFDKRKLPSPGFQVEVVLVDYDGSQPPKPKPAAASTDQKSEADSSTGTVAKGNNASSAEVSNKESARNDKDDVFSDSEAEDGSSKGRREKVSRNVEGTTNAAKASETSSVQKEASAAASRIEKVSITSEQGSARTPDAAPLKSGVSSKSSSTTAPPPPPAAADSSMSEFKAIAADASVFSFGDEDDYESE

SEQ ID NO: 120182 - protein, 397 aa, Oryza sativa
  Clone ID: PAT_MRT4530_23327C.1.pep
MSPSATSPPNRPHRKRRAGAGGGGADDGSTRRRGRSAVLLGPTHFPAVRSFGLRLALVVAPAPRHRRKQRPLHYACRPTSLPCRRRRRLRSIISLLHLPILRPFYLRYILAAAASGPCRCRRKESLVGMGNYISRVLRKSSSDRGKAPPADDTAKQDLCEVFTPLTNEEESEVNNILYGSDQSKKIIVMHGPSNIDITKEKIWCLRTCNWLNDEVINLYLELLKERAQREPKRFLKCHFFNTFFYKKLACGKTGYDYQSVRRWTTLNRLGYGLVECEKIFIPIHRNVHWCLAIINMKDKTFQYLDSFGGMDHAVLRILARYIRDELNDKSNIQVDTSSWLKISSDSCPLQQNGWDCGMFMLKFIDFHSRGIGLCFTQEHMDYFRKRTAKEILRLRAD

SEQ ID NO: 120183 - protein, 75 aa, Oryza sativa
  Clone ID: PAT_MRT4530_23328C.1.pep
EIYAYGMEALFKKGPVALRAGPPRAQSTKKGPAAPQRFPPQKVTFEQRKARFVEKLNALPPSPGADDDAQEKGGE

SEQ ID NO: 120184 - protein, 64 aa, Oryza sativa
  Clone ID: PAT_MRT4530_23329C.1.pep
LPPDGICGQVSSPPSRSLCHVPSRFVWLLGPHLMSVSCTLGHEGGPVLVRSEVCPGVPGSLFCM

SEQ ID NO: 120185 - protein, 330 aa, Oryza sativa
  unsure (1)..(330): unsure at all Xaa locations
  Clone ID: PAT_MRT4530_2332C.1.pep
MPVVMASFFPIXRGTKKLNYYRSRFYWLSNGQKQKYCLARWDILCRSKDHGXLGIHDLELKNIALFSKWLYRLLTMDGVWQQLIHNKYLGSQPLSQVQWKTRNXMFFASLIKVKKDXFFRFESFTIKDGSQIRFWKDKWFGDATLQEQYPSLTIFLDINXSTILEVFQSGAXNLFMXRDSIGSELVAWNNLLPRIANFELSQAQHEFLWNLTHSGKFTVKTHYLAVVHSDVQXYKLTPXKLKVPLKVKIFVWYLHRGVMLTKDNLPKRNWQSNQKCXFCHNMETIKHTCFECHFANLVWSITYVASRITAPQMLCHRGWEVESACQRAFS

SEQ ID NO: 120186 - protein, 50 aa, Oryza sativa
  Clone ID: PAT_MRT4530_23330C.1.pep
MKLYLNLSFSTFVICQSSNFLFDGCWLYIYMSHISIMFLSLFKDMEMTFG

SEQ ID NO: 120187 - protein, 72 aa, Oryza sativa
  unsure (1)..(72): unsure at all Xaa locations
  Clone ID: PAT_MRT4530_23331C.1.pep
MXCNNITGITQEYNSFGISALCDYTIHLSHAIFKVVLHLAMGTQCVSIVVYKFTFYFTCISRTNLHGHLSPV

SEQ ID NO: 120188 - protein, 57 aa, Oryza sativa
  Clone ID: PAT_MRT4530_23332C.1.pep
MMPFPFVTLALAHGHHPPNSISRATSLAGSGRRQERWHYRWGRGIGEFGQKAKMNQQ

SEQ ID NO: 120189 - protein, 1023 aa, Oryza sativa
  Clone ID: PAT_MRT4530_23333C.1.pep
MLRAAAATTAGFLPPRLAAETAPAARVVAAAGAEVRSSPLLRALGVPRGGAGIGSATPGRRMYFASGSDSSGSAADSDSEASSAAGAGEEESEGNRSSSAVAPAIIRPEDCHTVIALPLPHQPLFPGFFMAMSVKDPKLLKALVENHKRSFPYAGAFLVKNEEDTDSNTVTRSDPKKSIHGLKGKELLKHLHEIGTLAKITSIQGDQVLLLGHCRLRITEMVEEDPLTVKVDHLKHMVDFNYQRLADFGAAISVTNKLLCQGVLEELDVSKRLMLTLELVKRELEITKLQQSIAKAIEEKVTGEQRRYLLNEQLKAIKKYLGFPILLVTVATGLTAVGNGKGRLIRHYLFFLVTLMHCGMQELGLETDDKTALSEKFRKRIESRKEKCPSHILQVIEEELTKLQLLEASSSEFSVTSNYLDWLTVLPWGDYSDENFDVLRAQRILDEDHYGLTDVKERILEFIAVGKLRGSSQGKIICLCGPPGVGKTSIGRSVARALNRKFYRFSVGGLSDIAEIKGHRRTYVGAMPGKMVQCLKSVGTSNPLVLIDEIDKLGRGYSGDPASALLELLDPEQNANFLDHYLDVPIDLSKVLFVCTANVIEMIPGPLLDRMEIITIAGYITDEKMHIARDYLEKNTREACGIMPEQVEVTDSALLALIENYCREAGVRNLQKQIEKVYRKIALQLVRQGVSNEPAREITLVEPSEQPTGVSIATEVENKSQRDSLAEDVSVHVIPTDFSCEKINVVSLTTKSEVDHYEHPKGVSKETSADDKATPTNTSGKMEANEHTEEVMEALVDEALVDKTVEKVVVDASNLDNFVGKAVFQPERIYDQTPVGVVMGLAWNAMGGSTLYIETAKVEDGEKKGALVVTGQLGDVMKESAQIAHTICRSILHEKEPNNTFFTKSKLHLHVPAGATPKDGPSAGCTMVTSMLSLAMGKLVKKDLAMTGEVTLTGRILPIGGVKEKTIAARRSGIKTIIFPAANRRDFDELAPNVKEGLEVHFVDKYSEIYDLAFPSDSQALAS

SEQ ID NO: 120190 - protein, 285 aa, Oryza sativa
  Clone ID: PAT_MRT4530_23334C.1.pep
MNAFLELEPFSTPLFEIPDDADFEYTSMLAADDFLLMDGDFLADQPPVSVEVVAGGGDASGKRSFHADDGEAMGVVSRSSKRRKKAPRNSSSLSNCDGSGGEGSEPTAERPGGRRVWVRERSTEWWDRMRDPVACPEADFRRAFRMPRAVFDKLCDDLAAAVTKEDTTLRTAIPVPQRVTVCIWRLATGDPLREVSRRFGLGISTCHNIIVQVCAAITTVLLTRVVRWPDSHAASASMFEALSGIPGVVGTVYTKHFPLVEKPFVVPVGNPPLVPVVQPRLRIRD

SEQ ID NO: 120191 - protein, 102 aa, Oryza sativa
  Clone ID: PAT_MRT4530_23335C.1.pep
MAQQRWWRIIAESSKKKGWGEGRPLVVHRHSGSRQYGEAESERMIFSVTAKKLISYDSSTSDGKMWKHYDAFAQGLITLPLCIPGTAFYKCMQVYAYLVEAP

SEQ ID NO: 120192 - protein, 468 aa, Oryza sativa
  Clone ID: PAT_MRT4530_23336C.1.pep
MSSSFLGPFTDFDYSSVLAAGDFFAGHHPDQPPSPAEVVVAVGGGDASGKRSFQADDDDAMGVVSRLSKRTRKAPSSSSSPSHSDGGGGGGGEGNEPAAERGGGRRVWVRERSTEWWDRMRDPAACPEAEFRRAFRMPRAVFDKLCDDLAAAVAKEDTTLRAAIPVPQRVAVCLWRLATGDPLREVSRRFGLGISTCHSIILQVCAAITAVLTRVVRWPDSHAAAASRFQALSGIPGVVGAVHTEHIPIVAPRENAGEYYDRRLTDRNNKATYSVAMQAVVDADGAFTDVCIGHPGSLSDAAVLTKSALYARCEAGLLLGDDPQWLVGGASYPLTSWMLVPYAQPNLTWAQERLNARVADARAAAVGAFRRLRARWRCLRRRAEVKLPELPNMLGACCVLHNLCERSGGELDADLLHDELVDDGVVAGGGNTVRSAAAEQVRDRIAHGLLHAGNTASSSYQDYHYGRL

SEQ ID NO: 120193 - protein, 219 aa, Oryza sativa
  unsure (1)..(219): unsure at all Xaa locations
  Clone ID: PAT_MRT4530_23337C.1.pep
RAPSRRGEDADAGRRRPWKGRIRPPRRSTAATRASAPPASARPSPPRVAAEXRHAIPAEIRAGSRAGPVLRRRLRPPRRRRLVLDLHLEQHLLPRGGRERGRNRRRLLPAGIPQLQATHQNGRRRFGLGSPLPPVLPSRQLLLLSGGALLIRPRNPLRPPHQPPVLEADQNLGGRLHRVVHRKRNPQHQPPARTHAAGRRRWETAPPLRRERERKEERE

SEQ ID NO: 120194 - protein, 278 aa, Oryza sativa
  Clone ID: PAT_MRT4530_23338C.1.pep
MPVTLFNRGSLVPVFVATETIVELVRPTKDGFSTSVRIVVPREHAGEYYDHRLTDRNNKATYSVAMQAVVDDEGAFTDVCIGHPGSLSDAAVLAKSALYARCEAGLLLGHDKLGWQQPLWLVGGASYPLTSWMLVPYTQPNQTWAQDRLNAHVADARAAAVGAFRRLRARWQCLRRAEVKLPELANMLAVCCVLHNLCERIGEELDANLLHDELEVVDDGVVAGGGNTVRSAAAEEVRDHRIAHVRSSSHLATSDLTAIDISAIDVVLEMALRMGYIA

SEQ ID NO: 120195 - protein, 61 aa, Oryza sativa
  Clone ID: PAT_MRT4530_23339C.1.pep
YYCPISEIRRFLVCNITDTGRCKQMRQNMKPGMPRPSFYALGFFIPSYIFIYSLKSRMVRH

SEQ ID NO: 120196 - protein, 133 aa, Oryza sativa
  Clone ID: PAT_MRT4530_2333C.1.pep
DREDITCSDITMSTLCINKIKHQLQMNLAADLEGISRPMSTCWKAYGVYFQMVLVPRQNSYRAAGKLQNKPRISPLGEVNRISARLITRGDVVLRLRGSVVYSFRSRIELCRDSAQIDCLSIPIGRSGPNIPH

SEQ ID NO: 120197 - protein, 64 aa, Oryza sativa
  Clone ID: PAT_MRT4530_23340C.1.pep
IIMTMEQSVKLYVWAFDKTWMNEKESDFLATDCLDSLPPNPNLFRNIWLEPEAYLGCSSEVTNA

SEQ ID NO: 120198 - protein, 70 aa, Oryza sativa
  Clone ID: PAT_MRT4530_23341C.1.pep
HQQGLNMWLFSRVFEPGLKTVIFSPEFSLPVQYPRGNKGGCKPGDEPFSSCIVHFQHSFARSKVHHIVTK

SEQ ID NO: 120199 - protein, 66 aa, Oryza sativa
  unsure (1)..(66): unsure at all Xaa locations
  Clone ID: PAT_MRT4530_23342C.1.pep
CIWLEQLKTXSRCSTPVCIDCQFGNAALLTYKYHFLSLLLFSLYHKFSPISAWKISYFHQSKIVLN

SEQ ID NO: 120200 - protein, 50 aa, Oryza sativa
  Clone ID: PAT_MRT4530_23343C.1.pep
MKGGLRTYRGTTNPIHHMFGGLNGSMWQVVVVPRMKKAPLKTDLRPYGPH

SEQ ID NO: 120201 - protein, 49 aa, Oryza sativa
  Clone ID: PAT_MRT4530_23344C.1.pep
FVLQVEMILQAVVYEKEHGKVLDEFFLSTAGKFQTEIGKNWAGEVNARR

SEQ ID NO: 120202 - protein, 151 aa, Oryza sativa
  Clone ID: PAT_MRT4530_23345C.1.pep
GGGSAASDEVEVAAVAATQKLATAPVSDVRGEDGGGGGRRRALSSSPLEEHSRQGRSVDATSERLEHLLDAAGGEGDAFLEVEHLDHAVLYQERVAARPDVVPSRLVGEVELDAQGVGELPVAVREEEHPHHGGEEGEPLEEGGAESDLGR

SEQ ID NO: 120203 - protein, 813 aa, Oryza sativa
  Clone ID: PAT_MRT4530_23346C.1.pep
MDEPDAPAAPAPVEGEPKGKKSKSNKGNKHKQQDSLSAVSDASAVVTHTDLPDESGNGCTSGEGATTSTAPALEAEKVDKREAPAASASVEGTQKGKKSKDKKRKKHKQQGSPSAVSDASAVVTDTDLANESGNGCTHGEGVLRDADVASSRSGNDLTPDVDRTLGKSKASKRQCDATTSTAAAPEAEEMDEREAPAASASVEGTRKGTRKGTKSKDKKRKKHKQQESPSAVSDASAVVTDTDLSNEPGNGCTSGEGALRADDVVASSGHDPTPEMDRTPGKSKTLKQRRGGAISTLAVPEGDKEVDEQEAPGASASVEGAAPKGKKSKSKKQKKQSPSAVSDASAVVMDTDLANESGGGCRGGEGALQDADVVAIPRDGQEPKCPEVNSAEDLVAGKKGNKDNNSQLCSSLHESSIERKRRKNRDRRRRKKENANRRSNVQNPSLLPGAGEVVSVATADMNNTPGSKCKNPSQPVADEVGLVMTADGNISLGSECKKSNKKMKRNQTSVPEAPSVQRMDLGETASVGVMDGECEVQAVLSDCQSARSDRSNIAQAHKENFRHIYSPRGSLIRFRRKKLLILDINGLLADINQDHHNAHLSHAKSKCGFGCKYHYEEGYETVPIILLGPNAHTIICQDMSKCTGTGFKTLENKNKPLVLKELKKLWNKEDPDLPWEQEEFSPSNTLLVDDSPYKALGNPPHTAIFPHPYSYLNKKDDSLVLMPIFHEQDQVEIFGCIWRTLLLQMMFSAMYRSTHSLFGLGWMEQEPIIEDRKVAESRGACSRCSVSVCVVTAAVLAAAHPAILEKKLPPDSA

SEQ ID NO: 120204 - protein, 119 aa, Oryza sativa
  Clone ID: PAT_MRT4530_23347C.1.pep
GGVGREDVAVARRSPPAPAVPPRRPRRSRLPVDARASLSPATMRMPPLCHRARLPTPPRLAAAHPFSRVSATASPRPHAAIAFRRRQLRELPLISPPARAPHAPPPGPPPPPARILRPC

SEQ ID NO: 120205 - protein, 140 aa, Oryza sativa
  unsure (1)..(140): unsure at all Xaa locations
  Clone ID: PAT_MRT4530_23348C.1.pep
CLRRSELDQLDLGCFAVSTYTTTTAKIIXSSYSGQRPACENRRNEQKKKNAGPHREPPAPLHAVGAAAGLLPPSSGQIWEGAGEGSRRCRPARAVVAAAGLLPPSSGQIWEGAGEGSRRRRPARAIVAAAGIPTPSSGQI

SEQ ID NO: 120206 - protein, 53 aa, Oryza sativa
  Clone ID: PAT_MRT4530_23349C.1.pep
ERSVRCLTVRVWHRRQNPSDLVLHVPLIPALSAPCELVPPVTPSSHTQHLNAL

SEQ ID NO: 120207 - protein, 158 aa, Oryza sativa
  Clone ID: PAT_MRT4530_2334C.1.pep
FYLFLLYFFYFLFFLLHFLVWGGQRNTPPFKRGDPTPSLKRDPPRKENPLPKNLGRTGGKTPGKGKFRERNPPPPPGEGQRGPPKKKGPQGKKGLKKGPPPGGCYKTKGEGGKKNKGAAPKRGKVRSSLGGGGGPPFGERGKAHPPKRPGGLWGKKHS

SEQ ID NO: 120208 - protein, 77 aa, Oryza sativa
  Clone ID: PAT_MRT4530_23350C.1.pep
ALYLFYPDSIHGLFDLLIDIVYAVLLMFPLGILALIECTIPEACSCTLQKPTWIAHFVQLFPWTDRMDEGCTSHLMN

SEQ ID NO: 120209 - protein, 132 aa, Oryza sativa
  unsure (1)..(132): unsure at all Xaa locations
  Clone ID: PAT_MRT4530_23351C.1.pep
KFKNCSKGSVPFAGRGPGNHKTKTPFFQGWTREPFVPEVXANCXGLASPAXAXEQFRGECCRXXXXVDXSCCRCEAISXILGWHLQEXGAPDXGHPMSEXFRGCRRGDLERXAASLPXXCNVXIPNGGGGVC

SEQ ID NO: 120210 - protein, 100 aa, Oryza sativa
  Clone ID: PAT_MRT4530_23352C.1.pep
QSGRAAASSSARTSTAAGARCDALNHMLRIIYRESRQPAGQLGQHTHAPRCSQRLAGEGTSSAAAASTPGVLQRGTSTKWRSQVSATGYQGTGYYLSVCS

SEQ ID NO: 120211 - protein, 102 aa, Oryza sativa
  Clone ID: PAT_MRT4530_23353C.1.pep
MAAPHNGGGGRRRVSGRRGGRGGGCGRCRRSALMLFFYFVSNWVVPELIMKDLQEPKKAEESEEAASSPAATMSVAGDGQPEAKIRLKVKKTKKNKKAAMKV

SEQ ID NO: 120212 - protein, 90 aa, Oryza sativa
  Clone ID: PAT_MRT4530_23354C.1.pep
MQKTCLLPWKPSSLSCCPLAAEYYVYQNLELRGSLASSTIVKSSSQWTSTVIIGSRSSHHSSTTDHPMARKVGRKVHEVSNDLDSGMALA

SEQ ID NO: 120213 - protein, 109 aa, Oryza sativa
  Clone ID: PAT_MRT4530_23355C.1.pep
MAGVVGLLAMAVVREAGAKLGTAIGEQVMMMCGFKEDLEDMKDMLESMAAVLKDAERRSVTEESVLLWLKRLKNAAYDISDMLDGFQDKSKSATLLALVVSTYKGTYTS

SEQ ID NO: 120214 - protein, 164 aa, Oryza sativa
  Clone ID: PAT_MRT4530_23356C.1.pep
LASCAIDDEVSSMEAAAALTTTTGAQYSCCFGLAHGGAAQRRRRTAAGFGAARWSGRRLRALPPQVSEFLSPEQLVPGSPADTGDVSSLIPISALMLFFYFVSNWVVPELIMKDLQEPKKAEESEEAASSPAATMSVAGDGQPEAKIRLKVKKTKKNKKAAMKV

SEQ ID NO: 120215 - protein, 226 aa, Oryza sativa
  Clone ID: PAT_MRT4530_23357C.1.pep
MASLSLSLHHPCNSRTGFLGKRQGICLHVIPAGRVGFVRKTVECKESRIGKKPIEVPSNVTLTLEEQFIKAKGPLGELSLNYPGEVKVVKEESGKLRVSKTVETKRANQMHGLFRTLTDNIIVGVSKGFDKKLQLVGVGYRAAVEGKDLVMNLGFSHPVRMAVPEGLKVKVEENTRIIVSGYDKSEIGQFAASIKKWRPPEPYKGKGIRYADEIVRRKEGKAGKKK

SEQ ID NO: 120216 - protein, 142 aa, Oryza sativa
  Clone ID: PAT_MRT4530_23358C.1.pep
MEAAAALTTTTGAQYSCCFGLAHGGAAQRRRRTAAGFGAARWSGRRLRALPPQHFLSPTIDKNQDLIVTVCALMLFFYFVSNWVVPELIMKDLQEPKKAEESEEAASSPAATMSVAGDGQPEAKIRLKVKKTKKNKKAAMKV

SEQ ID NO: 120217 - protein, 94 aa, Oryza sativa
  Clone ID: PAT_MRT4530_23359C.1.pep
MQRIWRRKGERRRGEIEIKEEDDDEEAARLDSAKNREEGREKFYKVSNRHLPIENWNITEGGLKSEINYKAIYNATCGAQFTITEYVLPADLGT

SEQ ID NO: 120218 - protein, 156 aa, Oryza sativa
  unsure (1)..(156): unsure at all Xaa locations
  Clone ID: PAT_MRT4530_2335C.1.pep
SEPYNGTVHSCAVRISARYHDEDTTSSDITMTILCINQPKHQLQTDLAADLEGISGPMSTCWKAYGLXMVLVPRQNSYRDAGNLXNKPRISLLGEVNRISARLITRGDVVLRLRGSIACSFRSRIELCRDSAQFDCLSIPIEKSRPNIPHQLPPPS

SEQ ID NO: 120219 - protein, 97 aa, Oryza sativa
  Clone ID: PAT_MRT4530_23360C.1.pep
KLFFFVKQKKDGLFCKCHKLCSSEKVCACIKANRACTEYCSCHKKCSNVRSSSTPKLPTTTNTCCVSKCCKVDSPPDFKCQQCGNMCHSSTCTMPKL

SEQ ID NO: 120220 - protein, 124 aa, Oryza sativa
  Clone ID: PAT_MRT4530_23361C.1.pep
RWSGRRLRALPPQVSEFLSPEQLVPGSPADTGDVSSLIPIRQSRTWVGLGLTSALMLFFYFVSNWVVPELIMKDLQEPKKAEESEEAASSPAATMSVAGDGQPEAKIRLKVKKTKKNKKAAMKV

SEQ ID NO: 120221 - protein, 116 aa, Oryza sativa
  unsure (1)..(116): unsure at all Xaa locations
  Clone ID: PAT_MRT4530_23362C.1.pep
PNTHDLVSYGGTNYNCYGGAVLVDFDVTDGANDRLSFESAYFPDTAVAYERHCARHYPLSSDEEDGCADIDEGCSFYLPDTDDDDGAMFCASRVVHHDPADDXEAHLGSWTDWFWS

SEQ ID NO: 120222 - protein, 64 aa, Oryza sativa
  Clone ID: PAT_MRT4530_23363C.1.pep
NTTTWSLFLFSKGEESLLLEEKGEGLLAQSNIQLAQFPGFEPRCAHKHLLNCVTPSGRSSDYSS

SEQ ID NO: 120223 - protein, 1454 aa, Oryza sativa
  Clone ID: PAT_MRT4530_23364C.1.pep
RSPPSRGGAAANGGGLSYSTLFNLEPLLNFKVPLPEDLDRYRRSSPNGSMSSQGQGSLSDQYNGINDASHGLHRKRKRNLDGASDDDEVDAYSNQITEEHYRTMLSEHVQKYRRSKFKEDVFSSDPPQVIVPQKHKNGSARVTKYRSDTRNVAMLGGVEATAEYNGTKSTNAYGGFNKVVASLDSSYLDMGDNVSYKIPEGYDKLALSLNLPVFSDIRVEETFLNGTLDLRTLAAMLSTDQKFETTNRGGLAEPQPQYESLQERVKVQKFSLQVTEDPFAIPEGAAGRIRRFIISESGSLHVHYVKVLEKGDTYEIIERSLPKKQIIRKDPSEIAREESEKTIKLWHAIAVKGIPRHHRNFMALLKKRQVDAKRFSENCQREVKFKVSRSLKLMRSAAIRTRRLARDMLIFWKRVDKEQYELRKREEKEAAEALKREEELREAKRQQQRLNFLLSQTELYSHFMQNKAGESAPSDEASVPEEDEEDPEEAELKREALRAAQHAVSQQKRMTNAFDSETGRLRQSSDSGIPTDDLASMEPNKIDLLHPSTMPEKSSVQTPELFKGALKEYQLKGLQWLVNCYEQGLNGILADEMGLGKTVQAMAFLAHLAEDKNIWGPFLVVAPASVVNNWAEEILVNEEKLLRRVKWQYMVLDEAQAIKSSSSQRWKTLLSFNCRNRLLLTGTPIQNNMAELWALLHFIMPTLFDSHEQFNEWFSKGIEGHAEHGGALNEHQLSRLHAILKPFMLRRVKIDVIAEMTKKKEEIVPCRLSSRQQVFYQAIKNKISLNELLDGSRGNLNDKKLLSLMNIVMQLRKVCNHPELFERNEGSSYFYFADIPNSLLSPAFGELQDVHYAGKRNPIMFEIPKLVYKGIVSNMEMPVRGCGFLYGSFNRMFNIFSPSYIHQSAFPEAISPNNTVLLSGAFGFTRLINLSPVEASFLATCSLFNRLAFSAVRWNKKYTDELVDVFLDSESTDLESTHNDLTTVRAVVRLLLSPTKAESSFLRTKIETGPSDSPYEALVLSHHERLVSNIRLLRSTYAFIPPARAPPINVWCADRNFAYKLTDEMHDPLAKKLVLGFARTSEFNGPREPTSPHSLIEELHTDLPFPEPMLQLPYRIFGSSPPMSNFDPAKMLTDSGKLQTLDILLRRLRAENHRVLLFAQMTKMLDILEDYMNFRKFKYFRLDGSSAISDRRDMVRDFQNRNDIFVFLLSTRAGGLGINLTAADTVIFYEIDWNPTQDQQAMDRTHRLGQTKEVTVYRLICKDTIEEKILQRAKQKNAVQELVMKGKHVQDDHLMRQEDVVSLLIDDTQISHKLKEISMQAKDRLKKRRTKGIKVDKEGDLMLEDLDDQTSGAAEHDNTSSKKKKSSQKKLPKLQDNGSVDKNAEAEGGEVEDEDSIAAPRPKRSKRLMKNLNEDKEPEQEPTTDGDNPAEAAENNISPDDNDTEEAKDRTPSA

SEQ ID NO: 120224 - protein, 56 aa, Oryza sativa
  Clone ID: PAT_MRT4530_23365C.1.pep
CTRHGCMFRTFNASGCLDIISFFLTKVLDVFLLGTLLSIVDALVFTYGHGSRCSMR

SEQ ID NO: 120225 - protein, 76 aa, Oryza sativa
  Clone ID: PAT_MRT4530_23366C.1.pep
MRNNAHFSKLAALVNNGHCRQVSHQTRGSSSKQTTTLLKLPHWASIATRTGQGENILAWSMKKGTGRPKKSIEPRL

SEQ ID NO: 120226 - protein, 201 aa, Oryza sativa
  Clone ID: PAT_MRT4530_23367C.1.pep
MAMGPPRLLRGLIPQLLSVDAWLPCTCSSRLQLLLSHFHCRLHLRWPSCADAFKLLLALLLVSAALAEVRYIASSSMAPTLRPADRAVAERITYFFRRPSIGDIVFFKVPTTLQNYGVNKDVVFIKRILATPGDFIEVRQGQLIINGVARKEHYTASHASYTMEAMRLPEGHVFVMGDNRNNSCDSRAWGPLPISNIIGRT

SEQ ID NO: 120227 - protein, 320 aa, Oryza sativa
  Clone ID: PAT_MRT4530_23368C.1.pep
MRALALAVVAMAVVAVRGEQCGSQAGGALCPNCLCCSQYGWCGSTSDYCGAGCQSQCSGGCGGGPTPPSSGGGSGVASIISPSLFDQMLLHRNDQACAAKGFYTYDAFVAAANAYPDFATTGDADTCKREVAAFLAQTSHETTGGWPTAPDGPYSWGYCFKEENNGNAPTYCEPKPEWPCAAAKKYYGRGPIQITYNYNYGPAGQAIGSDLLNNPDLVASDATVSFKTAFWFWMTPQSPKPSCHAVITGQWTPSADDQPAGRVPGYGEITNIINGGVECGHGADDKVADRIGFYKRYCAMLGVRYGDNLDCYNQRPYPPS

SEQ ID NO: 120228 - protein, 177 aa, Oryza sativa
  Clone ID: PAT_MRT4530_23369C.1.pep
MAMGPPRLLRGLIPQLLSVDAWLPCTCSSRLQLLLSHFHCRLHLRWPSCADAFKLLLALLLVSAALAEVRYIASSSMAPTLRPADRAVAERNYGVNKDVVFIKRILATPGDFIEVRQGQLIINGVARKEHYTASHASYTMEAMDPVLKPCMILQRLPEGHVFVMGDNRNNSCDSRAW

SEQ ID NO: 120229 - protein, 140 aa, Oryza sativa
  Clone ID: PAT_MRT4530_2336C.1.pep
TERTGACERDMENAAGGRRAQQTQVTEERQKKMKHKAAQEIADGSSTSDTVHGAADGVCFPCGTSTATAHLLQPKHSQPQHEFWCSVVSSVFICCELSSPTKLKLSDAGVVQANWPPPHFTRFSNVSIVFHSCELGRWSP

SEQ ID NO: 120230 - protein, 215 aa, Oryza sativa
  Clone ID: PAT_MRT4530_23370C.1.pep
MVFYYKARPDAGDYTIYMGADKNENEELIKYGLPEDVWFHVDKVSSAHVYLRLKKGESIDSICDGLLEDCAQLVKAHSIQGNKMNNVEVVYTPWSNLKKSPSMDVGQVGFHNTRMVRVVIVEKRVNEIINRLNKTRVERRPDLKAEKDASNAAEKAERKMQLKEKRRREEMERLEKERRAEIRSYKGLMVAEKMTSNRQIASAGNSMQEMEDDFV

SEQ ID NO: 120231 - protein, 70 aa, Oryza sativa
  Clone ID: PAT_MRT4530_23371C.1.pep
MEHGSPEDVTRHACHLGDVTSREADVVYLHDYDCEISLTGPNSFIGRCMMVHHHTYDLRKVGHSLIMNSL

SEQ ID NO: 120232 - protein, 65 aa, Oryza sativa
  Clone ID: PAT_MRT4530_23372C.1.pep
RSFGFATVKSIQMLAEIYAKLNIQRDYIGGTDEKLRNVGGKHCDPFMILTHINHKGKNKRIIVEN

SEQ ID NO: 120233 - protein, 672 aa, Oryza sativa
  unsure (1)..(672): unsure at all Xaa locations
  Clone ID: PAT_MRT4530_23373C.1.pep
IKKAKGGLTLFIVKSLVLRKKDERSSSEFVGDDETQSLMYTLFKLEEHFPHDKSQCNSELHHSISLPKDLHGAPPGSFTHQIAETIGKISSVYKMAFFWQSLVLELKKLWSDGQPVPRMPLDAAPDLNCCLLHQEIQVINCCIARKKRRKAAKESLDSLLKRASIDNSNHLYSNGDSPDSEMYIKGSAGDNVLRLGADHPSENLTLLETGELVYSPTLQEGPIMTAELIKETEELVLRTGXAANPGCVLEDFIRWHSPPDXGNLWKELWGAAKPIPAVEQAPIYDEDLAVESIFDALEVIEPSKLFEQLLAVIKAISWLITLQVTSYLYQDKCNALPHAICGYQLSVCFVAAELVLPAGSNLSKLFYDCKDYILSIYQDDISKEKLDEICKVYETMEAIVTHPEETLQIMEAPDEKSPLESKNRFKIKLNFIGKDRHPLWKRAPKEEKKSSPKDEKRSSEERSTKIFSNLLDKKVSIFSKKNAKPTTEVPPPPPPSSAPGPFDDSTLRKLLNSSTIFFFASRGILALGPCRGLAEVEPVIRYVKKWPGWWLCWWLGMRWDGRPGAGGGCWHWRDTFVEIPRAMALLDRLPVVLFVMLSTAGPHFYLGIELGSHGNPAMAPPRHATLRRSYALRGGIEIVGVCDIRCCSKDFTFKPCRLATAAILLPSGRRSS

SEQ ID NO: 120234 - protein, 96 aa, Oryza sativa
  Clone ID: PAT_MRT4530_23374C.1.pep
MAKIAFSSNNERRGKEWVQGSVGMAERGMEWRGEEVHREILVGEARPEKRTAARREGKCGVGGVAAFVGLESFLAAVTTRDPSAGNNTFGALPTPN

SEQ ID NO: 120235 - protein, 149 aa, Oryza sativa
  Clone ID: PAT_MRT4530_23375C.1.pep
NLHGFFFHFISDWLMNWMEYLQLELIPDILWHHSTNCTKETSTICIYKIVHSLSSNGPGADEGGGGGGTSVVGFAFFLENMETFLSRRFEKIFVLLSSDDLFSSFGDDFFSSFGARFHRGWRSLPIKLSLILNRFLLSRGDFSSGASII

SEQ ID NO: 120236 - protein, 198 aa, Oryza sativa
  unsure (1)..(198): unsure at all Xaa locations
  Clone ID: PAT_MRT4530_23376C.1.pep
ETIGKISSVYKMAFFWQSLVLELKKLWSDGQPVPRMPLDAAPDLNCCLLHQEIQVINCCIARKKRRKAAKESLDSLLKRASIDNSNHLYSNGDSPDSEMYIKGSAGDNVLRLGADHPSENLTLLETGELVYSPTLQEGPIMTAELIKETEELVLRTGSVGAGCSQLLSDMQAFKAANPXCVLEDFIRWHSPPDWSEDC

SEQ ID NO: 120237 - protein, 217 aa, Oryza sativa
  unsure (1)..(217): unsure at all Xaa locations
  Clone ID: PAT_MRT4530_23377C.1.pep
NYRGFWLNLFNPAEIFHDIVLDYPLDAVTRPNVAHSCECFAMLXGHINKSLFLYVNNIGRYVEYMYRCTSRWYGSRGICFTYGTGFGIKGLVAAGXTFRTSSAIRKATDSMLXGGWGESYLSHFNARXNSLFGLHTHAVNTSWXILTLIDAAGQVSCFLLVIYLQDPMLLHRAAKDGEFPQQVLLPIWVLGMGWSKSIHKNSNLLLPLSTFDSHISS

SEQ ID NO: 120238 - protein, 1125 aa, Oryza sativa
  unsure (1)..(1125): unsure at all Xaa locations
  Clone ID: PAT_MRT4530_23378C.1.pep
MTKPPSSKAEVELANVIPIIFDDFEGEDRKSMEEYIKEITQEALMRACTRTRQGVIIKPKPRPKPTYDVVSNEEVTQFIQQHIASTIDSSMITLNNKLNASIQNHVEGFLRTRFGPLVADFMFKDKASTSASQATIDQISSITNGAKTQQHGEGWAAHTASLTGPDGRSDRVLPRRSDRNSGRSDRATGRRSNRVLGRTFDSPVSTATTCPQILLHVPNAYNDVSRGYPPDTRQGQYNYIAPQPQPIRPPNPPPNQHRPDNMEELISGIIRDKFRIEARNRAKVYQKPYPDYYDNIPYPRGYRVPEFTKFNGEDSRTTWEHVERLDVGQQFLDVSQLVQKALAQESRVKDSKKFVRPYEKKPNVNSIDYHEASDSEGEGDHDICEVKPGHPCIVAEGRRNTVAAVDSTSPPSRSRRRPSSIAVRHHVQSAINEGRLKFTDGSKMKLDHDPFPVNIINFDDKKVLIRPEQAESTKGKGMVIGEPRPKMMVPKNPENRANGEKREGKRVKVKTRTSEVITIKVGSHDVPIPSGDEVGESSSNKSEAGTSSSKSADLTRPSGRSNRSHTGGLXSPIQQRMLVDGGAAVNLMPYSLFKKXGRGDDELKKTNMILNGFNGEPTEAEGIFSAELTVGNKTXPTAFFIVDVQXVKVIELLMEYVDWFAWEYHEMPGLSRDLVEHRLPIKPSFRPYKQLPRRFNPLLYDRVKEEIDRLLKAGFIRPCRYAEWVSSIVPVDKKGSGKIRVCINFRDLNKASPKDEYPMPIADMMMNDASGHKNAGATYQRAMNLIFHDLLGIILEIYINDIVVKSDGMEGHIADLRLAFERMRRYGLKMNPHKCALGVSVGRFLGFMVHERGVEIDPKKIEKIRYFKAPTCKNEVQKLLGKGAKQQEVFEELKKYLSTPLVVRAPKAGKPFRLYIASEDKVIGAVLTQAEDGKGYIITYLSQRLLDAETRHIARHDNSRANDLAQQASGYNVKKGLFLVLEEPVLDFKSLCEIGKTSDQGRSDRHCTAGLTGHMPPETEEDWRIPLIRYMNDPTRKGHRFVLVATDYFTKWAKAVPLKNMTHTEANGQVESSNKTLLKLVKKKIEEHPKKWHEQNDLSSEDYKTLMGDNFDEIIDKRLKALEEI

SEQ ID NO: 120239 - protein, 229 aa, Oryza sativa
  unsure (1)..(229): unsure at all Xaa locations
  Clone ID: PAT_MRT4530_23379C.1.pep
MHQLPSPAPSSASSSPSTTTATTTSLVSRARTAIHSAAARVLTDIKADLRDADGSGALRAPSPRPSADRHPDSIAAVVGSPRDEAPDIISSPDGDTSNIEPDSTSSTKMAFPSVSVVKQLVAAIDNGKNFKSMNDMRSNGDQLLKEKGGLSLSVVKSLVRREKDERSSSEFVGDDETQSLMYTLFKLEEHFPHDKSQCNSELHHSISLPKDLHGAHLXSFTHXIAETIG

SEQ ID NO: 120240 - protein, 419 aa, Oryza sativa
  unsure (1)..(419): unsure at all Xaa locations
  Clone ID: PAT_MRT4530_2337C.1.pep
ALTRLPFSRLRFLAFAAAPPFVVRTTPAGRCAAGPGAPRGGAVVGREGVGVGGGXMAYSEPAARAVAEEVARWGGMRQTGVTLRYMMEFGARPTERNLLRSAQFLRRELPIRIARRALDLDSLPFGLSTKPAILKVRDWYLDSFRDLRCFPEVRNRDDELAFTEMIKMIRVRHNNVVPTMALGVRQLKKDLGGTKAFPPGIDEIHQFLDRFYMSRIGIRMLIGQHVALHEPDPEPGVIGLISKRLSPMLVAQHATEDARAICMREYGSAPDVNIYGDPDFTFPYVKLHLQLMMFELVKNSLRAVQERYMNSDKHAPPVRIIVADGAEDVTIKISDEGGGIPRSGLSRIFTYLYSTAENPPDLDGRNEGVTMAGYGYGIPISRLYARYFGGDLQIISMEGYGTDAYLHLSRLGDSEEPLH

SEQ ID NO: 120241 - protein, 1307 aa, Oryza sativa
  unsure (1)..(1307): unsure at all Xaa locations
  Clone ID: PAT_MRT4530_23380C.1.pep
MTEPPSSKAEVEPAIVIPITLNDFEGEDRKSMEEYIKELTQEALMRASTRTRQDATFEDKFDEFLRFKVGPLLADFVGKNKASTTASQAPIDQTNSRTDGVAHTAGPTGPDGRXTAGPTGYYPGGQTGTXASLIAPLDVDQTGPWXRTFDPPVSSAATNPQVPPHVPNAYNDVGRGYPPDTRQVQYNHIAPQTQPIRPPNPPPNQHRPDNMEEIIGGIIRDKFGIETRNLAKVYQKPYPDYYDNMPFPRNYRVPKFTKFSGEDGRTTWEHESRVKDNKKIVRPYEKKPNVNVIDYPEASDSEDEGDHDMYVAEWSWTNKNKPFVCSNLMPTPRKDRQSEVKYSFDVAKYDKIFDYLLQEKQIRLPKGHIIPSQEELKRRAYCKWHDSHSHSTNDCNVFRRQVQLAIDEGRLKFTDGSKMKLDHDPFPVNTINFNDKKVLIRPEQAESTKGKGVIIGEPRPKIIVPKNPEVCVCKENKSEASTSKAPRKTKVTLDMLLEKYEKQGSERARNKGKIQRSPPRERFGHSPRRSHSPPYHHSQDIPWGPYPMPPPGYPYPYYMPWGATPPMFNHMPPMQFNQGWGGPRRPIHERLSSPNNGRFYGKNRANEESASGWSDRWSTSGLTRLQRRFDRRFAKGDVRASSSSTRPNRGHYLPPGTEPKPRRMPKYLTATQRRRLQCLRAQEIREKKAEEQRDKRFNELRPPPVWRRKTIEKEEPVVVEKKEEQSIAKDESSPKEDMDINKVCMLPMEFCAMDEAEVAQFSLGPKDVVFEKPDESNRHMKPLYLKCHTDGKPVSRMLVDGGAAVNLMPYSLFKKLGREDDELKKTNMILNGFNGEPTEAKGIFSAELTVGNKTLPTAFFIVDVQEANLEWLQKRVQEYRSTKNDIGETIEDFDEVEKLGQGFTSADPLEEVDIVDGTKPRPTFVNKNMRADYKVNIIELLTEYVDCFAWEYHEMPGLSRELVEHRLPIKPGFRPYKQPPRRFNPLLYDRVKEEIDRLLKAGFIGPCRYAEWVSCIVLVEKKGSATAIVLLAWRYIKPSTRERAAAWEDQSSTIIVLFPAPSSSCYYRLLFATYIGKLCRLFFATVAHTPSRASVPTPSGYDYFRSLFFRERSSGSMPTLLLSIPGTKCSTAFLSKFFPMGKTNALRGRISSFQQTRDESIPEAWERLQEYVAACPHLGMDDWLILQNFYYGLTPMSHDHLDAAAGGAFFSKTVQGAVDLIEKMVSNMGWREERLQTRQRGMLLAAKLDLLMKRLDDHEKRPQGTLKALDTHATCEVCGNTGHSGNDCPETREEAMYMGNNNNGYHP

SEQ ID NO: 120242 - protein, 1034 aa, Oryza sativa
  Clone ID: PAT_MRT4530_23381C.1.pep
MVRTGTMFREEQRSSAVGIPCEKVTRVRILGGQLPSTVGIGTRLREELRSRRSRIPDDEVGYEMAQGDKTAVQPAACKRFDWRRASGRSDRHVLGGQTAGWRPVRPAIEVVGDSRITARLEVLRSCLSTCHKKLPTRFLATPLGKRSVHRQLDFDFAMTKPSSKTEVEPSHMIPVTLDDFEGEDRKAMEEYINELTREALMRATTRTRQGVIIKPGPRPKLAPDVDKAYTTANQHPIDLIGSKTDGAAFMAGPTGPDGRSDRDTAVGPTGQMAGQTGCYPTGQTGFQAGPTAQPDAGQTGPWAVAPLREKLDGQQFLDVSQLMQRALVQESWVKDKKFARPFDKKPNVNVVDYSDASDSEEEGKEVVIGEPRPKMMVPKKPEVGVWKENKGEASTSKAPRKTKVTFDMLLEKYEKQGEKREGKRVKIEERTSEVITIKIGSHDVPVPSGDGVGKSPSKKSEAGTSSSQSAGLTRPPGWSDRSHAVGLTGPSGRSDRQPDSGPTEASGRSDRVPAVGLTGASGRSDRWSATGLTGLQRQFDKRAAKGDVGAPSSSNKVNRGHYLPPGTEPNPRWMPKDLTATQKKRLQRLRAQELREKRAEEQRDKMFNELRPPPVWRPKSIEKAKPIDVEEKEEQSVDKDKSSPKEDIDINMVCMLPMEFCAMDEAEVAQFSLGPKDAVFEKPDESNRHMKPLYLKGHVDGKPVSRMLVDGGAAVNLMPYSLFKKLGRKDDELKKTNMILNGFNGEPTEARGIFSAELTVGNKTLPTAFFIVDVQDIIANFDNFAIRHIARCDNSRANDLAQQASGYNVKRGLFLILEEPVLDFKFLCEIGKVGDQRRSGRRCTAGLTGDQGRSDRLHAAGLTGVPEQSDRPCVAGLTGSRQDAGDTFQANGQAESSNKTLLKLVKKKIEEHPKRWHEVLSEALWAHRISKHGAPKVTPFELVYGQEAVLPVEVNLGSLRYIKQDDLSSEDYKTLMGGNLDEVIDKRFKALKEIEKEKKRVAKAYNKRVKAKLFPVGDLVWKTILPLGTRSKEF

SEQ ID NO: 120243 - protein, 1005 aa, Oryza sativa
  Clone ID: PAT_MRT4530_23382C.1.pep
MANFGLTATMELRWISASGNRLPGFILLLRTQWSRWRRKAAAKAAASCGWRRRKGRNLLVRVGKRLPAGFGTKEPKARVELDFAEPREVAALTDDGRGDGARRLERRPEVQSAIDEGRLKFTDGSKMKLDHDPFPVNTINFNDKKVLIWPEQAESTKGKGVIIGEPRPKMIVPKKPEVGVWKENKSEASTSKAPRKTKVTLDMLLEKYEKQGGERAHNKGKRPRSPLWERFVHSLRRSHSPPYHHPQDMSWGSYSMPPPSYTYPYYMPWGATSPMFNHMPPMQFNQGWGGPRRPIHERFSSPNNGQFYGRNRANEERREGKRIKVEARTSEVITIKVGSHDVPIPSGDEVGESSSKKSEAGWFDRRTDNGPTDASGRSDRPPNVAEVAQFSLGPKDAVFEKPDESNRHMKHLYLKGHIDGKLVSRMLVDGGAAVNLMPYSLFKKLRHGDDELKKTNMILNGFNGEPTEAKGIFSAELTVGNKTLPTAFFIVDVQEESVLDFKSLCDIGKTEDQERSDRHYTAGLTGDQGRSDRPHAVGQTSDPERSNRPGVTPRNSRIEFQAECALKSPSRTGRGILDGTDEAYSSEKPPSDTYSYSGRPSQGPPRSITPTLAWMRQLEESYTTSPAVAQAGLWADVIKGGGADRRVPLVSGSKGGRCTVDRDHAGLGGELQGVTPGMAGLTGSRQSAGGHVSINFKAELIVNSDICAQETEEDWRIPLIRYLKDPTLKVDRKIRRQAFKYTLLDEDLYRRNIDGVLLKCLDEDQSKVAMGEGHRFVLVATDYFTKWAEDVPLKNMTHTEANGQAESSNKTLLKLVKKKIEEHPKRQDDLSSKDYKTLMGDNLDEVIDKRLKALEEIEKEKKRVAKAYNKRSPLQADMGQEGRVNRHHLPPLVTAAGPTLQPTTFTAATGGATDEAATTAASYPVCAELPPPAIDVLQPSAVTPSSSRSSFIRLAASHLRSPPPLTSTAPCSPPTIGVLLVVALPMPVVPYCPLLRNHGQLLAVD

SEQ ID NO: 120244 - protein, 2932 aa, Oryza sativa
  Clone ID: PAT_MRT4530_23383C.1.pep
MTKPSSKTEVEPSHVIPVTLDDFEGEDRKAMEEHINELTREALMRATTRTRQGVIIKPGPRPKLAPDMEKVDGFLRNRLGSLMDDYTLKDKAYTTVSQSPIDPIGSKTDGAAFTAGPTGPDGRGYPPDTRQGQYNHIASQTQPIRPPNPPPNPQGPNNMEDMISDIMRNRFGIETRNRARAYKKPYPDYYDNVSFPRNYRVPEFSKFSGEDVDYSDASDSEEEGDHDIYVAEWSWTNKNKPFVCSNLMPTLRKDRQSEVKYSFDVAKCDKILIIFCKRSKLDYLKAMSYLLKKRRAYCKWHNSHSHSTNDCNVFRRQVQSAIDEGRLKFTDGSKMKFDHDPFPVNTINFNNKKVLIRPEQAESTKGKKVVIGEPRPKMMVPKKQEIGVWKENKGEASTSKAPRKTKVTFDMLLEKYERQGGERDHNKGKRPRSPPRERFGHSPRRSCSPPYFHPQDMSWGPYPMPPPGYPYPYFMPGGATPPMYNHMPPMRFNQGWGGPRRPIHERLSSPNKSRFYGKNRVNEEKREGKRVKIEERTSEVITIKIGSHDVPIPSEDGVGKSPSKKSEAGSSSSQSAGLTRPSGRSDRGHVAGPTGPSGRSDRRSDDGLTDASGRSDRVSNVDLTGASGRSDRRSAAGLTGFQRRFDGRVAKGDVRASSSSNKVNKGHYLPPGTEPNPRWMPKDLTATQKRRLQRLRAQELREKKAEEKRDKRFNELRPPPFCAMDEAEVAQFLLGPKDAVFEKPDESNRHMKPLYLKGHVDGKPVSRMLVDGGAAVNLMPYSLFKKLGREGDELKKTNMILNGFNGEPTEARGIFSAELTVGNKTLPTAFFIVDVQEASLEWLQKRVQEYRSTKNDIGETVEDFDEVEKLGQGFTSADPLEEVDIGDGTKPRPTFVQKNMKADYKVKVIELLKEYVDCFAWEYHEMPGLSRELVEHRLPVKPGFRPYKQPLRRFNPLLYDRVKEEIDRLLKAGFIRPCRYAEWVSSIVPVEKKGSGKIRVCIDFRYLNKATPKDEYPMPIADLMINDALGHKVISFLDGNVGYNQIFMAEEDMYKTAFRCPGFVGLFEWVVMTFGLKNAGATYQRAMNLIFHDLLGIILEIYIDDIVVKSDGMEGHIADLRLAFERMRRYGLKMNPLKCAFGVSAGKFLGFMVHERGVEIDPKKIEKIHDFKAPTCKKEVQKLLGKVNYLRRFISNLAGKIDAFVPILRLKKEADFTWGAKQKETFEELKRYLSTPPVVRAPKAGKPFRLYVASEDKVIGAVLTQEEDGKEYIITYLSRRLLDAETRHIARCDNSRANDLAQQTSGYNVKRGLFLILEEPVLDFKFLRKIGKVGDQRRSDRRCTAGLTVTRGGLTGHMPPGHRFVLVATDYFTKWAEAVPLKNMTHTEANGQAESSNKTLLKLVKKKIEEHPKRWHEVLSEALWAHRIYKHGATKVTPFELVYGQEAVLPVEVNLGSLRYIKQDDLSSEDYETFMGDNLDEVTDKRLKALEEIEKEKKRVAKAYNKRVKAKLFQVGDLIEVVGDSRITAKLKVLRSCLSTCQKSCQQFQKMDFPRYDGTTDPLIFVNRCESYFHQQRIMEEEKVWMASYNLEDVAQLWYIQLQEDEGTPRWNRFKDLLHLRFGPPLRSAPLFELAECRRTGTVKEYQNSFQALLPRAGPLQEAQLVQLFTGGLLPPLSHAVRIHNPQSLAAAMSLARQVELMELDKPAPVPARPAPRGLLPALPQRLALPAPPASAPVAKMEAKPVKRLSQEEQAERRRLGLCYNCDEKYSRGHNRVCRRIFYIDGVTLTDAEDAALDADQDGEAPVFSLQAVAGVPICDTMQVRVMLGAVTLTALLDTSSTHNFIAEEAARRTNLAIQPKPRLTATVANGEKIQCPGVLRQAPITIDGEEFHVDLFVMPLAGYDLVLGTQWMVTLGPITWDFTARTMSFSRHGMEVRWSDVAARPEPTVAVIAASEVLLDGLLASFEGVFAEPSGLPPQRARDHSIVLKPGALPVAVRPYRYLAAHKDELELQCAAIIEQGIVRRSDSAFSSPVLLVKKPDGSWRFCVDYRALNALTVKDAFPIPVIDELLDELHGARFFTKLDLRSGYHQVRMRPADVHKTAFHTHDGLYEFLVMPFGLCNAPVTFQALMNDVLRPFLRRFVLVFFDDILIYSKTWADHLRHIRAVLSELQRHQLFLKRAKCAFASASVAYLGHVISEAGVAMDPAKVQAVRDWPAPRSARAVRSFLGLAGYYRKFVHNYGAIAAPLTALLKKDSFSWSGEAATAFDALKAAVTTAPVLAMPDFSKPFIVECDASSHGFGAVLVQDSHPVAFFSRPVAPRHRALAAYERELIGFVHAVRHWRPYLWGRRFVVKTDHYSLKYLLDQRLATIPQHHWVGKLLGFDFTVEYKPGHANAVADALSRRDTPEDGTILALSAPRFDFVDRLRHAQTTDPALVAMHEELTSGSQALPWAAVDGMIQYSGRLYIPPASPLLPELMAAVHEEGHEGVQRTLHRLRRDFHFPNMKQLVQDLVRACPTCQRYKSEHLHPAGLLLPLPVPQGVWTDIALDFVEALPRVRGKSVILTVVDRFSKYCHFIPLSHPYSAETVAQAFFADIVRLHGMPQSIVSDRDTVFTSHFWRELMWLVGTKLHMTTAFHPQSDGQSESANRVIVMYLRCLTGDRPRQWLQWLPWAEYVFNTAYQTSLRDTPFRVVYGRDPPSIRSYEPGDTRVAAVAKTMEERDKFLADIRSRLEQAQATQKRHYDKAHRHVTYQVGDWALLRLRQRAASSLPQTVAGKLRPRFYGPYRITELINDVAVRLALPPRARLHDVFHIGLLKKFHGSPPDAPPPLPAVHHGAVVPEPERAVKTRLARGVRQLLIQWKGESPASATWEDADAFIAKYPDFQLGDELALDEGGDVMWGRTYARRRRARDVRRATERAQRTAEEATGSG

SEQ ID NO: 120245 - protein, 400 aa, Oryza sativa
  unsure (1)..(400): unsure at all Xaa locations
  Clone ID: PAT_MRT4530_23384C.1.pep
RDRSGRREAGNLLPSSSGPGAIPVRTQRRRCQQRRGGGSILGVATNEDDKEAANTAHIYLIAKKXEAMGSAEHYRPISFIHSFTKIITKQLANRPSPXINELMSRNISAFIRKREVHDNFLFIDHLXKSIGKKKKTTLFIKIDISSAFDSISWPYLLEVLQRFSFGTRWRNXIANLLASSSSSIILNGSPGDSIHHDRRLRXGDPLAPFVFILPMELLQKLXIQAAETTASLTPFNARFQRFTYSIYMDDVTIFIRSXEGHVXSVCSDLSSTTRVLGLQTNIHKTEIYLIXLIQAYPAKLGSFLCSYXPLDVMKLRKTEFVPLLDKIGGKILGWKGRFFTLAGRNTLVKSVLSAMPVFHLTAXPNSEIWVLKRIEKIRKAFRWKGEPGEELNWQNDCRPK

SEQ ID NO: 120246 - protein, 1627 aa, Oryza sativa
  Clone ID: PAT_MRT4530_23385C.1.pep
MTKPPSKMEVEPSNVIPVTLDDFEGEDRKAMEKYINELTWEALMRASTRTRQGVIIKPGPRPKLAPDVVSNDEVSQSIQQQIASTIDSSMAAFKDRLDVMFKDKFDGFLRIKLEFPNLPSLVVKMRFRDVRNRCYALNITDRDLAGLAFNGLVAPLRERLDGQQFLDVSQLMQRALAQESRVKDNRKLARPFDKKSNVNVVDYPEASDSEEEGDHDIYVAKWSWTNKNKPFVCSNLMSTPRKDQQSEVKYSFDVAKCDKIFDYLLQEKQIRLPKGHVIPSQEELKRRAYCKWHDSHSHSTNDCNVFRRQVQSAIDEGRLKFTDGSKMKLDHDPFPVNRINFSDKKVLIRPEQAESTKGKEVVIGEPRSKMIVPKKPEVGVWKENRSGASTSKAPRKTKVTFDMLLEKYEKQGAEKIRNKGKRPRSPPRERFGHSPRRSHSPSYHYPQDMSWGPYPMPPPGYPYPCFMPWGATPPMFNHMPQMQFNQGWGGPWRPIHERLSSPNNSRFYGKNRANEEKREGKLVKVEERTSEVITIKVGSHDVPIPTGDGVGVSPNRKSEAGTNSSQSAGLTRPSGRSDRGHAAGLTGPSGRSDRRPDSYPTDTSGRSDRAPDVGLTDASGRKIAKGDVEASSSSNKVNRGHYLPPGTEPNPRWMPKDLTATQKRRLQRLRAQELREKKAEEQRDKRFNELRPPPIWRPKSIEKAKPIGVEEKEEQLVDKSESSPKEDMDINMVCMLPMEFCAMDEAEVAQFSLGPKDAVFEKPDESNRHMKPLYLKGHVDGRPVSRMLVDGGAVVNLMPYSLFKKLGREDDKLKKTNMILNGFNGEPTEAKGIFSAELTVGNKTLPTAFFIVDVQEANLEWLQRRVQEYRSTKNDIGETVEDFDEVEKLGQGFTSADPLEEVDIDDGTKPRPTFVNKNMRADYKVKIIELLKEYVDCFAWEYHEMPGLSRELVEHRLPIKPGFRPYKQPPRRFNPLLYVRVKEEIDRLLKAGFIRPCRYAEWVSSIVPVEKKGSGKIIVCIDFRDLNKPTPKDEYPMPIADMMINDASGHKVISFLDGNAGYNQIFMAEEDMYKTAFRCPGFVGLFEWVVMTFGLKNAGATYQRAMNLIFHDLLGIILEIYIDDIVVKSDGIEGHIANLRLAFERMRRYGLKMNPLKCAFGVSAGKFLGFMVHERGVEIDPKKIEKIRDFKAPTCKKKVQKLLSKVNYLRRFISNLAGKIDAFVPILRLKKEADFTWGAKQQEAFEELKTYLSTPPVVRAPKAGKTFRLYIASEDKVIGVVLTQEEDGKEYIITYLSRRLLDAETRHIARRDNSRANDLAQQASGYNVKRGLFLILEEPVLDFQSLYEIGKIGDQGRGCEACQRFGNVQLAPAAVLNPIIKSWPFRGWALDFIGQIYPSSSKGHRFVLVATDYFTKWAEAVPLKNMTHTEANGQAESSNKTLLKLVKKKIEEYPKRWHEVLSEALWAHRISKHGATKVTPFELVYGQEAVLLVEVNLGSLHYIKQDDLSSEYYKMLMGDNLDEVIDKHLKALEEIEKEKKRVAKAYNKRVKAKLFQVGNLVWKTILPLGTRSKEFGKWSPSWEGPYRVCGIVRGNAYFLETLQGEHFQRAINGKYLKKYFPSVWQDA

SEQ ID NO: 120247 - protein, 974 aa, Oryza sativa
  Clone ID: PAT_MRT4530_23386C.1.pep
MDDQGEKLYREIWTGNQGKRGKKLPTRFFVTPLGKSAQRHLSFDVAITKPPSTKAEVEPSNVIPITLKELDEGALKAMEEHLKAYTQEMLMKTCTRTRQGVVLKPGWLPKPNFDVGFRDVRNRCYSLNITDRDLADLAFNGLIAPIKERLVGQQFLDVSQLMEKAPAQESRIKDNEERLKFSDGSKMKLDHDAFPANTINFNDKKVLIWPKQAESTKGKGMVSEEPRPKMIVPKNPEVGVWKENRSEASSSKAPKKTKMTFIMLLNKYEKQGGKREGKRIKVETRTSEVITIKVGSHDVLIPSGHEVGESSSNKFEARTNSSQSAGLTNLLGRSDWAFRPEEEEQSVDESYPKEDMDVNMMCMLPMDFCAMDEAEVAQFSLGPKDAVFEKPDESNCHMKPIYLKGHIDGKPVSRMLVDGGAAVNLMPYSLFKKLGRGDDELKKTNGGEKHDKAISLYVMSKEANLEWLQKRVQEYRSTKNDIGETIEDFDEVEKYHEMPGLSRGLVEHQLPIKPGFRPYKQAPYRFNPLLYDRVKEEIYRLLKAGFIRPCRYAEWVSSIVPVEKKGSGKIRVCIDFRDLNKATPKDEYPMPIADIMINDTSGHQVISFLDGIILEVYIDDIVVKSDGMEGHIADLKLAFERMRRYGLNVNLLMCAFGMSAGRILRFMVHERGVEIDPKKIEKIRDFKAPTCKKEVQKLLGKFRETTIFGAALLFDETEASFTWLFETFLPAHNGKQPKTIYTDQDAAIGKAIKIVFTESYHGLCTFHIMQNAVKHLSPVKGKEEDEGEEEDEGEEESHVLSDFSACMFGHEDEASFEEAFQIMRSKVHKQTWLDSIYKDNAQPKGQVIGVVLFSPNGMCYEASVRLKYYYTNNQAEYDALLFGLQVMEMIGAKHIEAFGDSELVVQQVAGAYKCLYGSLNRYLDQCLDIIANLYNFAIRHVARRDNSRANDLVMNSELHSRHSRLLLARSFGEL

SEQ ID NO: 120248 - protein, 1859 aa, Oryza sativa
  Clone ID: PAT_MRT4530_23387C.1.pep
MTKQSSSKAEVEPTNVIPITLDDFEGEDRKSMEEYIKEITQEALMRVCTRTCQGVIIKPGPRPKLTPDLVSNEEVTQSIQQQVASTIDSSMIIFKSKLDATIEGRFDEFLRTKFGPLMANFMLKDKASTSASQAPIDQTSNGTDGAAQTAGPTGPDGRSDRNFAVGPTGQTAGPTRYYPGGQTRTHAGLTAPLDVGQTGPWTGQTGAIISIQGIDPMTNASYLYHLRTFDPPVSTAAINPQVPPHVPNAYNDVARGFPPDTRQGQYNHIAPQTQPIRPPNPPPNQYRPDNMEEIISGIIRDKFGIEARNRAKVYQKPYPDYYDNVPFPRGYRVPEFTKFSGEDSRTTWEYVGQFLAQCGEANSDSFKLRLFSLSLSGTAFTWFTSLPANSIHTWAQLEQRFHDYFYTGKTELRLCDLTSIKQKYNEPVIDYIKRFRDVRNRCYSLNITDRDLACLAFNGLIAPLRERLDGQQFLDVSQLMQKALAQESRVKDNKKFIRPYEKKPNVNLIDYPEASDSEDEGDHDMYVAEWSWTNKNKPFLCSNLMPTPRKDRQSEIKYSFDVAKCDKIFYYLLQEKQIRLPTGHIIPSQEELKCRAYCKWHDSHSHSTNDCNVFRRQVQSAIDEGRLKFTDGSKMKLDHDSFPVNTINFNDKKVLIWLEQAESTKGKGVIIGEPRPKMIVPKKPEVGVWKENKSEASTFKAPRKTKVTLDMLLEKYEKQGGERARNKGKRPRSPPREQFGHSPRRSHSPPYHHSQDMSWGPYPMPPPGYPYPYYMPWGATPPMFNHVPPMQFNQGWGGLRRPIYERLSSPNNGRFYGRNRANEEKREGKRIKVEARTSEVITIKVGSHDVPIPSGDEVGESSSNKPEAGTSLSQLAGLTGPSGRSDRSHTAGLTGPSGRSDRRPDNSPTDASGRSDRPPNVGLTGASGRSDRWSTSGLTKLQRQFDRRFAKDNAGASSSSSKLNRGYYLPPGTEPKPRWMPKDLTATQRRRLQLLRAQELREKKAEEERDRKFNELRPPPVWRRKSVEKEEPVVVEKKEEQSVDKDESSPKEDMDINMVCPKDAVFEKPDESNRHMKPLYLKGHIDGKPVSRMLVDGGAAVNLMPYSLFKKLGRGDDELKKTNMILNGFIGEPTEAKGIFSVELTVGNKTLPTAFSSSMCKRVQEYRSTKNDIGETIEDFDEVEKLGQGFTLADPLEEVDIGDGTKPRPTFINKNMRADYKVKIIELLKEYVDCFAWVYHEMPGLSRELVEHRLPIKPGVRPYKQPPRRFNPLLYDRVKEEIDRLLKAGFIMPCRYAEWVSSIVPVEKKGSGKIRVCIDFRDLNKATPKDEYHMPIADMMINDASGHKVISFLYGNDGYNQIFMAEEDMHKTAFRCLGFVGLFEWVVMTFGLKNAGATYQRAMNLIFHDLLGIILEIYIDDIVVKSDGMEGHIADLMLAFERMCRYSLKMNPLKCAFGVSAGKFLGFMVHERRVEIDPKKIEKIRDFKAPTCKKGVQKLLGKIDAYVPILRLKREADFTWGAKQQEAFEELKRYLSTPPLVWAPKAGKPFWLYIASEDKVIGAVLTQEEDGKEYIITYLSRRLLDAETRPILSGRIGKWAYALIEYDLAYEPLKSMRGQIVCDFIVDHHVDIAYEEEETEEDWRIPLIRYLKDPTLKVDRKIQRQAFKYTLLDEDLYHQNIDRVLLKCLDEDQSKVAMGEGHRFVLGSTDYFTKWAEAVPLMNTTHTEANGQAESSNKTLLKLVKKKIEEHPKRWHEVVSEALWAHRISKHGATKVTPFELVYGQEVVLPVEINLGSLRYIKQDDLSSEDYKTLMGDNFHEVINKHLKALEEIEKEKKRVAKAYNKRVKAKLFQVGDLV

SEQ ID NO: 120249 - protein, 108 aa, Oryza sativa
  Clone ID: PAT_MRT4530_23388C.1.pep
STAPAPLAGVPNQRTYSFHWQRWHREIAKLPLRQVGPTKCRKTKTRSHQTRTQQTMMIRRRRHQREEYSSEIGNRMALHILARGSIFQLLCLKRHRSSSDKTADIYIP

SEQ ID NO: 120250 - protein, 144 aa, Oryza sativa
  unsure (1)..(144): unsure at all Xaa locations
  Clone ID: PAT_MRT4530_23389C.1.pep
KLRLFTWGLSGDAFTCLTSLPSNSIHTWSLLLYTPXVDFSTAENGLGLCDLTSAXQKYNEPVIDYIKRFTDVRNRCYSLNITDRDLAGLAFNGLIAPLRERLDGQLAMDEAEVAQLSLGPKDAVFEKPDESNRHMGTEWTFQHT

SEQ ID NO: 120251 - protein, 136 aa, Oryza sativa
  Clone ID: PAT_MRT4530_2338C.1.pep
EDTTNTDITMTNLCINQLKHQLQTDLAADLEGISGPISTFGKLMKSTFQIVLVPHQNSYRVAGNLQNKPRISLLGEVNRVSARLISRGDVVLRLRGSVACSFRSRIELCRDSAQIDYLSIPFGRSGSNTPHHMVYP

SEQ ID NO: 120252 - protein, 95 aa, Oryza sativa
  Clone ID: PAT_MRT4530_23390C.1.pep
MARRPRIRCSGRAAGPAATRLRAAGSPPTRRRRAAPAGTAAPPCRTRRPPRRSSGTAPPRAAPRRTPCRTRARPGGGPARRTPPRPAPPARRRTR

SEQ ID NO: 120253 - protein, 84 aa, Oryza sativa
  Clone ID: PAT_MRT4530_23391C.1.pep
TYLLNLKARNYQHVVILNEINQKVGLGTLFRTKREKEWIVILSLVHPQVDPFASEAQRSQPVFPSKERQPIRTQKLNTIYLLYY

SEQ ID NO: 120254 - protein, 182 aa, Oryza sativa
  Clone ID: PAT_MRT4530_23392C.1.pep
YWRRWCAAADRSCAAADADRSWIRSWCASRRCRERPRARAADGRAPHGSRGARPKAATPAQPTGGGAPAPRMAPPATSGAAERRPREGRDGGSKAAGHGSPRGDGDDGNGDRSGGKRRRGSGRRGRRRPAAGEGCKSAFRSLPNTKGRPKYFMEKFALAAGTPSRTSVNSMPSHLMAATWDF

SEQ ID NO: 120255 - protein, 50 aa, Oryza sativa
  Clone ID: PAT_MRT4530_23393C.1.pep
QPIESLRFMYDRGHRIHTLFAGWSEENGSILPWMDLCNCSDSYMVQHICQ

SEQ ID NO: 120256 - protein, 98 aa, Oryza sativa
  unsure (1)..(98): unsure at all Xaa locations
  Clone ID: PAT_MRT4530_23394C.1.pep
LHGWPIMPLLLGVYDFTVGLPPSPPTGVSAXRSWASTSSPXLACLSHRRLVSLPTRLAYYAAVGGHLRFHRRPPSLPLTGVFIVIDGRLCSHIGHLCH

SEQ ID NO: 120257 - protein, 80 aa, Oryza sativa
  unsure (1)..(80): unsure at all Xaa locations
  Clone ID: PAT_MRT4530_23395C.1.pep
MFYIRFTCNIFEQILLHNEFRVFSFEDVLTWVKEKXPSVRNAWMIKEVDWGPNQDLLQVHFYLTTSILVHRRQEIKFYTF

SEQ ID NO: 120258 - protein, 204 aa, Oryza sativa
  unsure (1)..(204): unsure at all Xaa locations
  Clone ID: PAT_MRT4530_23396C.1.pep
MASRKPASFRTSAGGRANRVFSGELPARANPTKTVLIDADDVEPSQKRKRAKGGRAETLTAIAGVPPLRTEVGTEARARGVVQIGNAFSDDDPSHGTPTLLAERTSRSPVPTAVAGSAGEEVQSFMVGATASAEGAVAAACATFNAPXPGPHLSLLAPARGKQAAVETSXGVGHLVSPVGGLVPFPELNEFVEGCTAAKSLLVR

SEQ ID NO: 120259 - protein, 101 aa, Oryza sativa
  Clone ID: PAT_MRT4530_23397C.1.pep
MSPRYTLSLRTEVGTEARARGVVQIGNAFSDDDPSHGTPTLLAERTSRSPVPTAVAGSAGEEVQSFMVGATVGGLVPFPELNEFVEGCTAAKSLLVRVCTW

SEQ ID NO: 120260 - protein, 91 aa, Oryza sativa
  Clone ID: PAT_MRT4530_23398C.1.pep
VLPASADVGGGGGVRPEMHRKKISQLDRNQPTSQNARFKNSNPWHLLSDWGNIRASYCISAVAGSVSVFELLWDVVVCQGDKWLYSCSSKK

SEQ ID NO: 120261 - protein, 306 aa, Oryza sativa
  Clone ID: PAT_MRT4530_23399C.1.pep
YPPEPQNRTFFTSPESDVAAAEAERSRNVEARRVASRRWSAAWASARRREKAGPASLFARDRRRTGAEDARIWKDDAGPRRPPRAAVLRSPPSAAVVRGAGPPSSLVPPILAGVRRPPPAHRLPPRAAVVRSSAPPCALATPLLAAVRRPPPRAAIRRAPPRAAVVRSSAPPPLAVVRRSPLSAAVVRPPLRTCATSASCSSRSWQCSLDVPILRARGMPSPTRSRNGEQQQAPGCLDPVRRQQQEHAPAADGRSAASAVAATRDDSSWASLPEDLVSHHLPARPCRRRASCAGFVSFFNLSTGGA

SEQ ID NO: 120262 - protein, 229 aa, Oryza sativa
  Clone ID: PAT_MRT4530_2339C.1.pep
MGGRERAEDDEGVGEVERQDHNHQLERVEHGAGPRPLPTYRPPRTAPCRCRRSGRESGEVIMGRGESSDRDSLPVILLLRCPGDGPSQSIARCHQPLPLVTVIHHRRERHGPVHGRKPARARRRSRCHLPHGRLPLRRPLHLPHPSTGALAGLALSGVLVNMTTSDPTLATEIAEVAAAKGYAAVDASVSGGDRGACKATLSIFAGSDAAVVTRLTPLFKLMGNALYMG

SEQ ID NO: 120263 - protein, 317 aa, Oryza sativa
  Clone ID: PAT_MRT4530_233C.1.pep
MATRANGSSCSLASLMAAIFFLLVVSSRGAHGGRIAIYWGQNGNEGTLADTCATGNYAFVNLAFLCSFGSGQAPQLNLAGHCDAYSGACANLTADIARCQSMGVKVLLSIGGGAGGYSLASKQDVSHLARYLWESFLGGRPSAPGGRRPLGDAVLDGVDFDIEGGGGDPRYYGDLAAYLKAYSGKGAAGKEVLLSAAPQCPFPDQWVGKALDTGLFDYVWVQFYNNPPCQYAAGSGGGAANLLDAWRQWTSGVEARYIFLGLPASPGAAGSGFIPVGSLESQVLPALKASSKYGGVMLWSRYYDDQDGYSSAIKNAV

SEQ ID NO: 120264 - protein, 310 aa, Oryza sativa
  Clone ID: PAT_MRT4530_23400C.1.pep
MVGATASAEGAVAAACATFNAPLPGPHLSLLAPARGKQAAVETSGSDNSLSAPRFVSSDFETRAELIPIVQGVGHLVSPVGGLVPFTELNEFVEGCTAAKSLLVRALSAQCSVEQVVRARLDTYKARVRSLEGELSRKELEKETLTGSLKDANSEIRKLRLELEREKKDNQGLMTYYNDSERILDGLRRELALERAATKAVTDEAKTACHSLRLALTDLGAKVSDVPAEDASAQTFMEWTQQAGGKRFGLNPDELLNYYCGYCAKGFGLDPAREVLDGYNGELVAISRHWKWTNDVQAPSCEWPDWRNWL

SEQ ID NO: 120265 - protein, 462 aa, Oryza sativa
  Clone ID: PAT_MRT4530_23401C.1.pep
MASRKPASFRTSAGGRANRVFSGELPARANPTKTVLIDADDVEPSQKRKRAKGGRAETLTAIAGVPPLRTEVGTEARARGVVQIGNAFSDDDPSHGTPTLLAERTSRSPVPTAVAGSAGEEVQSFMVGATASAEGAVAAACATFNAPLPGPHLSLLAPARGKQAAVETSGSDNSLSAPRFVSSDFETRAELIPIVQGVGHLVSPVGGLVPFTELNEFVEGCTAAKSLLVRVCTWAYFALISTTPLISSHNLFRLFVKALSAQCSVEQVVRARLDTYKARVRSLEGELSRKELEKETLTGSLKDANSEIRKLRLELEREKKDNQGLMTYYNDSERILDGLRRELALERAATKAVTDEAKTACHSLRLALTDLGAKVSDVPAEDASAQTFMEWTQQAGGKRFGLNPDELLNYYCGYCAKGFGLDPAREVLDGYNGELVAISRHWKWTNDVQAPSCEWPDWRNWL

SEQ ID NO: 120266 - protein, 181 aa, Oryza sativa
  Clone ID: PAT_MRT4530_23402C.1.pep
MGPAHGHLVLLVAAVALLSAGFLPHAVAKKGGAVPPAVADICSRTPFPDTCKSTAGRHASKYPVIDVVAVLNMQVDAFSKRTAHARERVTKVSRGAQPQQTQALSFCDTMYMNTQDTIGAAERAITFRDKATAKIMLQLAVQDFESCDRPFKQSGINNPLEKIDVELNQMAQNCMTLASMI

SEQ ID NO: 120267 - protein, 199 aa, Oryza sativa
  Clone ID: PAT_MRT4530_23403C.1.pep
MATTSRRSLHALLGGGAVADLVLWRRRNVSAAAVAGATAVWFLFERAGYSFPSVMANALLLLVAILFFWAKSASLLNRPLPPLPKLEVSDVVVEKAADRALVWINKVLAVGHDIAIKRDRSVFIKVILILWVVSYIGMLFNFLTLIYIGVMFSLLVPPLYEKYQDQVDEKIGMAHSVLSRHLDTIISKTGESTKQKKTE

SEQ ID NO: 120268 - protein, 88 aa, Oryza sativa
  unsure (1)..(88): unsure at all Xaa locations
  Clone ID: PAT_MRT4530_23404C.1.pep
RTRGXFFFLFFFFFFFFFLCFSNQKGHSQKLFFLKIHLLLTQTNQIASKKEQNHFKLDGFLKNLLKDRKRNLSTSPPPVPVFKPGGSF

SEQ ID NO: 120269 - protein, 205 aa, Oryza sativa
  Clone ID: PAT_MRT4530_23405C.1.pep
MERQRSQDIFPELVKDEDLVGIEDNRRLLTEWLYYDELDNKVITVSGMGGLGKTTLVTNVYEREKTNFSAHAWMAVSQTYTVDALLKKLLRKVGYKGEIDKMDVYDLKEEITRVLKDRKCLIVLDDVWDQEAYFKICDAFQSNQQSRVIITTRKNHVAALASSACRLDLQPLDGNQAFDLFCRRAFYSTKDHECPSELVEVAASI

SEQ ID NO: 120270 - protein, 194 aa, Oryza sativa
  Clone ID: PAT_MRT4530_23406C.1.pep
MEMEGGDNDFAKAVLAGLDKCEELGYEDVELWSDSQRACGVLSDFETINMDDRNRMECMLLRFKSTRFKRLVSVQKPREIKDWSLCEILFMVDDILIEKVHSRYLLRNLLKKWSPYLRGQSIYSITRTKLTRYIIRTKLTRDIIRHPIGAVPLHEAAERFSVDMIKLLFRQGASANIGPNSDFILLGDLVLIHT

SEQ ID NO: 120271 - protein, 57 aa, Oryza sativa
  Clone ID: PAT_MRT4530_23407C.1.pep
MATIDTTVAHIKIKMPKCWNHIRTPITLLISNVRQICIRAPFWVHEYLMGLVVDALL

SEQ ID NO: 120272 - protein, 101 aa, Oryza sativa
  Clone ID: PAT_MRT4530_23408C.1.pep
MLRRPAATAAGRAIRRAAYHSDGGPPPRKLRGPRFSPLNRHNHEVDALLEEVKNTPILVQNVLRSWVIAAAVISGYCWGYNRVITKRPVAGSEPPTEGEVE

SEQ ID NO: 120273 - protein, 93 aa, Oryza sativa
  Clone ID: PAT_MRT4530_23409C.1.pep
NVCQVSQMESAACTVDVLHRVGGTATMAQYLIVASLSAEARFYHVTSVLPLKQFTHPVEAAFSIVRVFLDKLTMRAFSSCPVLLCSRRYIFRS

SEQ ID NO: 120274 - protein, 431 aa, Oryza sativa
  unsure (1)..(431): unsure at all Xaa locations
  Clone ID: PAT_MRT4530_2340C.1.pep
SVDCFADSRQLGRNFYVGPKPSVSRLHKLSNKYSWAPKFVTPGNSQVISKLICAXILVQESAEAQPXLNNHTRLYRSISKPGMYHSKPGANEIIISYSIIYYVFLDTSNALTNFRNDKLTRKTRKKTNKNQINNTYKNHPNDQPKPVNGTGGSERLXLKDDSTQTNERSTGTPRLNERANDSTTAATKPMSXIRKSHRTKAIGERXMTTVNRRQHMETMTTLGPNKIRLDXDRIKTLGKTSQMNGRRRTAMEDGRXRASKGGEVLSTVATTFRLRTAATEGWTSFGLALRCRRREQXLTRDSWDDXRTAAVEQKTAATHWFTARMASGEISAQGNRLPGFSSSXANPTAAAATEGDDGRRRTARLERXPALGERRRARGEKVSGDGGRRDLRRXGRGRXGVLYIGTGARVRAQIDGKNSGNSRVLAGGRKD

SEQ ID NO: 120275 - protein, 267 aa, Oryza sativa
  Clone ID: PAT_MRT4530_23410C.1.pep
MANKAPATTSWRWRLLLLLLLAVAALCWIPPAIAMAAAAAAATTSSGGRRSLLGFVEAQGNSSYRCSPSGPCVPCQYSEKVSRFYALTLVIRSWGSPWRGESILGGLMGQANRVCKNKDVSHSALYLYWSESTPINSYPQSPPPQLLILSYQSDEKYCCSETGYRLPLKCVEVQNVTKEGNNTKQRKVLDDASTSGGSKHYTTYRSCVPLEDEEKLSVLGFEVFILSYSMVMMAGMLLISGPFVYYRKRRTAIMQGASRIPTSPPRF

SEQ ID NO: 120276 - protein, 54 aa, Oryza sativa
  Clone ID: PAT_MRT4530_23411C.1.pep
SVAVRAVAVRDSNPARQFLRGEEARAGIDTAYFCRTCLCGPPYPQNTKSKFSYS

SEQ ID NO: 120277 - protein, 218 aa, Oryza sativa
  unsure (1)..(218): unsure at all Xaa locations
  Clone ID: PAT_MRT4530_23412C.1.pep
GWRRRGGWAFSSSGCGGGDRDCDHWRYDGLGRLAEGLADGCIWPARHRLEEGLETGLAQKGVADGSGGRLGARGASGGDEGRLGARGAANGGRLDWCKRRVRWRRPAWRERCGRRWRRRPRCEEELPVGVAWSLAHEGWPAGGAGAGVPDVGRAXVVVEHRCVSVLSHTSRVVAGXKPSLGSFEPRRTAAAVFPSLLFLKTSFWHTLRDDLVCVPLLV

SEQ ID NO: 120278 - protein, 176 aa, Oryza sativa
  Clone ID: PAT_MRT4530_23413C.1.pep
MGRRWRLGFSPPAQTKHVRVFSSGTDHQLLRSLVNPGEEVILTVPNEQLEHVVRFLLVTRITRIMTSDDVLVRSLGNAYFLVPTMVNLHPTLAAARLDGRVKVSSACAISAGAQTSSADDHSSLSEMLLPRAAAIAAHEKVGQNILCADVASKVSSTCAKTIAKTTLGGKVSGIDS

SEQ ID NO: 120279 - protein, 146 aa, Oryza sativa
  Clone ID: PAT_MRT4530_23414C.1.pep
MAVGGEELAFSVQICGVRAGEISEGEEGRRIVGGGDSKSYRIFGAGKIVDGDFFSVDLCQEGKRSSRSRGEEMARVGGKEMARGAGDRAPSPGIAREIERNRPGSRGKGGDRAGAGWRGKGISIGYGGEGIGRGEWVHKSRFLSPR

SEQ ID NO: 120280 - protein, 141 aa, Oryza sativa
  Clone ID: PAT_MRT4530_23415C.1.pep
MTSAATSSPAAAWTARTAHARRRTATLWHERRTPTGRARRGELTDDQNVGGRPTDGDDVEEKAAEKIGSTVATVLRRSSAAAKGRTRTATTWRSRRWPSRATTTTETPAAHGWSDGGYSGARAHGARALPATRGEGEGGDG

SEQ ID NO: 120281 - protein, 422 aa, Oryza sativa
  Clone ID: PAT_MRT4530_23416C.1.pep
MQFSGLSPDCISSDYIMEGSLLDLYVKCGDVETALVIFNSSDRTNVVLWNLMLVAFGQINDLAKEIDLGEQIHSLSVKTGFESDMYVSGVLIDMYSKYGWLEKARRVLEMLKEKDVVSWTSMIAGYVQHECCKDALAAFKEMQKCGIWPDNIGLASAISGCAGINAMRQGLQIHARIYVSGYSGDVSIWNALVNLYARCGRIREAFSSFEEIEHKDEITWNGLVSGFAQSGLHEEALKVFMRMDQSGVKHNVFTFVSALSASANLAEIKQGKQIHARVIKTGHSFKTEVGNALISLYGKCGSFEDAKMEFSEMSERNEVSWNTIITSCSQHGRGLEALDLFDQMKKEGIKPNDVTFIGVLAASSHVGLVKEVLSYFKSMSDEYEIRPRPDHYACVIDIFGRAGQLDRAKKFIEEMPIAADAM

SEQ ID NO: 120282 - protein, 196 aa, Oryza sativa
  Clone ID: PAT_MRT4530_23417C.1.pep
MQRLSVGSAGGKPRLLEGGAAAGEEEEEEEKAGKAGRAAPDRSIHIIPVLTLLCFLVLFLLSHDPASSSLAIATGRGNDGVHRPQRRRPPPVKAGAEAGPRPKDGDGAAAAALTAKAKAGCDVSAAQLAVGFVVGIEGAKKSEKPTREESLIFLFSSSLFFLGISPTPTIAPQDYVGSSTVLLYVLYLVIFFLSWP

SEQ ID NO: 120283 - protein, 51 aa, Oryza sativa
  Clone ID: PAT_MRT4530_23418C.1.pep
CRHNANHTHNKYREHVNLIKGCLHVETSLDHCTSQSMPIEMYHSLQEKWFI

SEQ ID NO: 120284 - protein, 1170 aa, Oryza sativa
  Clone ID: PAT_MRT4530_23419C.1.pep
MTRRGAASLGRTLAGFLAHEDPAKVLSLFADKARQHGGLGPLDFACALRACRGNGRRWQVVPEIHAKAVTRGLGKYRIVGNLLIDLYSKNGLVLPARRVFEELSARDNVSWVAMLSGYAQNGLGEEALGLYRQMHRAGVVPTPYVLSSVLSSCTKAELFAQGRLIHAQGYKHGFCSEIFVGNAVITLYLRCGSFRLAERVFCDMPHRDTVTFNTLISGHAQCGHGEHALEIFEEMQFSGLSPDCVTISSLLAACASLGDLQKGTQLHSYLFKAGISSDYIMEGSLLDLYVKCGDVETALVIFNSSDRTNVVLWNLMLVAFGQINDLAKSFELFCQMQAAGIRPNQFTYPCILRTCTCTREIDLGEQIHSLSVKTGFESDMYVSGVLIDMYSKYGWLEKARRVLEMLKEKDVVSWTSMIAGYVQHECCKDALAAFKEMQKCGIWPDNIGLASAISGCAGINAMRQGLQIHARIYVSGYSGDVSIWNALVNLYARCGRIREAFSSFEEIEHKDEITWNGLVSGFAQSGLHEEALKVFMRMDQSGVKHNVFTFVSALSASANLAEIKQGKQIHARVIKTGHSFETEVGNALISLYGKCGSFEDAKMEFSEMSERNEVSWNTIITSCSQHGRGLEALDLFDQMKKEGIKPNDVTFIGVLAACSHVGLVEEGLSYFKSMSDEYGIRPRPDHYACVIDIFGRAGQLDRAKKFIEEMPIAADAMVWRTLLSACKVHKNIEVGEFAAKHLLELEPHDSASYVLLSNAYAVTEKWANRDQVRKMMRDRGVRKEPGRSWIEVKNVVHAFFVGDRLHPLAEQIYNFLAVINDRVAKVGYKQEKYHLFHDKEQEGRDPTDLVHSEKLAVTFGLMSLPPCGEIYFIVCQLSSSEENKWSSRVYYQSLIEKTERKERAGGMKGKQLETPISHLKSGARRNILKPASAAAAVMELTCPNQKMAYQQGIRCLLEREAGAYFVCFQRNSREYVGCHAIRCWATWRKETRTLSPRSSPYDREIHLEELPPRGLQCIASLLVTFQEYSGMETYERDWRPGLNFRFSRFDRSDGNDSSIRELTGQMLQDMKYSYRSILVYVLLLYDKTNDDQLLKHLKREIIHGMQQSCRDPEMGREMDEVAAMFCSKQGKPVGNYASLVKEARERLVVKKKEQESATNESFDVMKKLKV

SEQ ID NO: 120285 - protein, 54 aa, Oryza sativa
  unsure (1)..(54): unsure at all Xaa locations
  Clone ID: PAT_MRT4530_2341C.1.pep
MGGRERAEDDEGVGEVERQDHNHQXPCRCRRSGRESGEVIMGRGESSDRDSLPV

SEQ ID NO: 120286 - protein, 978 aa, Oryza sativa
  Clone ID: PAT_MRT4530_23420C.1.pep
MAAPKPIWVRQAEEAKLKSEAETAAAAKAAFDATFKALSASAADDPDQDDDLHRPSSPAQASRDAYSDADDDDDDRPHAPPGPVDPSKSSAAGPGIAGGSAGAPATFTVVSKDRDSRRVPTGGARVRVRVSPAAGVGGDDLEGAVKDNGDGSYAVTYVVPKRGNYMVHVDLDGSPVMGSPFPVFFSASNTAATVVTSTFPPTLPAVSSAYPNMVNQTMPNMPNYAGALSAAFPSLLGLLPAASTGASGGVVLPGVGASLGEICREHINGKCTKATDCSKLNHPPQQLLMSVLAATTSVGALSQAPMAPSAAAMAAAQAIMAAQALQAHAAQMQADSKAAGGEASGSTDKTDKGDVLKKMVQISNLSPLLTVDHIKQLFGYCGKVVDCTITDSKHIAYVEYSKQEEATAALALNNMDVGGRPLNVEMAKSLPPKTNLANSNLPMMMQQAVQLQQMQFQQALIMQQTIAAQQAAARAATMKSATEAAAARAAEISRKLKAEGFGGETVEEKDARGKSRSPSPSARRSKSRSRSPIKYRRSRRSRSYSPPVRHTRGRRSRSPSRSYHSKYGSDRSYRDDRDKYGRSGRRESDRSRDHYSSSSRRNRSRSISPRHKKSSRSDSRSPKRHREESLSPSKSRRSARAGSRSPGQHKGSKLSPTRDHHSSRRSRRSRSRSQEKNRNSDKKDSKKSEMEDKKRRSDRGNRGDKDEKYLKDPMEDKKLDVSSVAHKRSSSASEDEMLNSNSKRSKHDAALECHERKDEDHIEEDRRDLDSVGSKSEKRSLGNGDHEKQNHDTNRKTDKSHDRDDSSRKDRKYREDESRHSRDRCSRHSSSRSHRSSRHSREKYHGDTTDQHKSKKSEEGSKSRKDDCLLDDTLSSDRRKVQSEDSPRRKHNQLAASSDVHGINHDTGVKVPNDFSEADQGIQEAKQVVHETDMSSAPRLEDPFLAQDKQDKPIVAGLNGLHEPGVDGAFVGTEESAI

SEQ ID NO: 120287 - protein, 246 aa, Oryza sativa
  Clone ID: PAT_MRT4530_23421C.1.pep
MTPRAPSMRHHPPHLYLAEVVASWHPFHKKPCLSDRSTAPPSAHFADAPETQTQTPTPPLSASGGGGGGSFRWLGPRKRRRRGAGSRSVSGRSSDRRRSGTCSDFHVTCGAGGGGATDSSGEMWASDVGEVRMRDVPMATEFGPAAPVGGAGSGSGGTGAAAEVAAADSGYGSEPGYRGDVELGYGDEIDEEEEDGRQQLFFWGEEIGDCIADMNKMGIVGDNNFGEQKSHHRCRRKKHDVRMLDP

SEQ ID NO: 120288 - protein, 816 aa, Oryza sativa
  Clone ID: PAT_MRT4530_23422C.1.pep
MALRKLSSLLLVAQLLLVVVGGASAIVARGTQLYTTGYFPQIDCSPAPMATSTGSNGTAFRANLLTLLASLPDQAAPTGFASMQAGAGGRAPGGDDDDRAFARGSCLGDSTPSQCRDCLAAAVIDVAEGCGADTRRAGAWLSGCYLAYADTDATSPRESAFHRWFFDGDILPFSDNLDPTFLDLANGAVSALAAAAANRSGSGRTMLAATQEFDDGANTGLAGSVLAQCAAGRAPADCVQCLQDSARAMPRCCWNAWGLGESVAVALSYDCVLQVHHAPGLSGGKPWWRSSPSVCPRRWSSSASNNHAISALGRGQALPCRHGRRSVEAARGQLPVQTSRCLLQDVPSSTRRAQAGRPAVYTTAPSGPAAVRLHALGRAVPRRPPQVAAGQGVGLARRLARSCGGGCSGRRAADGGSGGSGQYGANGRPAAGADGFYTFAAQEAVVAMEVVVATAAAVDLSPAPPLSLPHSLASIASASGDTFVDLSGSVLGASLLVGHPGGNCGAVRRDGEAALDFAVFVSGLATLVSCNPSLMALTKLSCLLLVCVTSTATGARYFPQIDCSPAPTSNSSNGTAFRANLLALPTDDLPAQAAATRFASTQAGGGDRALALSVCLGDSTPALYRESLAAAVADVVAGCGARAGAWLDGCYRSYLAAYAADTNTTMSPSPAGGEFHRWVVTGDVLPFSDNLYATFLDMSNGVAARMLAIDVGAATTRTGLAGRVVAQCAAGVAPADCVQCLEGAAREIPRCFREARREEQGEGVGVVVSDDCVLRFDMTSSPAPRTSDTCDGTCKLLALAFGVALGIILSFTFNLQ

SEQ ID NO: 120289 - protein, 92 aa, Oryza sativa
  Clone ID: PAT_MRT4530_23423C.1.pep
GGLLHLSLRARFSSSSYFPSSDDDGRRDGTDPEMREHLYNTYDYRDVSLAPQTTDLLTKNCLLTEKYWSAIPSQQRRRVRCTRRCIGRILTS

SEQ ID NO: 120290 - protein, 233 aa, Oryza sativa
  Clone ID: PAT_MRT4530_23424C.1.pep
MALTKLSCLLVVVFLAGVTSTATGARYFPQNGTAFRENILVLPTDLPAQAAATRFASTQAGDGDDRALALSVCLGDSAPAQYRESLAAAVADVVAGCGAASRRAGAWLDGDNLYATFLDMSNGVAARMLATTATQAIDVGAATTTGLAGRVVAQCAAGVAPADCVQCLEGAAREMPRCFREARREEQGEGVGIVVSDDCVLRFDMTSSPAPRTSNTCDGTCKLLAFAFGAALE

SEQ ID NO: 120291 - protein, 918 aa, Oryza sativa
  Clone ID: PAT_MRT4530_23425C.1.pep
MALRKLSSLLLVAQLLLVVVGGASAIVARGTQLYTTGYFPQIDCSPAPMATSTGSNGTAFRANLLTLLASLPDQAAPTGFASMQAGAGGRAPGGDDDDRAFARGSCLGDSTPSQCRDCLAAAVIDVAEGCGADTRRAGAWLSGCYLAYADTDATSPRESAFHRWFFDGDILPFSDNLDPTFLDLANGAVSALAAAAANRSGSGRTMLAATQEFDDGANTGLAGSVLAQCAAGRAPADCVQCLQDSARAMPRCCWNAWGLGESVAVALSYDCVLQVHHAPGLSGGKPWWRSSPSVCPRRWSSSASNNHAISALGRGQALPCRHGRRSVEAARGQLPVQTSRCLLQDVPSSTRRAQAGRPAVYTTAPSGPAAVRLHALGRAVPRRPPQVAAGQGVGLARRLARTSPPSPRLLLPLLPRGGRRGHRRRAPRLAIDRAARSARAAYAARSSSRSDSGAVGAAVVDGAPPTVGAAGVDETPGTPPPCASPRRRPRRPLRPLLLSLGLGSGGGGCSGRRDADGGSSGSGQDGADGRPAAGADGFYTSAAQEAVVAMEVVVATAAAVDLSAAPPLSLPHSLASIASASGDTFVDLSGSVLGASLLVGHPGGNCGAVRRDGEAALDFAVFVSGLATLVSCNPSLMALTKLSCLLLVCVTSTATGARYFPQIDCSPAPTSNSSNGTAFRANLLALPTDDLPAQAAATRFASTQAGGGDRALALSVCLGDSTPALYRESLAAAVADVVAGCGARAGAWLDGCYRSYLAAYAADTNTTMSPSPAGGEFHRWVVTGDVLPFSDNLYATFLDMSNGVAARMLAIDVGAATTRTGLAGRVVAQCAAGVAPADCVQCLEGAAREIPRCFREARREEQGEGVGVVVSDDCVLRFDMTSSPAPRTSDTCDGTCKLLALAFGVALGIILSFTFNLQ

SEQ ID NO: 120292 - protein, 77 aa, Oryza sativa
  Clone ID: PAT_MRT4530_23426C.1.pep
VVSGVGVVEVRVSCCRLQESVSSSGWCWFCGVGGSWPCCGWWWSTLPQSPAHATESSQAKIPPAEECHSLTQITQIK

SEQ ID NO: 120293 - protein, 76 aa, Oryza sativa
  unsure (1)..(76): unsure at all Xaa locations
  Clone ID: PAT_MRT4530_23427C.1.pep
PPFLIEGGXXXMIXSDPVRALARPQMDGPDPTETHGKYQAARHFFVEIKKENLGNCLTLIALTPKKKKKKKKHPPP

SEQ ID NO: 120294 - protein, 50 aa, Oryza sativa
  Clone ID: PAT_MRT4530_23428C.1.pep
PSFVDACAYHFLTFTNLCEGGALLLLSHHPISLFLSLPSLNLVQRFFHQQ

SEQ ID NO: 120295 - protein, 54 aa, Oryza sativa
  Clone ID: PAT_MRT4530_23429C.1.pep
IMLPSIDHWPQKQMKVNSSLILFDCLCFFLQTVFYHVSGDLISPYILKHIISLS

SEQ ID NO: 120296 - protein, 108 aa, Oryza sativa
  Clone ID: PAT_MRT4530_2342C.1.pep
TFDRVCSIPYRPQPLMNSTSKYHRDYPFLPAAASSSDGDGDGDGFYIGEPRNPAAGADSTDVFLFLAVPAGWLVRLAAFVGELVASAILGLVYPVAALIGWLRAVPAA

SEQ ID NO: 120297 - protein, 148 aa, Oryza sativa
  Clone ID: PAT_MRT4530_23430C.1.pep
MRGSHVCSLVSSLVFLWLGVAAAQKASSWKTLSGNAPAIIAKGGFSGIFPDSSEFAYQFALIASSPDTILYCDVRLTKDGLGICLPDIKMDNCTNIPDFYQQGRKSYLVNGVSTAGWFSVDYNGTALGQGFLKQSIFSRSPGFDPSFF

SEQ ID NO: 120298 - protein, 226 aa, Oryza sativa
  unsure (1)..(226): unsure at all Xaa locations
  Clone ID: PAT_MRT4530_23431C.1.pep
MSKEVSEEPEHVRPKDYTDPPPAPLFDVGELRLWSFYRALIAEFIATLLFLYITVATVIGYKVQSSADQCGGVGTLGIAWAFGGMIFILVYCTAGISGGHINPAVTFGLLLARKVSVIRAVMYIVAQCLGGIVGVGIVKGIMKHQYNAVIYNQKKAWDDHWIFWAXPFIGALAAAAYHQYILRAAAIKALGSFRSNPSTDLRWPWLLCCCWPGWTWSYRLHVRECV

SEQ ID NO: 120299 - protein, 282 aa, Oryza sativa
  Clone ID: PAT_MRT4530_23432C.1.pep
MSKEVSEEPEHVRPKDYTDPPPAPLFDVGELRLWSFYRALIAEFIATLLFLYITVATVIGYKVQSSADQCGGVGTLGIAWAFGGMIFILVYCTAGISGGHINPAVTFGLLLARKVSVIRAVMYIVAQCLGGIVGVGIVKGIMKHQYNANGGGANMVASGYSTGTALGAEIIGTFVLVYTVFSATDPKRNARDSHVPVLAPLPIGFAVFMVHLATIPITGTGINPARSIGAAVIYNQKKAWDDHWIFWAGPFIGALAAAAYHQYILRAAAIKALGSFRSNPSN

SEQ ID NO: 120300 - protein, 57 aa, Oryza sativa
  Clone ID: PAT_MRT4530_23433C.1.pep
INYACNFNSLISFYIFRIWLCFSFDGALPAVAIAHARGSGMCLLAPPPPATFFRTRG

SEQ ID NO: 120301 - protein, 633 aa, Oryza sativa
  Clone ID: PAT_MRT4530_23434C.1.pep
MASEIEVLEDTTAAAAAPAATIGGGEVAGAGAGEEGEAAADAEALKDDVYTGAAYGDLEKLHRLVEREGRPVTEPDALGYHALQWAALNNRVAAAQYILEYVLSFSVVCFGGMTVLSLLSGQHGADVNAIDHTGQTALHWSAVRGHIQVAELLLKEGAKVDAADLYGYQTTHVAAQYGQTSYLYHIVAKWNADPDVPDNDGRSPLHWAAYKGFADSLKCFSLGCTPLHWAAIRGNLESCTVLVQAGKKEDLMVQDNTGLTPAQLAADKNHRQVAFFLGNARRVHERGCVISGQYSSNMTLLFGLFSWLGIFLATAGLVMFYKCSRKDPGYIDKNTRDAQNQRDDEPLLKRGLDNPELLAGNWSQLCITCKIVRPVRSKHCSTCDRCVEQFDHHCPWVSNCIGKKNKWEFFMFLILEVSAMIITGVTAVIRVVGDPDSPASFGGWLNYSATNHPWVVSFVVMDLFLFFGVITLTVVQASQISRNLTTNEMANAMRYSYLRGPGGRFRNPFDHGVRKNCSDFLLKGYNEDIERVEQTLQPDEELGMIQMTRSAVSQNGESMSLHANGTDHGCADPQGNSKSHRHSHGSSQCCSHSKRPDKTPLGLGLGLGRNNPSSRYTRSLPSIHSESSAYLPL

SEQ ID NO: 120302 - protein, 40 aa, Oryza sativa
  Clone ID: PAT_MRT4530_23435C.1.pep
ISIYKRSCPHLVYSLVNAIIRLMSLTSTSFGCLFSYSIRP

SEQ ID NO: 120303 - protein, 179 aa, Oryza sativa
  Clone ID: PAT_MRT4530_23436C.1.pep
LNELQHNNQIAREYVIGTVLAIDCASDLLLIQSTRVHFMLRCGMPHPPLPIASQFPKPLSKVVMVSWPHPTRNRTAVTGEISHPGRQFDELSPVNPLGFTTMLSEVQIRSEQGSSGGPLLNGQVQVTGLLHGGNGSFSFFISLPNGDSLYDLLALIQHCSAPFTSFWMLCVWVNMLRLF

SEQ ID NO: 120304 - protein, 66 aa, Oryza sativa
  Clone ID: PAT_MRT4530_23437C.1.pep
SLSRLHATQQRCDPTSYEAQPASLVLAGGKMLHCWCAQPGTSDGRLLPAYCLALVRPHAGHPRTAV

SEQ ID NO: 120305 - protein, 72 aa, Oryza sativa
  unsure (1)..(72): unsure at all Xaa locations
  Clone ID: PAT_MRT4530_23438C.1.pep
SIVCLVKYICIYMVVHSYYLHIYVPKILFLSRATSIGLTRANLLASQELRTVHLNSSLSDPIHINTXASHGE

SEQ ID NO: 120306 - protein, 83 aa, Oryza sativa
  Clone ID: PAT_MRT4530_23439C.1.pep
AWPGAGVTTRNNPTGVPYVRALILVPGCKAQHTQRQTRNSGRLWRRPQALDGRHELDTKTFILQELLFWVWEKLSNTEYNPRS

SEQ ID NO: 120307 - protein, 130 aa, Oryza sativa
  unsure (1)..(130): unsure at all Xaa locations
  Clone ID: PAT_MRT4530_2343C.1.pep
LQQLQIFRFRRVGQQLRLSSPTIFFIFMIGVGTMHLKRCQTVKLYIAAPLTFXIVMVLFGFXKQLIGYNIVAFRHPSTVFRFGKSTREIMAKMIEALGFGVIWFERRLSFRLRRSQGLLWILWVPHTHTA

SEQ ID NO: 120308 - protein, 42 aa, Oryza sativa
  Clone ID: PAT_MRT4530_23440C.1.pep
CSPHKGSDRAGGDLNTLWIYTRWPPLGAGTTEDPMMNASGLT

SEQ ID NO: 120309 - protein, 341 aa, Oryza sativa
  Clone ID: PAT_MRT4530_23441C.1.pep
MEEHDYDSNSNPPLMSTYKHLFVEQHRLDMDMGAIDVDECELPVIDLAGLMEAEQVCRADMVRAASEWGFFQVTNHGVPQALLRELHDAQVAVFRRPFQEKVTERLLGFSPESYRWGTPTAKCLEQLSWSEAYHIPMTTPRPSTSIRARAVIEEVSRAMYELAQKLAEILMRGLPGAGEGETMVTTREETCFLRLNRYPPCAMAMGGFGLCPHTDSDLLTIVHQQQDTVGGLQLLKGGRWVAVKPSPSTLIVNVGDLLQAWSNDVYKSVEHRVMANATLERFSMAFFLCPSYHTLIIPSSSHVHDDDAHYRSFTFGEYRKQIMEDVRSTGRKIGLHRFRTR

SEQ ID NO: 120310 - protein, 79 aa, Oryza sativa
  Clone ID: PAT_MRT4530_23442C.1.pep
MAPVATTEDEDEEGPVGLDRGVAGGCGAQVHGVVRCYNVKTSIASAFSSTASDSDRWDWDWLHAVMATQQKRQRAMAAP

SEQ ID NO: 120311 - protein, 489 aa, Oryza sativa
  Clone ID: PAT_MRT4530_23443C.1.pep
MRVSVLVNATLRNNLKKLYDDHFRIEEIIDQKIREEFKFPTPKCLDRFSDVGWNNSIEPNPLVTGCAFKKIFVKIEIDGLELTRKQGPVNSERDEGAELYCERKKRVKWHQLWPSSAKDMKVVPVPRARAAPRRHIWIPVILILVAVTVLWIYLYPPQDYTYPVRDWYPVRDWFPAEPARELTDEETAARVVFRQILSTPPFPSRNPKIAFMFLTPGKLPFEKLWELFFKGHEGRYTIYVHASREKPEHVSPVFVGRDIHSDKVGWGMISMVDAERRLLAKALEDTDNQLFVLLSDSCVPLHNFDYVYDFLMGSRHSFLDCFDDPGPHGVFRYSKHMLPEVREIDFRKGSQWFAIKRQHAMVVVADSLYYTKFRRFCKCFFLLSQPGMEEGRNCYADEHYLPTLFLMMDPAGIANWSVTYVDWSEGKWHPRSFRAKDVTYELLKNMTKELLQRPCLWNGLKRPCYLFARKFYPETLNNLMYLFSNYTIF

SEQ ID NO: 120312 - protein, 105 aa, Oryza sativa
  Clone ID: PAT_MRT4530_23444C.1.pep
EHYLPTLFLMMDPAGIANWSVTYVDWSEGKWHPRSFRAKDVTYELLKNMTSVDISYHITSDEKKELLQRPCLWNGLKRPCYLFARKFYPETLNNLMYLFSNYTIF

SEQ ID NO: 120313 - protein, 236 aa, Oryza sativa
  Clone ID: PAT_MRT4530_23445C.1.pep
MKGNNVSQLALLLSYLVLTTRGEELKPINNGENTSRILTTLQVNKTIQMEPSSFPIGMDIKSPLVGAISQAQLSTIDCPIGTIPIVRNNNLANMMVQRIGTLANDDLPMLGAGIEYWDEIYGMQASINVYEPSVKKDSKDVSASWIQISVVPKGTNGIGIGAGSCVYPRSGDSFARFHIRWDNEELNKSCSDHNCPGFMQVSHSVGLGGRINPISVYNGPQYVINVLIFKVPCLSM

SEQ ID NO: 120314 - protein, 207 aa, Oryza sativa
  unsure (1)..(207): unsure at all Xaa locations
  Clone ID: PAT_MRT4530_23446C.1.pep
MKVVPVPRARAAPRRHIWIPVILILVAVTVLWIYLYPPQDYTYPVRDWYPVRDWFPAEPARELTDEETAARVVFRQILSTPPFPSRNPKIAFMFLTPGKLPFEKLWELFFKGHEGRYTIYVHASREKPEHVSPVFVGRDIHSDKVGWGMISMVDAERRLLAKALEDTDNQLFVLLSDSCVPLHNFDYVYDFLMGSRXXFLDCFDDPG

SEQ ID NO: 120315 - protein, 151 aa, Oryza sativa
  Clone ID: PAT_MRT4530_23447C.1.pep
ILSSPLLSSATTSLPPPPPRLLLTSLPSLSSPKSLEERERNGAVVGLGETAKGSGGGGGGGEVTLETLRRKMSEFARERDWEQFHSPRNLLLALVGEVGELSEVFQRAGQAPPRLPGRGAREVPLRRGGRGRRAPLPLPPLRHRPRQRCFW

SEQ ID NO: 120316 - protein, 101 aa, Oryza sativa
  Clone ID: PAT_MRT4530_23448C.1.pep
MACSAVRFARKQQIVIRTDEPTRRHCRHVREGLRFGEGSPGLPHGRRKWPGHSIQGIDGSMRGGKVACERRVGGARAGPTATTGRHEGLEGCMLPLAGFSF

SEQ ID NO: 120317 - protein, 198 aa, Oryza sativa
  unsure (1)..(198): unsure at all Xaa locations
  Clone ID: PAT_MRT4530_23449C.1.pep
HRNFVLPHPHVALPYSTHQTGATLLSASNKPPDPPGLFPLLSPLPCSLFLSLPTRPPAPPSSAFNEPPSITTSFLRLLPLSPPSSPFSLYPPLPPPPPWRRRXGVLHASGRSWSAGASAAPXPPPPLPTASSPPPSLLLPTAPRPLPTXHRCRSPPPPPPPSPLTPPPPLLPTVVVPRRERPEGEREGEEEEKEREDD

SEQ ID NO: 120318 - protein, 182 aa, Oryza sativa
  Clone ID: PAT_MRT4530_2344C.1.pep
CRCRRSGRESGEVIMGRGESSDRDSLPVILLLRCPGDGPSQSIARCHQPLPLVTVIHHRRERHGPVHGRKPARARRRSRCHLPHGRLPLRRPLHLPHPSTGALAGLALSGVLVNMTTSDPTLATEIAEVAAAKGYAAVDASVSGGDRGACKATLSIFAGSDAAVVTRLTPLFKLMGNALYMG

SEQ ID NO: 120319 - protein, 103 aa, Oryza sativa
  Clone ID: PAT_MRT4530_23450C.1.pep
QLLIIPHPYPVVKKAQKKECAYIAFKTNPNSMVTPITEKSSISRALPNNVQANANRISKKKAQRLKQNKENKFGASTPIQNKSYQNVKNPPKPSKAAFRKKKN

SEQ ID NO: 120320 - protein, 510 aa, Oryza sativa
  unsure (1)..(510): unsure at all Xaa locations
  Clone ID: PAT_MRT4530_23451C.1.pep
IDVYGLTSLLHKLSTSFPTMVSKKTSHETVNDFRPISLMGISLKVITKLMDDRLQCVILKLISENQYGFIKGRIIQDCLAWSFEYIHQCQPSKREIIILKLDFEKAFNTIEHSVIISVMQLMDFPVKWLEWVKMVFSSTQSTVLLNGVPGKPFSCKRGVKQGHPLSPLLFVLGAKLLKXVVNKAFNLGLLSKPINEADGTCFPIIQYADDTLVLLKASQKEIFCFKALLNSFAQSTGLKVNFSKSSIYPLNLSSKKAELLAELLGCPIGTLPFXTYLGLPMGTTRPRVVDFAPLVDRVEIRLTSSSMFLPQGXGGGRPTLINSVLSSIPTYYMCPLQLPVTVVKAIDTARKNCLWKGNNQGSTRKSLASWDMVCRPQRXKGGLGIVNLRVQNTTLLMKHSVKLYKSANLPWVNLVXEFILRSKGPILNKGSFWLRDILVLLDIFRGIAXCTIQSGNSALFWEYLWNDELLSDKYPNLCHLALQKEESISNMCSRSLEDSFLLPLSTQAYV

SEQ ID NO: 120321 - protein, 72 aa, Oryza sativa
  unsure (1)..(72): unsure at all Xaa locations
  Clone ID: PAT_MRT4530_23452C.1.pep
GCSIXVTIVALSYFDVLQRGPSLYRVAAYLHVLAAPSLFSSWPYIQLAGPGCPSPRLGKLCGYRASPSCGAF

SEQ ID NO: 120322 - protein, 318 aa, Oryza sativa
  unsure (1)..(318): unsure at all Xaa locations
  Clone ID: PAT_MRT4530_23453C.1.pep
MPPHSIGVCYGTNGDNLPAPXGDVVQLYQSNHIDAMRIYLPNDTILHALRGTRIAVVLDAPDVRSLASNDATNASSSAAQAWVQANVRPYYPDVNIKYIAVGNEVKDGADKPKILPAMNNIRDALSAAGLGGHIKVSTAVEMSLVAGSPLPSGSAFADPPSIMGPIVKFLASXGSPLLANVYPYYAYKNDNGVDLNFALFRPSSTTIDDNGHTYTNLFDAMVDSIYSAMEKEGGSDVPVVISETGWPSADGRGASKDNARVYNQNLINHVGKGTPKRPVALETYIFAMFDENQKKGDPIEKHFGLFNPDKSPVYSINF

SEQ ID NO: 120323 - protein, 69 aa, Oryza sativa
  Clone ID: PAT_MRT4530_23454C.1.pep
LSGLMFTQESVVTACREGHIKIWTRPSESETQTNSSEANPTTALLSTSFTKDNKASLSSKIISGSTFKQ

SEQ ID NO: 120324 - protein, 56 aa, Oryza sativa
  Clone ID: PAT_MRT4530_23455C.1.pep
KHLGFSRAPSIRVFNGVKTGVIRPYPVVNRSCYQIRMEIAGALDQNNCLDKEDKGG

SEQ ID NO: 120325 - protein, 250 aa, Oryza sativa
  unsure (1)..(250): unsure at all Xaa locations
  Clone ID: PAT_MRT4530_23456C.1.pep
GTFGCSIGKMPFTYLGLPLGTSKPNIIDFAPLIDRVEGRLPSTAIHLNYGQRLTMVNSVLSSLPTYYMCTLKLPKKAIQHIDRARRHCLWRKXSNMEIKTHSLAAWDLVCRPKKKGGLGVINLEFQNIALLLKHLDKFXNKKNLPWVQLIWNKHYSNSDKPPQAHKEKGSFWWKDIFRLIPFFRAFAQCTLGQGDTALFWKDKWTDSYLESEFPILFSFARNEDSTIQSFLQASELSQNFHIPLSSQATQ

SEQ ID NO: 120326 - protein, 147 aa, Oryza sativa
  unsure (1)..(147): unsure at all Xaa locations
  Clone ID: PAT_MRT4530_23457C.1.pep
IRLTARNTPNPSAEPNIRAPXRRQATISTEWPDHDKTTAGTRDHWSRQNQMDQDTAAGDDHHRQARNDDQRRHQPDTAATAXSRDNTNDLMDTNDPRAHHKQTTTPTLNADERRARSTNSTRRDHTGMARHAKKPDQRAVPKGGAHR

SEQ ID NO: 120327 - protein, 370 aa, Oryza sativa
  unsure (1)..(370): unsure at all Xaa locations
  Clone ID: PAT_MRT4530_23458C.1.pep
SYRFDVHFTHXTIIKCQVFTDFIADWTVPEEDKVDRTDNKHWTMAFDGAFNSQXARAEFIFTSPTEDQFRHADXVRFXATNNNGEYEGLLAGLRATASLVVKRLVWKGDSEIVANQGHKDHKCSNPELSKYLAEVRKLERRFDGLEVCHVYHKDNADANNLAXRAFRREQVEPDTFLEVLTSRSIKSSPDGNINSTTNVSSKATTQIDKTITDIETTXDWRTPLIDFLNADKLPEDDTEAEXYTKLLAQALQTILMSFSCWGLDILEYFSRGQGDYKFLFMAINKFIKWIEAEPTREIRAEHAIKFIRGIFYRYGLPYQMLTDNGSQFTSGTFQDYCFELNIKICSALVSHPQSNKQVEWANGIVYTIGS

SEQ ID NO: 120328 - protein, 99 aa, Oryza sativa
  Clone ID: PAT_MRT4530_23459C.1.pep
RRAGLLEYTPSTPPPRAGSPDYTPLSPPPRAASPEYSPSTPPPSPVPSDAKFGTFPLWGRRRRHHPYQRGGSSIACSPRAVQVAGGHHHHPRWAILHGY

SEQ ID NO: 120329 - protein, 160 aa, Oryza sativa
  Clone ID: PAT_MRT4530_2345C.1.pep
TDEDTTSSDITMTTLCINQPKHQLQTDLAADLEGISGPMSTCWKAYGVYFQMVLVPCQNSYRAAGNLQNKPRISLLGEVNRVSARLITRGDVVLRLRGSVACSFRSRIELCRDSAQIDCLSIPIGRSGPNIPHQLVSEHDCPLGNLSFYNQKITTQKNHP

SEQ ID NO: 120330 - protein, 67 aa, Oryza sativa
  Clone ID: PAT_MRT4530_23460C.1.pep
SEHPCVCNLFLNRGMSHVFSLYSHLIYDDKHRCPPLLSGIYQSFYPKKKKKKKKKKKKKKKKKKKKK

SEQ ID NO: 120331 - protein, 95 aa, Oryza sativa
  unsure (1)..(95): unsure at all Xaa locations
  Clone ID: PAT_MRT4530_23461C.1.pep
MEGQEEDGRNETTRYQGRQPKGTEPQAAADDKDKREPPAGPLAEPGEXQEPSPDRTAIRPVESAGIPFLNMTKTTGMGVSKSSPKGATGGTQGIA

SEQ ID NO: 120332 - protein, 754 aa, Oryza sativa
  Clone ID: PAT_MRT4530_23462C.1.pep
MAMAASSCASCSAAADSFSSSASSCCCCGSSRIQRRRGVLLLCFVSGVHAVEPDGDGESAARRLAGLHAIDASAARRVSGLHALDSDYSTPRRVTGLHALDPDSSAPRRVTGLHALDASAPSCVTGLHAIDSDASTPRRVTELHAIDSSAPRRVARLHALDSDSSAPRGVAGLHALDASAPGRVAGLHAVVPTATGRVAGVQPQHAASVPRAVRRRVWHVSAVAPPPPPPSLPEARLQHRLLAARGPGRRRPPSPPSLRHPARILGSFSCRHHLAQLSPPNSLADAGRGGEILTASQPPLTRTPRGRGGVQATSTSTSTSKTMATSGSSSSPSSPSSPKRQRVAPPPPRRTDMLMALPPDILDDRILALLPFDKLVRTSCLSRAWRRRWESVRNLEIELPRAYSGGGRALWRCARPVRFFSARVARRDVFRAARWLRALARKGVQDLSLEFSLAGKQRPLPGPALFSCAALVQLDLEQCDMPAAPPGFLGFPNLERLDLVYVTLPFAGAGTQLEHLIVAAEKLAVLNLSPVITINGGGVDTWAIRAPKLRKLYITMEMGDDNGCRIPMPLPMLEEVTISFDRLFGTQDFLDAFQNISTVNKLFFISDKLRLTSFTQFNINMLEGITCKFENLREGGLIIDFGQRSSVLSLVSLLKFAPHIEHLYIRTDHSILDPVSSEDEMDEDSLNSEDEFDEDSLNSQDEIDEDSLNSEISSDLLASLKYVTLINMKHPVLVDVAFVLWEKYFGTCYCSDSR

SEQ ID NO: 120333 - protein, 125 aa, Oryza sativa
  Clone ID: PAT_MRT4530_23463C.1.pep
QPPPPPPPPLAPPCQAAATRRGPAAAACSPSSSPAASWCSSTGPSSSPTTSAPPSPPPTSPTSPSPAPPSPTSSPSGSTSTTPASASTSTTTSSTPSSASAASASATPPAPPRPSSTSGGRAPTT

SEQ ID NO: 120334 - protein, 564 aa, Oryza sativa
  unsure (1)..(564): unsure at all Xaa locations
  Clone ID: PAT_MRT4530_23464C.1.pep
DAFDFLKGDLLAAVQWFWNLNTSNLQDLNSAHISLLPKKXDTSSADHYRPISLMLSFAKIITKTLANKLAPRLKVCLSGKELFAIILFVQNMVKFLHRHRKXCLFVKVNISKAFDSVSXPFLLEVLQRFGFGTRLHHWVSNLLASSSKILFNGSPGETEELPILTPVSNKMSRFRCSLYADDVAXILISFAKASSLHTNNEKTEIFPIACEGVDVQDITQVPQGSIKTFPCSYLGLLLHMRKLRKVDSTPLIDKCGARLPGWKGKFFTSAGHETLVKSLLTGLPINHMTGIQTPKXWVIKRIDRFRRALLWKGDDPNNVSPGYSLVXWNTVCMPKNLGGLGILELNKFSRAIHLRXFWFSWKEENKPWLGYVDKSLFQAATEIMLGDGKKXGLFWDNNWISNQCPKHLAPRLFSLAKQKRNTVHHELTGNKSIFSFQQITTIKEIHELISLGTLIQNVQLLPRLPNDILWKFSSNGIYTSKGAYVLQFXGIFVTTDFAKIWSAPTEPKHRFLGWLILHQKTPTAQNLLHRHRPCDWICPLCREAFEGTAHMFIECSFTINVWNK

SEQ ID NO: 120335 - protein, 90 aa, Oryza sativa
  Clone ID: PAT_MRT4530_23465C.1.pep
HASAHFVRASPPPHPSSRATVSTNPLNPLLRLADAMGSPADDSFPACGDDAIRDVYGIGGGGEEDEPPLFQYLLELGPRSPSDYLDLPPS

SEQ ID NO: 120336 - protein, 179 aa, Oryza sativa
  unsure (1)..(179): unsure at all Xaa locations
  Clone ID: PAT_MRT4530_23466C.1.pep
YYDVRSRRGGRAGSSDRAGRCQVQCCLQFAKAWMLILVACEIMTEPVREAIXRRSDMISNEGHSAADAHRAVPLSAPAALAFRSTRQRQRAATIGDRYKHLYSALWMNHRLTMTTIFFFAAAQIVHSYWHSVNAPRYGGSVMGHKVVDRNREARHLRLYQDYLDGKSSALLMLLERRER

SEQ ID NO: 120337 - protein, 330 aa, Oryza sativa
  Clone ID: PAT_MRT4530_23467C.1.pep
MVPLLRLLADTATMEMAAGMEVAARLTMTGGSGGEAGDGGRIQALQADLAPPHGDGVGAAVLEVAAVLRRLLLASVAGGGGSSDGSRLAATVPEEAAATSALKAGKESDVRIKSTGTLTNLKARFWTCTGVKQIFQASLLDTTGNCDPLCSVDEVSSQYFEANYKPKNDLLKALTIIATALAGAAAINHSWVAEHQDIAMVLVFALGYAGIIFEESLAFNKSGVGLLMAVCLWVIRSIGAPSTDVAVQELSHTTAEVSEIVFFLLGAMTIVEIVDAHQGFKLVTDNISTRNPRTLLWVIVYAIILNDIISMDGFLLLMPCYQNGLEPHSF

SEQ ID NO: 120338 - protein, 33 aa, Oryza sativa
  Clone ID: PAT_MRT4530_23468C.1.pep
VQTGISRGQLCRRVSAYRRRDQCKLAEIPYTRR

SEQ ID NO: 120339 - protein, 109 aa, Oryza sativa
  Clone ID: PAT_MRT4530_23469C.1.pep
GGGQSFLGYLFGGNEAPKPVGKPAPAVAPAPGPAPAPIGGVGAPVEKPSPAKGDAPKQIPVGIQGSRSNNNSHKADGQNPGNFFTDCPLTKVHAAPGGGFSLGYLFGGK

SEQ ID NO: 120340 - protein, 239 aa, Oryza sativa
  unsure (1)..(239): unsure at all Xaa locations
  Clone ID: PAT_MRT4530_2346C.1.pep
MPFATELTKRLGIRVPVVQGGMMHVGTADLASAVSNAGGLGLITALIFPTPEELRKEIQRCRTLTKNPFGVNITLLPSMVPPNYAAFAQTIIDEGIKVVKTAGNSPGPVITQLKKAGIIVLHKCTTIRHAQSAVXLGVDFLSIDGFECAGHVGESDITNFILLSKARQTLGVPFIASGGFADGYGLAAALCLGACGINMGTXXLCVLVEAPVHXQVKEEIVRAQETDTTLLLRRWTNTT

SEQ ID NO: 120341 - protein, 72 aa, Oryza sativa
  Clone ID: PAT_MRT4530_23470C.1.pep
MRLCRRVGRAAMEQGGMSGCGKQAAEATDGLHLLFQEEIFRGLDFEKIKERFQAMGDRRIELPKPSRVPKRA

SEQ ID NO: 120342 - protein, 449 aa, Oryza sativa
  Clone ID: PAT_MRT4530_23471C.1.pep
LGVLRALGVTWAAAARPQRQQPRLAAQTPRGPAPGADGRRAAAELRGIPGRIAGNGACAVASLYTLQGKKGVNQDAMIVWENFCSREDTIFCGVFDGHGPNGHLVAKRVRDLLPIKLGADLGTDEGRQTSTSSIKSNGDETGSPGNMGRDAEQNGEYPEIFTALRTSFLRAFNVMDRDLKLHKSIDCFFSGTTAVAVLKQGRNLIIGNLGDSRAILGTRDKDNQLMAVQLTVDLKPNIPSEAQRIRQRRGRIFALPEEPEVARVWLPKYNSPGLAMARAFGDFCLKDYGLISMPEVSYHRITEKDEFVVLATDGVWDVLSNTEVVSIVNRATSRASAARLLVESAHRAWRARFPTSKIDDCAVVCLFLDTDELSETSSSMARDMTNAVEVSSGQHSNTIQLSTGVSSDVVTAVLTDGDDLSAVDAVAKLVTLTDLPNNASGATQSITTK

SEQ ID NO: 120343 - protein, 957 aa, Oryza sativa
  Clone ID: PAT_MRT4530_23472C.1.pep
MALSAGDVPTMYTVLVNSLSADEAVRRPAETALAQCEARPGFCSCLLIALQLAVLISKIARLDYPKEWPDLFSLLAQQLQSADVLASHRVFMVLFRTLKELSTKRLAVDQRNYAEITSHLFEYTWNLWKSDVQTILQNLSMLSQRSDIDSILEQSNDLMLICDRWLLCLKIIRQLIFSGYASDSTTAQEVWQVREVCPTVLTAIQSLLPYYSSYKDKQAKLWDFAKRACTKLMKVLVTLQGRHPYSFVHQAVLPAIVDFCLNMITNPEQGGASFEEFLIQSMVFVKSVLECKEYKPSPTGRVINESSQPLSLEQRKKNFGAVASDMLKIVLPGDRVMLLCNILIRRYFIYTAKDLEEWSENPESFHHEQNLVQWTEKQRPCAEALFIVIFENYREQLAPVVVSILREAMALSPPLETDVTAGMLLKDAAYTAAGHVYYELSNYLSFNEWFHGSLSIEISNGHPNMRIIRRKIALLLGQWISEIKGDTRKLVYHALVGLLQDNDIAVRLAACSSLCYLFQESSFSELDLFECLPTCWTMCFKLTEDVQEFDSKVQVLNFISVLLEHAGDKVIPFASQLSHFFQKIWDESAGESLLQIQLLAALRTFISSVGYQSPLSYHMLIPILQSGINVDSPDALNLLEDSVLLWETTLLNAPSIVSQLLDLFPYLVGIVTRSFDHLEVTINIIEDYIIFGGSEFLKRHGASLANILDTIVGNVNDKGLLTALPIIDLLIQLFPQEAPPLISSALQKLIFICLNQDDEHNPSRTTVRASAGAILARLLVMNTNFTGKLLSEPALLTSIQQTGISVNNNLLLSLVDMWIDKVDDANVIQQKEYAMALSVILTLHVPQVIDKLDDILSVCTTVIMGGREVKTEDDTSGDITSSSWLGNDNSGYSNTSKELRKRQVKDSDPIKQASLEDMLRDNLKACAALHGDATFNAAIGRIHPAAFAQLQQALNIA

SEQ ID NO: 120344 - protein, 120 aa, Oryza sativa
  unsure (1)..(120): unsure at all Xaa locations
  Clone ID: PAT_MRT4530_23473C.1.pep
PVLAPSSPSPSSLSSPSLRLSSVPRTSWPCSSSSPRRHPPPPPTSLPFSCSRASSPTTTTLFSPPSPPPPPTTTLGVVFPVTPTTPRSPPSTSPWTPSLXPPGLPAPAPSPPRKKACCPP

SEQ ID NO: 120345 - protein, 163 aa, Oryza sativa
  unsure (1)..(163): unsure at all Xaa locations
  Clone ID: PAT_MRT4530_23474C.1.pep
PGKGPPGRLTFPPGGGVEKILVPDPPGPPGFQVCPPEGRVTPAXFGQKTAAGSINQGVFQYGPFFMEVQGCSFVREKFSGIKGNKWPGLEVFNRGVFPGLVLIFGAVKKALVFWKGAPRQRGGGFLGVGRLILKIILFIPIWEAFQGNHAPPLFINLIWGFVL

SEQ ID NO: 120346 - protein, 49 aa, Oryza sativa
  Clone ID: PAT_MRT4530_23475C.1.pep
DRLDPDLYRLVVEVVKCVRVPNMLNAGPQGASFDLSHDTRVTEEWEDEW

SEQ ID NO: 120347 - protein, 69 aa, Oryza sativa
  Clone ID: PAT_MRT4530_23476C.1.pep
RSSSPASSVSPWFGTYRVLYLGPFSVEPSSYLYLECPGDYCWDTERLLAYPETLDKNRELEVIHYMWAM

SEQ ID NO: 120348 - protein, 1267 aa, Oryza sativa
  Clone ID: PAT_MRT4530_23477C.1.pep
MASTAGRGEDDEREKKKKEGSGNDGDAGKLPFLGMFRYADGVDKALMAVGTVAAMANGMSEPLMTVVFSAVIDCFGGDDVSTVLHRVSKVVLYYIYLGVGTSMASFLQVSCWTMAGERQSACIRSLYLEAIITQDIAFFDVEMTTGEAASRISADTVLIQDALGEKVGKYIQVLTAFVGGFVIGFIRGWMLALVVMACIPPSIFSFALVSRLRAQISGKTHVSYSYAGNVVEQTIGSIRMVVSFNGEKRAITMYNTLIKKAYKATIMEGIISGFGIGSIFFVVYCSYSLAFWYGAKLVISKGYTGGQVINVVFAILTGSMAIGNASPSISAIAEGQSAAHRLFEIINRKPNIDITGTSGIILEDIKGNVELKDVCFSYPARPEQLILDGLCLQVPNGTTMAIVGQSGSGKSTIISLVERFYDPQDGEVLIDGINIKTLKLHWIRGKMSLVSQEPLLFMTSIKDNITYGKENATDEEIKRAAELANAANFIDKLPNAYDTMVGQHGAQLSGGQKQRIAIARAILKNPKVLLLDEATSALDVESERLVQEALNRVMIGRTTLIVAHRLSTIKNADCIAVVHQGKIVDQGSHDELITHVRGAYSQLIQLQQTHTEEMHDVQYSEVSTSRLKSRSLSLEQSMINDSPRNRRKNSLAKHIGSSGSDGLHKHGLTDEPEDKECGDNKDINKAPIRRLFNLNKPEAPILLLAIITAFVHGLLFPIFSIMMSGGIRTFYYPPHQLRKDSRFWALMCILMAIISLVSIQLEYFLFGMAGGKLIERVRCLSFQSIVHQEVSWFDDPSHSSGSLGAKLYIDALNIRRLVGDNLAILVQCIVTLIAGFTIAFASDWKLTLTIMCPIPLVGLQNYVQLKFLKGFSEDAKVMYEDASQVVTEAIGSIRTVASFCAEKRVIKTYNQKCQASMKESIRSGMVGGLGFSFSYLMVYLTYALCFYVGAQFVHGGKSTFKDVFRVYFALVFTAFGISQTSAMASDSSKAHESAASILAIIDRKSNIDSSIDEGIILEKVNGTIELNHVNFKYPSRPDVQVLCDFTLGIPSGKTVALVGESGSGKSTVIALLERFYDPHSGTISLDRVELKNLKLSWLRDQMGLVSQEPILFNDTIHANIAYGRKGQVTEEEIIAVAKASNAHEFISSLPQGYNTTVGERGTQLSGGQKQRIAIARAILKDPKILLLDEATSALDAESERIVQDALDQVMVSRTTIVVAHRLSTIKGADVIAVIKDGSIAEKGQHDSLMRINGGVYASLVDLHSKTP

SEQ ID NO: 120349 - protein, 68 aa, Oryza sativa
  Clone ID: PAT_MRT4530_23478C.1.pep
SRVFFFFFFFFSEAKRLLCISRNSDIDRSTTCKIDDHDVFCPYWGFSCMITISSLADKQWAAVDNYMG

SEQ ID NO: 120350 - protein, 352 aa, Oryza sativa
  Clone ID: PAT_MRT4530_23479C.1.pep
MRQRADNLREKVRTLFRTSGDVVARMKLVDSIQHLGVGHLFNEEISTTLSDIHASEFTSSSLYEVALRFRLLREHGLWVSPATFNIFKDDDGRWWKDLTGYVGLSYLRDRLVESYTWSQMLFYEEGLALTRIIFTKIIVLMVIMDDTYDSHATIQECRKLNEAIQRWDESALFLLPEYLKKFYNELLNNFKEFEDQVAINDKYRVAYAKKEEAEWSHNNYKPSFEEQVALSTKTSTVQLLCVSTTVGRARTEAMLKEQQRSGTVKKPYDKARVVQVATAQDGACACMREQRARVDWEHGHRPLAPAGSGKSAAACMDICPCGRRTSALARTWQRGGRRPSRLGDIGVERDLM

SEQ ID NO: 120351 - protein, 103 aa, Oryza sativa
  unsure (1)..(103): unsure at all Xaa locations
  Clone ID: PAT_MRT4530_2347C.1.pep
MEKVRITPPNYRGHPNYPPEPXNRTFFTPNYKYRTNYXPRPNPRXFWSTWRTRGSPVNILFIKKCGTHLSYTTLSSLYSLSLSLTSLSHFSRRWRMRRGQHGG

SEQ ID NO: 120352 - protein, 113 aa, Oryza sativa
  Clone ID: PAT_MRT4530_23480C.1.pep
MTLLISIVQPPSLLAIQFQPLQNNRFKRNNPAISARARTVRARAAELPAGVVVPREQPKLSEPFLGFTKTAEVWNSRACMIGLIGVFIVELVLSKGVLQTIGLEVGKGLDLPL

SEQ ID NO: 120353 - protein, 133 aa, Oryza sativa
  Clone ID: PAT_MRT4530_23481C.1.pep
LMSLGHYSMRVCFSGMAFYLRDAVLLLNLRALIASFWKRIKTYAKLRKALSSLDGALPDATYDEICAYDDECAICRGPMARAKKLSCNHLFHLACLRSWLDQGLMDGYSCPTCRRPFFLSSQGHTRSTAEVGN

SEQ ID NO: 120354 - protein, 76 aa, Oryza sativa
  Clone ID: PAT_MRT4530_23482C.1.pep
IISHSNLNLNSNIFYIYSISIHLKFIHLKFIVPKFISQKVYIPDSNLNLNSNFLYIVFLYINFSNFLFFLNFCVVY

SEQ ID NO: 120355 - protein, 94 aa, Oryza sativa
  Clone ID: PAT_MRT4530_23483C.1.pep
MAQVADTVALHPWLLDLLPLLIVLLISTHVLVLVHTSPSRESSRPPSGSSVLVPCPSGAPSVQGQALRELLHLERNQGKLSEYKTRMVRLKPKK

SEQ ID NO: 120356 - protein, 404 aa, Oryza sativa
  unsure (1)..(404): unsure at all Xaa locations
  Clone ID: PAT_MRT4530_23484C.1.pep
MRALEFQKTYKQAAGSFSEWRGRLVRNFGFVIDLISLLMSLGHYSMIFWLRGMAFHLVDAVLLLNLRALIASFWKRIKTYAKLRKALSSLDGALPDATYDEICAYDDECAICRVGPRINGWLLMSNLSKTSLSVISRSHKIYSRERDNMEEKAANVEISSAKTKWELRGAKTAGASEEAALQFVPMKKQPTASVAYSDSCSRSPNFLTIKNALSPGRLLPALPYCNYARENSTLIRGSEAEEVWLVGLERAERDAYTHACRGAGLDSSWAPPWSSPGMDNPSSSSAVTSVGLSGVQMMMRQLTSVTXLGTTMVEPWSLWPEPVAGSSVVPSSSSRPDGASAAGLRFRGTARPANGSMSEVLSMVDRVREVLPHIPDELIIEVHFYFLSTLVLAITLRTGSDENK

SEQ ID NO: 120357 - protein, 183 aa, Oryza sativa
  Clone ID: PAT_MRT4530_23485C.1.pep
MKSKENGSIQKAGKVDHSQRGRPNWVLVAGGVLLSTLSVRLGCKLKQMFDAKKQNSMPKVKRRPGACDLHSNLYRFNDQTSCYCCMSAVADGVEIRQAPGSPLPKSTDLSPLLLVEIPGPESSKENSGVMWTSSPDRLEDPRKPFQYSNSSGSPCFSESGSDIYNKREVIQKLRQQLKRRDEM

SEQ ID NO: 120358 - protein, 193 aa, Oryza sativa
  Clone ID: PAT_MRT4530_23486C.1.pep
MARAAICLAVFFLLAVISSAASDDPLTTVQQPISQVSHGATMEEKRSSPVKQDEGEEKAASKAVQAGDRRDGELDVGRGSGQDAEHHRGIEIKKLDNDDDDGSDWDSVDDSDSDHDSDSDHDHDSDSDHDSDFDRGSDSDHDSDSNHDIDGDDNDDDDDDNNDDEHKTNKTMSKKKKRSASGGRRVGPGGNKS

SEQ ID NO: 120359 - protein, 184 aa, Oryza sativa
  Clone ID: PAT_MRT4530_23487C.1.pep
MAFMSSASEEESAGLKAPTDARVIRQRYEGDGPILSDDALLPADPGAAAGAAAEQQQQQDEARSVRCECCGVAEDCTPTYIGRVRERFDGRWVCGICAEAVSELRRRDPALAVREAVASHAALCAEFNATVRVNPALCLVRGMRDIVRISCRGRSGDSASPSAAPGGGAGARIGRTRSCALPYV

SEQ ID NO: 120360 - protein, 55 aa, Oryza sativa
  Clone ID: PAT_MRT4530_23488C.1.pep
IVLSRQSHLARSYGMLGLEEVLTLDVCLEAVFFLEREWILCATVVGDTVVVAAET

SEQ ID NO: 120361 - protein, 810 aa, Oryza sativa
  Clone ID: PAT_MRT4530_23489C.1.pep
MWLLPLICFVLALLLAAGASGGGGAAAGGGNGGGGERRGVYVVYLGAVPPRTSPNILQQTHLRLIGAVLKRGQPVESVVVQQYKYAFSGFAARLSAAEAAALRRKPGVVSVFADPVYHLHTTRSWDFLQQQTTAAVDVKTGGSAHRRRRSPRARAAAASASTSSSPTADTIIGLLDSGVWPESPSFDDAGFGPVPARWKGVCMAGDDFNSSSCNRKLIGARYYDVGGEAKRQSARSSGSSPRDEAGHGTHTSSTAAGNAVTGASYYGLAAGTAKGGSASSRVAMYRVCSGEGCAGSAILAGFDDAVADGVDVISVSLGASPYFRPDFSDDPIAIGSFHAVAKGIMVVCSAGNAGPDAATVVNAAPWILTVAASTIDRYFQSDVVLGGNNTAVKGGAINFSNLNKSPKYPLITGESAKSSSVSDTESASHCEPGTLDASKIKGKIVLCHHSRNSDTPKTEKVGELKSAGAVGAVLVDDLEKAVATAYIDFPVTEITSNAAADIHKYISSTSEPVVTITPTITVTEYKPAPVVAYFSSRGPSPQTPNILKPDVAAPGVNILASWIPTSTLPAGEEKPSQFNLVSGTSMACPHVAGAAAAVRAWNPAWSPAAIRSAIMTTAAQLNNDGAAVTTDSGSPATPYDHGAGQVNPAAALDAGLVYELGEEDYLQFLCDYGYDASQIKLVAASLPGGFSCGAGGNASDSKDLISGLNYPSIAVTGLGKAGGTRTVSRVVTNVGAQQEATYTVAVAAPAGLDVKVVPGKLEFTKSVKKLGFQVSFSGKNAAAAAKGDLFGSITWSDGKHTVRSPFVVTI

SEQ ID NO: 120362 - protein, 336 aa, Oryza sativa
  Clone ID: PAT_MRT4530_2348C.1.pep
MAASPLAALGDGSGGFELKNAGSGGGGGTWPGRKRGGTAVELGRGGLEEREVEAVLRCGGEACGGPEDEEVSTNSPPAAPPTAKVGGPGSRQRYEEHPSVDILAEEPASTSCRLQRGRAKEPRRQRRRRRRRVGRGGRGGDKPEREFGPLRSVTPYSYVLVDLCVKEYRELESEPEFRPEVTSDKQSTRLLPRSPAFPVDAHFNLHLMASDFLAILALKPGMALTGTDIPTLGVSTPAPARDESQEALIIPTGRGEACMGDGGGLPSPGSAGGYPPPPRSAGGGPPPPGSAGGHPTLPRFAGGALPAAGASSLDPGKEYDVNGGGSGLRMTATVGG

SEQ ID NO: 120363 - protein, 430 aa, Oryza sativa
  Clone ID: PAT_MRT4530_23490C.1.pep
MKEKDTSKQLLPTRASSSSRFGGKVGSNIAVVLLLVSLGFVLGLTSSNAMFLKSFYPSSLMPSSMAPLRLVLSSTSTSPSPPSPPPPPPPPPPQQPAPMHSMGDEELFWRASMAPKSRRRLPDGVVPKKVAFMFLVRGELPLRPLWEKFFEGQRTDHYSIYVHAHPSYSFTGSPESVFHGRYVPSKAAKWGDASLVEAERRLVANALLDAGNSRFVLLSEACIPVYDFATVHAYLTGANTSFVDSFENGGSRSRYREFFAGRNITLARWRKGAQWFEMDRALALEVAADDELCFPAFRDFCVGRRECLIDEHYLATLVTMLGWGRRNANRTLTYADWSRPVNRHPHTYTAEEVTEKVIGGIRADKRCSYNGASSGGICNLFARKFPPETLQPLLRLAPKVPARGRQKPSLTRIIKQKARPWRIAPPSKSP

SEQ ID NO: 120364 - protein, 97 aa, Oryza sativa
  Clone ID: PAT_MRT4530_23491C.1.pep
MASFVCAMLCTVLLLGSKSGIVCPHRQIACVEKKRDGDHVFVESSHPLLVPDEDILHYYPLAKTPKSGGDRGGLGEDILHYYPLAKTPKSGGNRVSL

SEQ ID NO: 120365 - protein, 88 aa, Oryza sativa
  unsure (1)..(88): unsure at all Xaa locations
  Clone ID: PAT_MRT4530_23492C.1.pep
SGIPASTHASAHTMHTGLREKKIRRERERGGGREGYXSXLSSFASPGEELSLPCRRCSPPWSGVFLYCTLCWGGAPTIFYYLISPFSS

SEQ ID NO: 120366 - protein, 235 aa, Oryza sativa
  Clone ID: PAT_MRT4530_23493C.1.pep
MGRGKIVIRRIDNSTSRQVTFSKRRNGIFKKAKELAILCDAEVGLMIFSSTGRLYEYSSTSMKSVIDRYGKSKDEQQAVANPNSELKFWQREAASLRQQLHNLQENHRQLMGEDLSGLNVKELQSLENQLEISLRSVRTKKDHVLIDEIHELNRKGSLVHQENMELYKKISLIRQENAELYKKIYETEGPSEVNRDSPTPYNFAVIEKTNVPVQLGLSTLPQHSDAEQSTAPKLG

SEQ ID NO: 120367 - protein, 117 aa, Oryza sativa
  Clone ID: PAT_MRT4530_23494C.1.pep
QSLENQLEISLRSVRTKKDHVLIDEIHELNRKGSLVHQENMELYKKISLIRQENAELYKKIYETEGPSEVNRDSPTPYNFAVIEKTNVPVQLGLSTLPQHSDAEQSTAPKLGLQLNP

SEQ ID NO: 120368 - protein, 120 aa, Oryza sativa
  unsure (1)..(120): unsure at all Xaa locations
  Clone ID: PAT_MRT4530_23495C.1.pep
LSQHGGARDVXYRCFICGLXLGPPXDRSLRKPPSPPYGRRSXDSNESSKLTGEDEGEVTLGFGFRSTLPPSRSKSECXRRPSQXAXNGQWXLXTXXQXXTGLXXXXXPPPXLPGXXGLVF

SEQ ID NO: 120369 - protein, 221 aa, Oryza sativa
  Clone ID: PAT_MRT4530_23496C.1.pep
MEISFDAWVGVQRHGQDLADRLAQGFSGLLLHAHPPQLHWSAPALPAKLIPFEIDLPVVPFVVGGRRAGGGRGAADLPAAAVASFVEIGGRLGQAGSELGACVGGAVQQLARQILVPFLAESARGRKWEAIPPQPAAAAAAAATVNEGEVALAVERAEDKGLASERVGDRGPLEVAAAAWFASSGSAIATSIGVAEGGLDEEDGRQFWTSNHLGNTAGQLG

SEQ ID NO: 120370 - protein, 57 aa, Oryza sativa
  Clone ID: PAT_MRT4530_23497C.1.pep
LPKIIWNIYHQYNARTKILLFFPKYDHVVWAKMPAHPDTHSDGLTVLRLRHVNRVWP

SEQ ID NO: 120371 - protein, 99 aa, Oryza sativa
  Clone ID: PAT_MRT4530_23498C.1.pep
FFFYFKREGREESNPRLLLPPQGDNPPEEDPLFPFEKERTARRRVFICREKSPPGKGGENPLFFFMKTLYAGGVPGPQGGGKRKHNTQEGGGEAGTNSD

SEQ ID NO: 120372 - protein, 99 aa, Oryza sativa
  Clone ID: PAT_MRT4530_23499C.1.pep
MLGSGVEEGEREKMKEFVSSREMAMGGDSPTSGDLVLTVGTKQKDWLSGDDRWWWIQWYWWGAARDMEDDDMRTAHARKKREGERRGLTDTIEAFRPVN

SEQ ID NO: 120373 - protein, 970 aa, Oryza sativa
  Clone ID: PAT_MRT4530_2349C.1.pep
MERASVIGGTMVSLMVKLSSIAGPRYSLMAGARSDVIFLGAELESMHAFLEKLSGVDGPDPQVRCWMKEVRELAYDVEDCIDEFMHRVDVVHGAVTSNHGFSSLRGLVSHATRLVAVAWMHHRLASELKGLKARAIEVSERRSRYKLGDDIGMLGGSAMATDPRVSVLYADTPDLVGIDRPASEMVNWLTDDVCTLKVLSIIGFGGLGKTTLAMEVYRRVGGQYSCKAFATVSQKLDTKKLLKDLLSQIAQNEVDHMGTWEEGQLIRKLRECLLNKRYFIIIDDVWSKSAWEKVRCALPENNHCSRLLTTTRIDSVAKSCCSHPDDLIYRIEPLKASDSRNLFFKRIFGYEDVCPPQLKEVSDQILKKCCGSPLAIISIASLLASKPVMLKEQWEKVLISIGSALEKNSDLEGMKQILSLSYYDLPYYLKTCLLYLSLYPEDFKIERDSLIQQWIAEGFIGEERGQSVEDVAESYFNELINRSMVQPMDINCDGKAHACRVHDMMLELIISKAIEENFVTLLGGHPVAAKPQGITRRLSIQCDKEITKTKGGMNLLHARSLSLYVQACQLPPLSDFRVLRVLNLEGCLGLCDNHLKDISILFHLKYLSLCRTWISKLPPEIGDLHSLETLDIRDTNIEELPGTIIRIVQLKYILSGGHTWGKIKLPDGIGSMASLRVISGFNICCSSTNAVQELGTLKGLRELTINWTDFSSGDMKRQEAMMNTLGKLGTSNLQSFAICSRNFGSLEFLDSWSPPPNHLQRFRLSAYYFLPRVPRWMASLCNLIHLNINIEKLSNEDIQILQDLPSLLHLDLWLKSPQKEDKIVIHGVGFPYLQELIFSCEGTSLIFEPAALPKLERLQMAVHVKEAKSYGYQFGIEHLRSLKKIYIQLLCAGASALDIKDAEDAIHTIVKFHPGHPRIDIQKCGMDMHLEERNKRQHPEETNVQNMNASKEDMNHANKKRKEYQSSSAQ

SEQ ID NO: 120374 - protein, 603 aa, Oryza sativa
  Clone ID: PAT_MRT4530_234C.1.pep
MVGMLPETNAQAAAEEVLGDAWDYRGRPAARSRTGRWGAAAMILVAELNERLTTLGIAVNLVTYLTATMHAGNAEAANVVTNFMGTSFMLCLLGGFVADSFLGRYLTIAIFTAVQASGVTILTISTAAPGLRPAACAAGSAACERATGAQMGVLYLALYLTALGTGGLKSSVSGFGSDQFDESDSGEKSQMMRFFNWFFFFISLGSLLAVTVLVYVQDNLGRPWGYGACAAAIAAGLVVFLAGTRRYRFKKLVGSPLTQIAAVVVAAWRKRRLELPSDPAMLYDIDVGKLAAAEVELAASSKKSKLKQRLPHTKQFRFLDHAAINDAPDGEQSKWTLATLTDVEEVKTVARMLPIWATTIMFWTVYAQMTTFSVSQATTMDRHIGASFQIPAGSLTVFFVGSILLTVPIYDRLVVPVARRATGNPHGLTPLQRIGVGLVLSIVAMVCAALTEVRRLRVARDARVGGGEAVPMTVFWLIPQFLFVGAGEAFTYIGQLDFFLRECPKGMKTMSTGLFLSTLSLGFFVSSALVAAVHKLTGDRHPWLADDLNKGQLHKFYWLLAGVCLANLLVYLVAARWYKYKAGRAAAAGDGGVEMADAEPCLH

SEQ ID NO: 120375 - protein, 363 aa, Oryza sativa
  Clone ID: PAT_MRT4530_23500C.1.pep
NRILYCEAVKGDTNIYGLRLFVCVERYPKNTFNRYWQPFPDSKHAVSSTHNVTSADFWNLPPPGVFNTALVAEQDAPLVLQWPPIPLQNDSYYVALYFADTVSESSRTFNVYINDYSFYEGLTVTSAGLSVFATQWILSGLTRVILAPISGLPPLINAGEVFGLFPLGGYTFPRDAHALEAIKRSLQNIPDDWNGDPCMPHGYAWTGVTCDKGQIPRVISLNFSSMGLSGYLSSDIARLTALTDISFANNSLSGPIPNLSNLRNLTRLHLQDNKLNGTVPQTLGIITSLRELSFFLCVFLPSYPPYTSSFSFSNSKIGAIGANYLLPVHFLLILNCSKRVVLFNTVALIHNLMFLKSENGVIK

SEQ ID NO: 120376 - protein, 71 aa, Oryza sativa
  Clone ID: PAT_MRT4530_23501C.1.pep
GPHIIKRSWDSSGVCGMWECEMCHAELSSSYSRLYIYTYVLHKTSSAEAGGGVSARAGKFSRKRGYVARAY

SEQ ID NO: 120377 - protein, 97 aa, Oryza sativa
  unsure (1)..(97): unsure at all Xaa locations
  Clone ID: PAT_MRT4530_23502C.1.pep
XFLXSXSDKFVLDFNTMALSYLLCDGTKXXSVHPSCSAARFFDTAKLNNAVTGSTSSASVTKRNNFILPSNVSSTILVLKAVLFVSFDNSGCRFLAN

SEQ ID NO: 120378 - protein, 562 aa, Oryza sativa
  Clone ID: PAT_MRT4530_23503C.1.pep
MAPPVPTAAARLVLRRLLSTAVAEAEAAAVAPAAEKAAAKGAKTAAAAGEEKDARSLYRRLSALGGAGEGSVSRVMNKWVREGREARAADLAKYVKELRKYKRHAHALEILQRDFNASCKTNLHLLSFEWLRMDEALRREAAKSGEKVELMEWMVNTKGMNMSYTNHAIRLDLIYKVRGIEAAEQYFAGLPDPGKNHKTYGALLNCYCSAKMEDKATDIYRKMDELGISSSTLPINNLMSLYVKIGQHRKVTSLFEEMKVKNVKPDNLTCCLLMSSYAALNKIDTVGEVLKEMEEKKVALGWSAYSTLASLYVNANMVEEAESALKKLESLIDVQAGRQPFDFLMSLYASVGNLSEVNRVWNLIKANFQKVTNTSYLGMLQALYKLNDDDRMKQIYEDWESNYENYDARLTNMMTRAHLRNGLTKEAELLWEKVKEKGAEFDSKTCELFLEHYMGKGDMTSALNWVENMTKLPRKKSKLDQEKISCFLKYFEEHKDVEGAERFLNCLRTSGCIDGKAYESLLRTYLAAGKTSRSIRQMIKEDKIEICYGIGKLLKRIADKGR

SEQ ID NO: 120379 - protein, 46 aa, Oryza sativa
  Clone ID: PAT_MRT4530_23504C.1.pep
GLLISPVNIVVATQVTKTARRSCTTISLGFSFLIAFAYIRVRAYYK

SEQ ID NO: 120380 - protein, 138 aa, Oryza sativa
  unsure (1)..(138): unsure at all Xaa locations
  Clone ID: PAT_MRT4530_23505C.1.pep
MRFEGCGATRTVAGPIDPPCPMGVSATSGGGHEGGKTNPYMRKEADVRYGQYNSIAPRQPFRPRNSPRPKNMEDHVRNIIREAFGIVPMNRARVYQKSYPDYFDDIPYPCGFRVPEFTKFNGEDSRXTTWEHIGQFLA

SEQ ID NO: 120381 - protein, 126 aa, Oryza sativa
  unsure (1)..(126): unsure at all Xaa locations
  Clone ID: PAT_MRT4530_23506C.1.pep
PPRNPRGRHHARFFIALRVIPASHLKMVEVELLNFLDQGRLGKVTSSTKTTSSQETRSTSPRASQLHCTEGDVXGGTKTKSTLPPYRGLAKRPSSXPQAKKACTPDRPTHDKRARKAMTANAVHPT

SEQ ID NO: 120382 - protein, 103 aa, Oryza sativa
  Clone ID: PAT_MRT4530_23507C.1.pep
PGPTLDVFYRPLKKVGAFGVSPGVPPPVERFPMSPWAYFSVSGVSPGGWFPVSAIELLCPLEKPFYPPPVLLFKVTGGRPKRFPFLPVGNINLIPSVGSYFLV

SEQ ID NO: 120383 - protein, 95 aa, Oryza sativa
  unsure (1)..(95): unsure at all Xaa locations
  Clone ID: PAT_MRT4530_23508C.1.pep
FFFFFFXLEKXXCLXSRPXFRTIXSLLGHTHAYTFFFSFXMTXHLFKNVXLXPYXTCCIXXESXTHYFPXEXSXSRDFFMTXSLIXXPRXLXHSS

SEQ ID NO: 120384 - protein, 55 aa, Oryza sativa
  Clone ID: PAT_MRT4530_23509C.1.pep
KLPRTTATPISILKTSKPQGNPCSRLRFLGQLVGVTTVQFPLFRIFPRLCVSDIR

SEQ ID NO: 120385 - protein, 176 aa, Oryza sativa
  Clone ID: PAT_MRT4530_2350C.1.pep
MSTTVRYATPNIVLVGDLLVLQGFDEMGLRDGFSDNILLDNFGYGGSNLTRVCAPTRSEPSLSTTWSIEIIQASSSVAYQKMSDHMISNEYAARPPRNLRELRLGTPRADKALSDPEETKDHVKGPRALSSENDSLTTMLGARESVRLNKLTDRSRKILFDIVKDFMSLWFYTKID

SEQ ID NO: 120386 - protein, 86 aa, Oryza sativa
  Clone ID: PAT_MRT4530_23510C.1.pep
MRMTGEEGAAARAARPWPRRRRRLLLRRRIDLHELQSSSTALPSGQLGFTIAAETYDTTTTLPSPNLSSEQAFHTFVVPVTAAASV

SEQ ID NO: 120387 - protein, 256 aa, Oryza sativa
  Clone ID: PAT_MRT4530_23511C.1.pep
MADESWRTPAIVQELAAAGVEEPPSREFFNQPIERKRKFSNLIDGKNFQVEGYGTDRVVTQDQILDWSDRLFLRVEPKEERNLAFWPDHPESFRDVLNEYASRTKRIRDDIVQAMSKLLGLDEDYFFDRLNKAPALARFNYYPPCPRPDLVFGVRPHSDGSLFTILLVDEDVGGLQIQRDGKWYNVQVTPNTLLINLGDTMEVLCNGIFRSPVHRVVTNAERERISLAMFYSVNDEKDIGPAAGLLDENRPARYRK

SEQ ID NO: 120388 - protein, 350 aa, Oryza sativa
  Clone ID: PAT_MRT4530_23512C.1.pep
MADESWRTPAIVQELAAAGVEEPPSRYVLGEKDRSDELVAAELPEPIPVVDLSRLAGADEAAKLRAALQNWGFFLLTNHGVETSLMDDVLNLAREFFNQPIERKRKFSNLIDGKNFQVEGYGTDRVVTQDQILDWSDRLFLRVEPKEERNLAFWPDHPESFRDVLNEYASRTKRIRDDIVQAMSKLLGLDEDYFFDRLNKAPALARFNYYPPCPRPDLVFGVRPHSDGSLFTILLVDEDVGGLQIQRDGKWYNVQVTPNTLLINLGDTMEVLCNGIFRSPVHRVVTNAERERISLAMLYSVNDEKDIEPAAGLLDENRPARYRKVSVGEFRAGIFGKFSRRERYIDSLKI

SEQ ID NO: 120389 - protein, 56 aa, Oryza sativa
  Clone ID: PAT_MRT4530_23513C.1.pep
KSSPCIPSYSEEHTSSSSSSYALRDRNIAVNKGKDSISGVNFIFHNDYLTMVHRVN

SEQ ID NO: 120390 - protein, 222 aa, Oryza sativa
  Clone ID: PAT_MRT4530_23514C.1.pep
MSISLRLAVPTAAPPVLPPLRQSAVRAAGSPAAAALRTGALRGCASLPLKPQPLLGAGQAASGRRGGAAVCHSSAHLSARTMQWVSAGATAVLLLAKGTAIHKSFLVPLFALLAPCSVISWIKSDYGHWTAFLALLVRLFFSIPGELELPLSTMLLVSVAPYQLMNLRGTQGGAALSLALAGYLAFQHFTRVGGLGKAFDQGSIIATLAIICITVIPLMMLF

SEQ ID NO: 120391 - protein, 87 aa, Oryza sativa
  Clone ID: PAT_MRT4530_23515C.1.pep
MASNGHEGFTHEEEGQRKKTINLEKKPSALGGQTKEEEPLQGKGGEGRAAVGIVCAAVAIDDADDGGDRARLETAVVAAGQRTAAMG

SEQ ID NO: 120392 - protein, 247 aa, Oryza sativa
  Clone ID: PAT_MRT4530_23516C.1.pep
MSISLRLAVPTAAPPVLPPLRQSAVRAAGSPAAAALRTGALRGCASLPLKPQPLLGAGQAASGRRGGAAVCHSSAHLSARTMQWVSAGATAVLLLAKGTAIHKSFLVPLFALLAPCSVISWIKSDYGQWTAFLALLVRLFFSIPGELELPLSTMLLVSVAPYQLMNLRELLRKILLFSKVLVLMLQFPFPVHRGTQGGAALSLALAGYLAFQHFTRVGGLGKAFDQGSLIATLAIICITVIPLMMLF

SEQ ID NO: 120393 - protein, 89 aa, Oryza sativa
  unsure (1)..(89): unsure at all Xaa locations
  Clone ID: PAT_MRT4530_23517C.1.pep
WDTTIPKTAHVISPVNHHQTGFSPAGANQRGPLAATLSGPXGEGQSAVARLTGEKKTTLRHTNPSPARADSLMQRHDSFPTGTGSERNQ

SEQ ID NO: 120394 - protein, 96 aa, Oryza sativa
  Clone ID: PAT_MRT4530_23518C.1.pep
EWGFLGPLEGGPSGFPNFFYIAPHWIGGFSSVLEEAKIDEGGGWYFLKGKVSINPNPFFCGPLWLLEATPGQPCGGRNIFPATMPVLKQNRAPLGS

SEQ ID NO: 120395 - protein, 62 aa, Oryza sativa
  Clone ID: PAT_MRT4530_23519C.1.pep
IGNLNLTFKKIGNKSYANLAQPENFSNCRSETKCKPFKIPHHFTSPKQGSHNAARSPRIHVA

SEQ ID NO: 120396 - protein, 87 aa, Oryza sativa
  Clone ID: PAT_MRT4530_2351C.1.pep
KKRTPQGTYRCRREPTGNGGRHRCKRWGWEQLLHDGGSFLCIYLGSKKGFMGGGKKGRQLKTRTGGSKGEDLDPKAPPTTQSWRGSL

SEQ ID NO: 120397 - protein, 102 aa, Oryza sativa
  Clone ID: PAT_MRT4530_23520C.1.pep
MASNEREGSSSSTPVQMYEASWEPTGDAPGWTQAPRHSIGVSSCASGSEDRNNMRTLKRTSAFRGSIFIKEPERKPSLGGGDISPLTEVSALSQIKYTFHAL

SEQ ID NO: 120398 - protein, 67 aa, Oryza sativa
  Clone ID: PAT_MRT4530_23521C.1.pep
FFFFFFFNPTNIHPGILIHHQFSHGGPHISFLTHQHHGSIHHSAGLPQGSTALHCKAWWHPSQAPLI

SEQ ID NO: 120399 - protein, 80 aa, Oryza sativa
  Clone ID: PAT_MRT4530_23522C.1.pep
HAFQKGKCFFIVKKNQGNKLVRPFSVHTWMIARPFHFPGCPNPPVPQGLAAIFFKLLVLYIYTNGRATSTFFFSSTTSEN

SEQ ID NO: 120400 - protein, 195 aa, Oryza sativa
  unsure (1)..(195): unsure at all Xaa locations
  Clone ID: PAT_MRT4530_23523C.1.pep
GADEDGEVGEERRSDGRRPAXAVEKSSGEAGAGWGEERWRPGESARRAAADKGERRRSMSLPLCCLPPPGVHLHRHRHRRCRLLLSHRAPPCPPPMGPPLWMRSGGAYDSGLVGGGRSGQGXAVACSPPASRPACSLFPSPTWPPPLSLEPRSGALVWTRAPPLAPLLRRAGHLDTAADDSPPLGLVVGGGSGQA

SEQ ID NO: 120401 - protein, 110 aa, Oryza sativa
  unsure (1)..(110): unsure at all Xaa locations
  Clone ID: PAT_MRT4530_23524C.1.pep
MKEEGEPEEHALQPQRQARRAICSGGGGSEDSGGGSRKKLRLSKDQAAVLEDTFKEHNTVNPISKQTNNXKQKAALARQLNLKPXQVEVWFQNRRARTKLRQTEVDSELL

SEQ ID NO: 120402 - protein, 146 aa, Oryza sativa
  unsure (1)..(146): unsure at all Xaa locations
  Clone ID: PAT_MRT4530_23525C.1.pep
GLKGGKGAARERKETPPEEVPPPHQWAPGEILGKPIPAGLNGKKKGENWGERGRXSRGIFSPHLIAPGGGGXGGFGGGGGAXARAGRRERREDGDDGWAPPVSEGGGRAHPSAARARGEGRVGRGERRERGGGRWAEPAQEREGDF

SEQ ID NO: 120403 - protein, 57 aa, Oryza sativa
  Clone ID: PAT_MRT4530_23526C.1.pep
RPSPETSGRWTRRILFFLLPSPGQVTGQWSQLAGEEDKLVVVAGRLAIIRQRRPMLV

SEQ ID NO: 120404 - protein, 77 aa, Oryza sativa
  Clone ID: PAT_MRT4530_23527C.1.pep
MGFVSGIDDFVFPPGQAFLFSSLDFITSDFGKIYLLDSDSNQLGRGRVSAPFGIPNSAKIYPKVISTELATVNSEIW

SEQ ID NO: 120405 - protein, 1287 aa, Oryza sativa
  Clone ID: PAT_MRT4530_23528C.1.pep
MGEIKGLLSSICASMSSQGPEFGGTAGASTSGIARGAAGLAASAAATVSNTTTVAGSSSVPPGFSPQPNTAGVQTGAGAMPLTSGAQLNPVNAGSMTSTVTIPSFLPRNTQGAMTSVGNVNFQIEPNTVNPSFGPVFTTATRTHVLPEGRNFNFPERESQEDVGMNHYGIDTNQPWRYPTRQPGGTAVGIGAGMPNPGGDRFTEANAHEAVELLQNAKQTGSVMQYIDKFEDCVSLVKRDHPYLTESYILSCFIEGLRADIKHDVYEKASIAKRLSYQSGFNRNKPQFQPAQSSGTRFVNQKNTTQGVEKEKKTCWYCKEPWNYQHKCKVGKVVHMMEEVEEEEEPQETQEENGETGYQTAPRRRAVALVDSGSTNSFMNYDFAIKSGCEILEAGNRRILVAGGGMISSSTKTEQLSYTVQGHPFERVFQLIPLKGFDVILGADWIYDHSPISLDLKQRVLWVTCKGQQVKFVDHTLPQGKIMIKAGKFGKMLDKGIMGFFIEVLSKTEEKKEETIIPEQIAVLLQEFADVFADPKGLPPKRDCDHAIPLKVGAEPPSLRPYRVPHQQKNAMEEIIKELLDSKEIRPSLSPYSSPAVMVRKKDGNWRMCVDYRQLNAKTVKNKFPMPIIEDLLDELNGAKVLTKMDLRSGYHQIRMVEGDIPKTAFKTHMGHFEYLVMPFGLTNAPATFQALMNQIFGKLLRKCVLVFFDDILIYSRDLREHEQHLRIVLNILRSHKLFAKRSKCTFAVGSIEYLGHIVSGEGVATKPNKIQDVLDWPVPKNVSKLRGFLGLTGYYRRFVKGYGTICRPLHDLLKKNSYQWGVEQQKAFDNLKEVMTSCPVLALPNFNQPFVLDDRCMCIEYKKGKENKAADALSRRDTDGDKCLAITLVYPAWVEDVKNSYMGDEKYAMLVTGEELNEGAEGFTLQSGLLRYKNRIYVGQSTDIRQRLLQSFHNSTFGGHSGMKVTYHKLKKIFYWPKMKKDVDRQMTECPTCQIAKPDIFMYLDCWPFQIPEMAWPHISMDFIEGLPKSHGKDVILVVVDRLHGMPVAIVSDRDRIFTSELFQNVFKAMGTALRFSTSYHPQSDGQTEREPKEWYKWLPTAEWWYNTSYHTSLQVTPYEAMYGVTPPQIGERAIPGNVSEEARVTVQQREDMLARLKENLAKAQTRIKKFADRLRSERQFELGDMVYLKMQPYRHNAFGLRGSLKLRAKFYGPFRVLEKIGKVAYKLQLPEEANIHPVFHVSQLKKHVGRPLFHTLDLEDKVWLKGKGLSEVEISEITEEKFRDN

SEQ ID NO: 120406 - protein, 1160 aa, Oryza sativa
  unsure (1)..(1160): unsure at all Xaa locations
  Clone ID: PAT_MRT4530_23529C.1.pep
MADPRVKRLEMGEIKGLLSSICASMSSQGPGFGGTAGASTSGIARGAAGLAASAAATVSNTATVAGSSSVPPGFSPRPNTTGLQTGAGATPLTSGAQGAMTSVGNVNFQIEPNTVNPSFGPVFTTATRTHVLPERRNFNFPERESQEDVGMNHYGIDTNQPWRYPTRQPGGTAVGTRAGMPNPGGGMYWQEPPRYLHGVIPNPYTEMSLRSQRLELTLFNGEDAVGWLQQCEKFFEMTGTPVDQWVNLASGHLVGRAGKWFRNLAIPWYCLNWQQFYLMVLDRFTEANAHEAVELLQNAKQTGSVMQYIDKFEDCVSLVKRDHPYLTESYILSCFIGGLRADIKHDVCGQKPQNLLAGYWYAKVYEKASIAKRLSYQSEFNRNKPQFQPAQSSGTRFVNQKNTTQGVEKEKXLAAIMVRKKDGNWRMCVDYRQLNAKTVKNKFPMPIIEDXLDELNGAKVFTKLDLRSGYHQIRMVEGDIPKTAFKTHMGHFEYLVMPFRLTNAPATFQALMNQIFGKLLRKCVLVFFDDILIYSRDLREHEQHLRIVLNILRSHKLFAKRSKCTFAVGSIEYLGHIVSGEGVATKPSKIQDVVDWPVPKNVSKLRGFLGLTGYYRRFVKGYGTICRPLHDLLKKNSYQWGVEQQKAFDNLKEVMTSCPVLALPNFNQPFVLETDACGIGIGAVVIRTDQQSLKFMATQRLTEGIQHKLLLKLMEFDYSIEYKKGKENKAADALSRRDTDGDKCLAITLVYPAWVEDVKNNYMGDEKYAKLVTGEELNEGAEGFTLQSGLLRYKNRIYVGQSTDIRQRLLQSFHNSTFGGHSGMKVTYHKLKKIFYWPKMKKDVDRQVTECPTCQIAKPEHIHVPGLLDPLQIPEMAWTHISMDFIEGLPKSHGKDVILVVVDRLTKYAHFVAMSHPFDTQDVIQVFMENEPKEWYKWLPTAEWWYNTSYHTSLQVTSYEAMYGVTPPHIGERAIPGNVSEEARATVQQREDMLARLKENLAKAQTRIKKLVDRLRSERQFELGDMVYLKMQPYRQNAFGLRGSLKLRAKFYGPFRVLEKIGKVAYKLQLPEEANIHPVFHVSQLKKHVGRQAIPLPNLPLVGADGTVKTEPLAVLARRVIPRQNEPVVQWLIHWENLTPEDATWENATFIQATFPHFRP

SEQ ID NO: 120407 - protein, 61 aa, Oryza sativa
  Clone ID: PAT_MRT4530_2352C.1.pep
LFPPPAPTTSSWWSISTYKLSPPWRHCTPSLALLMHPKDLILRVIDDVQQGFSVHVKVNIL

SEQ ID NO: 120408 - protein, 116 aa, Oryza sativa
  Clone ID: PAT_MRT4530_23530C.1.pep
SFLKWWLFQIYYILQTVLIVCMLPCIFAFFHHLPGHTKKKRNPRGKNSSPPPPPGKKTKHLLQKPPVPARAGFFIKVQRGMAPIPATKPPPPPGPLRMKKPKKAGRPPSTSLFSSP

SEQ ID NO: 120409 - protein, 63 aa, Oryza sativa
  unsure (1)..(63): unsure at all Xaa locations
  Clone ID: PAT_MRT4530_23531C.1.pep
CLXKDLNNPRXKDPLNFPLSKYHRGPSGLHHFMTSCYEKICNAKHFLLLSVGKLRHQIYIYFA

SEQ ID NO: 120410 - protein, 47 aa, Oryza sativa
  Clone ID: PAT_MRT4530_23532C.1.pep
DLILLGGGGALFLNILKDAISSDKSIFFFKLVFAHDFLAQYHFAAFP

SEQ ID NO: 120411 - protein, 203 aa, Oryza sativa
  Clone ID: PAT_MRT4530_23533C.1.pep
MAALVVAAAEAGGSADVDGGAPCGRGRDWRRRRGGRRRSSWPQRRLEADGGGPRGRSAGWRRTAMLVGDAAEAGGGAEANGGARRDLDGGGRWCSSGPRRPAEDGGGARRGRLGTVAVGGGWIGAEAEGGMMDGVGMDGGGAESIQYIMESILMGWRLSESYSKRIGIILYRAGFVASEFYLETKATHGIEGTPREGFGIIES

SEQ ID NO: 120412 - protein, 84 aa, Oryza sativa
  Clone ID: PAT_MRT4530_23534C.1.pep
SKQQHYASLLTGKPFMTLPTRPPTRPAGTRGSTLGNSATWYLVRRTSFPYSESILELWRNSWCISCFLCETVLSATTISTTQHN

SEQ ID NO: 120413 - protein, 68 aa, Oryza sativa
  Clone ID: PAT_MRT4530_23535C.1.pep
KIKVKGQHDNPPLLSTKDPHGLHLDKNTWPLSLASGRPTARAHGGAAREPPPRAPVGVARRLVIRSYN

SEQ ID NO: 120414 - protein, 525 aa, Oryza sativa
  Clone ID: PAT_MRT4530_23536C.1.pep
MGSSVKDAGGGKEEQQQQLESPLLEAAVSSGGGDGGGGHGVSGELESILGDETVPWARRMWAATGVEMRLMLRLAAPAVLVYMINYLMSMSTQIFSGHLGTLELAAASLGNTGIQVFAYGLMLGMGSAVETLCGQAYGVHKYDMLGVYMQRSTVLLMATGVPLAVIYAFSRPILVLLGESPEIASAAAVFVYGLVPQIFAYAANFPIQKFLQAQSIVAPSAYTSAATLVLHLVVGWLVVYQLGMGLLGASLVLSLSWWVIVAAQFVYIAASKRCRRTWTGFSWMAFSGLPEFLKLSTASAVMLCLETWYFQILILLAGLLDDPQLALDSLTVCMTLAGWVMMISIGFNAAASVRVGNELGAGHPRAAAFSVVVVTAVSFVITVVMAVVFLMFRDYISYIFTEGETVARAVSDLCPFLAATLILNGIQPVLSGVAVGCGWQKIVAYINVGCYYFVGIPLGFLLGFKFHLGAKGIWTGMLGGTCMQTLILFWITFRTDWNKEVEEAKKRLNQWEDKKQPLLAGTVDY

SEQ ID NO: 120415 - protein, 116 aa, Oryza sativa
  Clone ID: PAT_MRT4530_23537C.1.pep
MLWPGSGALPSARSGGRGGRVNGVTAEGDAAAAGRRREGRQRWSDGPVIWREGRWWRRPGGGSAAGGEAAVVRRAGSGDGGASIAAPSSSLSDEGGSGGDVSGAGGEGSMMIFLDS

SEQ ID NO: 120416 - protein, 78 aa, Oryza sativa
  Clone ID: PAT_MRT4530_23538C.1.pep
MAGCWRGAAQRLWPMAEVAVAEEDSDGDGCVNGWPAGGRGDGSGWLAQRAVAEADVERTRRRGTDLVSNVNVLIKPVN

SEQ ID NO: 120417 - protein, 358 aa, Oryza sativa
  Clone ID: PAT_MRT4530_23539C.1.pep
MSCSHLSTAWSSSALATRRRSAPSSGSSGRLQVVRCSLRELRSRIDSVRNTQKITEAMKLVAAAKVRRAQEAVVSSRPFSEALVEVLYNMNQEIQTEDIDLPLTRIRPVKKVALVVLTGERGLCGSFNNNVLKKAETRIEELKQLGLEYTVVSVGKKGNAYFIRRPFIPTERTLEVNGIPTVKDSQSICDLVYSLFVSEAVDKVELLYSKFVSLVRSDPIIQTLLPMSPKGEICDINGVCVDATEDELFRLTTKEGKLTVEREKVKIETQPFSPVVQFEQDPVQILDALLPLYLNSQILRALQESLASELAARMSAMSSATDNAIELRKNLSMVYNRQRQAKITGEILEIVAGADALA

SEQ ID NO: 120418 - protein, 505 aa, Oryza sativa
  Clone ID: PAT_MRT4530_2353C.1.pep
MWRSSDYFYFQWSSYGNCLVLDKRCGVPPTTSTFSGQAISHTAASIGVREIILLAHWFSHQYAAISRTSPQPVDRSDLSYICFKWSSYGYCLVLDQRCGIPPTTSTFSAMWRSSDYFYFQWSSYGYCLWSSYDYCLLLDQRCSDFSHYLYFNVVGLITRHDCEQTSGYAISWCSSNYFHFKWSSYGYCLVLDQRCSDFSHYLYFNKVGSRRYESAICDLAGHGSEKEDYPVVDYESDLRTNMSTTPHPEPPRGRITPPRRHLSLSPAPAASSRLSLLARARAGRAVAFPDITAASSPPACPPFRVRPPEARPRRQPVALSPPTASSRPCRAAQVQAGHAVSSLGITASTSTPACPRFRPETAVARAGLSILVVADVPSAAPSSSPACRLAASPPPPASQRQGRPRPRLPSTQTPPVSVVVFTAHPRRLVVSWRRLRRRHRSGVFHAILVFVQPLPVVIFVLGSASSSLVPAVSRLRSRIAAEVVPSPFASVVPEPSPFPRLVAWW

SEQ ID NO: 120419 - protein, 120 aa, Oryza sativa
  Clone ID: PAT_MRT4530_23540C.1.pep
MLVWAGRSIERVAAARRPVSKAGGSGAVSKLQDAGSKPCLGIASADSSIGRRSELPLPLTPPLVAALSYSSMAYPPIVASSTGRERGHWQFLDAGSLAVSSTLLGPGSVAVPRSCRYFPE

SEQ ID NO: 120420 - protein, 1104 aa, Oryza sativa
  Clone ID: PAT_MRT4530_23541C.1.pep
QIRSTCKVLVMTSVLMLKMVFSLIHVRTVICGASAPGQAPLFVCARGRGGRRRSLASTVPSVVTPSRPLVHPMPEMSVAKKEEVCSHRLGPRLDEPAVGVPIKKRPVLLSDRLLPSGMPPSMRPSSPATGMAVSVAEAGCSKDTFLNRSVSEETSAITKGNGMFNPQDQRHAKRSFIQSLTEKKGLSLDGSSGIPSRIESGTGNVAPVDDTQSQKFLSLGLRSASRLNGKINSSSNVKEEKVDQGLSSFPSADFQKDAGATNEPKSSSDSSFGRLPNLDLNVPLDPHDLAESLPIVQDSSNILYHETVQLQKAHVPPVPPVSTVSNGLHRNIASTLNLSNAYGLSNKRGAADVTLDLQLKPPARPELGINWKGLAPVPGLSLSLSSKHVEESENNAGLNLSLFGKHINESENNAPNVAVRSEPTKEPEEQSQRHVQNDVEKEQPLESQSVGLANNRAEIEKPNGAHQVPGKAALDLNSGIFPNVATANVPLSTERLRDAIRTEAMHADHEVKKSIKCEETTAAIPSPATASVSSRCSPLMATKQLPLGDRDASRAGLRVSASQPSLPTEPACCNPDEANVDCKPTMSHVNSRNAVEVCGSLQSSSNPIPEPSISNSRNRFGFDGMSQGSAEMDCSEDDDNIVSHLSTTNKPHGGTLGNNQTSDSMGSGRNLQKEHDSNTHQNCSFVTNKIDMQGISDDKRINVKDGVFPHSCQNSHQSGNVVNEESKNKQLLGSDKNTPMNNNDSTIRVKTITGSSTADTRRTTSVQNERDGQVDDPHWRGMGHPYVNVNSKRDWVSSSIWNETWERLMQSKREKNKGEYHGGRHAPDTFNQRRPDYRYGGRGVGSRGNPRNFRGPRMNESELYFDDEPMARRRRPFEDYLGHMQRIPHRRHRSSPMNNQLQGGLMRDMDIDGFSGRDVPDPRLLAHEHMEDLSDDMMEERSPPLIRTDRPYLPHRHHTRRHGSPFDRIEHDDRGMQRNMRRCGMHHGGVEGDSFEPHLHPAQLAELHAKAELTERRKFGERRGHHLRPFEGSPDDDEVILSYGADGDMDFAEGGSGGLPPGELDGRFRRHMGRDEEEEDHMCHGPHGWRDGSSNGSRAKRRRY

SEQ ID NO: 120421 - protein, 518 aa, Oryza sativa
  Clone ID: PAT_MRT4530_23542C.1.pep
MGPRGVVGSAAMLGLEMHLAHPQMHAAAYQQPDPHGGGGGGFQQQVAAVRQQQQQSYSPYSAGASSRVIKAPGHDDGMGNGAGKGGVVQQQQQPGSVGCPWTRMKWTDGMVRLLINVVYSVGDDGDGVAAGGAAGGKASAGAAGHGKAGGSGSHGAHGQAAAQQKKGKWKSVSRAMMESGHMVSPQQCEDKFNDLNKRYKRVVDLLGRGKACKVVENHALLDAMDELTHKAKDEARKLLSSKHLFFREMCAYHNSGAAAAAAAHGPHGAGAAGVEATACFHHPPPASMAAASSAARQAAAAAPSLGMKDSSAGPEDDEDDSEDVPSSNEVDDEDDDDDDDDDEVGPGMKSRRIYGGHRVHHHHHHHNGHHKRRRGDDVSSAGAGDDDDEDGVKRARGAASAAGGGDDEGPSAVQQLQSELAAAVAGGGDPQQVRQWVRRRTVEVEEQQVAHEVRAYHLERQRLKWERFRANKERDMERARLRNDRLRIDGRRMLLLLRQKDLDFDIAEANSSSDRAGL

SEQ ID NO: 120422 - protein, 81 aa, Oryza sativa
  Clone ID: PAT_MRT4530_23543C.1.pep
VFNHSWSANIVPPPLLYWRTLTCASGCSQNAISRWARCGRRSCTTFYYKNEAFKHRDQAALSRGARSVGPRSNPPGVQRFR

SEQ ID NO: 120423 - protein, 99 aa, Oryza sativa
  Clone ID: PAT_MRT4530_23544C.1.pep
PEKPGRPTRPRRPEPQQKPGGPEHGAEGGTRSTQPGAEGQHRTPDHGREGNRREAHHHKGGDPGGGNQGQREGDRGKNHGDKGEQEDERPRGPARSGQD

SEQ ID NO: 120424 - protein, 579 aa, Oryza sativa
  Clone ID: PAT_MRT4530_23545C.1.pep
MDLDKSTSTSASLKKLQEDGALPGRGTMEREAGGTEPQPVLGRMVVIEDFILCGFLPPPSEFLLLVLNFYGLSLLHLNPNSIAFLSIFSHLCEAYIGVEPFLDLFRFYYELRWMEPKKVSGCVGLSSEAVERHVGQLMISGPTTASNVHVPLCEKGADEREAAINPVSAAAFHRAARAKAAQDGSGGTSNASPAVASTDVVVVPRSREATPSGPDSDLAAGRGPPAAVLTWGELQVEMGRLLEAGSRGISREIAEVRVAAASSANERADQLARDLAEVREDLQKMRELVAGNERQRQGLEHRMSELENHLSEIRGSLWVTYTGLHQLAGECSVKPTIPTNPDEFSLTSSLAELATVMEAIPSKHAARIGEETSNGIYTRACHVLACVRLAHPELDLRKILDQGAASDARKDVMEEVGDLGESVLPLFEEDVDVKDVQQRGQPKLPVIVPALAFETHVPEGDDRRIQYWRTKFEVAELERTMLEVRKDQAVETLRGRELEGIGQRIDEALKQECRRSSRYAGGHVLACIRDHRPQLHLEFLHEGFSRSRRTPTEIDGLAKSMAPLAEKVFQSMDWRWPFW

SEQ ID NO: 120425 - protein, 475 aa, Oryza sativa
  unsure (1)..(475): unsure at all Xaa locations
  Clone ID: PAT_MRT4530_23546C.1.pep
MDLDKSTCTSASLKKLQEDGALPSHGTMEREAGGLDSATVERRVGQLMISGPTTASNVPVPLCEKGAAEREAAINVAASLKEKVAKEASDAAAAATTTSGDNVPKKERKFSSVIGHRWKTPTPSSVSIAAFRRAARAKAAQDGSGGTSSASPVVASTDVVVVPKSREATPSGPASDLVAGRGPPAVVLTWEQLQVEMGCLLKAGTRGISREITEARAVAASSANERADRLARDMEVREDLQKMRELVAGNERQRDVDVEDVQQRGQPELPVVVPLLAFEPHVPEGDVAQNSHVETGMATTPLDLESALADQDRRIQYWRTKFEVAELERTMLEVKNDQAVETLRGREVWFNSYLKSCCTSMSRVCRELRVPRGDTEESAAGYISWLNGDCAQLEGIGQRIDEAPKQECRRSSRYAXGGHVLACIRDHRPQLHLEFLHEGFSRSRRTPTEIDGLAKSMAPLAEKVFQSMDWRWPSW

SEQ ID NO: 120426 - protein, 694 aa, Oryza sativa
  unsure (1)..(694): unsure at all Xaa locations
  Clone ID: PAT_MRT4530_23547C.1.pep
MDLDKSTSTSTSLKKLQEEGALPGRGTAEREVGGTEPQPVLGRMVAIEDFILCGFLPPPSEFLLLVLNFYGLSLLHLNPNSIAFLSIFSHLCEAYIGVEPFLDLFRFYYELRWMEPKKVSGCVGFRIQDGLKSRYIPFQCPSSRSKWRERWFYLQIEDSDPVFIVPEEQPDKIPSWTAKPTLTPSLQSFIDIIDDLQVWGLSGYEVAADFIGRRIQPLQARAHPAFDYSGSEDVTRVSPRGLDSVTVEHRVGQLMISGPITASNVPVPLCEKGVAEREAAINALPLTDIIGPLVDHQVAASLKERVAKEASDAVATAATTSGGNVPKKGRKFSSVVGHRWKTPTPSVEMGRLLEAGARGISREIADARAAASSSANERADRLARDLAEVREDLQKMQELVAGNERQRQGLEHRMSELENHLSEIRGSLRVTYTGLHQLAGECGVKATIPANPDEFSLTSSLAELAMAMEAIPSKHAARIGEETSNGIYTGACHVLVCVRLAHPELDQRKILDQGTASDAHKDVMEEVGDLGESVLPLFEEDVDVEDVQQRGQPELPVIVPALAFEPHVPXGDVDQSSPVETSMATTPLVDLESALADXDRRIQYWRTKFEVAELERTMLEVRKDQAVETLRGREVWFNSYILWLNRACAQLEGIGQRIDEALKQECRRSSRYAGGHVLACIRDHRPQLHLEFLH

SEQ ID NO: 120427 - protein, 462 aa, Oryza sativa
  Clone ID: PAT_MRT4530_23548C.1.pep
QHQIQQGGGDGFHRPGGNYGGGPIVVGNGGPAVVGGDGPGGTTLFVGELHWWTTDADLEAELIKYGPVKEVRFFDEKASGKSKGYCQVDFYDPAVATACKEAMNGHLFNGRPCVVAFASPNSVRRMGEAQVKNQQSMSAQTSSMQPKGGRGGGGAGSPQVGGNYGGGRGGGPGGGAGGGGGNWGRGGGGMGRGPAGNMRNRMGGPAGGRGIMGNGGMVAPPPPMLPPGGMMGQAFDPTGYGAMGRMGAGFGGFPGAPGAGPFPGLMQPFPPVVAPHVNPAFFGRGGMGAGGVGMWPDPNMGGWGGEEQSSYGDDAASDQQYGEGGSHGKERAERPPDREWSGASERRREREKDIPPAQEWPDRKHRDERDMGRERDRDYDRERERDRDRERERDRDRERDRERDRERERDRHRDDRDRYGDYHRHRDRDSERNEDWDRGRSSGVRSRSREVDHSKRRRMTPE

SEQ ID NO: 120428 - protein, 64 aa, Oryza sativa
  Clone ID: PAT_MRT4530_23549C.1.pep
VTLDGIQKGVRVCWFLTSGWPALTPSLQSFIDIVDDLRERGLSGYEVAADFIGRRIQPLQARAH

SEQ ID NO: 120429 - protein, 49 aa, Oryza sativa
  Clone ID: PAT_MRT4530_2354C.1.pep
PGLILADPSNNLYNPLSKKTTYTIKHKHQKTPSQELEDNINNLNKQVSY

SEQ ID NO: 120430 - protein, 432 aa, Oryza sativa
  Clone ID: PAT_MRT4530_23550C.1.pep
MAPVSLPPGFRFHPTDEELIIYYLKRKINGRQIELEIIPEVDLYKCEPWDLPEKSFLPSKDLEWYFFSPRDRKYPNGSRTNRATKAGYWKATGKDRKVNSQRRAVGMKKTLVYYRGRAPHGSRTDWVMHEYRLDERECETDTGLQDAYALCRVFKKTAPGPKIIEHYGVVHHHVEQPQWMTSSIDRSPTLDVSCDGRGDDFESSSFSFPTETPMDSMHGGFGMQMSAPHEDGKWMQFLSEDAFNATNPFLTNPVSANFSCLPSKVDVALECARLQHRLTLPPLEVEDFPQDVSLDTKIGILRSNPNEVDILQEFLSVATASQELINGSTSSYPEMWLGASTSSASYVNELSSLVEMGGVGTSNHHESARLQVEIADMEVFKDEKKRVENLRGVKLVNTVFHIRYRLYTDTVLACTNSELDCRRSRSSHDRSH

SEQ ID NO: 120431 - protein, 630 aa, Oryza sativa
  Clone ID: PAT_MRT4530_23551C.1.pep
MDLDKSTSTSASLKKLQADGALPGRGTMEREAGGIEPQPVLGRMVAIEDYILCGFLPPPSEFLLLVLNFYGLSLLHLSPNSIAFLSIFSHLCEAYIGVEPFLDLFRFYYELRWMEPNRVSACVGFQLRDGLKSHYIPFQCPSSCSIWRARWFYLQIENSDPVFVVPEERPDKISSWTAKPALAPSLQSFIDIIDDLQVRGLSGYEVAADFIGLSSESVERRVGQLMISGPTMANNVPVPLCDKGAAEHETAINPVSIATFRRAAWAKAAQDGSGGTSSTSPTVASTDVAVVPRSREATPSGPASDLAAGRCPPSTVLTWEELQVREDLQKMRELVAGNERQRQGLEHRMSELENNLSEIRGSFRVTYTGLHQLAGECGVKTTIPANPDEFSLTSLLVELATAMEAIPSKHAARIGEETSNGIYTRACHVLACVRLVHAELDLQKILDQGAASNARKDVMEEVGDLGDSVLPLFEETKFQVAELERTMLEVKKDQAVETLRGREVWFYSYLKSCCTSMTRVCRELRVSREDPEESAAGYILWLNGACAQLEGIGKRIDEALKQECRRSSRYAGGHVLACIRDHRLQLHLEFLYEGFSCSRRTSTEIDGLAKSMAPLAEKVFQSMDWRWPSW

SEQ ID NO: 120432 - protein, 944 aa, Oryza sativa
  Clone ID: PAT_MRT4530_23552C.1.pep
MKLLSDIIHCSRPVETAAIAGVTKSGIDMAQGPVKSMGSYLWARVTHLVKCEAEVDKMKVKVDSLLRDKTDMETIIEHANYECRVASEATKQWILDVEEIATQAKDLVVECKGKSLLVAAILEKMKTQKEFDEVITVDLREKPGLEEIKNSFAKQLGMIYSAKLNAHRAAFLAEKLKEKKSILFLDNAWESLDLWKMGIPVEECKVIVTTQKIEVCKYMGAQVEISVDFLTEKESWELCKFKAGVPDISGTETVEGKIAKRCGRLPLALDVIGTVLCGKDKRYWECALSELESSYPLEKAEVLQKIYMPLESSYNHLEGDEKKSLFLLCSLFPGGHKISKNELTSYWTGEDIFNEFNTLEETRRKLHMRITDIEDSFLLLPINYTKCVMMHDIVRDVAVFIASRFCEQFAAPYEIAEDKINEKFKTCKRVSFINTSIEKLTAPVCEHLQLLLLRNNSSLHELPENFFQSMQQLAVLDMSNSSIHSLLLSTKDLAAVRTLCLNDSKVSRGIWLVSSLENLRVLSLAGCSIDSLPEQLGNLKKLRLLDLSSMESLEILEGLISKLRYLEELYVDTSKVTAYLMIEIDDLLRLRCLQLFIKDVSVLSLNDQIFRIDFVRKLKSYIIYTELQWITLVKSHRKNLYLKGVTTIGDWVVDALLGEIENLILDSCFEEESTMLHFTALSCISTFRVLKILRLTNCNGLTHLVWCDDQKQFAFHNLEELHITKCDSLRSVIHFQSTNNPTNQLARNCQHLELGRKSTTTAYLSKPKGTQCSALRKLDFVLVARVAAMLSNLERLTLKSNVALKEVVADDYRMEEIVAEHVEMEETVGNEIVSADTRYPAHPADVGDSLDPEAFPSLTHLSLVDLPGMEYFYKVGGEIMRFSWKSLVSLKLGGCHSLKGFPIHGASAPGLKNVELVHNGDKSWYQTLISQDASLAERFKTTQE

SEQ ID NO: 120433 - protein, 617 aa, Oryza sativa
  Clone ID: PAT_MRT4530_23553C.1.pep
MDLDKSTSTSTSLKKLQADGALPGHGTMEREVGGIEPQPVLGRMVAIEDYILYGFLPPPSKFLLLVLNFYGLSLLHLSPSYIAFLSIFSHLCEAYIGVEPFLDLFRFYYELRWMEPNRSFIDIIDDLRVRGLSGYEVAADFIGRRIQPLQARAHLAFDYSGLEDSTRVSPRGLSSEAVERRVGQLMISGPTMASNVPVPLCDKGAAEREAAINALPLTDIIGPLVDHQAAASLKEDVVKEASDVAAAAATTSGGNILRRGRKFSSVIGNRRKTPSPSASDASPLPPRRQLLVTLGEKAARVKATQDRSGGTSSASPDVSSTDVVVVPRNREATPSGPASDLAAGRGPSSAVLTWEELQVEMGRLLEAGAHGISREIAEARAAATSSANERADRLTRDLAEVREDLQKMRELVAGNERQRQGLEHRMSELENNLSEIRGSLRVTYTDLESVLADRDRRIQYWRTKFKVAELERTILEVKRDQAMEALQGREVWFNSYLRSCCTTMAVVCRELRVHRGDPEESAAGYISWLNGACAQLEGIGKRINEALKQECRRSSRYAGGHVLACIRDHRPQLHLEFLHEGFSHSRRNPTEIDHLAKSMAPLAEKVFQSMDWRWPSW

SEQ ID NO: 120434 - protein, 573 aa, Oryza sativa
  Clone ID: PAT_MRT4530_23554C.1.pep
MDLDKSTSTSASLKKLQEDGALPGRGTMEREAGDFYGLSLLHLNPNSIAFLSIFSHLCEAYIGIEPFHDLFRFYHQLRWMEPKKVSGCVGFRLRDGLKSRYIPFRCPSSRSKWRGRWFYLQIEDSDPVFIIPTEQPDKISSWTAKPALTPSLQSFIDIIDDLRVRGLSGYEVAADFIGRRIQPLQARAHPAFDYSRPENATRVSPRGLNSAIVEHRVIQLMVSDPTTASDVPVPLCERGAAKRKAAINALPLTDIIGPLVDHQVAASLKEKVAKEAFDTAAAAATTSGGNVPKKGRKFSYVIGHRRKTPTPSASDASPPPPRRQRLVTLGEKAARANAAQDGSGGTSSASPAVASTDVVVVPRSREVTLSGLASDLAAGQGPPTAVLTWEELQVEMGRLPEAGARGVSREIAEARAAAASSANERADRLARDLAEVREDLQKMRELVAGNKRRQQGLEHRMSKLENNLSEIRGSLRVIYTGLHQLAGECGIKSTIPANPDEFSLTTSLAELATAIEAIPSKHAAKIGEETSNGIYTGACHVLVHHLSFLQHFDLEYFVVICRDVDVEDVQQHG

SEQ ID NO: 120435 - protein, 441 aa, Oryza sativa
  Clone ID: PAT_MRT4530_23555C.1.pep
MDLDKSTSTSASLKKLQEDGALPGRGTMEREVGGTEPQPVLGRIVAIEDFILCGFLPPPSEFLLLVLNFYGLSLLHLNSNSIAFLSIFSYLCEAYIGVEPFLDLFRFYYELRWMEPKKGVRMCWFPTSGWSEVAIHPLPVPLISQQMAGEVVLSSDRRFGSGLDSATVRRRVGQNMISGSTTASNVPVPLCEKGVAERETAINVAASLKEKVAKEASDAVAAAATMSGGNVPKKGRKFSSVVGHRRKTSTPSPFTGRRRQKRRKMGPEGLPACLLLWPRHMSWSYPGAASREDLQKMRELVAGNKRQGQGLEHRMSELENNLSEIRCSLRVTYTGLHQLAGECGIKSTIPANPDEFSLTTSLAELATAMEAIPSKHAARIEEETSNGIYTRACHVLAYVRLAHPKLDLRKILDQGAASNARKDVMEEVDDLGESVLPLFEE

SEQ ID NO: 120436 - protein, 114 aa, Oryza sativa
  Clone ID: PAT_MRT4530_23556C.1.pep
HGQFADQDHRIQYWRTKFEVAELKRTMLEVRKDQAVETLRGREVWFNSYLKSCCTSMSRVCKELRVPRGDPEESAAGYISWLNGASTQLEGIGQRIDEALKQECRRSSRYAGGH

SEQ ID NO: 120437 - protein, 217 aa, Oryza sativa
  unsure (1)..(217): unsure at all Xaa locations
  Clone ID: PAT_MRT4530_23557C.1.pep
YSTPGYARPRRSARRSSSPSPRPSPTSSSPSTSSASTPSPRSIPTATSSAPSSGTPEPPATASSSSTSPISAPRPASSPTAAPARRLRLSSKARSXPASALTSTTHAATPRNASSPASTRTLTSRASSATPSAASCSASRTSTAPRRPCSATSRASSPGPRRGTVTGRPTSTPSHLSARGTAATGRIGASRCGGSCRKQASGTSWRACRRRSRSRGS

SEQ ID NO: 120438 - protein, 42 aa, Oryza sativa
  Clone ID: PAT_MRT4530_23558C.1.pep
MVNPSLPAQLCTVAGSGENGESSGGEDEVSLGSRDFLLRVSE

SEQ ID NO: 120439 - protein, 118 aa, Oryza sativa
  Clone ID: PAT_MRT4530_23559C.1.pep
MEEAPRPTNPMVTQLLTDLYQFTMVYAYWKAGKHLDHAVSGSLIPFPLLLHRSVPLRRWRREAGAARVGGGAWGCRREWKAEAEAVGRAGDGTRRRWRRKREREMETVGREGEGDGGG

SEQ ID NO: 120440 - protein, 170 aa, Oryza sativa
  Clone ID: PAT_MRT4530_2355C.1.pep
MTELGAPHRETAQALLCRFGRGRYVRFFALDLRNVSEKNRTRHGRRRQVRAAEKRNTLLLGHHMGLKLPKKRNILFTMRASLQPEVTPDKHSTRLLLRSSALPVDARFNLHSMASDFLAMLALKPRMDLTGTDIPTPGVSTPAPARDESQEALIIPTGRGEACDRPPVAT

SEQ ID NO: 120441 - protein, 143 aa, Oryza sativa
  unsure (1)..(143): unsure at all Xaa locations
  Clone ID: PAT_MRT4530_23560C.1.pep
SPTSLGCLTRPSLPWFCSLLYGGCSSFLFVYCWSPPPGRGPPAALRLTAARVTAARPPPTALRPATTARRLAASPPRWPPPPPPRXPPPPLLGAALRMRRPPPSATATRPPPLPDPTKGRPPPPPGRLPPPEGSRRGGEGGEN

SEQ ID NO: 120442 - protein, 486 aa, Oryza sativa
  Clone ID: PAT_MRT4530_23561C.1.pep
MVPTVLDWAIRKNGSCPSAARSAAGQVAPACVSANSKCVNVTNGNGYLCKCSEGYAGNPYVTGNDGCTNINECELRKADPAKYEKLYPCYRGSRCIDTVGGYDCKCRFGLKGNGKTSDQGCRPMIPAPIVAILATVCAVIAFLALLFLQKKWRRRWFFDNNGGRLLEGMGITIFTEKELDSITKGKCTKIGQGAFGEVYMGTYKDQQVAVKYSIAKGATRTQNAFRWPKFLVPTKVPSSRARGQEFVDELRIQSLIRHVNVVRLIGCCLQTKVPMLVFEFIPQGSLEKKLHGFERQTLSLLNRLDIAIGSAEALSYMHSSGLQSVVHGDVKPANILLDDNLIPKVSDFGSSELALKMKHVCADMNYVDPVCIQTGKYCTMESDVYSYGVVLLELITRKKAKYDDGRSLPIEFVNRYKDNNERRKMYDQDMLSSTDALYPYCMECLDRMAAVAVRCLKNKVEKRPTMADVVKELKQLREQICTRVSS

SEQ ID NO: 120443 - protein, 211 aa, Oryza sativa
  Clone ID: PAT_MRT4530_23562C.1.pep
MWSAAAARTVTPLPAASPLQQHQQRRGAWARVGNGRAASTTAARAGLWDFVGGDLVKPDMGRWLDDVEKHKSLAIYPPHEGGYEGRYLSRLSYQGYYFLDLSARGLGDPETTLTKIHPVCPPSLGRQPVARWYFPPEVDYRLSLLHPDAKGLVVWVMEAKVLSKAELQFLAILPDIRPKVRVIAECGNWRKFVWKPLKQIAGLEPDPDAEE

SEQ ID NO: 120444 - protein, 83 aa, Oryza sativa
  Clone ID: PAT_MRT4530_23563C.1.pep
MVRPGGRANGDEHRVARTSSAGGATPSRRFPSLARDGGGVLQDSARTGNLTRLRGGEGKPLKPMSGFAFGSSPLLNAFSPFCL

SEQ ID NO: 120445 - protein, 42 aa, Oryza sativa
  Clone ID: PAT_MRT4530_23564C.1.pep
IFHTATLSNVNMSRPMPGKGFYITLLGMQDCISTEDGYTLIG

SEQ ID NO: 120446 - protein, 54 aa, Oryza sativa
  Clone ID: PAT_MRT4530_23565C.1.pep
EIPNHAVLLLALLAGNRCCPRTPVERVHPVDRSVASHCYGGSGGHQNQREFDSM

SEQ ID NO: 120447 - protein, 1027 aa, Oryza sativa
  Clone ID: PAT_MRT4530_23566C.1.pep
MEVAEAGVDGVAGRRQQEEASGAAPFGRSSSLIGAAGFDGALRVEHLFGFLPSSPIVSPELKDLRSQLHQTADCCEKAFLDTEKKKLILESTKGYICDAIVAVIDHLGTVSSKLEQQLQEKIEITQTEKKLNFLKQRLLTCEQYAITLKLLTVRGDNDAIQYHRRYLSQSTGGTKEENGANSRKDDVKFVEYNSPTIPGAILTFKPYDIQSTIGRERSVATTDSESPTTDAKSSFSFRAEDVPIVLAEHRKKANHGSNILSFIRKVLIGNNVQPNITESPISVKPVSIDHHAGVFGRKNGPAASGGDGVEEGDEEVQAAGEAAVEISSENAGPGCRQSQSGGGSGEDGGHDDDDGEGSNKKRRRKNYHRHTAEQIRIMEALFKESPHPDERQRQQAVQERHENSLLKSELEKLQDEHRAMRELAKKPSRCLNCGVVATSSDAAAAATAADTREQRLRLEKAKLKAEIERLRGTPGKSAADGIASPPCSASAGAMQTNSRSPPLHDHDGGFLRHDDDKPRILELATRALDELVGMCSSGEPVWVRGVETGRDILNYDEYVRLFRRDHGGSGDQMAGWTVEASRECGLVYLDTMHLVHTFMDVDKWKDLFPTMISKAATLEMISNREDDGRDGVLQLMYAELQTLTPMVPTRELYFARYCKKLAAERWAIVDVSFDESETGVHASSAVRCWKNPSGCLIEEQNNGRCKMTWVEHTRCRRCTVAPLYRAVTASGVAFGARRWVAALQLQCERMVFAVATNVPTRDSTGVSTLAGRRSVLKLAHRMTSSLCRTTGGSCDMAWRRAPKGGSGGGGDDDIWLTSRENAGDDPGEPQGLIACAAASTWLPVNPTALLDLLRDESRRPEWDVMLPGKSVQSRVNLAKGKDRTNCVTAYAARPEEEEERGGKWVLQDVCTNPCESTIAYAAIDAAALQPVIAGHDSSGVHLLPCGFISVMPDGLESKPAVITASRRGGEASGAGSLVTVAFQVPASPSAAAATLSPDSVEAVTVLVSSTLRNIRKALGCDSCEEEF

SEQ ID NO: 120448 - protein, 1324 aa, Oryza sativa
  unsure (1)..(1324): unsure at all Xaa locations
  Clone ID: PAT_MRT4530_23567C.1.pep
MAAAVELTGDGGTTAETRWLSPPLTHDDNRGFLQMLREKKERLGVGAAKVEVRLEKLTVEADVRVGRRAVPTLLNCAINAAQELAACAHMCTTRKKPMKIINEATGTIRPSRMTLLLGAPGSGKTTLLKALAGKLDSSLKMKGKVTYNGEEVNSSTPQYLHAYVSQYDLHHAEMTLSSLKKLICTGHNLWRRKQPYNKLYYQAIKIECMQILGLSECADTLVGDEMRRGISGGQKKRATIGEMLVGLARCFFMDDISTGLDSSTTFEIMKFLQQMAHLMDLTMVISLLQPPPETLELFDDIILLCEGQIVYHGPRENATDFFETMGFKCPSRKNVADFLQEVTSKMDQKQYWIGNANKYQYHSIEKFAESFRTSYLPRLVENDHFESTNAGKSKEVKTSTSRMISSWNIFKACFSREVLLLKRNSPVHIFKTIQITVLALVISTLFLRTNMRHDTVLDANKYMGALFMAVVIVNFNGMTEIAMTIKRLPIFYKQREILALPGWALLSSVFLLSLPISFVETGLWTGLTYYVIGYAPSFVRFIQHFVVLFAMHQMSMSLYRFLAAIGRTQVMANMLGTAALIAIYILGGFVISKDNLQPWLRWGYWTSPFTYAQNAVALNEFLDDRWATEFHFANANTVGETILKVRGLLTEWHWYWICVSILFGFSLVFNILSIFALQYMRSPHKHQVNINATKVKVDYNSQIVGNGTASTDQVILPFQPLSLVFDHINYFVDMPKEMTKYGVTDKKLQLLQDVSGAFRPGVLTALMGITGAGKTTLLDVLAGRKTGGYIEGTVKIAGYPKKQETFSRISGYCEQSDIHSPNLTVYESLQFSAWLRLPSNVKSHQRNMFIDEVMDLVELTGLKNAMVGLAGATGLSAEQRKRLTIAVELVASPSIIFMDEPTTGLDARAAAIVMRTVRKTVDTGRTVVCTIHQPSIEIFESFDELLLMKRGGQLIYSGSLGPLSSNMIKYFEAIPGVPRIKEGQNPAAWMLDISSRTAEYEIGVDYAEIYQRSSLYWENRQLIDDLGKPEPNTEDLHFPPKYWQDFRAQCMACLWKQNCAYWKNSEHNVVRFINTFAVSIMFGIVFWKIGSTIKDEQDVFNILGVVYGSALFLGFMNCSILQPVVGMERVVLYREKAAGMYSTMAYAIAQVAVELPYMFVQVFIFSAIVYPMIGFQMTATKFFWFALYMVLSFMYXMLYGMMTVALTPNIEIPAVLSFLIFIFWNVFSGVLIGRQMIPVWWRWVYWANPAAWTLYGLMFSQLGYRTELIQVPGQPEQTVKEFLEGYLRLQTRYFNLVTSLHVAIIALFSSFFFLSINHLKFQMR

SEQ ID NO: 120449 - protein, 56 aa, Oryza sativa
  Clone ID: PAT_MRT4530_23568C.1.pep
YFGYSLACVIAACRLCCTQCPMAVALAWSASVGTPMFGVPSSEATAYARIISHLSR

SEQ ID NO: 120450 - protein, 410 aa, Oryza sativa
  Clone ID: PAT_MRT4530_23569C.1.pep
MAMAARARCSRQPNSHRLLAVVVLAAILLLPVASAAAAVVAAVAEGDGVENRSAARQWATGKDEGELVSGEESRGGGSVVEDEFAGGFGSLDSMLQWAIGNSDPDKLKEQAEGVQKLSADELLKRRMEIKELMEKLKMPSDADLMKIAIADLNNSSISLEDRQRALQELLILVEPIDNANDLDKLGGLVAVIQDLNNANEEIRTTSAWVLGKASQNNALVQNQILGYGALARLVKMGYATSAEEATKALYAISALVRDNINGQEAFHSENGSAMLQHILASNSVDVRLQKKAVFLVTDLADFQLNSGNSGLPFLSDRIFLKSLVDMLSRFDLDLQEKVLLAIKSLLKLSSTEATDFESCDLSSVLYRLGVQLEELPSEEQKEYAGEVDDLRREVQILFQDKLKEGTKTAL

SEQ ID NO: 120451 - protein, 282 aa, Oryza sativa
  unsure (1)..(282): unsure at all Xaa locations
  Clone ID: PAT_MRT4530_2356C.1.pep
GFSDNELLDDFSXGEIQPNQIRTIIVIDNLVYRDHPSLKLRGVPKDVRSYDVERVRNKGQLSTRVGCGQVHRIIENDLDRCRVVTPNLPTKTDDLSHSTGHGWTTREKYVAISCTATLIGVREMILLARWFSNQYVAISRTATSIGVREMILLARWFSNRPLRNLRELRLGTPRADKALLDPSETKDHENSIRHYRRLHVSMVLHQDRLRRVRQVLIRLRRRFYTFSIARERLVDLDKEYGMKKWRDESAVSDLVGHELEEEDYPVVDYESDLQTAISTTVR

SEQ ID NO: 120452 - protein, 40 aa, Oryza sativa
  Clone ID: PAT_MRT4530_23570C.1.pep
WGFQDKGPIIKRPILPIYGQTVRPGQFNDRLPSLLVQTWR

SEQ ID NO: 120453 - protein, 384 aa, Oryza sativa
  Clone ID: PAT_MRT4530_23571C.1.pep
MELSMSGGALRTFTRCVTCLARVGSDLVLQAHPAKLELHTLNSSRSAYASISLARDFFDEFSLSAAAAADSAPSSTPLQCSVLLKSVLSVLRTPTAALDRIAASLPNPDAPKLQLTLHCLNGVKKTYWIACSAESEVQTLALDRSNFSSRLAIRPRDLARLLSNFQSSLQELTVIATDPAAGLSNVGVDGEIEGKAVELRSYIDPTKDDCDTRLHTQLWIDPTEEFVEYVHSGDSVDVTFGVKELKAFLTFCEGCEVDILLFFQKAGEPVLLVPKFGLDDGSSSDFDATLVLATMLVSQLTDSSVAQQPTTSAQRAEEPRVAATPPPVPENVSNHTKIWSELSDVVSDNPRSQHHPSNWVGADEDDDDDEDEELFVQTTPHYMD

SEQ ID NO: 120454 - protein, 156 aa, Oryza sativa
  unsure (1)..(156): unsure at all Xaa locations
  Clone ID: PAT_MRT4530_23572C.1.pep
LLAFLMTTDKSASAQNTIIALHLRXTPKGYRTQRTITRTGFRAITTCRLPLTNPWDTQQTKRSFSEPRAECTDSSGTPPEFLLGSYSRRGRSRMSAKLPSTPPELPLTLYLILMYKRYNKASCNSAQSCVCXSEMETSLYKLXMTVRGMGNDQTTL

SEQ ID NO: 120455 - protein, 67 aa, Oryza sativa
  Clone ID: PAT_MRT4530_23573C.1.pep
RPACVGAARRTRGAHVVEGRQCGCSLEEAPHRPAPTTSRDVLLEELPCRHYLPQDYLHLQRECILSK

SEQ ID NO: 120456 - protein, 395 aa, Oryza sativa
  Clone ID: PAT_MRT4530_23574C.1.pep
SLTSANEKVKRGLLDCKKLPEAISGCWNLQSLHFIRCSGFVMLPESVGKLKKLRTLELNYVIDLESLPQSIGDCQGLQSLQLHSCNKLQGMPTSIGRIENLRVLHITSCPCMQKLPSEPCGESNNLEIINLSNCHNFHGLPSTFACKALRTLNLYNTKITMLPQWVTSIDTLECLDLGYCHELMEFPKGIANLRRLAVLNLEGCSKLRCMPSGFRQLTQYFNIFGSNDLTQLPESMRSLTSLHKLIIHDCPTFGMLPEWLGELCSLQSLFIKGTPMMDSLPQSIGCLTSLTHLTIACDNLKQLPETFHHLTSLRELDLAGCGALTALPENIGKLSALEALYVGPCSAIQCLPESIKHLTNLRRLNISGCPNLVKRCEQEVGEDWQLVSHIPNLTN

SEQ ID NO: 120457 - protein, 1148 aa, Oryza sativa
  Clone ID: PAT_MRT4530_23575C.1.pep
MARKIKDIKVKYNEIVRQRRDANTIRSSLQVDQPIPSSNMIIGELSLLSNVEESKIPIRDQEMDTIVSMLVDSNEGENCWIVSVVGLGGSGKTTLAKHICHVNKIKELFKERIFWVHVSREFDVQKLIGKLYETIVGRKSDCQPQQQMVREISKQLCCNKFLLVLDDAWHTDGYEWGQFMVHLQDRSIGSRILLTTRDRKVAEVVKSKQIHELVFLTESESWSLFLKCSGWVEDDLGSEFIQLGKEILKKCGGVPLAIRTIAGVLCEKREISTWRAIRGSDLWNVGSVNDRVFASLKLSYIHLADKLKQCFTFCSIFPKGYVINKDRLVAQWIAHGFITPMKEEQPKDIASEYFDSLVKAGFFLQDTIEEFGYLHKMHDLIHDLAQYCEKNEVVTSRPNSMSTYQTHKCRYLSLTSGNEKVKRGLLDKVHALYMSDGNLSFDKPVKKSCYIRSVILDNENCTTFPPVLLKFEFLGYLEIHGVDCKKLPEAISGCWNLQSLHFIRCSGFVMLPESVGKLKKLRTLELNYVIDLESLPQSIGDCQGLQSLQLHSCNKLQGMPTSIGRIENLRVLHITSCPCMQKLPSEPCGESNNLEIINLSNCHNFHGLPSTFACKALRTLNLYNTKITMLPQWVTSIDTLECLDLGYCHELMEFPKGIANLRRLAVLNLEGCSKLRCMPSGFRQLTRLTKMGLFVVGCDGDNARISELETLDMISGKMKIINLKYTLDPTDADKASLKRKNNIKYLELDWSRGETEKELVTDMVMEQDLAVLNALEPPSRIEEILIYYYGGPCLPWWMKKQTDSSCWESTMLKQTNPCQLIYLTRMTLHEIPNLKHMQGLVELPLLNYLELFGLPNLEDMWTTTGGAEIRGDELQAKYCFPALSTLWIRGCPRLNVVPYFPSSLERLFLRESNDQLLSSGSFSHLLPPLAHESSPCSNAHSAVPRLKELTIIKMTGSSCGWDFLQYLDALEYFNIFGSNDLTQLPESMRSLTSLHKLIIHDCPTFGMLPEWLGELCSLQSLFIKGTPMMDSLPQSIGCLTSLTHLTIACDNLKQLPETFHHLTSLRELDLAGCGALTALPENIGKLSALEALYVGPCSAIQCLPESIKHLTNLRRLNISGCPNLVKRCEQEVGEDWQLVSHIPNLISD

SEQ ID NO: 120458 - protein, 54 aa, Oryza sativa
  Clone ID: PAT_MRT4530_23576C.1.pep
MATRFLSGQFKTGKSSERTDVFGYGIMLLELVTGQRAIDFSRLEEEDDVLLLDH

SEQ ID NO: 120459 - protein, 198 aa, Oryza sativa
  unsure (1)..(198): unsure at all Xaa locations
  Clone ID: PAT_MRT4530_23577C.1.pep
TRQFNGLCPKDVAPLCFRLAKRKQRCVQFEISSNNWIVSFXQFTTVEELHDLVQLGGNDPRYLTLPTTXDEINWNWNPSRVYSSKEAYSYQFAGTFARLDFDALWKSPAELKMXSFGWLILHHKTLTAQNLLRRHWPCNWICCLCTSTFEDTNHLFCDCVYVREVWTLVHSWRNLLMKHLLTSPPILDSMSLTHCMLL

SEQ ID NO: 120460 - protein, 116 aa, Oryza sativa
  unsure (1)..(116): unsure at all Xaa locations
  Clone ID: PAT_MRT4530_23578C.1.pep
MKVSAGLQYSSCQIRWIFHCPGYIKDDTITVESTVKVIKESRLSETKGTSEIIQVPPSDIAEHLGKLAXLLETKQGAYVTFIVGRGSFAAHKIVLAMRSPVFQAQLCVGLHFTTFI

SEQ ID NO: 120461 - protein, 53 aa, Oryza sativa
  Clone ID: PAT_MRT4530_23579C.1.pep
HKVLIQMRRNIFFSVHNREIHRSIRQCKSMACLSNRANESKRINHSKTPILLH

SEQ ID NO: 120462 - protein, 396 aa, Oryza sativa
  Clone ID: PAT_MRT4530_2357C.1.pep
MAERAVAHSLSPSASGDDGEQNPRCRARTPPSPSRRNLGRGEALGEVGGSATSPPAGDGGGWRDGARRRLVYGDGSTPQGALQAAGALLRHPPVVPDPETPARRWLDDVADLVMTAQQRLGAGGRSSATEASGAAAAGSMSSRRRARRAAAVTRRPSAIPSSTPPTQEDVRGGPDARLDIERQRDARRAAHATEGASSSGAPLRSGHGGRPPVSPVGGAGCRAFVASLRNVRWPPRFRPTITEKYDGSVNPAEFLQIYTTGIEAAGGDDRVVLPSELTLRSPRVTMYCEADQDQLRRDDLDYLEERRRRAALRAARYQQSLRRYHQHHVRARSLCVDDLVLRRVQTRAGLSKLSPMWEGPYRVIGVPRPGSVRLATGDGTELPNPWNIEHLRRFYP

SEQ ID NO: 120463 - protein, 69 aa, Oryza sativa
  Clone ID: PAT_MRT4530_23580C.1.pep
CAHKKDRILAALGHGPIHFFIGFFSRGCVLVLRVLRPLRGALNNWMNVRLLARFCMRPAACTSSRPCET

SEQ ID NO: 120464 - protein, 110 aa, Oryza sativa
  Clone ID: PAT_MRT4530_23581C.1.pep
MSRRGGGGSGGRQGSEPESAAAVHVPGPCAATQRALAECHRSAARGPLRPEVLCRHLNRALAECLVTSCCPGETEAVRTLCGSAGTALKRSQCQRARIGLSLCLESHQEP

SEQ ID NO: 120465 - protein, 78 aa, Oryza sativa
  Clone ID: PAT_MRT4530_23582C.1.pep
VQTRFSSKFWRFIQEAGLRTDEEKGCDMPKPRRRKQMRHRSSLGLQYAEYYICNLYQEVKGYITNRSSDILSNWSYVF

SEQ ID NO: 120466 - protein, 50 aa, Oryza sativa
  Clone ID: PAT_MRT4530_23583C.1.pep
MASNNVHSRDGRERASSYNEKLQLALGLRRPQNATVERDNHVVVNPGNPA

SEQ ID NO: 120467 - protein, 154 aa, Oryza sativa
  unsure (1)..(154): unsure at all Xaa locations
  Clone ID: PAT_MRT4530_23584C.1.pep
DAWAAIGLKTKDGVVLAVEKRVTSPLLEPSSVEKIMEIDEHIGCAMSGLIADARTLVEHARVETQNHRFSYGEPMTVESTTQAICDLALRFGEGDEESMSRPFGVSLLIAGHDENGPXLCNAKAIGSGSEGADSSLQEQYNKELTLQEAETIAL

SEQ ID NO: 120468 - protein, 237 aa, Oryza sativa
  Clone ID: PAT_MRT4530_23585C.1.pep
MFLTRTEYDRGVNTFSPEGRLFQVEYAIEAIKLGSTAIGLKTKDGVVLAVEKRVTSPLLEPSSVEKIMEIDEHIGCAMSGLIADARTLVEHARVETQNHRFSYGEPMTVESTTQAICDLALRFGEGDEESMSRPFGVSLLIAGHDENGPSLYYTDPSGTFWQCNAKAIGSGSEGADSSLQEQYNKELTLQEAETIALSILKQVMEEKVTPNNVDIAKVSPNYHLYTPAEVEAVIARL

SEQ ID NO: 120469 - protein, 79 aa, Oryza sativa
  Clone ID: PAT_MRT4530_23586C.1.pep
AVAGGLVHQCMCCRGGEVPRWLGSHGVVGQGDVPPATEALAAAATRWSWSRQTSDAAVGAFAAAVVRWSWSCWRRQLGR

SEQ ID NO: 120470 - protein, 69 aa, Oryza sativa
  unsure (1)..(69): unsure at all Xaa locations
  Clone ID: PAT_MRT4530_23587C.1.pep
TERIXNLRFXSKWEVVXXLSEPARXPAVRARXRGXXRXSXARRXRLRGGSSAAARETXRRSDRKQKRGE

SEQ ID NO: 120471 - protein, 127 aa, Oryza sativa
  Clone ID: PAT_MRT4530_23588C.1.pep
MEEGDEDKDTKVDGREKKILAMTHVPADTDAAYWLTGLWTRGSNLALSRILAIREFIASLPQYKMIFVSTFINSVEKGSDLRQWPIRRACISGIDHRQLRTGDKWGSMQRSAVPRTSLFSEAKCEEK

SEQ ID NO: 120472 - protein, 75 aa, Oryza sativa
  Clone ID: PAT_MRT4530_23589C.1.pep
RIWGPTTGRILMELSRSDVTGTGENLRALCTCNTGVAPSSKWFHYKGGTLDSLIPESMRQGSHFTRGNGPAGESI

SEQ ID NO: 120473 - protein, 127 aa, Oryza sativa
  unsure (1)..(127): unsure at all Xaa locations
  Clone ID: PAT_MRT4530_2358C.1.pep
FFFFLGKHGGIFSFFFSPLLTHFLIEFRVLKHHGTTTVIKETKERTSTKKVDXLISIKQQELRDFTYCTLSGYPLSLTTILGFASRVDDPSASGSGTARSLHTWDLKPCECTPRSKQGELGGSPFFS

SEQ ID NO: 120474 - protein, 119 aa, Oryza sativa
  Clone ID: PAT_MRT4530_23590C.1.pep
MSHLVQGRDVLVPFSVAAITFSSLPLADTRLLSMDNTDARKDEKWDLTTELLNFLFLYPPLLLPSQRRTYDLVRARATIQAKQVKRPYSTYHGTVNQLMALVSWAHQRDFGQRPFSAGD

SEQ ID NO: 120475 - protein, 76 aa, Oryza sativa
  Clone ID: PAT_MRT4530_23591C.1.pep
PANFVTFCYSLCLLTLHACMCSLSLSLLYVYLAMPCLAAALHCTDQFVSYHHAALHIVQMVHVKKKKKKKKKKTRD

SEQ ID NO: 120476 - protein, 63 aa, Oryza sativa
  unsure (1)..(63): unsure at all Xaa locations
  Clone ID: PAT_MRT4530_23592C.1.pep
SGLPRVIHHLHFSILGNRVSQIILYVLSINHLSHFPPGRAPSSPARSPTGARSAXPPSPPATP

SEQ ID NO: 120477 - protein, 45 aa, Oryza sativa
  Clone ID: PAT_MRT4530_23593C.1.pep
MGNWRRDKDCGDRRHPTITMQGKDNVYRLRGSLNRESAPTCQWSQ

SEQ ID NO: 120478 - protein, 112 aa, Oryza sativa
  Clone ID: PAT_MRT4530_23594C.1.pep
PRTFEHMHISNPLNLQHMTSIQAGAELKKFENLGRSNWHSRFSLKFSFLITERTAKYYTVCSLTSPKVAGQGSAPWIHTHHPSTYAKSTGVANSIRSCDRDRSEMINKCRSC

SEQ ID NO: 120479 - protein, 137 aa, Oryza sativa
  Clone ID: PAT_MRT4530_23595C.1.pep
HIQPNYPPRKTDPTRSLFFFFLESYVLTWFIVFAFDSSDMVIVQCTHSRTLELKSYFCYCYCYLYHFFLLASMYKRPTPFWHSTQPKKNQNFPRRSDPTNEATNRPTEEDRGMDLEDRVGGDQSCQRRSMTTQRWMM

SEQ ID NO: 120480 - protein, 108 aa, Oryza sativa
  unsure (1)..(108): unsure at all Xaa locations
  Clone ID: PAT_MRT4530_23596C.1.pep
HRRNASCGSRGGSRRSCAAKLLPSPTLLPSPCAASLRHTKSPNHPQPSKTPKLLHSSSHSPLPSPPPPTRCFHLHPLLSSPPPPPPPPPRRPXPPLSPTPTTCRRPSP

SEQ ID NO: 120481 - protein, 160 aa, Oryza sativa
  Clone ID: PAT_MRT4530_23597C.1.pep
MDSPATSYSTASNQGDPTRPEYVSQRDWNHRHQLFDPARSIKLQNIVAVKDNGSTLSDVSLRFAPTTCQTSTTTTTGFTVLTLVLFLSTSVLSRFPTNGKFYSTLTKAPCLYGSTPRSNKASTTNVDKASSQILRLLDHSRTVGGSQQGIRNEEMVYPPR

SEQ ID NO: 120482 - protein, 105 aa, Oryza sativa
  Clone ID: PAT_MRT4530_23598C.1.pep
HTHRLFCPVSLRPSSAASPAVAPHPPMIASNRPWCLPLIRCTLLHALRAQLAGGSVSSSLLSSRSALHHCSCCCCSCRCSCSCTSVPSPRRLSLRSSLPRFDQLR

SEQ ID NO: 120483 - protein, 63 aa, Oryza sativa
  Clone ID: PAT_MRT4530_23599C.1.pep
RPGPGQPHSSLSCQRRNAAFLLCLCSCSSAYECLYASVCFEECPPSFFFSLGSQVKVKNGLLS

SEQ ID NO: 120484 - protein, 87 aa, Oryza sativa
  unsure (1)..(87): unsure at all Xaa locations
  Clone ID: PAT_MRT4530_2359C.1.pep
PLQRGYLYPHDITNPDHPARGDQPRRETSKLSXQGISKANKGLPYADERGPRPTTGXVPDHTMPGSPGVLPDTTPANPHVSRHQGSP

SEQ ID NO: 120485 - protein, 75 aa, Oryza sativa
  Clone ID: PAT_MRT4530_235C.1.pep
TVLVLPLRCTQPPPTDNVHALALIARFITLVVVLVMPPPPPLFSHQRPACYRRRLKTPRTAGPRPKKRIQADGGV

SEQ ID NO: 120486 - protein, 48 aa, Oryza sativa
  Clone ID: PAT_MRT4530_23600C.1.pep
SEICSRGNAVPTVHCSNCDCQAPNDLGDRLCKTCRTPLLKRYLWSVGD

SEQ ID NO: 120487 - protein, 177 aa, Oryza sativa
  Clone ID: PAT_MRT4530_23601C.1.pep
MAMTASYFIFSWNKFTLGPSICHPVRFSSLNRKTGYDPSPNLRKPGKHGPSAVLKHAARRRTAVLPVVFVDGDQTVDLGTVTVQPFLGVRKLRVVVADRVGLVGQQILASLARPCRARRVPLEEGTDLTAAVRTRGAAALLAFTRTGDFLTELQSYIREEDGVQRHASAAAAPASGW

SEQ ID NO: 120488 - protein, 627 aa, Oryza sativa
  Clone ID: PAT_MRT4530_23602C.1.pep
MSQERALDEVVSPFLMQLSKARLLFLKLDEDSSFLEIKHLFQNIEKEAYEVENILQRVSRWENEIIDDFGGIARYLDDIVEEESHLNSICLKLQIVNAEMSNLKDRMKLPLHVPVIKPSVPPLLPASSPAKLLPANVSEEWRRLEIERKILENSTMSTLQLSYDNLDLQLKLCLLCFSIFPENSIISKRAMIHWWIGEGLVAATRNQTAEDVGKDCFDKLIARDMIEAVHVKRSCSVSECKLHPWIRRMLITVARKAQFFEFDSEGNATWDFSGTHRACLVEEYKQEIEISPVKNQPNTDGLLTIFNVNERYLQFDKSWFLDLRKIAVLQLGRWHNLYRHHIEVDSTEFLEGLQLSKQIKYLCLRGISRITALPASIGELSNLMILDLHACHNLERLTESITSLQMLTHLDVSECYLLEGMPRGIGLLTELQVLKGFVIGGSTSNYNCRVAELVRLEKLNKLSVYIGSKVAVTGDELNELENIKGLRSLTITWAVSVLSKGKDQQASVATAMLTSLSLPPNLKKLDLRCFPGKKIPSWLSPSKLLGLKKLYFTGGMLNTFGDGSTSEMWKVEILRLKFLDDLEVEWTQLHEAFPNLTFLEVFRCSKLESFPCDKDGVWMNCDKQEVR

SEQ ID NO: 120489 - protein, 583 aa, Oryza sativa
  Clone ID: PAT_MRT4530_23603C.1.pep
SIISSPPAQATVASKNRVGRRRRKEDAPGSRARARARAMEQYEVVEQIGRGAYGSAYLVVHKGERKRYVMKKIRLSKQNDKFQRTAYQEMSLMASLSNPYIVEYKDGWVDEGTSACIVTSYCEGGDMAERIKKARGVLFSEERVCRWFTQLLLALDYLHCNRVLHRDLKCSNILLTKDNNIRLADFGLAKLLMEDLASTIVGTPNYMCPEILADIPYGYKSDIWSLGCCMFEILAHRPAFKAADMASLINKINRSSISPMPPIYSSSLIYAKHDALFGRKQIVKSMLRKNPEHRPTAGELLRHPYLQPYLAESCSCSPIYLPVKPTKSNLGDKQQSRKPGSGRKRIIKTNGSSEALETAAEQAVDTRDNSTYISDVSTVGTQDACISQVSVDPQARNKAYQNIDDLTLFQQIEENLMTITDRQIDEAIFLKAVRTSSTVDVVPVSGAIQKPNEAPIPKEELTIGVVQEQRKEVKAHTHQGSKPGTGDVPIVTEESSPKSAVKLAHSDSTPAEWDHLNIVQQRADALESLLELCAKLLKQERLEELAGVLRPFGEGAVSSRETAIWLTKSLMTPPKLEGSPKLT

SEQ ID NO: 120490 - protein, 143 aa, Oryza sativa
  Clone ID: PAT_MRT4530_23604C.1.pep
SPGDNEFRDGNINCSSAFCNSKDTSSFQEYINKGKIIIELISFCLASKLLGYHTFIVCNLLQTNVIVSHSKFLNKNREVAMTPIPNQTRVGDSMQNEGRRPLGRSSRIPAWVSEVSGGGKRRDRRGAMKRQGPRGLSAPDLDD

SEQ ID NO: 120491 - protein, 72 aa, Oryza sativa
  Clone ID: PAT_MRT4530_23605C.1.pep
RILKRITFHNPGPVRILNNLGQPDTNSGLAVMAQRYRQSKPRPDLNSERQGDSVHDPLAEPTGLDPNQSPHV

SEQ ID NO: 120492 - protein, 289 aa, Oryza sativa
  Clone ID: PAT_MRT4530_23606C.1.pep
MAGLDLGTSYLHHHQSLHLRHDDGGAGSDDGGHDDLSPGSGGGGGPSSTAGGAGIGGGEVVARRPRGRPPGSKNKPKPPVIITRESANALRAHILEVAAGCDVFEALTAYARRRQRGVCVLSAAGTVANVTLRQPQSAQPGPASPAVATLHGRFEILSLAGSFLPPPAPPGATSLAAFLAGGQGQVVGGSVAGALIAAGPVVVVAASFSNVAYERLPLEDGDEVVPPAPAGSDQGGGGSGGMPPLGVDPSGGAATGGLPFFNMPFGMPPMPVDGHAGWPGAGVGRPPFS

SEQ ID NO: 120493 - protein, 100 aa, Oryza sativa
  Clone ID: PAT_MRT4530_23607C.1.pep
METVEKWMDGSKIPVDSKNRVYFFLPGLSVSQLSDSRRSQAGEKRRASGMGRAEKLGANRKGNPAASHSSSYPYPVVITEESTQLLEFPWSSSWLGLVAP

SEQ ID NO: 120494 - protein, 65 aa, Oryza sativa
  Clone ID: PAT_MRT4530_23608C.1.pep
CMTLFLSVYYYHCTHSIPDTTDGRQCYREPVVVSWGNITASWTASYRANISWGLSLSLINSRRQP

SEQ ID NO: 120495 - protein, 129 aa, Oryza sativa
  Clone ID: PAT_MRT4530_23609C.1.pep
RETSQVMGYDIPKGTSVFVNMWAICRDSRYWEDPEEYKPERFENNSVDYKGNNFEFLPFGSGRRICPGINLGVANLELPLASLLYHFDWKLPNGMAPKDLDMHETSGMVAAKLITLNICPITHIAPSSA

SEQ ID NO: 120496 - protein, 326 aa, Oryza sativa
  unsure (1)..(326): unsure at all Xaa locations
  Clone ID: PAT_MRT4530_2360C.1.pep
MEAEARAACADDGMEAEVPHRVDSSSPLPYFPRHGYLRHRTFTLDHAALASVDASLYSRLIVSPLSPVMAAFSRKFGTGRYFLDHMKTRPGELDGPTTAGMRSSLASTSRRLAIAGAPLVVDHVSFASTVAGLCSRPAALRPHHCHGCLLASVRHRPPLPRPQEDEADEESCCEDCCVIAVVVPRPSEVAVREIAMYWFENQRASRIISRTSMEVAGREIATYWFENQQASRIISRSPMEVVVGEIATYWFENQRASRIISRSPMEVAVREIATYWFENQRVSRIISRTPMEFAVRQIATYWFENQRASRNISXRTPMEVAPWPVL

SEQ ID NO: 120497 - protein, 220 aa, Oryza sativa
  Clone ID: PAT_MRT4530_23610C.1.pep
MANHTDAELRPELFLPPGANVEAPWIARIPRSDFTVQSIPQNLGEEFAVVLIEPQPPEHLVNQTINEIIHFVTHFFEPQLSLSFNDYSMIESSSSVQIIKQPSGQIVPYSLPIPELPFFRFPEKFCYAVAFGVFRLLLLAVNPTMFQCITQTIPWNTVKINWVVIPYVLPWCIQSPAKRQRISIAGKKCRKSSSLQLCLDRNNFPACESEEAEETGPALC

SEQ ID NO: 120498 - protein, 52 aa, Oryza sativa
  Clone ID: PAT_MRT4530_23611C.1.pep
LFTCATQSLRSELEYNPEPYIYTSGEPTVADNARVHSSCAIAQPLPSQCGPG

SEQ ID NO: 120499 - protein, 57 aa, Oryza sativa
  unsure (1)..(57): unsure at all Xaa locations
  Clone ID: PAT_MRT4530_23612C.1.pep
QRRRHIVFPVNXHSXRSVVGREEERDGRNSSGKSLAPAGLGGGGGGLTQGGREGVKG

SEQ ID NO: 120500 - protein, 448 aa, Oryza sativa
  Clone ID: PAT_MRT4530_23613C.1.pep
MTTPLPYAAAATAATGEDPDQIGRLPDCLLTTILSLLPLDAAARTTALSRRWRSLWPSAPLRLHDSDLPSRSQYLSAAISGILASHRGDAVSFRLSSGRPSSADLDTWLRILAGKRLQELLLQPPSEPLPLPPSLLGCHSLRSADLTNCRLPAAAAATASFPHLHELTLRYCFASSRALHGLLAGCPALAALSLDRVFGCRSLRVRSRTLRSLTVSVSLRRRDEVGDELQDLAVEDGPLLERLLGHDVNWGPSIHVLHAPRLEMLGYLGVGIPSLQIGAALFHSMRAVRLAAEFRCLKTLALEMVDPQVKPVVDFLRCFPCLEALYITSHMFEPRSMETLKCDNMDYPIECLNRHLKKVVLAGYEGRRRELQLARFLVSNARVLQVMKFLCANDCKPTWLASQKRQLCWESRLSLGPQVIFEVYRKSHTRFRKHASNITLVDPFDVKT

SEQ ID NO: 120501 - protein, 78 aa, Oryza sativa
  unsure (1)..(78): unsure at all Xaa locations
  Clone ID: PAT_MRT4530_23614C.1.pep
PPKKAKKSILVVRKLKKPQQGRPLDPHXKKQFASGRXLPCISSRPGQCAQTNGYILKGKELDXXMKKPQRKKGKGPPA

SEQ ID NO: 120502 - protein, 252 aa, Oryza sativa
  Clone ID: PAT_MRT4530_23615C.1.pep
MSSVQLSGAGVAAVAFTKNGASSFDGLRLAPPSVRVCSSRRPSRSLVVKAATVVTPKYTSLKPLGDRVLVKLGAAEEKTVGGILLPSTAQSKPQGGEVVAVGEGRTIGDKKVEVSLQIGAEVVYSKYAGTEVQFNDTKHLILKEDDIIGVLETDDVKDMKPLNDRVLIKVAEAEDKTAGGLILTETTKEKPSIGTVVAVGPGPLDDEGKRQPLSVSAGSTVMYSKYAGSEFKGADGTNYIVLRVSDVMAVLS

SEQ ID NO: 120503 - protein, 116 aa, Oryza sativa
  Clone ID: PAT_MRT4530_23616C.1.pep
MPWSCRRCPHPEEPTVTVPHHRALLAAAPRCGGPIGEISAVRPMASTRLDRRLHGGQTGGGDKQQQYIRRLDRNNYTGQTDRSTPIKFPQERKYLKDSFVHEVVLSSQFASCDPWH

SEQ ID NO: 120504 - protein, 251 aa, Oryza sativa
  Clone ID: PAT_MRT4530_23617C.1.pep
MSGTGYTVEVTNLSSRASESDLHEFFSFSGAIEHIELIRSGEYGSTAYVTFKEPYSLETAVLLSGATIVDQPVCIARWGQPNEPYNFWDTPNWYTEEEIEYRTYQTCQFNSTPQEALTIAQDVVKTMLARGYVLSKDALARARAFDESHQVTATAAAKAAELSKRIGLTDRVSGLTDRVSAGVGAIRSVDETYHVSETTKTVATATGRTAVKVVNGIMTSSYFSAGAMMLSDALHRAAQAAADLAAHGRHN

SEQ ID NO: 120505 - protein, 89 aa, Oryza sativa
  unsure (1)..(89): unsure at all Xaa locations
  Clone ID: PAT_MRT4530_23618C.1.pep
DCGLCLYGLLVHQMDVKTAFLNGELDEEIYMDXPDGFVVEGQEGKVCKLLKSFYGLKQAPKQWHEKFDKTLTSAVFAVNEADKCVYYRH

SEQ ID NO: 120506 - protein, 727 aa, Oryza sativa
  Clone ID: PAT_MRT4530_23619C.1.pep
MKCFWVSTGKPMEVLNADQQKEFDEATTLFVGCILSVLGDRLVEVYIHMTDAKELWDALIAKFGATDASNNLYIMELFHDYKMADNRSVVEQAHVIQTMAKKLEQAHEYSVEGLIASLDVEEKTREKDSASKGDGGQSSANVVHKAQNKSKGKYKAQQTTNLKKKKNNNPNQDERTCFVCGLPGHLARKCPQRKGMKALAGQTSKSANVTIGNTRDGSGYDNLPSGFSVNQSTNWWIDIGANVARGSTVLIGNGSHASVHGVGTVDLKFTSGKIVQLKNVQHIPTIDRNLVSGSRLTRDGFKLVFESNKIVLSKHGYFIGKCYECGGLFRFSLSDFLQVPNRNKDKTPYEIWIGRKPSLSYLRTWGCLAKVNVPITKKRKLGPKTVDCVFLGYAHHSIAYRFLIVKSEVPDMHVGTIMESRDATFFVNFFLMKDTHSSSSQPSEIIPSSITSPEQTEHTHEHVTEENDSEGPRRSNRQRTAKSFGDDFIVYLVDDTSKSISKAYASPDADYWKEAVRSEMDSIITNGTWEVIERPYGCKPVGCKWVFKKKLRPDGTIEKYKARLVAKCYTQKEELDEEIYMDQPDEFVVDGQEGKKQAPKQWHEKFDKTLTSAGFAINEKILNRIGYIDKLTALDTATVEAEWVRDLLMHLPIVEKSVPAILMNCDNQTKAGKSLHEGTITKCDRQCIEGDGFETHSILERTYLCELDCWSQSMKMLGESSRKLTKD

SEQ ID NO: 120507 - protein, 79 aa, Oryza sativa
  Clone ID: PAT_MRT4530_2361C.1.pep
MEVPRPVVPDLDLRAGRCFSAQTSHESNCQPFSAADVRADGHMGVYRLRPPGFEVSLLRYAHAVPVRWRIPPRHRPKHR

SEQ ID NO: 120508 - protein, 593 aa, Oryza sativa
  Clone ID: PAT_MRT4530_23620C.1.pep
MEASARGNLRNGGARVSGTSAFDVLHREKAAIRRCDFTMAGFADALRLDKFTVQCQYFAQAQNKSKGKYKAQQTTNFKKQKKNNNNPNQDERTCFVCRQPGHLARKCPQRKGMKAPVGQTSKSANVTIGNTGDRSVARGSTVLMGNGSHASVHGVGTVDLKFTSEKIVQLKNSFFPMKDTHSSSSQPSEVIPSSITPPEQTEHTHEHVTEEDVSEAPRRSKRQRTAKSFGDDFTVYLVDDTPKSISEAYASPDADYWKKAVRNEMDSIIANVNEADKCVYYRHGGGEGVILCLYVDDILIFGTNLEVINESHYVEKMLNRFGYIDSKPSPTPYDPSLLLRKNKRIARNQLEYSQIIGSLMYLASATRPDISFAVSKLSRFTSNPGDDHWRALERVMRYLKGTIELGLHYTGYPAVLEGYSDSNWISDVDEIKATSGYVFTLGGGAVSWRSCKQTILTRSTMEAELTALDTATDEAEWLRDLLMDLPIVEKPVLAILMNCDNQTVSGTSAFDVLHREKAAIRFLGSASRDCSLFVRDGSPSSPLVCFAPSSTLATASSSYRATELIQMDSTWPSESEHTENQAPEAAANIALLA

SEQ ID NO: 120509 - protein, 141 aa, Oryza sativa
  unsure (1)..(141): unsure at all Xaa locations
  Clone ID: PAT_MRT4530_23621C.1.pep
MQPPFAVLFCCGKFGFRKIRCVKTAWSPDKLRVTYPVRLRGRPDXAFTQHTRNQSRVCLLLCTAPSLIDYSIPLAGVHRRSGEXVSGTFAFDVLHREKAVIRFLGNASRDCSLFVRDGSPYSPLVCCAPSSTPATVSCFCR

SEQ ID NO: 120510 - protein, 58 aa, Oryza sativa
  Clone ID: PAT_MRT4530_23622C.1.pep
ALCLDRERPHFPPPPPYQNLLECGQGLTVLYSEMDEVFPSSRPILRHTTWPSEFPSSL

SEQ ID NO: 120511 - protein, 811 aa, Oryza sativa
  Clone ID: PAT_MRT4530_23623C.1.pep
MAPPPSSLLRDLLAADGFRNRRKPPDSNPPAAPRTTSMPLQHRRPSRPARSQSDVLTRSRLRETNNVGTSDGDGVDAGEEQRTATRRSSASLMSARSYNNNKDSGGGAMRGGSAAAVPALDESVLTALISLVAGAVKRFVRDEGFRASLRGGCMSCLGGESNHRAVLDLRVIVHTVERAASEGLDDPRDLKRASLRLHAMASLDAKEADAVSAAGVPYQRLAACAHLYMSVISKLQEKDHSSAVHVLEAFCLAPHEARTSLLPALWDRLFRSGLSHLKAWRDRESATAASSDTRVKDVEKMFVEAVDDGTRALACYYRDWLLGRSQAMSLPVVPAPPSTVLASALRFSTSTSYDIGSDVACSSGSYSPAVKFALDETPSQYDREIEEEEEAEVDEKTADAESVFHECDGTEPKSYTHSLQTEENELMPDKLANEASERKLLSEGPDLQSDTDGSQISIFATIPSDFLCPLTRQIFNRPVTIADRPQVRAACYTFSGSIKASECAQLQELTATFVENVLSSECETSEKLEKARRLMAIGGIDFLLHKFHGGGEDEKAQAAELLLLCIRAEGSCRNYMAIRICNSSVVQLLHSEVEPHRDSVYREEAAKIITHSLRCSLSEENVVANIRKALLLLGGHFSFSGDLLAEDRMLKQAGFVDGSRVTRADSDAAVQDKGRDEDEVWLRDVTAALLGSGRRPFLEALSMCMSSPNHDLAAVCLTTAAWLSRSLASIDAADVQLAAFSALIPRLKQRLAGDRSQAQHRVLASVTLYNFSKIPDCRALLMLLADGLRDHLVELAELTWTAGQLITELQE

SEQ ID NO: 120512 - protein, 919 aa, Oryza sativa
  Clone ID: PAT_MRT4530_23624C.1.pep
MKAPAEQTSKSANVTIGNTGDGSGYGNLPTVARGSTVLMGNGSHASVHGVGTVYLKFTSGKIVQLKNVQHVPSIDRNLVSGSRLTRDGFKLVFESNKVVVSKHGYFIGKGYECGGLFRFSLSDFCNKSVNHICGSVDDEANVWHSHYWKEAVRSEMDSIIANGTWEVTERPYGCKPVGCKWVFKKKLKPDGTIEKYKARLIAKGYTQKEGEDFFDTYSPVARLTTIRVLLSLAASHGLLVHQMDVKTSFLNGELDEEIYMDQPDGFVVEVNEIDKCVYYRHGGGEGVILCLYVDDILIFGTNLEVINESHYVEKILNRFGYIDSKPSPTPYDPSLLLRKNKRIARNQLEYSQIIGLLMYLANATRPDISFAVSKLSRFTSNPGDDHWRALERVMRYLKDYSIPLAGVHLQSGEQVFGTSAFDVLHREKAAIRFLGSASRDCSLFVRDGSPSSPLACCAPSSTLATASSSCRATGFSATSCRPQLGSSARIWGGRAAAEAMQGTPQVFDHGSISFGRFELESLAWEKWSVFANDRRHEEFGKFNGLVAKKKAYFEEYFKRIRELKALQQQNQQTELNLDYSGDGSDSSQTGEDVPTADQASPSGSGTLLDSMVQTGVQTIFENDLECYDDNDKEMLDKDISPSVGGTCQIEQEFRESASGGNHPDRMVDVLQQNTNCGPDDLGRPMESMMTPKRTVKKDSLVGQAAKTMPKTVNMTSSNIPGHAVVNKGTDSGKSSVVNRRAKPETIQQRLKAVTGNIVDIVGRSKLVVKEVPGIMGVRRPSSPALQRPSTRERRPVTRDSSRKAPEVATMCRPSTAERRPATRELAPKQANTVVPCRPSTPNRRPMTRELAPVTPQKAITQKLVKSSKPEMKRCSTPYSGRTLHSLVPAYTGILHCTSRHSGDSEISNILIKECNSCTD

SEQ ID NO: 120513 - protein, 563 aa, Oryza sativa
  Clone ID: PAT_MRT4530_23625C.1.pep
MRPGETGKRVKGSPSRSGGADEDRIGCLPDGVLHHILGFLPAPDAVRTCLLARRWRHLWKSATGLRISEGYGVEKLHDFVHHLLLLRGGAPLDTFELGSIDLAEGDNRSMNLWFRHALLCQVRVLRLNVFGLELHDLPFVSRHLVKLELRFVILMHSFLDFSSCPVLENLEIVSSELSDAKRISSQSLKHLNLTHCTFSENVRIRIDVPNLLSLWLQDYRCRTPVFEVMPLLVKAFVSVTGDSGDWLTCTSGNADSEECPHDDCGKWEIDNNCKVLQAFSQAKNLALVADSQKLLDFIDKKSDYSIPLVGVHWRSGEQVSGTSAFDVLHREKAAIRFLGSASRDCSLFVRDGSSSSPLACFAPSSTLAIASSSCRATGLSATSFKDYWKEAVRSEMDSIIANWTWEVTERPYGCKPVGCKWVFKKKLRPDVNEADKCVYYRHGGGEGVILCFYVDDILIFGTNLEVSGTSAFDVLHREKAAIRFLGSASRDCSLFVRDGSPSSPLACFAPSSTLATTSSSCRATGLSVTSFKGGASRKKRPSFTYQVRELQSDAATAPTSKCY

SEQ ID NO: 120514 - protein, 1039 aa, Oryza sativa
  Clone ID: PAT_MRT4530_23626C.1.pep
MGRAGLRNLCLRRPAPGEGAVIFTMAGFTDALRLDKFTGVHFKRWQIRVTLWLIAMKCFWVSTGKPMGVLNADQQKEFYEATTLFVGCILSILGDRLVEVYMHMTDAKELWDALNTKFGATDASNDLYIMEQFHDYKMANNHSVVEQAHEIQTMAKELELLKCVLPDKFVPGCIIAKLPPSWRGFGTALKHKRREYSIEGLIVSLDVEEKAWEKYAASKGDAQQTTNFKKQKKNNNNPNQDERTCFVCGQPGHLARKCPQRKGMKAPAGQTSKSANVTIGNTGDGSGYGNLPTVFSVNQSTNWWVDTGANVARGSTILMGNGSHASVHGVGTVDLKFTSGKIVQLKNVQHVLSIDRNLVSGSRLTRDRFKLVFESNKVVVSKHGYFIGKGYECGGLFRFFLSDFCNKSVNHICGSVDDEANVWHSRLCHINFGLMSRLSSIVPNRNKDKTPYEIWIGRKPSLSYLRTWGCLAKVNVPITKKRKLGPKTVDCVFLGYAHHSIAYRFLIVKSEVPDMHVGTIMESRDATFFESFFPMKDTHSGSSQPSEIIPSSITPPEQTEHTHEHVSEEDVSEAPRRSKRQRTAKSFGDDFTVYLVDDTPKSISEAYASPDADYWKEDVRSEMDSIITNGTWEVTERPYGCKPVGCKWVFKKKLRPDGTIEKCKARLVAKGYTQKEGEDFFDTYSPVARLTTIRVLLSLAASHGLLVHQMDVKTAFLNGELDEEIYMDQPNGTNLEVINEVKSFLSQNFDMKDLGIADVILNIKLIRGENEITLLQSHYVEKILNRFGYIDSKPSPTPYDPSLLLRKNKRIARNQLEYSQIIGSLMYLASATRPDISFAVSKLSRFTSNPGDDHWRALERVMHYLKGTMELGLHYTGYPAVLKGYSDSNWISDVDEIKATSRYVFTLGGGAVSWRSCKQTILTRSTMEAELTALDTATVEAGWLCDLLMDLPIVEKPVPAILMNYDNQTVIVKVNSSKDNMKSSRHVKRRLKSIRKLRNSGVITLDYIQTARNLADPFTKGLSRNVIDNASKEMGLRPM

SEQ ID NO: 120515 - protein, 1507 aa, Oryza sativa
  unsure (1)..(1507): unsure at all Xaa locations
  Clone ID: PAT_MRT4530_23627C.1.pep
MKAPVGQTSKSANVTIGNTGDGSGYGRTRFHRPNGEWVICFCSWSDHGGEYFSNEFDLFYEEHGIIHERTPPYSPESNGIAERKNRTLTDLVNAMLDIAELPKAWWGEALLTSNHVLNRVPNRNKDKTPYEIWIGRKPSLSYLRTWGCLAKVNVPITKKRKLGPEIMDCVFLGYAHHSIAYRFLIVKSDSRDATFFESFFPMKDTHSSSSQPSEIIPSSITPPEQTKHTHEHVTKEDVSEAPRRSKRQRTAKSFGDDFTVYHVDDTLKSISEAYASPDVDYWKEAVRSEMDSIIANGTWEVTEWPYGCKPVGCKWVFKKKLRPAVLLKTSHGLLVHQMDVKTDFLNGELDEEIYMDQPDGFVVEGQEGKVYKLLKSLYGLKQAPKQWHEKFDKTLTSAGFAVNEADKCVYHHHGGGEGVILCLYVDYILIFGTNLEVINEVKSFLSQNFDMKDLEVADVILNIKLIRGTIELGLHYTGYPAVLEGYSDSNWISDVDEIKATSGYVFTLGGGAVSWRSCKQIILTRSTMKAELTALDTATVEAEWLRDLLMDLPIVEKPVPAILMNYDNQTVIVKVNSSNDNMKSSRHVKRRLKSVRKLRNSGVIMLDYIQTARNLADPFTKGLSRNVIDNASKEMGLRPISNDVFMLVYICNVMIYLWNKLNHYVLIISTIQKPYYRRCDFTMAGFADALRPDKFTGVHFKRWQIRVTLWLTAMKCFWVSTGKPEGVLTADQQKQFEEATTLFVGCILSVLGDRLVEVYMHLTDAKELWDALNTKFGATDAGNDLYIMEQFQDYKMADNRSVVEQAHEIQTMAKELELLKCVLPDKFVARCIIAKLPPSWRSFGTALNHKRQEYSVEGLIASLDVEEKAREKDAASKGDGXARGSTVLMGNGSYASVHGXDHGGEYFSNEFDLFYEEHGIIHERTPPYSPESNGIAERKNRTLTDLVNAMLDIAELPKAWWGEALLTSNHVLNRVPNRNKDKTPYEIWIGRKPSLSYLRTWGCLAKVNVPITKKRKLGPEIMDCVFLGYAHHSIAYRFLIVKSDSRDATFFESFFPMKDTHSSSSQPSEIIPSSITPPEQTKHTHEHVTKEDVSEAPRRSKRQRTAKSFGDDFTVYHVDDTPKSISEAYASPDVDYWKEAVRSEMDSIIANGTWEVTEWPYGCKPVGCKWVFKKKLRPDGTIEKYKARLVAKGYTQKEGEDFFDTYSSVARLTTIRVLPSLAASHGLLVHQMDVKTDFLNGELDEEIYMDQPDGFVVEGQEGKVYKLLKSLYGLKQAPKQWHEKFDKTLTSAGFAVNEADKCVYHHHGGGEGVILCLYVDYILIFGTNLEVINEVKSFLSQNFDMKDLEVADVILNIKLIRGTIELGLHYTGYPAVLEGYSDSNWISDVDEIKATSGYVFTLGGGAVSWRSCKQIILTRSTMKAELTALDTATVEAEWLRDLLMDLPIVEKPTCEKTIEVCXEIEKLRGYNVRLHPNCXKPGRSLHEGTITKCDRQCIEGDGFETHV

SEQ ID NO: 120516 - protein, 77 aa, Oryza sativa
  Clone ID: PAT_MRT4530_23628C.1.pep
YQKEISRLNEQVQEFKRLSETKTEELKTAEANTLALQKQSEGLLTEYERLIAENEEFRNQLQSMDLRLSHSDNKKNT

SEQ ID NO: 120517 - protein, 180 aa, Oryza sativa
  Clone ID: PAT_MRT4530_23629C.1.pep
MLAVHGGGTTGCGEEDQHSDAVGRGKEDQGGGAAGRGEDPRQGWRGSGPRRRPRRARRGGPRRQWRRRGSIIGCSEEVHGGSLVGHGEEVDGGGGGVAGRGEEFRGGDGAFSLSLSLGSLGSTPSTFCRLLPRPPALAVPMVLPQPLPQDDLLDPDALADPDSSFYEINGVRVHHKVCTH

SEQ ID NO: 120518 - protein, 248 aa, Oryza sativa
  Clone ID: PAT_MRT4530_2362C.1.pep
MEIAVREIATYWFEDQRTCRIISRTPMEIAVREIATYWFEDQRASTIISRTPMELAVREIPTYWFKNQRASRIISRTPMEVAVREIATYWFENQRASRIISRTPMEEIATYWFENQLASRIISRTPMEVCYVLVREPASCFRIGHGMWWVHNPDRYYGNTLIINLLSQEELDLKQFLNRLAMLLKDEEIKWYQRDKVKDLLEDDSNTKYFQFVANGWDREKDGWDGMIEGILDEPCFSLERHGRMRMG

SEQ ID NO: 120519 - protein, 164 aa, Oryza sativa
  unsure (1)..(164): unsure at all Xaa locations
  Clone ID: PAT_MRT4530_23630C.1.pep
FKSGGPGGPEQTGCRGAPAKWGGGPKSLSEQDRLQKRYTGTGAMYRTAGEPLHGKGNLGGEGAPAGTRPIRWTQGGKXGGRAASGAGGXIGAGXTDRSMGXTXSWGXCPGAXPGKALGNEGEXPGPGPLPXKLMQGPMKGRSGGGTGGVGPKSGTPTVRTPHRD

SEQ ID NO: 120520 - protein, 1017 aa, Oryza sativa
  unsure (1)..(1017): unsure at all Xaa locations
  Clone ID: PAT_MRT4530_23631C.1.pep
MAGFADALRPDKFTGVHFKRWQIRVTLWLTAIKCFWVYMHMTDAKELWDALNTKFGATDGSNDLYIMEQFHDYKMADNRSVVEQAHEIQTMAKELELLKCVLPDKFVAGCIIAKLPPSWRSFGTALKHKRQEYSVEGLIASLDVEEKAREKDAASKGDGGQSSANVVHKAQNKSKGKYKAQQTTNFKKQKKNNNNPNQDERTCFVCGQVGHLARKCPQRKGMKAPAGQTSKSANVTIGNTGDGSGYGNLPTVFSVNQSTNWWVDTGANVARGSTVLMGNGSHASVHGVGTVDLKFTSGKIVQLKNVQHVPSIDRNLVSGSRLTRDGFKLVFESNKVVVSKHGYFIGKGYECGGLFRFSLSDFCNKSVNHICGSVDDEANVWHSRLCHINFGLMSRLSSMCLIPKFSIVKGSKCHSCVQSKQPRKPHKAAEERNLAPLELLHSDLCEMNGVLTKGGKRYFMTLIDDATRFCYVYLLKTKDEALDYFKIYKAEVENQLDRKIKRLRSDRGGEFFSNEFDLFCEEHGIIHERTPPYSPESNGIAERKNRTLTDLWVFKKKLRPDGTIEKYKARLVAKGYTQKEGEDFFDTYSPVARLTTIRVLLSLAASHGLLVHQMDVKTAFLNGELDEEIYMDQPDGFVVEGQEGKVCKLLKSLYGLKQAPKQWHEKFDKTLTSAGFAVNEADKCVYYRHGGGEGVILCLYVDDILIFGTNLEVINEVKSFLSQNFDMKDLGVADVILNIKLIRGENEITLLQSHYVEKILNRFGYIDSKPSPTPYDPSLLLRKNKRIARNHLEYSQIIGSLMYLASATRPDISFAVSKLSRFTSNPGDDHWRALERVMRYLKGTVELGLHYTGYLAVLEGYSDSNWISDVDEIKATSGYVFTLGGGAVSWRFCKQTILTRSTMEAELTALDTATVEAERLRDLLMDLPVVEKPVPAILMNCDNQTTCEKTIEVCXEIKKLRSYNVGLHPNSEKPGRSLHEGTITKCDRQCIEGDGFETHSILERTHLCELDCWSQSM

SEQ ID NO: 120521 - protein, 446 aa, Oryza sativa
  Clone ID: PAT_MRT4530_23632C.1.pep
MAKVQGALLPDRDGQAAGPVPFKEVAGVDAIPARPVTEHDAAISGMPRRLVYNNSLPILSYRGFWLLEDWARGTAAMADERRGGFVARPGDVVLATLPKAGTTWLKALAFATMARGLFPPASPDHPLRRLNSHDCVPTVESGLFACGREGVLDKLPSPRLLNTHLPLSLLPSSITDNDDCPEEDLEEVKAGRRKPTITSPLLKVTRTTQRDEKDRAVSTWHFIKRIKRIGSDVPFSEVYKSICEGTSACGPVWDHILGYWNASKKEPSRVLFLTYEQMLQDPMGTIRQLAEFLGQPISDAEEETGVVAEIVELCSLESMKKQKINREGYQGVGITFSNDAYFRKGVAGDWLNHMTLEMGQHLDSILNEKFDGGVDLDGTKDEYMFHGRIEGAVLEEGVGGGTAGGEVRLPSLSLRSTLPPLLAATTTPMTTPLGSGEGRGGSSERS

SEQ ID NO: 120522 - protein, 136 aa, Oryza sativa
  Clone ID: PAT_MRT4530_23633C.1.pep
FGIVFCPILFGFVVGCIAQKSRYICSNLEDNRVHFSSIVWILKIVIIEHRRKGHAYHRHSYTGNRFPQGIRFKPRVKLENTGGSDLFCSCGDSHPLLINSDSVLFASIIAVKKTVSLIVYSFGSQLYVDQHVVDDN

SEQ ID NO: 120523 - protein, 29 aa, Oryza sativa
  unsure (1)..(29): unsure at all Xaa locations
  Clone ID: PAT_MRT4530_23634C.1.pep
NLLSEDIPIENKFLFKXDLMYGNYYRSVD

SEQ ID NO: 120524 - protein, 313 aa, Oryza sativa
  unsure (1)..(313): unsure at all Xaa locations
  Clone ID: PAT_MRT4530_23635C.1.pep
MWRLKVAESGGTPLLRSTNGFLGRAVWEFDPDHGTPEDRADVERVRREFTDHRLHHRESADLLMRMQQASTSSLSYXPVNNKLGEKEEVTEEIAMASLRRALDEFSSLQADDGHWPGDFSGVMFIMPGLIFALYVTGSLDTIISPEHRREICRYIYNHQNEDGGWGSLMLSSSTMFGTCSNYITLRLLGEETSNEQLAKGRIWIILHGGTTFVPQWGKIWLSILGVYEWAGNNPIFPELWLTPQFLPFHPGKFWCLTRMVYLPMAYLYGKKFVGPTAPTILALREEIYSAHYLTIDWAQARSACAKSHFHIPS

SEQ ID NO: 120525 - protein, 58 aa, Oryza sativa
  Clone ID: PAT_MRT4530_23636C.1.pep
DVQDITSDSKKSKQSESCIHTDKNVQDIPSDSDIKTSEKRVDSTTHATSHKDRPETES

SEQ ID NO: 120526 - protein, 104 aa, Oryza sativa
  Clone ID: PAT_MRT4530_23637C.1.pep
NTGPERNPSSTASFQIRGISIGLVQLEAHNCLVTPLRAPAQNSLDSFSKKASLPSEIFKLLLEVRIKALVITFVLMHNHTYEPSVDAISDQMTGPHRGSGLQGA

SEQ ID NO: 120527 - protein, 59 aa, Oryza sativa
  unsure (1)..(59): unsure at all Xaa locations
  Clone ID: PAT_MRT4530_23638C.1.pep
TMRDRDWDLFINSGFXLATLGPGNKINHIWQPLAYDCRFTQSLRLALPRFTRGLNGKRE

SEQ ID NO: 120528 - protein, 96 aa, Oryza sativa
  Clone ID: PAT_MRT4530_23639C.1.pep
LTNTVLERKGIFHLHGLAELHHLRHYQPIHRVQLLPPRCSQRQHSQPHQGWYSLSSRDKASRFLARVLVRQNLGAPGHGACPSERVPASAPDRVCI

SEQ ID NO: 120529 - protein, 187 aa, Oryza sativa
  unsure (1)..(187): unsure at all Xaa locations
  Clone ID: PAT_MRT4530_2363C.1.pep
LTPYPWLLQPGVRAPIETTPSNPIRPGTHSSGQSSSSRRAAEGDRHDEEPSLPHILATQNQLFERMLANSENMGSAMAHNANQGQSKLADVQRTHPLHFSSASXDPLVADDLLRDIEAKXQSLAVHQEVFRSAHILAGLMEINKKEFLNLKQGNMPFMEFLDRFNYLGRYQDRPVKFRGLCKILIEC

SEQ ID NO: 120530 - protein, 92 aa, Oryza sativa
  Clone ID: PAT_MRT4530_23640C.1.pep
PFVAFFFFFFFFFFFFFFFLTLEKPPFHNTPKATIGPKTPKFLTQKKKTSFKPPTKGPLRAKINGPSNQAHGPGQNLTNPKKSQKPPGKPPL

SEQ ID NO: 120531 - protein, 61 aa, Oryza sativa
  Clone ID: PAT_MRT4530_23641C.1.pep
SPCLAAAVEQSLALLPSISTFQRSSLNPLVGIGREHQQYVNPYCERGKEFTLAYENTHTKR

SEQ ID NO: 120532 - protein, 45 aa, Oryza sativa
  Clone ID: PAT_MRT4530_23642C.1.pep
MACLVLLQKKTCEQNRLLYYGTEVVRLTNFDLELPHHIPQKLQLS

SEQ ID NO: 120533 - protein, 235 aa, Oryza sativa
  Clone ID: PAT_MRT4530_23643C.1.pep
MAPRAATVEKVAVAPPTGLGLGVGGGVGAGGPHYRGVRKRPWGRYAAEIRDPAKKSRVWLGTYDTAEEAARAYDAAAREFRGAKAKTNFPFASQSMVGCGGSPSSNSTVDTGGGGVQTPMRAMPLPPTLDLDLFHRAAAVTAVAGTGVRFPFRGYPVARPATHPYFFYEQAAAAAAAEAGYRMMKLAPPVTVAAVAQSDSDSSSVVDLAPSPPAVTANKAAAFDLDLNRPPPVEN

SEQ ID NO: 120534 - protein, 729 aa, Oryza sativa
  unsure (1)..(729): unsure at all Xaa locations
  Clone ID: PAT_MRT4530_23644C.1.pep
MVGTGSGRAADGTAVNLLSAVLRVRYPGRANLTRPFVTGSLESTDSPSFFEPVSLVTYAEEGYAYAESASCPPPPTGRLDALQVFEGSKFSCAHLSSLFKATFRLDYTNGSSESTASSLGLHQRFMFINRMRCADNGAVRAYVVFANQTDVSAYYFMLGEKAMVVEGFWDEKRSRLCLKGCHVVNSGPSRADLAVGECGIGMSFWSPAVWSLQERSFAAGLVWNTSLKSGEGIAASSNTIAPYFRGSLSGLKYNYTKVDEAKKYYEKYGLNKKRKGKFPDSNSYRDLTFRFFLQKGGGSGYASPVTIGSMLYDGNSLVDSDHSYHIMTETNHRLLNVSYDIHYVGNWSLETFRRQHISAEGVYDAKTGSLCMIACRVVNISLDCEILVTAQFSPLDTKVAQHVKGTIRSLRKKTDPLFFEPLDIASYGLYIDKVDESMWRMDLESTMALISMTLSCLFIAVQLFHVKKVPEALPAMSITMLVVLSLGYMIPLVLNFEALFKNSNKQTFPLSGGGWLEVNEVIVRIITMVTFLMQLRLLQLACSARSMDVSKDQSWAAEKKVLWICLPLYIIGAVAAWVVHMQFNNNRRMLRKVARLPRVNRHAFWEDLVSYGGLILDGFLLPQVILNACLGSKVKALSPGFYIGSTMIRALPHVYDVFRAKHFVPSLRPFYRGSRGGFLXMRIYICVKLWQMLFLGSLXFLQQRFGGAFFICSKNRKASEYEMVSTVSS

SEQ ID NO: 120535 - protein, 693 aa, Oryza sativa
  unsure (1)..(693): unsure at all Xaa locations
  Clone ID: PAT_MRT4530_23645C.1.pep
LFSDLLFLCAHTYVASAAIDWCLHLHGXNSAAVADGDIVLTAGRRHRRRLVPSPSRLVGHITVVGHLCLHRXAASSAANWCSRLYSWLVTPLFMGVHVFXTGLPLSPPTGVLAYTVGWSHHRSWASTSSPPARLRHRRLVSPPARLVYYAVVVGCLRLHRPXASVAADWCPRLYGWLVTSPFMGVHGFTXDLPSPLPTDVSAYTAGLLCRCCWASTTSSPACLRCRRLVSSPTRLAYYAVVVGRLRLHCRPASVAADWCPRLYGWWTPPPLMDLVIYTTGLLPPPPTGVFIVIDGRLXHHHRLALIRRQLVSSPIRLVGHTTVVGRRCLHRPAASFAADWCLRLYGWLVTPPLLGVYVFTDRPPXSAADWCFRLHGWPIMLLMLGVYVFTDRPPPPPPTGVFACTAGLLCRRCXNVNIFTDRPPRMMPTGATVFTVGHVGATANRRNHLQCKLSTSAADCRASLSSLTSVILIACLPSPPPMVPXLSWLAYFAAIQGHIHFRHHSTSSSDFIFIVFCTGKTNCRYFASFAASPTTTSTRASTSRHASPNMMSCYFTTTSGVTIFNISTWTSSTCIFTLVMAVRRQEAIVLDSMFNCFPTNQRVGGYTNTRLXKFDKFYVKMKXNQSINESTLGVIIFIFASEPKFDFSDSNYYTGXFGFXTLPQFTLKFSXLSSLRFNLHVREFRVINQSAQF

SEQ ID NO: 120536 - protein, 745 aa, Oryza sativa
  unsure (1)..(745): unsure at all Xaa locations
  Clone ID: PAT_MRT4530_23646C.1.pep
HESDAHTYVASAAIDWCLHLHGXNSAAVADGDIVLTXPAAVIAADWCPRLHGWLVTSPLLGIYVFTAXPPRPPPTGVLAYTVGWSHHYSWASTSSPTGLPLSPPTGVLAYTVGWSHHRSWTSTSSMTGLPLSPPTGVLVYTVGWSHHRSWXSTSSPTGXLCRHRLVSSPIRLVGHTTIHGRPRLHRPACLCRRRLVSSPIRLVGHTTVHGRPRLHRRLAFATADWCLRLHGWFIMPSLLGVYVFTDRSASVAADWCPRLYGWLVTSPFMGVHGFTDRLAFAAADXCLRLHGWLIMPLLLGVYDFIXRPASVAADWCPRLHGWPIMPSLLGVFDFTAGLPPSPPTGVLAYTVGGLRRHXWTSSSTPXGLLPPPPTGVFIVIDGRLCSHIGHLCHHQGEYYKAKTSPPACPHPPPTSVFAYTVGWSHHRCWASLSSPTGXPRSPPTGVFAYTVGWSHHRCWASTSSPTGRLVRRRLVFPPARLAYYAADVGRLCLHRPAASSAADWCFRLHGWPIMSPLLNVNIFTDRPPRMMPTGATVFTVGHVVATANRRHHLQCKLSTSAADWFLHLHGCMILPVLIGLIIFIASRLRHPHRLFAFAAXWCLDFHGWPILLPFKDIFIFVIILLLPSPTGXAAADXCFYLHNYASSLPVCFCCRRLVFTSSWLCNLFTMVERLYLYCLLHRQNQLPLLRKFCCFTNHDIYKSLNISACLTKYDVVLFYNNKWCYNLQYFYLDIFNMHLHSSDGC

SEQ ID NO: 120537 - protein, 79 aa, Oryza sativa
  unsure (1)..(79): unsure at all Xaa locations
  Clone ID: PAT_MRT4530_23647C.1.pep
VKREITGVTTIXSGKQXMRMPRGXNMLRQIYGXTSWRDLLLYPSXACLATSKILPSPACLRVEYXXQXILELALHVGSQ

SEQ ID NO: 120538 - protein, 96 aa, Oryza sativa
  Clone ID: PAT_MRT4530_23648C.1.pep
MASEGVEGKMSCLCLTMPPTSIHPRQQCRLPHAHRQAVRGEHRGVIARCPHAVVKTVHKIFSLSHQSHRLSIHDAFSSRVGVVMLSVRGTPLVTPR

SEQ ID NO: 120539 - protein, 54 aa, Oryza sativa
  Clone ID: PAT_MRT4530_23649C.1.pep
LSRSSKPSASSSSPPGPPQSPSPPGEAAAVGEAASASDFRQWEGKKSLERRRRE

SEQ ID NO: 120540 - protein, 303 aa, Oryza sativa
  unsure (1)..(303): unsure at all Xaa locations
  Clone ID: PAT_MRT4530_2364C.1.pep
QSLAPQTSIGVREIILLAPWSSNQYVAISRTATSIGVREIILLVRWFSNQYVAISRTGNFHWCSRDNSTRSLALEPXVAISRTGNFHWCSRDNSTRSLALEPWLRNSYDXSSTDSVAVLVPRLQMIERHLXLVLNQLIVAISRTFTSSGQFTTTTWSSTSGVAFLPLLPLXVVKIRLLPGPRPVWSSWGYYLVLDQRCNDSPITSTSTKVDIRYTIMLXVFYPEIPYHXRHLVLKPILLSLYAVLTRPPRNLRELRLGTPRADKALSDPVETKDQTLRLLDRSRTVAGSRQGIRNKEMVYPPR

SEQ ID NO: 120541 - protein, 48 aa, Oryza sativa
  Clone ID: PAT_MRT4530_23650C.1.pep
SPSPHHKHHHHHQTIRAPKPKPKPQSPPTQSPRSQPPPPPRHQTQQAP

SEQ ID NO: 120542 - protein, 570 aa, Oryza sativa
  Clone ID: PAT_MRT4530_23651C.1.pep
MHRRSGEQVSGTSAFDVLHREKAAIRSNDVFMLVYICNVMIYLCNKLNHYVLIISTIQEPYYRRYDFTMAGFADALRPDKFTGVHFKRWQIRVTLWLTDMKCFWSISEAYASPNTDYWKEAVRSEMDSIITNGTWEVTELPYGCKPVGCKWVFKKKLRPDASHGLLVHQMDVKTAFLNRELDEEIYMDQPDGFVVEGQEGKVCKLLKSLYGLKQAPKQWHEKFDKTLTSTGFAVNEVDKCVYYRHGGGEGVILCLYVDDILIFGTNLEVINEVKSFLSQNFDMKDLGVADVILNIKLIRFENEITLLQSHYMEKILNRFGYIDSKPSPTPYDPSLLLRKNKRIARNAPEYSQIIGSLMYLASATRPDISFAVSKLSRFTSNPGDDHWRALERVMRYLKGGGAVSWRSCKQTILTRSTMEAELTALNTATVEAEWLRDLLMDVPIVEKPMLAILINCDNQTVIVKANSSKDNMKSSRHVKRLLKSVRKLRNSGVITLDYIQIARNLADPFTKGLSRNVIDNASKDMGLRPIEDAVLQSILERTHLCELDCWSQSMEILGESSRKLTKDLGV

SEQ ID NO: 120543 - protein, 253 aa, Oryza sativa
  Clone ID: PAT_MRT4530_23652C.1.pep
MGGGHSHLVHPGHGALRRAACGSAGAACGLCGGRVRMGEMAYRCAAAECTAFFLHDACYRYPERIKAKGHFSAGHSLALTARADVAGGACTVCAMTLDGFSHVYTCSKSRHLACGRGGFRAHPRCGNLPPQAGAPSHQHQLFLRAPDGGGGVRRCVECNAVAGGGGGGGRQVVRAWSYQCQTCPDSELCLACALGRDGVPPCCCCGQCVCGGGCFVGCAGLAGNAMGHFIHELFRGCTGLSFKSAMGTARPPA

SEQ ID NO: 120544 - protein, 77 aa, Oryza sativa
  Clone ID: PAT_MRT4530_23653C.1.pep
MGFARFRMERVRMMGLPVEFGQSLSRRCTCATPPPQRRDYPVNCPSQCLLPAMCHPTTPPLLRRPARLRRRLSSDQR

SEQ ID NO: 120545 - protein, 1000 aa, Oryza sativa
  Clone ID: PAT_MRT4530_23654C.1.pep
MAGFADTLRPDKFTGVHFKRWQLRVTLWLTAMKCFWVSTGKPEEILTADQQKQFEEATTLFVGCILSVLGDRLVEVYMHMTDAKELWDALNNKFGAIDASNDLYIMEQFHDYKMADNHSVVEQAHEIQTMTKKLELLKCVLLDKFVASANVVHKAQNKSKGKYKAQQTTNFKKQKKNNNNPNQDERTCFVSGQPGHLARKCPQRKGMKAPAGQTSKSANVTIGNTGDGSGLVARGFTVLMGNGSHAYVMVLARFCYVYLLKTKDEALDYFKIYKAEIENQLDRKIKRLRSDRDGEFFSNEFDLFYEEHGIIHERTPPYSPESNGIAEKKNRTLTDLVNAMLDTAGLPKAWWGEALLTSNHVLNRAPNRNKDKTPYKIWIGRKPSLSYLRTWGCLAKVNVPITKKRKLGSKTVDCVFLGYAHHNIAYRFLIVKSKVPNMHVGTIMESRDATFFESFFPMKDTHSSSSQPSEVIPSSITPPEQTEHTHEHVTEEDESEAPRSSKRQRTAKSFGDDFTVYLVDDTPKSISEAYASSDVDYWKEAVRSEMDSIIANGTWEVTERPYGCKPVGCKWVFKKKLRPNGTIEKYKARLVAKGYTQKEGENFFHTYSPVARLTTIRVLLSLATSHGLLVHQMDVKIAFLNGELDEEIYMDQPDGFVVKGFAVNEADKCVYYRHGGGEGVILGLYVDDILIFGTSLEVINEVKSFLSQNFDMKDLGVADVILNIKLIRGENGITLLQSHYLEKILNRFGYIDSKPSPTPYDPSLLLRKNKRIARNQLEYSQIIGSLMYLASATRPDISFAVSKLSRFTSNSGDDHWHALERVMHYLKGTMELELHYSGYPAVLEGYSDSNWISDVDEIKATSGYVFTLGGGAVSWRSCKQTILTRSTMEAELTALDTATVEAEWLRDLLMDLPIVEKPVPAILMNCGNQTVIVKVNSSKDNMKSSRHVKRRLKSVRKLRNSGVITLDYIQTARNLADPFTKGLSQNVIDNASKEMGLRPM

SEQ ID NO: 120546 - protein, 1170 aa, Oryza sativa
  Clone ID: PAT_MRT4530_23655C.1.pep
MGSALYPLGEMRRSQRADGLAAVLAIGTANPPNCVTQEEFPDFYFRVTNSDHLTALKDKFKRICQEMGVQRRYLHHTEEMLSAHPEFVDRDAPSLDARLDIAADAVPELAAEAAKKAIAEWGRPAADITHLVVTTNSGAHVPGVDFRLVPLLGLRPSVRRTMLHLNGCFAGCAALRLAKDLAENSRGARVLVVAAELTLMYFTGPDEGCFRTLLVQGLFGDGAAAVIVGADADDVERPLFEIVSAAQTIIPESDHALNMRFTERRLDGVLGRQVPGLIGDNVERCLLDMFGPLLGGDGGGGWNDLFWAVHPGSSTIMDQVDAALGLEPGKLAASRRVLSDYGNMSGATVIFALDELRRQRKEAAAAGEWPELGVMMAFGPGMTVDAMLLHATSHGDGGLLDFLDMWNIKAVARTSPKMHGGKTLGNYSIPLAGVHQRSGEQVSGTSAFDVLHREKAAIRHCDFTMAGFADALRPDKFTGVHFKRWQIRVTLWLTAMKCFWVSTGKPEGVLTAEQQKQFEEATTLFVGCIVSVLGDRLVEVYMHMTDAKELWDALNTKFGATDASNDLYIMEQFHDYKMADNRSVVEQAHEIQTMDKELELLKCVLPDKFVAGCIIAKLPPSWRSFGTALKHKRQEYSVEGLIASLDVEEKAREKDAASKGDGGQSSANVVHKAQNKSKGKYKAQQTTNFKKQKKNNNNPNQDERTCFVCGQVGHLARKCPQRKGMKAPAGQTSKSANVTIGNTGDGSGYGNLPTVARGSTVLMGNGSHASVHGVGTVDLKFTSGKIVQLKNVQHVPSIDRNLDTHSGSNQPSEIIPSSITPPEQTEHTHELVSEEDVSEAPRRSKRQRTAKSFGDDFTVYLVDDTPKSISEAYASPDADYWKEAVRSEMDSIIANGTWESHYVEKILNRFGYIDSKPSPTPYDPSLLLRKNKRIARNQLEYSQIIGSLMYLASATRPDISFAVSKLSRFTSNPGDDHWRALERVMRYLKGTVELGLHYTGYPAVLEGYSDSNWISDVDEIKATSGYVFTLGGGAVSWRSCKQTILTRSTMEAELTALDTAIVEAEWLRDLLMDLPVVEKPVPAILMNCDNQTEIKKLRSYNVGLHPNSEKPGRSLHEGTITKCDRQCIEGDGFETHSILEGTHLCELDCWSQSMKILGESSRKLTKDLGV

SEQ ID NO: 120547 - protein, 658 aa, Oryza sativa
  Clone ID: PAT_MRT4530_23656C.1.pep
MQLLALTMSAPASCSSPRPCGHDDTVSRNRPLSGGQRLISSGGLFALGFFQPDDRAPNRWYLAIWYNKISKTTPVWIANRATPISDPNLSQLTASEDGNLALFDQARSLIWATNITNNVNSTVGVILDSGNLVLAPASNTSNFLWQSFDEPTNVWLPGAKLGRNKITGQITRFISWKSSVDPSPGYYTLEIDPNGGDQFIHLWNNSAIYWETGKWIGQVKTVVWMESKKDWVPFLALPKAQCAVYFLCGSFAMCTENAVTFCSCLRGFSKQYNGEWRYGLSEQLLLYRLFLRWWLFFVLTRKATVIGASTAGAILVTLIVIIGILLILRKRNLSEANKVEGSLVVFRYRFLQHVTKNFSERLGKGSFGPVFKGTLPDGTLIAVKKLDGVSQGEKQFRAEVSTIGTIQHVNLIRLLGFCSERSMKMLVYEFMPNGSLDRYLFGSTPLTLSWKTRYQIALGIAKGLAYLHEKCRSLIIHCDIKPENVLLGADFMPKIADFGLAKLLGRDFSRVLTTMRGTIGYLAPEWISGTAITTKADVFSYGMMLFEIISGNRNADWHRQGEQGAGTFFPVLVAMRLPEGKIQDLLGSELSADANLEEVERACKVACWCIQDDENTRPTMGEIVQILEGLVDVSFPPVLWYLHVLAQRSNFSTEETSH

SEQ ID NO: 120548 - protein, 51 aa, Oryza sativa
  Clone ID: PAT_MRT4530_23657C.1.pep
WGKLKPVGTTCMASHIQKLVQAQWHHFWLFGHIKPTNPTEKRSGFTRRAVG

SEQ ID NO: 120549 - protein, 408 aa, Oryza sativa
  Clone ID: PAT_MRT4530_23658C.1.pep
MKAPAAQTSKSANVTIGNTGDGSGYGNLPTVARGSTVLMGNGSHASVHGVGTVVLKFTSGKIVQLKNMQHVPSIDRNLVSGSRLDYSIPLAGVHRRSGEQVSGTSDFDVLRREKAAISATDLATLYGSALTGVYLPSPREGGGAHVAVAVGEAVRAKQVAHAPAELNSPRSSAAKPKNPDEILRDFHALHPIEAFSTSFGGGAALACVAGHARNGLSGYERMFCGLDDIYCVFMGRLDNLSSLIRQYGLCSRSTNEALLVIEAYRTLRDRGPYPADQVVKDLSGSFAFVVFDNKSGAVFAALSTDGEVPLYWGIAADGSVVICDEREIVKGGCGKSYAPFPVGCMFHSEGGLKSFEHPMNRLKAMPRVDSEGVMCGATFKVDTFTKINSMPRVGSATNWAATWDDAAA

SEQ ID NO: 120550 - protein, 73 aa, Oryza sativa
  Clone ID: PAT_MRT4530_23659C.1.pep
TPPVGPCKAGSFRVVTPPVHVLGGLVQKKFVPSGDDHQIILFFYALRIQRLFPPKKKKKKPKKKKKKKKKKQK

SEQ ID NO: 120551 - protein, 114 aa, Oryza sativa
  unsure (1)..(114): unsure at all Xaa locations
  Clone ID: PAT_MRT4530_2365C.1.pep
MLPPRQARRHTAPASASASPPPQRTLLVPCWPLAAGRAPPCHDNFPSGAPPQASVPCSACASXPPTAGHAPRTKPVFLWEPHTQQSLPASXSPLSSPPSSKHWQLPFVDAALPR

SEQ ID NO: 120552 - protein, 654 aa, Oryza sativa
  unsure (1)..(654): unsure at all Xaa locations
  Clone ID: PAT_MRT4530_23660C.1.pep
GGGDGGDDDGDDDDYFDDFDDGDEEEXFNREFVDAVMQEWCKTMSNLPAGLRQAYEMMVRYLAIFARPTHSRSFSRALPGWLSRGLVGRFEQEWDLAVVNALTASCCNVMVLGLLAPCRSYGSTSRFDFQNAIEKLPNNIFEKSYPLRQFDLQKRISAFFYKAAELSLLGVVAGSIQGGLSKALSARKERRLSVTIPSVSTNALGYGAFLGLYANLRYQLLCGLDQYMVRRFDVLGVAIFFSTALRLTNIQIGESSRRTWLGEEADPQYSDRLLRAYKRPVEVAGDQQDSRWFISKDAIVSGLGLLGIKQDYSIPLAGVHRRSGEQVSKTSAFDVLHREKAVIRFLGSASCDCSLFVRDGSPSSSLACCAPLSTPATASSSCRATGLSAISVSETSAFDVLHREKAAIRFLGSASRDCSLFVRDGSPSSPLACFAPSSMLVTASSSCRATGLSATSIRVTLWLTAMKCFWVSTGKPIGVLNADQQKEFDEATTLFVGCILSVLSDRLVEVYMHMTDAKELWDALNTKFGATDASNDLYIMEQFHDYKMADNRSVVKQAHEIQTMAKELELLKCVLPDKFVAGCIIAKLPPSWRGFGTALKHKRQEYSVEGLIASLDVEEKAREKDVASKGDGGQSSANVVYKAQNKSKGKYKAQ

SEQ ID NO: 120553 - protein, 105 aa, Oryza sativa
  Clone ID: PAT_MRT4530_23661C.1.pep
LLCDAPSLVDYFIMLAGVHLRSGEQVSGTSAFDVLPLRSRAAHVRRHPQPRVVRAAPRPGRSSPSPHAAALGPHRRDLRPRRAVLPPNPLEGADKSGAAAFQICL

SEQ ID NO: 120554 - protein, 538 aa, Oryza sativa
  Clone ID: PAT_MRT4530_23662C.1.pep
MKKYCDCCKRYVDHSNGKMKCFHRQMSANFEHSMIIPNKFLDQFGGKISRTVELESPKGNVYVVKVSKHMNKTVLQCGWEAFVDAHQIEENDSLLFRHIKNSRRASGVQERNADPIDVSSSTHDDTVQSSGGERFARSESGSDSQHSKTAKLAATCSSGGSECTGEEAKESSSSEHESSYDLVDPQIAPMPGYVLSRGTNLSQAHEEKLDMLVQEIRPEIPLYVTTMKHSNVNSHHASLVIAKHYACAYFPHTSQTITLKWHGKNRKWHPKFYIRKDQVGYILHGRWIDFVRHNHVKEGDICIFHLKNFNGRKFRATVHLLRETIPHSFGALHIPKRFESRNGRMRLKMTDDRRVSSTECRRGTMEPSTTNVKKEADNEQCNNGQGKRQEPLNFDVSVGSSKPYLTADRVSLTEEQFMKVEENVHSIQSEGPIYVSIMNKSNVGTDGLYIITLGRQFAIRYLPEGEQTLTLLTTGTGKAWQVKMRPRSGDARMFTLGWRDFVRDNRLQTEDICLFQLTKNSERGLAMKVHIIRHNERS

SEQ ID NO: 120555 - protein, 281 aa, Oryza sativa
  unsure (1)..(281): unsure at all Xaa locations
  Clone ID: PAT_MRT4530_23663C.1.pep
MRLKNTFEEEFAEDTWCKLSKKVALNTSQSVVSLASFKDYSIPLAGVHQRSGEQVSGTSAFDVLHREKAAIRHCDFTMAGFADALRPDKFTGVHFKRWQIRVTLWLTAMKCFWEYSVEGLIASLDVEEKARKKDDASKGDGGQSSANVVHKAQNKSKGKYKAQQTTNFKKQKKNNNNPNQDEMTCFVCGQVGHLARKCPQRKGMKAPAGQTSKSANVTIGNTGDGSGYGNLPTXRTGFHRPNGEWVTCFCSWCWHGRSEVYFGKDRAAEERAACPFYRQES

SEQ ID NO: 120556 - protein, 1421 aa, Oryza sativa
  unsure (1)..(1421): unsure at all Xaa locations
  Clone ID: PAT_MRT4530_23664C.1.pep
MPERSCRFPRGDATPPPPPAAASTCGRLGAGTRTSPAGGACAGSGRFVCISPRKGMKAPAGQTSKFANVTIGNTRDGSGYGNLPTVARGSTVLMGNGSHASVHGVGTVDLKFTSGKIVQLKNVQHVPSIDRNHVSGSRLTRDGFKLVFESNKVVVCKHGYFIGKGYECGGLFRFSLSDFCNKSVNHICGSVDNEANKRKLGPKTVDCVFLGYAHHSIAYRFLIVKSEVPDMHVGTIMESLDATFFESFFPMKDTHSGSSQPSEIIPSSITPPEQIEHTHEHVSEEDVCEAPRRSKRQRTAKSFGDDFTVYLVDDTPKSISEAYASPDADYWKEAVRSEMDSIIANGTWEVTERPYGCEPVGCKWVFKKKLRPDGTIEKYKARLVAKGYTQKEGEDFFDTYSPVARLTTIRVLLSLAASHGLLVHQMDVKTAFLNGELDEEIYMDQPDGFVVEGFAVNEADKCVYYRHGGGEGVILCLYVDDILIFGTNLEVINESHYVEKILNRFGYIDSKPSPTPYDPSLLLRKNKRIARNQLEYSQIIGSLMYLASATRPNISFAVSKLSRFTSNPGDDHWRALERIMRYLKGTMELGLHYIGYPAVLEGYSDSNWISNVDEIKATSGYIFTLGGGAVSWSILGDRLVEVYMHMTDAKELWDALNTKFGATDASNDLYIMEQFHDYKMADNRSVVEQAHEIQTMAKELELLKCVLPDKFVAGCIIAKLPPSWRSFGTALKHKRQEYSVEGLIASLDVEEKARKKDAASKGDGGQSSANVVHKAQNKSKGKYKAQQTTNFKKQKKNNNNPNQDERTCFVCGQVGHLVRKCPQRKGMKAPAGQTSKSANVTIGNTRDGSGYGNLPTVARGSTVLIGNGSHASVHGVGTVDLKFTSGKIVQLKNMQHVPSIDRNLVSGSRLTRDGFKLVFESNKVVVSKHVYFIGKGYECGGLFRFSLSDFCNNMCLIPKFSIVKGSKCHSCVQSKQPRKPHKAAEEINLAPLELLHSDLCEMNGVLTKEVENQLDRKIKRLRSDRGGEFFSNEFDLFCEKHGIIHERTPPYSPESNGIGERKNRTLTDLVNAMLDTAGLPKACEAPRRSKRQRTAKSFGDDFIVYLVDDTPKSISEAYASPDADYWKEAVRSEMDSIIANGTWEVTERPYGCKPVGCKWVFKKKLRPDASHGLLVHQMDVKTAFLNGELDEEIYMDQPDGFVVEGQEGKXFAVNEADKCVYYCHGGXHYVEKILNRFGYIDSKPSPTPYDPSLLLRKNKRIARNQLEYSQIVGSLMYLASATRPDISFAVSKLSRFTSNPGDNHWCALERVMRYLKGTVELGLHYTGYPAVLEGYSDSNWISDVDEIKATSGYVFTLGGGAVSWRSCKQTILTRSTMEAELTALDTATIEVSGTSAFDILHRLVFLSARVLRDFVDARNRE

SEQ ID NO: 120557 - protein, 1082 aa, Oryza sativa
  unsure (1)..(1082): unsure at all Xaa locations
  Clone ID: PAT_MRT4530_23665C.1.pep
MAGFADALRPDKFTGVHFKRCRSNSRKPLFVGCILSVLDDRLVEVYMHMTDAKELWDALNTKFGATDASNDLYIMEQFHDYKMADNRSVVEQAHEIQTMAKELELLKCVLPDKFVAGCIIAKLPPSWRSFASLDVEEKAREKDAASKGDGGQSSANVVHKAQNKSKGKYKAQQTTNFKKQKKNNNPNQDERTCFVCGQPGHLARKCPQCKGMKAPAGQTSKSANVTIGNTGDGSGYGNLPTVFSVNQSTNWWVDTGANVARGSTVLMGNGSHASVHGVGTVDLKFTSGKIVQLKNVQHVPSIDRNLVSGSRLTRDKFKLVFESNKVVVSKHGYFNGKGYECGGLFRFSLSDFCNKSVNHICGSVDDEANVWHSRLCHINFGLMSRLSSMCLIPKFSIVKGSKCHRCVQSKQPRKPHKAAEERNLAPIELLHSDLCEMNGVLTKGEKRYFMTLIDDATRFCYVYLLKTKDEALDYFKIYKAEVENQLDRKIKRLRSDRGGEFFSNEFDLFCEEHGIIHERTPPYSPESNGIAEKKNRTLTDLVNAMLDTAGLPKAWWREALLTSNHVLNRVPNRNKDKTPYEIWIGRKPSLSYLRTWGCLAKVNVLITKKCKLGPKIVDCVFLGYAHHSIAYRFLIVKSEVPDMHVGTIMESRDATFFESFFPMKDTHSGSRQPSEIIPSSITPPEQTEHTHEHVSEEDVSEAPRRSKRQRTAKSFGDDFTVYLVDDTPKSISEAYASPDADYSKEAVHSEMDSIIANGTWEVTERPYRCKPVGCKWVFKKKLRLDGTIEKYKARLVAKGYTQKEGEDFFDTYSPVARLTTIRVLLSLAASHGLLVHQMDFSFIKWXVKTAFLNGELDEEIYMDQSXGFAVNEADKCVYYRHGGGEGVILCLYVDDILIFGTNLEVINEVKSFLSQNFDMKDLGVADVILNIKLIRELGRNVLVHVRPRRSAGSSPQNTLFASARPCNDVMLKKLGGISPVRLFCDKANMRSAGRCDKPSGMELPRRFWSNSSCTIFVRFASDGGKWPESELWLSWSTVRFGNASSHRGMPPTIEVVVFEVRDVEGGAIVERVRYLAGERVVA

SEQ ID NO: 120558 - protein, 722 aa, Oryza sativa
  Clone ID: PAT_MRT4530_23666C.1.pep
MKCLWVSTGKPEGILTAGQQKQFEEATTLFVGYILSVLGDRLVEVYMHMTDAKELWDALHTKFGAIDASNDLYIMEQFHDYRMADNRSVVEQAHETQTMAKKLELLKCVLPDKFVAECICVLKFTSGKIVQLKNVQHVPSINRNLVRGSRLTRDGFKLVFESNKVVVFKHRNFIGKGYECGDLCEMNGVLTNGGKRYFMTLIDDATRFCYVYLLKTKDEALDYFKIYKAEVENQLDRKIKGLRFLIVKSEVTDMHVGTIMESRDANFFESFFPMKNTHSSSSQPSEIIPSSITPPEQTEHTHEHVTKEDDSEAPRRSKRQRTAKSFGDDFTVYLMDDTPKSISEAYASSDADYWKEAIRSEMDSIIANGTWEVRERPYRCKPVGCKWVFKKKLRPDASHGLLVHQMDVKTAFLNGELDEEIYMDQPDGFVVEGQEGKVCKLLKSLYGLKQAPKQWHEKFNKTLTSAGFAVNEADKCVYYRHGGGEGVILCLYVDDILIFGTNLGVINEVKSFLSQNFDMKDLGVADVILNIKLIRGENGITLLQSHYVEKILNRFGYIDSKPSPTPYDPSLLLRKNKRIARNQLEYSQIIGSLMYLASATRPDISFAVSKLSRFTSNPGDDHWRALERVIRYLKGTMELGLHYTGYPAVLEGYSDSNWISDVDEIKATGGYVFTLGGGAVSWRSCKQTILTRSTMEAELTALDTATVEAEWLLDLLMDLPFC

SEQ ID NO: 120559 - protein, 39 aa, Oryza sativa
  Clone ID: PAT_MRT4530_23667C.1.pep
KRERLKLEICILHKLLFYSKQRHLGFPWGCSVVANARPR

SEQ ID NO: 120560 - protein, 42 aa, Oryza sativa
  Clone ID: PAT_MRT4530_23668C.1.pep
MGTPQPGGSVRSAYQLGRLVRVGDGAMGFLNGPSHPDGPMKI

SEQ ID NO: 120561 - protein, 62 aa, Oryza sativa
  Clone ID: PAT_MRT4530_23669C.1.pep
YNSMLVLFRAKDLSNHWNIAHHRCAVVEPHPPRGVGRPRRPVNPHKIETVDGYYGSSFIDAT

SEQ ID NO: 120562 - protein, 121 aa, Oryza sativa
  unsure (1)..(121): unsure at all Xaa locations
  Clone ID: PAT_MRT4530_2366C.1.pep
FYASFPVLAKGMNWVLLYSTWRHGIFLRGXTVIALYSNKXSMVVVGDKEGAVFGGLVEAPLQPTSAKKYQGSNSCFVFTNLHSNPSIYRPTGANNYFTVCSTDYLALGGGGHFALYLDADL

SEQ ID NO: 120563 - protein, 254 aa, Oryza sativa
  unsure (1)..(254): unsure at all Xaa locations
  Clone ID: PAT_MRT4530_23670C.1.pep
TRAAAVDARGKEGGSPAAAAATTAAATVAHDGVGAATRRHGNGGAGTTARRHGNDSAAARERRRGXSKVAAQRHENGGAWRRGRGRGXGRWSGEKWGGVEFYRGEEGERKGRGGATRQRRGGAGREVAMGRAATGRXTAAATAVARGSGRDATVARRDGDRARRRASGDGTGGSGREVARGLAHGGGDGRRAGSRRGRRCAAAGDDGDGAAARGARRRWDVDGDGDSGDAXAATERRRSGARRAVREAAWQRRG

SEQ ID NO: 120564 - protein, 366 aa, Oryza sativa
  Clone ID: PAT_MRT4530_23671C.1.pep
MSAAAAAAAASAANVAVIGGGSKQTQPIPIPHPLSLIRLLPFELTRTCDPLFGLSTDAVSGAVCASLLAARGVAVTLFDSGRGAGGRMAQRREVMEDGTELRFDHGAPYFTVSNDEVARVVSGWEARGLVAEWKAMFACFDREAGKFTDFEKEGTIKKYVGVPGMNSICKSLCLEDGVVAKFGVTIGRMDWIQDRSSWLLASLDGRDLGHFDYVVATDKNIASPRFSGLTGRPPPLDLSLLPQLSMMIQDIPVRPCFALMLAFSEPLTKVPVQGFSFNNSDYLSWAFCDSSKPGRAHVPLNSQSWVLHSTAEYASKKQLIKPQLRVEGHIVYRPISLFALLSIPCHIEKPGSTGSAVSLLAYYALD

SEQ ID NO: 120565 - protein, 96 aa, Oryza sativa
  Clone ID: PAT_MRT4530_23672C.1.pep
MAGGGGSSDGEPLEMRMTMAGPDLFFDVVIAVEVEEDAPRSADRRAHRRWPLPSIKGPPQPDLAVMRWWRRKSRGVRSPQQSPPLLRPTWPLQSHN

SEQ ID NO: 120566 - protein, 138 aa, Oryza sativa
  unsure (1)..(138): unsure at all Xaa locations
  Clone ID: PAT_MRT4530_23673C.1.pep
PFRSVTTTTSCASINAPRIVSSQFGLVLLCNGSLAQQLXGQSTSRRQTARRGSPRQCRFYRLQAFEPVQRVRALAATTEFVYVSKEQFQCTGVSVAHPALEPRGRVLARYTNGASXLIYILEGXRIYGPPFPRWPESY

SEQ ID NO: 120567 - protein, 43 aa, Oryza sativa
  Clone ID: PAT_MRT4530_23674C.1.pep
MRSSGTEAPSSSAATQSKSAKGSTLTERKKSIKKRRPPNLSSC

SEQ ID NO: 120568 - protein, 77 aa, Oryza sativa
  Clone ID: PAT_MRT4530_23675C.1.pep
MTRFGDDQPVIGPYRPGRSDRHRVAGQTGLGLVRPPPARSDRPRLWRLCIGHPKRNLPATRGPVIAPLNSTAKLKIN

SEQ ID NO: 120569 - protein, 79 aa, Oryza sativa
  Clone ID: PAT_MRT4530_23676C.1.pep
MHGTDGGGARRAGCRWRRGKARPQATARPSPSHVILIASPFAGHVIPMAELLRRLVAHHGCTASLVTFSGLASPTSASS

SEQ ID NO: 120570 - protein, 161 aa, Oryza sativa
  Clone ID: PAT_MRT4530_23677C.1.pep
ATRRRRALLPVPAAVPAGSGGLSLLVFLARAPKMSRLLSLDTHPRHRRFRSSPDPPLLPSPPDLPASLASPTLEFFPPTRSAQSPPSSLPSSSSAVPSVAFSLGELVTDRAAVNGAFVTRAAQDLGPFPQCLGAPKALSHSSKRLYSQVVGGVVSISSCLS

SEQ ID NO: 120571 - protein, 291 aa, Oryza sativa
  Clone ID: PAT_MRT4530_23678C.1.pep
MGTVLDSHFLALTAIVTVGYQLVFFIITALLRFDKVTDFAGSTNFIILAILTLALKGAWHFRQVVLTVLVVIWGLRLGLFLLMRILQWGEDKRFDEMRDNLGKLAVFWIFQAVWVWTVSLPVTIVNASDSDPSIEARDIIGWIMWLIGAGMEAIADQQKLTFKNSPSNRGRWCNVGLWSYTRHPNYFGEIFLWWGIFVASTPVLSGAEWLVILGPVFLTLLLLFVSGIPLLEASADKRFGQNEEYRTYKNTTSPLIPLPPAVYGALPGWFKMGFLFELPLYNRVPQRDPVS

SEQ ID NO: 120572 - protein, 69 aa, Oryza sativa
  Clone ID: PAT_MRT4530_23679C.1.pep
CITDECRLLGRAEMGQHGTNITFPGSVHTKPNTVWARRAYIKVCQHSQHAYPWFCPNMRVIETPAVGHA

SEQ ID NO: 120573 - protein, 56 aa, Oryza sativa
  Clone ID: PAT_MRT4530_2367C.1.pep
SNHLVAGSLRAGPAAGTEHHSAISARQRYREHSVVTGNYLCYLCSILHVVFSYILS

SEQ ID NO: 120574 - protein, 726 aa, Oryza sativa
  unsure (1)..(726): unsure at all Xaa locations
  Clone ID: PAT_MRT4530_23680C.1.pep
AGPTGSGSRAPVHRGPRPPRRSTVSPREPTARIGPKPIGRPRGGAAGARARHEAGSAETWRGGGKGEAARGRQGAAAAGDVERRRAAGGQRRARGRRRTPRGGELTGDRGRRSSGGFPAKRGGGRGPPRPCGAEGGNGASRRRPKRRRDAAGGERPYGCKPVGXCKWEFKKKLRPDGTIEKYKARLVAKGYTQKEASHGLHIHQMDVKTTFLNGELDEEIYMDQPDGFVVDGQEGKVCKLLKSLYGLKQAPKQCHEKFNKTLTSAGFAVNEADKYVYYRHGGGEGVILCLDVDDILIFGTNLGVINEVKSFLSQNFDMKDLGVADVTLNIKLIRGENGITLLQSHYVEKILNRFGYIDSKPSPTPYDPSLLLRKNKRIARNQLEYSQIIGSLMYLASATRPDISFAVSKLSRFTSNPGDDHRRALERVMCYLKGTMELRLHYTGYPTVLEGYSDSNWISDVDEIKATSGYIFTLGGGAVSWRSRKQTILIRSTMEAELTTLDTATVESEWLRDLLMDLPIVEKPVPAILMNCDNQTGKRRTCTTYASIDYSIPLAGVHRRSGEQVSGTSAFDVLHREKGAIRFLGSASRDCSLFVHDGSPSSPLACCAPSSTPATASSSCRATGLSASSATVPRCRRRDNGFNRRWMRLRAGLVDEDAVDVPVDECRILVGNGALRSLAVNCSLLDDSAVPAVVKRSLLELSLLKCSSFSWYLFVAVGEIEMQNFK

SEQ ID NO: 120575 - protein, 301 aa, Oryza sativa
  Clone ID: PAT_MRT4530_23681C.1.pep
MSSPGESGPSASAKDTDAAQRAQEQEPGKQGGATRERRMESLGWLTESAVMPKKHKAIEGVGAASILDLKAQLYRTQEEARKPTAHDAAAAAAASGEFRRAKKRAAPGDPLGAKNSGVDARAHKDKLELKAVKDGSVSYAALEKKAELYEKLSRGEIPDEEDKEKYCVDFFQKSFDHVYEPRQPESQSVIDRAEPENDNDDSMSSAKPVGLGRTGTTIDRDEHKRFVRTVCKSLQAVFIGTMEVHEEVSEARQKASTMKSRRQEQEAARREKLKQAYLKKRLEKLLAEKRATSATDDQPAS

SEQ ID NO: 120576 - protein, 808 aa, Oryza sativa
  Clone ID: PAT_MRT4530_23682C.1.pep
MAKELELLKCVLPDKCVAECIIAKLPPSWRGFGTALKHKRQEYSIEELIASLDVDEKAREKDTMSKGDVNQSTNWWVDTGANVARGSTILMGNGSHASVHGVGTVDLKFTSGKIVQHVPSINKNLVSGSRLTRDGFKLVFESNKILLCVLVEKKDEALNYFKIYKAEIENQLDRKIKRLRSDRGGEFFSNEFDLFCEEHGIIHERTPPYSPESNGIAERKNRTLTDLVNAMLDTRDYLRHGGGEQSEHTHEHVTEEDDSEAPRRSKRQRTAKSFGDDFTVYLVDDTPKSISEAYASPDADYWKEAVRSEMDSIIANGTWEVTERPYECKPMGCKWVFKKKLRPDASHGLLVHQMDVKTTFLNGELDEETYMDQPNGFVVEGQEGKVCKLLKSLYGLKQAPKQWHEKFDKTLTSAGFAVNEADKCVYYCHGGGKEVILCLYVDDILIFGTNLEVINEVKSFLSQNFDTKDLGVADVILNIELIRGENGITLLQSHYVEKILNHFGYIDSKPSPTPYDPSLLLRKNKRIARNQLEYSQIIGSLMYLASATRPDISFAVSKLSRFTSNPGDDHWRALERVMRYLKVTMELGLHYTGYHAVLEGYSDSNWISDVDEIKATSGYVFTLGGGAVSWRSSKQTILTRSTMEAELTALDTATVEAEWMRDLLMDLPIVEKPVPAILMNCDNQTFCFATGNSDLFCFGNIPKNPVRENGVESGVCLLLCGAPSLVDYSIPLAGVHRRSGEQVSGTSVFDVLHREKAAIRFLGSASCDCSLFVRDGSPSSPLACCASLSTPTTASSSCRATGISATSI

SEQ ID NO: 120577 - protein, 387 aa, Oryza sativa
  unsure (1)..(387): unsure at all Xaa locations
  Clone ID: PAT_MRT4530_23683C.1.pep
MARKKIREYDSKRLLKEHLKRLAGIDLQILSAQVTQSTDFTELVNQQPWLSTMKLVVKPDMLFGKRGKSGLVALNLDIAQVKEFVKERLGVEVEMGGCKAPITTFIVEPFVPHDQEYYLSIVSERLGSTISFSECGGIEIEENWDKVKTIFLSTEKPMTPDACAPLIATLPLEARGKIGDFIKGVFAVFQDLDFSFLEMNPFTIVNGEPYPLDMRGELDDTAAFXNFKKWGNIEFPLPFGRVLSSTEGFIHDLDEKXSLKFTVLNPKGRIWTMVAGGGASVIYADTCATADPDGRKRALLIGGGIANFTDVGATFSGIIRALREKESKLKAARMHIYVRRGGPNYQTGLAKMRKLGAELGVPIEVYGPEATMTGICKQAIECVMAAA

SEQ ID NO: 120578 - protein, 1284 aa, Oryza sativa
  Clone ID: PAT_MRT4530_23684C.1.pep
MASFADALRPDKFTGVHFKRWQIRVTLWLTAMKCFWKQFEEATTLFVGCILSVLGDRLVEVYMHMTDAKELWDALNTKFGATDASNDLYIMEQFHDYKMADNRSVVEQAHEIQTMAKELELLKCVLPDKFVVGCIIAKLPPSWRSFGTVLKHKRQEYSVEGLIAPLDVEEKAREKDAASKGDGGQSSANVMHKAQNKSKGKYKAQQTTNLKKQKKNNNNPNQDERTCFVCGQLGHLARKCPQRKGMKAPVGQTSKSANDARGSTVLMGNGSHASVHGVGTVYLKFTSGKIVQLKNVQHVPSIDRNLVSGSRLIRDRFKLVFESNKVVVSKHGYFIGKGYECGGLFRFSLSDFCNKSVNHICGSVDDEANVWHSCLCHINFGLMSRLSSMCLIPKFSIVKGSKCHSCVQSKQPRKPHKAAEERNLAPLELLHSDLCEMNGVLTKGGKRYFMTLIDDATRFCYVYLLKTKDEALDYFKIYKAEVENQLDRKIKRLRSDRGGEFFSNEFDLFCEEHGIIHERTPPYSPESNGIAERKNRTLTDLIGRKPSLSYLRTWGCLAKVNVPITKKRKLGPKTVDCVFLGYAHYNIAYRILIVKSEVPDMHVGTIMESRDATFFESFFPMKDTHSSLSQPSEIITSSITPPEQTEHTHEHVTEEDDSEAPRRSKRQRTAKSFGDDFTVYLVDDTPKSISEAYASPDADYWKEVVRSEMDSIIANGTLEVTERPYECKPVGCKWVFKKKLGHDGTIEKYKARLVAKGYTQKEGEDFFDTYSPVARLTTIRVLLSLAASHGLLVHQMDVKTSFLTGELDEEIYMDQPDGFVVEGQKGKVCKLLKSLYGLKQAPKQWHEKFDKTLTSTGFAVNEADKCVYYRYGGGEGVILCLYVDDILIFGTNLEVINEVKSFLSQNFDTKDLGVVDVILNIKLIKGENGITLLQSHYVEKILNRFGYIDSKPSPTPYDPSLLLRKNKRIARNQLEYSQIIGSLMYLASTTRPDISFVVSKLSRFTSNPGDNHWRALERVMRYLKGTVELGLHYTGYPAVLEGYSDSNWISDVDEIKATSGYVFTLGGGAVSWRSCKQTILTRSTMEAELTALDTATVEAEWLRDLLMDLPIVEKPVPAIVMNCDNQTVIVKVNSSKDNMKSSRHVKRRLKSVRKLRNSGVITLDYIQTARNLADPFTKGLSRNVIDNASKEMGLRPIEDAVLQSILERTHLFELDCWSQSMEILGESSRKLTKDLGFCFAANSDSFLFWKRSEKSDYSIPLAGVHLRSGEQVSGTSAFDVLHRE

SEQ ID NO: 120579 - protein, 66 aa, Oryza sativa
  unsure (1)..(66): unsure at all Xaa locations
  Clone ID: PAT_MRT4530_23685C.1.pep
MAGIGPIRQDXEPVVVRKKAPTAAAKKXEKAVNAAXRSGXEIETIKXYNAGTNXAASSGTSXNTKR

SEQ ID NO: 120580 - protein, 119 aa, Oryza sativa
  unsure (1)..(119): unsure at all Xaa locations
  Clone ID: PAT_MRT4530_23686C.1.pep
ERLRYNLERALKNEVHGLVVVNEVVGDEYDVEVAQVEVHGWGLNGTRKAIAGRRTTGAPSPPRAARRRRPCSCLPGRPCWSHLAPPPPPPRSRRXAPPPPATSASKAPPPPSSTAGRVR

SEQ ID NO: 120581 - protein, 397 aa, Oryza sativa
  Clone ID: PAT_MRT4530_23687C.1.pep
KNIQKKKVTQSTDFTELVNQQPWLSTMKLVVKPDMLFGKRGKSGLVALNLDIAQVKEFVKERLGVEVEMGGCKAPITTFIVEPFVPHDQEYYLSIVSERLGSTISFSECGGIEIEENWDKVKTIFLPTEKPMTPDACAPLIATLPLEARGKIGDFIKGVFAVFQDLDFSFLEMNPFTIVNGEPYPLDMRGELDDTAAFKNFKKWGNIEFPLPFGRVLSSTEGFIHDLDEKTSASLKFTVLNPKGRIWTMVAGGGASVIYADTVGDLGYASELGNYAEYSGAPNEEEVLQYARVVLDCATADPDGRKRALLIGGGIANFTDVGATFSGIIRALREKESKLKAARMHIYVRRGGPNYQTGLAKMRKLGAELGVPIEVYGPEATMTGICKQAIECVMAAA

SEQ ID NO: 120582 - protein, 906 aa, Oryza sativa
  Clone ID: PAT_MRT4530_23688C.1.pep
MEMETLQLRAGTGCLWVCLLLCVAPSLVDYSIPLASVHRRSGEQVSGTSAFDVLHREKAAIRFLGSASCDCSLFNRDGSPSSPLACCTPSSTLATASSSCRATGLSATSIRVNLWLTAMKCFWVSTGKPMGVLNADQQKEFDEATTLFVGCILSVLGDRLVEVYMHMTDATELWDALNTKFGATDASNDLYIMEQFHVYKMADNRSVVEQAHKIQTMAKELKLLKCVLPDKFVAGCIIAKLSPSWRGFGTALKHKRQEYFVEGLIASLDVEEKAREKDVASKGDGGQSSTNVVHKAQNKSKGKYKAQQTTNFNKKKKNNNPNQDERTCFVCGQPGHLARKCPQRKGMKAPAGQTSKSANVTIGNTGDGSGYGRTGFHRPNGEWVTCFCSWCWHGRSEVYFGKDRAAEECAAYYWKEDVRSEMDSIIANGTWEVTERPYGCKPVGCKWVFKKKLRPDASHGLLIHQMDVKTTFLNEELDEEIYMDQPDGFVVEGFAVNEADKYVYYRHGGGEGVILCLVCLLLCVASSLVDYSIPLASVHRRSGEQVSGISAFDVLHWEKAAIRFLGSASCDCSLFNRDEGDAADRASNLTDATVDSLIESIIIKDGVKAKFFFNIMSLANSAGEKLLAFSQYILPMKFLERLLVKRLGWHVGKEIFMISGDTSADDREVAMDQFNNSADAKVLFGSIKACGEGISLVGASRVIILDVHLNPSVTRQAIGRAFRPGQQKKVFVYRLVAADSPEVKFHETAFKKEVIPKLWFEWSELCTTEDFKLNQVDIDDSEDELLEANAIRQDIKALYRRVGKGLSAAAAASKRRWTLALAAKKVVGRKLGGPKKPVPRSVKAGLQFLVSRYLENGRHAQRVGTGTPVYLAAVLGVAVAAAARRREGSSSSAGTPMAVAATAARW

SEQ ID NO: 120583 - protein, 49 aa, Oryza sativa
  Clone ID: PAT_MRT4530_23689C.1.pep
MRYLKGTVELGLHYTGYHPNSEKPGRSLHEGTITKCDRQCIEGDGFETH

SEQ ID NO: 120584 - protein, 288 aa, Oryza sativa
  Clone ID: PAT_MRT4530_2368C.1.pep
MAMAAPARDDEEPQDGYYSIVYELHAPGDDEWLLRHLWREAHPMAQAGGEAGAPVLGRMMAAMRRWWWRADPQLHLGRARLLLRRWRAGSASARRLARWRREGGVTPRVLLQSAEVVAARPSTGRAQGLDGLGGRHHALPSFFLRYERVMHDFVVAGGITVLTPFIWGALVAIMVGLGADMGPLLELDVLGITDRFCYISLERFFLISHSIFSLKFTVHFLLDGRPVVPEPEQQVHQPDPDEPEHVYRVVLHGEEFTFLTNIPRAKFYLLIAAVFVVVFLFHPFSAET

SEQ ID NO: 120585 - protein, 319 aa, Oryza sativa
  unsure (1)..(319): unsure at all Xaa locations
  Clone ID: PAT_MRT4530_23690C.1.pep
MQARVVVFPVKGRAWCFASPRATAPAAACGGGDGGALLPPPPPTVKDLWRGIAGGGRTASENAEAVVDFVADKMNRAWIGFGSAPEGSMKNRIHRSGVFGLKLLSRVRPSEVLLKSVTKDVSLLEIVHPASLXACFLNLCACSVTVKCINPRLVRRRLRHIAVSSIYIFPHPSVSAMFLRTRGASVHRKFLYGSVCLLPVTSVFMVLPLPNIPFFWVLFRAYSHWRALQGSERLQLLVSDSSDQWKILLEKQKEMSSRKDGNPCENTQYAPWNLQPSKKLDGFLESRKLNEGLDCDTISRICQAYDLDKIDVLKYRDLE

SEQ ID NO: 120586 - protein, 41 aa, Oryza sativa
  Clone ID: PAT_MRT4530_23691C.1.pep
STRFSSLNQKQLTALRLIIFELLELQPYAWTNAWSTRNPTG

SEQ ID NO: 120587 - protein, 868 aa, Oryza sativa
  Clone ID: PAT_MRT4530_23692C.1.pep
MRWRMRSSSVRASFSPAVRGLRRFFPPTTQRGDEEQCLEQRRRDTTAWSALPISSDAFHRATVVSTAISLFAFSTRRRSTSPSPLSAHHRSTSSSAHSARRRPAPSCRLHAPPLHGLTGLQNLCLRRFCLRLCAAPSLVDYSIPLAGVHLRSGEQVSRTSAFDVPHREKAAIKFLGSALRDCSLVTLWLTAMKCFWVSTGKPEGVLTAEQQKQFEEATTLFVGCILSVLGDRLVEVYMHMTDAKELWDALNTKFGATDASNGLYIMEQFHNYKMADNRSVVEQAHEIQTMAKELELLKCVLPDKFVAGCIIAKLPPSWRSFGTTLKHKRQEYSVEGLIASFDVEEKAREKDAASKGDGGQSSTNVVHKAQNKSKGKYKAQQTTNFKKQKKNNNNPNQDERTCFVCGQLGHLARKCPQRKGMKAPAGQTSKSANVTIDNTGDGSRYGNLPTDARGSTVLMGNVSHASVHGVGTVDLKFTSGKIVQLKNVQHVPSIDRNLVSGSRLTRDGFKLVFESNKVVVSKHGYFIGKGYECGGLFRFSLSDFCNNEAPRRSKRQRTAKSFGDDFTVYLVDDTPKSISEAYASPDADYWKEVVRSEMDSIIANGTWEVTERPYGCKPVGCKWVFKKKLRPDELDDEIYMDQPDGFVVEGQEGKASQSMRWGPPVGSFPHLPPIPARRRAETAAAPTPPSLPGHVGHARACAASPAPFPLSLPFAPAPEMAGIRKPNPASLSSPLPPRSSPSRAVAAVSFAGSRSTSAASSPSRFVAGALIPTRTGHAEARPPSPSPPVARRRRSPSSSSAPATLGEASPLLSFPVSPCVAATRARRRFGSLPPSAAAAFASPPPPGAVAGNPFARAPSPSPRPVGRS

SEQ ID NO: 120588 - protein, 1513 aa, Oryza sativa
  Clone ID: PAT_MRT4530_23693C.1.pep
MAGFADALRPDKFTGVHFKRWQIRVTLWLTAMKCFWVSTGKPEGVLTAEQQKQFEEATTLFVGCILSVLGDRLVEVYMHMTDAKELWDALNTKFGATDASNDLYIMEQFHDYKMADNRSVVEQAHEIQTMAKELELLKCVLPDKFVAGCIIAKQPPSWRSFGTALKHKRQEYSVEGLIASLDVEEKAREKDAASKGDGGQSSANVVHKAQNKSKGKYKAQQTTNFKKQKKNNNNPNQDERTCFVCGQVGHLARKCPQRKGMKAPAGQTSKWKRVARGSTVLMGNGSHASVHGVGTVDLKFTSGKIVQLKNVQHVPSIDRNLVSGSRLTRDGFKLVFESNKVVVSKHGYFIGKGYECGGLFRFSLSDFCNKSVNHICGSVDDEANVWHSRLCHINFGLMSRLSSMCLIPKFSIVKGSKCHSCVQSKQPRKPHKAAEERNLAPLELLHSDLCEMNGVLTKGGKRYFMTFIDDATRFCYVYLLKTKDEALDYFKIYKAEVENQLDRKIKRLRSDRGGEFFSNEFDLFCEEHGIIHERTPPYSPESNGIAERKNRTLTDLVNAMLDTAGLPKAWWGEALLTSNHVLNRVPNRNKDKTPYEIWIGRKPSLSYLRTWGCLAKVNVPITKKRKLGPKTVDCVFLGYAHHSIAYRFLIVKSEVLDMHVGTIMESRDATFFESFFPMKDTHSGSNQPSEIIPSSITPPEQTEHTHELVSEEDVSEAPRRSKRQRTAKSFGDDFTVYLVDDTPKSISEAYASPDADYWKEAVTEQPYGCKPVGCKWVFKKKLRPDGTIEKYKARLVAKGYTQKEGEDFFDTYSPVARLTTIRVLLSLAASHGLLVHQMDVKTAFLNGELDEEIYMDQPDGFVVEGQEGKVCKLLKSLYGLKQAPKQWHEKFDKTLTSAGFGVNEANKCVYYRHGGGEGVILCLYVDDILIFGTNLEVINEVKSFLSQNFDMKDLGVADVILNIKLIRGENGITLLQSHYVEKILNRFGYIDSKPSPTPYDPSLLLRKNKRIARNQLEYSQIIGSLMYLASATRPDISFAVSKLSRFTSNPGDDHWRALERVMRYLKGTVELGLHYTGYPAVLEGYSDSNWISDVDEIKATSGYVFTLGGGAVSWRSCKQTILTRSTMEAELTALDTATVEAEWLRDLLMDLPVVEKPVPAILMNCDNQTTCEKTIEVCQEIKKLRSYNVGLHPNSEKPGRSLHEGTITKCDRQCIERDGFETHMQPPFAVLFCCKFGFVFVLETFRKIRICENQSRVCLLLCTAPSLVDYSIPLAGVHQRSGEQVSGTSAFDVLHREKAAIRCSRRTQSTENVEEADDANQLAVVGVHHPHLRHADKATEATPSTTASARPNGCAAAGSEDDADDGSPSPSDSVPVEESDVADLWSTVTGFALPESGGLVWSTVTCSNDALAPLSCRGSGFALSASGDDSEWPENDGPPPPLLSTIGFMPPATGGEGEEPENEASSYGECPENTYGGRLLLSAVLPHYSRRRQRRLPSAPQRPPPQPPDGLHR

SEQ ID NO: 120589 - protein, 52 aa, Oryza sativa
  Clone ID: PAT_MRT4530_23694C.1.pep
MDMRTKWLSKDLLSKKKKVDLGRVLSFLDYKEYSISVLRKLDTLPLYMYNNI

SEQ ID NO: 120590 - protein, 1013 aa, Oryza sativa
  Clone ID: PAT_MRT4530_23695C.1.pep
MEGTVLCSANHAPLTPISFLERTALVYPDRLAIVASDGSAGVAVSRTWRDTRARCLRLAAALTGLLGVQRHDVVAVFAQNIPAVCELHFGVPMAGAVICTLNSRLDAAMAAVLLRHSEAKVVFVDRALLGVAQKALVLVAEAGARRPVLVLISELLDENERSPPDAKIKVTRVDYEYEHLLSAAAAGSSPDFAIRWPADENEPIALNYTSGTTSRPKGVIYSHRGAYLSSLAAVIVNAMAETPVYLWTVPMFHCNGWCQVWGVAAQGGTNVCVRRVTAAAIFDSVARHGVTHMGGAPTVLSMIVNATADERRRQPGGRRRRVTVMTGGAPPPPQVLFRMEEQGFLVIHSYGLTETYGPATVCTWKPEWDALTAEERARIKSRQGLHHVGLEAADVKDPATMRSVPADGRTVGEVMLRGNTVMSGYYKDGGATAEALAGGWLRSGDLAVREEDGYIKILDRSKDIIISGGENISTVEVEAALFGHPAVEEAAVVGRPDEYWGETPCAFVKLRGGGGGGGGGAAVEEELMAFCRARLPRYMAPRTVVVVEEELPKTATGKVQKVALRERAKAMGSLPAAASSSSRRAPTGTAGATKVLRPFFNHMALMLVLAEFQRKHGTGRWLLNLLTYYSIPLTGVHRRSGEQVSGTSAFDVPARRRSGEQVSGTSAFDVLHSRSFYHLEVENQLDRKIKRLRSDRGGEFFSNEFDLFCEEHDIIHERTPPYSPESNGIAERENRTLTDLVNAMLDTLEQTEHTHEHVTKEDDSEAPRRSKRQRTAKSFGDDFTVYLVDDTPKSISEAYASPDADYWKEAPHMVFSFIKWTLKTAFLNGELDEEIYMDQPDGFVDEGFAVNEADKCVYYRHGGGEGVILCLYVDDILIFGTNLESHYVEKISNRFGYIDSKPSPTPYDPSLLLRKNKRIARNQLEYYQIIGSLMYLASATRPDISFAVSKLSRFTSNPGDDHWRALERVMRYLKDYYIPLAGVHRRSGDQVSGTSAFDFLHQEKAAIRFLGSV

SEQ ID NO: 120591 - protein, 339 aa, Oryza sativa
  Clone ID: PAT_MRT4530_23696C.1.pep
MAAGGGGEEGRGGGTATAARAVEAVAAAPGRPLSPRSGVKTAGRGRAAAARTMAGRGRGPIARLRKSTIFVGVEVQAYGLSACENMILPTGKRVFLVVPGGWILNGQKRWPANGSFADVFVVLACNTSNNQINGFIVNGGSPGLKISKIENKTSLRVVQNCDILLEDVFVPDDDRLPGANSFQDLVKALSFSCVIVAWISIGIAAGVYDACLRYLGERKQFGAPLAAFQLNQEKLVRMLGNIQAMWLLGWRLCKLHDSGRMTTGQASLGKAWITKQARETVALGRELLGGNGIVTDFHVGKAFCDMESIYTYEGSYEVNVLVAAREITGIASIRPTSRL

SEQ ID NO: 120592 - protein, 1166 aa, Oryza sativa
  Clone ID: PAT_MRT4530_23697C.1.pep
MAGFADTLRPDKFTGVHFKRWQIRVTLWLTAMKCFWVSTRKPEGILTAPQQKQFEEATTLFVGCILSVLGDRLVEEKAREKDAASKGDGGQSSANVVHKAYNKSKGKYKAQQTTNFKKQKKNNNNPNQDERTCFVCGQPGHLAKKCPQRKGMKAPAGQTSKSANVTISNTGDGSGYGNLPTVFSVNQSTNWWVDTGANVAWGSTVLMGNGSHASVHGVGTVDLKFTLGKIMNLVSGSCLTRDGFKLVFESNKVVVSKHGYFIGKDYECGGLFRFSLSDFCNKPVNHICGSVDDEANVWHSRLCHINFGLMSRLSSMRLIPKFSIVKCSKCHSCVQPKQPRKPHKAAEERNLAQLELLHSDLCEMNGVLTKGGKRYFMTLIDDATRFCYVYLLKTKDEALDYFKIYKAEDENQLDRKIKRLRSDRGGEFFSNEFDLFCEEHGIIHERTPPYSPESNGIAEKKNRTLTDLVNAMLDTAGLPKAWWGEALLISNHVLNRVPNRNKDKTPYEIWIGRKPSLSYLRTWGCLAKVNVPITKKRKLGPKTVDRVFLGYAHHSIAYRFLIVKSEVPDMHIGTIMESRDATYFESFFPMKDTYSGSSQPSEIIPSSITPPEQTEHLYEHVTKEDVSEAPRRSKRQRTAKSFGDDFTVYLVDDTPKSISEAYASPDADYWKEVVRSEMDSIIANRTWEVTERPYGCKPVECKWVFKKKFRPDGTIEKYKAQLVAKGYTQKEGEDFFDTYSPIARLTTIRVLLSLAASNGLLVHQMDVKTTFLNRELDEEIYMDQPDGFVVEGQEGKVCKLLKSLYGLKQASKQWHEKFDKTLTSAGFAVNEADKCVHYRHGGGEGVILCLYVDDILIFGTNLEVINEVKSFLSQNFDMKDLGVADVILNIKLIKGENGITLLQSHYMEKILNSFGYIDSKASPTPYDTSLLLRKNKRIARNKLEYSQIIGSLIYLASATRPDISFAVSMVSRFTSNPGDDHWRALERVMRYLKGTMELGLHYSGYPAVLEGYSDSNWISDVDEIKATSGYVFTLGGGAVSWRSCKQTILTRSTMEAELTALDTATIEAEWLRDLLMDLPIVEKPVPAILMNCDNQTVIVKVDSSKDNMKSSRHVKKRLKSVRKLRNSGVITLDYIQTARNLADPFTKGLSRNVIDNASKEMGLSPM

SEQ ID NO: 120593 - protein, 122 aa, Oryza sativa
  Clone ID: PAT_MRT4530_23698C.1.pep
VPGGWILNGQKRWPANGSFADVFVVLACNTSNNQINGFIVNGGSPGLKISKIENKTSLRVVQNCDILLEDVFVPDDDRLPGANSFQDLVKALSFSCVIVAWISIGIAAGVYDACLRYLGERK

SEQ ID NO: 120594 - protein, 203 aa, Oryza sativa
  Clone ID: PAT_MRT4530_23699C.1.pep
MASARPPDDDDDDGCMRQRRDPLLASLSRSSLAIEPPRRPCHAADGRRRRTHAPSSHPVDNGNGNLGDDDSGWRRLATVQMTATAAGDLVDNGGAPAWVQDARRDAHRRALRRRPALLRRIELGSPRTPPWLPPHWAAAAQRPWPRGSTTPSWRCRRRMEAGARGGARRLRRRRRQGRGRLRHRGEEPKEMGGGIYVGPMVGQ

SEQ ID NO: 120595 - protein, 39 aa, Oryza sativa
  Clone ID: PAT_MRT4530_2369C.1.pep
RTGRLRLLPRHALGSSVVSASPSLVEDVQAIAYLASFLL

SEQ ID NO: 120596 - protein, 82 aa, Oryza sativa
  Clone ID: PAT_MRT4530_236C.1.pep
KRAQKEGCVFFAFKTTPFFLVTPLAGKGSFFGAFPIVVLAKAYRFSKKKAQGLKQKKGNGLGAFPPPQKKSSQKVYNGGESF

SEQ ID NO: 120597 - protein, 760 aa, Oryza sativa
  Clone ID: PAT_MRT4530_23700C.1.pep
MTENRFLDKTSPKDESEGAQIATPISGDETPSSSTMTRLVQYNSCRSATSTVAANLPRSMRRRWGTSTTAASVPVQCPRCRPPPAARLTLPTVRAARGTHRALLEEDSSPITIDVELERGLQNLCLRRPALGEGGNKIFGKRFARLLPIRPRRLAFLSARVLCAFVDARNREVTLWLGAMKCFWVSTGKPMGVLNADQQKEFDEATTLSVGCILSVLGDRLVEVYMHMTDAKELWDALNTKFGATDASNDLYIMEQFHDYKMADNRSVVEQAHEIQTMAKELELLKCVLPDKFVAGCIIVKLPPSWRGFSTALKHKRQEYSVEGLIASLDVEEKAREKDVASKGDGGQSTANVVHKAQNKSKGKYKAQQTTNFKKKKKNNNPNQDERTCFVCGQPGHLARKCPQRKGMKAPAGQTSMSANVTIGNTGDGSGYGKIVQLKNVQHVPSIDRNLVSGSRFAVNDAMMQINVYTIAMMGSHYVEKILNRFGYIDSKPSPTPYDPSLLLRKNKRIARNQLEYSQIIGSLMYLASATRPDISFAVSKLSRKLRNSGVITLDYIQTTRNLADPFTKGLSRNVIDNASKEMGLRPIEDAILQSILERTHLCELDCWSQSMDILGESSRKLTKDHPSVHLRSGEQVSGTSAFDAPHWEKAAIRGDSRSTRAMEWVGGETVVSVPPEPQVEEHHDEQQKHIGRRLGEEKLMRAEHWKWERKVWDGENTRAKKCGKEMVEIDNSCKVREKPCKVKNVPKYSEQNVLALKNV

SEQ ID NO: 120598 - protein, 485 aa, Oryza sativa
  Clone ID: PAT_MRT4530_23701C.1.pep
TRLVTTVLPRTILLGPVKSLPLAADKLGMQGSYAFLADGNNIAGQLQPDLFSKCNSSRGFIVDVSNNLITGGIPVEIGSLCSSLVVLGVAGNQLSGLIPTSIGQLNYLISLDLSRNHLGGEIPTSVKNLPNLERLSLGHNFLNGTIPTEINQLYSLKVLDLSSNLLTGEIPGALADLRNLTALLLDNNKLTGKIPSAFAKSMSLTMFNLSFNNLSGPVPANSNTVRCDSVIGNPLLQSCHMYTLAVPSAAQQGRGLNSNDYNDTSSADSQNQGGSNSFNAIEIASITSATAIVSVLLALIVLFIYTRKCAPRMSSRSSRRREVITFQDIGVPITYETVVRATGSFNASNCIGSGGFGATYKAEISPGVLVAIKRLSVGRFQGVQQFHAEIKTLGRLRHPNLVTLVGYHLGESEMFLIYNYLPGGNLERFIQERSKRPVDWKMLHKIALDIAKALAYLHDTCVPRILHRDVKPSNILLDTEYNAYL

SEQ ID NO: 120599 - protein, 106 aa, Oryza sativa
  Clone ID: PAT_MRT4530_23702C.1.pep
KYDTKQPTSIDHMKRIQQKVLLHKKSYTNSDVTCYVFMRCTGLPETKVWQMVARQNKRPVLSFSFSYFMLRKRGKEEIMDSPAGQVVISIQQSDCVIMSSILRIIF

SEQ ID NO: 120600 - protein, 192 aa, Oryza sativa
  unsure (1)..(192): unsure at all Xaa locations
  Clone ID: PAT_MRT4530_23703C.1.pep
TTSDALTNLHNDGNDKLTRKTKKKTNTNQINSTYKDYPNDQPKPANGTGGSERLXLXDDSTRMNETRGTPRLNERANDSTTAAAKPGTERRPHWGRPKRKRQRQRRRQRTETTTTTLGPNKIRLNWIKSLGINYTGKRHGRRRTATEDGRRRASKGGEVLSTAATTFRRCAATTEGWPGFVLVLRCRRREQL

SEQ ID NO: 120601 - protein, 55 aa, Oryza sativa
  Clone ID: PAT_MRT4530_23704C.1.pep
VGFFFFLFFFFGGPTFIPIWDPFKLLWVKGGVRKKNNYFHFPNILHSKLKTGWPS

SEQ ID NO: 120602 - protein, 117 aa, Oryza sativa
  Clone ID: PAT_MRT4530_23705C.1.pep
MEVFSLRVMEGEEGAAKSMCGGDRWCHRRATSKEWEEPRSKRQATASVRQRLGTTSAPAGATVERGGGGRPRLRWGQRWSAVAAGTREEGGCAERGGANRAEAGVFVRWRERRRTLR

SEQ ID NO: 120603 - protein, 95 aa, Oryza sativa
  Clone ID: PAT_MRT4530_23706C.1.pep
PWEVAVAAGSACGKSLMSSDPPAGSHTTPPDPPVEASGGCHRSWWGEGAAAAHAKGGRRRRRHSQGHITVGPRTFDGPRASRWVQHNAARRSWGR

SEQ ID NO: 120604 - protein, 152 aa, Oryza sativa
  Clone ID: PAT_MRT4530_23707C.1.pep
MVDDSKRRYHTGVSPMYAALYSTGVRPLTWEQRSTTIRATLDDGRGGDGDPLQSEKDAAAACGEGGKRQRRQRPRANDPINVQTNDASLVKAFVDYPNFAAISSPDTFLASTMHCHGFVTVGSVFSVDVFQGSAKGFEKPEYNSIVEIDRIE

SEQ ID NO: 120605 - protein, 38 aa, Oryza sativa
  Clone ID: PAT_MRT4530_23708C.1.pep
ARGYILGTCLPSRLVFSWLQLSKNHLKCKHVRAATLFP

SEQ ID NO: 120606 - protein, 74 aa, Oryza sativa
  Clone ID: PAT_MRT4530_23709C.1.pep
SIHTHDHVHSFLVFTFLRGLVSQIMPCGVQCMNRYAPSHPVYSLHKHTLSIQLPNMTDIVRMHRCYHMHDRLYY

SEQ ID NO: 120607 - protein, 48 aa, Oryza sativa
  Clone ID: PAT_MRT4530_2370C.1.pep
AKLCGAELRHLSATSTGAECRATTDGRLSQRATMVSKFNATRFGAEKR

SEQ ID NO: 120608 - protein, 100 aa, Oryza sativa
  unsure (1)..(100): unsure at all Xaa locations
  Clone ID: PAT_MRT4530_23710C.1.pep
TLPPPPRLPHRAAPIAAPPQRLHRRRPHCDTPELSPSPPRRATSPSAAPPACLPGVPIPSSPRRXPHPPPPRRPGRSPSIAVAPQVGVALQRDFPAQVGG

SEQ ID NO: 120609 - protein, 246 aa, Oryza sativa
  unsure (1)..(246): unsure at all Xaa locations
  Clone ID: PAT_MRT4530_23711C.1.pep
GEGRAARTREKKPLLLLFSASPPRAPPPGPHSLRCAPTTPRVRASPASSTPRHRRFPCVPPSPPRPPGAVPYSASPTTPPTSRRPHRRAPTTPPPSXAPIATPLSSATPPTAAPARPHLRRRRHAPLFAALPPSPASPSPPRRATSPSAAPPXLPPRRPHPFLATSLPHPPPPLRASRRNPAAEPTGELTAVPAGRRQSPSPRRSALHCRGISPPNGRRSRSTPPSSHADSMSNPYLTTGILSLKK

SEQ ID NO: 120610 - protein, 115 aa, Oryza sativa
  unsure (1)..(115): unsure at all Xaa locations
  Clone ID: PAT_MRT4530_23713C.1.pep
SCRRRRSSPSPSPARHRRSSPSPARRRRSSRLARSGGAPKLACPGRARKPPPPSGRRHRRRATAASXRLASPCRRRAQAGAPRPPRLAPGAARRRRRLSPSRRRRQRGCHMNPEM

SEQ ID NO: 120611 - protein, 90 aa, Oryza sativa
  Clone ID: PAT_MRT4530_23716C.1.pep
MEMAAAVLSSSVSSASAAAACHAQKFPNRIPSRMCIKTPVQDRPGYTNDNVDIQIHREHHSTGILDGTDEAYSSENPPSDTYSYSGVGGK

SEQ ID NO: 120612 - protein, 53 aa, Oryza sativa
  Clone ID: PAT_MRT4530_23717C.1.pep
SLITTRNSAQSFIIPYLHKGCAQGSLAIRQIYPASYTEVQANMCVRTLIMAQE

SEQ ID NO: 120613 - protein, 181 aa, Oryza sativa
  Clone ID: PAT_MRT4530_23718C.1.pep
TRPQGTVAAGLPPVFAVGPLSPAPIPAKDSGSYLPWLDAQPARSVVYVSFGSRKALPRDQLSELAAGLEASGHRFLWVVKGAVVDRDDAGELTDLLGEAFLQRIHGRGLVTMAWVRQEEVLNHPSVGLFISHCGWNSVTEAAASGVPVVAWPRFADQRVNARGGARGDRRVGGHLELEGED

SEQ ID NO: 120614 - protein, 154 aa, Oryza sativa
  Clone ID: PAT_MRT4530_23719C.1.pep
PRFEEAKQLIRSGAFGTYDYAPLLDSLEGNSGFGRGDYFLVGYDFPSYIDAQAQVDEAYNSGSVGASGERQRRAASGGGGAVAAACGAAASNNGSSGERQRRRSDGSGERQRRCGGGSIAERRRAAAASSSNGAAAAAAAAVTAPELKQRGERA

SEQ ID NO: 120615 - protein, 99 aa, Oryza sativa
  Clone ID: PAT_MRT4530_2371C.1.pep
GCGRQQLGGGRRGGGGATEATGSEAGGGWWWRPAAGDGEDSRHRLEERRGEGGGGGRGGEGAGRGDLAGAVDSLRPASEAGGGALGWWRRGIRRCGGGL

SEQ ID NO: 120616 - protein, 74 aa, Oryza sativa
  Clone ID: PAT_MRT4530_23720C.1.pep
GKSFRVVPHVALFWGGVQEKGGQDLGGPQGFLVYPWWLQREGGVKGPFFVRFLFKNGGFRVVGEVFPQNFSAGF

SEQ ID NO: 120617 - protein, 227 aa, Oryza sativa
  Clone ID: PAT_MRT4530_23721C.1.pep
MAAAAAAAARRLLSRRATSFSASALLRRGGPGAPESLLRPTVAAVSRVGFLRGFARRPGGDGYSPMRSGGGGGGGGDRAPTEMAPLFPGCDYEHWLIVMDKPGGEGATKQQMIDCYIQTLAKVLGSEEEAKKKIYNVSCERYFGFGCEIDEETSNKLEGLPGVLFVLPDSYVDPEYKDYGAELFVNGEIVQRSPERQRRVEPVPQRASDRPRYNDRTRYARRRENQR

SEQ ID NO: 120618 - protein, 144 aa, Oryza sativa
  unsure (1)..(144): unsure at all Xaa locations
  Clone ID: PAT_MRT4530_23722C.1.pep
DVRVEWSAKLAPHPCTDAASFCSFVLLREIQICFLLETFRKIRCVKXCGVRISYTRLIRFGYAEWRSCGXPDQATYLYINRAAAYIQHTRNQSKAAIRFLGSASRDCSLFVRDGSPSSXLACCTPSSMPATASSSCRATGLSAT

SEQ ID NO: 120619 - protein, 61 aa, Oryza sativa
  Clone ID: PAT_MRT4530_23723C.1.pep
RINQGEKPREIQCMKYKREMIRLLTRSCFPSYENGGPSNTVDTEGEGAHAEAGGEALVHML

SEQ ID NO: 120620 - protein, 245 aa, Oryza sativa
  Clone ID: PAT_MRT4530_23724C.1.pep
MESSPACERNGAPATIGGNRMVAEVQAGSVSVTVATTRRGGGSSGGGARPEMGGGRRSSGARREGGRRHGRAEGEADVAGNPPYCAGDVERWGERERGVGFESRPLERAHGPGDVGKVGGDAGAEWGAKRGGEGGRRGEVGRRRLGLGSNRLEEEDDRQIAHYSLKRTPVIISRIRGKPAQLAHSKGDIRPSCTSQTIQRLQQFAHFAFLTFNYKPIRLIHIDLLIQLSIKKSCLNVHLMNEKTM

SEQ ID NO: 120621 - protein, 189 aa, Oryza sativa
  Clone ID: PAT_MRT4530_23725C.1.pep
YLAQKRRIRGNSYTRELIYPLLCCSLLQDLIHLPAKQHEAPDRPPGHPPRHPRDLDHVAALHHEGARPKDDHELAGGEPQHLASPRESPAAAEKGKRNPAFQPAPGRRWKPSKPARFLEKARRAGITPAPAPPASGRRGRVEVWPTGQARAPPVQGIKPRRSWLRLRVDATESRRRGGLPAAREEEEEK

SEQ ID NO: 120622 - protein, 666 aa, Oryza sativa
  Clone ID: PAT_MRT4530_23726C.1.pep
MEDAKALRRLLNDTDLDLVSDRERQAYYMLSDREYAHMREYAPELLKKIGIRLIYTGKINNPRRGVHLRSGEQVSGTSAFDVLHREKAAIRFLGSASRDCSLFVRDGSPSSPLACCAPSSTPATTSSSCRATDLSATSWLGDRLVEVYMHMTDAKELWDALNTKFGATDASNDLYIMQQFHDYKMADNRSVVEQAHEIQTMAKELELLKCVLPDKFVAGCIIAKLPPSWRGFGTALKHKRQEYSVEGLIASLDVEEKAREKDTASKGDGGQCSANVVHKAKNKSKGKYKAQQTTNFKKQKKNNNNPNQHERTCFVCGQPGHLARKCPQRKGMKAPAGQTSKSTNVTIGNTGDGSGYGNFPTVARGSTVLMGNGSHASVHGVGTVDLMFTSGKIVQLKNVQHVPSIDRNLVSGSYYWKEAVRSEMDSIIANGTWEVTERPYGCKPVGCKWVFKKKLRLDASHGLLVHQMDVKTAFLNGELDEEIYMDQPDGFVVEGFAVNEANKCVYYRHGGGEGVIMCLYVDDILIFGTNLEMINESHYVEKILNRFGYIDSKPSPTHYDPSLLLRKNKRIARNLLEYSQIIGSLMYLASATRPDISFAVSKLSRRAPAIRRAGLWNLCLRRPTLGEGGNKVFGKRFARLLPVCPRRLAFLSARVLRAFVDARNRE

SEQ ID NO: 120623 - protein, 963 aa, Oryza sativa
  Clone ID: PAT_MRT4530_23727C.1.pep
MVVRIGEEVGSGAGKAVAWPGRRRAMRARPWEEVAARPGEEADTRAAREGEDYSIPLAGVHLRSGEQVSGTSAFDVLHREKAAIRKIRLNHYMPIISTIQKPYYRHCDFTMAGFADALRPDKFTGVHFKRWQIRVTLWLTAMKCFWVSTGKPEGVLTAEQQNILGDRLVEVYMHMTDAKELWDALNTKFGATDASNDLYIMEQFHDYKISNNRSVVEQTHEIQTMAKELELLKCVLPDKFVAGCIIAKLHPSWRSFGTTLKHKRQEYSVKGLIASLDVEEKAREKDAASKGDGGQSSANVVHKAQNKSKGKYKAQQTTNLKKQKKNNNNPNQDEKTCFVCGQLGHLARKCPQHKGKKAPVGQTSKSANVTIGNTGDGSGYGNLPTVFSVNQSTNWWVDTGANVHVCADISLFSSYQVARGSTVLMGNGSHTSVYSVGTVDLKFTSGKIVQLKNVQHVPSIDRNLVSGSRLTRDEFKLVFESNKVVVSKHGNFIGKGYECGGLFRFSLSDFCNNSVNHICGSVDDEANVWHSRLCHSNFGLMSRLSSMCLIPKFSIVKGSKCHSCVQSKQPRKPHKAAEERNLAPLEFLHSDLCEMNGVLTKGGKRYFMTLIDDATRFCYVYLLKTKDEALDYFKIYKAEVENLLDRKIKRLRVPNRNKGKTPYEIWIGRKPSLSYLSTWGCLAKVNVPITKKRKLGPKTVDCVFLGYAYHSIAYRFLIVKSEVPDMHVGTIMESRDATFFESFFPMKDTHSSSSQPSEIIPSSITSPEQTEHTHEHVTEEDDSEAPRRSKRQRTAKSFGDDFTVYLVDDTPKSISEAYASPDADYWKEAIRSEMDSIIANGTWEWVFKKKLRPNGTIEKYKARLVAKGYTQKEGEDFFDTYSPIARLTTICVLLSLAASHGLLVHQMDVKTAFLNGELDEEIYMDQPDGFVVEGQEGKALISEDVVLQSILERTHLCELDCWS

SEQ ID NO: 120624 - protein, 87 aa, Oryza sativa
  unsure (1)..(87): unsure at all Xaa locations
  Clone ID: PAT_MRT4530_23728C.1.pep
FFFFFFFFFGTTYISPTLLXYGSGAHVPQTRGGLHERXPPHGXLFXKYGKXXGNSLTTGXXGGDVNANCVEKRFQTFQKIQXXGPES

SEQ ID NO: 120625 - protein, 1247 aa, Oryza sativa
  unsure (1)..(1247): unsure at all Xaa locations
  Clone ID: PAT_MRT4530_23729C.1.pep
SGDRLVEVYMHMTDAKELWDVLNTKFGATDASNDLYIMEQFHDYKMTDNRSVVEQAHEIXTMAKELELLKCVLPDKFVAGYIIAKLPPSWRSFGTALKHKRQEYSVKGLIASLDVEEKAREKDVVSKGDGGQSNANVVHKAQNKSKGKYKAQQTTNFKKQKKKNNNPNQDERTCFVYGQPGHLARKCPQRKGMKAPSGQTSKSANVTIGNTGDGSGYGNLPTVFFVNQSTNWWVDTGANVHVCAGISLFSSYQVARGSTILMGNGVGTVDLKFTSGKIVQLKNVQHVPSIDRNLVSGSRLTRDGFKLVFESNKIVVSKHGYFIGKGYECGDLFRFSVSDFCNKSVNHICASVDDEANVXHSRLCHINFGLMSWLSSMCLIPKFSIVKGSKCHSCVQSKQPRKPHKVAEEINLAPVELLHSDLCEMNGVLTKGGKRYFMTLIDDATRFCYVYLLKMKDETLDYFKIYKAEVENQLDRKIKRLRSNRGGEFFSNEFDLFCEEHGIIHERTPPYSPESNGIVERKNRTLTDLVNAMLDTAGLPKAWWGEGLLISNHMLNRVPNRNRDQTPYEIWIGRKPSLSYLRTWGCLAKVNVPITKKRKLGPKTVDCVFLKYAHHNIAYRFLIVKSEVPDMHVGTIMESRDATFFESFFPMKDTHSGSSQPSEIIPSSITPPEQIEHTHEHVSEEDVSEAPRRSKRQRTAKSFGDDFTVYLVDNTPKSISEAYASPDADYWNEAVRSETGLGRLTTIRVLLSLAASYCLLVHQMDVKTAFLNGELDEEIYMDQPDGFVVEGQEGKVCKLLKSLYGLKQAPKQWHEKFDKPLTSTGFAVNEADKCVYYRHGGGEGIILCLYVDDIQIFGTNLEVINEVKSFLSQNFDMKDLGVVDLILNIKLIRGENGITLLQSHYVEKILNRFGYIDSKPSPTPYDPSLLLRKNKRIARNQLEYSQIIGSLMYLASATRPDISFAVSKLSRYPVVLEGYSDSNWIFDVDEIKATSGYVFTLGGGAVSWRSCKQTILTRSTMKAELTALDTATAEAEWLRDLLMDLPIVEKPVPAILMNYDNQTGLLAALYCAVARRLLHPACRRAPAIGRAGLQNLCLRRPAPGEGGSKVFGKRFARLLPVRPRRLAYLSARVLRAFVDAHNHDALYWWDDWKLRILVLGSNTIQLFLFIYGGVRWHRISLWFRLCIWLAYIGGDSLAIYALATLFNRHKHEAPAASELEVLWAPILLIHLSGQDMIASYSIQDNYL

SEQ ID NO: 120626 - protein, 159 aa, Oryza sativa
  unsure (1)..(159): unsure at all Xaa locations
  Clone ID: PAT_MRT4530_2372C.1.pep
MGHAARPERPLHTHRRPRGPLSRRRYGETERGGRPLAVVAVVGRAACHHRLRNARRRPGVRSPDGAREKEGKSLAWRPAAVAAARHSHHSLTDDGGATLLSSRDGGSAXPAQPTASLASWPARRPRSXARPPPAAAPRPPPVAIPAAGRQSVSTPRPPA

SEQ ID NO: 120627 - protein, 687 aa, Oryza sativa
  unsure (1)..(687): unsure at all Xaa locations
  Clone ID: PAT_MRT4530_23730C.1.pep
MAVKDRFTGNPGRLTVLTTSGSGCFTAFNYCFEMPALCKRTPSFLWLYPASYLLFRVEVLLSWSRLREVGFVAAVKLPYLVSSPDLTIRHERRVEVEPGRFERNRETRGRRSNDTFMLVYIFNVMIYLWNKLNHYVLINSTIQKPYYRHCGFTMIGFADALKPDKFTGVHFKRWQIRVTLWLIAMKCFWLSTGKTMGVLTADQQKEFDEATTLFVGCILNVLGDRLVDVYMHMTDAKELWDALNTKFGATDVSNDLHLAKKCPQRKGMKAPVGQTSKFANVTIGNTGKGSGYDEGLDYFKIYKAEVENQLDREIKRFRSDRGGELFLNEFDLFYEEHGIIHKRTHPYFPESNGIAERKNRTLIDLVNAMLHTAELLKAWWREALLTSNHVLNRVPNRNKNKTPDEIWIGRKXHHFLTCAHGGXLAKVNVPITKKRKLRPKTVDSVFLGYAHHSTAYRFLIVKSESISEAYASPDADYWKEVVRSEMDSIIANGTWEVTERPYGCRPMGCNWVFKKKFTPDGTIEKYKAQLVEKGYTQKEGEDFFDTYSLIARLTTIRVKKASFDMKKLGVADVILNIRKSRGENGITLLQSHYVEKILNRFGYIDSKPSPTLYDPSLLLRKNKRIARNQLEYSQIIEHKSILERTHLCELDCWSQSTEILDESSRKLTKRPRSMTYTLQMRGSLQTV

SEQ ID NO: 120628 - protein, 696 aa, Oryza sativa
  Clone ID: PAT_MRT4530_23731C.1.pep
MESRDAIFFESFFPMKDTHSSSSQPSEIIPSSITPPEQTEYTHEHVTEEDDSEAPRRSKRQRTVKSFGDDFTVYLVDDTPKSISEAYASPDADYWKEAVRSEMDSIIANGTWEVTSGCKPMGCKWVFKKKLRPDASHGLLVHQMDVKTAFLNGELDEEIYMDQPDGFVVEGQEDKASQSMRQINVYTIAMVGVRELFCDCLRNLCLRRPAPGEGDNKVFGKRLARLLPVRPRRLVFLFARVLRAFVDACNHEKFLPSSRSFYHLDHVNEEFIVGRARSTPISLLQALATIILAVAAAAAAAWLAPIAGTSSSTSRVAAANGTCQSRVAPFGYACEEHTVTTEDGYILSLQRIPSGRGETAAGGGGGGKVPVLLQHGLMMDGVTWLMNSPNESLGYILADNGYDVWIANSRGTVYSRHHTSLVSSDSAYWNWSWDELSSKDLSAVVQYVYSQAGQQKMHYVGHSLGTLIALAALSDQQQQIGMLRSAGLLSPIAFLDKMSSPLARAAADVFLAEALYWLGLSEFDPTGEYVHSLVTDICKQPGIDCYNLMSAFTGDNCCLDNSSVQVFLAHEPQATATKNMIHLAQMIRGGTIAKYDYGNAGDNREHYGQATPPAYDVTAIPGDFPLFLSYGGRDSLSDVQDVSRLLRALGQSHSRDGDKLTVQYLADYAHADFVMARNAGERVYAPLMAFFKLQEK

SEQ ID NO: 120629 - protein, 723 aa, Oryza sativa
  Clone ID: PAT_MRT4530_23732C.1.pep
MKEFILAHNDAMETNPAAERDIAVATASSRSCGSAPNFQQASTGKPVGVLTADQQKAFDEAITLFMGCILSVLGDRLVEVYMHMTDAKELWDALNTKFGATDASNDLMVDNRSVVEQAHEIHTMAKELELVKCVLPDKFVAGCIIEKLSPSWRGFDTALKHKRQEYSVEGLIASFDVEEKAREKDSTSKGDGGQSSANGPQRKGIKAPVGQTSKSAKVTIGNTGEGSRNKDKTPYEIWIGRKPSLSYLHIWGFLAKVNVPIMKKRKLGPKTVDCVFLGYAHHSVAYRFLIVKSEVTERPYGCKSVGCKWVLKKKLRPDGTIEKYKARLVAKGYTQKDGKDFFDTYSPVARLTTIRMLLFLAASHGLLVHQMDVKTAFLNGELDEEIYIDQPDGFVVEGQEGKVCKLLKSLYSLKQAPKQWHEKFDRTLTSAGFTVNEADKCVYYRYGGGEGVILCLYVDNILIFGTNIEVINEVKSFLSQSFDTKDLAVADIILNIKLIRGDNGITLLQSHYVEKILNRFLYIDSKPSPTPYDPSLLLRKNKIIARNQLEYSQIIGSLMYLASATRPDISFAVSKLSQFSSNPGDDHWRALERVMRYLKGTMELGLHYTGYPAVLEGYSDSNWISDVDEIKATSGYVFTLGGGAVSRRSCKQTILTRSTMEAELTILDTTTIEAEGLCDLLMDLPVVEKSMPAILMNCDNQTVIVKVNSFKDNMKSSRHVRRR

SEQ ID NO: 120630 - protein, 1040 aa, Oryza sativa
  Clone ID: PAT_MRT4530_23733C.1.pep
MEDNRSKDTATKYRGVRRRPWGKFAAEIRDPERGGARVWLGTFDTAEEAARAYDRAAYAQRGAAAVLNFPAAAAAGRGGGAGGAASGSSSSSSAQRGRGDKIEFEYLDDKVLDDLLDDEKYRASAQRGTRREGRRGCRRWGGQEPRPRRWRRLPLPARSHGPRVDCPFRCLTTGLRLGLLRPLRALSSVSRSSTRNCAPPRCLLKPWRLTAHPIRFASSATVELPRFHPLYSITAASFYDDGGLKTSEAKEMPLYVLGDRLVEVYMHMTNAKELWDALNTKFGATDASNDLYIMEQFHDYRMADNRSVVEQAHEIQIMANANVVHKAQNKCKGKYKAQQTTNFKKQKKKNNKPNQDERTCFVCGQPGHLARKCPQRKGMKAPAGQTSKSANVTIGNTGDGSGYGNLPTVARGSTVLMGNGSHASAHGVGTVDLKFTSGKIVQLKNVQHVPSIDRNLVSGSCLTRDGFKLVFESNKVVVSKHGYFIGKGYGEAPRRSKRQRMAKSFGDDFIVYLVDDTPKSISEAYASPDADYWKKAVRSEMDSIITNGTWEVTERPYGCKPVGCKWVFKKKLRPDASHGLLVHQMDVKTAFLNGELDEKIYMDQPDAFVVEGFAVNEVDKCVYYRYGGGEGVIPCLYVDDILIFGTNLRVINENFLERTHLCELDCWSQSMKILDYSILLAGVHRRSGEQVSGTSAFDVLHREKAAIMFLESASRDCSLFIRDGSSSSPFACCALSSTPATASSSCRVTGLSATSRLSARRPLARALDSTPPAANCRDLNSAPLRRCPAPSRLAAPAASAATTVPSPSRAARPQLQHSASPRRRRRCHCRPRRPLPSSAPAPRVLSSGLPAVRAELPTSRRATVPSPPLLSPDNDIVSLFRKHEAKKIATSSSSSNGFIGDEAPVPEEEPPQAPTIDDEAPVPEVNAPHYPIYDVNRLESDPGLRLPISSYPANDQDSVRRAYILKGPWQKSSLRACQLATPQVASLLASSLPAPPPLAGLCRFHLRRASALARWPASARDSRICGTRGKGEKEKEDWSR

SEQ ID NO: 120631 - protein, 169 aa, Oryza sativa
  unsure (1)..(169): unsure at all Xaa locations
  Clone ID: PAT_MRT4530_23734C.1.pep
ARSGLADAAGSLLPPASSRRRPPPPTTEARLLPPPPSSLVTHASRRARRLSRRPPRSSPAPAAELVASLAGRRARRLSRRPPSSSPLSSPTPAAELVVPLAGHRARRLARPNQPDPXSSMWREYSPLGCPIPLSPSIQTPSKKRRPCLIRVYPTNQTHPNFFQTRNFNR

SEQ ID NO: 120632 - protein, 1308 aa, Oryza sativa
  unsure (1)..(1308): unsure at all Xaa locations
  Clone ID: PAT_MRT4530_23735C.1.pep
MAGFADALRPNKFTGVHFKRWQIRVTLWLMVMKCFWVSTGKPEGILTADHQKQFEEATTLFVGCILSVLGDRLVKVYMHMTDAKELWDALNTKFGATDASNDLYIMEQFHDYKMADNRSVVEQAHEIQTMAKELELLKCVLPDKFVAGCIIAKLPPSWRSFGTALKHKRQEYSVEGLIASLDVEEKAREKDAASKGDGGQSSANVVHKVQNKSKGKYKAQQTTNFKKQKKNNNNPNQDERTCFVCGQPGHLARKCPQRKGMKAPAGQTSKSANVTIGNTGDGSGYGNLPTIFSVNQSTNWWVDTGANVHVCADISLFSSYQVARGSTVLMGNGSHASVHVVGTVDLKFTSGKIVQLKNVQHVPSIDRNLVSGSRLTRDGFKLVFESNKVVVSKHGYFIGKGYECGGLFRFSLSDFCNKSVNYICASVDDEANVWHSRLCHINFGLMSRLSSMCLIPMFSIVKGSKCHSCVQSKQSLKPHKAAEERNLAPLELLHSDLCEMNGVLTKGGKRYFMTLIDDATRFCYVYLLKTKDEALDYFKIYKAEVENQLDRKIKRLRSDHGGEFFSNEFDLFCEEHGIIHERTPPYSPESNGIAERKNRTLTDLVNAMLDTAGLPNAWWGEALLTSNHVLNRVPNRNKDKIPYEIWIGRKPSLSYLRTWGCLAKVNVPITKKRKLGPKTVDCVFLGYDHHSIAYRFLIVKSEVPDMHVGTIMESRDATFFESFFPMKDTHSGSSQPSEIIPSSITPPEQTEHTHEHVSEEDVSEAPRRSKRQMTAKSFGGDFTVYLMDDTPKSISEAYASPDADYWKEAVRSEMDSIIANGTWEVTERPYGCKPLGXKWVFKKKLRPEGTIEKYKARLVAKGYTQKEGEDFFDTYSPVARLIIFCVLLSLAASHGLLVHQMDVKTAFLNGELDEEIYMDQPDGFVVEGQEGKVCKLLKSLYGLKQAPKQWHEKFDKTLTSAGFAVNEADKCVYYRHGGGEGVILCLYVDDILIFGTNXEVINEVKSFLSQNFDMKDLGVADVILNIKLIRGENEITLLQSHYVEKILNRFGYSDSKPSLTPYDPSLLLRKNKRIARNQLEYSQIIGSLMYLASATRSDISFAVSKLSRFTSNPGDDHWRALERVMRYLKGNMELGLHYTGYPAVLEGYSDSNWISDVDEIKATSGYVFILGGGAVSWRSCKQTILTRSTMEAELTALDTATVEAEWLRDLLMDLPIVEKPTCEKTIEVCQEIEKLWSYNVGLHPNSXKPGRSLHEGTITKCDRXCIEGDGFETHSILERTHLCKLDCWLQSMEILGESSRKLTKDLGV

SEQ ID NO: 120633 - protein, 200 aa, Oryza sativa
  unsure (1)..(200): unsure at all Xaa locations
  Clone ID: PAT_MRT4530_23736C.1.pep
PAHPWRRGGGRNGASLTQPLRVLHXAHRWHACLDAASSLLPPASSRRRPPPPTTEXSPPPAAAFLSPPPATLVARASRQARRLSRRPPRSLPAPAAELVASLGGRRARRLSRRPPSSSPPLXSPTPAAELVAPLAGHRARRLARPNQPDPSIQHLEEIFSSXAALSHSQTPSKKRWPCPIRVYPTNQTHPNFFQTRNFNR

SEQ ID NO: 120634 - protein, 128 aa, Oryza sativa
  Clone ID: PAT_MRT4530_23737C.1.pep
INFLGELAIHYYKVTTSLQQLSSLVGTSVVRAHFPISNTPPQQFTSIIASSAVSSSPGIAHSALHACSAAFHRLTRSSCISTQHIWGTLHLEGFLQPISHHCIAVCSTTSNFCDHCQTSSPGSNHRPS

SEQ ID NO: 120635 - protein, 254 aa, Oryza sativa
  unsure (1)..(254): unsure at all Xaa locations
  Clone ID: PAT_MRT4530_23738C.1.pep
TRGWTRRSRTRRGWRWRRRRRRSRSRSRRKRMGKMSSNPKRXGEEQDEGAVEDADMDDAGEVLVGGEDAHGNGDAQEGQGESEGFDPNPEGSCLDVIEERKKELSDKLDTLNKKKHARGRLLKLILNAEEEIRMRTMQASLRTTVPQPSENAADGSSISRLVPRMTVDVNFSDVAGESEAGSNQGTPGRPLHHVHSISPSTASFARSPVRFSPTQFWSHSKKSSDFLDSKSVPLCSYWKSRTSYWPSLNIIARN

SEQ ID NO: 120636 - protein, 479 aa, Oryza sativa
  Clone ID: PAT_MRT4530_23739C.1.pep
MSKTESRKLSDDYEVVDVLGRGGFSIVRRGVSKSEEKTQVAIKTLRRLGPAMAGMKQGTKPVPGSGLPMWKQVSISDALLTNEILVMRRIVESVAPHPNVINLHDVYEDVHGVHLVLELCSGGELFDRIVGRDRYSEFDAACVIRQIASGLEALHKASIVHRDLKPENCLFSDKDEKSTLKIMDFGLSSVEDFSDPIVALFGSIDYVSPEALSRQEVSAASDMWSVGVILYILLSGCPPFHAATNREKQQRILQLLRHPWVIGDCAKQDLMDAEVVSKLQKFNARRKLRAAAIASVLSCKVALRTKRLRNLLGTHDLTSEELDNLRLHFGRICADGENATLSEFEQVLRAMKMDSLIPLAPRVFDLFDNNRDGTVDMREILCGFSSLRNSRGDDALRLCFQMYDADRSGCISKEELASMLRALPEECLPGDITEPGKLDEVFDQMDADSDGKVTFDEFKAAMNKDSALQDVLLSSLRPQ

SEQ ID NO: 120637 - protein, 763 aa, Oryza sativa
  Clone ID: PAT_MRT4530_2373C.1.pep
MASGDDEPTTCQRVNGDLPPLESSSASASASDSGQSRAAAAAADDERRGGQMAGLRRLWGEWEIRVLLLSSLSLQVFLLFTGGLRKRNVAAWLHFMLWLAYLLADSIAIYALGNLSQNQKLCSNGPHGGGDMHLLVFWAPFLILHLGGQDTITAFAIEDNELWLRHLLSLVSQIALALYVYWKSRPSAAGLLVPAILMFVSGVVKYGERTWALKSASMSSLRSSMLTRPDPGPNYAKFMEEYHSSKEAGLHAEIVIVPERPPDDNIHVQEEHMEYGELVVKAHRFFHTFRRLFVDLILSFQDRTDSLAFFRRLQRDQAYKVVEIELLLMYESLHSKSSVIHGPTGRYLRIFTLAAPVLSLIVFSGTDKAPYKPVDVTVSYVLLGGAIFLEIYAILLMAISPWSFADLRKKDKCLPVASGVFRAVSYFLPEARPRWSNQMAQYNLIHYCLKDKPTWLTGALEKLEWDYNVRVKTIWDSIWYTHHIGVSMVLKQLVFKQLKEKANSTADPMSYRRFGDHRGQWFLHRMGCYQELGASVEVEFDESIILWHIATDLCFYDDDDDDGRDAGERKLKRWSSCCFCSCSDHAPTADDSHLNDVSHLPAASREISNYMLFLLVMRPFMLTASIGQIRFGDTCAETKNFFLRGDELGAARKAAEALTKVKTEINPREVKGDRSKSVLFDACRLAEQLRRLERRKRWRLVAGVWVEMLCYAAGKCRGNFHAKQLSQGGELLTVVWLLVAHFGMGDQYRVEAGHARAKLIIEN

SEQ ID NO: 120638 - protein, 922 aa, Oryza sativa
  Clone ID: PAT_MRT4530_23740C.1.pep
MPTPAPSASSSSSSCGGGGGGAGAASSYSSSPDDRMLRGECGRRHPFASSAAVGAGSPDAMDTDSAEPSSAATSVADFGARSPFSPGAASPANMDDAGGASAAGHAARPPLAGPRSGFRRLGLRGMKQRLLVVANRLPVSANRRGEDQWSLEISAGGLVSALLGVKDVDAKWIGWAGVNVPDEVGQRALTRALAEKRCIPVFLDEEIVHQYYNGYCNNILWPLFHYLGLFRLSRLATTRNFESQFNAYKRANQMFADVVYQHYKEGDVIWCHDYHLMFLPKCLKDHDINMKVGWFLHTPFPSSEIYRTLPSRSELLRSVLCADLVGFHTYDYARHFVSACTRILGLEGTPEGVEDQGRLTRVAAFPIGIDSERFKRALELPAVKRHITELTQRFDGRKVMLGVDRLDMIKGIPQKILAFEKFLEENHEWNDKVVLLQIAVPTRTDVPEYQKLTSQVHEIVGRINGRFGTLTAVPIHHLDRSLDFHALCALYAVTDVALVTSLRDGMNLVSYEYVACPGSKKGVLILSEFAWASQLLGAGANFVKTRKYVQSENPNQAAFQHVMNYKKQVLMVTFVSALTEPVEESGRRFGDEINEIDRKAQPELKGPLRALCEDEHTTVIVLSGSDRSVLDENFGEFNMWLAAEHGMFLRPTNGEWMTTMPEHLNMDWVDSVKNVFEYFTERTPRSHFEHRETSFVWNYKYADVEFGRLQARDMLQHLWTGPISNAAVDVVQGSRSVEVRSVGVTKGAAIDRILGEIVHSKSMITPIDYVLCIGHFLGKDEDIYVFFDPEYPSESKVKPDSSGSVSLDRRPNGRPSNGRSNSRNSQSRTPKAQAAPERSSSSSSSSQGTPNSHHDWREGSSVLDLKGENYFSCAVGRKRSNARYLLNSSEEVVSFLKEMADATAAHNGFQSTTADYMFLDRQ

SEQ ID NO: 120639 - protein, 64 aa, Oryza sativa
  Clone ID: PAT_MRT4530_23741C.1.pep
MELDDMGGAYEIQEEDAVVALPATRLQQIISCSCYLGREAEELVKAVLADGKAKSSRYVVGRCK

SEQ ID NO: 120640 - protein, 55 aa, Oryza sativa
  Clone ID: PAT_MRT4530_23742C.1.pep
MVAAGPCMQKVYVLSRSRGCKLIANNGHGSQIDSVLWLPPKRSLIVYQINKFSYS

SEQ ID NO: 120641 - protein, 135 aa, Oryza sativa
  Clone ID: PAT_MRT4530_23743C.1.pep
MKSLIGTKSIVRIASELRNPETGAWPSAVDVWRAIYMKANGTWSIPNGAEILNNLEEAAETHKERIAAAPIPLAEHFALVLGRKPNHSRSVGIGAVNQGAKERYRIHARAEAADQRASDAQNQAAALLEKVERLT

SEQ ID NO: 120642 - protein, 108 aa, Oryza sativa
  Clone ID: PAT_MRT4530_23744C.1.pep
MRRWLEVGDELIHGPHLPTREGERSRVPHTVLGLGWAREEEMGHVREQAKWREGGKEWAKKGEARKEGGERGGWPRPGGVKRVEKDTLGQIRRKRKRGFSFIFLVIKL

SEQ ID NO: 120643 - protein, 100 aa, Oryza sativa
  Clone ID: PAT_MRT4530_23745C.1.pep
MKQRRRGSIVGGEIDGWRRRYRWAADGVLEERRGRTIQGCAPAPKQVKTRMRSGGEEDEEEDGEETMLGVGAEGYHTRRRAIPIVSFVNGRMDGVGASQY

SEQ ID NO: 120644 - protein, 85 aa, Oryza sativa
  Clone ID: PAT_MRT4530_23746C.1.pep
FLRGLCLGRFRVRLGEAVAFSPLFGRGLVLSVLGGLVVYFRLPFWLGFFKFSRFMRLPLGRCKKKKKKKKKKKKKNQKKKKKTRG

SEQ ID NO: 120645 - protein, 154 aa, Oryza sativa
  Clone ID: PAT_MRT4530_23747C.1.pep
MADPYGDGKGLKQQQRQKLKPALEVEDFINLLHGSDPVRVELTRLENELQYKEKELGEAQAEIKALRLSERAREKAVEDLTEELTKVDGKLKLTESLLESKNLEAKKINDEKKAALAAQFAAEATFRRVHAAQKDDDMPPIEAILAPLEAELKL

SEQ ID NO: 120646 - protein, 89 aa, Oryza sativa
  Clone ID: PAT_MRT4530_23748C.1.pep
KGRIPLGRFIQYRFHSWHVLRPRALTTTSTFIDTAWDTRSTLGIVSHNVDPRLIKPMRSRCLLGDLGFCWAYCHRFDINISLNLYFSSP

SEQ ID NO: 120647 - protein, 585 aa, Oryza sativa
  Clone ID: PAT_MRT4530_23749C.1.pep
MASSRISPSSTSSAAGGLSASASGDSSSSSTSRRRRWCLRRRLGEAAGSDFINLLHGSDPVRVELTRLENELQDKEKELGEAQAEIKALRLSERAREKAVEDLTEELTKVDGKLKLTESLLESKVMEQPHTMLQNLEAKKINDEKKAALAAQFAAEATLRRVHAAQKDDDMPPIEAILAPLEAELKLARHEIAKLQDDNRALDRLTKSKEAALLEAERTVQIALAKASLVDDLQNKNQELMKQIEICQEENKILDRMHRQKVAEVEKLTQTVRELEEAVLAGGAAANAVRDYQRKVQEMNEERKTLDRELARAKVSANRVAVVVANEWKDGNDKVMPVKQWLEERRILQGEMQQLRDKLAIAERAARSEAQLKDKFQLRLKVLEEGLRMSTTRTNVSAARRQSIGGADSLSKTNGFLSKRPSFQMRSSVSTTTTTLVNHAKGASKSFDGGCRSLDRYKGHVNGSGMNVSTDSSEDKESNNSDEKANEFTSVETEDTVSGLLYDTLQKEVIALRKACHEKDQSLKDKDDAVEMLAKKVDTLTKAMESEGKKRRMEVAAMEKEMAALRLEKEQDNKAKRGRRKRKKS

SEQ ID NO: 120648 - protein, 122 aa, Oryza sativa
  Clone ID: PAT_MRT4530_2374C.1.pep
TLREVCAGRVPEHVLQRAEEVGYVFPTEVQEQSLPVLLSGQDCILHAQTASGKTLAYLLSVFSAIDFGRSSVQALVEDPTRELGMQVTKVARILAAKACTVMALLDGGMLRRQKSWVKAEPP

SEQ ID NO: 120649 - protein, 34 aa, Oryza sativa
  Clone ID: PAT_MRT4530_23750C.1.pep
RVAHIVDLEVGPSTARCFWHHGAMEGLRCWPVTA

SEQ ID NO: 120650 - protein, 127 aa, Oryza sativa
  unsure (1)..(127): unsure at all Xaa locations
  Clone ID: PAT_MRT4530_23751C.1.pep
MATMVEGCVGPSELHLKKELTALRKARFLRDPETCSSWRSPLSSKSFMTTSCVINPNEIGSNVSQKHIEPAAAPPKGEKKRKKVYXYNWRHHSTKSSERGIKVDDDDRQASTDWNLERPCLSNGGDL

SEQ ID NO: 120651 - protein, 174 aa, Oryza sativa
  Clone ID: PAT_MRT4530_23752C.1.pep
MADSGSASERREEGKKGREEEEEDDVVCLDPSFFVDRRCASLLCPDLLLGFVDLGGKLRDDYVHLRLASAPPPLPPRCFQLVPPAPTRSFLLSVELVWPGAVLMNTYLSEHPETVKDHSIIELGSGVGITGILCSRFCKEVVLTDHNDEVLEASFKPYEYLPVMSLSLTKYRRY

SEQ ID NO: 120652 - protein, 222 aa, Oryza sativa
  Clone ID: PAT_MRT4530_23753C.1.pep
MSIEAGVTATAPTVSAIVLTATVGCHLLKISGYSQTRLVDNGERVESAKFKAAGHTWRIVFYPNGKYSMDHGAFSFYLKLIDRSKGVDAEIQFSLLPRHGADSGTLPYSKPEIMHTFGSARRNSKCGFNWFISRDEMETLQNKYVGEDDDSIILCCDIKVVNKPAIHRIGLNDLGVFCPCDDDTCKRLHKRSLQAASDIAMESQPCLGIKGGFKRLFSYFLA

SEQ ID NO: 120653 - protein, 104 aa, Oryza sativa
  Clone ID: PAT_MRT4530_23754C.1.pep
WVFNFFGFFFFFFFFFFFFWQQLEVTIITSYGGGSIYPSQATKIAHSQNAILGLERAPCPSGGKKKGNLGGVWFSCHTFKGSIFRLFRLENFSAFHQGPNFQRV

SEQ ID NO: 120654 - protein, 103 aa, Oryza sativa
  unsure (1)..(103): unsure at all Xaa locations
  Clone ID: PAT_MRT4530_23755C.1.pep
YVPYCSLPLFFWSLANIISCQQQIKIDINVRLHADLSVLVNXITITPEMPRHGTIDVIYVQETKMLFLNLNTRNCYHMTKGCLAVLSNLLRCHDAGVSSFTMD

SEQ ID NO: 120655 - protein, 399 aa, Oryza sativa
  Clone ID: PAT_MRT4530_23756C.1.pep
MSRRHRHYPDPEVEDHFEDSTQDEPSNSLVTSTKESKGGRGPNVLMAPVPEKDRAVITPLNKDAWITNPMKKNVSSTITCLIKAHYPGTYRPLDKHGKQVPEDEAVVIAHYHNFSAHTRITILKEFLLCFKFADGREEDCARLFYRKAVERFSQALSHEKSEAKRSLEKHIENMRATELQQDGDAPSHDDFDVDEPQLWKAFPPYWIEQKWWDMLCDLWSDENVKKVSAQNSKNRMEGGGVHHTCGSRSVAMHKQAMVVYNDRVKEGENNQVNKQHVWVQLTKGIIDRNHVGNSASAPSGSMETQPLYTQQQVQDIVQQAVTNAVNNAHQELASRIERLEQTVDKDKAETHSHDANGPSSSVVPEFLHALLMNGMNTTEEAPQAGHCGRTCENDDLWRF

SEQ ID NO: 120656 - protein, 204 aa, Oryza sativa
  unsure (1)..(204): unsure at all Xaa locations
  Clone ID: PAT_MRT4530_23757C.1.pep
MQPPFAVLFCCWKIRICFVLETFRKIRYXKRCGVRISYARLIRFGYAEWRSCGRLDQASYLYINRGAAFTQNTRNQSRVCLLLCAALSLVDYSIPLAGVHLRSGEQVSGTSAFDVLHREKTAIRFLGSAPRDCSLFVRDGSPSSSLACCAPSSTLATASSSCRANGLSTTSPRPSAAPRDTQTPLTSRRQRGQPRDRSLACERR

SEQ ID NO: 120657 - protein, 207 aa, Oryza sativa
  unsure (1)..(207): unsure at all Xaa locations
  Clone ID: PAT_MRT4530_23758C.1.pep
WRRARGAAAGASRGGLSTSTTPMAATGSITRARITSSTTTTTTTTWSPTPPPARRRACATRTTTRCGISIGISSNAGNGITSSAATPATTTTTTATTTPVAAASAAAXSTCTARSMSSKRRAIAGEHSVVDAAVXSCCATASTTAAAATTISTTRRARRPPCPPACSQAVLSRRGTCSNGRRRRRFEARAYTAGRRRRLRNATSQLT

SEQ ID NO: 120658 - protein, 151 aa, Oryza sativa
  Clone ID: PAT_MRT4530_23759C.1.pep
FLEDDKSKRHHRGRKSKASSQVSGENHTALAALKDAASTQQKSATPRSLAQEDKSPKENGDTRTNGVTESKTERNADIALTSNRSKSRSQSMSANHSMSKSMSISPRRSPVKRSAISPKISLISRSPDVQGHGRSPVRAPERSESRSPPRE

SEQ ID NO: 120659 - protein, 45 aa, Oryza sativa
  unsure (1)..(45): unsure at all Xaa locations
  Clone ID: PAT_MRT4530_2375C.1.pep
KKKADKLQTPDGWAKFTGGFFLGGISGVFWAYFFLXVLALPYFFK

SEQ ID NO: 120660 - protein, 194 aa, Oryza sativa
  unsure (1)..(194): unsure at all Xaa locations
  Clone ID: PAT_MRT4530_23760C.1.pep
SAKLAPHPCADAAFFCSFVLLREIRICFVLEAFRKIRCVKMAWSXRISYARLIRFGYTEWRSCGRPNQATYLYINRAAAFTQHTRNQSRVCLLLCAAPSLVDYSIPLADVHRRSGEQVSGTSAFDVLHREKATIRFLGSASRDCSLFVRDGSPYSPLACCAPLSTPATASSSCRATGLSATSVRVRYLKEKGGT

SEQ ID NO: 120661 - protein, 112 aa, Oryza sativa
  Clone ID: PAT_MRT4530_23761C.1.pep
MATPLIAGLTVAAAALAGRYSIQAWNAYKARPVVPRMRKFYEGGFQPTMTRREAGLILGVRENAHPEKVKEAHKKVMVANHPDAGGSHYLASKINEAKDILLGKTKGGGSAF

SEQ ID NO: 120662 - protein, 1935 aa, Oryza sativa
  Clone ID: PAT_MRT4530_23762C.1.pep
MGMGSELYVATGWRERSAMQAVGRETRWCLRLAGGSGATHYSIPLAGVHQRSGEQVSGTSAFDVLHREKAAIRLNHYMSIISTIQKPYYRHCDFTMAGFADALRPDKFTGVHFKRWQIRVTLWLTAMKCFWVSTGKPEGVLTAEQQKQFEEATTLFVGCILSVLGDRLVEVYMHMTDAKELWDALNTKFGATDASNDLYIMEQFHDYKMADNRSVVEQAHEIQTMAKELELLKCVLPDKFVAGCIIAKLPPSWRSFGTALKHKRQEYSVEGLIASLDVEEKAREKDAASKGDGGQSSANVVHKAQNKSKGKYKAQQTTNFKKQKKNNNNPNQDERTCFVCGQVGHLARKCPQRKGMKAPAGQTSKSANVTIGNTGDGSGYGNLPTVFSVNQSTNWWVDTGANVHVCADISLFSSYQVARGSTVLMGNGSHASVHGVGTVDLKFTSGKIVQLKNVQHVPSIDRNLVSGSRLTRDGFKLVFESNKVVVSKHGYFIGKGYECGGLFRFSLSDFCNKSVNHICGSVDDEANVWHSRLCHINFGLMSRLSSMCLIPKFSIVKGSKCHSCVQSKQPRKPHKAAEERNLAPLELLHSDLCEMNGVLTKGGKRYFMTLIDDATRFCYVYLLKTKDEALDYFKIYKAEVENQLDRMIKRLRSDRGGEFFSNEFDLFCEEHGIIHERTPPYSPKSNGIAERKNRTLTDLVNAMLDTAGLPKAWWGEALLTSNHVLNRVPNRNKDKTPYEIWIGRKPSLSYLRTWGCLAKVNVPITKKRKLGPKTVDCVFLGYAHHSIAYRFLIVKSEVPDMHVGTIMESRDATFFESFFPMKDTHSGSNQPSEIIPSSITPPEQTEHTHELVSEEDVSEAPRRSKRQRTAKSFGDDFTVYLVDDTPKSISEAYASPDADYWKEAVRSEMDSIIANGTWEVTERPYGCKPVGCKWVFKKKLRPDGTIEKYKARLVAKGYTQKEGEDFFDTYSSVARLTTIRVLLSLAASHGLLVHQMDVKTAFLNGELDEEIYMDQPDGFVVEGQEGKVCKLLKSLYGLKQAPKQWHEKFDKTLTSAGFAVNEADKCVYYRHGGGEGVILCLYVDDILIFGTNLEVINEVKSFLSQNFDMKDLGVADVILNIKLIEKILNRFGYIDSKPSPTPYDSSLLLRKNKRIARNQLEYSQIIGSLMYLASATRPDISFAVSKLSRFTSNPGDDHWRALERVMRYLKGTVELGLHYTGYPAVLEGYSDSNWISDVDEIKATSGYVFTLGGGAVSWRSCKQTILTRSTMEAELTALDTATVEAEWLRDLLMDLPVVEKPVPAILMNCDNQTTCEKTIEVCQEIKKLRSYNVGLHPNSEKPGRSLHEGTITKCDKQCIEGDGFETHIKSLYVYNLNRAVHAFKPFDKLARRESPRVESIMSTTPTAASRRLVLILCTLAISCSSGIAGFAAGDDDAFIRCLAAAAVPPRLVHTPGSASYAPTLVSSIRNLRFVTPGTPRPLAIVAAAEAGHAQAAVRCGRRHGVRVRARSGGHDYEGLSYLSLDRRERFAVLDLAALRDVRVDADRAEAWVGSGATLGELYYAVGAASRTLAFPAGVCPTVGVGGHISGGGFGTLMRRYGLAADNVLDAVLVDADGRLLNRTTMGEGLFWAIRGGGGESFGVVLSWKLRLVRVPETVTVFTIRRPRNQSATDLITKWQEISPSLPRDVILRVVVQSQHAQFESLFLGRCRRLARLMRARFPELGMTQSDCEEITWIQSTVYFAFYSSSKPLELLLDRGTEPDRYFKAKSDYVQEPIPRHAWESTWPWLEEHDAGLLILDPYGGEMARVSPAATPFPHRKGNLYNLQYYSFWFEHGAETLERHLSWVRGLYGEMEPYVSKNPRTGYVNYRDMDLGRNEIEGNVTSYTKGKVWGEKYFRGNFERLAAVKAMVDPDDFFRNEQSIPPLPAAKGWSSI

SEQ ID NO: 120663 - protein, 715 aa, Oryza sativa
  unsure (1)..(715): unsure at all Xaa locations
  Clone ID: PAT_MRT4530_23763C.1.pep
MAVKDRFTGNPGRLTVLTTSGSGCFTAFNYCFEMPALCKRTPSFLWLYPASYLLFRVEVLLSWSRLREVGFVAAVKLPYLVSSPDLTIRHERRVEVEPGRFERNRETRGRRSNDTFMLVYIFNVMIYLWNKLNHYVLINSTIQKPYYRHCGFTMIGFADALKPDKFTGVHFKRWQIRVTLWLIAMKCFWLSTGKTMGVLTADQQKEFDEATTLFVGCILNVLGDRLVDVYMHMTDAKELWDALNTKFGATDVSNDLHLAKKCPQRKGMKAPVGQTSKFANVTIGNTGKGSGFCYVYMLKMKDEGLDYFKIYKAEVENQLDREIKRFRSDRGGELFLNEFDLFYEEHGIIHKRTHPYFPESNGIAERKNRTLIDLVNAMLHTAELLKAWWREALLTSNHVLNRVPNRNKNKTPDEIWIGRKXHHFLTCAHGGXLAKVNVPITKKRKLRPKTVDSVFLGYAHHSTAYRFLIVKSESISEAYASPDADYWKEVVRSEMDSIIANGTWEVTERPYGCRPMGCNWVFKKKFTPDGTIEKYKAQLVEKGYTQKEGEDFFDTYSLIARLTTIRVKKASFDMKKLGVADVILNIRKSRGENGITLLQSHYVEKILNRFGYIDSKPSPTLYDPSLLLRKNKRIARNQLEYSQIIEHKVGAVSWRSSHWVVVLFRTHSILERTHLCELDCWSQSTEILDESSRKLTKRPRSMTYTLQMRGSLQTV

SEQ ID NO: 120664 - protein, 241 aa, Oryza sativa
  Clone ID: PAT_MRT4530_23764C.1.pep
MDLGQFVSTKVVSSIFTMASSPSLALSFLVLLVLATFTTTTVLATNNLPPSSAPALSPASSAAAKEFLRATCTSKSELPELCFDILLPYASSFNGSQGKVARASAAIAIERHRGLLDELRGLKPGPGDVGAERRMLVMLLSDCVRDFDATYMFADETLARIDFLVSGRGSEEQRASDKLRANVWLTSAMDSGVSCTDWFNEEGSHGRPASSPVGKKVIAGCATATQYMSIALELLVNCITT

SEQ ID NO: 120665 - protein, 176 aa, Oryza sativa
  unsure (1)..(176): unsure at all Xaa locations
  Clone ID: PAT_MRT4530_23765C.1.pep
MQPPFAVLFCCRKIRICFVLETFRKIRCVKTAWSPDKLXRLIRFGYAEWRSCGRPDQATYLYINRAAAFSQHTRNQSRVCLLLCAAPSLVDYSIPLASVHQRSGEQVSGTSAFDVLHREKAAIRFLGSASRDCSLFVRDGSPSSPLACCAPSSTLATTSSSCRATGLSATSVRVRH

SEQ ID NO: 120666 - protein, 1096 aa, Oryza sativa
  unsure (1)..(1096): unsure at all Xaa locations
  Clone ID: PAT_MRT4530_23766C.1.pep
MAGFADALRTDKFTDVHFKRWQIRVTLWLTAMKCFWVSTGKPMGVLNADQQKEFDEATTLFVGCILSVLGDRLVEVYMHMTDAKELWDALNTKFGATDASNDLYIMEQFHDYKMADNRSVVKQAHEIQTMAKELELLKCVLPNKFVVGCIIAKLPPSWRGFGTALKHKRQEYSIEGLIASLDVEEKAREKDAASKGDGGQSTANVVHKAQNKSKGKYKAQQTTNFKKKKNNNNPNQDERTCFVCSQPGHLARKCPQRKGMKAPAGQTSKSANVTIGNTGDGSGYGNLPTVFSVNQSTNWWVDTGANVHVCADISLFSSYQVARGYTVLVGNGSHASVHGVGTVDLKFTSGKIVQLKNVQHAPSIDRNLVSGSRLTRDGFKLVFESNKVVVSKHGYFIGKDYECGGLFRFSLSDFCNKSVNHICGSVDDEANVWHSRLCYINFGLMSRLSSMCLIPKFSIVKGSKCHSCVQSKQPRKPHKAAEERNLAPLELLHSDHCEMNWVLTKGGKRYFMTLIDDATRFCYMYLLKMKDEALDYFKIYKAEVENQLDRKIKRLRSDRGGEFFSNEFDLFCEEHGIIHERTPPYSPESNGIAERKNRTLTDLVNAMLDTAGLPKACIAYRFLIFKSEVPDMHVGTIMESRDATFFESFFPMKDTHSSSSQTSEIIPNSITPPEQTEHTHEHVTEEDDSEAPRRSKRQRTAKSFGDDFTVYLVDDTPKSISEAYASPDVDYWKEAEMTERPYGCKPVGCKWVFKKKLRPDGTIEKYNARLVAKGYTQKEGEDFFDTYSPVARLTTIRVLLSLAASHGLLVHQMDVKTAFLNGELDEEIYMDQPDGFVVEGQEGKICKLLKSLYGLKQAPKQWHEKFDRTLTSAGFAVNEADKCVYYRHGGGEGVILCLYVDDILIFGTNLEVINEVKSFLSQKFDMKDLGVADVILNIKLIRGENGITLLQSHYVEKILNRFGYFDSKPSPTPYDPSLLLRKNKRIARNQLEYSKIIGSLMYLASATRPDISFAVSKLSRFTSNPGDDHWRALERVMHYLKGTMELGLHYXGILWYWKDIVILTGSLMWMRSKPLVDISSHXVVVLFRGGLANRPF

SEQ ID NO: 120667 - protein, 143 aa, Oryza sativa
  Clone ID: PAT_MRT4530_23767C.1.pep
MATMAPRLLIVVVSVLFTAGIIASAAAARDLTADPAGQAPPAYDFGIPAGFFVPGTNNPYNGDPAAWAAGYGSAAAGDVGGFGNGGAEAPSMVCSDKGPCNGKKLTCPKKCFVSFSRSGNGYAAGGGGGGCSFDCSTKCEATC

SEQ ID NO: 120668 - protein, 185 aa, Oryza sativa
  Clone ID: PAT_MRT4530_23768C.1.pep
KWHGVRISYARLIQFGYAEWRSCGHPDQATYLCINRAIAFMQHTRNQSRVCLLLCDAPSLVDYFIMLAGVHLRSGEQVSGTSAFDVLHREKAAIRFLGSASRDCSLFVRDGSPSSPLACCARSSTPATASSSCRATGLSATSPRAAPRPGRSSPSPHAAALGPHRRDLRPRRAVLPPNPLEVADK

SEQ ID NO: 120669 - protein, 88 aa, Oryza sativa
  Clone ID: PAT_MRT4530_23769C.1.pep
VHRVLHEPLFPIEWTPPPSTTSPSAPVSATPASPTLPPLRHGRCRAGRPPFPYPLHLPARRSLDRHPRTLLPTFTSAAGAASPPPPLC

SEQ ID NO: 120670 - protein, 152 aa, Oryza sativa
  unsure (1)..(152): unsure at all Xaa locations
  Clone ID: PAT_MRT4530_2376C.1.pep
NVVISLASLLSGRVTTTVWSSTSDVAFLPLLPLXWSSYDYCLVLDKRCSDSPITPASQSLISGAQDCQVFYPEIPYHKRHLALKPILLSLYAVLTRPPRNLRELRLGTPRANKALSDPSETKDHTLRLLNRSRTVARSRQGIRNEEMVYPPR

SEQ ID NO: 120671 - protein, 1204 aa, Oryza sativa
  Clone ID: PAT_MRT4530_23770C.1.pep
MADQGHSVSDGYEMLLDDLYIMEQFHDYKMADNRFVVEQAHEIQTMVKELELLKCVLPDKFVAGCIIAKLPPSWRSFGTALKHKRQEYSVEGLIASLDVEEKAREKDAASKGDGGQSSANVVHKAQNKSKGKYKAQQTTNFKKQKKNNINPNQDERTCFVCRQPGHLARKCPQRKGMKAPAGQTSKSANVTIGNTGDGSRYGNLPTVFSVNQSTNWWVDTGANVARGSTVLMGTGSHASVHGVGTVDLKFTSGKIVQLKNMQHVPSIDRNLVSGSRLTRDGFKLVFVSNKVVVSKHGYFIGKGYECGGLFRFSFSDFCNKSVNHICGSVDDKTNVWHSRLCHINFGLMFRLSSMCLIPKFSIVKGSKCHSCVQSKQPRKPHKAAEERNLAPLELLHSDLCEINRVLTKGGKRYFMTLIDDATRFCYVYLLKTKDEALDYFKIYKTEVENQLDRKIKRLRSDRGGEFFSNEFNLFCEEHGIIHERTPPYSLESNGIAERKNRTLTDLVNAILDTAGLPKAWWGEALLTSNHVLNRVPNRNKDKTPYEIWIGRKSSLSYLRTLGCLAKVNVPITKKRKLRPKTVDCVFLGYAHHRIAYRFLIVKSEVPDMHVGTIMESRDATFFESFFPMKDTHSSSSQPSEVISSLITPPEQTEHTHEHVTEEDVSEAPRRSKRQRTAKSFGDDFTVYFVDDTPKSISEAYASPDADYWKEAVRSEMDSIIANGTWEVTERPYGCKSAGCKCVFKKKLRSDGTIEKYKARLVAKGYIQKEGEDFFDTYSPIARLTTIRVLLSLPASHGLLVHQMDVKTIFLNGELDEEIYMDQLDGFVVEGQEGKVCKLLKSLYGLKQAPKQWHEKFDKTLTSAGFAVNEADKCVYYRHGGGEGVILCLYVDDILIFGTNLEVINEVKSFLSQNFDMKDLGVADVILNIKLIRGENGITLLQSHYVEKILNRFGYIDSKPSPTPYDPSLLLRKNKRIAKNQLEYSQIIGSLMYLASAIRPNISFVVSKLSRFTSNPGDDHWRALERVMRYLKGTMELGLHYTGYPAVLEGYSDSNWISDVDEIKATSGYVLTLGGGAVSWRSCKQTILTRSTMEAELTALDTATVEAEWLRDLLMDLPIVEKPMPAILMNCDNQTVIVKVNSSKDNMKSSRHVKRRLKSVRKLRNSGVITLDYIQTARNLADPFTKGLSRNVIDNASKEMGLRPM

SEQ ID NO: 120672 - protein, 187 aa, Oryza sativa
  Clone ID: PAT_MRT4530_23771C.1.pep
MRPDKFTGVHSKRWQIRVTMWLTAMKCFWVSTGKPEGILTADQQKQFEEATTLFVGCILSVLGDRLVEFHDYKMADNRFVVEQAHEIQTMAKELELLKCVLPDKFVAGCIIAKLPPSWRSFGIALKHKRQEYSVEGLIASLDVEEKAREKDAASKDDTGQSSANVVHKAQNKSKGKCKAQQTTNFRR

SEQ ID NO: 120673 - protein, 125 aa, Oryza sativa
  unsure (1)..(125): unsure at all Xaa locations
  Clone ID: PAT_MRT4530_23772C.1.pep
XVVDIDLQESSSIQKXSTSTXRCISSLSTTCAKSSDSARRRRXPXPAPAPYSSLLVRWYNRSRRRDDXTRKGSRRVGVGPPNLLVVVGRXACARXXGEGLVRVVRKATRPNGGEGGGXGGDDLXP

SEQ ID NO: 120674 - protein, 1165 aa, Oryza sativa
  Clone ID: PAT_MRT4530_23773C.1.pep
MAGFADALRPDKFTGVHFKRWQIRVTLWLTAMKCFWVSTGKPEGVLTAEQQKQFEEATTLFVGCILSVLGDRLVEVYMHMTDAKELWDALNTKFGATDASNDLYIMEQFHDYKMADNRSVVEQAHEIQTMAKELELLKCVLPDKFVAGCIIAKLPPSWRSFGTALKHKRQEYSVEGLIASLDVEEKAREKDAASKGDGGQSSANVVHKAQNKSKEKYKAQQTTNFKKQKKNNNNPNQDERTCFVCGQVGHLARKCPHRKGMKAPAGQTSKSANVTIGNTGDGSGYGRTGFHRPNGEWVTCFCSWCWHGRSEVYFGKDRAAEEHAACPFYRQESCYECGGLFRFSLSDFCNKYVNHICGSVDDEANVWHSRLCHINFGLMSRLSSMCLIPKFFIVKGSKCHSCVQSKQPRKPHKAAEERNLAPLELLHSDLCEMNGVLTKGGKRYFMTLIDDATRFCYVYLLKTKDEALDYFKIYKAEVENQLDRKIKRLRSDRGGEFFSNEFDLFCEEHGIIHERTPPYSPESNGIAERKNRTLTDLVNAMLDTAGLPKAWWGEALLTSNHVLNRVPNRNKDKTPYEIWIGRKPSLSYLRTWGCLAKVNVPITKKRKLGPKTVDCVFLGYAHHSIAYRFLIVKSEVPDMHVGTIMESRDATFLESFFPMKDTHSGSNQPSEIIPSSITPPEQTEHTHELVSEEDVSEAPRRSKRQRTAKSFGDDFTVYLVDDTPKSISKAYASPDADYWKEAVRSEMDSIIANGTWEVTERPYGCKPVGCKWVFKKKLRPDASHGLLVHQMDVKTAFLNGELDEEIYMDQPDGFVVEGQEGKVCKLLKSLYGLKQAPKQWHEKFDKTLTSAGFAVNEADKCVYYRHGGGEGVILCLYVDDILIFGTNLQVINEVKSFLSQNFDMKDLGVADVILNIKLIRGENGINLLQSHYVEKILNRFGYIDSKPSPTPYDPSLLLRKNKRIARNQLEYSQIIGSLMYLASATRPDISFAVSKLSRFTSNPGDDHWRALERVIRYLKGTVELGLHYTGYPAVLEGHSDSNWISDVDEIKATSGYVFTLGGGAVSWRSCKQTILTRSTMEAELTALDTATVEAEWLRDLLMDQPVVEKPTCEKTIEVCQEIKKLRSYNVGLHPNSEKPGRSLHEGTITKCDRQCIEGDGFETHV

SEQ ID NO: 120675 - protein, 78 aa, Oryza sativa
  unsure (1)..(78): unsure at all Xaa locations
  Clone ID: PAT_MRT4530_23774C.1.pep
MGSRKINHFCSSARAAPSCRSSCTAAVFRRRRPRAPRSLSWLPXSSXLPLSALVLTFXRTHAPLSFLPPSXSCPLSFL

SEQ ID NO: 120676 - protein, 198 aa, Oryza sativa
  Clone ID: PAT_MRT4530_23775C.1.pep
MAGKAAKATATNANNNGGGGYIRTVTLRGFDGIRVRVSAATMAAASATARARLDEAIRRTPRHAAVPDDVLINVPGVARPVLARVADYCDRHYGGGGGGEGGEFAAPEGYGFDDPLARFDDELMDGADVGTVVDLLRAAAFLRVERLADLASREVAACMRGRTVEGIRQVFGIANDYTDEEEQDVRKENSWAFDAYND

SEQ ID NO: 120677 - protein, 104 aa, Oryza sativa
  Clone ID: PAT_MRT4530_23776C.1.pep
SSSLQIHILSWSHSDRWRGRDEGRRTSGGATMATATGWRRGPRRREAVVVGRDDGDCDGGRRRLVPASLPLSLSLSLYVSLSLSIRPASQGGGGGGGLALITFF

SEQ ID NO: 120678 - protein, 344 aa, Oryza sativa
  Clone ID: PAT_MRT4530_23777C.1.pep
MAPPLLPAAEEDGGCVARWMRRDVLLGLALGQFVSLLITSTGFSSSELARRGINAPTSQSLLNYILLSLIYGGILIYRRQPLTIKWYYYLILGIIDVEANYIVVKSYQYTSLTSVMLLDCWSIPCVIILTWIFLKTKYGLRKFIGVGVCVAGLILVVFSDVHASDRAKGPNPLKGDLLVIFGSMLYACSNVTEEYLVKKSNRIELMAMLGLFGAIISGIQISILERKELHSIKWNAGAVLPFLGFALAMFLFYSTVPTVLKICGATMLNLSLLTSDMWAVLIRIFAYHEKVDWIYFVAFAGTAAGLLIYSYKSSKEAEETAQVAGASDKQGKAGDEEAGMQNSS

SEQ ID NO: 120679 - protein, 568 aa, Oryza sativa
  Clone ID: PAT_MRT4530_23778C.1.pep
MDLDKSTSTTASLKKLYDDGALPGRGTMQRETGGLESDTVGHRVSQVMISAPSVAGDIPIPLCEKGPAERAAAINALPLTDVIEPLADHQVAASLKEGVTKEASDVAAAAATTSGSNVLKKGRKFSSVLGTRLRMTGPHTVVSYLGIGRVSPTSAKAKAGDDQRELYEREETLRRAARAKAAQGGTKAATSSANQRADQLARDLAEAREDLLKMRVLVAGNERQRQGLEHRISELENNLSEIRGSLRISYTGLHQLAGECGVTTTIPANPDEFSLTSSLVELATAMEEIPSKHAARLGEETSNGVFNGACHVLACVRLAHPDLDLKKVLDQGAADDTRKDVDIESVQQRGQPGMPVIISALALEPFVSREEDALADRDRRIQYWNTKLEVAELERTMVEVKKDRAVEALRGREVWFNSYLKSCCTAMTGVYKELRVPRGDPEESAAGYISWLNGACAQLEGIGKRLDEALKQECRRSSRYAGGHVLACIRDHHPQLHLEFLHEQFSHSRRTPAEIDGLAQSMAPLAEKEFANSHPSPSAILNALGRKTCVIVYGPSHLGESLLRPAWL

SEQ ID NO: 120680 - protein, 166 aa, Oryza sativa
  unsure (1)..(166): unsure at all Xaa locations
  Clone ID: PAT_MRT4530_23779C.1.pep
MEEFHKEIRRCRRAAGVVPQGGHWVSPESRWKKMTATMHWYPRCPDLRRALGLSAHSDSGFCSXSIVPGLQLFRRGPDRVYHRAVVNRNRDRISLGYFLGXQPNVKVAGGRVPPGWSAAYRAVTWPEYKAVRKKAFTTGGSTLEMVSTPTATDEHNDVTDVVRDVI

SEQ ID NO: 120681 - protein, 98 aa, Oryza sativa
  Clone ID: PAT_MRT4530_2377C.1.pep
LCKLRSQHLKNLFRNHTQHQSPKVNLGEKIMALQQIMSPFGKTDTASVLVETITYIKFLHGTDAFNVFIWIDAGAECTALLDGGSIEEASCISARLTT

SEQ ID NO: 120682 - protein, 45 aa, Oryza sativa
  Clone ID: PAT_MRT4530_23780C.1.pep
MACFLLVWTKEHSRLKHFNFTPPSFCIYSISHASITPVRGVEDSY

SEQ ID NO: 120683 - protein, 153 aa, Oryza sativa
  Clone ID: PAT_MRT4530_23781C.1.pep
MGKTTASAVAGEDIGSDGGSGGGFQQWGQYWRYADDDEVANGEEGQPRCRPSVECTPVSVAAEGAEVGSGEDAAKWRQRGGAPARTRGGGGASEEKKRGLRGRGWRRNDVFARGILGGEIVRWRKLARGWTVQINLDDLTCSIGGGQLLFILV

SEQ ID NO: 120684 - protein, 151 aa, Oryza sativa
  Clone ID: PAT_MRT4530_23782C.1.pep
MMTVVPEEEAVDSDDGGNVASAEEGSDPFFPIAVANAPSLTSLSSSWSTLADGEIRWRRWCSRNARHMMMRCKGMDGDEGLRWSAHVVAEAAEKSRLRRLPPLAASTARAPPLAAVVLFMRQWRPRRSHPTNKETRAGGGQGGATSEAKCP

SEQ ID NO: 120685 - protein, 79 aa, Oryza sativa
  Clone ID: PAT_MRT4530_23783C.1.pep
YRLHRFFTDVVESSLSMQLDIGGAGRLSMPLLMSFHFGRVGLDVFSSTSTFVAANSDPLPFSFAYFFLENGIEIVDRKR

SEQ ID NO: 120686 - protein, 111 aa, Oryza sativa
  Clone ID: PAT_MRT4530_23784C.1.pep
KGTGLLWTESTGPRRGAPRGAHVAPTWRPRGRPRGRQANGPDLLSDRSDGCSGSRLGSARVAQAGPGMACSGAARTSAVTRGSAGAGEERRRTATTSDGRTTATGGRAPGP

SEQ ID NO: 120687 - protein, 84 aa, Oryza sativa
  unsure (1)..(84): unsure at all Xaa locations
  Clone ID: PAT_MRT4530_23785C.1.pep
MAEIVDRVHGXPRRGAPRGAHVAPTWRPRGRPRGRQPNGPDLPSGRSDGCSGSRLGSARVAQAGPGMACGGTARTPAARGGARR

SEQ ID NO: 120688 - protein, 168 aa, Oryza sativa
  unsure (1)..(168): unsure at all Xaa locations
  Clone ID: PAT_MRT4530_23786C.1.pep
LKLLCFSIPRKLFSFSRAPSRLXDCLSIPQIQQTTVLSVRWCCEFQVQCKILSLRSLRTQYCLHFGKFSSGCCKISQSSDCRNMHRDLILPPSPHHWSSLGLAAWNIKLREALKFLRENHLPRQQEPGQDGRFWNRVAPYFPRDYRPLLKHKKRMEKKEKKNTPKNWM

SEQ ID NO: 120689 - protein, 61 aa, Oryza sativa
  Clone ID: PAT_MRT4530_23787C.1.pep
ETSVFIFWGPPPPGPSSSPSAAIIKGSPPTASPAIQGHVYPFSPLRGSPLLKFKTPQGFIW

SEQ ID NO: 120690 - protein, 52 aa, Oryza sativa
  Clone ID: PAT_MRT4530_23788C.1.pep
MASSESVPAASETSADTTAYSIAKPKPTFYRRPHTNGLERHPDPHDAPERQF

SEQ ID NO: 120691 - protein, 381 aa, Oryza sativa
  unsure (1)..(381): unsure at all Xaa locations
  Clone ID: PAT_MRT4530_23789C.1.pep
SCFLVWSGHRVSSSSSRYHPSFTAQGVRRLRRSSSWWCGEHHRHHRHRHHHRHRHPLTDSSVRNNPCANFQPPSDAAALSIYCVDSNGCCNFSCVQSAVDAIPENRLTRSVVXINSGTYIEKVTVNFSKPNVTFQGQGFESTIIVWNNSAKNTGTFYSATVDVFATGFVTNNISFKNASPAPKPGDRDGQAVAIRVSGDQAAFXGCGMYSYQDTLFDDLGRHYFSDCFIEGSIDFIFGNGRSFYEKCILNSVATSDGINGAICAQGREYAADDTGFAFVNCRITGSGLILLGRAWRPYSRVVFAHTDMPGIIVPXGWSDWDDPQRDAXTTMFYGEYMCTGVGANMTGRVPYAKPLTEQQAQIYLDASYVDADGWLKPFNDS

SEQ ID NO: 120692 - protein, 149 aa, Oryza sativa
  Clone ID: PAT_MRT4530_2378C.1.pep
MTSNEYAIRYIRHVSTKEQLSTRVGCGQVHRIIENGLDKCRVVAPNLPTKADDLSHSTGHGWTTTREKYVAISRTATSIGVREIILHVRWSSNQYVALSRTATSIGVREIILHVRWSSNQYVALSRTATLDGRGTTTAITQRSSYHDFK

SEQ ID NO: 120693 - protein, 290 aa, Oryza sativa
  Clone ID: PAT_MRT4530_23790C.1.pep
MGCVSSKQFKRAAQHEDPAILAKETTFSVSEVEALFELFKKISHSIFRDGLIHKEEFQLALFRNSNKKNLFANRNLFLCENADSVSPQVQIFDLFDLKRNGVIDFGEFVRSLSIFHPETPLGDKIALFFFVVAFRLYDLRGTGCIEREELHEMVLALLNESDLFLSEEAVEQIVDQTFKQADLNDDGKIDPDEWKTFASKNPALLKNMTLPYLKDITMGHDYMGKPMGTELDESQSSDMGTQYAAIVKTSALKNSHDDISDGSQKLRCIVFGRVSGRACLAQLQLQLHPS

SEQ ID NO: 120694 - protein, 554 aa, Oryza sativa
  unsure (1)..(554): unsure at all Xaa locations
  Clone ID: PAT_MRT4530_23791C.1.pep
WLINEKQFEEAPRRSKRQRTAKSFGDDFAVYLVDDTPXSISEAYASPNTDYWKEAVRSEMDSIITNGTWEVTELPYGCKPVGCKWVFKKKLRPDGTIEKYKVRLVAKGYTQKEXENFFDTYSPVARLTTIHVLLSLAASHGLLVHQMDVKTAFLNRELDEEIYMDQPDGFVVEGQEGKVCKLLKSLYGLKQAPKQWHEKFDKTLTSTGFAVNEVDKCVYYRHGGGEGVILCLYVDDILIFGTNLEVINEVKSFLSQNFDMKDLGVADVILNIKLIRFENEITLLQSHYMEKILNRFGYIDSKPSPTPYDPSLLLRKNKRIARNAPEYSQIIGSLMYLASATRPDISFAVSKLSRFTSNPGDDHWRALERVMRYLKGTMELGLHYSGYHAVLEGYSDSNWISDVDEIKATSXYVFTLGGGAVSWRSCKQTILTRSTMEAELTALNTATVEAEWLRDLLMDVPIVEKPTCEKTIEVCQEIEKLRSYNIGLHPNSXKPGRSLHEGPITKCDRQCIEGYGFETHSILERTHLCELDCWSQSMEILGESSRKLTKDLGV

SEQ ID NO: 120695 - protein, 116 aa, Oryza sativa
  Clone ID: PAT_MRT4530_23792C.1.pep
MGQQQGIQGMGEVARIATVGVDSLISALQEIACAIHPTTSVMHQPVHPTGWVWVAPGMCTLGLAGIWHRVSSLVSASCCRALVASEECHNLSYDWLVNHAGHGVKCIPLVLETHTG

SEQ ID NO: 120696 - protein, 47 aa, Oryza sativa
  Clone ID: PAT_MRT4530_23793C.1.pep
MHCVWESFWQGLFGTAPAPAPPLLELSQTVSAPPKLGVELGGTLSQN

SEQ ID NO: 120697 - protein, 1017 aa, Oryza sativa
  unsure (1)..(1017): unsure at all Xaa locations
  Clone ID: PAT_MRT4530_23794C.1.pep
MHRRSDEQVSRTSAFDILHREKATIRRCDFTMVGFADALRPDKFTGVHFKRWQIRVILWLTAMKYFWKEFDETTTLFVGCILSVLGDRLVEVYMHMTDAKELWDTLNTKFAATDASNDLYIMEQFHNYKMADNRSVVEQAHEIQTMAKKLELLKCVLPDKFVAGCIIAKLPPSWRGFGTALKHKRQEYSVEGLIASLDVEEKAREKDVASKGDVNQSTNWWVDTXGQCRTGFHRPNGEWVTCFCSXCWHGRFEVYFGKDRAAEERAACPFYRQESCYECGGLFRFSLSDFRNKSMNHICGSVDDEANVWHSRLCHINFGLMSRLSSMCLIPKFSIVKGSKCHSCVQSKQPRKPHKAAEERNLAPLELLHSDLCEMNGVLTKGGKRYFMTLIDDATRFCYVYLLKTKDKALDYFKICKAEVENQLDRKIKRLRSDRGGEFFSNVFDLFCEEHGIIHERTPPYSPESNGIAERKNRTLTDLVNAMLDTAGLPKAWWGEALLTSNHVLNRVPNRNNDKTPYEIWIGRKTSLSYLRTWGCLAKVNVPITKKRKLGPKTVDCVFLGYAHHNIAYRFLIVKSEVPNMHVGTIIESRDATFFESFFPMKDTHSSSSQSSEIIPSSITPSEQTEHTLEHVTEEDDSEAPRRSKRQRTAKSFGDDFTVYLVDDTPKSISEAYASPDADYWKEAVHSEMDSIIANGTWEVTERPYGCKPVGCKWLFKKKLRPDASHGLLVHQMDVKTTFLNEELDEEIYMDQPDGFVVEGQEGKVCKLLKSLYGLKQAPKQWHEKFDKTLTSAGFAVNEADKCVYYRHGGGEGVILCLYVDDILIFGTNLEVINEVKSFLSQNFDMKDLGVADVILNIKLIRGENRITLLQSHYVEKILNRFGYIDSKPSPTPYDPSLLLRKKKRIARNQLEYSQIIGSLMYLASATRPDISFAVSKLSRFTSNPGDDHWRALERVMRYLKGTMELGLHYSGYPAVLEGYSDXNWISDVDEIKATRGYVFTLGGGAVSWRSCKQTIL

SEQ ID NO: 120698 - protein, 80 aa, Oryza sativa
  Clone ID: PAT_MRT4530_23795C.1.pep
SFWDWPCFWKGLFIGVSPPFWLVFSPTRVRFHLLPGLLVFLCPVSCFSTCPFLPVKLFFPFVWFLLPFFVFFSPKLFNTP

SEQ ID NO: 120699 - protein, 1319 aa, Oryza sativa
  unsure (1)..(1319): unsure at all Xaa locations
  Clone ID: PAT_MRT4530_23796C.1.pep
MAGFADALRPDKFSGVHFKRWQIRVTLWLTAMKCFWVSTGKPEGILIADQQKQFEEATTLFVGCILSVLGDRLVEVYMHMTDAKELWDALNTKFGATDASNDLYIMEQFHDYKMTDNRSIVEQAHEIQTMAKELELLKCVLPDKFVAGCIIAKLPPSWRSFGTALKHKRXEYSVEGLIASLNVEGKAREKDAASKGDSGQSSANVVHKAQNKSKGKYKAQQTTNFKKKKKNNNNPNQDERTCFMCGQPGHLARKCPQRKGMKAPAGQTSKSANVTIGNTGDGGGYSNLPTVFLVNQSTNWWVDTRANVHVCADILLFSSYQVARGSIVLMGNGSHASFHGVGTVDLKFTSGKIVQLKNVQHVPSIDRNLVSGSRQTRDEFKLVFECNKVVVSKHGYFIGKGYECGGLFRFSLSDFCNKSVNHICGSVDDEANVWHSCLCHINFDLMSRLSSMCLIPKFFTVKGSKCHSCVQSKQPRKPHKAVEERNLAPLELLHSDLCEMNGVLTKCGKXYFMTLIDDATIFCYVYLLKTKDEALDYLKIYKAEVENQLDKKIKRLRFDRGGEFFSNEFDLFCEEHDIIHKRTPPYSPESNGIAERNNRTLTDLVNDMLDTTGLPKAWWGXALLTSNHLLNRVPNRNKDKTPYEIWIGRKPSLSPSTXGCLAKVNIPITKKRKLGPKTVDCVFLGYAHYSITYRFLIVKSEVPDMHVGTIMESRDATFFESFFPMKDTHSSSSQPSEVIPRSITQPEQTEHTHKHVIEEDVSEAPRRSKRQRTAKSFGDDFTVYLVDDTPKSISEAYASPDADYWKETVRSEMDSIIANGTWEVTNRPYGCKPVGCKWVFKKKLRPDGTIEKYKARLVAKGYNQKEGEDFIDTYSPVARLTTVHVLLSLAATHGLLVHQMDVKTAFLNGELDEEIYMDQPDGFVVEGQEGKVCKLLKSLYGLKQAPKQWHEKFDKTLTSSGFAVNEADKCVYYRYGGGEGVILCLYVDDILIFGTNLEVINEVKSLLSQNFDMKDLGVADVILNIKLIRGENVITFLQSHYVEKILNRFGYIDSKPSPTPYDPTPSLRKNKRIARNQLEYSQIIGSLMYLASATRPDISFVVSKLSRFTSNPGDDYWRALERVMRYLKDTMELGLHYSRYPAVLEGYSDSKWISDVDEIKATSGYVFTLGGGAVSWRSCKQTILTRSTMEAELTVLDTATVEAEXLRDLLMDLPIVEKPVPAVLMNYDNQTTCEKTIEVCQEIEKLRSYNVGLHPNSXKPGRSLHEGTITKCDRQCIVGDRFETHSILERTHLCKLDCWSQSIEILGESSRNLTKDLGV

SEQ ID NO: 120700 - protein, 242 aa, Oryza sativa
  Clone ID: PAT_MRT4530_23797C.1.pep
MLENRALLKSGENWKFQVAICDFLEAEIRICFVLETFRKIRCVKTAWSPNKLRATYPVRCGVRISYARLIRFGYAEWRSCGRPDQATYLYINRVATFTQQTRNQSRVCLLLCTAPSLVDYSIPLAGVNRQSGEQVSGTSAFDVLHREKAAIIFFGSASRDCSLFVHDGSPSSPLACRAPSSTPATTSSSCRETGLSATSPKPRSNEGEGGSAEPSGLAEPGAGPIQPNFGWRPPLLLHFVDL

SEQ ID NO: 120701 - protein, 1059 aa, Oryza sativa
  Clone ID: PAT_MRT4530_23798C.1.pep
MKPENAFVTVQEGTLCLAIVVTTKQQPVPILGNLAQQNIHVGSPPPTAQGAAGQRSIRAAGRRAAGEEDGADGERDEESEDAAAVIVHLHRSRARAVSGVAGGSVSAGAAAGGAGGDSLFPRRRRRPPLRLSLLKRPNRRRLPSPVSSSSPPASGPLRRSNPEVARATAATTGRRTSSPPASCPAGCCREKRTAGAASGSAQPAACDEERQARSGVRAAADDHPPPGSGRGSRRSPPARIWRRWPSPTWIRRWWRRAGGLGRWGVSGSGYRDGDSNYGDHDDDDNDDREEGSDNSFRIKVTLWLTAMKCFWVSTGKPEGVLTAEQLKQFEEATTLFVGCILSVLGDRLVEVYMHMTDAKELWDALNTKFGATDASNDLYIMEQFHDYKMADNRSVVEQAHEIQTMAKELELLKCVLPDKFVAGCIIAKLPPSWRSFGTALKHKRQEYSVKGLIASLDVEEKAREKDAASKGDGAQSSANVVHKAQSKSKGKYKAQQTTNFKKQKKNNNNPNQDEKTCFVCGQLGHLARKCPQRKGMKAPVGQTSKSAKSANVTIGNTGDGSGYGNLPTDARGSTVLMGNGSHASVHGVGTVYLKFTSGKIVQLKNMQHVPSIDRNLVSGSRLTRDGFKLVFESNKVVISKHRYFIGKGYEYGGLFRFSLSDFGNNSVNHISGSVDDEPNVWHSPSHGLLVYQMDVKTTFLNGELDEEIYMDQPDWFVVEGQEGKVCKLLKSLYGLKQAPKQWHEKFDKTLTSAGFAVNEAGKCVYYSHGGGEGVILCQYVDDILIFGTNLEVINESHYVEKILNCFDYIDSKPSPTPYDPSLLLRKNKRIARNQLEYSQIIGSLMYLASATRPDISFAVSKLSRFTSNPGDDHWRALERVMRYLKGTVELGLHYTGYPAVLEGYSDSNWISDVDEIKATSGYIFTLGGGAVSWRSCKQTILMRSTMEAELTALDTATVEAKWLRDLLMDLPIVEKPSILERTHLCELDCWSQSMEIFDYSIPLTSVHLRSGEQVSGTSTFDVLHRKKATIRFLESALRDCSLFIRDGSSSSLLACCVPS

SEQ ID NO: 120702 - protein, 135 aa, Oryza sativa
  unsure (1)..(135): unsure at all Xaa locations
  Clone ID: PAT_MRT4530_23799C.1.pep
LDFLGRHMHTPVEAVVSILFVASRRRMMSVVAAGGKHLRWSSMARFGYAPPIENSPTNKAATXLATIACRRITVLNRSPPRGMPLSRRDSEVDQSSDQEQGNRQRXRRRAAKRQCACPACPCSRGREKRVAGEWD

SEQ ID NO: 120703 - protein, 299 aa, Oryza sativa
  Clone ID: PAT_MRT4530_2379C.1.pep
MACNSKLLIARLDRKKKKEKKKRRKKQKQTPRRRLFLSLSPLDLVFSLSQDSIAMAAEVAKAAVVPESVLKKRKREEQWAADRKEKALAEKKKAVESRKLIFARAKQYAQEYDAQEKELVQLKREARMKGGFYVSPEAKLLFVVRIRGINAMHPKTRKILQLLRLRQIFNGVFLKVNKATINMLRRVEPYVAYGYPNLKSVRELIYKRGYGKLNKQRIPLQNNKVIEEGLGKHDIICIEDLVHEIMTVGPHFKEANNFLWPFKLKAPLGGLKKKRNHYVEGGDAGNREDYINELIRRMN

SEQ ID NO: 120704 - protein, 142 aa, Oryza sativa
  Clone ID: PAT_MRT4530_237C.1.pep
DDGDDGGRFGAARRHGRQAWAGAAEGDGGGDQAARQGSGTGRRGRRRRRGSGGEPRGRAHANTARGSRLRERGARQGWGEGERGEGGRSARRLTRTRARRAGGAERSGGERRGSASGRGEGRERGEDGPREIRPIDPGGGKI

SEQ ID NO: 120705 - protein, 1320 aa, Oryza sativa
  unsure (1)..(1320): unsure at all Xaa locations
  Clone ID: PAT_MRT4530_23800C.1.pep
MADFADALRPDKFTGVHFKRWQIMVTLWLTAMKCFWVSIGKPEGVLTAEQQKQFEEATTLFVGCILSVLGDRLVEVYMHMTDAKKLWDALNTKFGATDASNDLYIMEQXHDYKMADNRSIVEKAHEIQTMAKELELLKCVLPDKFVAGCIIAKLPPSWRSFGTALKHKRQEYSVEGLIASLDVEEKAQEKDAAYKGDGGQSNANVVHKAQHKSKGKYKAQQTTNFKKQKKNNNNPNQDERIXFVCGQPGHLARKCPQRKGMKAPAGQTSKSANVTIGNTGDGRGYGNLSTVFSVNQSTNWWVDTGANVHVCADISLFSSYQVARGSTVLMGNGSHASVHGVGTVDLKFTSGKIVQLKNVQHVPSIDRNLVSGSRLTRDGFKLVFESNKVAVSKHGYFIGKGYECGGLFRFFLSDFCNKSVTHICGSVDDEANVWHSRLCHINFGLMSRLSSMCLIPKFSIVKGYTRHSCVQSKQPRKPHKAAEERNLAPLELLHSDICEMNGVLTKGGKRYFMTLIDDATRFCYVYLLKTKDEAVDYFKIYKAEVENQLDRKIKRLRSDRGGEFFSNEFDLFCEEYGIIHERTPPYSPESNGIAERKNRTLTDLVNAMLDTAGLPKAWWGEALLTSNHVLNRVXNRNKDKTPYEIWIGRKPSLSYLCTWGCLAKVNVPITKKHKLGPKTVDYIFLGYAHHSIAYRFLIVKSEVPDMHVGTIMESRDATFFESFFPMKDTHSSSSQPSEIIPSSITPPEQTEYTHEHVTEEDDSEAPRRSKRQRTAKFFGDDFTVYLADDTPKSISEAYASPDADYXKEAVRSEMDSIITNGTWEVTERPYGCKPVGCKWVFKKKLRPDGTIEKYKAWLVAKGYTQKEGEDFFDTYSPVARLTTIRVLLSLAASHGLLVHQMNVKTAFLNGELDEEIYMDQPDGFVVEGQEDKVCKLLKSLYGLKQAPKQWHEKFDRTLTSAGFAVNEADKCVYYRHGGGEGVILCLYVDDILIFRTNLEVINEVKSFLSQKFDRKDLGVADVILNIKLIRGENKITLLQSHYVEKILNRFGYIDSKPSPTSYDPSLLLRKNKRIARNQLEYSQIIGSLMYLASATRPDISFAVSKLSRFTSNPGDDHWHALERVMRYLKGTMELGLHYFGYPAVLEGYSDSNWISDVDDIKATSGYVFTLGGGVVSWRSCKQTILMRSTMEAELTALDTATVEAEWLRDLLMDLPIVEKPVPAIFMNCDNQTTCEKTIEVCQEVEKLRSYNVGLHPNNXKPGRSLHEGTITKCDRQCIEGDGFETHSILERTHLCELDCWSQSMKILSESSRKLTKDLGV

SEQ ID NO: 120706 - protein, 67 aa, Oryza sativa
  Clone ID: PAT_MRT4530_23801C.1.pep
PSYLEFPTPGHHSLVFIAPSIITVLCNSRLPLQAIQGVITSGQCSHHFFPKPFASLQTHHTFIAPNT

SEQ ID NO: 120707 - protein, 988 aa, Oryza sativa
  Clone ID: PAT_MRT4530_23802C.1.pep
MKCFWVSTGKPMGILNADQQKKFDEATTLFVGCILSVLDDRLVEVYMHMTNAKELWDALNTKFGAIDASNDLYIMEQFHDYKMADNCSIVEQAHEIQTMAKELELLKCVLPDKFVAGCIIAKQPPSWRGFSTALKYKRQEYSVEGLIASLDVEEKAREKDVASKGDGGQSTANVVHKAQNKSKGKYKAQQTTNFKKKNNNNPNQDERTCFVCGQPGHLARKCPQRKGMKAPVGQTSKFANVTIGNTGDGSSRTGSTVLMGNGSHASVHGYECGGLFRFSLSDFYNKSVNHICGSVDDKAYVWHSRLCHINFGLMSRLSSMCLIPKLSIVKGSKCYSCVQSKQPRKPHKVAEERNLAPLELLHSDLCEMNGVLTKGGKRYFVMLIDDATRFCYVYLLKTKDEALDYFKIYKAEVENQLDRKIKRLRSDRGGEFFSNEFDLFCEEHGIIHERTPPYSPESNGIAERKNRTLTDLVNAMLDTAGLPKACIAYRFLIVKSEVPDMHVGTIMESRDANFFEISFFPMKDTHSSSSQTSEIIPNSITPPEQTKHTHEHVTEEDDSEAPRRSKRQRTAKSFGDDFTVYLMDDTPKSISEAYASPDADYWKEAVRSEMDSIIANGTWEVTERPYGCKPVGCKWVFKKKLRPDGTIEKYKARLVAKGYTQKEGEDFFDTYSPVARLTTIRVLLSLAASHGLLVHQMDVKTTFLNGELDEVIYIDQPDGFVVEGQEDKACKLLKSLYGLKQAPKQWHEKLDRTLTSVSFAVNEAVKCVYYRHGGGEGVILCFYVDDILIFGTNLEVINEDLGVADVILNIKLIRGENGITLLQSHYVEKILNHFGYIDSKPSPTPYDPSLLLRKNKRIARNQLEYSQIIGSLIYLASATRPDISFAVSKLSRFTSNPEDDHWRALERVMRYPKGTMEFGLHYSGYPAVLEGYNDSNWISDVDEIKATSGYVFTLRGGAVSSRSCKQTILTRSTMEAELTALDTATVEA

SEQ ID NO: 120708 - protein, 193 aa, Oryza sativa
  Clone ID: PAT_MRT4530_23803C.1.pep
MPMAIKNQFSGIPGRYNRTYQLRETEIGSDAVKAAVLDGGTTVQSPREMECAKASAGGAARSHAWLVELGFKAGVAGGAVRGQRKDCRVRRREPLRRGVVQRKDVPRWRKDRLLGRNYSRLRASMKARSTREERKASRRGRTGVQSREALRKNLIAAFSRCRTSKAEVQETCSPDRRCTPEDGVVYERRRSTE

SEQ ID NO: 120709 - protein, 1279 aa, Oryza sativa
  unsure (1)..(1279): unsure at all Xaa locations
  Clone ID: PAT_MRT4530_23804C.1.pep
MAGFTDALRLDKFTGVHFKRWQIRVTLWLTAMKCFWVSTGKPIGVLNADQQKEIDEATTLFVGCILSVLSDRLVEVYMHMTDAKELWDALNTKFGATDASNDLYIMEQFHDYKMADNRSVVEXAHEIQTMAKELELLKCVLSNKFVAGCIIAILPPSWRGFGTALKHKRQEYSVEGLIASLDVEEKAREKDTASKGDGGQSTTNVVHKAQNKSKGKHKTQQTTNFKKKKNNNNPNQDEKTCFVCGQPSHLARKCPQRKGMKAPAGQTSKSANVTIGNTRDGSGXNLPTVFSVNQSTNWWVDTGANVHVCADISLFSSYQAARGSTVLMGNGSHASVHGVGTVDLKFTLGKIVQLKNVQHVPSIDRNLVSGSRLTRDGFKLVXFESNKVVVSKHGYFIGKGYECGGLFRFSLSDFCNKSVNYICGSVDDEANVWHSRLCHINFGLMSRLSSMCLIPKFSIVKGSKCHSCMQTKQSRKPHKAAEERNLAPLELLHSDLCEMNGVLTKGGKRYFMTLIDDATRFCYVYLLKTKDEALDYFKIYKAEVENQLDRKIKRLRSDRGGEFFSNEFDLFCEEHGIIHERMPPYSPESNGIAERKNRTLTDLVNALLNSNHVLNRVPNRNKDKTPYEIWIGRKPSLSYLRTWGCLAKVNVPITKKRKLGPKTVDCIFLGYAHHSIAYRFLIFKSEVPDMHVGTIMESRDATFFESFFPMKDTHSSSSQPSEIIPSSITPPEQTEHTHEHVIEEDVSEAPRRSKRQRTAKSFGDDFTVYLVDDTLKSISEAYASPDADYWKEAFRSEMDSIIANGTWEVIEXPYGCKPVGCKWVFKKKLRPDGTIEKYKAWLVAKGYTQKEGEYFFDTYSPVARLTTICVLLSLAASHGLFVHQMNVKTAFLNGELDEEIYMDQPDRFVVEGQEGKVCKLLKSLYGLKQAPKQWHEKFDKTLTSPGFAVNEADKCVYYRHGGGEGVILCLFVDDILIFGTNLEVINEVKSFLSQNFDIKDLGVADVILNIKLIRGENGITLLQSHYVEKILNRSGYIDSKPSPTPGXNKRIARNQLEYSEIIGSLMYLASATRPDISFAVSKLSRFTSNPGDDHWRVLERVMRYLKGTMELGLHYSGYPAVLEGYSDYNWISDVDEIKATSGYVFTLGGGAVSWRSCKQTILMRSTMEAELTALDTATVEAEWLRDLLMDLPIVEKPVPAILMNCDNQTVIVKVNSSKNNMKSSRHVKRRLKSVRKLRNSGVITLDYIQTARNLADPFTKGLSRNVIDNASKEMGLRPM

SEQ ID NO: 120710 - protein, 93 aa, Oryza sativa
  Clone ID: PAT_MRT4530_23805C.1.pep
MRQASPVPSRRQLAGWGGGTSGDRGGWEEESRRCEERQLGVGGGRETLKILDGDFYTKLTEGPHCKCFAGNPKNGVADTIFFFFLIIQIKSWR

SEQ ID NO: 120711 - protein, 79 aa, Oryza sativa
  Clone ID: PAT_MRT4530_23806C.1.pep
MGGGGIETATGGDGAKTARGRGGAGTAAAWQRMEAATGSGMAMSEVRGGAGARRLADAEAMRWWLWRMGEGSGSKGCGD

SEQ ID NO: 120712 - protein, 966 aa, Oryza sativa
  unsure (1)..(966): unsure at all Xaa locations
  Clone ID: PAT_MRT4530_23807C.1.pep
MADNRSVVEQAHEIQTMAKELELLKCVLPDKFLAGCIIAKLPPSWRGFGTALKHKRQEYSVEGWIASLDIEEKAQEKDAASKGDGGQSTANVVHKAQNKSKGKYKAQQTTNFKKKNNNNNSNQDERTCFVCDQPDHLARKCPQRKRMKALAGQTSKSANVTIGNTGDGSGYGXRGSTVLMGNGSHASVHGVGTVDLKFTXGKIVQLKNVQHVPSIDRNLVSGSRLTRDGFKLVFESNKVVMSKHGYFIGKGYECGGLFRFSLSDFCNKSVNHICGSVDDEANVWHSRLCHINFGLMSRLSSMYLIPRFSIVKGSKCHSCVQSKQPRKPHKAAEERNLAPLEFLHSDLCEMIGVLTKGGKRYFMTLIDDATRFCYVYLLKMKDEALDYFKIYKAEVENQLDRKIKRLRSDRGGEFFSNEFDLFCEEHGIIHESAPPYSPESNGIAERKNRTLTNLVNAMLDTAGLPKAWWGEALLTSNHVLNRVPNRNKDKTPYEIWIGRKSSLSYLRTWGCLAKVNVPITKKRKLRPKTMDYVFLGYAHHSIADRFLIVKSEVPDMHVGTIMESRDPTFFESFFPMNDTHSSSSQPSEIIPSSITPPEQTEYTHEHVTEEDDSEAPQRSKRQRTTKSFGDDFTVYLVDETPKSISEAYASPDADYWKEAVRSEMNSIIANGTWEVTERPYGCKPVGCKWVFKKKLRPDGTIEKYKARLVAKGYTQKEGEDFFDTYSPVARLTIIRVLLSLAASHGLLVHQMDVKTAFLNGELDEEIYMDQPDGFVVEGQEGKVCKLLKSLYGLKQVPKQRHEKFDKTLTSAGFTVNEADKCVYYRHGGDLGVADVILNIKLIRGENVITLLQSHYVEKILNRFGYIDSTMELGLHYSGYSAVLEGYSDFNWISDVDEIKATSGYVFTLGGAAVSWRSCKQTILTRSTMEAELMALDTATVEAEWLRDLLMDLPIVEXTGAGYPYEL

SEQ ID NO: 120713 - protein, 61 aa, Oryza sativa
  unsure (1)..(61): unsure at all Xaa locations
  Clone ID: PAT_MRT4530_23808C.1.pep
TYSGCVIYFXMXSIVFLXGLNPXLPSCCXCCIIKQXCKFDXRVQKKKKXXKKKKGXPHPGG

SEQ ID NO: 120714 - protein, 38 aa, Oryza sativa
  Clone ID: PAT_MRT4530_23809C.1.pep
YSTAALESSIMPVVIARFSIAQSDGPGAHKRLPDECGP

SEQ ID NO: 120715 - protein, 434 aa, Oryza sativa
  unsure (1)..(434): unsure at all Xaa locations
  Clone ID: PAT_MRT4530_2380C.1.pep
MAERAVAHNLXSPSASGDDREQNPRRRARTPPSPSRRSLGREEALEGVERSATSPPTGNGEGRRDGERRLLVYGDGSTPQGALRAAGALLRHPPVVPDPETPARRWLDDVADLVMTAQQRLVAGGRSSAPKASGVATTGSVSSRRRARRAAAVTRRSSAIPSSTPPTQEDVRGGPDARLNIERRRNGRRAXHATEGASSSGAPLRSGHGGQPPMSPVGGAGCRAFVASLRNVRWPPRFRPTITEKYDGSVNPAEFLQIYTTGIEAAGGDDRVMANFFPMALKGQARGWLMNLPPASVHSWEDLCQQFTMNFQGTYPRPGEEADLHAVQRGDDESLRSYIQRFCQVRNTIPCIPAHAVIYAFRGGVRHNRMLEKIASKDVTTRRHLHRLRRVVADSVRRSASPADCRSTVALGIPNRAAAFFRFGRRSRRRRRPG

SEQ ID NO: 120716 - protein, 74 aa, Oryza sativa
  Clone ID: PAT_MRT4530_23810C.1.pep
PDMQTPTSQAVNQLFNVELTAFSKAGPGEYSFTMESTIGMECGLLPTLAKRKETIQLLLLPYSFQYDPVLGLIL

SEQ ID NO: 120717 - protein, 114 aa, Oryza sativa
  unsure (1)..(114): unsure at all Xaa locations
  Clone ID: PAT_MRT4530_23811C.1.pep
KRRPAFHKGVVXVKGKMSTSGYATTSTTHAXLKKIAKKAKVPLQKVVVRNDSPCGSTVGPILSAKLGLQTIDVGCPQLAMHSIREFADTSSIEQATSLFSTFFSELPEVLHSVQ

SEQ ID NO: 120718 - protein, 478 aa, Oryza sativa
  Clone ID: PAT_MRT4530_23812C.1.pep
MAGAAAASAAAAAVASGISARPVAPRPSPSRARAPRSVVRAAISVEKGEKAYTVEKSEEIFNAAKELMPGGVNSPVRAFKSVGGQPIVFDSVKGSRMWDVDGNEYIDYVGSWGPAIIGHADDTVNAALIETLKKGTSFGAPCVLENVLAEMVISAVPSIEMVRFVNSGTEACMGALRLVRAFTGREKILKFEGCYHGHADSFLVKAGSGVATLGLPDSPGVPKGATSETLTAPYNDVEAVKKLFEENKGQIAAVFLEPVVGNAGFIPPQPGFLNALRDLTKQDGALLVFDEVMTGFRLAYGGAQEYFGITPDVSTLGKIIGGGLPVGAYGGRKDIMEMVAPAGPMYQAGTLSGNPLAMTAGIHTLKRLMEPGTYDYLDKITGDLVRGVLDAGAKTGHEMCGGHIRGMFGFFFTAGPVHNFGDAKKSDTAKFGRFYRGMLEEGVYLAPSQFEAGFTSLAHTSQDIEKTVEAAAKVLRRI

SEQ ID NO: 120719 - protein, 466 aa, Oryza sativa
  Clone ID: PAT_MRT4530_23813C.1.pep
PLRGHQQLQPRRPQIGGGEREEGAGDDEEERAGSVVTRSPLCSILFYVLATAAAATATATLVGNITADEEYWAKRSEVARSFNRAAYVSDPVATLNRFNADVLRATTRRSLARYTGPCMATNPIDRCWRCRDDWATDRKRLARCVRGFGHRTVGGAAGKIYVVTDASDDEMVIPRKGTLRYGVIQDRPMWIVFARDMIIQLRQELIVNHNKTIDGRGAQVHITGAQITLQGVQHVIIHNVHIHHSVPHGGGMIRDSKRHYGLRTRSDGDGISIMSSSNIWIDHVSMSNCSDGLIDAVSGSTAITISNGHFTKHDHVMLFGASNSDAQDEVMQITVAFNHFGKGLVPRCRFGFFHVVNNDYTHWLMYAIGGNMNPTIISQGNRFIAPDDLNAKEVTKREYTPYDEYKEWVWKSQGDVMMNGAFFNESGGQNERSYDQLDFIPAKHGKYVGQLTKFAGTLNCHVGMPC

SEQ ID NO: 120720 - protein, 450 aa, Oryza sativa
  Clone ID: PAT_MRT4530_23814C.1.pep
MDIYTTSHHSTIMAASSVTGSRRLCILFYLLTVVATVVTAASAHTAHNATADEEYWEKRAEEARSFNRAAYVSDPVATLNRFNADVLRATTRRSLARYTGPCMATNPIDRCWRCRDDWATDRKRLARCVRGFGHRTVGGAAGKIYVVTDASDDEMVIPRKGTLRYGVIQDRPMWIVFARDMIIQLRQELIVNHNKTIDGRGAQVHITGAQITLQGVQHVIIHNVHIHHSVPHGGGMIRDSKRHYGLRTRSDGDGISIMSSSNIWIDHVSMSNCSDGLIDAVSGSTAITISNGHFTKHDHVMLFGASNSDAQDEVMQITVAFNHFGKGLVPRCRFGFFHVVNNDYTHWLMYAIGGNMNPTIISQGNRFIAPDDLNAKEVTKREYTPYDEYKEWVWKSQGDVMMNGAFFNESGGQNERSYDQLDFIPAKHGKYVGQLTKFAGTLNCHVGMPC

SEQ ID NO: 120721 - protein, 150 aa, Oryza sativa
  Clone ID: PAT_MRT4530_23815C.1.pep
MARTLPLSIIMEAAAKTASKKEGSGRRADPSSVVVLPYSRLPRHALGEIEKLLGKLKPARVDPGDLQTFLGSSAATEETMELRMRASSSAIGASSSRTHAAGMKHSIVAATDSRMVDINELDEWAAGGGSTTSALVPIIPTVKRLFSTAR

SEQ ID NO: 120722 - protein, 33 aa, Oryza sativa
  Clone ID: PAT_MRT4530_23816C.1.pep
EADLHSARKDPQSISKWELIQLPLWYSLETYSL

SEQ ID NO: 120723 - protein, 203 aa, Oryza sativa
  Clone ID: PAT_MRT4530_23817C.1.pep
MAEEEARMRNSIVSSVAAEDPRKVWRSPGSTRAGFSFPSSFSISPASASRSSTNTSPSVGTYKKVRRRRQRQHRLRWLRQQWRRVLKGARPQRPRAWRGRREYGRTTTLLGSARRPLPSFLDAVLAAASMIIERGRVLAITEGDAWSIEKRLREKVEGGEKKEREKETYVTLTCGPYMMTQQHGAGEAKLLTSSSRRPHIRIA

SEQ ID NO: 120724 - protein, 47 aa, Oryza sativa
  Clone ID: PAT_MRT4530_23818C.1.pep
VGNTHAATLLPYYAWTDVGTLHLNLSLGVTHTTTTATPTTDTTRLPS

SEQ ID NO: 120725 - protein, 337 aa, Oryza sativa
  Clone ID: PAT_MRT4530_23819C.1.pep
MSSSSNSDSGKKGGNPLEAMGAFFSSQVNRRKLVTSEKQALATRLSAGGEAFPGSEHRPADRKTWMAELGPERLRVHQLVWPGTHDSATNKIGIPFVTRPFAQCQSLSVYEQLAAGARVIDVRVQEERRVCHGVLATYSVDVVLDDVRRFLGETASEVVILEVRTEFGHDDPPEFGRYLVEQLGEHLIPQDEAVFHKTIAELLPRRLICVWKPRKSPAPKPGEPLWSAGYLRDNWIDTDLPETKFESNVKFLGEQPPVADRRFFYRVENTVTPQADNPVLCVRPVTRRIHGYARLFIAEVFAKGLGDKLQVFSTDFIDGDFVDACAGVTKARVDGAA

SEQ ID NO: 120726 - protein, 290 aa, Oryza sativa
  unsure (1)..(290): unsure at all Xaa locations
  Clone ID: PAT_MRT4530_2381C.1.pep
MILLARWFSNQYVAISRTATSIGVREMILLARWFSNQYVAISRTXNFHWCSRDNSTRWFSNQXIVAISRTXNFHWCSRDNSTRXVLEPWLSXGYTWFSTSGVAILPLALLLVVELKLHLVFDQRCSDTPASFTSRGRVKAXTWFSTSGVAILXPLHPLPVVELXLLHGPRPVWSSWGYXLIFDQQCSDPPITSTPAKLISGTQYRQVFYPEIPYHXRHLDLKPILMSLYAVLTRPLRNLRELWLGMPRADKALSDHVETNDHTLRLLDHSRTVGGSQQGIRNEEMVYSPR

SEQ ID NO: 120727 - protein, 128 aa, Oryza sativa
  unsure (1)..(128): unsure at all Xaa locations
  Clone ID: PAT_MRT4530_23820C.1.pep
MPPKKIYAPFHQPGQLFLKKTVYSGGFFLEPKKQAPPEGLPVNPPPRGSPHEVDAPPKKLPGYFPHGAVYHPPKKIXGGKKGPPPSAGPGQKNSQKPPQVGSKPKEKTPPPKKKKKKKKKKKKKTPPP

SEQ ID NO: 120728 - protein, 105 aa, Oryza sativa
  Clone ID: PAT_MRT4530_23821C.1.pep
MRCGGRGLAGSWLHASVPLPIPRAGDGGRGRDGGEGGIGGGKSGAYLDDIPRVMLSPIVVPRFKPPDPSSSSDLRHRSSSSPAPSHSSLLDPSVASTAASMTCPV

SEQ ID NO: 120729 - protein, 139 aa, Oryza sativa
  Clone ID: PAT_MRT4530_23822C.1.pep
MEDLQSCKYYQSSSIPNLKKAMWQSEEDIMDSDRESYRLVQPGTHQFWERMEVFIHEDYVNKRNEVRREQRRKQLQMEQALAGVSPPAPEPRESPRVPAQCLTLTGGPSTTVGSPTASATAAEAAETVGHRLFDCLKPY

SEQ ID NO: 120730 - protein, 56 aa, Oryza sativa
  Clone ID: PAT_MRT4530_23823C.1.pep
LPPPPPPPLHPWKHADYKRPGTWILKRALRRFKYTPHDIVLMFIRKPWINIKAFGF

SEQ ID NO: 120731 - protein, 162 aa, Oryza sativa
  Clone ID: PAT_MRT4530_23824C.1.pep
GYQEFRTVAGRHYDTMKTYYQKAAMAYSKGEKSYASYLAEEGKHYRELARMEDERASREIFEARNKHITNTVTIDLHGQHVKQAMRLLKVHMMICVCMPTTFLRVITGCGVEGTGKGKIKRAVAELVEKEGVEWHEENAGTIVLRLGGPREYRFLEHDSDSD

SEQ ID NO: 120732 - protein, 72 aa, Oryza sativa
  Clone ID: PAT_MRT4530_23825C.1.pep
YGNLIFMQLLDKSNIFFPVSFFFENLFVLNCKMKIMSLVIFSPFDFEEQQVGACQLLAPRTVLAMQLISNQF

SEQ ID NO: 120733 - protein, 77 aa, Oryza sativa
  unsure (1)..(77): unsure at all Xaa locations
  Clone ID: PAT_MRT4530_23826C.1.pep
SAFLHASLSRTRRRSLLSAGSVAPCCLPXAVASPASRRHLCRPLLPSFFSVGHQRNSTTRATEPVCTIDSKGGRTRR

SEQ ID NO: 120734 - protein, 1062 aa, Oryza sativa
  unsure (1)..(1062): unsure at all Xaa locations
  Clone ID: PAT_MRT4530_23827C.1.pep
MARLPLRSRATLLRRRPQLRVVPAEQPVFPAPRCCDFTMAGFADALRPDKFTGVHFKRWHIRVTLWLTAMKCFWQKQFEEATTLFVECILSVLGDRLVEVYMHMTDAKELWDALNTKFGATDASNDLYIMEQFHDYKMADNRSVVEQAHEIQTMAKELELLKCVLPDKFVVGCIIAKLPPSWRSFGPEQEKGKYKAQQTTNFKKQKKNNNNPNQDERTCFVCGQPGHLARKCPQRKGMKTPTSQTSKSANVTIGNTGDRSGYGRTGFHRPSGEWVTCFYSWCWHGRYEVYFGKDRAAEERATCPFYRQESCYECGGLFRFSLSDFCNKSVNHICGSVDDEANVWHSRLCHINFGLMSRLSSMFLIPKFSIVKGSKCHSCVQSKQPRKPHKAAEERNLAPLELLHSDLCEMNGVLTKGGKRYFMMLIDDATRFCYLYLLKTKDEALDYFKIYKAEVENQLDRKIKRLRFDRGGEFFSNEFDLFCEEHGIIHERTPPYSPESNGIAKRKNRTLTDLVNAMLDTAGLPKARWAEALLTSNHVLNRVPNRNKDKTPYEIWIRRKPSLSYLRTWGCLAKVNIPITKKRKLGPKSVDCVFLGYAHHNIAYRFLIVKSEVPDMHVGTIMESRDATFFENFFPMKDAHSSLSQPSEVIPSPITPPEQTEHTHEHVTEEDVSEAPRRSKRQRTAKSSGDDFTVYLMDDTPKSILEAYASPDADYWKEAIRSEMDSIIANRTLEVTERPYGCKPVGCKWVFKKKLRPDASHGLLVHQMDVKTAFLNGELDEEIYMDQPDGFVVEGQEGKVCKLLKSLYGLKQAPKQWHEKFDKTLTSTGFAVNEADKCVYYRHGGGEGVILCLYVDDILIFGTNLEVINEFYYVEKILNRFGYIDSKPSPTPYDPSLLLRKNKRIARNQLEYSQIIGSLMYLASATRPDISFVGYSDSNWISNVDEIKATSGYVFTLGGGAISWRSCKQIILTRSTMEAELTALDTATVEAEWLRDLLMDLPIVEKPTCEKTIEVCQEIEKLRSYNVGLHPNSXKPGRSLHEGTITKCDRQCIEGDGFETHV

SEQ ID NO: 120735 - protein, 337 aa, Oryza sativa
  Clone ID: PAT_MRT4530_23828C.1.pep
MLVVVARKSSSSARVAAHRHISTHLDTTATATATMTAGQPLRDDPQPRRHSPPALHPAVVPAYPPPESDADESWVWSQIKAEARRDADAEPALASFLYATVLSHPSLDRSLAFHLANKLCSSTLLSTLLYDLFVASLAAHPTLRAAVVADLLAARSRDPACVGFSHCLLNYKGFLAIQAQRVAHVLWAQDRRALALALQSRVADVFAVDIHPAAVVGKGVLLDHATGVVIGETAVIGDNVSILHHVTLGGTGKAVGDRHPKIGDGVLIGAGATILGNVRIGAGAKIGAGSLVLIDVPPRTTAVGNPARLLGGKKGDDMPGESMDHTSFIQQWSDYSI

SEQ ID NO: 120736 - protein, 1260 aa, Oryza sativa
  unsure (1)..(1260): unsure at all Xaa locations
  Clone ID: PAT_MRT4530_23829C.1.pep
MAGFADALRPDKFTGVHFKRWQIRVTLWLTAMKCFWVSTGKPEGILTVDQQKQFEEATTLFVGCILSVVGDRLVEVYMHMTDAKELWDALNTKFGATVASNDLYIMEQFHDYKMADNRSVVEQAHEIQTMANELELLKCVLPDKFVAGCIIAKVPPSWKSFGTALKHKKQEYSVEGLIASLDVEEKAREKDAASKGDGGRSSANVVHKAQNKSKGKYKAQXLVCGQPGHLARKCPQRKGIKAPVGQTSKSANATIGNTGDGSGYGNLPTVFSVNQSTNWWVDTGANVHVCADISLFSSYQVARGSTVLMGNGSHASVHGVGTVDLKFTSGKNVQHVPSIDRNLVSGSRLNRDRFKLVFESNKVVMSKHGYFIGKGYECGGLFRFSLSDFCNKSVNHICGSVDDEANVWHSRLCHINFGLMSRFSSMYLIPKFSIVKGSKCHSCMQSKQSRKPHKAAEERNLAPLELLHSDLCEMNGVLTKGGKXYFMTLIDDATRFCYVYLLKTKDEALDYFKIYNAEVENQLDRKIKRLRSDRGGEFFSNEFDLFCEKHGIIHERTPSYSLESNGIAERKNRTLTDLVNAMLDTTGLPKAWWGEALLTSNHVLNRVPNRNKDRTPYEIWIGRKPSLSYLRTWECLAKVNVPITKKRKLGPKTVDCXFLGYAHHSIAYRFLIIKSEVPDMHVGTIMESRDATFFESFFPMKDTHSSSSQPSEVIPNSITPPEQTEHTHEHVTEEDVSEAPRRSKRQRTAKSFGDDFTVYLVDDTPKSISEAYASPDADNXKEVVCSEMDSIIANGTWEVTERPYGCKPVGCKWVFKKKLRPDGTIEKYKARLVAKGYIQKEGEDFFETYSPVARLTTIRVLLFLAASHGLLVHQMDVKTAFLNGELDDEIYMDQPDGFVVEGQEGKVCKLLKSLYGLKQAPKQWHEKFDKTLTSAGFAVNEADKCVYYRHGGGEGVILCLYVVDILIFGTNLXVTNEVKSFLSXNFDMKDLGVADVIXNIKLIRGENGITLLQSHYVEKILNRFCYIDSKPSPTPYDPSLLIRKNKKIARNQLEYSQIIGSLMYLASATRPDISFAVSKLSRFTTNPEDDHWRALERVMCYLKGTMESGLHYTGYPAVLEGYSDSNXISDVDEIKATSGYVFTLGGGAVSWRSCKQTILTRSTMEAELTALDTATVEAEWLRDLLMDLPIVEKPVPAILMNCDNQTTCEKTIEVCQEIEKLRSYNVGLHPNSXKPGRSLHEGTITKCDRQCIEGDGFETH

SEQ ID NO: 120737 - protein, 81 aa, Oryza sativa
  Clone ID: PAT_MRT4530_2382C.1.pep
LRGHIRRGFRGGDTCVIPPPKFHHQPLPRPDTTLRCGNTAVGVPTVTVSLPSPLNVTVWRLTVARASPGRENPWSVARRGH

SEQ ID NO: 120738 - protein, 209 aa, Oryza sativa
  Clone ID: PAT_MRT4530_23830C.1.pep
KVSPPTTTLRSALTRAFSNVWSRCRATVVLPPCSTTRARRPATCQAARRDGAGWATISGGQPKQPTRRPARRDGTRRGRRARIFGGDEQPTYVARASRRIPSRPFLKQVPIRSPFCLISSSVPPLLLAREFLGWIETAGCHLSAGEAQDAEAMPPSPRFSFSQIWRGGRRVVAWRGPRPALRDGGSMKSADGGASVRCGGSLVVGRTGS

SEQ ID NO: 120739 - protein, 188 aa, Oryza sativa
  unsure (1)..(188): unsure at all Xaa locations
  Clone ID: PAT_MRT4530_23831C.1.pep
KHVWWREDGNTRALARLAWKAARVHDVRVEWSAKLAHHPCADEASFCRFVLLQKIRICFVLEIFRKIRCVKTAWSPXSYARLIRFGYAEWRSYGRLCAAPSLVDYSIPLAGVHRRSGEQVSGTSAFDVLHRKKAAIRFLGSASRDCSLFVRDGSPSSPLACFAPSSTLATASSSCRATGLSATSLSRR

SEQ ID NO: 120740 - protein, 930 aa, Oryza sativa
  unsure (1)..(930): unsure at all Xaa locations
  Clone ID: PAT_MRT4530_23832C.1.pep
MADNRSIVEQAHEIQTMAKELELLKCVLPDKFVAGCIIAKLPPSWRSFGTALKHKRQEYSVEGLIASLDVEEKAWEKDAASKGDVNQSINWWVDTGANVARGSTVLMRNGSHASVHGVGMVDLKFTSGKIVQLKNVQHVPSIDRNLVSGSRLTRDGFKLVFESNKVVVSKHGYFIGKGYECGCLFRFSLFDFCNKSVNHICGSVDDEANIWHSRLCHINFSLMSRLSSMCLIPKISIVKGSKCHSCVQSKQLRKPHKAAEERNLAPLELLHSDLCEMNGVLTKGGKRYFMTLIDDATRFYYVYLLKTKDEALDYFKIYKEHGIIHERTPPYSPESNGIAERKNRTLTDLVNAMLDTAGLPKAWWGEALLTSNHVLKRVPNKNKDKTPYEIWIGRKPSLSYLRIWGCLTKVNVPITKKHKLGPKTVDCVFLVYAHHNIAYRFLIVKSEVPDMHVSTIMESRDATFFESFFPMNDTHSGSSQPFEIIPISITPPEQTEHTHEHITEEDVSEAPRKSKRQRTAKSFGDDFTVYLVDDTPKSISEAYASPDADYWKEAVCSEMDSIIANGTWEVTERPYGCKHVGCKWVFKKKLRPDGTIEKYKARLVAKDYTQKEGEDFFDTYSPAARLNTIHVLLSLAASHGLLVHQMDVKTTFLNGELDEEIYMDQPDGFVVEGQEGKVCKLLKSLYGLKQAHKQWHEKFDKTLTSAGFTVNEADKCVYYRHGGREGVILCLYVDDILIFGTNLEVINEVKSFFSQNFDMKDLGVADVILNIKLIRGENRITLLQSHYVEKILNCFGYIDSKPSPTLYNPSLLLRKNKRNGRDQLEYSEIIGSLMYLASATRPDISFAASKLSRFTSNPGDDHWCALERVMRYLKSTMELGLHYTGYPAVLEGYTDSNWISDVDEIKSTSGYVFTLGXGVVSWRSCKQTIL

SEQ ID NO: 120741 - protein, 383 aa, Oryza sativa
  Clone ID: PAT_MRT4530_23833C.1.pep
MADNRSVVEHAHEIQTMAKELELLKCVLPDKFVAECIIAKLPPSWRGFGTALKHKRQEYSVEGLIASLDVEEKAREKDAASKGDGGQSTANVVHKAQNKSKGKYKAQQTTNFKKKKNNNNPNQDERTCFVCGQPGHLARKCPQRKGMKAPAGQTSKSANVTIGNTGDGSGYGNLSTVFSVNQSTNWWVDTGGNVARGSTVLMGNGSYASIHGVGTVGRAEPTNCYSQKCKGNFTLRKCSLRLAAEDEIHALLAIMELGAFLHSLLLRPAARDEINAFMSAWSSARSSAYSAPVWQSPLLIPSSSTWVPSSLIDVLASILTELIVGPCCPIITLDQAEVTEAFRAFDCKGNGFISAIELTRSIADTATPTASSSFYLTVGPITH

SEQ ID NO: 120742 - protein, 1119 aa, Oryza sativa
  unsure (1)..(1119): unsure at all Xaa locations
  Clone ID: PAT_MRT4530_23834C.1.pep
MAKELELLKCVLPDKFVAGCIIAKLPPSWRSFGTALKHKRQEYSVEGLIASLDVEEKAREKDAASKGDGGQSSANVVHKAQNKSKGKYKAQQTTNFKKKCPQRKGMKALAGQTSKSANVTIGNTGDGSGYGNLPTVFSVNQSTNWWVDTGANVARGSTVLMGNGSHASVHGVGTVDLKFTSGKIVQLKNVQHVHSIDRNLVSGSRLTRDGFKLVFESNKVVVSKHGYFIGKGYECGGLFRFSLSDFCNKSVNHICGSVDDEANVWHSRLCHINFGLMSRLSSMCLIPKFSIVKGSKCHSCVQSKQPRKPHKAAEERNLAPLELLHSDLCEMNGVLTKGEKRYFMTLIDDATRFCYVYLLKTKDEALDYFKIYKAEVENQLDRKIKRLRSDRGGEFFSNEFDLFCKEHGIIHERTPPYSPESNGIAERKNRTLTDLVNAMLDTAGLPKAWWGEALLTSNHVLNRVPNRNKDKTPYEIWIGRKPSLSYLRTWGCLAKVNVPITKKRKLGPKTVDCVFLGYAYHSIAYRFLIVKSEEDVSEAPRRSKRQRTAKSFGDDFTVYLVDDTPKSISEAYASPDADYWKEAVRSEMDSIIANGTWEVTERPYGCKPVGCKWVFKKKLRPDGTIEKYKARLVAKGYTQKEGEDFFDTYSPVARLTTICVLLSLAASHGLLVHQMDVKTTFLNGELDEEIYMYQPDGFVVEGQEGKVCKFLKSLYGLKQAPKQWHEKFDKTLTSAGFAVNEADKCVYYRHGGGEGVILCLYVDDILIFGTNLEVINEVKSFLSQNFDMKDLGVADVILNIKLIRGENEITLLQSHYVEKILNRFGYIDSKPSPTPYDPSLLLRKNKRIARNQLEYSQIIGSLMYLASATRPDISFAVSKLSRFTSNPGDDHWRALERVMRYLKGTVELGLHYTGYPAVQEGYSDSNWISDVDEIKATSGYVFTLGGGAVSWRSCKQTILTRSTMEAELTALDTATVEAEWLRDLLMDLPVVEKPVPAILMNCDNQXRHVKRRLKSVRKLRNSGVITLDYIQTARNLADPFTKGLSRNVIDNASKEMGLRPILNHYMSIISTWRRLKEIASEKQKKPTIRSITEIEEHTCMAGREKSVEKEIVLYSYVPP

SEQ ID NO: 120743 - protein, 63 aa, Oryza sativa
  Clone ID: PAT_MRT4530_23835C.1.pep
MKVPDRIDIPNQRMWYNRLNVEKDPFRPKEDGEDVLGPDFPYLSAIGALMYLANSTRPDIAFS

SEQ ID NO: 120744 - protein, 40 aa, Oryza sativa
  Clone ID: PAT_MRT4530_23836C.1.pep
IVAAVHLETGARLSPAPHDHHGSLPDNRQPHRRPHRPAAP

SEQ ID NO: 120745 - protein, 919 aa, Oryza sativa
  Clone ID: PAT_MRT4530_23837C.1.pep
MKCFWVSTGKPMGVLNVDQQKEFDEATTLFVGCILSVLGDRLVKVYMHMTDAKELWDALNTKFGATDASNDLYIMEQFHNYKMADNRSVVEQAHEIQTMVKELELLKCVLPDKFVVGCIIAKLPLSWRGFGTALNHKRQEYSVEGLIASLDVEEKAREKDAASKGDGGQSTANVVHKALNKSKGKYKAQQTTNFKKKNNNNNSNQDDRTCFVCGQPGHLARKYPQRKGMKAPAGQTSKSANVTIGNTGDGSGYGYECGGLFRFSLSDFCNKSVNHICGSVDDEANVWHSRLCHINFGLMSQLSSMCLIPKFSIVKGSKCHSCVQLKQPRKPHKAAEERNLAPLELLHSDLCEMNGVLTKGGKRYFMTLIDDATRFCYVNLLKTKDEALDYFKIYKAEVENQLDRKIKRVRSDRGGEFFSNEFDLFYEEHGIIHERTPPYSPESNGITERKNRTLTDLVNAVLDTVGLPKAWWGEALLTSNHMLNRVPNRNKNKTPYEIWIGRKPSLSYLRTWGCLVKVNVQITKKRKLGPKTVDCVFLGYAHHSIAYRFLIVKSEWKEAVHSEMDSIIANGTWEVTERPYGCKPVGCKWVFKKKLRPDGTIEKYKARLVAKGYTQKEGENFFDTYSPVARLTTSRVLLSLAASHGLLVHQMDVKTAFLNGELDEEIYMDQPDGFVVEGQEGKVCKLLKSLYGLKQTPKKWHEKFDKTLTSAGFAVNEANKCVYYRHGGGEGVILCLYVDDILIFGTNLEVINEVKSFLSQNFDMKDLGVADVILNIKLIRGENGITLLQSHYVEKILNRFGYIDIMEGYSDSNWISDVDEIKATSGYVFTLGGGAVSWRSCKQTILTRSTMEAELTALDTANVEAEWLRDLLMDLPIVEKPVPAILMNSDNQTTCEKTIEVCQEIEKLRSYNIGLHPNS

SEQ ID NO: 120746 - protein, 107 aa, Oryza sativa
  Clone ID: PAT_MRT4530_23838C.1.pep
MGCNTVKNHPKPSSRRGERSPSFLSPDLDPLALFLPVRSSRSRVVIVFVVLPGISNAVAASWTSPTPFSCTTTSFISADTYVFAWTSSTVSLLNSTPSEPPFAAGRL

SEQ ID NO: 120747 - protein, 858 aa, Oryza sativa
  Clone ID: PAT_MRT4530_23839C.1.pep
MRPDYSIPLASVHRRSGEQVSGTSAFDVLHREKAAIRHCDFTMAGFADALRLDKFTGVHFKRWQIRVTLWLIAMKCFWVSTGKPEGVLTAEQQKQFEEATTLFVRCILSVLGDRLVEVYMHMTDTKELWNALNTKFGATDASNDLYIMEQFHDYKMADNRSVVEQTHEIQTMAKELELLKCVLPDKFVAGCIIAKLPTSWRSFGTALKHKRQEYSVEGLIVSLDVEEKAREKDAASKGDGGQSSANVVHKAQNKSKGKYKAQQTTNFKNQKKNNNNLNQDERTCFVCGQVSHLARKCPQRKGMKASAGQTSKSANVTIGNTRDGSGYGNLPTVARGSTVLMGNGSHASVHGVGTVDLKFTSRKIVQLKNVQHVPSIDRNLVSGSRLTRDGFKLVFESNKVVVSKHGYFIGKGYECGGLFRFSLSDFCNKSVNHICGSVDDEANVWHSHYWKEAVRSEMDSIIANGTWEVTERPYGCKPVGCKWVFKKKLRPDASHGLLVHQMDVKTAFFNGELDEEIYMDQPDGFVVEGQEGKVCKLLKFLYGLKQAPKQWHEKFDKTLTSAGFAVNEADKCVYYHHGGGEGVSLCLYVDDILIFGTNLEVINEVKSFLSQNFDMKDLGVADVILNIKLIRGENGITLLQSHYVEMILNRFGYIDSKPSPTPYDPSLLLRKNKRIARNQLEYSQIIGSLMYLASATRPDISFAGYSDSNWISDVDEIKATSGYVFTLGGGAASWSSYKQTILTRSTMKTELTALDTATVKTEWLRDLLMDLPIVEKPEPAIHMNCDNQMVVKVNSSKDNMKSSRHVKRRLKSVRKLRNSKVITLHYIQTARNLVDPFTKGLSRNVIDSASKEIGLRPM

SEQ ID NO: 120748 - protein, 164 aa, Oryza sativa
  Clone ID: PAT_MRT4530_2383C.1.pep
MWAPQESDGAWGSLPGDRAGPPLPVRPGALSEVLRPRSEERQREKKCARHGRRRQVRAAEKRNTLLLCSGGSVCEGIQRAESEREAHASCPARPLFPVDAHFNLHLMASDFLAILALKPGTNLTGTDIPTPGVGTPAPARDKSQEALIIPTGRGEACDRSPIAT

SEQ ID NO: 120749 - protein, 159 aa, Oryza sativa
  Clone ID: PAT_MRT4530_23840C.1.pep
MAGLSLELADGERRLGWGRVQQRNCRGGPCEHVGVRADEQATATAVVCSSRKTSYSGGGSWGMQCLTVQLKGVGEVQEASTALEMPGNTMNTMRTRERLDLAIKTPNKRLNELEHCMQSLFGQGKGSGAHRTGRNKANVSRSGLRKEGERSPRLELGLG

SEQ ID NO: 120750 - protein, 210 aa, Oryza sativa
  unsure (1)..(210): unsure at all Xaa locations
  Clone ID: PAT_MRT4530_23841C.1.pep
MVRNWISYVTIILFCCRKIRICFVXLETFRKIRCVKTAWSPDXLRTTYPVRCGVRISYARLIRFGYAEWRLCGRPDQATYLYINRAAAFTQHTRNQSRVCLLLCAAPSLIGYSIPLAGVHLRSEEQVSGTSAFDVLHREKXAVRFLGSASRDCSLFVRDGSPSSSFACCAPSSTLATASSSCRATGLSATLPPPSPLPAAHSASSPRARR

SEQ ID NO: 120751 - protein, 475 aa, Oryza sativa
  Clone ID: PAT_MRT4530_23842C.1.pep
MAFHVFLIAALLLLPLPAAFSKAVRTQSLLANPLSPDPITQEQQLSLAAPRTNASTLHFRLAHREHFALNATASDLLAHLLARDAARAAALLAAPNNATRPRRRGGFAAPLLSGLPQGSGEYFAQVGVGTPATTALMVLDTGSDVVWLQCAPCRHCYAQSGRVFDPRRSRSYAAVDCVAPICRRLDSAGCDRRRNSCLYQVAYGDGSVTAGDFASETLTFARGARVQRVAIGCDHDNEGLFIAASGLLGLGRGRLSFPSQIARSFGRSFSYCLVDRTSSVRPSSTRSSTVTFGAGAVAAAAGASFTPMGRNPRMATFYYVHLLGFSVGGARVKGVSQSDLRLNPTTGRGGVILDSGTSVTRLARPVYEAVRDAFRAAAVGLRVSPGGFSLFDTCYNLSGRRVVKVPTVSMHLAGGASVALPPENYLIPVDTSGTFCFAMAGTDGGVSIIGNIQQQGFRVVFDGDAQRVGFVPKSC

SEQ ID NO: 120752 - protein, 156 aa, Oryza sativa
  unsure (1)..(156): unsure at all Xaa locations
  Clone ID: PAT_MRT4530_23843C.1.pep
KRHGVRISYARFIRFGYAQWRSCGRPDQATLLYINRPTVFTQHTKNQSRVCLLLCAAPSLVNYSIPLAGVHRRSGEQVSGTSAFDVLHREKAAIRFLGSAXRDCSLFVCDGLSSSSLACCAPSXTPAIAKSSCRAACLSTTSVRVQSNNMRSKSRE

SEQ ID NO: 120753 - protein, 497 aa, Oryza sativa
  Clone ID: PAT_MRT4530_23845C.1.pep
MATYLMYPGTGTISQQNETRQKRYKEMSIDGVTEEFSGDYQTQIDINLLADQLEAKLCDVPLDDGGRRHGSPECHISIVKPQVRLVDVSQYAPQVLLVGAYHHRSLDRCELDKLAALRRALPDGDDERASTLRRYLAAIAGLESEARSYYRDDTDDMGAEEFALMLLLDGWYILHYFGVGVGGGGRAVDIFAVRDVFYLLENQIPFFILEKVYELIHSPPPSPGATAIAGGGSSSSSVVVVDGFVRHLRSLLRDQGYSNLEVDITSTRPCHLVHLLHMHFTPMAMAPAADDAAAVPIPTRRARATVYRWRGATQYHAAGVRFKRRALGLGDARCVLDVELRRLTLHVPTLTVDNNTWRVLRNLMALEQNNPNLGSHVTAYCLFMSHLAGTANDVALLASKGVVVHFMGCDEDVAKGFAGLCRGVALSVDDARQNYLQPTWEKMERRYSSRPVNWMALLRRRHLSNPLVATALLAAIVGLVCEVLQAVYAVKSYKTRS

SEQ ID NO: 120754 - protein, 176 aa, Oryza sativa
  Clone ID: PAT_MRT4530_23846C.1.pep
MEKLCEHKLTLPELVSGVRRWRQCYAQRRRRQRRDAAYSASDDTPGFRQRQRCARLPSTAAALRATSIDGAAADPPSAASDILRLRFLVDAGAEADPVYPRILPLHLAWIPPAHISGMLLVELGLEDQIGMRKMNWRGCRRHPVAGASEAAQKAALLLRETLEVTGALPSRVNGID

SEQ ID NO: 120755 - protein, 205 aa, Oryza sativa
  Clone ID: PAT_MRT4530_23847C.1.pep
MEEDICQGETIAERKSLPPDPCHRHPPPSDSRRRNPLSPDPRPRDSSPPDPCPRDLLLPNLHPHDPRSLDPDRATPALQPNLGGRGEPGHRSFSLQCDRLVVVVASWTEAHRRLPSGAADLHYVALLASAKHGQVVLPLPPSAAIIDRRRCTPSLLLAREREIKKERKKERKREGLDLRGRGKKEGARDVYSLPRFLQARLPTPR

SEQ ID NO: 120756 - protein, 77 aa, Oryza sativa
  Clone ID: PAT_MRT4530_23848C.1.pep
MAGVVRSAACSGGEGERKTSWPEVVGLSAEEAKKVILKDMPDADIVVLPAGSPVTLDFRSNRVRIFVDTVAGTPTIG

SEQ ID NO: 120757 - protein, 450 aa, Oryza sativa
  Clone ID: PAT_MRT4530_23849C.1.pep
MEEDICQGEAIAGRKSLLPDPHHRHLPPSDSRHRDPLSPDPCPRDSSPSDPCPRDSLLPDLHRHDLPSPDPDRATPSPPTKSRRGRGEPGHRNCSDPYIDRVRRCERSAMSSGGKQDGAAAAGEEERKTSWPEVVGLPVEEAKKVILKDMPDADIVVLPAGSPAEDHRCLIYLLHRPSSSPPWRRIQWYRTPPQSDLSPTLSPPVSFAAMEEDICQGETIAERKSLPPDPCHRHPPPSDSRRRNPLSPDPRPRDSSPPDPCPRDLLLPNLHPHDPRSLDPDRATPALQPNLGGRGEPGHRSFSLQRDRLVVAAAYGTEPHHRLPSAAADLHYVALLAAPKHGQHLKSTACKNTSIFVGGPLNPAANEDPFSLPTLVKISLVVFTGGEGERKTSWPEVVGLSAEEAKKVILKDMPDADIVVLPAGSPVTLDFRSNRVRIFVDTVAGTPTIG

SEQ ID NO: 120758 - protein, 1203 aa, Oryza sativa
  Clone ID: PAT_MRT4530_2384C.1.pep
MSAAATTGGGGERRSLRGMFKFADRVDVLLMALGTLGAIGDGCSTNLLLIFASDVMNSLGYARAGAHGGAAAATGVDFMREVEKSCLNFVYLAFAVLAVAFMEGYCWSRTSERQVLRIRYLYLQAILRQEVGFFDSQEATTSEIINSISKDASLIQEVLSEKVPLFLMHSTVFISGLAFSTYFSWRLALVSFPLVLLLIIPGLIYGKYLLYLSRQSRHEYTNANSLVEQALGSIKTVYSFTAEKRIIQRYTAVLDKTIKLGIRQGIAKGLAVGFTGLSFAIWAFLAWYGSRLVMYHHESGGRIYAAGISFVLGGLSLGMALPELKHFTEASVAATRILDRINRVPEINADDPKGLILDQVRGELQFESVRFVYPSRPNMTVLKDFNLQIPAGQTVALVGSSGSGKSTAIALVQRFYDATEGTVKVDGVNIKELQLKWIRSKMGLVSQDHALFGTSIKENILFGKPDATMDELYAAAMTANAHNFIRGLPEEYETKIGERGALLSGGQKQRIAIARAVIKNPAILLLDEATSALDSESEKLVQHALDQASMGRTTLVVAHKLSTVKNADQIAVVDGGTIAEIGTHDELINKGGPYSRLVKLQKMGLFSGKDQYQPSQYVQSKSNATYTRLLAMNAPEWRQAVIGSLSALVYGSLQPIYAITIGGMIAAFFVQDLKEMNAIISRYALIFCSLSVISIVVNLLQHYNFAYMGEHLVRRIRVQVLEKILTFEAAWFDEETNSSGSLCSRLSNEASLVKTLVADRISLLLQTASGIIIAVTMGLIVAWKLALVMIAVQPTTMICYYAKKIVLSNVSRDLAKAQHQSTQIAIEAVYNHRMVTSFGCSSKVLQLFEHTQEEPLKRARKKSWVAGITTGLSPCLSFLSWALDFWYGGKLAQSGEISAGDVFKTFFVLVSTGKLIADAGSMTSDLAKGANAVASVFEVLDRKSISPQNSQVEKDNQKNKIQGRIEFKRVDFAYPTRPQCLILQDFSLDVKAGTSIGLVGRSGCGKSTIIGLIQRFYDVDRGAVKVDGMDVREMDILWYRGFTALVSQEPAIFSGSVRDNIAFGKPEADEDEIVEAAKAANAHEFISSLKDGYHTDCGEHGLQLSGGQKQRIAIARAIIRNPAILLLDEATSALDAQSEQVVQEALDRIMSGRTTIVVAHRLNTIKNVDSIAFLGEGKVVERGTYPHLMSKKGAFYNLAALQK

SEQ ID NO: 120759 - protein, 48 aa, Oryza sativa
  Clone ID: PAT_MRT4530_23850C.1.pep
CQFLGLGLDSVKKAQEFRYSMWGIHYVEPAGLLYVISGIILHCYLHLN

SEQ ID NO: 120760 - protein, 82 aa, Oryza sativa
  unsure (1)..(82): unsure at all Xaa locations
  Clone ID: PAT_MRT4530_23851C.1.pep
IGGQKRALERCPSNGGQKYGQGMGFWVLKTKTRVEPWGGGXGTQNHPLDPPRVFWAKNPPLVIMMIRTTPTNGGEIKRREGP

SEQ ID NO: 120761 - protein, 166 aa, Oryza sativa
  unsure (1)..(166): unsure at all Xaa locations
  Clone ID: PAT_MRT4530_23852C.1.pep
TKFLIELDFPLIPVVKCSPLEMPSIPETLNGASVSNVLKTVSDSATDLIVELNSSEEVVNVRPNISELVQSAGRGVAVTGPAPVGSSYXFFSRFFCPKYGLNEDPVCGSVHCALAPYWGKKLGKQCMTASMASPRSGTLYLQWDEAAQRVQIRGEAVTVMVGNILV

SEQ ID NO: 120762 - protein, 103 aa, Oryza sativa
  Clone ID: PAT_MRT4530_23853C.1.pep
MEIAAFFTPATAAAEAVVAITRNWVFYFCMRTIVFAGGLLALFIGYVMAAYSKTWLDSLSLLPLLFAAVILPVYAAVAIQDARRLERERVVWIVRKALEIEGL

SEQ ID NO: 120763 - protein, 174 aa, Oryza sativa
  Clone ID: PAT_MRT4530_23854C.1.pep
MVTFAETSGSLLQSSEDDDDDEEDEEEDEEYGEDAMPVRSSGSLSPAHWRGASKSRGCFRCGKGGSFWARGDKEACLACGARYCGGCLLRAMGSMPEGRKCLDCIGRPVAESKRDSLGRGSRVLRRLLSATEVELVMRSERECAANQLRPEDVYANGTKLSPEELVMLQGCQCP

SEQ ID NO: 120764 - protein, 510 aa, Oryza sativa
  Clone ID: PAT_MRT4530_23855C.1.pep
MAADDDAEHETSPASASASSAPATRKRKRPGATATDGAPAQSADDAGGMCDDVLRNIFSRLPARAAVACTALSKHHRRLVTGAEFRRLHLLLGAPLPRPHVAYLATAPITRRGDDRVVSKFHGFHVAGAGMGIGAHAPMRALTDGRYENKSYVNTCNGVILLAMKKKTPSRSFILWNPAIADDEKKLTIPEGLQDNGEYYVAGLGYGRRSKTYKLLLCRLKCLSSKGPGGCRIFYRCAELVVYTLGAGAGAGDQPRTVLSGLDTKIKRQSLYLDGTIYLLDAEDSIVFAFDVDDETVTAIDLPGERSITKHASSKLMEMSGRVCVVTKDGTHTFSVWLLVAEDDHRWQRRCAIGESNIYYRSITAAWDHGDALLLLVDGSPYLYDITDERMTKTEMPIDVKPEEAAYTLCWGYKPTLVSPGSIVGDGDGDEEEGRRRRGRDRTADIVAAVRPVRERDVRRGRKATLDVTCFMEMLVRIMRELPGGMQDVIDMPLLNASLNVRYRYSDDED

SEQ ID NO: 120765 - protein, 69 aa, Oryza sativa
  Clone ID: PAT_MRT4530_23856C.1.pep
FFFFFFFFFFFFFFFFFFFFFFFIIKNVSTKHRVTNYMTCSWYHCTINKAEHYHTNTQAKCLLQINPGF

SEQ ID NO: 120766 - protein, 160 aa, Oryza sativa
  unsure (1)..(160): unsure at all Xaa locations
  Clone ID: PAT_MRT4530_23857C.1.pep
LRRRRRLLLLPPSLRRILPSPSDHSPSSTPPSPPRHFATPPPSPIPSPIPPRAEQRSRGFPSSCCFRLRDRVVRSHQRALCAKLCDLHGLTQLRTPRNRRPRLLLTTATRASRAAHTFPRTSAAKRLLQRRRKLARCPRPPXXRSLLLASWCGWVALAGR

SEQ ID NO: 120767 - protein, 57 aa, Oryza sativa
  Clone ID: PAT_MRT4530_23858C.1.pep
PPPYGSIFFKWKNPPFVNFEVACGFPQTGFYKVPLSCSDGSLSGFFFFPNPRPFQKL

SEQ ID NO: 120768 - protein, 290 aa, Oryza sativa
  Clone ID: PAT_MRT4530_23859C.1.pep
MGKDEVMESGGAAGEFAAKDYTDPPPAPLIDAAELGSWSLYRAVIAEFIATLLFLYITVATVIGYKHQTDASASGADAACGGVGVLGIAWAFGGMIFILVYCTAGISGGHINPAVTFGLFLARKVSLVRAILYIVAQCLGAICGVGLVKAFQSAYFNRYGGGANTLAAGYSKGTGLAAEIIGTFVLVYTVFSATDPKRNARDSHVPVLAPLPIGFAVFMVHLATIPITGTGINPARSIGAAVIFNNEKAWHNHWIFWVGPFVGAAIAAFYHQYILRAGAIKALGSFRSNA

SEQ ID NO: 120769 - protein, 356 aa, Oryza sativa
  unsure (1)..(356): unsure at all Xaa locations
  Clone ID: PAT_MRT4530_2385C.1.pep
MGLRDGFSNNKLLDDFGCGEIKPDRNISSDKIGTIVVNNLIYRDHSSLKLRGVPKDVRSHDIERVRNKEQLSTRVSCGRVHPIIENDLDKCRVVAPNLPTKTGDLSHSTGYGWAVXENGYVINQLWHFHWCSRDNSTRXVLEPVKAQSHAPHFNWCSRDNSTXLVLEQWSRDTYSLVLNQSIVAIXVHLLLVVELRLXLVLDQRYSNSPAIXSTSSGRVTTTTWFSTSGVAILPLPLLQVVGLGLQLVFDQRYNDPPITSTPKLISGTXYHQVFFPEIPYHXRHLELKPILMSLYAVLTRPLRNLRELRLGTPKADKALSDHVETNDHALRLLDHSRTVGGSLQGIRNEEMVYLPR

SEQ ID NO: 120770 - protein, 43 aa, Oryza sativa
  Clone ID: PAT_MRT4530_23860C.1.pep
GYGCPGLSGTAHAIRSRHLLLAHQLRIQLLSAAAYHQLLSAGQ

SEQ ID NO: 120771 - protein, 1443 aa, Oryza sativa
  unsure (1)..(1443): unsure at all Xaa locations
  Clone ID: PAT_MRT4530_23861C.1.pep
MDGRGRGRREVDLAAATGGEELGVSSGSGVSKAGPQAMRNRQRELREDGSRCGRPRMEERWEPESASSSSSATPPASMLDLTLLAALELRLIFLSRSGQSSTKPTRPSWPSSRHSSMRRWCSSIGELEPAARCRAEEDAEHVLRQVRPAAGCVRCSVFMCAPPWGKPPRSNDAFMLVFICNVMIYLWNKLNPYMPIISTIQKPYYRHCDFTMAGFADALRPDKFTGVHFKRWQIRVTLWLTAMKCFWVSTGKPEGVLTAEQQKQFEEATTLFVGCILSVLGDRLVEVYMHMTDAKELWDALNTKFGATDASNDLYIMEQFHDYKMADNRSVVEQAHEIQTMAKELELLKCVLPNKFVAGCIIAKLPPSWRSFGTALKHKRQEYSVEGLIASLDVEEKAREKDAASKGDGGQSSANVVHKAQNKSKGKYKAQQTTNFKKQKKNNNNPNQDERTCFVCGQVGHLARKCPQRKGMKAPAGQTSKSANVTIGNTGDGSGYGNLPTVFSVNQSTNWWVDTGANVARGSTVLMGNGSHASVHGVGTVDLKFTSGKIVQLKNVQHVPSIDRNLVSGSRLTRDGFKLVFESNKVVVSKHGYFIGKGYECGGLFRFSLSDFCNKSVNHICGSVDDEANVWHSRLCHINFGLMSRLSSMCLIPKFSIVKGSKCHSCVQSKQPRKPHKAAEERNLAPLELLHSDLCEMNGVLTKGGKRYFMTLIDDATRFCYVYLLKTKDEALDYFKIYKAEVENQLDRKIKRLRSDRGGEFFSNEFDLFCEEHGIIHERTPPYSPESNGIAERKNRTLTDLVNAMLDTAGLPKAWWGEALLTSNHVLNRVPNRNKDKTPYEIWIGRKPSLSYLRTWGCLAKVNVPITKKRKLGPKTVDCVFLGYAHHSIAYRFLIVKSEDVSEAPRRSKRQRTAKSFGDDFTVYLVDDTPKSISEAYASPDADYWKEAVRSEMDSIIANGTWEVTERPYGCKPVGCKWVFKKKLRPDGTIEKYKARLVAKGYTQKEDEDFFDTYSPVARLTTIRVLLSLAASHGLLVHQMDVKTVFLNGELDEEIYMDQPDGFVVEGQEGKVCKLLKSLYGLKQAPKQWHEKFDKTLTSAGFAVNEADKCVYYRHGGGEGVILCLYVDDILIFGTNLEVINEVKSFLSQNFDMKDLGVADVILNIKLIRGENGITLLQSHYVEKILNRFGYIDSKPSPTPYDPSLLLRKNKRIARNQLEYSQIIGSLMYLASATRPDISFAVSKLSRFTSNPGDDHWRALERVMRYLKGTVELGLHYTGYPAVLEGYSDSNWISDVDEIKATSGYVFTLGGGAVSWRSCKQTILTRSTMEAELTALDTATVEAEWLRDLLMDLPVVEKPVPAILMNCDNQXRHVKRRLKSVRKLRNSGVITLDYIQTARNLADPFTKGLSRNVIDNASKEMGLRPIAFLKELTFVSLTVGRSL

SEQ ID NO: 120772 - protein, 132 aa, Oryza sativa
  Clone ID: PAT_MRT4530_23862C.1.pep
SGWDGPLGLLGAGLDTAKSSSFGKHPSPFSLRLGRIWTCRVWSKGDHVTRLDRWEPELNEAIPNDERDTTMPTGWRRIKLQDHFCARPFGIKYGSYRSIIHLSISGDLTRDDVNFRWIPFRLASCATGTPNQ

SEQ ID NO: 120773 - protein, 58 aa, Oryza sativa
  unsure (1)..(58): unsure at all Xaa locations
  Clone ID: PAT_MRT4530_23863C.1.pep
FICFVVFSFIILLLQSLPLHGEFLAMVDDQQKXRITCMNDNLTQCXLRQXGKFTGQYH

SEQ ID NO: 120774 - protein, 190 aa, Oryza sativa
  unsure (1)..(190): unsure at all Xaa locations
  Clone ID: PAT_MRT4530_23864C.1.pep
MQPPFAVLFCCRKIRICFVXLETFRKIRCVKTAWSPXSYARLIRFGYAEGRSCGRPDQATYLYINRAAAFTQHMRNQSMVCLLLYTAPSLVDYSIPLAGVHRRSGEQVSGTSAFDVLHREKGAIRFLGSASRDCSLFVHDGSPSSPLACCAPSSTPATASSSCRATGLSASSVRVRHQQGISPIAVPSHY

SEQ ID NO: 120775 - protein, 1366 aa, Oryza sativa
  Clone ID: PAT_MRT4530_23865C.1.pep
MQPPFVTDPPSSRNICENQSRVCLLLCTAPSLVDYSIPLASVHQRSGEQVSGTSAFDVLHREKAAIRHCDFTMAGFADALRPDKFTGVHFKRWQIRVTLWLTAMKCFWVSTGKPEGVLTAEQQKQFEEATTLFVGCILSVLGDRLVEVYMHMTDAKELWDALNTKFGATDASNDLYIMEQFHDYKMADNRSVVEQAHEIQTMAKELELLKCVLPDKFVAGCIIAKLPPSWRKLGKKDAASKGDGGQSSANVVHKAQNKSKGKYKAQQTTNFKKQKKNNNNPNQDERTCFVCGQVGHLARKCPQRKGMKAPAGQTSKSANVTIGNTGDGSGYGNLPTVFSVNQSTNWWVDTGANLHVCADISLFSSYQVARGSTVLMGNGSHASVHGVGTVDLKFTSGKIVQLKNVQHVPSIDRNLVSGSRLTRDGFKLVFESNKVVVSKHGYFIGKGYECGGLFRFSLSDFCNKSVNHICGSVDDEANVWHSRLCHINFGLMSRLSSMCLIPKFSIVKGSKCHSCVQSKQPRKPHKAAEERNLAPLELLHSDLCEMNGVLTKGGKRYFMTLIDDATRFCYVYLLKTKDEALDYFKIYKAEVENQLDRKIKRLRSDRGGEFFSNEFDLFCEEHGIIHERTPPYSPESNGIAERKNRTLTDLVNAMLDTAGLPKAWWGEALLTSNHVLNRVPNRNKDKTPYEIWIGRKPSLSYLRTWGCLAKVNVPITKKRKLGPKTVDCVFLGYAHHSIAYRFLIVKSEVPDMHVGTIMESRDATFFESFFPMKDTHSGSNQPSEIIPSSITPTEQTEHTHELVSEEDVSEAPRRSKRQRTAKSFGDDFTVYLVDDTPKSISEAYASPDADYWKEAVRSEMDSIIANGTWEVTERPYGCKPVGCKWVFKKKLRPDGTIEKYKARLVAKGYTQKEGEDFFDTYSPVARLTTIRVLLSLAASHGLLVHQMDVKTAFLNGELDEEIYMDQPDGFVLEGQEGKVCKLLKSLYGLKQAPKQWHEKFDKTLTSAGFAVNEANKCVYYRHGGGEGVILCLYVDDILIFGTNLEVINEVKSFLSQNFDMKDLGVADVILNIKLIRGENGITLLQSHYVEKILNRFGYIDSKPSPTPYDPSLLLRKNKRIARNQLEYSQIIGSLMYLASATRPDISFAVSKLSRFTSNPGDDHWRALERVMRYLKGTVELGLHYTGYPAVLEGYSDSNWISDVDEIKATSGYVFTLGGGAVSWRSCKQTILTRSTMEAELTALDIATVEAEWLRDLLMDLPVVEKPVPAILMNCDNQTTCEKTIEVCQEIKKLRSYNVGLHPNSEKPGRSLHEGTITKCDRQCIEGDGFETHSILEGTHLCELDCWSQSMKILGESSRKLTKDLGV

SEQ ID NO: 120776 - protein, 1095 aa, Oryza sativa
  Clone ID: PAT_MRT4530_23866C.1.pep
MAKELELLKCVLPDKFVVGCIIAKLPPSWRSFGTALKHKRQEYSVEGLIASLDVEEKAREKDAASKGDGGQSSANVVHKAQNKSKGKYKAQQTTNFKKQKKNNNNPNQDERTCFVARGSTILMGNGSHASVHGVGTVDLKFTSGKIVQLKNVQHVPSIDRNLVSGSRLTRDGFKLVFESNKVVVSKHGYFIGKGYECGGLFRFSLSDFCNKSVNHICGSVDDEANVWHSRLCHINFGLMSRLSSMCLIPKFSIVKGSKCHSCVQSKQPRKPHKAAEERNLAPLELLHSDLCEMNGVLTKGGKRYFMTLIDDATRFCYVYLLKTKDETLDYFKIYKAEVENQLDRKIKRLRSDRGGEFFSNEFDLFCEEHGIIHERKPPYSPESNGIAERKNRTLTDLVNAMLDTAGLPKAWWGEALLTSNHVLNRVPNRNKDKTPYEIWIGRKPSLSYLRTWGCLAKVNVPITKKRKLGPKTVDCVFLGYAHHSIAYRFLIVKSEVPDMHVGTIMESRDATFFESFFPMKDTHSGSNQPFEIIPSSITPPEQTEHTHELVSEEDVSEAPRRSKRQRTAKSFGDDFTVYLVDDTPKSISEAYASPDADYWKEAVRSEMDSIIANGTWEVTERPYGCKPVGCKWVFKKKLRPDGTIEKYKARLVAKGYTQKEGEDFFDTYSPVARLTTIRVLLSLAASHGLLVHQMDVKTAFLNGELDEEIYMDQPDGFVVEGQEGKVCKLLKSLYGLKQAPKQWHEKFDKTLTSAGFAVNEADKCVYYRHGGGEGVILCLYVDDILIFGTNLEVINEVKSFLSQNFDMKDLGVADVILNIKLIRGENGITLLQSHYVEKILNRFGYIDSKPSPTPYDPSLLLRKNKRIARNQLEYSQIIGSLMYLASATRPDISFAVSKLSRFTSNPGDDHWRALERVMRYLKGTVELGLHYTGYPAVLEGYSDSNWISDVDEIKATSGYVFTLGGGAVSWRSCKQTILTRSTMEAELTALDTATVEAEWLRDLLMDLPVVEKPVPAILMNCDNQTVIVKVNSSKDNMKSSRHVKRRLKSVRKLRNSGVITLDYIQTARNLADPFTKGLSRNVINNASKEMGLRPM

SEQ ID NO: 120777 - protein, 431 aa, Oryza sativa
  Clone ID: PAT_MRT4530_23867C.1.pep
MNTIQNCPVRTIYFESPCAFPEINSFTYETVSTYGLPLETIRSDFKSGLEGLLKERPTKAIFIGTRIGDPNAVIFLFPCLVALQISIDLLCPILMPIDLSLIDVPRLPINLLLTTVWDYRYTSIGSIYDTVPNALLCDSTTGKSFRATYMLADERLERAGRTKKNISSVSSNGTNSTEVEQTISRSASIIVVGDEILFGTVEDKLGAGLCKKLHAIGWRVSHVAVVSNEIDSVAEEVERCKSTDDMVFLVGGLGPLHSDISLAGVAKAFGVRLAPDEEFEEYLSQLIGDNYTGDRNEMALLPEGITELLHHKMLPLPLIKCKNVVILAATNVDELETEWGCLLDTQESGLVMAKSFVSKHLCTSLLDVKIAPVVAKLCIDFSDVYIGCYRISRSGPLVVSFIGKDNQRVEAAAEKLTNSFEGQFSQVDSCK

SEQ ID NO: 120778 - protein, 217 aa, Oryza sativa
  Clone ID: PAT_MRT4530_23868C.1.pep
PSHRWPSPPHPSQCSCVCCPVRTKSSSSSAFGALRCPRWPSSSLEMATGNSPSEVTPPDPPPRWRIFPAPAPVKCNGATSFPITASVRHINNNYKNTNIDGGWRRRPTSGGRCRVHDVLGPGRLGLGVKGTGRRGVALGPGHGARELGAGPPGTGQLGAGADADTAGAAALRAGARSGASATQPLWPTDDGVARGGVGIGTSGADGGVWTGEWGRRG

SEQ ID NO: 120779 - protein, 662 aa, Oryza sativa
  Clone ID: PAT_MRT4530_23869C.1.pep
MAGFADALRPDKFTGVHFKRWQIRVSTGKPEGILTVDQQKQFEETTTLFVGCILSIVGDRLVEVYMHMTDAKELWDALNTKFGATVASNDLYIMEQFHDYKMADNCSVVKQAHEIQTMAHELKLLKCVLADKFVAGCIIAKLPPSWRSFGTALKHKKQEYSVEGLIASLDVEEKAQEKDAASKGDGGQSSANVVHKAQNKSKGKYKAQPGRTGFHHPNGEWVTCFCYGVGMVDLKFTLGKNVKHVPSIDRNLVSGSRLTRDGFKLVFESNKEDVSEAPRRSKRQRTAKSFGDDFTVYLVDDTPKSILEAYASPDADYWKEAVRSEMDSIIANATWEVTERPYGCKPVGCKWVFKKKLRPDGTIEKYKARLVAKCYTQKEGEDFFDTYSPVARLTTIHVLLFLAASHGLLVHQMDVKTAFLNGELDDEIYMDQPDGFVVEGQEGKVCKLLKSLYGLKQAPKQWHEKFDKTLTSAGFAVNEADKCVYYRHGGGEGVILCLYVDDILISGINLEVTNEVKSFLSQNFDMKDLGVADVILNIKLIRGENGITLLQSHYVEKILNRFGYIDSTMELGLHYTGYPAVLEDYSDSNWISDMDEIKATSGYVFTLGGGAVSWRSCKQTILTRSTMEAELTALDTATVEAEWLHDLLMDLPMLKNRCRLSL

SEQ ID NO: 120780 - protein, 35 aa, Oryza sativa
  Clone ID: PAT_MRT4530_2386C.1.pep
LLAYTGAILIGYDYIRLTCLALTSGLLWCSRIIKC

SEQ ID NO: 120781 - protein, 135 aa, Oryza sativa
  unsure (1)..(135): unsure at all Xaa locations
  Clone ID: PAT_MRT4530_23870C.1.pep
GVGWXXXXXXRGSSDRRLRTKXDNAXYXXQRAFALYPFEEVAFSFNGGKDSTVLLHLLRAGYYLHKSSSDGEVEMNTIQNCPVRTIYFESPCAFPEINSFTYETVSTYGLPLETIRSDFKSGLEGLLKERPTKAI

SEQ ID NO: 120782 - protein, 1041 aa, Oryza sativa
  Clone ID: PAT_MRT4530_23871C.1.pep
MAGFADALRPDKFSGVHFKRWQIRVTLWLTAMKCFWVSTGKPEGVLTAEQQKQFEEATTLFVGCILSVLGDRLVEVYMHMTDAKELWDALNTKFGATDASNDLYIMEQFHDYKMADNRSVVEQAHEIQTMAKELELLKCVLPDKFVAGCIIAKLPPSWRSFGTALKHKRQEYSVEGLIASLDVEEKAQEKDAASKGDGGQSSANVVHKAQNKSKGKYKAQQTTNFKKQKKNNNNPNQDDRTCFVCGQPDHLARKCPQRKGMKAPAEQTSKSANVTIGNTGDGSGYGNLPTVFSVNQSTNWWVDTGANVARGSTVLMGNGSHASVHGVGTVDLKFTSGKIVQLKNGGKRYFMMLIDDATRFCYVYLLKTKDEVLDYFKIYKAEVENQLDRKIKRLRSDRGGEFFSNEFDLFCEEYGIIHERTPPYSPESNGIAERKNRTLTDLVNAMLDTTGLPKAWWGEALLTSNHVLNRVPNRNKDKTPYEIWIGRKPSLSYLRTWGCLTKVNVPITKKRKLGPKTVDCVFLGYAHHSIAYRFLIVKSEVPDMHVGTIMESRDATFFESFFPMKDTHSSSSQPSEIIPSSITPPEQTEHTHKHVTEEDDSEAPRRSKRQRMAKSFGDDFIVYLVDDTPKSISEAYASPDADYWKEAVRSEMDSIIANGTWEVTERPYGCKPVGCKWVFKKKLRPDGTIEKYKARLVAKGYTQKEGEDFFDTYSPVARLTTIRVLLSLAASHGLLVHQMDVKTAFLNGELDEEIYMDQPDGFVVEGQEDKVCKLLKSLYGLKQAPKQWHEKFDRTLTSTGFAVNEADKCVYYRHGGGEGVILCLYVDDILIFGTNLEVINEVKSFLSQKFDMKDLGVADVILNIKLIRGTIELGLHYSGYPAVLEGYSDSNWISDVDEIKATSEYFFTLGGDAVSWRSCKQTILTRSTMEAELMALDTAIVEAEWLRDLLMDLPIVEKPVPAILMNCDNQTVIVKVNSSKDNMKSSRHVKRRLKSVRKLRNSGVITLDYIQTTRNLADPFTKGLSRNVIDNASKEMGLRSM

SEQ ID NO: 120783 - protein, 1377 aa, Oryza sativa
  Clone ID: PAT_MRT4530_23872C.1.pep
MAIRGIPSSREMTVDDFKNWLKQFDTDNDGRISRGELREAIRRRGGWFSGLKAGRAVRHADRDNSGFVDESEIENLVAFAQKTLGMKVTAWHCDFTMADFADALRPDKFTGVHFKRWQIRVTLWLTAMKCFWVSTGKPEGVLTAEQQKQFEEATTLFVGCILSVLGDRLVEVYMHMTDAKELWDALNTKFGATDASNDLYIMEQFHDYKMADNRSVVEQAHEIQTMAKELELLKCVLPDKFVARCIIAKLPPSWRSFGTALKHKRQEYSVEGLIASLDVEEKAREKDAASKGDGGQSSANVVHKAQNKSKGKYKAQQTTNFKKQKKNNNNPNQDERTCFVCGQVGHLARKCPQRKGMKAPAGQTSKSANVTIGNTGDGSGYGNLPTVFSVNQSTNWWVDTGANVARGSTVLMGNGSHASVHGVGTVDLKFTSGKIVQLKNVQHVPSIDRNLVSGSRLTRDGFKLVFESNKVVVSKHGYFIGKGYECGGLFRFSLSDFCNKSVNHICGSVDDEANVWHSRLCHINFGLMSRLSSMCLIPKFSIVKGSKCHSCVQSKQPRKPHKAAEERNLAPLELLHSDLCEMNGVLTKGGKRYFMTLIDDATRFCYVYLLKTKDEALDYFKIYKAEVENQLDRKIKRLRSDRGGEFFSNEFDLFCEEHGIIHERTPPYSPESNGIAERKNRTLTDLVNAMLDTAGLPKAWWGEALLTSNHVLNRVPNRNKDKTPYEIWIGRKPSLSYLRTWGCLAKVNVPITKKRKLGPKTVDCVFLGYAHHSIAYRFLIVKSEDTHSGSNQPSEIIPSSITPPEQTEHTHELVSEEDVSEAPRRSKRQRTAKSFGDDFTVYLVDDTPKSISEAYASPDADYWKEVVRSEMDSIIANGTWEVTERPYGCKPVGCKWVFKKKLRPDGTIEKYKARLVAKGYTQKEGEDFFDTYSPVARLTTIRVLLSLAASHGLLVHQMDVKTAFLNGELDEEIYMDQPDGFVLEGQEGKVCKLLKSLYGLKQAPKQWHEKFDKTLTSAGFAVNEADKCVYYRHGGGEGVILCLYVDDILIFGTNLEVINEVKSFLSQNFDMKDLGVADVILNIKLIRGENGITLLQSHYVEKILNRFGYIDSKPSPTPYDPSLSLRKNKRIARNQLEYSQIIGSLMYLASATRPDISFAVSKLSRFTSNPGDDHWRALERVMRYLKGTVELGLHYTGYPAVLEGYSDSNWISDVDEIKATSGYVFTLGGGAVSWRSCKQTILTRSTMEAELTALDTATVEAEWLRDLLMDLPVVEKPVPAILMNCDNQTTCEKTIEVCQEIKKLRSYNVGLHPNSEKPGRSLHEGTITKCDRQCIEGDGFETHSILEGTHLCELDCWSQSMKILGESSRKLTKDLGV

SEQ ID NO: 120784 - protein, 1177 aa, Oryza sativa
  unsure (1)..(1177): unsure at all Xaa locations
  Clone ID: PAT_MRT4530_23873C.1.pep
MAGFVDALRPDKFTGVHFKRWQIRVTLWLTAMKCFWVSTGKPEGVLTAEQQKQFEEATTLFVGCILSVLGDRLVEVYMHMTDAKELWDALNTKFGATDASNDLYIMEQFHDYKMADNRSVVEQAHEIQTMAKELELLKCVLPDNFVAGCIIAKLPPSWRSFGTALKHKRQEYSVEGLIASLNVEEKAREKDAASKGDGGQSSANVVHKAQNKSKGKYKAQQTTNFKKQKKNNNNPNQDERTCFVCGQVGHLARKCPQRKGMKAPAGQTSKSANVTIGNTGDGSGYGNLPTVFSVNQSTNWWVDTRANVHVCADISLFSSYQVARGSTVLMGNGSHASVHGVGTVDLKFTSGKIVQLKNVQHVPSIDRNLVSGSRLTRDGFKLVFESNKVVVSKHGYFIGKGYECGGLFRFSLSDFCNKSVNHICGSVDDEANVWHSRLCHINFGLMSRLSSMCLIPKFSIVKGSKCHSCVQSKQPRKPHKAAEERNLAPLELLHSDLCEMNGVLTKGGKRYFMTFIDDATRFCYVYLLKTKDEALDYFKIYKAEVENQLDRKIKRLRSDHGGEFFSNEFDLFCEEHGIIHEMTPPYSPESNGIAERKNRTLTDLVNAMLDTAGLPKAWWGEALLTSNHVLNRVPNRNKDKTPYEIWIGRKPSLSYLRTWGCLAKVNVPITKKRKLGPKTVDCVFLGYAHHSIAYRFLVVKSEVSDMHVGTIMESRDAIFFESFFPMKDTHSGSNQPSEIIPSSITPPEQTEHTHELVSEEDVSEAPRRSKRQRTAKSFGDDFTVYLVDDTPKSISEAYASPDADYWKEAVRSEMDSIIANGTWEVTERPYGCKPVGCKWVFKKKLRPDASHGLLVHQMDVKTAFLNGELDEEIYMDQPDGFVVEGQEGKVINEVKSFLSQNFDMKDLGVADVILNIKLIRGENGITLLQSHYVEKILNRFGYIDSKPSPTPYDPSLLLRKNKRIARNQLEYSQIIGSLMYLASATRPDISFAVSKLSRFTSNPGDDHWRALERVMRYLKGTVELGLHYTGYPVVLEGYSDSNWISDVDEIKATSGYVFTLGGGAVSWRSCKQTILTRSTMEAELTALDTATVEAEWLRDLLMDLPVVEKPVPAILMNCDNQXRHVKRRLKSVRKLRNSGVITLDYIQTARNLADPFTKGLSRNVIDNASKEMGLRPI

SEQ ID NO: 120785 - protein, 56 aa, Oryza sativa
  Clone ID: PAT_MRT4530_23874C.1.pep
ALEGVIRRRRPHHGRPLLRLQVFDARQHQLGLVGPHHAVKRGAPGMDQGGSQARVR

SEQ ID NO: 120786 - protein, 66 aa, Oryza sativa
  Clone ID: PAT_MRT4530_23875C.1.pep
RWLARSKASHTEHAQPACRPRVRNARRRLTPYLIPILSAPRGPAQVITPGPSYDGTKLSELPIAHA

SEQ ID NO: 120787 - protein, 1283 aa, Oryza sativa
  unsure (1)..(1283): unsure at all Xaa locations
  Clone ID: PAT_MRT4530_23876C.1.pep
MAGFADALRPDKFTGVHFKRWQIRVTLWLTAIKCFWVSTGKPEGVLTAEQQKQFEEATTLFVGCILSVLGDRLVEVYMHMTDAKELWDALNTKFGATDASNDLYIMEQFHDYKMADNRSVVEQAHEIQTMAKELELLKCVLPDKFVAGCIIAKLPPSWRSFGTALKHKRQEYSVEGLIASLDVEEKAREKDAASKGDGGQSSANVVHKAQNKSKGKYKAQQTTNFKKQKKNNNNPNQDERICFVCGQVGHLARKCPQRKGMKAPAGQTSKSANVTIGNTGDGSGYGNLPTVFSVNQSTNWWVDTGANVARGSTVLMGNGSHASVHGVGTVDLKFTSGKIVQLKNVQHVPSIDRNLVSGSRLTRDGFKLVFESNKVVVSKHGYFIGKATRKPHKAAEERNLAPLELLHSYLCEMNGVLTKGGKRYFMTFIDDATRFCYVYLLKMKDEALDYFKIYKAEVENQLDRKIKRLRSDRGGKFFSNEFDLFCEEHGIIHERTPPYSPESNGIAERKNRTLTDLVNAMLDTAGLPKAWWGEALLTSNHVLNRVPNRNKDKTPYEIWIGRKXPSLSYLRTWGCLAKVNXKSEVPDMHVGTIMESRDAIFFESFFPMKDTHSGSNQPSEIIPSSITPPEQTEHTHELVSEEDVSEAPRRSKRQRTAKSFGDDFTVYLVDDTPKSISEAYASPDADYWKEAVRSEMDSIVANGTWEVTERPYGCKPVGCKWVFKKKLRPDGTIEKYKARLVAKGYTQKEGEDFFDTYSPVARLTTIRVLLSLAASHGLLVHQMDVKTAFLNGELDEEIYMDQPDGFVVEGQEGKVCKLLKSLYGLKQAPKQWHEKFDKTLTSTGFAVNEADKCVYYRHGGGEGVILCLYVDDILIFGTNLEVINDVKSFLSQNFDMKDLGVADVILNIKLIRGENGITLLQSHYVEKILNRFGYIDSKPSPTPYDPSLLLRKNKRIARNQLEYSQIIGSLMYLASATRPDISFAVSKLSRFTSNPGDDHWRALERVMRYLKGTVELGLHYTGYPAVLEGYSDSNWISGVDEIKATSGYVFTLGGGAVSWRSCKQTILTRSTMEAELTALDTATVEAEWLRDLLMDLPVVEKPVPAILMNCDNQTTCEKTIEVCQEIKKLRSYNVGLHPNSEKPGRSLHEGTITKCDRQCIEGDGFETHSILERTHLCELDCWSQSMKILGESSRKLTKDLGIKSLYVYNLNKNHLILSVHCNDWKAYSCTTMIFSQCARNQKSSAIPSVTVIGRRKAITICISTSSQRPIPLIIEQNDWSMFS

SEQ ID NO: 120788 - protein, 89 aa, Oryza sativa
  Clone ID: PAT_MRT4530_23877C.1.pep
WIPGLQDSARGRLSSPITTYCSVSIVMCTFVAPYVLVRADCSWKRRCWVLVAGRIHKIRSNYVFGTIPMGHIRCVICRIILEFNILQYL

SEQ ID NO: 120789 - protein, 78 aa, Oryza sativa
  Clone ID: PAT_MRT4530_23878C.1.pep
YSIPLAGVHRRSGEQVSKTSAFDVLHREKAVIRFLGSASCDCSLFVRDGSPSSSLACCAPLSTPATASSSCRATGLSA

SEQ ID NO: 120790 - protein, 33 aa, Oryza sativa
  Clone ID: PAT_MRT4530_23879C.1.pep
CLTLLLKNLALYCNCKKKKKNSRLVLPRPIPAA

SEQ ID NO: 120791 - protein, 97 aa, Oryza sativa
  unsure (1)..(97): unsure at all Xaa locations
  Clone ID: PAT_MRT4530_2387C.1.pep
LPKKGNMLFTIRASXQPEVTSDKQSTRLLPRSPAFPVDAHFNLHLMASDFLAILALKPGMNLTGTDIPTPGVSTPAPARDESQEALIIPTGRGEACD

SEQ ID NO: 120792 - protein, 114 aa, Oryza sativa
  unsure (1)..(114): unsure at all Xaa locations
  Clone ID: PAT_MRT4530_23880C.1.pep
GIGSIKGNLSRRVRVQEGCGMAVDSFFLVRQGLINPXGINMYTQGLCNLSXRSIQLLSAHRHPLSXGFYLSTGGIWNLTRGCIDFRSPAKGXVLRSAGPSESVGYVGVVRGCIH

SEQ ID NO: 120793 - protein, 257 aa, Oryza sativa
  unsure (1)..(257): unsure at all Xaa locations
  Clone ID: PAT_MRT4530_23881C.1.pep
VDQLLFXSXXXXKLQXHXXFPXEXXRCQKFTXXKXWXNXQXXXKFXYXPXXNXXXXXXXXPXHXSXXQGXGFSXGQGXXXGWAPKETXPXXXXXIFXXXXXXXXXPXXXXLXXXPRXXXXXXVXXXGXXLLGXXXSXVVXXXXRVXAXXXXXXXXXFYXXXXXXXXXXXXXXXXXXXXXXXXXLXXXXXAXXFXXXRVXXXXXXXXXLXXXXGXVFXXXXXXXXXXXXXXXLXXXXXXXXXXXXGXXXXXXXLXXXX

SEQ ID NO: 120794 - protein, 381 aa, Oryza sativa
  Clone ID: PAT_MRT4530_23882C.1.pep
MMLLARAVLRSRLRCPPLSAAAASTAAFSSAPSPAAAEAERAVRDGPRNDWSRPEIQAVYDSPLLDLLFHGAQVHRSVHKFREVQQCTLLSIKTGGCSEDCSYCPQSSRYSTGLKAQKLMNKDAVLEAAKKAKEAGSTRFCMGAAWRETIGRKTNFNQILEYVKDIRGMGMEVCCTLGMLEKQQAEELKKAGLTAYNHNLDTSREYYPNIISTRSYDDRLQTLEHVREAGISICSGGIIGLGEAEEDRVGLLHTLATLPAHPESVPINALVAVKGTPLQDQKPVEIWEMIRMIATARIVMPKAMVRLSAGRVRFSMPEQALCFLAGANSIFAGEKLLTTTNNDFDADQAMFKILGLIPKAPSFGDEAPAADTERCEEAASM

SEQ ID NO: 120795 - protein, 168 aa, Oryza sativa
  Clone ID: PAT_MRT4530_23883C.1.pep
MAVLFPSNYFLLSFWFFLGFWIIYQAFGAFGAVVNIDKPIESSIELVGVSGLVPVLALAPGPGVASRPAFNLLVRIDNDHILDRHREGGSVKVSYAGVPLAYGSIPSFRLGAREALTVAVDATSEAAGVPEDLLRLMAAEQRMGVAQLEIGMQLGGPGRESYSWSVDF

SEQ ID NO: 120796 - protein, 180 aa, Oryza sativa
  Clone ID: PAT_MRT4530_23884C.1.pep
MVSALALVIRAATDLQLTHHHPSSSSAAAHAHPRRWGARRPATRRWRAWRLAARRWASERPAARRVVPALHRWGVGAASLELWETGIDQFVGVDGVLMFSINKSKLIKRKWQGGDEFCKLCGKIESTDHALFKCPLAVFTWCVRWCIMLKEGDQAAMKGWGDLLMAKLQRLKPCCLPASV

SEQ ID NO: 120797 - protein, 293 aa, Oryza sativa
  Clone ID: PAT_MRT4530_23885C.1.pep
MAPRCLAALAPLAVLLLLSSCLAAAPATAQQSSSIGDTVVFWGRNKAEGSLREACDTGLYNTVIISFLSAFGRGSYKLDLSGHPVVPVGGDIKYCQSKGKTVLLAIGGQGGEYYLPSSQAAADLDDYLWNAFLGGGRSGVARPFGDAVVNGIDFFIDQGATEHYDELARLLHGHSNGGVMLTATARCVFPDQRQQAALATGLFSRIHVKLFNDGRCTWGRRESLEKWAAAYPDSRIYVSIVASPEADRDAYMSHKDLYFDVLQFINKLPNYGGIMVWNRYWDKKTGYINGDVF

SEQ ID NO: 120798 - protein, 297 aa, Oryza sativa
  unsure (1)..(297): unsure at all Xaa locations
  Clone ID: PAT_MRT4530_23886C.1.pep
MASRRLAPLLVLLLSSSLAAGQSTGDTVVFWGRNTDQLEGSLREACDTGLYTTVIISFLSAFGYIPGTYKLDISGHTVSAVGPDIKHCQSRGILVLLAIGGQGGEYSLPTSQAAVDLEDYLWNAFLGGGRPGVARPFGDAVVDGIDFFIDQGATEHYDELARRLYAHNKDYKGRLGVMLTATARCVFPDQRLQAALSTGLFSRIHVKVFGDGRCASRREELEKWMAAYPQSRVLVGVVASPEADRDGYVSHKDLYYDVLQFINKLPNYGGIMVWXRYWDKKTGWTAGNEPGLLDQVL

SEQ ID NO: 120799 - protein, 630 aa, Oryza sativa
  Clone ID: PAT_MRT4530_23887C.1.pep
MASRDLRRLLDGAALVAREAARRASAPDVLRSALLAATDLAGLTRGTPRTPRPTPPLGPHPTAAAAGGEARASVVYFSHDDAGPVSPPRRPPQDPPLEQRPPARESPHPAQAKEITEAGVAAAVGAAEPEPVAVARPPDGEAAGRSPAPSPSPSPVVRVEKRRRPRERRVPSTPFTRALGSVCHTMHRFEQGEMRIRLFVKLRIEQCVNRVVFFAKFVLAKLRFAGLGAGLAWGTLQESARRVVYGRPADADGKRSAMSPFLSDQNAERIALALCRMRGAALKVGQMLSIQDESLVPPPVLAALDIVRQGADVMPRKQLNSVLDAELGQDWSSKLTSFDYEPLAAASIGQVHRAVLKDGSDVVMKIQYPGVADSIESDIENVRLLLSYTNLIPKGLFLDRAMKVAKLELARECDYVLEATNQKRYKELLSDSEGYYVPKVIDELSSKKVLMSEFVPGFPIDKTDPNWSNFLFDEPTRKFNLIDFGAARDFPKRFVDDYLRMVVACANKDRAGVLEMSRRLGFLTGEEPEVMLDAHVQAAFIVGVPFAKPGGHDFRANNITHSVSNLGATMLKHRLTPPPDEVYSLHRKLSGAFLACIKIGAVVPCREMLFKVYEQYNFSDDRPEVLSSTG

SEQ ID NO: 120800 - protein, 189 aa, Oryza sativa
  unsure (1)..(189): unsure at all Xaa locations
  Clone ID: PAT_MRT4530_23888C.1.pep
DQVYYDHFTYNVLKSSKGKSLAVSAPLXNIPVLPQGGPIIPRRDTPRRSSALMRFGEYTLVVSASKPGAAEGELYVHDGDSFHYEQGQYIPRKFTLGGNTLTSLDAEGRDTKSLKAGTWLKAMESVHVHKIIIVGAPKTWDQKEAQIESEGRTWTVQVQYHAAQGSRAAFSVVAPVGPKIGQDWSIKLA

SEQ ID NO: 120801 - protein, 557 aa, Oryza sativa
  Clone ID: PAT_MRT4530_23889C.1.pep
MASMCSRSIPQLILLLSLTVFLLANAHPMAPPSPPRKAAAPPTAAKGVTGISPVLVSTLRETLDAIKNVASIISSFPIGGILGGGDLRLSSAIADCLDLLDLSSDELSWSMSTTSSSSYQPTNAGAATSSHVGTGDARSDLRSWLGGALSNQDTCKEGLDDTGSVLGSLVGTALQTVTSLLTDGLGQVAAGEASIAWSSSRRGLAEGGGAPHWLGARERRLLQMPLGPGGMPVDAVVAKDGSGNYTTVSAAVDAAPTESASRYVIYVKKGVYKETVDIKKKKWNLMLVGDGMGVTVISGHRNYVDGYTTFRSATVAVNGKGFMARDVTFENTAGPSKHQAVALRCDSDLSVFYRCGFEGYQDTLYAHSLRQFYRDCRVSGTVDFVFGNAAAVFQNCTLAARLPLPDQKNSVTAQGRLDGNMTTGFAFQFCNVTADDDLQRALAGGGNQSSAAAVTQTYLGRPWKQYSRVVFMQSYIGAVVRPEGWLAWDGQFALDTLYYGEYMNTGPGAGVGGRVKWPGFHVMTSPAQAGNFTVAQFIEGNMWLPPTGVKYTAGLTS

SEQ ID NO: 120802 - protein, 63 aa, Oryza sativa
  Clone ID: PAT_MRT4530_2388C.1.pep
EMDKPHIRGDGRIQPGPPVANTTRSHIPGAVQPTKSLQGQIGNQAPNSDSGTGLGNHHNVIDL

SEQ ID NO: 120803 - protein, 106 aa, Oryza sativa
  Clone ID: PAT_MRT4530_23890C.1.pep
MERRRRLERVSEGYGEAAWRRRGSERIRGRRRLYAMRKIGGCQYYQWKDEMLDTGVRTHLALAPIHAGHLQAVAPLGGFPTAAPQAIMQDRAAGVVGNAQVDIRVM

SEQ ID NO: 120804 - protein, 143 aa, Oryza sativa
  Clone ID: PAT_MRT4530_23891C.1.pep
MERRDRGGGSSSRNPHGAPVEEEEELEDDFDEFRLPMSHRPTENLETEGLEQASVDTQLTSSNVGFRLLQKMGWKGKGLGKNEQGITEPIKAGIRDAKLGVGKQEQDDFFTSEDNVQRRKLNIQLEETDEPHKKREVIVARAQ

SEQ ID NO: 120805 - protein, 81 aa, Oryza sativa
  Clone ID: PAT_MRT4530_23892C.1.pep
GLFGFGVQVQLASWAMLVPSSRNISISSFESSQACLGLKPEMLAFWEVVCIAYFKQCRKCSVTSWTVCIDSFSGCVPKKTS

SEQ ID NO: 120806 - protein, 378 aa, Oryza sativa
  Clone ID: PAT_MRT4530_23893C.1.pep
MGSTSGIDDFAFPQEQVYRFGSLDFITDNFGKISFLSSDSNQSERRDRGGGSSSRNPHGAPVEEEEELEDDFDDSTSPMNPRPTAKLDAEGLEQASVDTQLTSSNIGFRLLQKMGWKGKGLGKNEQGITEPIKAGIRDAKLGVGKQEQDDFFTSEDNVQRRKLNIELEETEEHIKKRELLALHIDICILFMQELLASALMILEHFGHFLFGGSFSCLVQIMTIQVIAEREQKIRSEVKEIQKVFFCSLCNKQYKLAHEFESHLSSYDHNHRKDYISDKFTVVTTEVQGNERNAKQQQQQPADAHRKQQQQKQEPSESSSERITMKNLPNPSNQDQRKTLKFGFSKMAPSKAPVGNVSKKPKVATKMSSVFGNESDEES

SEQ ID NO: 120807 - protein, 392 aa, Oryza sativa
  unsure (1)..(392): unsure at all Xaa locations
  Clone ID: PAT_MRT4530_23894C.1.pep
MVLQSHDVSDLCIGKPPVRWLPPSSTVADAIAEIEAGGGRGPDAAVAVWDGTKGEVDGRVCMADVHLFLCGGDGEAASLASPAAALQATLSDLLAAGAPPVRRIEPHASVVEAVDAFLDGAHCLVVPIRERRRRXGGGGGGGDXMCWLTVEDVVRFFVGCIGLFAPTASLSVSQLGIVREATLAVAAGDRALSAVPLLRAALATHSSVAVITGAGIAPRLAGEVSPSALCSCDVSVAAAIAALSAGDLTAFLHRSDLRCRRNLPGMVDLLYAGDPSSWPPSPSSSSSSSSSSSSLSSFSSSSDDEAEDGYKHYAPAPCARRDNNRQIIACHPGSSLVAVMAQAVAHRVTQVWVVDFDDGELVGVVRFLDVLWVLREHLNQPPPDLPIEFLIN

SEQ ID NO: 120808 - protein, 258 aa, Oryza sativa
  unsure (1)..(258): unsure at all Xaa locations
  Clone ID: PAT_MRT4530_23895C.1.pep
MVLQSHDVSDLCIGKPPVRWLPPSSTVADAIAEIEAGGGRGPDAAVAVWDGTKGEVDGRVCMADVHLFLCGGDGEAASLASPAAALQATLSDLLAAGAPPVRRIEPHARSRARHVYRSXPPAPHAFRLTKFVGYSVVEAVDAFLDGAHCLVVPIRERWRGAVAAGEMCMCWLTVEDVVRFFVGCIGLFDPTGSLQKPHRNATQHRRQASISTTPXLLSPALATHSSVAVITGAGIAPRLAGEVSPSALCSCDVSVAAA

SEQ ID NO: 120809 - protein, 69 aa, Oryza sativa
  unsure (1)..(69): unsure at all Xaa locations
  Clone ID: PAT_MRT4530_23896C.1.pep
LRVHLSQLRHNVILIPAQPVIAVIKPSSIGXYHLQRPHSLIYISECIASCSMIVYVRFSLCEIWQSSIQ

SEQ ID NO: 120810 - protein, 1289 aa, Oryza sativa
  Clone ID: PAT_MRT4530_23897C.1.pep
MAGFADALRPDKFTGVHFKRWQIRVTMWLTAMKCFWVSTGKPEGVLTAEQQKQFEEATTLFVGCILSVLVRSSWSTVFHDYKMADNRSVVEQAHEIQTMAKELELLKCVLPDKFVAGCIIAKLPPSWRSFGTALKHKRQEYSVEGLIASLDVEEKAREKDAASKGDGGQSSANVVHKAQNKSKGKYKAQQTTNFKKQKKNNHNPNQDERTCFVCGQVGHLARKCPQRKGMKAPAGQTSKSANVTIGNTGDGSGYGNLPSVFSVNQSTNWWVDTGANVHVCADISLFSSYQVARGSTVLMGNGSHASVHGVGTVDLKFTSGKIVQLKNVQHVPSIDRNLVSGSRLTRDGFKLVFESNKVVVSKHGYFIGKGYECGGLFRFSLSDFCNKSVNHICGSVDDEANVWHSRLCHINFGLMSRLSSMCLIPKFSIVKGSKCHSCVQSKQPRKPHKAAEERNLAPLELLHSDLCEMNGVLTKGGKRYFMTLIDDATRFCYVYLLKTKDEALDYFKIYKAEVENQLDRRINRLRSDRGGEFFSNEFDLFCEEHGIIHERTPPYSPESNGIAERKNRTLTDLVNAMLDTAGLPKAWWGEALLTSNYVLNRVPNRNKDKTPYEIWIGRKPSLSYLRTWGCLAKVNVPITKKRKLGPKTVDCVFLGYAHHSIAYRFLIVKSEVPDMHVGTIMESRDATFFESFFPMKDTHSGSNQPSEIIPSSITPPEQTEHTHELVSEEDVSEAPRRSKRQRTAKSFGDDFTVYLVDDTPKSISEAYASPDADYWKEAVRSEMDSIIANGTWEVTERPYGCKPVGCKWVFKKKLRPDGTIEKYKARLVAKGYTQKEGEDFFDTYSPVARLTTIRVLLSLAASHGLLVHQMDVKTAFLNGELDEEIYMDQPDGFVVEGQEGKVCKLLKSLYGLKQAPKQWHEKFDKTLTSAGFAVNEADKCVYYRHGGGEGVILCLYVDDILIFGTNLEVINEVKSFLSQNFDMKDLGVADVILNIKLIRGENGITLLQSHYVEKILNRFGYIDSKPSPTPYDPSLLLRKNKRIARNQLEYSQIIGSLMYLASATRPDISFAVSKLSRFTSNPGDDHWRVLERVMRYLKGTVELGLHYTGYPAVLEGYSDSNWISDVDEIKATSGYVFTLGGGAVSWRSCKQTILTRSTMEAELTALDTATVEAEWLRDLLMDLPVVEKPVPAILMNCDNQTTCEKTIEVCQEIKKLRSYNVGLHPNSEKPGRSLHEGTITKCDRQCIEGDGFETHSILEGTHLCELDCWSQSMKILGESSRKLTKDLGV

SEQ ID NO: 120811 - protein, 56 aa, Oryza sativa
  unsure (1)..(56): unsure at all Xaa locations
  Clone ID: PAT_MRT4530_23898C.1.pep
IHSYGLTETYGPATVCTWKPEWDALTAEERARXKSRQGLHHVGLEAADXKDPATMR

SEQ ID NO: 120812 - protein, 1014 aa, Oryza sativa
  Clone ID: PAT_MRT4530_23899C.1.pep
MEQKDSGGGGGGLARRLMLDASGREMDSPRFRAILRATSGRRKRAPDVKSFSHELNIRGPLLHPLQQRKPRGCVNSPEEFIGAIRTKFIRLKEEVDAELGVFAGDLVGALDKADGDEERVALEDLLVVAQRCAEMSPEELWVKCECIVQGLDDRRQELTAGVLKQAHTRVLFILTRCTRLLQFRKEGGGYVAADDKQHVLSLHQLSDLGLYPFKVAGGSSELGRKSTSSLTELKERLIRRRMLEHKQLTLDFSAGRVISSDTGGDSPGSGGKISSWKKLPSPAEKTLHKVTEPTTEEKTTPTKKKAITRNKVAVDEIVERIDAASIHPDGLSYLGDSAVKLEVPSGFPEAQQIIVDGKPRMICRICDFEIPMVCAEGHFIVCTLADRCDSKGLNTDQRLQRVAEVLGRVLGCFESKSPQTAECNHNETARGSTSSLTESDGSMDHDILSHLLTVPSTELFSEGALTPASGSMPQSPLLTPRTSHAESQLTKHKAFVELENFQQVESLMTIARGIERIKNSEYNSLEDLSSYLEDLNAVIDTRKVDALVVETFGRRIAKLLQEKFIQLCGQIEDSNTDSLGSIDEDGPMESSVSSRTSQMNGKFKDRTSIEDFEIIKPISRGAFGRVFLAKKRVTGDLFAIKVLKKADMIRKNAVESILAERDILISARNPFVVRFFYSFTCRENLYLVMEYLNGGDLYSLLRNLGCLDEDMARTYMAELVLALEYLHSMNVIHRDLKPDNLLISRDGHIKLTDFGLSKVGLINSTDDLSGPDVSNVLVGDHQPADAEQRAQKREQRQKQAAVGTPDYLAPEILLGMTHGPTADWWSVGVILFELLVGIPPFNAEHPQIIFDNIMNREIPWPQVPEELSFEAYDLIDKCYFNSVNFHVRLLIENPVQRLGATGAGEVKAHPFFKDINWDMIARQQADEFGSMEEFGAPSLSVKYSFSNFSFKSNIYAKNACCDWQMEVADLTLKDEFRIGKYFTANYQSFTYTIHDQPQKKRIQTSQEITTHHKN

SEQ ID NO: 120813 - protein, 56 aa, Oryza sativa
  Clone ID: PAT_MRT4530_2389C.1.pep
WVHHFTHQSSNPRAHEYRPVWHNFSFSSTSLGAGAQPNIFSFIYNGSGARWSTLTK

SEQ ID NO: 120814 - protein, 68 aa, Oryza sativa
  unsure (1)..(68): unsure at all Xaa locations
  Clone ID: PAT_MRT4530_238C.1.pep
XLXXVXXAXXXXXXASVPXXXAXALVRPFAPPAAXXVTEVXKELXGAATRLPVCCCPAGPPLSTLLLS

SEQ ID NO: 120815 - protein, 138 aa, Oryza sativa
  Clone ID: PAT_MRT4530_23900C.1.pep
QKSGINRRRGGRRPALDRSSATGFHGRRRRRLRRSGVHLLLHEPKHPAARSRLLLPRRAIGGGGDVLLPGHRRRRSRLRGLHAPELLLVGVLEHVRLHEVSSHHGRHSPKHLDQITPCLLCFVSSSRYIPRLLVGSSC

SEQ ID NO: 120816 - protein, 1959 aa, Oryza sativa
  unsure (1)..(1959): unsure at all Xaa locations
  Clone ID: PAT_MRT4530_23901C.1.pep
MAGFSLISCAVGIIFFSVCYLPAAPAAALSFNYSTFSSDNQEDFTFEGNASIHDGCIDFVANGTWGRGYRPYSTGRVSYKLPVRLWDAATGEVASFTTTFSFNITPMNISDKGDGMAFFLVSYPSRMPLTADGDTLGLVSNKPENAPAGGDQFVAVEFDTYPNPGLDPNATGDHIGIDINSVRSLTTEPLTNSSLIGNMTAIVHYDSSSSILSVKLWINDTTKPPYNLSYEIVDLKKKLPENVTIGFSAATGASDELHQLTSWYFNSSSSFEHKHGRAGVVAGATVGATLFVVLLFTAAAILIRRRRIKNRKEAEDEQDISSDSEDNDGEPIVEIEMGTAPRRLPYYELVEATKNFAVEEKLGQGGFGSVYRGYLREQGLAVAIKRFAKDSSKQGRKEYKSEIKVISRLRHRNLVQLVGWCHGRNELLLVYELVPNRSLDVHLHGNGTFLTWPMRIKIVLGLGSALLYLHQEWEQCVVHRDIKPSNVMLDESFSAKLGDFGLARLIDHTIGIKTMTAMSGTPGYLDPECVITGRASAESYVYSFGIVLLEVACGRRPMSLLDSQNNGVFRLVEWAWDLYGKGDVLMAADKRLDGDYDSAEMERVIALGLWCVHPDPSVRPSIRDAMAILQSSGGQLPVLSAKMPVPMYAPPMASFDGLAVCVIYRDVVVLRCDAVVVHIDDERPCYSHLVFLDYSIPIVSVHRQSGEQVSGTSAFDVLHREKAAIRRCDFTMAGFADALRPDKFTGVHFKRWQIRVALWLTAMKCFWVSTGKPEGILAADQHKQFEKATTLFVGCILSVLGNRLVEVYMHMTNAKELWDALNTKFGATDASNDLYIMEQFHDYRMADNRSVVEQAHEEYSVEGLIVSLDVEEKAREKDAASKGDGGQSSANVVHKAQNKSKGKYKAQQTTNFKKQKKNNNNPNQDERTCFVCSQPSHLARKCPQRKGMKAPAGQTSKSANVTIGNTGDGSGYGXRGSTVLMGNGSHASVHGVGTVDLKFTSGKIVQLKNVQHVSSIDRNLVSGSRLTRDGFKLFFESNKVVVSKHGYFIGKGYECGGLFRFXLSDFCNKSVNHICGSVDDEANVXHSRLCHINFGLMSRLSSMCLIPKFSIVKGSKCHSCVQSKXPRKPHKAAEERNLAPLELLHSDLCEMNGVLTKGGKRYFMTLIDDATRFCYVYLLKTKDDALDYFKIYKAEVENQLDRKIKRLRSDRGGEFFSNEFDLFCEEHGIIHERMPPYSPESNGIAERKNRTLTDLVNAMLDTAGLPKAWWGEALLTLNHVLNRVPNRNKDKTPYEIWIGRKPSLSYLRTWXCLAKVNVPITKKRKLGPKTMDCVILGYAYHSIAYRFLIVKSEEPDMHVGTIMESRDATFFESFFPMKDTHSSSSQSSEIIPSSITPPEQTEHTHEHVTEEDDSAAPRRSKRQRTAKSFGKDFTLYLVDDTPKSISEAYASPDADYWKETVRSEMDSIIANGTWEVTERPYGCKPMGCKWVFKKKLRPDGTIEKYKARLIAKGYTQKEGGDFFDTYSPVARLTTIRVLLSLAASHGLLVHQMDVKTTFLNGELDEEIYMDQPDGFVVEGQEGKVCKLLKSLYGLKQASKQWHEKFDKTLTSAGFAVNEADKCVYYRHGGGEGVILCLYVDDILIFETNLEVINEVKSFLSQNFDMKDLGVADIILNIKLIRGENGITLLQSHYVEKILNRFGYIDSKPSPTPDDPSLLLRKNKRIARNQLEYSQIIISLMYLASATRPDISFAVSKLNRFTSNPGDDHWRVLERVMRYLKGTVELGLHYTGYPAVLEGYSDSNWISDVDEIKATSGYVFTLGGGAVXWRSCKQTILTRSTMEAELMALDTATVEAEWLHDLLMDLPIVEKSTCEKTIEVCQEIKKLXSYNVGLHPNSXKPGRSFHEGTITKCDRQCIEGDGFETHSILQRTHLCELDCWSQSMEILGESSRKLTIDLGV

SEQ ID NO: 120817 - protein, 1199 aa, Oryza sativa
  unsure (1)..(1199): unsure at all Xaa locations
  Clone ID: PAT_MRT4530_23902C.1.pep
MAGFADALRPDKFTGVHFKRWQIRVTLWLTAMKCFWVSTGKPEGVLTAEQQKQFEEATTLFVGCILSVLGDRLVEFHDYKMADNRSVVEQAHEIQTMAKELELLKCVLPDKFVAGCIIAKLPPSWRSFGTALKHKRQEYSVEGLIASLDVEEKAREKDAASKGDGGQSSANVVHKAQNKSKGKYKAQQTTNFKKQKKNNNNPNQDERTCFVCGQVGHLDRKCPQRKGMKAPAGQTSKSANVTIGNTGDGSGYGNLPTVFSVNQSTNWWVDTGANVARGSTVLMGNGSHASVHGVSTVDLKFTSGKIVQLKNVQHVPSIDRNLVSGSRLTRDGFKLVFESNKVVVSKHGYFIGKGSKCHSCVQSKQPRKPHKAVEERNLAPLELLHSDLCEMNGVLTKGGKRYFMTFIDDATRFCYVYLLKTKDEALDYFKIYKAEVENQLDRKIKRLRSDRGGEFFSNEFDLFCEEHGIIHERTPPYSPESNGIAERKNRTLTDLVNAMLDTAGLPKAWWGEALLTSNHVLNRVPNRNKDKTPYEIWIGRKPSLSYLRTWGCLAKVNVPITKKRKLGPKTVDCVFLGYAYHSIAYRFLIVKSEVPDMNVGTIMESRDAIFFESFFPMKDTHSGSNQPSEIIPSSITPPEQTEHTHELVSEEDVSEAPRRSKRQRTAKSFGDDFTVYLVDDTPKSISEAYASPDADYWKEAVRSEMDSIIANGTWEVTERPYGCKPVGCKWVFKKKLRPDGTIEKYKARLVAKGYTQKEGEDFFDTYSPVARLTIIRVLLSLAASHGLLVHQMDVKTAFLNGELDEEIYMDQPDGFVVEGQEGKVCKLLKSLYGLKQAPKQWHEKFDKTLTSAGFAVNEADKCVYYRHGGGEGVILCLYVDDILIFGTNLEVINEVKSFLSQNFDMKDLGVADVILNIKLIRGENGITLLQSHYVEKILNRFGYIDSKPSPTPYDPSLLLRKNKRIARNQLEYSQIIGSLMYLASATRPDISFAVSKLSRFTSNPGDDHWRALERVMRYLKGTVELGLHYTGYPAVLEGYSDSNWISDVDEIKATSAYVFTLGGGAVSWRSCKQTILTRSTMEAELTALDTATVXAEWLRDLLMDLPIVEKPTCEKTIEVCQEFEKLRSYNVGLHPNSXKPGISLHEGTITKCDRQCIEGDGFETHSILERTHLCELDCWSQSVEILGESSRKLTKDLGV

SEQ ID NO: 120818 - protein, 218 aa, Oryza sativa
  unsure (1)..(218): unsure at all Xaa locations
  Clone ID: PAT_MRT4530_23903C.1.pep
AGPTGQRPGREKGVAARGPTGQWHGEERGRRHAGPTGQWRGRGKGRGGGTRRDPAQDRPTGRGDGXRRARERVAGDGTRRRRRRKSGGSGRWQRPKATASAGXRRRTGKRGRRGEEMPHRGWPARRKTMANGDGRPREATATADELRRALRKEKRGIREREIDPGDRKPWPKAAVEMELTRARGDEGSGDEPRRRRGGRGGPRPREANGDDGARRRRA

SEQ ID NO: 120819 - protein, 1172 aa, Oryza sativa
  unsure (1)..(1172): unsure at all Xaa locations
  Clone ID: PAT_MRT4530_23904C.1.pep
MADNRFVVEQAHEIQTIAKELELLKCVLPDKFVAGCIIAKLPPSWRSFGTAFKHKRQEYSIEGLIASLDVEEKAREKDAASKDDAQQTTNFKRQKKNNNNPNQDERICFVCGQPGHLARKYPQRKGMKAPAGQTSKSANVTIGNTGDGSGYGNLPTVFSVNQSTNWWVDTGANVARGSTFLMANGSHASVHGVGTVDVKFTSGKIVQLRNVQHVPSINRNLVSGSRLTRDGFKLVFESNKVVVSKHGYFISKGYECGGLFRFSLSDFCNKSVNNICGSVDDEANVWHSRLCHINFGLMSRLSSMCLISKFSIVKGSKCHSCVQSKQPRKPHKAAEERNLAPLELLHSDLCEMNEVLTKGGKQYFMTLIDDATRFCYVYLLKTKDEALDYFKIYKAEVENQLDRKIKRLRSDRGGEFFSNEFDLFCDEHDIIHERTPPYSPESNGIAERKNRTLTDLVNAMLDTAGQPKAWWGEALLTTNHVLNRVPNRNKNKTPYEIWIGRKPSLSYLRTWGCLAKVNVPITKKRKLGPKTVDCVFLGYAHYNIAYRFLIVKFEVPDMHVGTIMESRDATFFESFFPMXDTHSGSSQPSEIIPSSITPPXQTEHTHEHVTEEDVSEALRRSKRQRTAKSFGDDFTVYLVDDTPKSISEAXASPDADYWKEAVRSEMDSIIANWTWEVTERPYGCKPVGCKWVFKKKLRPDGTIKKYKARLVAKGYTQKEGEDFFDTYSPVARLTTIRVLLSLAASLGLLVHQMDVKTAFLNGELDEXIYMDQPDGFVVEGQEGKVCKLLKSLYGLKQDPKQWHEKFDKTLTSVGFAVNEADKCVYYRHGGGEGVILCFYVDDILIFGTNLEVINEIKSFLSQNFDMKDLGVADVILSIKLIRGDNGITLLQSHYVEKILNRFGYIDSKPSPTPYDPSLLLRKNKRIARNXLEYSQIIGSLMYLASATRPDISFAVSKLSRFTSNPGDDHWRALERVMHYLKGTMELGLHYSGYPAVLEGYSDSNWISDVDEIKATSGYVFTLGGGAVSWRSCKHTILTRSTMEAELTALDTATVEAKWLRDLLMDLPIVEKPVPAILMNCDNQTTCEKTIEVCQEIEKLRSYNVGLHPNSXKPGRTLHKGTITKCDRQCIEGDGFETHCILERTHLCKLDCWSQSMEILGESSRKLTKDLGV

SEQ ID NO: 120820 - protein, 64 aa, Oryza sativa
  unsure (1)..(64): unsure at all Xaa locations
  Clone ID: PAT_MRT4530_23905C.1.pep
XXXFFFLLIFTIFSILYLPLKPQHTYMPDLQSSSLIVYTDTKHVLHGINKKNLVAVQKENKKAK

SEQ ID NO: 120821 - protein, 1259 aa, Oryza sativa
  unsure (1)..(1259): unsure at all Xaa locations
  Clone ID: PAT_MRT4530_23906C.1.pep
MSMQCARHSRSGHCGHLARSARGVKRLLGPLMMVEPLILMHRCYHLPQTRVAKVCCLALNPKQRWDSGSGNIKEIKIRGELGLRDEQSSSDAALTWQSTRTLRKHLLIRRGECWSEYSSIVNTDDEAKATCNSFCETCWKILRFRSNQTFHQLNPFLNLRNRCNRVKHGNPMVVLQFHLEIISLSFGKLENRGRNVLRGRLRYLQGKDFRLPVKEGRRPSTSIPEHDIGKISVLIKSLYAYNLNNPKTYYRHCDFTMAGFADALRPDKFTGVHFKRWQIRVTLWLTAMKCFWVSTGKPEGVLTAEQQKQFEEATTLCVGCILSVLGDRLVEVYMHMTDAKELWDALNTKFGATDASNDLYIMEQFHDYKMADNRSVVEQAHEIQTMAKELELLKCVLPDKFVARCIIAKLPPSWRSFGTALKHKRQEYSVEGLIASLDVEEKAREKDAASKGDGGQSSANVVHKAQNKSKGKYKAQQTTNFKKQKKNNNNPNQDERTCFVCGQLGHLARKCPQRKGMKAPTGQTSKSANVTISNTGDGSGYGNLPAIFSVNQSTNWWVDTRSNVARGSTVLMGNGSHVSVHGVGTVDLKFTSGKIVQLKNVQHVPSIDRNLVSGSRLTRAGFKLVFESNKVVVSKHGYFIGKGYECGGLFRFSLSDFCNKSVNHICGSVDDEANVWHSRLCHINFGLMSRLSSMCLIPKFSIVKGSKCHSCVQSKQPRKPHKVAEERNLAPLELLHSDLCEMNGVLTKGGKRYFMTLIDDATRFCYVYLLKTKDEALDYFKIYKAEVENQLDRKIKRLMSDRSGEFFSNEFDLFCEEQDIIHERTPPYSPESNGIAKRKNRTLTDLVNAMLDTAGLPKAWWGEALLTSNYVLNRVPNRNKDKTPYEIWIGRKPSLSYLRTWGCLAQVNVPITNKHKLGPKTVDCVFLGYAYHNIAYRFLIVKSEVPDMHVGXIMKSRDATFFESFFPMKDTHSSSSQPSEVIPSSITPPEQTEHTHEYVTEEDVSEAPRRSKRQRTAKSFGDDFIVYLVDDTPKSISEAYASPDADYXKEVVCSEMDSIIANGTWEVTERPYGCKPVGCKXVFKKKLRPDGTIEKYKVRLVTKGYTQKEGEYFFDTYSPVARLTTIRVLLSLAASHSLLVHQMDVKTAFLNGELDEEIYMDQPDGFVVEGQEGKMCKLLKSLYGLKHAPKQWHEKFDKTLTSTGFAVNEADKCVYYSHGGGEGVILCLYVDDILIFGTNLEVINEVTSTLSLHRPVSEA

SEQ ID NO: 120822 - protein, 529 aa, Oryza sativa
  Clone ID: PAT_MRT4530_23907C.1.pep
MRPGETGKRVKGSPSRSGGADEDRIGCLPDGVLHHILGFLPAPDAVRTCLLARRWRHLWKSATGLRISEGYGVEKLHDFVHHLLLLRGGAPLDTFELGSIDLAEGDNRSMNLWFRHALLCQVRVLRLNVFGLELHDLPFVSRHLVKLELRFVILMHSFLDFSSCPVLENLEIVSSELSDAKRISSQSLKHLNLTHCTFSENVRIRIDVPNLLSLWLQDYRCRTPVFEVMPLLVKAFVSVTGDSGDWLTCTSGNADSEECPHDDCGKWEMSSGCFLPCGRDARHLFDGMSPPGEAGRRGKGAARPSDDRIGHLPDEVLHDIIGLLPAPDAVRTCVLARRWRHLWKSATGLRIADDDGVGLVPMEELRDFVDHLLLLRGRAPLDTCELSFAGLSSDGGGGDARLVDLWFRHAVLCEVQALRLNAPRSASRLVLDGLPLVSGRLAKLELAHLNLVHNFLDFSSCPVLEHLEIVLCSLSDAERISSQSLKRLNITACDFSEIFRTRIDVPNLLSLRLDNYIITGLLCSRACRY

SEQ ID NO: 120823 - protein, 1399 aa, Oryza sativa
  Clone ID: PAT_MRT4530_23908C.1.pep
MSIISTIQKPYYRHCDFTMAGFADALRPDKFTGVHFKRWQIRVTLWLTAMKCFWVSTGKPEGVLTAEQQKQFEEATTLFVGCILSVLGDRLVEVYMHMTDAKELWDALNTKFGATDASNDLYIMEQFHDYKMADNRSVVEQAHEIQTMAKELELLKCVLPDKFVAGCIIAKLPPSWRSFGTALKHKRQEYSVEGLIASLDVEEKAREKDAASKGDGGQSSANVVHKAQNKSKGKYKAQQTTNFKKQKKNNINPNQDERTCFVCGQVGHLARKCLQCKGMKAPAGQTSKSANVTIGNTGDGSGYGNLPTVFSVNQSTNWWVDTGANVHVCADISLFSSYQVARGSTVLMGNGSHASVHGVGTVDLKFTSGKIVQLKNVQHVPSIDRNLVSGSRLTRDGFKLVFESNKVVVSKHGYFIGKGYECGGLFRFSLSDFCNKSVNHICGSVDDEANVWHSRLCHINFGLMSRLSSMCLIPKFSIVKGSKCHSCVQSKQPRKPHKAAEERNLAPLELLHSDLCEMNGVLTKGGKRYFMTLIDDATRFCYVYLLKTKDEALDYFKIYKAEVENQLDRKIKRLRSDRGGEFFSNEFDLFCEEHGIIHERTPPYSPESNGIAERKNRTLTDLVNAMLDTAGLPKTWWGEALLTSNHVLNRVPNRNKDKTPYEIWIGRKPSLSYLRTWGCLAKVNVPITKKRKLGPKTVDCVFLGYAHHSIAYRFLIVKSEVPDMHVGTIMESRDATFFESFFPMKDTHSGSNQPSEIIPNSITPPEQTEHTHELVSEEDVSEAPRRSKRQRTAKSFGGDFTVYLVDDTPKSISEAYASPDADYWKEAVRSEMDSIIANGTWEVTERPYGCKPVGCKWVFKKKLRPDGTIEKYKARLVAKGYTQKEGEDFFDTYSPVARLTTIRVLLSLAASHGLLVHQMDVKTAFLNGELDEEIYMYQPDGFVVEGQEGKVCKLLKSLYGLKQAIKQWHEKFDKTLTSAGFAVNEADKCVYYRYGGGEGVILCLYVDDILIFGTNLEVINEVKSFLSQNFDMKDLGVADVILNIKLIRGENGITLLQSHYVEKILNRFGYIDSKPSPTPYDPSLLLRKNKRIARNQLEYSQIIGSLMYLASATRPDISFAVSKLSRFTSNPGDDHWRALERVMRYLKGTVELGLHYTGYPAVLEGYSDSNWISDVDEIKATSGYVFTLGGGAVSWRSCKQTILTRSTMEAELTVLDTATVEAEWLRDLLMDLPVVEKPVPAILMNCDNQTTCEKTIEVCQEIKKLRSYNVGLHPNSEKPGRSLHEGTITKCDRQCIEGDGFETHIKSLYVYNLNTLSSSSSFSGTGGPPRIDDIVAAATMTTPRDHKLKVVTKPGGGAQRVAAMETLPRETFSPRFRCGGGAAAAVASAIVGRSYLGGK

SEQ ID NO: 120824 - protein, 55 aa, Oryza sativa
  unsure (1)..(55): unsure at all Xaa locations
  Clone ID: PAT_MRT4530_23909C.1.pep
KRETIFCAPGGRXPRWRSGRSPAKLXPGAEHLGRGERXHRLRPTIQREVGDAAEG

SEQ ID NO: 120825 - protein, 137 aa, Oryza sativa
  unsure (1)..(137): unsure at all Xaa locations
  Clone ID: PAT_MRT4530_2390C.1.pep
VTERGAPHRETAQAPLCQPGPPFYLVRGHHMGLXLPKKGNTLFTKRASLQPEVTSDKHSAHLLLRSSALSVDARFNFHSMASDFLAMLAPKSGMDLTGTDIPTPGVSTPAPARDESQEALIIPTGRGEACDRPPVAT

SEQ ID NO: 120826 - protein, 179 aa, Oryza sativa
  unsure (1)..(179): unsure at all Xaa locations
  Clone ID: PAT_MRT4530_23910C.1.pep
FRYPAKGYTQKEGEDFFDTYSPVARLTTIRVLLSLAASHGLLVHQMDFSFIKWXVKTAFLNGELDEEIYMDQSDGFVVEGQESKVCKLLKSLYGLKQAPKQWHEKFDKTLTSASFAVNEADKCVYYRHGGGEGVNLCLYVDDILIFGTNPEVKNEAKSSLPQNLKLKXLGIADVILNIN

SEQ ID NO: 120827 - protein, 303 aa, Oryza sativa
  Clone ID: PAT_MRT4530_23911C.1.pep
MKWSSVPIPSSPPMQHQTAMVTEKKEFGSVAQFHHLALDTQYGPMRFTDSIIREDHRLTGSLNVLSLKVKSSDVGYPINLYGTVIVRDGLDFNCNFIFRRNRNNCQVIQSENENIILTGPTRGIVFHDIFFEINLKIKEYEECNDKEFSKGLLEMKFHTRKSKIVSETFESRLSEVELVSACVKEALEGTVEITILSGPKVFHGKISACTTDVSNYIVLYDSNVCGATSVGDDRVMQLLRRVVAVSANEILILNIHAHNIHQNDNVSSRTLRFTPLARGADEEVINCDLYKMQVKVVWSVFKG

SEQ ID NO: 120828 - protein, 44 aa, Oryza sativa
  Clone ID: PAT_MRT4530_23912C.1.pep
MVGRVIMEEVCQMLGWDEKEGEIAGLKGMAVRGSGSIGQSEASG

SEQ ID NO: 120829 - protein, 190 aa, Oryza sativa
  Clone ID: PAT_MRT4530_23913C.1.pep
MSPSLPSSSTSQPFCRWGADAVTGHRRRAGTQGNDGVEEGGAVGAAREVLVTMGAVGEEESVGNAGKGDERRGKGGVERAAGEKLGGYRRRRGGRRNGRQRDGRLPAAVREKVQFPASYHCRSGYHRSACPALLRPRPAAAVLRSSRPTPPARSGCRRSACPAPLRPRTCSAPAAPSFARSSRRRPAPPK

SEQ ID NO: 120830 - protein, 1117 aa, Oryza sativa
  Clone ID: PAT_MRT4530_23914C.1.pep
MPRRRRSAGTRGRPPRWRRRRLREEGTGTPGCGTGIAAPSPPSRPPMRCASTRGLSHHQQQQQQSPPAAAKAAEALRQGGGGSGGLNLQLGLREDAATPMDVSPAATTVSSSPSPPASSAPAQEPVVRPSKRVRSGSPGSASGGGGGGGGGGNSGGGGGSYPMCQVDDCRADLTNAKDYHRRHKVCEIHGKTTKALVGNQMQRFCQQCSRFHPLSEFDEGKRSCRRRLAGHNRRRRKTQPTDVASQLLLPGNQENAANRTQDIVNLITVIARLQGSNVGKLPSIPPIPDKDNLVQIISKINSINNGNSASKSPPSEAVDLNASHSQQQDSVQRTTNGFEKQTNGLDKQTNGFDKQADGFDKQAVPSTMDLLAVLSTALATSNPDSNTSQSQGSSDSSGNNKSKSQSTEPANVVNSHEKSIRVFSATRKNDALERSPEMYKQPDQETPPYLSLRLFGSTEEDVPCKMDTANKYLSSESSNPLDERSPSSSPPVTHKFFPIRSVDEDARIADYGEDIATVEVSTSRAWRAPPLELFKDSERPIENGSPPNPAYQSCYTSTSCSDHSPSTSNSDGQDRTGRIIFKLFGKEPSTIPGNLRGEIVNWLKHSPNEMEGYIRPGCLVLSMYLSMPAIAWDELEENLLQRVNTLVQGSDLDFWRKGRFLVRTDAQLVSYKDGATRLSKSWRTWNTPELTFVSPIAVVGGRKTSLILKGRNLTIPGTQIHCTSTGKYISKEVLCSAYPGTIYDDSGVETFDLPGEPHLILGRYFIEVENRFRGNSFPVIIANSSVCQELRSLEAELEGSQFVDGSSDDQAHDARRLKPKDEVLHFLNELGWLFQKAAASTSAEKSDSSGLDLMYFSTARFRYLLLFSSERDWCSLTKTLLEILAKRSLASDELSQETLEMLSEIHLLNRAVKRKSSHMARLLVQFVVVCPDDSKLYPFLPNVAGPGGLTPLHLAASIEDAVDIVDALTDDPQQIGLSCWHSALDDDGQSPETYAKLRNNNAYNELVAQKLVDRKNNQVTIMVGKEEIHMDQSGNVGEKNKSAIQALQIRSCNQCAILDAGLLRRPMHSRGLLARPYIHSMLAIAAVCVCVCVFMRALLRFNSGRSFKWERLDFGTI

SEQ ID NO: 120831 - protein, 98 aa, Oryza sativa
  Clone ID: PAT_MRT4530_23915C.1.pep
RVHESGAHAAASRSTVDRVHPGSHRPAPWVPRVSRTQGRGRLTAGPHAAATRRARGWPCRHGRRETARPRPDGRRRRPPARRSSGRERGGKGERRRRS

SEQ ID NO: 120832 - protein, 377 aa, Oryza sativa
  Clone ID: PAT_MRT4530_23916C.1.pep
MEDLSDLEGYHHLYTHLKPIILTARILYLTAVNRVQPEFMDQRSICEIPHMARAAAGRPGGGERRLWEPPFDASLPAPPISYPITTLAVLASRAYLSEDGNFHLPFNRASVPALASSRRAAPLPPRRHILACHDFRGGYRDDAAPQGGDDPGAYALWHWHLIDVFVYFSHYLCHAPAAVLEWDKVVEICEEMLATEASTQMYAERLTELAGNYFLDGEWDIRQASAAGATAAVAPPSSSRLGPMTSSRVVAAVSLPPREAGELRGGIFRRDTFSRVASAVPIRSRRSFYGARDGASSRRLSPMAAVAATTETHGRTTAAAAADGAAPGQTSYGRRRRRADALPPPPSTEPNDSSGSAMSDKTGVKTTKGPKVNGFVS

SEQ ID NO: 120833 - protein, 1592 aa, Oryza sativa
  unsure (1)..(1592): unsure at all Xaa locations
  Clone ID: PAT_MRT4530_23917C.1.pep
MAAVAVARLPRSGSVGCGGGCSASVRLRRCRRRRHRRQPPGTGTVAGTIKGAAGADEDGGGDAGEGVPTKNPTTKLAGLPRWQRHGGNHAGGGRRAEARQAEANVNRADARTYPDPLNRSKNSHEAGDFVLGEGGDTLTPWRRAALTQHGGGSVTEVVREVDEDVDEVPVPEHVGARVVAPLRRCVVAVPAPEVVAREDVAPGQERRGPGRGGEGRHGGAVEGEVEVPVLGEVATGCEPRERGTSGVLFPSEKRGGLLEGKTPPPFPPEPPDSPPATTATPAMSASAAAAAAAYGTPPSQQPPPPTAESVLRVASRDPSAAAPLLQALPPDGLDDVLSSLSPASPPNHLALLPAVLALSPSPTAGGAALSALLSAPSWPSPTLLAVASLLRDLPAAYRHRVPAFVAKVLSLLPAADAQDLPALAYQLLLLASKPLHPRAVLSGLLRFFGGHRGARLRAPPSIARQVEGTVLMHVAFAVKQDPALAREVVAAVKADAAGTLSGFAVAVLLSVARVRRFNDAAVGVLRDAVITSRRDYRISRRCKWLPECLKGECARAANCVEKALLKAVGESIGGREHVVPSIVQVGFLLLEASDSDRKEEVGFNEGVMSTEEVGVNMLKSLFDIHGMARTEIIEQCKFRILSVKPSQSLPVIRLLGGLVRTHPFQMLEYISHLKELLDYFAFLNDKISIGLINCILPLTKFSRDLKDYIILVIRKAMFKREDAVRIAATNAIVELIIAENKHKRTEANPFQDSSSQPSSSQQPETHLEIGGGLFQELSGLLRRCFMQQARVKEVLYNGLIQIVTSDPSIAENVLDFLWPHFLNYYTEHAECPLKIDSCFKIENAKFNKIVXCEQPRDAYWKCFGFAPSQDNEXCQVGRLSSSDLFVKALSNTQKYLRKCLAEDQRGQTQETCSLSSHLDTAHCHNFAMIGIIEVFIGFTASKLEKVADEQKEMLEKEILDLIDAHSSFERKKSKNKEKVAQRAGNSSDSTAKQMNGPKEYYSATLQKLNERRETFMDSSLYELVRVCVKQCDADNLEKCSQRPTQSKLNQCHSLLSFVLKACYRMFKSLAAKGSGATTGNVRAVLYEDVKKLVGPMMQLIWWIMLDSKQENGGTKRNLTQGKKHMDSKKDQLYLALTCLTEMSKLSVPEDHPGDIIDVLVSSAPPNIEDMVHCSQLLGRNDTDPNTGSVHVFLNILKMLYVRVLSQSLPRESEAVTELILGISRKLHHEQSHLVGHWAASLCQKTILQNPSIAQEMVKLAIHLMIAPDDLVLVHEMTAELKLITTGEEDSRDSSETFPVINCKTKNSLAAVFLQMVESSLTELDWVIGKLKVMLALAYDSANIDEDDQPADERTQRLYLEEALYSRSTSVVHVLSSFAHTSLKDSQAEQFLKLTAKLYKLLARMAKSQIAPKGYKQVMPGLKFQKLAEVTCRMLTAPLYVFVALVQENQQASKRGILARIKRESKCIPDLIFQIEDYEKYLIQLSKLTKVNLLRHAKRSVARDFKIQSKDELERNSTAARAASSENMPEEDAEGPDAPLETNGDEDPQASARSDNTVEDSESDEEGERVLARRKRAKTNSIVQDSDEEAEDE

SEQ ID NO: 120834 - protein, 57 aa, Oryza sativa
  Clone ID: PAT_MRT4530_23918C.1.pep
VSSLQQSVYSWNIRPTCMKLASRRPVALFIDPDDCSHISLWMVSFSRHRSFKVNTSE

SEQ ID NO: 120835 - protein, 97 aa, Oryza sativa
  unsure (1)..(97): unsure at all Xaa locations
  Clone ID: PAT_MRT4530_23919C.1.pep
MCGGAILADLIPPSCSGGHTRKNKRRRISDYXDFQVDLEELDDRDDDSDFDFEAEAVDEYDKGAVDDHSGDGAVDLATTATIASEIPHERHGARRFR

SEQ ID NO: 120836 - protein, 260 aa, Oryza sativa
  unsure (1)..(260): unsure at all Xaa locations
  Clone ID: PAT_MRT4530_2391C.1.pep
MADGGGRRAPGFRFYPMEAEEELICFYLRNKLDGLRDDIERVIPVFDVYSVDPLQLSEIHHEMLGXGGGEEGEPWFYFCPRQEREARGGXRPSRTTPSGSWKAAGTPGVVYSADRRPIGMKKTMVFYRGRAPSGTKTAWKMNEYRAFHYPDASSASASSAGAAAPPNHLPPQLRSEFSLCRLYTRSGGIRQFDRRPLAGGGDENPGPSMAAAAASPEENDGSGSSMQQLELMDQGGAVDPDWDQWDDLATLTALLYWPRD

SEQ ID NO: 120837 - protein, 94 aa, Oryza sativa
  Clone ID: PAT_MRT4530_23920C.1.pep
MGAVKRSSFLLVVVVFALLLLTSMAAGGRKMLINKHQVQSMETSDDESMHQGQEDDEMLAMVHERILRQVKTNDYGTYDPTPTMAKPHAKEIPN

SEQ ID NO: 120838 - protein, 408 aa, Oryza sativa
  Clone ID: PAT_MRT4530_23921C.1.pep
MAAAAEAVTEVDATNEEGEEEEQVVNPWEVSAGKGGIDYDKLVDQFGCQRLDDALVARVARLTARPPHRFLRRGLFFAHRDLNEILDLYEKGEKFYLYTGRGPSSEALHLGHLIPFMFTKYLQDAFKVPLVIQLTDDEKFLWKNLTVEETKRLARENAKDIIACGFDVERTFIFSDFNYVGGAFYENMVKVARCVTYNKVVGIFGFTPEDHIGKVSFPPVQAVPSFPSSFPHLFSGNDQLRCLIPCAIDQDPYFRMTRDVAPRIGYQKPSLIESRFFPALQGENTKMSASDPNSAIYVTDSAKEIKTKVNKYAFSGGRDSIELHRKLGANLDVDVPIKYLNFFLEDDNELEHIKKEYKEGRMLTGEVKQRLVAVLSELVARHQRARALVTEEMVDVFMAARPLPNMFG

SEQ ID NO: 120839 - protein, 49 aa, Oryza sativa
  unsure (1)..(49): unsure at all Xaa locations
  Clone ID: PAT_MRT4530_23922C.1.pep
TTPTPATSPNIVPRKRGSNTQQPGTSEAGKRPQPKXXTEINTERRGQPG

SEQ ID NO: 120840 - protein, 87 aa, Oryza sativa
  Clone ID: PAT_MRT4530_23923C.1.pep
KELGRLSLATRSSPLGRKKNPREWASTSVSLLILSLSRDSRIALRRLYLRRPPTAHRRNHLSSPPRRRLLVLAVASSRLTVSLAGEA

SEQ ID NO: 120841 - protein, 210 aa, Oryza sativa
  Clone ID: PAT_MRT4530_23924C.1.pep
SAIASFEKMGSRNVQANLFGEQIQLSLIFAHYKTGEYYKALSLAERFVRAYPNSNNMDYVHYLVGLSNVRLGDNFIQDFFHVNRSSRTIESIRNAYGNFQMIVRIYPQSQYVNDAQQWMVYLLNRMAEHELSIVKFYDKRDASVAVVNRVEEMLRFYPASKSTFDALPYMQKAYQRMGLKDSEAKVAELIEMNKAKVFPKITKPEYSKQF

SEQ ID NO: 120842 - protein, 696 aa, Oryza sativa
  Clone ID: PAT_MRT4530_23925C.1.pep
MLLGPRVMEERRGLMGRERDQFPVGMRVLAVDDDPVCLKVLETLLRRCQYHVTSTNQAITALKLLRENRDMFDLVISDVHMPDMDGFKLLELVGLEMDLPVIMLSVNGETKTVMKGITHGACDYLLKPVRIEELRNIWQHVVRRKFGNRERNNLDFSKECNKPQSADTDHGPYQPTCGSSDQNGRSSRKRKELHGEDDDEGDDNDYQENDEPSAAKKPRVVWSVELHRKFVAAVNQLGIDKAVPKRILELMNVEKLTRENVASHLQKYRLYLKRLGAVASQQASIVAAFGGRDPSFLHIGAFEGLQSYQPFAPSAALPSFNPHGLLTRTSAAAAFGLQELAAPSSTIQTSTGNVTVGHCLEENQQANLAQGLTAAIGQPQLQQNWIHQEGNGLSDVFSGSSLTNTLSSTLQRVPSSSLPPQELLECKQAKVSMPPSIRIPPSSSALLERTLGVSTNLGDSSISQQGALPIDGGFSADRLPLHSSFDGAVATKLDTSLAASQREIGQQGKFSVSMLVSPSDNLALAKNAKTGASSSGSTIILPLDTARHSDYLQFGGASNSLQKMDGQKQDHIQSSNIIWSSMPSTQLPSDTQIHNTQNQRLDSGSFNHNIGAHLADQTNASASILPQMKFDTRISEEKMKQKNTYDLGSSKLQGGFNSSGCNFDGLLNSIIKVEKDDLPFMDNELGCDLFPLGACI

SEQ ID NO: 120843 - protein, 75 aa, Oryza sativa
  unsure (1)..(75): unsure at all Xaa locations
  Clone ID: PAT_MRT4530_23926C.1.pep
PLAPRPRSTVSAPRRSTAMLARCPPIXPIKKKRRKRKEKKENVQLTCGPHGPFYFFLTRMPRQRNPSHILPWDLI

SEQ ID NO: 120844 - protein, 227 aa, Oryza sativa
  unsure (1)..(227): unsure at all Xaa locations
  Clone ID: PAT_MRT4530_23927C.1.pep
MAGPHPDKVFAQPPCEINAHGGLAKGDVMARIAKEGARTIPGRPEHGGNCDINNISRGSKTYLPVHVPGAKFSVGDLHFSQGDGEISFCGAIEMAGIITIKFDLIKGGVKSRGLKSPVYRPGDMGPTFSPSRYLTFEGFSVDEQGKQHFMDATIAYRQSCLRAIEYLKQFGYSGEQIYLLLSCAPIRGAIAGIVDIPNACTTLGIPMDIFDXDISIESEPVVRNLGA

SEQ ID NO: 120845 - protein, 393 aa, Oryza sativa
  Clone ID: PAT_MRT4530_23928C.1.pep
MIHGIKGTPGRGVKGIESHRQHTHHSLQSRRMRSQVAERSRQMLRLLSYPCTSVPQYPLYPVYEYHSSTVARQVEASGTQGSTTMPSSFVDNNVNTSFSQALPTSTMLVWTHVGEIVFPVYTTMPISTGPPMTGNENAVATNQGNSMSKNPPVEMENGLPTTPKLGKDSDAAKPYPSDINHGLTKMTSEATRSWCPIHKTKKHTLQDCWVFLNDPRALLYPSPPSPSPLVVGRALAPCALASPSPPPLQPCAAVVSAVAVAREDRRRVRKVVAVLVRPFAAAGDRRSFIAVVNPKVPAASSSSPSPSVASPSLFWSSVSSPCRPLRPGAFRLRSRAAVRRQACAARAVCLAEPPPPSVTSLLASSRPSAVNRRGPDRSRPSILDRLDLGRPFV

SEQ ID NO: 120846 - protein, 56 aa, Oryza sativa
  Clone ID: PAT_MRT4530_23929C.1.pep
SPDAESHPLDEGAYTLAGPTVQKFPPTRHTRTVPLGLTTGRSCATTDSRARTPRRR

SEQ ID NO: 120847 - protein, 194 aa, Oryza sativa
  Clone ID: PAT_MRT4530_2392C.1.pep
MADERRVTAAARRALRLDDVEPAAAAPEASVAEDRPPAPRRCCAVMTNLERALGRAAIAVDEAATRPVSPPSPVARGRRSRGSSDLPERLPPPKISARGGRWGASPMPEMTSDKQSIRLLPRSPAFPVDAHFNLHLMASDFLAILALKPGMDLTGTDIPTPGVGMPAPARDESQEAFIIPTGRGEACDRPPIAT

SEQ ID NO: 120848 - protein, 507 aa, Oryza sativa
  Clone ID: PAT_MRT4530_23930C.1.pep
ARPPSSQLGRPKPGGCPLPAGDGYYLIFVTKRRQIGCICGHPIYCIDESQMITIPHSSVQTRPATSKNELRYKKLLASVDLTKDFFYSYTYPIMQSLQQNVTSAGMKEMPYENLFVWNTFLTQPIRSRCRNTLWTVALVHGHFKQVKLSIFGRELNVVLISRRSRHFAGTRYLKRGVNDHGKVANDVETEQIVFEEEAGSWKGRMSAVVQMRGSIPLFWWQEAGRLSPKPDIIVQRYDPTYEATKLHFDDVAQRYGHPIIILNLTKIFEKRPREMMLRREYFNAVGYLNQNVPEEKKLRFIHWDFHKFAKSKSANVLGVLGGGASEALDLTGFYYNGKPKVQKKRSTQLTHISFHRDGSIDTRASSGDLPRLSSNADSLGPTASQDIRKDDSKQELLGDGPCYQTGVLRTNCMDCLDRTNVAQYAYGLAALGRQLHAMGATNVSKIHPDSSIASALMDLYQSMGDALVGSPGGAAFHHGVAPGRRGGLRPRRGGRLFIASVKRLYIA

SEQ ID NO: 120849 - protein, 399 aa, Oryza sativa
  Clone ID: PAT_MRT4530_23931C.1.pep
MSRTLLSHILHRPPPLLASRGGGRGGALPSRLRTLRLNCSVAEATASGDEAPAPPARKKRVVSGVQPTGLVHLGNYLGAIKNWVSLQDLYETLFFIVDLHAITLPYEAPQLSKATRSTAAIYLACGIDSSKASIFVQSHVRAHVELMWLLSSSTPIGWLNRMIQFKEKSRKAGDENVGVALLTYPVLMASDILLYQSDLVPVGEDQTQHLELTREIAERVNNLYGGRKWKKMGGRGGSLFKVPEALIPPAGARVMSLTDGLSKMSKSAPSDQSRINLLDPKDVIMNKIKRCKTDSFPGLEFDNPERPECNNLLSIYQIITGKTKEEVIRECENMNWGSFKTTLTDALIDHLQPIQVRYEEIMSDPGYLDGVLLEGSGKAAEIADITLNNVYQAMGFLRR

SEQ ID NO: 120850 - protein, 318 aa, Oryza sativa
  Clone ID: PAT_MRT4530_23932C.1.pep
MAVEKGKRVHVVEAETDVLSPDNELVFLEFDLHVTHIFGGSTTYSSKREYKKVEHGICSTSQGVPPEMKWFEQKIEFSEEDHPTTTTILGRYPIVVEPTIQNINVAPVLIDGSSSINLLFVGTLDAMGIPRIDNFRTEQITFDISAILGRAALAKFMAASHYAYQLLKMPGPKGTITIQGNAKLAVQYDKRSLDMVEHTPTSLTTTEPPKKVSKPNKAPRPDDAIKIVPLTSTNPDKTISMAAEDEEKTTFITPFCVFCYTKMPFGLISAGNTYLREIQGVLGDQIGRNVEAYVDDVVVKTKMGDTVIDFLRETFNNL

SEQ ID NO: 120851 - protein, 354 aa, Oryza sativa
  Clone ID: PAT_MRT4530_23933C.1.pep
MAFFLPLAFSLFLAVISAYVLQLLADARRRLPPGPWPLPLIGNLHQLDHLPHRSLARLAARHGPLMSLRLGTVRAVVASSPEMAREVLQRHNADIAARSFGDSMRAGGHCENSVVCLPPRRRWRALRRLSTVGLFSPRRLDAMRALLEEKVAELVRRVSGHAARGEAVDVGHAAHVAALGVLSRTMFSVDLDPEAAREVSDIVDEASVLGTGPNVSDFFPAIAPADLQGVRRRMARLVKRMYAIIDEQIERRMHGRTAGEPRKNDLLDVMLEEGESKEDSNEINRDAIRGLFTDLFTGGETTSHTMECAMAELLQCPNSMRRVHELKSVIGSKQQMDEHDITKLPYHHTRPKPR

SEQ ID NO: 120852 - protein, 225 aa, Oryza sativa
  Clone ID: PAT_MRT4530_23934C.1.pep
MGAADKGTGVQFEDFLPSMARKLGVEGLIEELCKGFELLMDPGAGKITFRSLKRNAAMLGLGELRDDELSEMMREGDLDGDGALDQMEFCVLMGARYHKNGKSHLWSAADEPGASPADRDTGRVDERALEDRNSPHGPNPEPRVAVAAVASEVDVEASRKGEDETRTGARDLNRLAAVRPRTSFRDAIAAGAPSKWGGGCVNPVRSRMRRGRVGTARDLNVNFPA

SEQ ID NO: 120853 - protein, 152 aa, Oryza sativa
  unsure (1)..(152): unsure at all Xaa locations
  Clone ID: PAT_MRT4530_23935C.1.pep
SYCKALERLSLRVRPRMAASFLVGGCGFCLGLLDPVSNIVANTLFSYGRAVGETRSECDELVYIPEEKLRDLEHRSLDGMVTFLTRFFPYLADAEAVRFLLYAEADLLVAARIVAFDIGMRRFGSSGPDIVNEALENGLKCAXLAXKHPNPD

SEQ ID NO: 120854 - protein, 263 aa, Oryza sativa
  Clone ID: PAT_MRT4530_23936C.1.pep
MDRLKRVTGMAKGLSAVPAQKNEDESLVLFGELYRHEKEKDVNLLEPMYSVEFEAIQGTSRMFKLPSGKKDYLLPDGGKHDYDWLKTPPATPLFPSLEMEANSSQMVFQRELPILQPVKTSRFSIKPEPTSTSTRTESPTSSSSKSATPTARSSSSSSKKNFTKGDPALSEVTTAYKMDKRSSYTPLKNIQQLAAPTTSTAASKAAKKTSASKKPEFPGSTNAVNKMAKLGIPDKPLKKTTATAPKARSKDPAIGMKDLKMDA

SEQ ID NO: 120855 - protein, 310 aa, Oryza sativa
  Clone ID: PAT_MRT4530_23937C.1.pep
MVRPPCCDKDGVKKGPWTPEEDLVLVSYVQEHGPGNWRAVPTRTGLMRCSKSCRLRWTNYLRPGIKRGNFTDQEEKLIVHLQALLGNRWAAIASYLPERTDNDIKNYWNTHLKRKLKKMSATGGGGDDGEGGGAGEVKTRAAAPKGQWERRLQTDIHTARQALRDALSLDPSPPAKPLDSSSGATAPPSSQAATSYASSAENIARLLEGWMRPGGGGGKTTTTPSSGSRSSAASVLSGEASHSGGATAPTPDGSTVTSKTKDEETAGAPPPPPPPAFSMLESWLLDDGMGHGEVGLMDVVVPLGDPSEFF

SEQ ID NO: 120856 - protein, 101 aa, Oryza sativa
  Clone ID: PAT_MRT4530_23938C.1.pep
MSIMLFLERLYMALVVAALWLIRRRRRRSNRREQDDDGAENDQLLQDPEAANSPMVLVQIPMFNEKQYIVSSRKCMVSGCVHAELALRASTTCLSTSSNVK

SEQ ID NO: 120857 - protein, 74 aa, Oryza sativa
  unsure (1)..(74): unsure at all Xaa locations
  Clone ID: PAT_MRT4530_23939C.1.pep
SFLSGLIQRVVPGRGVVVPELRRDETTGTSIGHARHRKTTVLXQLLSRSRSPLSPLRHVSGDLSINPGGQRRCP

SEQ ID NO: 120858 - protein, 300 aa, Oryza sativa
  Clone ID: PAT_MRT4530_2393C.1.pep
MDRGRNGRDDFFGGRDPFAGFGGFGRQRSLISGVFGGRDPFDDPFFNQPFGSGMHGPSLFGPMGGPFGDIRNDGFLEQAPPRGNGRKLIITELDEEEGENSGRQRQANREPYVQEPDDEMQGGQLQPRRDFNRANEGQPQARTFTYQSSSVTYGGVNGAYYTASKTRRTGSDGITVEESKEADTTTKEATHRISRGIHDKGHSLTRKLKSDGNVDTTQILHNLHEDELAGFEESWKGNARHHLAGLNQNAGTSNNNEPGNRGTSGRGRQSAWGWALPGREQGRDQRRNGERPKSRVIPIS

SEQ ID NO: 120859 - protein, 223 aa, Oryza sativa
  Clone ID: PAT_MRT4530_23940C.1.pep
HSFLSGLIQRVVPGRGVVVPELRRDETTGTSIGHARHRKTTVLTVTSTRIRREGLRPHSTVERCTRPSPPPVVATTQLLSRSRSPLSPLRHVSGDLSINPGGQRRCPFFLTELNQLHSLHGFKLVGNCSVLSLTPQADRSSARRMGRKPIADGLKVDFFHNWMWMHARRHRGIAHRNRPSSRQKAQSGTRFLLSLSLSLSFSIVDHACLFFLDLARAHAYALG

SEQ ID NO: 120860 - protein, 57 aa, Oryza sativa
  Clone ID: PAT_MRT4530_23941C.1.pep
MTRMQQVYLALPEVKRANVTSLRLILESTKEQKACHYHEQLYRHGLVGKHRNLKRTS

SEQ ID NO: 120861 - protein, 83 aa, Oryza sativa
  unsure (1)..(83): unsure at all Xaa locations
  Clone ID: PAT_MRT4530_23942C.1.pep
ECITFDLLALRAPIGENTVVLGGSKNDREAVRLFGWAHGVPXSPIDPYVRFNGRKLDKVRVKRNSGAYEVSVRYSWQVMPWAL

SEQ ID NO: 120862 - protein, 155 aa, Oryza sativa
  Clone ID: PAT_MRT4530_23943C.1.pep
MATTEEKIASTRLMRQQAQVEFGRARSLRLHAVLMRRRAQVELGRVRVLRDAAVRMRQEAQMDIAHARTLRVHALRMRLRAQAELVRCCNTDDGKGDNGEKAGDAGIREGSVVDSLAGADRFTDSDNIGYVVDSLANNTFVADSLEVTDAEEKNN

SEQ ID NO: 120863 - protein, 1230 aa, Oryza sativa
  Clone ID: PAT_MRT4530_23944C.1.pep
MATILLLLLGLLVGLPLLRAHGVTGSAAPTPPPLPVLPVPSYAQLQWQLSEMALFLHFGPNTFTDSEWGSGRADPAVFAPSALDAGQWARAAAAGGFGRVVLTAKHHDGFCLWPSALTNYSVAASPWKGGAGDVVGELAAAARAEGIGLGLYLSPWDRHEPVYGDTVAYNEHYLGQMTELLTRYGDVEEVWLDGAKGEGKDMDYMFDAWFALIHQLQQRVVIFSDAGPDTRWVGDEAGVAGYTCWSPFNKSTVTIGHIIPEYSRCGDPFGQDWVPAECDVSIRPDMQVLQEFTEIRQTIFSQNFAANATVTASTVRGGLGNQQFAPSNVLQESIYSYWAPEEGQSSWEMLFDLGQSASFNVIQLQEPIQMGQRVIKFRVEILVDELWQTIVEGTTIGYKRLFQFPVVEGAPALPPPPATMSDQPPPYTPLPLLSSFPPNPYPDQTPDPASTPTLVLPNPAFPNKRKRTGFRRKLPSGSPAAPVAVAASPSAQPPPRASAADDIIVINREPTAEAVTALTAGFPADSLTDEEIEAGVVSDVGGIEQVNYILIRNHLLTRWRETFNSWLAKESFATLIPPHCDHLLNAAYSFLVSHGHINFGVAPAIKERIPKEPTRHNTVIVVGAGLAGLAAARQLVAFGFKVVVLEGRKRCGGRVYTKKMEGGGRSAAGDLGGSVLTGTFGNPLGIVAKQLGLPMHKIRDKCPLYRPDGSPVDPEVDKKVEGTFNKLLDKSSLLRASMGDVAMDVSLGAALETLRQTDGDLSTDQEMNLFNWHLANLEYANAGLLSKLSLAFWDQDDPYDMGGDHCFLPGGNGRLVQALAENVPIVYERTVHTIRYGGDGVQVVVNGGQVYEGDMALCTVPLGVLKNGGVKFVPELPQRKLDSIKRLGFGLLNKVAMLFPHVFWSTDLDTFGHLTEDPSHRGEFFLFYSYATVAGGPLLMALVAGEAAHNFETTPPTDAVSSVLKILRGIYEPQGIEVPDPLQSVCTRWGTDSFSLGSYSHVAVGASGDDYDILAESVGDGRLFFAGEATTRRYPATMHGAFISGLREAANITLHANARAAKSKVEKGPSTNTQACAALLMDLFRQPDLEFGSFSVIFGGQASDPKSPAILKVELGGPRKKGATEGGKADQHHSNKLLFQQLQSHFNQQQQLYVYTLLSRQQAMELREVRGGDEMRLHYLCEKLGVKLVGRKGLGPGADAVIASIKAERNSSRTKTRPSKLKIGIPKSKS

SEQ ID NO: 120864 - protein, 383 aa, Oryza sativa
  Clone ID: PAT_MRT4530_23945C.1.pep
MMRLKVTILVVAFVLSAGVHISAAAAAAGQREEVHLVPAVYVFGDSTVDVGNNQYLPGNSPLQLPYGIDFPHSRPTGRFSNGYNVADFIAKLVGFKRSPPAYLSLTPQTSRQLMRGYRGANYASGGSGILDTTGTTVVTLTKQIVYFAATKSKMMSNGGGDGNSSSASASAIDDLLSKSLFLISDGGNDLFAFLRQSNRTASQVPSFYADLLSNYTRHVQALYSLGARRFGIIDVPPIGCVPSVRVTSQAGATRCVDAANDLARGFNSGLRSAMARLAGSGALPGMRYSVGSSYNVVSYLTANPAAAGFKVVNSACCGGGRLNAQVGCGAPNSTYCGNRNGYLFWDGVHGTQATSRKGAAAIYSAPPQMGFASPINFKQLVSS

SEQ ID NO: 120865 - protein, 136 aa, Oryza sativa
  Clone ID: PAT_MRT4530_23946C.1.pep
MAAAAEGEKKMITLKSSDGEEFEVEAVGMESQTIRHMIEDKCADNGIPLPNVNSKILSKVIEYCNKHVHASADDSTSSADLKNWTPTSSSAEFVQIYLDMIKGKTPEEIRKTFNIKKDLAPEEEEEIRRENQWAFE

SEQ ID NO: 120866 - protein, 179 aa, Oryza sativa
  unsure (1)..(179): unsure at all Xaa locations
  Clone ID: PAT_MRT4530_23947C.1.pep
TRQVTPPPPRTMPPSHQQHPPSPPPPPPPSSRRASVAADGPCAELLAAASPSPRCSPPSLPQTVSLPAAGSPPSPGXPPTLICSTTHSPLHATSSPSRAVTRAPTPPRRRKPSVARSLPTPXPRHPLPAPHCTRPVRRRAARPVLPHLPATGSPPSPRRRRRRSAPPPTPRCTRPVRRH

SEQ ID NO: 120867 - protein, 114 aa, Oryza sativa
  Clone ID: PAT_MRT4530_23948C.1.pep
KSINPKYSGYVSEGVAGEGSQSTSSRRILGARPESIPPKILAGCPPPCHPRVSEGSLQGESGERLDHGLVDDIGHSCGGTAAAAVGRRGSPLDGECWAEKSGGGRFPRAEFLQP

SEQ ID NO: 120868 - protein, 86 aa, Oryza sativa
  unsure (1)..(86): unsure at all Xaa locations
  Clone ID: PAT_MRT4530_23949C.1.pep
VVAVGMVENALQPSLGANPHRLGKALDQMAXGGFGRTWGRPDPIQFRLAASSVASLCRLVNFGPVCRVNSEFLAHSCISLVLDISY

SEQ ID NO: 120869 - protein, 121 aa, Oryza sativa
  Clone ID: PAT_MRT4530_2394C.1.pep
MTELGAPHRETAQGPLCRFGRGRYVRFFALDLRNPEVTPDKHSTRLLLRSSALPVDARFNLHSMASDFLAMLALKPRMDLTGTDIPTPGVSTPAPARDESQEALIIPTGRGEACDRPPVAT

SEQ ID NO: 120870 - protein, 194 aa, Oryza sativa
  Clone ID: PAT_MRT4530_23950C.1.pep
MGKYMRKAKVVVSGEVVAAAVMELAAAPLGVRTRARSLALQKRQGGEYLELRSRRLEKLPPPPPPPPRRRATAAAATADATAAESAEAEVSFGGENVLELEAMERNTRETTPCSLIRDPDTISTPGSTTRRSHSSSHCKVQTPVRHNIIPASAELEAFFAAEEQRQRQAFIDKYNFDPVNDCPLPGRFEWVKLD

SEQ ID NO: 120871 - protein, 172 aa, Oryza sativa
  unsure (1)..(172): unsure at all Xaa locations
  Clone ID: PAT_MRT4530_23951C.1.pep
ALPGSRGERLWVGTFDTIEEDAHAHDAAMLALCGASASLNFSNSAWLLHIPRAPAPRRLRPLAARHAARRQRGRRRVPAPGXTATSGDAASTAPPPTPVLQTKQCDFISVSSLDCWMLMSKHISSSIAKGSLCLQKNPISFCMVTNSYPSLLLEYIILQMNSFVLCISRLQR

SEQ ID NO: 120872 - protein, 61 aa, Oryza sativa
  Clone ID: PAT_MRT4530_23952C.1.pep
MKIDGLAVLLLYGEPGFDLKRGKPSSRDNGFSPPGQGSMRSSTTTGSNLWLLHCGSRSCSQ

SEQ ID NO: 120873 - protein, 554 aa, Oryza sativa
  Clone ID: PAT_MRT4530_23953C.1.pep
MVSNGNEDLKADVELVESTTVDNDTGAPGASTLPTQGVPRQGKQRNGFLNFCNRFSSGDRFKKLGPSPSFKFRQLALERDEFSRSIHSDSHDNHEHFQFIRKINWGHLWVMCKDWIKEPLNMALFAWIACVTVSGAILFLVMTGMLNRALPSKSQRDAWFEVNNQILNALFTLMCLYQHPKRIYYFVLLCRWEQKDVLVLRKTYCKNGTYKPNEWMHMMVVVVLLNLNCFAQYALCGLNLGYRRSERPPIGVGLTISVAIGAAAFAGLYNIISPLGKDYDTELTEVDQEAQTELTRPATSRTSLEKRYSFIQSEERRFVESRPEWVGGLMDFWDNISLAYLSIFCSCCVFGWNMQRLGFGNMYVHIATFMLFCLAPFFIFNLAAVNINNENLREALGLTGLALCFFGLLYGGFWRIQMRKRFNLPANNFCCRSAEATDCFQWLCCSSCSLAQEVRTADYYDIAEDRSYTEQITARSQHVMTPLSREDGLPLFRSNPGSPYRSSTASPSIFIMESPSAPRRSPGPSPLGGSPTMGDRTMKAPTPSVLHRDGEPEL

SEQ ID NO: 120874 - protein, 528 aa, Oryza sativa
  Clone ID: PAT_MRT4530_23954C.1.pep
TLLLFIIFCIFSSCYIPSPAIASDHDPSSKGFIHCLTKKSIPPWLIHKRSSSSYTPILKSSIRNPKFLNTTASTTPLCIVMAKKTSHIQAAVVCGRRHRVRVRARSGGHDYEGLSYRAEGRLERFAVVDLSGMRSVRVDAARGTAWVQSGATLGELYHAIWSSAPRLGFAAGVCPTVGVGGHFSGGGFGMLQRKYGLAVDHVVNATLVDARGDLLGRDAMGEDLFWAIRGGGGGSFGIVVSWHIKLVPVPPTVTVFDVVRTPERGAIDVLTKWQEIAPRLPDDIMVRVIAEPRRVTFEAMYLGTCDELLPLMHHRFPDLAMTRADCNEMTWIESIPYIHLGSNATVADILNRSSISRVNTKNRSDYVRHPIPKSIWKKIFAKLQQLTNFGEVQLFIDPYGAKISRIHESATPFPHREGVLYNIQYITYWNGDANGTLALKWSRDLYKFMEPYVSKNPREAYANYRDLDLGRNKVVNGISSYHHGKVWGEKYFRANFERLAKVKATVDPDDYFRNEQSIPPLPGRPPAS

SEQ ID NO: 120875 - protein, 250 aa, Oryza sativa
  unsure (1)..(250): unsure at all Xaa locations
  Clone ID: PAT_MRT4530_23955C.1.pep
VTSAMTSAPAAAWRXRQLGRRMLAGERRHDDANGRHQRVEGDATNSPVTKTTAEKQRTAPATRKKRRRLRRRRRGGRGRRRLGDHDGDLPERRRRPERRRRTAGAAATTAAVGHTALGRFRRRETKAREAAGRGDTGGPFKGVGRRRQRPTATGGGMESDXDDDSKREKEEEIEKIISPQKISPEKERIDRIXEGDGGGSDAARLXGFGRRRLEVDDNPDRWGPPVSDIERERGERRELSSEKSEKISES

SEQ ID NO: 120876 - protein, 307 aa, Oryza sativa
  unsure (1)..(307): unsure at all Xaa locations
  Clone ID: PAT_MRT4530_23956C.1.pep
LFLKRKRGLLRQRXLGFTVDRVHGCGSRKRTAEIDXSKTDGRDRXIHRGSRTDDDDDVSDDVSDDVSTGGGSATRAAHARRRTTARRRKRKAPTGRGRRGELTGDQRRSGGEDRVDGGDGALAVFGDGEGVDGDGGDLATTMATSXRATTTTGTAAAHGWSGGDDGGARSHGARALPTARDEGEGGGGGWKAAAKAHGDRRRDGKLGVRRKETDPNRPRIHELPKRLRRXFQKRKGRGDREDHFPSKDFTGSGKDRWGPPVSDSERERRAAARAGWADWAGGEREREXVLGRLSAQSQKKTFKNLFQ

SEQ ID NO: 120877 - protein, 79 aa, Oryza sativa
  Clone ID: PAT_MRT4530_23957C.1.pep
QERRGEETVLARMGICLKAGQGAITPGGPPPWAAADARRGRRRKRGPRAPTLRTSCSRPQLLPPPDRPGEPGSKRPTGL

SEQ ID NO: 120878 - protein, 51 aa, Oryza sativa
  Clone ID: PAT_MRT4530_23958C.1.pep
TFNILFSFEQVKISEEDDSDDNDQEDEEDDDDDFYGEEEEEEEEDDEDEDD

SEQ ID NO: 120879 - protein, 254 aa, Oryza sativa
  Clone ID: PAT_MRT4530_23959C.1.pep
MPAAAAAPPAARPLGPPPAGAPTAAARPAGPLPAGAPPQGRRPPGPPRCRSRSGEDGGGKGGEAPPGLCTADQEVGRIGEGKEEMKRYQEQPSLRVAVGELVDPFRYAPPSSISGARAAHLIGACLDHRRCSPRWHERPPDLCGTTGERAERRWRQWGGERSETSLRTPSFAASLGAWRSARARGHRRRSTGGAPLDASRRAARGAPLDAHRRVPLTSPRVAELAAPLSGKLDSPARENHRAPEEEERRWRRLL

SEQ ID NO: 120880 - protein, 277 aa, Oryza sativa
  Clone ID: PAT_MRT4530_2395C.1.pep
MKLDVSAMENNFAAHAAGGEDDGGLFGAGADLPAMELPTCPADFDGFQKETKEMLKHKKGTTTLAFIFDKGVIVAADSRASMGGYISSQTVRKIIEINPYMLGTMAGGAADCQFWHRNLGIKCRLHELANKRRISIAGASKLLANILYSYRGMGLSIGTMIAGWDEKGPGLYYVDSEGARLMGSRFSVGSGSLYAYGILDEGYRYVMPVEEAAELARRAIYQATFRDGASGGCVSVYHVGPNGWTKLSGDDVGELHYKYYPVEATPVEQEMADAPAA

SEQ ID NO: 120881 - protein, 90 aa, Oryza sativa
  Clone ID: PAT_MRT4530_23960C.1.pep
PATLICFCLHTISLGTNRRSKGYTMRHTSGSKLLQPTEIATIFLAMDNRASSTKIFPASNRGFSDCCSSPDLGQCSTHQHMPLLGFCCNF

SEQ ID NO: 120882 - protein, 52 aa, Oryza sativa
  Clone ID: PAT_MRT4530_23961C.1.pep
KFLNSKFRPCSGQPPPPFKFSPPNKNPPPPWEKRAPPCPFLGVGLGDSPCLL

SEQ ID NO: 120883 - protein, 109 aa, Oryza sativa
  unsure (1)..(109): unsure at all Xaa locations
  Clone ID: PAT_MRT4530_23962C.1.pep
SHGSAGAPYNPSPIGEGEKWLRXQKVTAEDCDLLHAQPXSSVHESGLTCCLXRLDALSYMPSAFIGTFLTAWLAXSXTSRLENMRYVGPKLKKLRMNALDPDDKAGVMH

SEQ ID NO: 120884 - protein, 164 aa, Oryza sativa
  Clone ID: PAT_MRT4530_23963C.1.pep
MSASSASTLPPVGKSGFTKLCKGLAVVLFLGHIVIRLFPSAVTYLALIPSRTIPFAWNLVTSGYIEQTIPGVIVSIVGLLVLGKVLEPLWGAKELLKFIFLVNLSTSACVFVTAIILYYITQQEIYLYTPLSGFYGVLSGFLVGIKQILPDQEITLFLLNIKAK

SEQ ID NO: 120885 - protein, 354 aa, Oryza sativa
  Clone ID: PAT_MRT4530_23964C.1.pep
MADEPWRLPNIVQELAAGVQEPPSRYLQDLAGGDQLAGAEIPEPIPTIDLGRLSGSDGADEAAKLRSALQNWGLFLVSNHGVETSLIDAVIEAAREFFRQPVEEKKKLSNLIDGKRFQIEGYGNDPVQTKDQILDWSDRLHLKVEPECDRNLAFWPTHPKSFRDILHEYTLKIKTVKNDILLALAKLLELDEDCLLNQFSDRAITTARFNYYSPCPRPDLVLGLKPHSDLCALTVLLTDKEVGGLQVLRDGTWYSVPAVRDYSLLINIGVTLEIMTNGTFRAPLHRVVTNAERERMSVAMFYAVDGEKEIEPVAELLGLKQQSARYRGIKGKDLLIGHYEHFSRGGRVVDSLKI

SEQ ID NO: 120886 - protein, 91 aa, Oryza sativa
  Clone ID: PAT_MRT4530_23965C.1.pep
MEVNMVFEKWSQEEEVTGIVNSLVMVSLVEGLSERLGVSGGRTNSSPSTWRFEQLTYSSLRGIFAKDKTSLPDELVHTPTEHLTDMKNTKA

SEQ ID NO: 120887 - protein, 647 aa, Oryza sativa
  Clone ID: PAT_MRT4530_23966C.1.pep
MTDGHLFNNILLGGRAGSNPGQFKVYSGGLAWKRQGGGKTIEIEKSDLTSVTWMKVPRAYQLGVRTKDGLFYKFIGFREQDVSSLTNFMQKNMGLSPDEKQLSVSGQNWGGIDINVTLSIVGNMLTFMVGSKQAFEVSLADVSQTQMQGKTDVLLEFHVDDTTGGNEKDSLMDLSFHVPTSNTQFLGDENRTAAQVLWETIMGVADVDSSEEAVVTFEGIAILTPRGRYSVELHLSFLRLQGQANDFKIQYSSIVRLFLLPKSNNPHTFVVVTLDPPIRKGQTLYPHIVIQFETEAVVERNLALTKEVLAEKYKDRLEESYKGLIHEVFTKVLRGLSGAKVTRPGSFRSCQDGYAVKSSLKAEDGLLYPLEKGFFFLPKPPTLILHEEIEFVEFERHGAGGASISSHYFDLLVKLKNDQEHLFRNIQRSEYHNLFNFINGKHLKIMNLGDGQGATGGVTAVLRDTDDDAVDPHLERIKNQAGDEESDEEDEDFVADKDDSGSPTDDSGGEDSDASESGGEKEKLSKKEASSSKPPVKRKPKGRDEEGSEKRKPKKKKDPNAPKRAMTPFMYFSMAERGNMKNNNPDLPTTEIAKKLGEMWQKMTGEEKQPYIQQSQVDKKRYEKESAVYRGAAAMDVDSGSGGNESD

SEQ ID NO: 120888 - protein, 689 aa, Oryza sativa
  Clone ID: PAT_MRT4530_23967C.1.pep
MGYGWALAAVLATWCLLDALSRLVWRPRAVAAALRRQGVRGPGYRLLVGSLGDINKLRADAAGAGGAAALDVASHDFIPFVQPQFRQWIPLYGRVFLYWFGWTPDMCVADVEVAKQVLSDRTGLFPKNVTTPMLLKLFGRGLVLANGDEWQRHKKVVHPAFNTDKLKMMTATMAGVARSMVSRWEEKVASHGGKVVIELSSQFEELTADVISHTAFGSSYAEGKQVFMAIKELQFIAFSSLLSVQIPGSRKVRSTLMQIISNRLAAAAKEKAGGGGGGYGEDLLGLMLEASAPPELGTKRRQPPVLSMDEIIDECKTFFFAGQETTSHLLSWTMFLLSTHPDWQDKLREEAVRECAGAGAGDDDDQLPTYDMLGKLKLLNQFLLETLRLYSPVPAIRRRTAAAVEMGGVTVPGGTMLTFPIATMHRDEEVWGADAGVFDPMRFDGGGGAMAKLLSFSTGPRACVGQSFAMVEAKAVVAAILRRFRLELSPEYVHAPTDVITLRPKHGLPMSCPDFQEARRLHAAVLVGGHGHGTVLVAQLVRAYAKLGDVAHALRVFDGMPRRNSFAWNAVIKGLVDAGRFSEALEMFWGMVNDGSVAVDGFTYPPVIKACAALGAVAQGRKVWEMVETDIASGNARPNVFVQCALVDMFAKCGCLDEARNVFESMQVRDLAAWTAMIGGTVHSGNWLE

SEQ ID NO: 120889 - protein, 217 aa, Oryza sativa
  Clone ID: PAT_MRT4530_23968C.1.pep
MKYVDWIFMRHKNNAVFNEVIKVCQAKNLGEILALEYDWNEEIIGWSLLPKVGDATTVPTKHAHLLCSMRYQCPAFSVMKLIWFEILETIYDPKRGLASAAPSVAPQRSSSSSTIKKALQAIFCMGTKIAKKVKKIERHQKEDWKAAGKDVSDVSEDEAFEDPFAAYEAARDVAAGEGPSHSFCENSTSSDDDDDGDEVPNVESEGTDPEAAVDAAV

SEQ ID NO: 120890 - protein, 76 aa, Oryza sativa
  unsure (1)..(76): unsure at all Xaa locations
  Clone ID: PAT_MRT4530_23969C.1.pep
NSTKTAAGSISAGAHTGNNPSSFHLWLXSTQHTFRAQAHKFQLVSAAFPGGSINPQLFSGIVASQIPPSNAQHQIL

SEQ ID NO: 120891 - protein, 149 aa, Oryza sativa
  unsure (1)..(149): unsure at all Xaa locations
  Clone ID: PAT_MRT4530_2396C.1.pep
MVLGRAERIVYVVSMAACSAALAPHAHTASKHALVXLTKNAACELGEHGIRVICISPFGVATPMLVNAWRQGQGGDHADEDQAAASEEEEVEKMEEMVRRLATLKGPTLRAGDIAEAAVFLASDESRYVSGHNLVVDGGVTTSRNVIGL

SEQ ID NO: 120892 - protein, 99 aa, Oryza sativa
  Clone ID: PAT_MRT4530_23970C.1.pep
MKLTLKSPDVAILCHLGQYLNTKNLGAETLYLSAKRQTRLGHGHVLGLGLALTLAVFMVLGKRGMATCKSGLVGPTMHHMVSVLVEAQLSRMELGSPGL

SEQ ID NO: 120893 - protein, 174 aa, Oryza sativa
  Clone ID: PAT_MRT4530_23971C.1.pep
HCCTSRRYHLGLGLAAIPDKQSVTCPARLAYDRPLNLPAAAAFPAGSPCSGLGSTSLCALTTGRRCTGAAWEPSLAAASTYTPVYMPASAWVARLPGPGIARARVCVREHPRHRRVRLLVDMEGDETAMRGLAPPGRQEPRPRAAICARHARMHHHLQLLDLLASVDLLRGAAA

SEQ ID NO: 120894 - protein, 37 aa, Oryza sativa
  Clone ID: PAT_MRT4530_23972C.1.pep
VIILVGENSYVHHGSYDHELFLTKERFLLTICYLSIT

SEQ ID NO: 120895 - protein, 364 aa, Oryza sativa
  Clone ID: PAT_MRT4530_23973C.1.pep
MSGFEGFTNPFPKFSTNNGVCGIFGIRAQRTRIPRYHKGGATRNQDFFGRLGYGPRDKHGAAEPMGRARARGGGPWPGKARPKRAGRAGGERGMGPGGPYPPCGVPGGARLSVARLSVGAAHEGSARVSGVGAYPGFKESVFGAGWDRGAPRTAGDERRPPGADGIGGEAMPGGGGARGSVLAHLGRRDHLGLGPRERGRPESASSPRAHAGFTSTRDGGGRRGRRQHGGDGGSAAMALWEETTKAAAGDDAGGVGQKGKEGGKGLGPLPKREKKEGEGEQLLLPLLDGCGVFVGCAKRGDGEDAKGRWRRWIVRRELNHGRGSIGVARSRWGHRRGRTLSASSASARKKTRARGERPGLEGKK

SEQ ID NO: 120896 - protein, 549 aa, Oryza sativa
  unsure (1)..(549): unsure at all Xaa locations
  Clone ID: PAT_MRT4530_23974C.1.pep
MAVFLSNRWFSPEVLVRLLGRSVGLARKPRPSKLSTARPSQWAGXAGARRRPMAGXRRGRGWVRVDRIHLAGSRVGPACQWRGSQWERRMRAALGFRVSAVHARAPDGPGMRRAHAQPVGAPWTXRARGGRKEAADRLGSVKAEVAPTWRLRGSHAGRREEEEGAAXRWTADGGRVHRSSSRRFEREGVHRNDGXTRGSEPPDRIRRREAGDDESRRRTPAARKGGNFTGATGVRLKGVGAYPGFKESVSGAGWDGGAPRTAGDERRPPGADGIGGEAMPGGGGARGSVHARGEGRVRRENGGYRVRRSPGRVSDGTGGITSVSGRGREGDRSPRQLLVRTPASPARATAEGGEDGGSTAGMVVRRQWGKPTLAVKGCKGDELAVVDARGKGAWSLAKTRKGGGRVRRRRRRRGRAAASPTLGRVRCGVAGAMDDVDDDGGGRFGMERGRAAARRRRGRADSGSDRPVGHLASERTRRGGAAGFRTATAGXSAPRRGRKEAEREXEERERKKRGDASLSRRMQRTYGEEEKRAERRWAGEESAHRARGR

SEQ ID NO: 120897 - protein, 109 aa, Oryza sativa
  Clone ID: PAT_MRT4530_23975C.1.pep
VPNRRTYSVVALIPVGCTTLIPCLSTLVVPWYPCSLSACTKYPAYTVDCRKLGKWVCEALKTGHVLAMREPCLRGIVPYSHIRTDSCGKLIEHNQSATTRWNGTPWLSN

SEQ ID NO: 120898 - protein, 190 aa, Oryza sativa
  Clone ID: PAT_MRT4530_23976C.1.pep
APPRGRPSPSRPASAPPPRPPPSSPPPPPPPPPPSPPAPSSSPGTPSPPPAPSPPPPPSQSSPPIAADSSHSHTPSPSPSSQTQQTAPGRTRTPASPCSSSRSSGAARPPSPPARRTCTPHRPPPPGRTAARRGGGGRWRRGRGCSTGRRSRRGRRCSSSRRGRSRRIDETTTPLMRSPSFSCPFSIRLI

SEQ ID NO: 120899 - protein, 280 aa, Oryza sativa
  unsure (1)..(280): unsure at all Xaa locations
  Clone ID: PAT_MRT4530_23977C.1.pep
GRRTAAKFTGARRDDSREREYTGTMGRTRGSEPPGRIRRREASDDESWRRTPAARKGGKLHRSNGGSIQKDGSISGVQGVHFRRWMGXSDAVEVRRREAASGSGRRRRQGHGXGSGAWGGAYEPRELKEEEGERGRGTEGYRVGTGHRDERRRRGSKLSSLGPGKGKEKSGRSPRQLLVRTPASPARATAEGGEDGGSMVGMVVRRQWRCGRKREETSGREESRETQGKDSRWEFDIFRKWGQMANLADYFNLGPQIHRSLYDVRMNLDVLKCCSTVLFL

SEQ ID NO: 120900 - protein, 60 aa, Oryza sativa
  Clone ID: PAT_MRT4530_23978C.1.pep
MGGSGTLISIYPEDLTFLFELDKRCYCNLKVVNNSEHHAAFKVHGLPFHDQYFLKLGEKA

SEQ ID NO: 120901 - protein, 185 aa, Oryza sativa
  unsure (1)..(185): unsure at all Xaa locations
  Clone ID: PAT_MRT4530_23979C.1.pep
ALPSRDGRCDERPTTXSELFGLGPGKGKETAPGVPRQLLARTPASPARAMEEGGEDGGSKVARARWWRGNEREEDREARFNRWQCRFREEEPTLAVKESELAVIDACSQGGDRTRVERLRHARGAVRLRGAARQGSGAGRRRRGRADAAATGRDVSRETQGEVMEKIQKEYLGICSREHRVRSRK

SEQ ID NO: 120902 - protein, 85 aa, Oryza sativa
  Clone ID: PAT_MRT4530_2397C.1.pep
RNKLAAADVHEGNVVPIDPEKLAPEQKKDFDAMMQQARDQFLSSFMQTRKGTFVQKYKVKVVPEDLGIGSSKGGEKKNRRPAPLV

SEQ ID NO: 120903 - protein, 573 aa, Oryza sativa
  Clone ID: PAT_MRT4530_23980C.1.pep
MDLLQSSYTPDDEDDDEQQPLSSPDASPLRLPAKSAAPAVDDTALALSAAAASTSRPLDPSLHLVPFNPTADQLWAPVLGPQHPHAPISSASGNRNHKLGHVEDAAVLPFLFDEQYNTFHRFGYAADPSGLHIVGDAQPSAEPDTVYNLAPSEHKRRRLQSKDEEGANQEPLPPEAKNPASDEWILRNKQSPWAGKKEAPPAELTEEQRQYAEAHAAKKAEKEARGEGKGEKSDMVAKSTFHGKEERDYQGRSWITPPKDAKASNERCYIPKRCVHEWVGHTKGVSAIRFFPKYGHLLLSASMDCKIKIWDVLESRTCMRTYMGHSKAVRDISFSNDGTKFLSAGYDRNIQYWDTETGQVISTFSTGKVPYVVKLNPDEDKQHVLLAGMSDKKIVQWDMKSGQITQEYDQHLGAVNTITFVDNNRRFVTSSDDKSLRVWEFGIPVVIKYISEPHMHSMPSISLHPNSNWLAAQSLDNQILIYSTKERFQLNKKKRFAGHIVAGYACQVNFSPDGRFVMSGDGEGSCWFWDWKSCRRFKTLKCHNGVCIGCEWHPLETSKVATCGWDGVIKYWD

SEQ ID NO: 120904 - protein, 735 aa, Oryza sativa
  Clone ID: PAT_MRT4530_23981C.1.pep
MASTEQQEHAVALLDPKVAEEEVYTTDGSLDIDGNPALKHRTGGWRACRSILGTEFCQCLAYFGMTINLVTYLTTELHQSNVAAAKNVSTWQATCFLTPLAGAIVADSYWGKYHTMVVGCCIGVAGLLMASLSALLPLLIKNISTLAMASAQEFVLFLGLYMIAFGVGGLRPCLMSFGADQFDAGDPSERNSKGSYFNWYLFTMNCASVISTTAMVWLQDHYGWALGLAIPAMVLAVGLSFLVAATPAYRFQRNRGSPFTRVCQVVVAAVRKFNVAPPADVALLYEVPEDDCSMERVKRIKHTDDLQFFDKAAVVTASDEEAAGDPWRLCSLTQVEELKILVRMLPLWASIAFFYTGTAQVNSMSVEQGMAMDARVGSLRVPPASLATFELLTSMALIPLYDRAFVPAARRLAGREKGIPDLLRIGAGLTMAVLAMAAAALVETKRARAARMGMEKTSIVWQVPQYAVMGVGEMLASAGQLDFFYSQAPPAMKTVCMALGFLAVAAGVYLSSLVLTAVSWATATGGRPGWIPDDLNEGHLDRFFWMMAGLGCLNLVAFTSCAMRAKERRGSEEGERERHYRAETDAVTSGRRRGSEFSGLGPGKGKETAPGVPRQLLAHTPDSPARAMEEGGEDGGSKAARARWWRGNEREGDGAAWFNRWQCRFREEEPTLAVKESELAEGEGELGLRVLAGRAWSGSGMRAGPFGCVVQRGQGSGARPAQAPAGAAGPTRRRP

SEQ ID NO: 120905 - protein, 393 aa, Oryza sativa
  Clone ID: PAT_MRT4530_23982C.1.pep
MSKLAILGRSSGLPRSNEGMRLLFSAVIGVMLGYLFGISFPTVNVTKPLLFREKRTDCILQLHFPSSIISYIEDKDSGITTQTLLNHAWTSANSKKRNNSESNSDEIPKIYVPTNPKGAEGLAPGIVVPETDLYLRRLWGEPSEDLTSQPRYLITFTVGYSQKANIDAAVKKFSENFTIMLFHYDGRTNDWDEFEWSKRAIHVSVRRQTKWWYAKRFLHPDIVAPYDYIFIWDEDLSVQHFNAEAYIKLVRKHGLEISQPGLEPDKGLTWQMTKRLGDQEVHKFVEIMATVFSRDAWRCVWHMIQNDLVHGWGLDFALRRCVEPAHEKIGVVDSQWVIHQVIPSLGNQGTAENGRTPWEGVRARCRKEWGMFQKRLADAEKAYYLGKGITPPN

SEQ ID NO: 120906 - protein, 104 aa, Oryza sativa
  Clone ID: PAT_MRT4530_23983C.1.pep
VRRRGRFGGGKPTLAVERSAGARRAVTSGSSVFAGCAKRGDGEDAKGRWRRWIVRRELNRGRGSIGVARSRWGHRRGRTLSASSASARKKTRARGERPGLEGKK

SEQ ID NO: 120907 - protein, 454 aa, Oryza sativa
  Clone ID: PAT_MRT4530_23984C.1.pep
MWTQLCTRSIRVLGAAVDDDEPAAVPVWEKRDDVLGDHVLFLGYPGSFFVEAARFNGDVPGGSAYFVVRSEPCRVYRCSFVDSSGSPATTTTLVETLPAGWNDERCMWFLPEPNIDWIKVEEEAAAAPARRRRRRRELRIYAGDLSPQVDRLRLREMYSEHGKVVQARVVYDKRGRSRGFGFVTMATQEGFYRALGRCNAVEKPEMIYRNFLEYEKWFMEFWNKELIYGTKEKGFIKSLKKKRMEGYILDFFERQGRGPRVEGGSAKPFGPARARERRPIRARGRGRERSGGPGAPRGVPGGAHMSAARFTVGRAHAGAVLGFGGCGVRAVRRVDRMAAGPHAAGWRTVDRAREGGEGRRRLTRSQPTWLRRGCHAGQREEEEGEAGNERRTAAEFTGARHDLSGKREHTGEEGRDERKRADGLDSPERGRRRRIAATHAGGEKKGKRRRGDKD

SEQ ID NO: 120908 - protein, 492 aa, Oryza sativa
  unsure (1)..(492): unsure at all Xaa locations
  Clone ID: PAT_MRT4530_23985C.1.pep
DEGRELDFLRWHWCGPRVEGGLAEPFGPARSRERRPIRARGRERGRSGGPGAPRGVPGGAHMSAARLTVGRAHAGAVLGFGGCGVRAVRRVDWMAAGPHAAGWRTVDRAHGRGGGRRRXPARLGQSRGGADVAPTWQPRGPAGGGRRGGRDGRWTAAEFTGARRDDSREREYTGTMGRTRGSEPPDRIRRKEARGGGLRRRMLAARKRGNGGGATRIKFKXGGSISGVQGVHLRRRMGQSDAVEIWRRAAASGSERRWRQAYGGRQRGSELSGLGPGXGKKMGGRSPLRLRAHAGFPAHARAEEGEDGGSKAAMALQRRQLAVVLGASGQAAAEAVTGVTPIGEKAKRGGRKELGSLPILDELREERARGRERCCLRVLDTRALRRRGGGSGRVGAGGCAAQAGQVDVSELAIESIGRNTSRRVIAADRRAEVSQALSGAIPFATIQHTSLAESKQSLEAYNPTSIVHAESGEMPSAAVASSTASSAPGWEA

SEQ ID NO: 120909 - protein, 110 aa, Oryza sativa
  unsure (1)..(110): unsure at all Xaa locations
  Clone ID: PAT_MRT4530_23986C.1.pep
EAWPAVEEADTVRGGATSGCGTVYGAXRLAGGGCRCSGPTCRQRLDSVEHRGASHGLAGGAIFEGSAGDLQLHQELASGGRRPEREAVGAAGHVRHEQRAGGDHPQPSDV

SEQ ID NO: 120910 - protein, 519 aa, Oryza sativa
  Clone ID: PAT_MRT4530_23987C.1.pep
ESGVQTTKEGVATSTILHVKLKHEDYEDPPDMRPKVLLLYGMNVNAFYSVKDICKDGGILKKVLAEGTKCTNPRDRDEVFVKYEVRLEDGTVVAESDGVEFTVKDGTILSIFEHLYYKVLKGHFCPAISKAVKTMKKNEKALLTVKPQYGFGEQGRPAARDEAAIPPNATLHINLELVSWKAVTEIGNDKKILKKILHEGEGYERPSDCTLVRVKLIGKLEDGTIFVTRGHDGDEPFEFKTDEDQVVEGLDKAVLSMKKGEVALVTIPPEYAFGSDETRQDLSVVPPNSTVYYEVELVSFDKEKESWDMKENTEKIEAAAKKKDEGNAWFKMEKYARASKRYGKALNFIQYDSSFSEEEKQLSKPLKVLELDSMNVKAFYRRAQAHMYLVDFDLAELDIKKALEIDPDNRDVKMGYRRLKEKVKEQKRKETKLYGNMISKLSKLEDSETEGGTTQAPSKKHGLWPLTALLRRLFTRSDGSKESMLWLVLRLLIPVVLLVAVCVAFYMRSGPPEVDCINC

SEQ ID NO: 120911 - protein, 308 aa, Oryza sativa
  Clone ID: PAT_MRT4530_23988C.1.pep
GMLEDGTIFVTRGHDGDEPFEFKTDEDQVVEGLDKAVLSMKKGEVALVTIPPEYAFGSDETRQDLSVVPPNSTVYYEVELVSFDKEKESWDMKENTEKIEAAAKKKDEGNAWFKMEKYARASKRYGKALNFIQYDSSFSEEEKQLSKPLKVSCKLNNAACKLKLKDYKEAKELCTEVLELDSMNVKAFYRRAQAHMYLVDFDLAELDIKKALEIDPDNRDVKMGYRRLKEKVKEQKRKETKLYGNMISKLSKLEDSETEGGTTQAPSKKHGLWPLTALLRRLFTRSDGSKESMLWLVLRLLISVVLLV

SEQ ID NO: 120912 - protein, 106 aa, Oryza sativa
  unsure (1)..(106): unsure at all Xaa locations
  Clone ID: PAT_MRT4530_23989C.1.pep
LPGYSXSGTTSGSETTNSVAADSVTVNNGRIPTIQNVNNRRIPTIQECIILAESLEGLTPIEKADAPELMRLDLAAREAFMSFNDEQVRLLWIKKLIGPVNNPGTA

SEQ ID NO: 120913 - protein, 335 aa, Oryza sativa
  Clone ID: PAT_MRT4530_2398C.1.pep
MTAVDLMPAADDDNNKQSSTGLLHHHQLPAAADNAILHNTRRLEGKVAIVTGGSRGIGEAIVRAFVHHGALVVVADIDDAGGHALAAALGPHACTYVHCDVAEEADVERAVATTLEQHGRLDVLCNNAGVLGRQTRGAKSIASLDAAEFARVLRVNALGAALGMKHAARAMVPRRSGSIVSVASVAGVLGGLGPHAYTASKHALVGLTKNAACELGEHGIRVNCISPFGVATPMLVNAWRQGQGGDHADEDQAAASEEEEVEKMEEMVRRLATLKGPTLRAGDIAEAAVFLASDESRSGVTKRDRERLNTSRSRSRQGLQEQATVDTSISLGIVE

SEQ ID NO: 120914 - protein, 583 aa, Oryza sativa
  Clone ID: PAT_MRT4530_23990C.1.pep
MATAATTSAAAIPTGGGGRRQHPHPRRPGLRPRRLHRLRLPAQAAAAAAASSPSTSSSSSSSSTPAEGGGRLVAELVGAFNELTGRMGEGLATSSSSRLLFRALKLALPALRDGDGGRALARALAIAASLADLQMDAEVISAGILREALDAGAISMRDVKSEIGISTAHLLHESLRLKHAPSKLDVLDDESASALRKFCLSYYDIRAVILELALKLDMMRHLDCLPRYLQRIKSLEVLKIYAPLAHAVGAGNLSLELEDLSFRYLFPHSYDHIDQWLRSQETENKLLIDSYKEQLLQALKDDDELSQIVQDISIQGRYKSRFSTMKKLVKDGRKPEEVNDILALRVILEPRCDGSSLDWGPRACHRTHEIIQAMWKEVPGRTKNYVTRPKENGYQSLHVAIDVSEPGKMRPLMEIQIRTKEMHKFAVGGEASHSLYKGGLTDPGEAKRLKAIMLAAAELAAMRLRDLPASDQGDSNCTNRAFCQLDKNGDGRISIEELTEVMEDLGAGGKDAKELMHLLDANSDGSLSSDEFEAFQRQIELMRSLDDKDDRYRKILKEKLQTIDSAGLIQVYRKQLGDKLLVS

SEQ ID NO: 120915 - protein, 99 aa, Oryza sativa
  Clone ID: PAT_MRT4530_23991C.1.pep
MVCKIFPGGVRATNPAAEMLLGSVSIHMLAARGAGGGGSVLYSRLLIASLFGKHVAKKNASKLLSSPVMVDEHTQEQDGDEEDIMSTFMAIRRRTSDKN

SEQ ID NO: 120916 - protein, 134 aa, Oryza sativa
  unsure (1)..(134): unsure at all Xaa locations
  Clone ID: PAT_MRT4530_23992C.1.pep
TQCHGAGTTSRGVVLTPFGQPATLXLINNQALQEHCAQQLILVAQQSDYQAITSAQEIEHQLQLHDVAGAYFDRTQAHAQALLDLHLPSIWAIYTNYYVAPRSIPTDWWRLVLNCTILMAQMVNINSCTTMSDS

SEQ ID NO: 120917 - protein, 53 aa, Oryza sativa
  Clone ID: PAT_MRT4530_23993C.1.pep
RSGLPFPTRATGPTALNLIPPRRELALRAQAHEALLQTGTVDSPTINSPWTRG

SEQ ID NO: 120918 - protein, 75 aa, Oryza sativa
  Clone ID: PAT_MRT4530_23994C.1.pep
MEPLFPAYRVEIGYLVEPVADGVDDATLDNSTINQLTSHGMEQKTTTKRNGKWGEEADAGECTPMANEEGSSQRY

SEQ ID NO: 120919 - protein, 133 aa, Oryza sativa
  unsure (1)..(133): unsure at all Xaa locations
  Clone ID: PAT_MRT4530_23995C.1.pep
MPLPPATEEAKQAKPRRRPPRHRERGGRGKWGQSGAQEEESKSDSIIWSSKGXQQCGVVARVRAVSAVGAEADARGAPVRRDAAHQGGRGRRPETPHQCRDEHTQRTSPGRRRRCTSPSGSINSEGQHAQSYL

SEQ ID NO: 120920 - protein, 134 aa, Oryza sativa
  Clone ID: PAT_MRT4530_23996C.1.pep
GSSRDGLRFAGDGVFFQRRACRPCPPAAVSASAWLHHPALRRASASAPGSHYPFQFPSFFSCLVFDFFKKNYCFKFEVACNSGTCYPHMRTISCCSAIFFSFSFHMGATLEVKSWLIRALNLHGTTFCIMTSCS

SEQ ID NO: 120921 - protein, 581 aa, Oryza sativa
  Clone ID: PAT_MRT4530_23997C.1.pep
MAAATSTSSTALAHPKTLNPASKSAAAGSVAFPAAQPPCPLADTPDGRRRRGAVAAKVSSPQVIGATMPSLDFETSVFKKEKVSLAGHDEYIVRGGRNLFPLLPEAFKGIKQIGVIGWGSQGPAQAQNLRDSLAEAKSDIVVKIGLRKGSKSFEEARAAGFTEESGTLGDIWETISSSDLLLLLISDAAQADNYEEIFSHMKPNSILGLSHGFLLGHLQSVGLDFPKNISVVAVCPKGMGPSVRRLYVQGKEVNGAGINSSFAVHQDVDGRATDVALGWSVALGSPFTFATTLEQEYRSDIFGERGILLGAVHGIVEALFRRYTEHGLDEDSAYKNTVECITGIISKTISKKGMLEVYNSLTEEGKKQFIEAYSAAYYPCMDILYECYEDVSSGSEIRSVVLAGRRFYEKEGLPAFPMGNIDQTRMWKVGERVRSTRPAGDLGPLHPFTAGVYVALMMAQIEVLRKKGHSYSEIINESLIESVDSLNPFMHARGVAFMVDNCSTTARLGSRKWAPRFDYILTQQAFVTVDKNAPVNQDLISNFFSDPVHSAIEVCAQLRPTVDISVPADADFVRPELRQSS

SEQ ID NO: 120922 - protein, 327 aa, Oryza sativa
  Clone ID: PAT_MRT4530_23998C.1.pep
MVVPGGGGGGSPEGQDRRPQGSPRGWCRSPGRPAARGSGSGSGADGSGTDGGNNGGQQIIVQRVMKETAGSVVYPMLTRTNYTDWALVMRVNLQAQGLWSAIEPGYAEYQDDRMALSAILRAVPPEMLPTLAVKDTAKEAWESVKTMRVGVARVREAKAQTLRNEFELIRMKESESVDEFSMRLNAIVNNLRMLGDPLEEEKVVQKFLRVVPSRFVQVAIAIEQLLDLKTLSIEEVTGRLRTVEERYRPGDNDGGVDGGRLLLTEEQWLERRRNRKKNGDTFDKSKVRCYNCQEYGHYSWEKKCHETKKNHQAHLVVADADDEPTLL

SEQ ID NO: 120923 - protein, 136 aa, Oryza sativa
  Clone ID: PAT_MRT4530_23999C.1.pep
MSPPPHPPSAPPIRSPFHRLLLRPPPRPPVPPIRRPRQGAVLPAYVAYSDTAALRSPNPYDNKSGNGASADCAFHLLDEIGLRQRRTPASSRAPRRSLTLLARAHCSPCWTLRPRMAFRPTWRARCSSGCTSPVIV

SEQ ID NO: 120924 - protein, 227 aa, Oryza sativa
  unsure (1)..(227): unsure at all Xaa locations
  Clone ID: PAT_MRT4530_2399C.1.pep
FSKWIEAKPVVTITADKARDFFINIVHRFGVPNRIITDNGTQFTGGVFKDFCENFGIKICYASVAHPMSNGQVERANGMILQGIKARVFDRLRPYAVYGAEAMLPSEVEFESLRFRNFNEERYEQGRVDDINRLEEAREAALIQSTRYLQGLRRYHNRNVRSRAFLVGELVLRKIQTTRDRHKLSPLWEGPFIISEVTRPGSYXLKREDGTPIDNSWNIEHLRRFYA

SEQ ID NO: 120925 - protein, 103 aa, Oryza sativa
  Clone ID: PAT_MRT4530_239C.1.pep
MARPSFLPSVSPFPLSARPLLPPFGSRAMDTEDQPPKPLPEFDRAREAYPFPSKIPRTLVSPKIGIRTDIAAYKPEPLPKPISPVFTLAIAALLPCFVVAIRC

SEQ ID NO: 120926 - protein, 84 aa, Oryza sativa
  Clone ID: PAT_MRT4530_23C.1.pep
MRMSRRRLQLQYDQLCIFSRRSRRYYADDEAAAVSDWERPAATRLRKVRSSDEDNGWWIGERDVDQKASDFIARFHHHQTSLVV

SEQ ID NO: 120927 - protein, 40 aa, Oryza sativa
  Clone ID: PAT_MRT4530_24000C.1.pep
RKVWSLDREEVNKIQLQYIHPTFARLSRRFKVQTHPNITE

SEQ ID NO: 120928 - protein, 53 aa, Oryza sativa
  unsure (1)..(53): unsure at all Xaa locations
  Clone ID: PAT_MRT4530_24001C.1.pep
KSWSSXAVAAASSRASERSAPSAPSPRGRHVSHRRLPPSYPLYHGLAPCLPCT

SEQ ID NO: 120929 - protein, 109 aa, Oryza sativa
  unsure (1)..(109): unsure at all Xaa locations
  Clone ID: PAT_MRT4530_24002C.1.pep
IPSTLGYTMYTSMVYQRVYGCSLYTLTNSITESTDGRSPARTEPGRYYIVWGPMSPSPTXRPTDPRYKRDLPXENLSHRISPPTHRPQPTKPKPXGAKSPVDLVESTRL

SEQ ID NO: 120930 - protein, 90 aa, Oryza sativa
  Clone ID: PAT_MRT4530_24003C.1.pep
MAMETRIRLMGIQNKLDECHVGKAPLEVGPSYVRFLCALTVKYSTRRLGGGGVAVPLQPAAPHGGGGIRQFTMTMQSDVRPVDDPSMGIL

SEQ ID NO: 120931 - protein, 109 aa, Oryza sativa
  unsure (1)..(109): unsure at all Xaa locations
  Clone ID: PAT_MRT4530_24004C.1.pep
IQIICVGNALHALRSRLSDPNNMLQSWDPTLVNPCTWFHVTXDSNNHVIRLDLGNSNVSGTLGPELGQLQHLQYLYEFFPLPVTAEKFIYELLSLICSLNMCLLTLFKQ

SEQ ID NO: 120932 - protein, 70 aa, Oryza sativa
  unsure (1)..(70): unsure at all Xaa locations
  Clone ID: PAT_MRT4530_24005C.1.pep
GIRLRLXYPWSWCTYIITVAFLYLYLYLNMCCWVMILSPELPYFGSIVSLARNLIYLRCILFSITSFTFF

SEQ ID NO: 120933 - protein, 68 aa, Oryza sativa
  Clone ID: PAT_MRT4530_24006C.1.pep
TKRQRTKKIQEQNLSEETRSGTITVIQRLHSSSKMGAWQRQRRRDPGLTEGKGLADPLPEAPEQGDEE

SEQ ID NO: 120934 - protein, 186 aa, Oryza sativa
  unsure (1)..(186): unsure at all Xaa locations
  Clone ID: PAT_MRT4530_24007C.1.pep
RFDLIFIVKDVRMYDQDKRIASHIIKVHASGAAASSKNTDASEGENWLKRYIEYCRVTCKPRLSEKAAEMLQNKYVEIRQKMRQQAHETGRAAAIPITVRQLEAIIRLSESLAKMRLTSVATPEHVEEAFRLFNVSTVDAAGSGINEHLNLSPDIANEIKXAEAHIKRRMGIGAXIYERRLIDELN

SEQ ID NO: 120935 - protein, 27 aa, Oryza sativa
  Clone ID: PAT_MRT4530_24008C.1.pep
SASTMMRLVPLHICRIDFDYMMTIKSR

SEQ ID NO: 120936 - protein, 416 aa, Oryza sativa
  Clone ID: PAT_MRT4530_24009C.1.pep
MANVLNYSINFTLDEEMEFKEFAQRPDAYVKICSMIGPSIYGHSDVKKAIACLLFGGSKKFLKFVEKTAPIAVYTSGKGSSAAGLTASVIRDGSSREFYLEGGAMVLADGGVVCIDEFDKMRPEARVAIHEAMEQQTISIAKAGITTVLNSRTSVLAAANPIAGRYDDLKTAQDNIDLQTTILSRFDLIFIVKDVRMYDQDKRIASHIIKVHASGAAASSKNTDASEGENWLKRYIEYCRVTCKPRLSEKAAEMLQNKYVEIRQARAKDFSLSLTKMRQQAHETGRAAAIPITVRQLEAIIRLSESLAKMRLTSVATPEHVEEAFRLFNVSTVDAARSGINEHLNLSPDIANEIKQAEAQIKRRMGIGSHISERRLIDELNRMGMNESIVRRALLIMHQRDEVEYKRERHVIVRKA

SEQ ID NO: 120937 - protein, 125 aa, Oryza sativa
  Clone ID: PAT_MRT4530_2400C.1.pep
MWDVGVGGTEEKKVRDAGVEASMESGRRPTLRKPVHWRPPRHQPLDVVGASPILFNVRNEKNRQEELEMAGGIAASLSGSGWGCWEDLVIIDPLPFSLELMMPLSTNTDTAAPPNPMLACHHVAR

SEQ ID NO: 120938 - protein, 1078 aa, Oryza sativa
  Clone ID: PAT_MRT4530_24010C.1.pep
MERVALLRNSGRRLLHRCRRPRPVVQAAGPSAPYRPSSSSHSRAGLPGGARLLAAAAPLHCAGRYWPHAAPRFVRRLSAPAVSTSPSPVPSDTDDVHEYAAKLGFEKVSEQSIDECKSTAVLYKHKKTGAEVMSVSNDDENKVFGIVFRTPPKNSTGIPHILEHSVLCGSRKYPLKEPFVELLKGSLHTFLNAFTYPDRTCYPVASTNAKDFYNLVDVYLDAVFFPRCVEDFQTFQQEGWHYELDNPEEEISYKGVVFNEMKGVYSQPDNLMGRVSQQALFPENTYGVDSGGDPNEIPKLTFEEFKEFHSKYYHPSNARIWFYGDDDPKERLRVLSEYLDQFEASPAPNESKIWPQRLFKEPVRIVEKYPVGQEGDLKKKFMVCINWLLSEQPLDVETELTLGFLDHLLLGTPASPLRRILLESGLGDAIVGGGVEDELLQPQFSIGLKGVSEDNIKEVEELVMQTLKNLAEEGFAPEAVEASMNTIEFALRENNTGSFPRGLSLMLRSIGKWIYDMDPFEPLKYERPLQQLKARIAAEGSKAVFSPLLEKFLLNNAHRATIEMQPDPEKASRDEAAEKEILKQVKASMTREDLAELARATKELKDKQETPDPPEALKAVPSLSLQDIPKEPIHVPIEVGEINGVKVLQHDLFTNDVVYSEIVFDMSSLKKDHLQLLPLFCQSLLEMGTKDMDFVQLNQLIGRKTGGISVYPFTSSIRGKDDPLTRIVVRGKSMATRVEDLFNLIYCILQDVQFTEQQRFKQFVSQSKARMENRLRGSGHGIAAARMDAKLNAAGWIAEQMGGISYLEYLRDLETKIDQDWDKISSSLEEMRQSLFRKDGCLVNITSDWKNLEKSNKHIAKFLDSLPSTTSLGSDPWLSRLPSVNEAIVVPTQVNYVGKAGNLYQSGYQLNGSAYVISKHISNTWLWDRVRVSGGAYGGFCDFDTHSGVFSYLSYRDPNLLKTLEVYDETAKFLRELEMDDDCLTKAIIGTIGDVDSYQLPDAKGYSSLMRYLLGITVEERQQRREEILSTSLKDFKEFADAVETINDNGVVVAVASPEDVEAANKENPLFSDVKKCL

SEQ ID NO: 120939 - protein, 69 aa, Oryza sativa
  Clone ID: PAT_MRT4530_24011C.1.pep
MARCLFTFLPPLPRPLPPPRWRQPGLRSDPKRQGEEDPWQIFTAADGPAHCQELIRVLQCRDPQRVAQI

SEQ ID NO: 120940 - protein, 42 aa, Oryza sativa
  Clone ID: PAT_MRT4530_24012C.1.pep
IPSGLTVVILPFGSGCVLVSLMFFGTVSSFHVSSRSSMYSQA

SEQ ID NO: 120941 - protein, 627 aa, Oryza sativa
  Clone ID: PAT_MRT4530_24013C.1.pep
MAAPKLLLGLVMLVGCAAADSHRYRPGDAVPLYANKVGPFHNPSETYRYFDLPFCAPEKVKDKIEALGEVLNGDRLVDAPYKLDFRVDFDAKSVCSRRLSKDDVVKFRHAVSKDYYFQMYYDDLPFWGFIGTKPEKADAGDKYYLYRHIIFDILYNKDRVIEINVHTDQNAVVDLTEDKELDVEFLYTAKWKETQIPFEKRMEKYSSSSVMPHHLEVHWFSIVNSCVTVLLLTGFLATILMRVLKNDFVKYSHDEEEPDDQEETGWKYIHGDVFRFPTNKSLFSAALGTGTQLFALTTFIFLLALVGVFYPYNRGALFTALVVIYALTSGIAGYSATSFYCQFEGKNWVRNLLLTGCLFCGPLFLTFCFLNTVAIAYNSTAALPFGTICVIVLIWTLVTFPLLVLGGIAGKNSKNEFQAPCRTTKFLREVPPLAWYRRTIPQMAMAGFLPFSAIYIELYYIFASIWGHRIYTIYSILFIVFIILLIVTAFITVALTYFQLTAEDHEWWWRSFLCGGSTGFFVFAYCLYYYRERSDMSGFMQTSFFFGYMACICYAFFLMLGMVGFRAALLFVRHIYKSIKCQLKQKQQQIEENQEATGFKAADGSLEEVCRNTDGTIPKLSTEEFSE

SEQ ID NO: 120942 - protein, 109 aa, Oryza sativa
  Clone ID: PAT_MRT4530_24014C.1.pep
CCQQMMLMSAALSLPRYLHHGALLSCTKCSLMLALMASPKFRPRPSWLSISPPCVEPTLGTATLHAKVLLGIAALATVYHHIYIAGSIKCDTSSSLSCNKICNRFSLFL

SEQ ID NO: 120943 - protein, 160 aa, Oryza sativa
  Clone ID: PAT_MRT4530_24015C.1.pep
MEQHELSSSSSSSEPSSPSFSSSSSSSSSSSLLRQCRICHEEEDEWCAAIESPCGCSGSLKYAHRGCVQRWCDEKGSTLCEICLQNFESYYTIPPKKVQVVETAVTVRDEEMLPEELSQEDQEAVCRIRANVMETSSMVPSLTITFTIMLWCGTHCSCDN

SEQ ID NO: 120944 - protein, 290 aa, Oryza sativa
  Clone ID: PAT_MRT4530_24016C.1.pep
MASSMAATATLSPPVLSAERPTVRGGLFLPPSPATSRSLRLQSARRCGISPATRKPRSLPRAAKVVVAVKADPLKVMIAGAPASGKGTQCELIKSKYGLVHISAGDLLRAEIAAGSENGKRAKEFMEKGQLVPDEIVVNMVKERLLQPDAQEKGWLLDGYPRSYSQAMALETLNIRPDIFILLDVPDELLVERVVGRRLDPVTGKIYHLKYSPPENEEIASRLTQRFDDTEEKVKLRLQTHYQNVESLLSIYEDVIVEVKGDALVDDVFAEIDKQLTSSLDKKTEMVASA

SEQ ID NO: 120945 - protein, 157 aa, Oryza sativa
  Clone ID: PAT_MRT4530_24017C.1.pep
MSTRNEMFLEPLLLDGSNYISWSTRALNVFRAMGPHTDALSDDVFKTIMPLEDAHLIWITLKERYDKSKCDGEDTLVEASFGDCSTSLPHHDKSQVIISSNQEGLTSSSIPPTYNYEQEFTSSICSSSIAEDHVCFMGHDDDSVVDHLNKKDTVDGP

SEQ ID NO: 120946 - protein, 204 aa, Oryza sativa
  Clone ID: PAT_MRT4530_24018C.1.pep
MDHAAVKGKQGAWCQRTKSGGEGRRMWRRPGGQMACGRAERLFTPSPLGDIKVLPIGIRARSLISGFTAWREIIDKSALSEDVFKTIMPLEDAHLIWTTLKERHDKSKSDGDDTLVEASFGDCSTSSPHHDKSQVIISSDQEGLTPSYISPTCNYEQESTPSICSSSIAEDHLCFMGDDDDSVVDHLNKTNTTMVIKLMRIIEK

SEQ ID NO: 120947 - protein, 60 aa, Oryza sativa
  Clone ID: PAT_MRT4530_24019C.1.pep
QSARVPLCARSPPAAGSLSTPMSLLGSLSAPWSPPLDPVVCELQVTRSGVPELHATGHVR

SEQ ID NO: 120948 - protein, 269 aa, Oryza sativa
  Clone ID: PAT_MRT4530_2401C.1.pep
MFAVIRARRSSLPVGIPKLPRVRQRELMNFSFIELEAATHNFATTIGQGGSGTVYKGVLSDGVQVAIKKHTDGFPSQYDEMPKKHPLILLRSMLEHKNIVKLVGYCHEYREIEMPKENATNGNVSAKEEFLLLVEEYMTNGNLGNLIYGGLLDWSSRLKIIEGITQGVVYLHTHSEKPIVHLDLKPDNILLDSNMNPKIGDFGLSEELQDDYINASVSGTLGYMPPEYIIEGTVSLKNDVYGFGVTLLETISGMSESGRGARHQASIEW

SEQ ID NO: 120949 - protein, 98 aa, Oryza sativa
  Clone ID: PAT_MRT4530_24020C.1.pep
MVCSYALEAELMACNEGVKMALQWTILPVIIETDCLSVTQMLQEGKMDRSGLAFVTRETKELLSGRWNFTIQKIHRDQNRVSHQLANIARTKKKFQDV

SEQ ID NO: 120950 - protein, 632 aa, Oryza sativa
  Clone ID: PAT_MRT4530_24021C.1.pep
MALHLVGSSSFNLPFSHWPLLLFTLPPLSRSPWPSISSGLPPTSHFYISLFFFSRSLHLLSLLLPSKDVVAFEEEGDHYAKVLRGGGRKRRVLGGGIEDELRPVAVRWYGAGMNMVLPYATEPPAFFHTSSNVAAMSLSRPLAAAAAATVPDELHLEIMVRLPALPQALARASAVCPEWRRVVRDAAFLRRHRELHGGVPATAGFFHNTVVFGGAPGGARFVCAGAGPLALSVPPSVSRQGVPCCHTHVNPGDAWTVLDCRGGRVLLGCCRFSCYFLVYNPITGKRCLVKAASHKRLHLHHSIRCNATLICDDDDADADGPFRVAAVYTTVTDGGRLFGAAFLSRTGRWTTAPQVFVDLPRGIDLRGEPSAVVGSTAYLSAYSYLVLAFDVEHWTMATFQRPPRCGNARLMKTRGDGVLGLVGALELTVRLWAREAGGWVLRSTVELSDMGLLRDLPSAPLPSSDARFPLLPPVKIIGVAEEGDAVFLWTMLGIFMFCPGSMELKKKAVKKQQNRVDMLQQMSLKINDEAPAGGGPGGRRRGGPGGLVGSAVAGRRSGPGGLAGSAVAERCCGPGGAVVGGGAALGGAVAGGSLELWKARKIVLGRADCSDKSQQVFSYVRRSTIEDTTVLA

SEQ ID NO: 120951 - protein, 856 aa, Oryza sativa
  Clone ID: PAT_MRT4530_24022C.1.pep
MTGARSAFAELDTGVVGTVKFGDGSVIDIQGRRSMVLKCKNGYHRSLDAVYFIPKLRKNIVSVGRLDARGYDALIWGGVFTLRDPEGLLLTKVYRDNSYLYVLKLNIASPVCLAASGGETAWRWHARFGHLNFQALQRLAQANMVCRLPHIDHMDQLCDGCLAGKQRHPPFPEEATFRAQEALELVHGDLCGTISPATPGGRKYFLLLVDDMSRYMWVRLLSGKHEAVAAIKQFQAGVELESGRKLQALRTDRGEEFTSVEFTDYCADRGMRRELTAPYSPQQNGVVERRNQTVMAAARCMLKSAGCRRVFGGEAVTAAVYVLNRSPTKALDGVTPYEAWHGRCPSVEHLRVFGCVGHVKSVRPNLRKLDDRGGQAGTTVQGGASPASTIVSPSPSGAAVRVEFCTPPSSVTPGTEEGPVRYRRVQDILSTTEPVLDFDYSDQCLLATEEPASFVEAEQHECWRKAMEEELRSIEENQTWSLADLPAGHKAIGLKWVYKLKKDPTGAVVKHKARLVAKGYVQQQGIDFEEVFAPVARMETVRLLIALAAMYVRGNGCSKLIVGVYVDDLIISGAQPSEIEVFKLEMKKKFCMSDLGLLSYYLGMEVVQKETGVFLSQTAYAAKILEKTGMEGCNSTQSPMDARLKLRKESDGKAVDPTMYKSTVGSLRYLVNTRPDLAYSVGYDTGCWFARKGTEGLSLIGFSDSDMAGDLDDRKSTTGVLYMLGKSLISWQSQKQKVVALSSCEAEYIAATTAACQGIWLTRLLAELIGEEPSQTVMKVDNKSAINLCKNPVLHERSKHIDTRYHFIRECVEKKQIAVEYVRSEDQLADILRKPVGRVRFLEVRKKMGLEPAHQD

SEQ ID NO: 120952 - protein, 435 aa, Oryza sativa
  Clone ID: PAT_MRT4530_24023C.1.pep
MQARREVRTKEEQWRGEERVVESPLGSARWSPEAEIGMRVEDIWDSLDQPQLSDRDRLNSCFDAIPVASFPHTFDGAQVVEIPSDATLAEAVDILSRHRIITAPVRNVDAPDDASWIDRYIGVVEFAGIAVWLLHQSEAAAARADDLGADELAAKLGTVALEGAAAARAPDQQQSAEGAVAEAFGALPSSDLFNKTKVKDISGSFRWAPFLALQSSDTFLTMLLLLSKYRMKSLPVVDIGEGTISNVITQAAVVHMLAECAGLHWFEDWGAKSLTELGLPMIRPSRLVKVRHDEPALKAFRLMRKRGVGGIPVVDHAGKPTGSIMIKDVKHLLASSDANRDYRTLTAQEFIANARQSSGEKQMNIVTCKKEESIKEIIFKLDAEKRQRIYVVDEQGNLDGLITLRDIIAKLVYEPPGYFGDFFNGVFPLPQNSRV

SEQ ID NO: 120953 - protein, 103 aa, Oryza sativa
  unsure (1)..(103): unsure at all Xaa locations
  Clone ID: PAT_MRT4530_24024C.1.pep
GNPHLRPKILNFPNPPKRXKKNFXVSPXXKPKIFXKKIKKTXFKNXGKLKIFFXISKPPLKKGFRVLNPRLGLFFSPQPPKKGGVWFFPLFXGGGGPPKGGNF

SEQ ID NO: 120954 - protein, 44 aa, Oryza sativa
  Clone ID: PAT_MRT4530_24025C.1.pep
IAGGARNVNGGWFMPGQIYCYNLHEIHIIVNGSDCTTLAFKNLT

SEQ ID NO: 120955 - protein, 51 aa, Oryza sativa
  Clone ID: PAT_MRT4530_24026C.1.pep
SSVSSSKGMNNRPDPVAMVAPLILVLTWRHANTTTTNRSSRRRRRSASSFH

SEQ ID NO: 120956 - protein, 97 aa, Oryza sativa
  Clone ID: PAT_MRT4530_24027C.1.pep
FFSFPFKPANPWRMDWLLLLPSEQYKVLPVVVLTKNSIPFTSTTSIKIPFLKRVPGEELQINYSVKLKRIRKERLFYIPNITRRRRLKMTKMEEEKK

SEQ ID NO: 120957 - protein, 851 aa, Oryza sativa
  Clone ID: PAT_MRT4530_24028C.1.pep
MARMLLHGVIDAKIVEADLSVTSDGQLRPSRKTLMKKKVFSWIKKKLPFCNSCQTQQVENAVGLGPLSGKLYATVDIDKARVARTRTVEPTGTPRWKESFHIYCAHYAGDVIFTVKAENPVGATLIGRAYLPVDEGLAAGAPVSDLWLPICGEGRRPIDGGDKIRVQLRFTGVAADPAARWGAGVGSGAYQGVPRTFFPQRRGCRVRLYQDAHIADGFAPRIQLAGRRWYEPRRCWEDVFDAISSARRMVYVAGWSVNTDVVLVRRPSSSSETLGELLKRKAEQGVMVLLLVWNDRTSVGLGPIRRDGLMATHDQDTARYFEGTKVHCVLCPRNPDQGRSYVQDVETATMFTHHQKTVIVDGGGGKTAPGLVSFLGGIDLCDGRYDTQEHPLFRTLDTTHRGDFHQPNFPGASIAKGGPREPWHDIHCRVEGPAAWDVLDNFEQRWRKQAGRGKDSLLVTLDRSMAARDADQADPEHWNVQVFRSIDGGAAAGFPESPDEAAAAGLVSGKDQVIERSIQDAYIHAIRRARDFIYVENQYFLGSSYAWRGGKGGVASVEGINALHLVPRELSLKIASKIAAGERFAVYVVVPMWPEGVPESDSVQAILDWQRRTMEMMYRDVDAAIQAKGIRADPTDYLNFFCLGNRERLPVPGGYSYEPTERPDPDTDYMRAQNARRFMIYVHAKTMIVDDEYIIVGSANINQRSMDGGRDTEIAMGAYQPSHLASVNRPARGQVHGFRLALWHEHLGRAAAASAAGELLRPSSLASVRLVNQAARRHWDAFARGDGDGAPPTEDLPGHLMAYPVRWTGCGGSDGSDGSDGKLVAATETFPDTKAKVLGAKSDVLPPILTT

SEQ ID NO: 120958 - protein, 54 aa, Oryza sativa
  Clone ID: PAT_MRT4530_24029C.1.pep
GPSTLTADAMTCFLDPYFPVQVLLAKRVLAVLPASFFQKKKKKKKKKKKKKKKK

SEQ ID NO: 120959 - protein, 91 aa, Oryza sativa
  Clone ID: PAT_MRT4530_2402C.1.pep
YIIVVSMRCVICERHTFSYFNLMDHKRLIHKLSPKRLTQSKKDVGLAVDKSTVTSGKANHHSNLIMNDVVHVQEYHYIAVAKDIEVEFPVG

SEQ ID NO: 120960 - protein, 92 aa, Oryza sativa
  Clone ID: PAT_MRT4530_24030C.1.pep
GWIGLQFFSPQNQFYQHFFKKPVCFSPMAGKLSKAFYTKNPSSFLTKGERTKKIQGLFCLKIHQAGRFLLFLGSPPPRRWGYGNGNGDGILA

SEQ ID NO: 120961 - protein, 187 aa, Oryza sativa
  Clone ID: PAT_MRT4530_24031C.1.pep
MAESLVAAIDDHSVISTEIPHSDLGEKASLVDADHRIGDVTRAPAAAAAEEEHGHYTSDLLRRAEYTRAVIISSAAVISMTLLVPTLYVAWMILWPHSTVATNVDDDGYHVEDILRDFPTPWLISSSRRLWSRVTCCDELLLVRGFHVFLVVFAFITVLPLFFAGIFGDVVRIVVGDVVRIGVVFEK

SEQ ID NO: 120962 - protein, 53 aa, Oryza sativa
  Clone ID: PAT_MRT4530_24033C.1.pep
KNYLFLILKLHDNNLRYLYKNRTDLLKSLEENTNEPYVGYRVNKSWTAGEKRV

SEQ ID NO: 120963 - protein, 52 aa, Oryza sativa
  Clone ID: PAT_MRT4530_24034C.1.pep
YISCKGSNSMLLAACCDPMCSVLKNSIIPWMRAEVYIKSRSKEQRIMKDGIN

SEQ ID NO: 120964 - protein, 36 aa, Oryza sativa
  Clone ID: PAT_MRT4530_24035C.1.pep
MAWEPQVWARQRRARFPAGLALAAMVTGDGWMKNMC

SEQ ID NO: 120965 - protein, 96 aa, Oryza sativa
  unsure (1)..(96): unsure at all Xaa locations
  Clone ID: PAT_MRT4530_24036C.1.pep
CHPPPPPPPXYPPPGXPPPPYPPPKPLLYPPPPPPPYPLLYPPYPPPPYPPYPPYPPYPPPPPPPPPPPYPPPYPPPXPPYPPPYPPPFPPPYPDP

SEQ ID NO: 120966 - protein, 613 aa, Oryza sativa
  unsure (1)..(613): unsure at all Xaa locations
  Clone ID: PAT_MRT4530_24037C.1.pep
ARSPGSRGGPSRTSASAGPAAAGRPAPGPGRGPTWFAEFDKKLSVCPFFRYLSMRSFVKGSFSVNRSISSMPSYNTQLTGPSSVWPEAYVVDIGSVIGGLCSEGLVAWYNQDVHVLETHYYSGGAAQSFAIKGFNFDSAPFLFPGFQSRRPHXLARRLGRLCAKRIGSYLSSWDGQIGTSAGSVMTVMXTWDGLRQRKWHSGADAVQEWKKLLVSFFDAVIPISAAAMALPPLSIRGDLGVLSTSAGRYAPSLLKSILQMGPQGALGATKLLRPFSEIVDSLGLKNPFVRNWIDLLCFLLAGVKSDGALSAEMVYMFAEWYKPGCSLEYPLEGSGAIIDALVRGIKKFGGRLALRSHVEKILIENGRAVGVKLQSGQIVRARKAVVSNASMWDTLDLLPPDAVPRSYQDKVKATPQCESFMHLHLGFDVENAREDLGIHHIVVNDWNKGVDADQNVVLISVPTVLGNGLAPPGKHVLHAYTPGTEPFSLWEGLDRKSAEYRRLKEERSEVMWKAVELALGPRFSREKCDVKLVGSPLTHKRFLRRNRGTYGPAIKAGEATFPGQATPIPQLFCCGDSTFPGIGVPAVAASGAIVANTLVSVSQHSELLDAVGI

SEQ ID NO: 120967 - protein, 128 aa, Oryza sativa
  Clone ID: PAT_MRT4530_24038C.1.pep
MDTGNNFFPPVLEVVLCVIIKEDGHMVCRDLEFINSIVEIGIGLVGFGILFSFFGVILFFDRGLLALGNIFFLTGIGLLLGWQSMWQLFTKKANIKWLWTSYPGLPIPDSSHWMDSAIPIPAVWSVQA

SEQ ID NO: 120968 - protein, 82 aa, Oryza sativa
  Clone ID: PAT_MRT4530_24039C.1.pep
MVKSRNDMLSPGLPNSNVVVGVSSPQASPNARGVRLAIATTLPGSTTTGHRYACPCAERCSPSDSDHFGHSVLYLYPGMMNS

SEQ ID NO: 120969 - protein, 55 aa, Oryza sativa
  Clone ID: PAT_MRT4530_2403C.1.pep
LQPPEAQMVSEKAGYNEVNQMAEKAKRRAENARLREPQTLKGHVKTGVKLKGPGL

SEQ ID NO: 120970 - protein, 52 aa, Oryza sativa
  Clone ID: PAT_MRT4530_24040C.1.pep
MVKNDRSMTGLTPVTSDWTDNRAPTSHLLPAEWRRGTTLGPAKGQAVVLASR

SEQ ID NO: 120971 - protein, 135 aa, Oryza sativa
  Clone ID: PAT_MRT4530_24041C.1.pep
MAYEISEIKKIGIGLVGFGILFSFFGVILFFDRGLLALGNIFFLTGIGLLLGWQSMWQLFTKKANIKGSVPFFLGLFLLFVRWPVAGIIMELYGSFVLFSGYGPPIQAFLYQIPVIGWILQYPFQLFGQFRRKRA

SEQ ID NO: 120972 - protein, 75 aa, Oryza sativa
  Clone ID: PAT_MRT4530_24042C.1.pep
MEDRKWVVDTGGQRGACGGTEVTRMAMGNGLALAAGKMARLVRKRRPVVADLVVGGGHRRRWVAVADPVVGRCRR

SEQ ID NO: 120973 - protein, 407 aa, Oryza sativa
  Clone ID: PAT_MRT4530_24043C.1.pep
MAATLAARTHAATSRTPAASRTSIKQSYASTHAKPADHHACVAGEPSSTARSKRSDEQTTRRKEVVDGVLSLGQIHDACVWREAARLLLLLLMGFIGCMEITDSAFGVHSIGFQLQRTLSIGIRVGGMPKLLISTTFKFVYSASRYEGMGVSLHCAAGIINSRLRVEEDAAVRWHDGKRHHGLPLAGHRRRGHEGSDSGELLTITTVVLAAAAADPTRADSPASSGVVVWKPPPSPDSADSVDLGEPRNLCRHLEQRRGTGTKSRKAEEAAPTTTTSSSTPPISTVNANFRRYLRIRPPTCRLPRASSRNVVPSTYFRQRRRPPADGTGESTRDSGVAASHPCRLLLPGSASRHRAWKPPTAAPNMRYLGVALIKSAVCVHDEKLALYLCLIAVFSRKTTPRGSLLV

SEQ ID NO: 120974 - protein, 517 aa, Oryza sativa
  Clone ID: PAT_MRT4530_24044C.1.pep
MAVEVVSEGAAAAAAEVAAPETKEVTAKAAADEAVTLAAVVSKNASFREESNFLDDLKDGERKALAELRAKVEEAIVDGKLFDDGKVEAKKKAAAAEEEKAVEEAAGEKKDGEEKKEEEEPVTEEKKEEEQGEEEEEPKKEEADEGEKEEKPAEEEAAAVVDKDIALWGVPLLPSKGDDATDVVLLKFLRARDFKAGAAFDMLRKTLHWRREWKGFAAGTDDDDDGEALPAELADACYLDGADREGHPVCYNALGVFADDAVYKKALGTEEGKARFLRWRVRAMESHVAKLDLRPGGVASLLQVTDLKNSPGPAKKDLRVAMKQVLDLFQDNYPELVARNILINVPFWYYAFSTLFYPFMTQRTKSKFVIARPSKVTETLLKYIPIEAIPVKYGGLKRDDDTEFSAEDSEVTELVVKASSTETIEIEATEGDTTLTWDLTVLGWEVNYKEEFVPSEEGSYTVIVKKGKKMGSSEAAVRNSFRAGEPGKVVLTVENLTHRKKKVLFRHKAKSACAKEC

SEQ ID NO: 120975 - protein, 550 aa, Oryza sativa
  Clone ID: PAT_MRT4530_24045C.1.pep
MYKMMYPSWNDISVYISEYWSVIIATVIFASVTGVTIYYTVNQLNKNISLSLMKAIRARARKYKKLKDKVPASSHIWRKELGSRSKGLKCCVCLKSVSSPQYMGGVIHQCDICGATAHPSCSGNAHKDCKCVSMVGFEHVIHQWAVQWIDTSDRSEEDSFCCYCDESCNGAFLAGSPIWYCMWCQRLVHVDCHNNLSIETGDICDLGPLKRLILSPLCVKELHWTGAAGLISSITHGANELASNVRERIRSRGKKYRKGTISVDSDSSGTIDPPSDIEGDSQETNNAAKRREDHANGELPEVHESSESENDKQLLTENKTSIPNGQHEDSHVHNNQKYEIVDVPSDSRPLLVFINKRSGAQCGDSLRQRLQILLNPIQVFELGKQQGPEVGLTLFRKVPHFRVLVCGGDGTVAWVLDAIEKQKFEAPPPVAILPAGTGNDLARVLSWGGGLGIVEKQGGLFSVLKDVEHAAVTVLDRWKITIKDNQGKLMSQPKYMNNYFGVGCDAKVALDIHNLREENPERFYSQVNPACSYEVTSPSYSHMHHLLLLV

SEQ ID NO: 120976 - protein, 877 aa, Oryza sativa
  Clone ID: PAT_MRT4530_24046C.1.pep
MRAGGCTVQQALTAEAAAVVKQAVTLARRRGNAQVTPLHVASAMLAPPGGLLRAACLRSHSHPLQCKALELCFNVALNRLPASAAVASSPLLGGHGHGHHGHYYPPSLSNALVAAFKRAQAHQRRGSVETQQQPVLAVKIELEQLVVSILDDPSVSRVMREAGFSSTQVKANVEQACSTTTATSAPPNQNPNPSCTGAAATATATTSPAHPPEIKAKLPLLDMLARDEDIAAVLDCLAPAAAGGRGGGGSRRRVVVVAESTAAAEATARAAVDRVRRGEAKQHDALRGAQVVSLRVSSFRDMPREEAERRLAELRCLVKSRGARVLLVVEDLKWAADFWAAAHAGARRVGSGGGGGYYCSVEHVVTEVRALASCDGGIWLVGFGTYQTYMKCRAGHPSLESMWGLQTLAVPAGSLALSLTCAFDDSALGAVNQSMKASPHTTDGNRPAPSCGPLLGGSHLLSRCCGGDCSAATTTHEHDTKASLPRSFVSSSSLPSWLQHCRDQQLQESTHFADLGKTWGSICGKPSQRMTLHFSAPVSPASSISSYEHGHGHQQQQHQPHHSWLLADLDAKHPWKPKREDDDDEKAKSHDDCSGASNGSVEVECRSRFKELNAENLKLLCAALEKEVPWQKEIVPEVASAVLQCRSGIAKRRDRSRSTEAKEETWLFFLGGDGHGKERVARELAGLVFGSRKSFLSVKLGASSSSPSASGSTEDHHRSKRPRTTTTSSASEAYLERLYDAVSENPHRVILIEDVEQGDHRWQVGVKEAIDRGVLRSQAGDEVGVGDAIIILSCESFEARSRAGSPLMNKKMKVEKEEANTSDHDHKLEIESGAPSSCFDLNLDMESDQAADELSSGDVCLLTAVDRVLLFRRQDEM

SEQ ID NO: 120977 - protein, 94 aa, Oryza sativa
  unsure (1)..(94): unsure at all Xaa locations
  Clone ID: PAT_MRT4530_24047C.1.pep
MMVMMVGMVGNTIQPSLGINPSGPSKPCIYRRCGRFGRTRGWPNXPKFRLVASSIALLYILVNFGPIYHVNSEFLAYSYISLVLDIVRLIYHLI

SEQ ID NO: 120978 - protein, 61 aa, Oryza sativa
  Clone ID: PAT_MRT4530_24048C.1.pep
SITVWHGPGVHTKAGILRNKPESRPTYELDYSWTCIGGTSVLFTGPMTVGRSLFVALLVAQ

SEQ ID NO: 120979 - protein, 115 aa, Oryza sativa
  unsure (1)..(115): unsure at all Xaa locations
  Clone ID: PAT_MRT4530_24049C.1.pep
DGTXXRVGAGVXGARXCKXRXRTGEPVEGWLDLXGGEHGXATHTPKLRVXLRFLGVESDXWWDAGVRXPGFAGVTXXXFPERSGCRVTLYQNSHLSGGFDPGVRXAGGGAYRPAR

SEQ ID NO: 120980 - protein, 312 aa, Oryza sativa
  Clone ID: PAT_MRT4530_2404C.1.pep
MPCGYGVPIISTLDFTARRGTTFASHQYDTGPFYDEIRRRLSFDFTKSQLVEKLRRLKKKYRLCAARMASSPHAAAAGFAFRTPHEGAIYDLARHIWPPALKRDGTASDDDDINPAAAAATAAVMTPVAMEDGFGGSAPTPTPTPRGRGGRRVRRRMAQEQEAAALPSAPALTSTDGAHQEPLVAAMENTLPQIAQLPPVSETEPMPVIANGANEEAVRSVLSRLLKEFITSFAVVGQTGPGMGLNMGFGGAGLNADIAGLGFGIAGLNPGVPGADRWRQHQILELEVYLKRIELVREQVTAALDELRSSEG

SEQ ID NO: 120981 - protein, 125 aa, Oryza sativa
  Clone ID: PAT_MRT4530_24050C.1.pep
KKVKYGMIHLTFLLRICIYVTFQAIKNKHGLPHQYSPMPNGYISNIQCSENHIYCSFTKPASCTCLLSHSVFEPASSQTSFLPKPERRWRPEVSAVPSPSPPGRAARRPRRRVFVAPPPPLEEKF

SEQ ID NO: 120982 - protein, 229 aa, Oryza sativa
  Clone ID: PAT_MRT4530_24051C.1.pep
MGEGRPLHRRRRRHRHSLRLPREGPFVATILFSASKIGMAPDFPWSSAGRSLPLVVSSGASAGVMVSSTRTVRDLHGGRSGGSRSREDMEAGGGDGKKKGGNKGDLAGRRSRAGCGGDADGDDLLPSSAGGRGSEVATCVDGCPGINQLLQRRGIFPREEAAAQRRRDGGGGARRAARSGGDGDGTALTSGRHLLSGDVVIRGNETKVEGLQALGGRKSERMLVQILSG

SEQ ID NO: 120983 - protein, 121 aa, Oryza sativa
  Clone ID: PAT_MRT4530_24052C.1.pep
QHGGASQAARSTASRSERREPGSTVDGVEVGAVLTVVRRERIRLPCGPAAVDPASPPAPARHRPPPAPAWSGTLLSASAPPPPICRRCHGGCCPLPPARSGRGRGMGGEGREVRASSPAPV

SEQ ID NO: 120984 - protein, 359 aa, Oryza sativa
  Clone ID: PAT_MRT4530_24053C.1.pep
MRMGGGSSAAAALVVMVLWAAVPVVVVQAASSPALIVFGDSIVDPGNNNGINTIIKANFPPYGHDFHNHTPTGRFCNGRIPTDFIASRLGLKELLPPYLSPELSTEELLTGVSFASGGTGFDPLTPRLASVISMPDQLLLFQQYKERVRGAAGDARVADMMTRGIFAICAGSDDVANTYFTMRARPGYDHASYAALLVHHAAAFVDELVKAGARKVAIIGMPPIGCVPSQRTMSGGMERRCSEGHNQIAVAYNAGMKRRMEEMQAKKKSTKTKLVFMDIYGFLMDMMMRPRAYGFSDSTMGCCGTGLLEVSVLCNALTSSVCTPVSDYLFWDSYHPTEKAYSILTDFVYDNYVKKLLLD

SEQ ID NO: 120985 - protein, 90 aa, Oryza sativa
  Clone ID: PAT_MRT4530_24054C.1.pep
PPLCLQILLSVTVHPSPSQDIPGIGTGTGLSLSIPPSLLHMGRFFLVSFLYDLILQMGLRFLLVAPDVNRRSAVVSIRLRLWRLSLFSSL

SEQ ID NO: 120986 - protein, 242 aa, Oryza sativa
  Clone ID: PAT_MRT4530_24055C.1.pep
MSIALESGPGLGGGGGGGGGPRFGRVARCAYAASPPPASVGARSSSSVGRDSDSPAAAAKWEWDGEEVEGGDGEVQSSYKGPFDTMDALQEALPFRKGVCKFYNGKSGSFAKLQDSVIPSPPEKSLPKPENPSPRKRKGLLPFSFKWGKPQNKEVFPEDDVIISPTNCRRMTLSPAATSSSGSNSGSDDEHYRSPKLHTRQPLRRPSNAAMGVFASPPAPRPPQDVTESTAMVSPRDKRRRN

SEQ ID NO: 120987 - protein, 160 aa, Oryza sativa
  unsure (1)..(160): unsure at all Xaa locations
  Clone ID: PAT_MRT4530_24056C.1.pep
SWARAPTAGTAPAARPRLLREKRRRAERRPRRRVPPRSPTPSPLASPPAWQPPPPPPXPPRRSHPPPSPXPPPPPPPPSLPXARTPAAASPPRRWPVAFPFSRVSAATLSLPHRPPADGPLTRATPSPPPTGLPMTLHPNSLLPKRNAPTLVTDFRPISL

SEQ ID NO: 120988 - protein, 112 aa, Oryza sativa
  unsure (1)..(112): unsure at all Xaa locations
  Clone ID: PAT_MRT4530_24057C.1.pep
VNGVKYLGTVGDMGLGGGGLGVPCHAPRALVLPXPRGLAQLXCGRGNVRCRPTDAPSFGAPSXEEDHHKSSPIYKGMTGLSPVSGGGRRWVALKDGLLLSFRAKARIVARTR

SEQ ID NO: 120989 - protein, 154 aa, Oryza sativa
  Clone ID: PAT_MRT4530_24058C.1.pep
MPRTHRSGALDVHKAFVRASQSGGRAREEADVAAGLYTLFAVVRPSARSGVGTPCGHGAIKWAAVASQALRGEDELTFAERGGNGVVGAKRAEGESVSGTTACVAAAYLGLKVEAGGMRRCGNYGVRSTADDTTFIFGLVLLFWSRAHLSLPSP

SEQ ID NO: 120990 - protein, 54 aa, Oryza sativa
  Clone ID: PAT_MRT4530_24059C.1.pep
MNDKIEDVRGGGVRPHGLARPNRETKQSRSLTGRKRLLKMYCNARFVVRYIILE

SEQ ID NO: 120991 - protein, 260 aa, Oryza sativa
  Clone ID: PAT_MRT4530_2405C.1.pep
MPLEFYKIKTVPLPSHFPSILFLFRLLPSFSHHLPGVKPERELAGKVNEPNLERGADPGVGLLQAEPPPIARSIRRDWQIQRWARPTNPVVAVSDDSGVGRNRRKPRLRVESDRRRDPLLPHRCSTSAPALASRSVSTSRRPLSLTAVFSLLSSSAGLSKCLLAACRERRKRQDTSPPSLSLRRHRQACSRHAVPDPPTLAPPPKLSKLAAAMDGWTTAGGIAATAPARDLACLGLAADYSELASLALGRNARKKEPPLP

SEQ ID NO: 120992 - protein, 280 aa, Oryza sativa
  Clone ID: PAT_MRT4530_24060C.1.pep
MEEQFLMVGLQALACRIWPNKGDAVLASTNFAFLLERLMMCSFMRGEPIVDGVRFFVKQNGSGYEFFDLCLPGFGGLTGDLPAVRPAASGVQTGGIRAVRPAAATGAAGDLGGQTGDSTPLGRGKREDKDGEKTSNNKPNYNKSKSSNQGRKTENLRKAFQQVCAAFGPLSDVDGESGDDDKGKNVSDVCFMARGESDTEYEDNEILVARKENVWIVDSGCSRHMTGDKNWFSSLKKESKTESIVFDDASTSAVVATGLVKVTRCLGRVFGVMDRESAWG

SEQ ID NO: 120993 - protein, 505 aa, Oryza sativa
  Clone ID: PAT_MRT4530_24061C.1.pep
MKPGEALDDYLSRFNKILSNLRSVDSSYDANYPQSEISRHFLNGLDMSIWEMKVTSIHESVNMSTLTLDSLYTKLKTHEMNVLSRKVDTKSSALVSSSSSSLDVDASSSKSSFLAIFNATSDDQLEQIEEEDLALVANRIARAMNNARSRKRGGPNRCFECGSIDHLRSHCPKLGRGKREDKDGEKTNDNKSKGTSKGRKIKENLKKAFDQVYAVFEPLSDVDGDSGDEAKGKNISGVCFIARGRVEYMEDVVKNNEVLSCPKCRKSKGVLVDCENCANLEKEVSYLKNSLLRFSDGVGARSGEILVKPDTNKTVFKSAGNQTDRSRSRGQTGDRSDRLLCLGQTGGEAAALVARKENVWIVDSGCSRHMTGDKKWFTSLKKASKTESIIFGDASTSAVLAIGLVKILWLLSTLKDYGLTFEKVPLFCDNTSAINIAKNPVQHSRTMHIYIRFHFLRDHVEKGDVELQFLDTKLQLADIFTKPLDSNRFAFLHGELGIIHPFGMF

SEQ ID NO: 120994 - protein, 179 aa, Oryza sativa
  Clone ID: PAT_MRT4530_24062C.1.pep
DPQNGVDCFNLNCAGFVQISNEYAFGAALAPLSEYGDVQYETHLTIYKDMLSNRWCAMYGDTMLGYWPLEAFPAFDKGEEAFWGGQVCNMHEGQEYTTTGMGSGYHPIEGMGKSAYIHGIQVMQIDKSWQRPTRTFGNMSNQPCYGVEPYESKDGALSIFFGGTANMACCGLACQSPGK

SEQ ID NO: 120995 - protein, 243 aa, Oryza sativa
  unsure (1)..(243): unsure at all Xaa locations
  Clone ID: PAT_MRT4530_24063C.1.pep
DDVRGGQRSCGILRLELIPATDPRSDRTSVRPAVQWRSHRPXGQTGYYTLALVARKENVWIVDSGCSRHMTGDKNWFSSLKKASKTESIIFGDASTSTVVATGLVKINENFELKNVALVEDLKYNLLSVLQIVDEEFEVHFKKTGSKVFDSRGDSVLNISRYGRVFKADFENPVSPGEDGRIFQDESDYDDDDEVGSAGQTGRQAGQTAGTPPVRPAQDNVTQLQKSLLLCTFNDDIRRNKSL

SEQ ID NO: 120996 - protein, 1020 aa, Oryza sativa
  unsure (1)..(1020): unsure at all Xaa locations
  Clone ID: PAT_MRT4530_24064C.1.pep
MAEKAAPPSTGSVKGRAPKPGLTDIIDDNVLPVDPDKFTPDQKQEFEAMMQQARDQYLSSFMQTRKGTRVQKYKMKLVADIPGTGSSKDGEVKQDPDGSAQQIIKGATSGYAGNQGDNLPEMHGAPSHIAQGLHGGNFSQDIQESFNNFQDRVDYAVHHALINQSGILVNTLSNMMKTIDDGSIAEHQATGLVYLPGGQEGVSTYEHISRYLAQCGEASAVDALRVRMFRLSLSGSAFTWFSSLPYGSVNSWADLEKQFHSYFYSGVHEMKLSDLTAIKQRYDEPVHEYIQRFREMRNKCFSSSLTDAQLADLAFQGMIPPIREKFSSEDFDSLSHLIQKVTLHEYRLADVRRSSKKVNHVCPYMYGSDDEDDDSEIAAAELVRSKTVIPCQWVKSPGKEQKYDFDITKADKIFDLLLREKHIKLPASHTIPSAEELGKKRYCKWHNSGSHSTNDCKVFRQQIQVAIEGGKIKFDNSKKPMKVDGNPFPVNMVHTATGRRYEENDNGFDPHWDCEFFRFCWNEGMRXRLPVHQRLGSMGQDHGREDEPTRKNQWCPSGXWRVKSQAPAADDATADEAKRLAKGKSVVTAPINMVFTLPAEFGISQADVDEVEEESAKLVLSSEQAVFEKPEGTENRHLKPLYVNGYVNGKPMSKMMVDGGAAVNLMPYATFRQLGRNAEDLMKTNMVLKDFGGNPSETKGVLNVELTVGSKTIPTTFFVIDGKGSYSLLLGRDWIHANCCIPSTMHQCLIQWQGDKIEVVPADSQLKMENPSYYFEGVVEGSDACAKDTVDDLDDKQGQGFMSADDLEEIDIGPADRXVEHRLPIKPGVRPRQQPPRRXLEGKERVVFYLSRRLLDAETRYSPVENQLAGEYECKNDTLLVYNEKCLELMKEFRLVTLKHVSRDQNLEGNDLAQGASGYKPMIKDVKVEITAISADDWRYDVHQYLSNPSRLASRKLRYKALKYTLLDDELYYRTIDGERLVVLLPRHDDFLRLKGSGHLMIVEPREKEEVKAEKKASVK

SEQ ID NO: 120997 - protein, 118 aa, Oryza sativa
  unsure (1)..(118): unsure at all Xaa locations
  Clone ID: PAT_MRT4530_24065C.1.pep
MERGGRTEGGITEVRRGAVTRGRRRGSNLSGLGPGKRKERARPKSPSASLLVPAPPTRTTMNGDGETEGGNGAEAASETGGGIDGRAPWFIGRRCRFGXTDLGRSRRELALGARGQDG

SEQ ID NO: 120998 - protein, 806 aa, Oryza sativa
  Clone ID: PAT_MRT4530_24066C.1.pep
MQALDDYLSRFNKILSDLRFVDSSYDANYPQFEISRHFLNGLDMSIWEMKVTSVQESVNMSTLTLDSLYTKLKTHEMNILSRRVDSKSSALVSSSSSLDVDASSSKSSILALFNATSDDQLEQFKEEDLALVANRIARAMNNVRFRKRGGPNHCFECGLIDHLRSHCPKLGRGKREDNDREKNNDNKPKGTFKGRKIKENLKKAFDQVYAAFEPLSDVDGDSGDEDKGKNISVVCFMARGESYSECEDNEKLKQPHDVLDCSTCTLYKKKLKVALGRVEYMEDVVKNNEVLSCSKCRKNKGVMVDCENCANLEKEVLYLKNSLQRFSEGVGARGGEILVKPDTNKTVFKSVGIMSTLSASSLKSNVMHAKPPVVACVAKSSDSTNVSNNREKYACSFCGKYGYIDGFCFRLAHKQKKEREVAFAKSKWQKSRFPSRKSVRPQWFPRSDRRPVRPAAEPRSDRTPVRLAVKRRSDRPPALMARKENMWIVDFGCSRHMTGNKNWFSSLTKASKTESIIFGDVFTSVVLATGLVKVNEKFELKNVALVEDLKYNLLSVSQIVDEDFEVHFKKTGSKVFDSCGDSVLNISRYGRVFKADFDNSVSPVITCLVAKFDKNVMFWHRRLGHVGFDHLTRLSGLDLARGLPKLKKDFDSLLHIDTVGPARVQSIGGKWYVLVIVDNFSRYSWVFFMATKDEAFQHFRGLFLRLDLEFPGSLKRIRSDNGGELKIASFEQFCNKRGLEHEFSSPRVPQQNGVVERKIRVLVEMARTMLGTLSQVQGEDGRIFEDESDDDNDEVGSADQTRRQAG

SEQ ID NO: 120999 - protein, 181 aa, Oryza sativa
  Clone ID: PAT_MRT4530_24067C.1.pep
MEEFGDWSLGEDRLGRGKREDKDGEKTNNNKPNNYKSKDGESGDDDKGKKVSDVCFMARGESDTEYEDNETAVGPAVKPATGQTGDRSDRLNSLGQTGGTEAYWIPKFLLSSNPSTEASTSACVSTLVARKENVWIVDSGCSRHMTGDKNWFSSLKKASKTESIVFADASTSAVVATCLVK

SEQ ID NO: 121000 - protein, 388 aa, Oryza sativa
  Clone ID: PAT_MRT4530_24068C.1.pep
MEPATETTATSPAAAAAAQPEAEAEAEAESAATPVAVAAAAAATYQPPAPVVPVAVAGAAAGRGNGKRKRGRPRKYGPDGSLLRPLKATPISASVPDDSGGGQYTPAAAVGAVMKRGRGRPVGFVSRASPVSVAVTAATSTAAVVVSSPATHTQTPLGPLGELVACASGANFTPHIINVAAGEDVNMKVISFSQQGPRAICILSANGVISNVTLRQQDTLGGTVTYEGRFELLSLSGSFTPTDSGGTRSRSGGMSVSLAATDGRVIGGGVAGLLVAASPVQVVVGSFLPSYQLDQNATKKPVIEITTVPPPPPAIGFTISSGDPMEDSYSGSHGQHRSGAAAATTTTAKANSTSAFRVENWTPPAPPAAEAARTKTPSSKAKVPVPGA

SEQ ID NO: 121001 - protein, 110 aa, Oryza sativa
  Clone ID: PAT_MRT4530_24069C.1.pep
MATGWVGHGQSETMPDPRSTCQCPTHARKAYRAKPHTRVHARRVLIGGHRACLPCAAVSPTTATPAAAAVHNRVAGLRSCRRVANHRPCRAPTRHRPPLVRRRFAGLHPR

SEQ ID NO: 121002 - protein, 175 aa, Oryza sativa
  Clone ID: PAT_MRT4530_2406C.1.pep
MPRCFTRRSDSLPTELLGVIFELLGVIFEHATHHPTVPWCVCDTRLCGTHNDTWVAVTVDLWQGFAAVNLFTSMRVVNADLDEVLLLILVSYILFLTSSIFSFPSSSSSSSPSPLPLPSPSWPEAVAAPGAAGGDATVAEGGGARRQSDHREGWQQAAGRAEGGGKRHAAAPGWL

SEQ ID NO: 121003 - protein, 123 aa, Oryza sativa
  Clone ID: PAT_MRT4530_24070C.1.pep
MEKCKPISTPIGSTAVLDPDEDGEAVDQKEYRSMIGTLLYLTASRPDIQFVVCLCARFQASPRASHRQPVKQIMRDHVEKGDVELQFLDTKLQLADIFTKPLDYNRFAFLRSELGIIHPFGMV

SEQ ID NO: 121004 - protein, 780 aa, Oryza sativa
  Clone ID: PAT_MRT4530_24071C.1.pep
MATPARFSTKPHVFDGTDFSHWCSRMQSYIMAEDYDIWRKVSHAYVIPEAINTAAEKTAFEQNCKARNILLSGISRSDYDRVAHLQTAHEIWVALSNFHQGTNNIKELRRDLFKKEYIKFEMKPGEALDDYLSRFNKILSDLKYVDSSYDTNYPQSEISRHFLNGTGKEVVQIGALNVVLLIIFVRIVLSLGEAKEKTKMLKQPYGVLDCSTCDLNKMKLKDALGRVKYMEDVVKNNEVLSCPKCRKSKGVMVDCENCANLEKEVSYLKNSFQRFSDGKKNLNMILDQSKALVARKENVWIVDSGCSRHMTGDKNWFSSLKKASKTESIIFGDASTSTVVATVFKADFENPVSPVITCLVAKFDKDVMFWHRRLGHVGFDHLTRLSGLDLVRGLPKLKKDLELVCTPCRHAKVVSTSHAPIVSVMTDALGQLLHMDTVGPARVHRWRKVEEVYVKQPPGFENPDFPNHVFKLSKALYGLKQAPRAWYDRLKNFFLAKGFTMGKVDKTLFVLKHGDNQLFVQIYVDDIIFGCSTHALVVDFAETMRREFEMSMMGELSYFLGLQIKQTPQGTFVHQTKYTKDLLRRFKMENCKPISTPIGSTAVLDPDEDGETVDQKEYRTSPGASYRQAVKRIMRIDRKSTSGTCHFLGTSLIAWSSRKQSSVAQSTTESEYVAAASSCSQIFWLLSTLKDYGLTFEKVPLFCDNTSAINIAKNHVQHSRTKHIDIRFHFLRDHVEKGDVELQFLDTKLQIADIFTKPLDSNHFAFLRGELGIIHPFGMV

SEQ ID NO: 121005 - protein, 1000 aa, Oryza sativa
  Clone ID: PAT_MRT4530_24072C.1.pep
MALPPLPFALAAALLLTIISGHLAAPATADGYVGGLAIYWGRHADADEGTLRQACDTGRYTTVIITFYNVFGYHPGNYNLDISGHDVTAVGADIIHCQKSRNVTILLAIGGYGGGYSLPTSQSAADVADNLWNAFLAGRRAGVSRPFGHEAAVDGVDFFIDQGGADHYDELARRLHGYGAGVIWTATTRCSYPDHRLEKALATKVFDRIHVRMYGAGEIERRCVISSRYSWEKWAAAYPGSKVYIGLVASPEQDEAWVFQKDLYYEYLQFVTKLPNYGGLAVYDRYYDKKANYTDSGTPTDSASPSVPVELPLIERHEVSSCKLSLIPSATSVIFGRSRPARLVQSEIGHLPYRVEIIICSYPRVSDALDVSFCEPLMHPQQDVLFFRVADGDDCWLSCDEHQENDFKADMHTQDPSIQEYPLRASPPLRLSSSLGKAAIGFAKSSLSSSHPSFPPRTTGASPSSSTRTSPPLRPHRRRRLLPSAVVRAFGEFAASPTTRWCPPFAPPRRRSPASTRCRVAAGDDVIVDVSAMSAVDRGEDFEEFQGAAGISGRSNREIYTGQTGGYALVRPANLLRMQSYIMAEDYDIWRKVSHAYVIPEAINTAAEKTAFEQNCKARNILLSGISRLDYDRVAHLLTAHEIWVALSNFHQGTNNIKELRRDLLKKEYIKFEMKLGEALDDYLSSNNKPNNNKPQGSSQARKFKENLRRAFDQVYASFEPSSDVDGESGDDDKGKNISGVCFMVRGESDIEYEDHEGNPAACSDLINHPYIQKPISIDTQSHAVAGVGRCTARKPEPAMNLKPHALVARKENVWIVDSGCLRHMTGDKNWFSSLKKASKTESIIFGDASTSAVLATVLVKVNEKFELKNVALVEDLKYNLLSVSQIVDEEFEVHFKKTGSKVFDSRGDSVLNISRYGRVFKANFENPVSPVITCLVAKFDKDGEDGRIFEDESDYDDDDEVGSAGQTGRQAGQTGRQHTSGQTGSGGAVRPARFVGFRY

SEQ ID NO: 121006 - protein, 720 aa, Oryza sativa
  Clone ID: PAT_MRT4530_24073C.1.pep
NALSNFHQGTNNIKELRRDIFKKEYIKFEMKPREALDDYLSRFNKIFSDLRSVDSSHDANYPQSEISRHFLNGLNMSIWEMKVTSIQESVDMSTLTLDSLYTKLKTHEMNVPSRKVDFKSSALVSSSSSLDVDASSSKPSFLAVFNATSDNQLEQIEEEDLAFVANRIARAMNNAKNRKRGGPNRCFECGSIDHLRSHCPKLGRGKREDKDGEKTNNNKPKGSSQGRKLENLRKAFQQVCAAFEPLSDVDGESGDDDKRKNISDVCFMARVESDTELKYLIPNDDDCSNCEVLMNEISKIRDVNAAHDLNLLALVSRKENVWIVDSGCSWHMTGDKNWFSSLKKASKTESIIFGDASASAVLATGLVKFDKDEMFWHRRLGYVGFDHLTRLSGLDLVRGLPKLKKDLDLVCTPCRHAKMVSSSHAPIVSVMTDAPGQLLHMDTVGPARVQSVGGKWYVLVIVDDFSRYSWVFFMATKDEVFQHFRGLFLQLDLEFPGSLKRIRSDNGVFLRSKLGKTSYELRFGHQPKVSHLRVFGCTLSQVQGEDGRIFEDESDDNDDDETTTSTSTDTERGSTSKVAAPLHIQRRHPPEQIIGNIDFAETMRREFEMSMMGELSYFLGLQIKQIPQGTFVHQTKYTKDLLRRFKMENCKPISTPIGSTAVLDPDEDGEAVDQKEYRSMIGSLLYLTASRPDIQFAVCLCARFQASPRASHRQAVKRIM

SEQ ID NO: 121007 - protein, 578 aa, Oryza sativa
  Clone ID: PAT_MRT4530_24074C.1.pep
MASFLVAWGLATRQPLFVTVPLGLRRVRSRTGRRSYKASAPPKKNGAGDDVDGIFVTGCHAVAYSGKQQDLFKLCSAGHLWQAHDLCQVRMYNPQIIIELALKQCPVCASFLNGNNSTIAMEVPEIAVEVAPEIIIAVEMPEAINTTIVRLPMYMQEANKGLFKPRVVSIGPYHYGQGSTLDMETHKDRFHHAFFQRLGNHVNHQDLIAQCTEGAMQCYNGNVDFRLYTLEKLMHDGCFILELLIQWEEGEHAHVDDHMRLMSNSIYYDLLIVDNQVPFFVLARLFEEFRRYNGEHPIVLVNTPLVNLISNFFNYDGQFSWVHSNLLNEDLPNANHRHLLEIQYNLVIRRNNNRNNNDEQMHYYSCLCGLCSRNICHKSPMPLGIPGANELQDYGVKFHQKENHRITDIFDVTFSHKTMSIPQFKINFGSKILLANLFAYDQIAGQQGRNNNGVVVGPVTSYVALMNALINTKKDVMVLQREGILDNLLSNEEEVASFFNRLGRCALVDVSNHRYTGMFEDVNRYWRYGCCCKHFVTFRMKHCRNPWTCLSLMGAILLLFISLISMIYTILQYYNRRQ

SEQ ID NO: 121008 - protein, 80 aa, Oryza sativa
  Clone ID: PAT_MRT4530_24075C.1.pep
PLLIWRCLYRGWSCPLQALLHVQLGIEAKGNPKHAFPSKETSRPDETESDSVLPVRPATHRRSDRPSTGGLTAQHTAVRP

SEQ ID NO: 121009 - protein, 43 aa, Oryza sativa
  Clone ID: PAT_MRT4530_24076C.1.pep
ALPRSKEHFFFKITGIYTQRMSTAQRNMHENKYRIYNDPTCLR

SEQ ID NO: 121010 - protein, 67 aa, Oryza sativa
  Clone ID: PAT_MRT4530_24077C.1.pep
MEVLSALLDPPSGNGRRAGEEGRVEAAAEGKGPVVSGERWLPELEMIWSAGGGAERRWIAIVIGMNG

SEQ ID NO: 121011 - protein, 159 aa, Oryza sativa
  Clone ID: PAT_MRT4530_24078C.1.pep
MGNIFVKKPKVTDVDRAILTLKTQRRKLAQFQQQLEKVIEAEKEAARQLVQQKKKDRALIALKKKKAQEELLKQVDTWQMNVEQQLADIELASKQKAVFDSLKAGNAALKSIQNEINIDDVQKLMDDTAEAKAYQDEINAALGEQLSAEDEEAVMAEFE

SEQ ID NO: 121012 - protein, 473 aa, Oryza sativa
  Clone ID: PAT_MRT4530_24079C.1.pep
MRIASSSGILMDANGKANGSAPSALVAYFLGMGFSREMVFRAIKEIGDTDSEQILELLLTYQAIGSDPSVGNSSHSACDPQILEEEDEEEDVNWDEDDTVDNFDRATYSDGSGDEDFLQEMSEKDEKIKSLVSMGFPEDEDTEFSSFGGRKKTKLIDGSKKKRERYRSRPQWNQVPFDGSHEEPMPLPNSMVGFSLPNDGLRSVHRNLPDQALGPPFFYYENVALAPKGVWTTISRFLYDIYPEFVYSKYFCAAARKRGYIHNLPIKNRNYTRGVSRTARYRALGNSFQVDTVAYHLSVLRDIFPNGMNVLSLFSGIGGAEVALHRLGICMKTVVLVEISEVNMTLLRSWWDQTQTGTLIEIADVQNLTAERIELFIRRFGGFDLVIGGSPCNNLAGSNRYHRDGLEGKHSALFYHYYRILDSVKTIMASIFGAKGKLFRHVRKALLLKQSSSLTLKTEQDPSNNSDKDSMDK

SEQ ID NO: 121013 - protein, 289 aa, Oryza sativa
  Clone ID: PAT_MRT4530_2407C.1.pep
MNIKGGGRVPVPPAGAGTLVKLVVLGGTAVYAAVNSLYNVEGGHRAIVFNRIQGIKDKVYPEGTHFMIPWFERPIIYDVRARPNLVESTSGSRDLQMVKIGLRVLTRPMPEKLPTIYRTLGENFNERVLPSIIHETLKAVVAQYNASQLITQRETVSREIRKILTERARNFNIALDDVSITSLSFGKEFTHAIEAKQVAAQEAERAKFIVEKAEQDKRSAIIRAQGEAKSAELIGQAIANNPAFLALRQIEAAREISHTMSSSANKVFLDSNDLLLNLQQLTVANKSKK

SEQ ID NO: 121014 - protein, 102 aa, Oryza sativa
  unsure (1)..(102): unsure at all Xaa locations
  Clone ID: PAT_MRT4530_24080C.1.pep
MNLHGNSMNSYLRRVQIASIGPCFHHVRSNCFLVVTLNLQAGTTGVKIITEMSFTCYXTVHGISLFFLLVPXTSVAPYSPSSNLPMGLCVLSQCCNFYTXYV

SEQ ID NO: 121015 - protein, 121 aa, Oryza sativa
  Clone ID: PAT_MRT4530_24081C.1.pep
MWQDGLGLGDAICFSCFAAWMMMMKAETIERRKRRTWPPDPLPRRPFITSACIFIVASVGGGGERDGDAQCWSLRIKKTRAMGETEIKGSIVVTGLDINYPTIWILSDDSLKNGGKIILTI

SEQ ID NO: 121016 - protein, 518 aa, Oryza sativa
  Clone ID: PAT_MRT4530_24082C.1.pep
MADTDHRRRGGATRAHVVLFPFMAQGHVAPFRCIAALVRRCRPDARLTVVATPGMAEAFRAHLVADGVGDGRLAGVHELPFLPAEHGLPAGADTSASIGFQQLITLFLASESLRPAFRRFVDDLRAANPGDDIHVMADMFLGWAVDVARDAGASSSIVLTCGGYGSALYFSLWDSVPLPATASPDDGFPLPRFPDVRVQRSQLTNHLAAADGKDAWSTFIQRQIAAFSRADALLVNTAENLEPKGLSMLRQWLNVPTYPVGPLLRAPAPSPEAKKTSPILEWLDEQPPGSVLYISFGSLYRITAPQMMELARGLEQSSHRFVWVIRPPAGNDANGEFSPEWLPEGFRERAEAEGRGLVVRCWAPQVEILAHTATGAFLTHCGWNSVQEALGHGVPLLGWPLSAEQFYNSKLLAEEMVCVEVARGSAAVDAAKVAAAVEAVLGETSMERAAMKRRAAEMKEAIDAARDGDKSSVTVMRRFLDEVLPPRGAQFMASWALQSACFRDGAMSHQLRSSHPMM

SEQ ID NO: 121017 - protein, 207 aa, Oryza sativa
  Clone ID: PAT_MRT4530_24083C.1.pep
MVELRLSQQRPRGRYAAEGEEGEGARDPPLDIKSTIETKVPAFENNQGNEEEKKDEEEDEKEGNDNGAIAIQGRAWGAVEWSWTHGRVSWTKKNPTAEDDQCRQRGCRCANGKEDDERGDTWCGSMSMQWRELYRGQRVRGRRWLTRRLVQQPPCSAAEDTDAQQARKDRADQANGGGRCGMRHGGTASDDDPRSDLRGGSRWFASC

SEQ ID NO: 121018 - protein, 47 aa, Oryza sativa
  Clone ID: PAT_MRT4530_24084C.1.pep
HISTSALMAASAATFEVAASFISVVALLMSIPISASSSSKSTETMEC

SEQ ID NO: 121019 - protein, 466 aa, Oryza sativa
  Clone ID: PAT_MRT4530_24085C.1.pep
MVEIVFAAVGAAALLVLLVAACLCCSRKTAPRRKRKKKPHNPVTHFDADTSGSKGGGGRDTSGPKPPPPPPWLAEPRAAPSTSDAAGMSKGTFTYEQLAAATGGFAEENLVGQGGFGYVHKGVLAGGKAVAVKQLKSGSGQGEREFQAEVDIISRVHHRHLVSLVGYCIAGARRVLVYEFVPNKTLEFHLHGKGLPVMPWPTRLRIALGSAKGLAYLHEDCHPRIIHRDIKSANILLDNNFEAKVADFGLAKLTSDNNTHVSTRVMGTFGYLAPEYASSGKLTEKSDVFSYGVMLLELVTGRRPIDAGAADHPWPASFMEDDSLVEWARPAMARALADGDYGGVADPRLEGSYDAVEMARVVASAAASVRHSAKKRPKMSQIVRALEGDMSLEDLNEGMRPGQSMVFGTAETGGSISEASGSYTFDMDRIIQEATAARLESGRRDDVSFSGEMSAEWKQPPHRVSR

SEQ ID NO: 121020 - protein, 311 aa, Oryza sativa
  Clone ID: PAT_MRT4530_24086C.1.pep
MVELRLSQQRPRGRYAAEGEEGEGARIWLRNLSCLHNRILIHITWNGSTLVAFENNQGNEEEKKDEEEDEKEGNDNGAIAIQGIHIYDALETTPGMREEKKGEEEDEKEGNDNGAIAIQGRAWGAVEWSWTHGRVSWTKKNPTAEDDQCRQRGCRCANGKEDDERGDTWCGSMSMQWRELYRSHRSWAAERITAITRKCSTHRGRVVGSSDDEGHVRAQRGQKLETDEWRRPQESQARRGQRVRGRRWLTRRLVQQPPCSAAEDTDAQQARKDRADQANGGGRCGMRHGGTASDDDPRSDLRGGSRWFASC

SEQ ID NO: 121021 - protein, 543 aa, Oryza sativa
  Clone ID: PAT_MRT4530_24087C.1.pep
MARLHHLLLSRALASHPLHHHLLPSPPPSSSLLPPLLPSPPRPPSPPSPLPGGRGVPHSSLAAASRHYASSTPGRRRRAPPMLLRRRRARRPPREGPAELNVQIGIEEALPDDPTILSIAEALQMDVAKAAKVAFDHLENSEYKTRDNCISDVNKYDTVEVSILLCDDDFIRKLNKEWRDEDHATDVLSMSQHIPGLDIPILQLGDIVISIDTAQRQAEERGHTLHDEIRILMVHGLLHLLGFDHELSKVAEEEMESGEEHILNSLDWKGKGLIKSAYDSIHDMDHSQSYVEASRDSDEINLREVHQPKLSHIVCDIDGIVDNEGYPHEESIESLREAVSRGINVITVTGKTRASTIRTFRLLDLGGKYRFISESSPGVFLQGSLVYGRHGQEIYRANLGLDICKEAFLYSLKYSIPLVAYHEEQCLTLFEHPLVDLLHTIHYETKVKVVPSVEDLLGYSSFQKLLFLDKVDGDSSVLRQHWSELTQGRARVIKAHSSMIEIVPLNASKGGGIRILLDHLGITEDSDLDAVGDYTRWLSNIFT

SEQ ID NO: 121022 - protein, 77 aa, Oryza sativa
  unsure (1)..(77): unsure at all Xaa locations
  Clone ID: PAT_MRT4530_24088C.1.pep
ALALXAXXVLGAVRPQVAGGHPIWSARLRRATAXXMNXGRGWRLHYNCSQVMGLPTSLRPFFNGVRRVFFLQCVXCE

SEQ ID NO: 121023 - protein, 857 aa, Oryza sativa
  Clone ID: PAT_MRT4530_24089C.1.pep
MEIPTDAIHRLRSSLREPFSAPASASATPPFPSVADAVAAFDSRVGVGAAGATPRCGRCGAAGGLLRGEGSAVCAYCGCPRREGCGGVAAFRGSVAYRWLLGSLGLDGSEPVEFDNESTDSSKTKEALKNGMVLSDLLDLKLSFPPENKETSGSTENNEQSSAEHMLKLSGVNLDSFFAARMENTTTAAVPTQKHTVVQEKQSTDSHGSSSLEMRATYLTGTKTSSQNTNQIEVTPAFANWDADFQSASSESVTEDSKKSDLFNSASNVKASSFPAHVTAISPVVPSGNETYMRSTKLEDSKDLASASGMLVKDESNSGIFPENNIAEFTESSLSKSSAHSDQLPARGDTGVGIDEAFDDWQEFTGGNQGSLSNAGEHMEGPIESNPSEIKTVDTWPVSSMESSNNVTDNSVDDWQAFTSSSGQGGNSVKPIEGSAASQGGDVVKPVGQTASISFEHFSEANSVELWPVGNINELHNTKVVNETNDSFDDWQDFTTSGQGQGAPSNQVGGMIEVSRITQKETSDDSWFTTDVKEEINKDLVNTTNAMLDDFQSFSGSDLAPQSSSFVSGEMMNPSFGQHEGTDTVQSWLGGSNNMGTNMATTNSEDNSFDIWKDFTTSGHQKENISIFERKKTSTSSEPAKETDPMDLWLTSNAQESNSSKDANRINDSSGGWQDFANFGQKESMKIPGVGHSAKDSSSNSAELKNHEQINEDSDPFDDWQDFKNSHPLDTSLQVPSNSSFDNSLVRMPDALEGLEFGSFAQSVPSQSQRDNKENSNETNTVSSNHNLERMVGRQQTGDLGSLSTIWPTTSHDTQSVSKPESADANVERLLSQMHDLSFMLKDDLSIPDKPVGHYKP

SEQ ID NO: 121024 - protein, 74 aa, Oryza sativa
  unsure (1)..(74): unsure at all Xaa locations
  Clone ID: PAT_MRT4530_2408C.1.pep
MCTXLNXLXXXXTXXNVXSAESQPFTCNPLGRNDVVSYLVLXKXEDXKKIFXXXXXXGGXVXVSXXLIXXXGTG

SEQ ID NO: 121025 - protein, 199 aa, Oryza sativa
  Clone ID: PAT_MRT4530_24090C.1.pep
GSPYIGLYLLLEDDYDSALDAFNAVLELDPHYNYTFLNRGLAFYYSGRYSEAERDLLRFYQEDKADPYRVLWLYFNELEFKPNEAKANLITRSKALSAHYWGTNIIHYFLGELTLAQLRDIMDKEAQPNTASYAEILTETYFYLAKQQLKLNKTDEAISAFRLSLANQVFNFVEYRFALFELSQLRAMENQTYPVVGIN

SEQ ID NO: 121026 - protein, 110 aa, Oryza sativa
  Clone ID: PAT_MRT4530_24091C.1.pep
MTTTTNLALALGAAGTSSGDDDGRGRSGAQDLSGDDKDSGSGAQELVNGSVRLRSCGALVATAMAPVAKITHFAPAARADSLMVLHSAAVDARLRQCIAADLSYWRFLFQ

SEQ ID NO: 121027 - protein, 134 aa, Oryza sativa
  unsure (1)..(134): unsure at all Xaa locations
  Clone ID: PAT_MRT4530_24092C.1.pep
REGKEKKEGKERREREEREEEKGKREGGRKEKEKGKRGKKRKREEGRGEEEERRGGEGREGEEEKGRKERRGEKEEEEXERRVEGSEERKSEKEKRGGKRERREQEKRRERARSREKGRGAKGAQRRRGTRTEV

SEQ ID NO: 121028 - protein, 72 aa, Oryza sativa
  Clone ID: PAT_MRT4530_24093C.1.pep
MAKEIPGLDWHLLLCCTSPKLSGDPRFRPNEHGAGRSRSSLFSHRMAAIAAPSKMLPHAALHSTLTTMCNGP

SEQ ID NO: 121029 - protein, 515 aa, Oryza sativa
  Clone ID: PAT_MRT4530_24094C.1.pep
MTEVDKEALHTLLKLKFDLDLNEENVKGCVELMFSSSYKSFRHRFYEHYVKHGGGENARMNPHKALEDRLADWFWLCDHFETEEFQKRSTIGKDNRSNLPYMHWKGTKSFVALQHELGCGDITLYKECYSNDKGWASSDAREKHDQMVRMQEESMQQDEIPLTEPQICEKVLGKAYGYIRGRGHGPKPNRRATSTSTRTYQQMEEELASTKQTVAVQQNQLAVQQNQLESQQKQLDWLHSVVSKLAGIPTPCMDANGTSVPAYTATTSNDGSKRSVAHFNFNWQKLISDYHLEDNAWVQNLYDLREKWATIYRRDSFCADMTSTQRSEELLVQYDKCIARLRRKELYEDHKSRNSDPILCISNLPMLKTAAESYTRNMYSAFEEEFQKQFVLSCTLIIQEGTINTYKVVTVDHSEDEARVIFNSVHMNISCSCRKYNCLGEETTQPSNINIAGASQPTVQEPLDSNTVMPFGDISMIFVPPIRGEFTNLLFQAHHETTAAASASRCLEFENQDPN

SEQ ID NO: 121030 - protein, 108 aa, Oryza sativa
  unsure (1)..(108): unsure at all Xaa locations
  Clone ID: PAT_MRT4530_24095C.1.pep
TCQFPQLHHMPCSHMITIXRLQGLDMEVSPRICFEASNEVVQHTYSPRFEPYLDPSQWPSYDXEFFVPDLSLKNDTGGRRRTKTFKNDMDKGWRQHPAWPFEDDDRCP

SEQ ID NO: 121031 - protein, 332 aa, Oryza sativa
  Clone ID: PAT_MRT4530_24096C.1.pep
MANKLAALLVSFAMLMAAAAGFYTPPSPSTCGLKVGYYHDKCPHAEAIVRGAVGAAILRDPGVGAGLIRMLFHDCFVEGCDASVLLDPTPANPQPEKLAPPNNPSLRGFEVIDAAKTAVEAACPGVVSCADIVAFAARDASFFLSNSRVSFDMPSGRLDGRYSNASRTLDFLPPPKFNLGQLVANFAAKGLSVEDMVVLAGSHTVGRSHCSSFVPDRLAVPSDIDPSFAATLRGQCPASPSSGNDPTVVQDVETPNKLDNQYYKNVLAHKGLFTSDASLLTSPATMKMVLDNANIPGWWEDRFQKAMVKLAAVEVKTGGNGEVRRNCRAVNY

SEQ ID NO: 121032 - protein, 339 aa, Oryza sativa
  Clone ID: PAT_MRT4530_24097C.1.pep
MARLAALLVSLAMLMAAVTAARVERAGAGFYTPPSPSTCGLKIGYYHDKCPHAEAIVKGVVAAALHRDPGVGAGLIRMLFHDCFVEGCDASVLLDPTPANPQPEKLAPPNNPSLRGFEVIDAAKDAVEAACPGVVSCADIVAFAARDASFFLSDSRVSFDIPSGRLDGRYSNASRALDFLPPPTFNLGQLVANFAAKGLSVEDMVVLSGAHTIGLSHCSSFVSDRLAVASDIDPSFAAVLRAQCPASPSSSNDPTVVQDVVTPNKLDNQYYKNVLAHRALFTSDASLLASPATAKMVVDNANIPGWWEDRFKTAMVKMAAVEVKTGSNGEIRRHCRAVN

SEQ ID NO: 121033 - protein, 262 aa, Oryza sativa
  unsure (1)..(262): unsure at all Xaa locations
  Clone ID: PAT_MRT4530_24098C.1.pep
MNDIIIFTDIISSLGLVEFPIKGKSFTCSNIQANLLLEQLDXLLTSNAWTLRYPKSYVLTLTRAISVQMXKYSSIPISNVFHFENYWVDMEGFFLSWCLXWNIDPGFIDPARCIIYKPELLRKFLKXLSKGLSKLLQLISIYNKGLDFLYLIEERRSLTILKWNFREVVKKQISKLYLFRRLYWKRRCTNRRIELGXENTKFFHAMATKRFXDIIAQINDERVTLVSSHQHKTSLFFNSFQNRMGVSSHPEMVFNLTELFPR

SEQ ID NO: 121034 - protein, 1062 aa, Oryza sativa
  Clone ID: PAT_MRT4530_24099C.1.pep
MATPARFSTKNHVFDGTDFSHWCSRMQSYIMAEDYDIWRKVSHPYVIPEAINTAAEKTAFEQNCKARNILLSGISRSDYDRVTHFRTAHEIWNVLSNFHQGTNNIKELRRDIFKKEYIKFEMKPGEALNDYLSRFIKILSYLRSVDFSYDTNYPQSEISRHFLNGLDMSIWEMKVTSIQKSVNMSTLTLDSLYRKLKTHEMNVLSRKVDSKSSALVSSSSYSLDVDAFSSKPSFLAVFNVTSDDQLEQIEEEDLAFVANRILELRIMPGTGKELGRGKREDKDGEKTNNNKPKGSSQGRKLENLRKAFQQVSAAFEPQNDVDGESGDDDKGKNISDVCFVARGESDTEYEDNELKQPHDVLDCSTCNLNKLKLKDALGRVEFMEDVVKNNEVLSCPKCRKSKGVMVDYANCANLEKEVSYLKNSLLRFSDGKKNLNMILDQSKVLVLEVALVARKENVWIVDSGCSQHMTGDKNWFSSLKKASKTESIIFGDASTSAVLATGLVKVHFKKTGSKVFDSCGDSVLNISRYGRVFKADFENPVSPVITCLVANFDKDMMFWHRRLGHFGFDHLTMLSRLDLVRGLPKLMKDLDLVYTPCHHAKMVAYSHAPIVSMMTDAPGQLLHMDTVGPARVQSVGGKWYVLVIVDHFSRYSWVFFMATKDEAFQHFRGLFLRLDLEFPSSLKRIRSDNGGEFKNASFEQFSNERGTLSQVQGEDGRIFEDESNDNDDDEITTSTSTDTERGSTLEVASPLHIQRRHPLEQIIGNIGERTTRSKVEVYVKQPPCFENPDFPNHVIKLSKALYGLKQAPRAWYDRLKNFLLVKGFTMGKVDKTPFVLKHGDNQLFVQIYVNDIIFGCSTHALVVDFAETMHREFEMSMMGELSYFLGLQIKQTPQGTFVHQTKYTKDLLRRFKKENCKPISTPIGSTAVLDPDEDGEAIDQKEYRSMIGSLLYLTASRPDIQFAILWLLFTLKDYGLIFEKVPLFCDNTNAINVAKNRVQHSRTKHIDIRFHFLRDHVEKGDVELQFLDTKLQLADIFTKPLDSNRFAFLCGELGIIHPFGMV

SEQ ID NO: 121035 - protein, 109 aa, Oryza sativa
  Clone ID: PAT_MRT4530_2409C.1.pep
MGSRGKKREPVGDLLYNGVSALAPLQPPATMLVHGVFAAPHMQAGMPMYIQTMLTGSNTPRAVAVVVAFGRRCRRWVREEEKKTGLHFPEAEIHRSSIFAVNPKFAVAF

SEQ ID NO: 121036 - protein, 170 aa, Oryza sativa
  Clone ID: PAT_MRT4530_240C.1.pep
MEIQYELNSDRDPNRSPTGLGGPSDGSYIFVRGVTGGGIASPWEYGEENARGGESRAGAIDYFLYIDARYFARVPSTSQRLLPLRSASSANCNIAQTNKPIYHGGAGICVGDRDVYFGVSQSIRHRSTNISMMASRRRQRPIAVGFIGLTWRSMRMPRPRPRPRPSLSLV

SEQ ID NO: 121037 - protein, 1074 aa, Oryza sativa
  Clone ID: PAT_MRT4530_24100C.1.pep
MPVELLRPVVAAVASLARCVRACAEESNRIEGGSGWCVAAMDGDARVRSGYGARAGPGATTSATTSSSPSYMSIDGDDNGGAGGAKVWVLVLLFLLIVLMFLPSVVRRGRPWGGGGGEHHRGGGGLSLKSGRDVVNLCLVAFAILCGLLGRARRLAASPPSRLERTSSAPYTKGNSLFRKRGGPNHCFECGSIDHLRSHCSKLGRGKREDKDDEKTNDNKQKGTFKGRKIKENLKKAFDQVYAAFEPLSNIDGDSGDEAKGKNISGVCFMACGESYLECENNEVSAFEEAINILSAKKKCEKMYRKQEFIIESLNFEIARLKSLIPNDDDCKSFEVLMNEISNIRDVNVAHDLKNKSSLALSFALHTRTSDELFLTKKLLQKYQIDFHASLMFNMISAKKLKQPHDVLNCSTCNLNKMKLKDALGRVEYMEDVVKNNEVLSCPKYLKSKGVMVYCENCANLEKEVSYLKNSLLRFFDSKKNLNMILDQSKVLVLEVALVARKENMWIVDSGCSRHMTGDKNWFSSLKKASKTKSIIFGDASTSLATGLVKVNENFELKNVALVEDLKYNLLSVLQIVDEDFEVHFKKTGSKVFDSCGDSVLNISRYGRVFKADFDNPVSPVIICLVAKFDKDMMFWHRRLGHVGFDHLTRLSGLDLVRGLPKLKKDLDLVCTPCHHAKMVASSHAPIVSVMTDAPGQLLHMDTVGPARVQSVGGKWYVLVIVDDFSRYSWVLFMATKDEAFQHFRGLFLRLDLEFPGSLKRIRSDNGGLEHEFSSPRVPQQNGVVERKNRVLVEMARTMLDEYKTPRKFWAEAINTACYVSNRVFLRSKLGKTSYELRFGRQLKVSHLRVFGCKCFILKSGNLDKFEARSTDGLFLGYPAHTRGYRVLIMETNKIIETCEVSFDEASPDGPPEITTSTSTDTERGSTSEVAAPLHIQRQHPLEQIIGNIGERTTRSKEEVYVKPLGFENPNFPNHVFKLSKTLYGLKQAPRAWYDRLKNFLLAKGFTMGKILCLLSTLKDYGLTFEKVPLFCDNISATNIAKNHVQHSRTKHIDIRFYFLMDHVEKGDVELQFF

SEQ ID NO: 121038 - protein, 665 aa, Oryza sativa
  unsure (1)..(665): unsure at all Xaa locations
  Clone ID: PAT_MRT4530_24101C.1.pep
GPDSQGYRVTKLDTRWHTTGGSEAVRPAAATXCGKRLRRSDRRFNTGQTGGIHLVRPADQSRMQSYIMAEDYDIWRKVSHAYVIPEAINTAAEKTAFEQNCKARNILLSGISRSDYDRVAHLQTAHEIWVALSNFHQGTNNIKELRRDLFKKEYIKFEMKPGEAFDDYLYRFNKILSDLRSVDSSYDANYPQSEISRHFLNGLDISIWEMKVTSIQESVNMSTLTLDSLYTKLKTHEMNVLSRKVDSKSNALISSSSSLDVDASSSKSSFLAVFNATSDDQLEQIEEEDLALVANRIARAMNNARNRKRGGPNRCFECGSIDHLRSHCPKLGRGKREDKDGEKTNNNKSNNNKSKGSYQGRKMENLRKAFQQVCAAFEPLSDVDGESGDDDKGNNVSDVCFMARGESDIEYEDNEGEDGRIFEDESDDDYDDEVGSAGQTGRQAGQTAGTPPIYVDDIIFGCLTHALVVDFAETMRRELEMSMMGELSYFLGLQIKQTPQAVLDPDEDGEAIDQKEYRSDLRSALVNGKDRDYAHGGAEVYCGRDTMEELRSRRSRIPGDEVGYKMAYGGWISCGRDLRNGLHEANDTREDIWPGIGVHLARHGSKSSRKWGLAFVSLAIELNVPLFSATCRFVHIRLPLSGTKRTTKSTATRRHKGSELRGREI

SEQ ID NO: 121039 - protein, 397 aa, Oryza sativa
  Clone ID: PAT_MRT4530_24102C.1.pep
MGKLLMGNTLNASARFESENCAVNSFKALNRRSDRPTYGGDSMPRESICGDGPGVGLGIRRRLWRLPTSERINKVVIHFKSSSICVSPGFGGLTGGALAVRPAASQRSDRRGHGGQTGFGNKRQELISALGRGKREDKDGEKTNDNKPKGTFKGRKIKENLKKAFDQVYAAFEALSDVDGESGDEDKGKNISGVCFMACGESESECEDNETGHQSDWRYRRGRTGPRKENVRIVDSGCSRHMTGDKNWFSSLKKASKTESIIFGDASTSAVLATSLVKVQWEDGRIFKDESDDDDEVGSAGQTGRQAGQTAGTPPIRPTQVLREFEMSMMGELSYFLGLQIKQTPQAVLDPDEDGEAVDQKEYRSDSMPRESICGNGSGVGLGIRRRPWWSEIMRDT

SEQ ID NO: 121040 - protein, 121 aa, Oryza sativa
  unsure (1)..(121): unsure at all Xaa locations
  Clone ID: PAT_MRT4530_24103C.1.pep
CEGWRGRGVLAAGSFFLFRQGLYLPMGINMYTRGHCNLSISXSIQLLSAHRHPLXLRFLLXTSGIWHLTRGCIGSVRSPAKGXXVLCSAGPGESIGYVGVVQGCIVSIPWIALVWLIYLPT

SEQ ID NO: 121041 - protein, 197 aa, Oryza sativa
  unsure (1)..(197): unsure at all Xaa locations
  Clone ID: PAT_MRT4530_24104C.1.pep
DYYNNGLPSNLSGGRNPSLDYGFXGAPRSAMASYCSELQFLXNPVTNHVQSAEQHNQDVNSLGLISSRKTAEAIEILKLMSSTFLIALCQAVDLRHIEENVKSAVKSCVMTVAKKTLSTNSTGGLHVARFCEKDLLQEIEREAVFAYADDPCSANYPLMKKLRNVLVERALANGTAEFDAETSVFAKVARFEEELRA

SEQ ID NO: 121042 - protein, 2978 aa, Oryza sativa
  unsure (1)..(2978): unsure at all Xaa locations
  Clone ID: PAT_MRT4530_24105C.1.pep
MDYQQSDGIYDMPDEPLFTLNLRLSHSNDLDRVHKSFTSKIDKARTYLTGRFRRIVKVKGSKRKEFVLTPEGPDVFTIAFTDGTNRVTAIIEERNMWLRGFQTADGHIFEFNDEHGNEGKDANLDDKTDEMNNQFNGNDKTRDEEVKDEEEAIKDQKLKVIKDPKMKAIKDRGMNKHCKQKEKSKAACGSKKKQVNRKDQLNPKKYIRGSVLLRHDSNYGSLLGPNRLPLFQVVYSTMRDMLQNLAHFDPNNYSDKHKRSMAALIIHTAETLKNKYISSLVLNSFNPHIGARLQALDDMGAAHINGWSTASELILKSIHLPSKVWDFQQQEFSKCNEFYKNQCWTTDPNVAMKSIVFLKGDAYTDTTASTVMAPPSGKPGAISLLKPPVIFNGLNFREYALHMQIHMCSQWLWGYLIGDRPCPPCPTLPAEPAISADADENTKRGLLDDLAAAMEAYQTDLSLYETWLEQEAYAKAILVGSMEQYEPRNDAMFLAVVNEAQSLRQLDATVDEFFRKMSAVWRQMDLQGADVCRTCTCCQRQRVQTETTRLYEFLSRLRPEFEPVRAQLLARRPRPSLLETLPELRAEETRCREAGIGIAQQSTSVLVAQGLPSQVHVSAQPVVVPSPLPVAAGAPSTPSGIVCGYCSKTGHTASMCYKKKRDQSHRTSQGSRQGSSQSSSQQITSTEQELVRLLRRLMTTASTSTHGSAAQASSLPPPPPSSSGILSSWFLDSGASFHMTPDSTHLSSMSPPDTPLTVQTANGTSLPVVDRGTLSTSSFRVPTVSHVPKLTMQLMSAGQITDHGCRIILEADSCCVQDRRTGLLVGTGPRRHDSQRLWELDWLHLPSDASTSQSVGSTASALATSATTTFAQWHRCLGHLSGARLSTLIGSWGLRSCFWRHRSTFQFLSIYQQFATMVRTQYDSSIRVFRADSVAPAPASRYDLRDRHAIRPAPKYGFTAAAIVEPTTYREAIAHQEWQQAMAEEIAALERTKTWDVVPAPTHVTPITCKWVYKIKTRSDGSLERYKARLVARGFQQEHGRDYGETFAPVAHMTTIRTLLAVASIRQWSISQLDVKNAFLNGELHEEVYMQPPPGYSVPDGMVLRLCRSLYGLKQAPRAWFERFSSVVTDIGFKASDHDPALFVHTSSCGRTLLLLYVDDMIITGDDSRFINLVKKRLSDQFLMSDLGPLRYFLGIEFSSTSSGFYLSQEKYIQDLLARSGLTDKRVVDTPMELGIHLRPNDASDHSDRRSLSAYCVFLGSSLIAWKTKKQTAVSRSSAEAELRAMAALTAEITWLRWLLEDFGVFVSPPTPLLSDSTGAISIARDPVKHELTKHIGVDASYMRSQVQNEVVALHLNASVGVVVMGGINHILMHNWEVPCAAEISLKASSYSAKIPIVEGEVKVFTDHHNQLYTSHLKLSSKEGQKEVKVRLYVDGFLALTAKSCQVENEEVLRDEKGETCTDNDKVTRCLGRVFAVMDRESAWGLDDVRGGQRSCGILRLELMHVVDGDSIWHTMELLCAYGMRSRIWKESKFERSNKVVIHFKSSSIYVSPGFGGLTGGAPAEYIKFEMKSGEALDDYLSRFNKILSNLRSVDSSYDANYPQSKISRHFLNGLDMSIWDMKVTSIQESVNMSTLTLDSLYTKLKTHEMNILSRKVDSKSSALVSSSSSLVVDVSSSMPSFLAAFNATSDDQLEQIEEEDLALVANRIARAMNNARNRKRGGPNRCFECDSIDHLRSHCPKLGRGKREDKDGEKTNNNKPNNYNKSKGSNQGRKMENLRKAFQQVCAAFEPLSDVDGESGDDDNGKNVSDVCFMARGESDTELKSLIPNDDDCENCEVLMNDISKIRDVNAAHDLKNRSSLACSFALHTRTLDELFLTKKLLQKYQIAFHASLMFNMISAKKLKQPHDVLDCSTCNLNKMKLKDALGRVEYMEDVVKNNEVLSFPKCRKSKGVMVDCENCANLEKEVSYLKNSLLRFSDGKKNLNMILDQLKVLVLEVALVARKENVWIVDSGCSRHMTGDKNWFSSLKKASKTESIVFADASTSAVVAIGLVKVNEKFELKNVALVKDLKYNLLSVSQIVDENSEVHFKKTGSKVFDSCGDSVLNISRYGRAFKADFENSVSPVTTCLVAKFDKDVMFWHCRLGHVGFDHLTRLSGLDLVRGLPKLKKDLDLVQGEDGRIFEDESDYDDDDEVGSAGQTRHQAGQTAGTPPVRPAHEERSDRPGLSGSGTVDVDRDGPPENSTSTSTGTKRGSTSEVAAPLYIQRRHPPEQIIGNIGERTTRSKVTTHDVCANSAFVASFEPKDVSHALTDESWINAMHEELENFERNKVWTLVEPPSGHNIIGTKWVFKNKQNEDGLIVRNKARLVAQGFTQVEGLDFDETFAPVARIEAIRLLLAFAASKGFKLYQMDVKSAFLNGFILEEVSVKQPPGFENPDFPNHVFKLSIALYGLKQALRAWYDRLKNFLLAKGFTMGKVDKTLFVLKHGDNQLFVQIYVDDIIFVCSTHALVVDFAETMRREFEMSMMGELSYFLGLQIKQTPQGTFVHQTKYTKDLLRRFKMENLQPISTPIXSTAVLDPDEDGEAVDQKEYRSMIGSLLYLTASRPHIQFAVCLCAGFQASPRASHRQAVKRIMRYLNHTLEFGIWSSTSSSICLSGYSDADFGGCRIDRKSTSGTCHFLGTSLIAWSSRKQSSVAQSTAESEYVAAASCCSQILWLLSTLKDYDLTFEKVHLFCDNTSAINIAKNPVQHSRTKHIDIRFHFLRDHVEKGDVELQFLDTKLQIADIFTKPLDSNRFAFLRGELGIIHPFGMVTRCLGRVFAVMDRESAWGLDDVRGGQRSCGILRLELMHVVDGDSIWHTMELLCAYGMRSRIWKESKFERSNKVVIHFKSSSICVSPGFGGLTGGAPAVRPVASRQSDRRTHGGQTGGDRSRRQAFSAVRPINLHRSDRRSSGGQTGATTSVRPRSIDFEGNFYFR

SEQ ID NO: 121043 - protein, 731 aa, Oryza sativa
  Clone ID: PAT_MRT4530_24106C.1.pep
MDAPESELVPDSFTLELQELAPDSMDTPELELVLDSFTPDLQELAPDSVEAPESELVPDSFAPELEELAPESEMVPDSLPPGAFVCGRCHLVHEDRQAWDRADSRFWPCSRCGLVHMEYMLGAKLYGLDEFDCKVFIPDLNNVVMHGNSIELPAHVLKMLDEKRKCELTAEKDDAFLREVEPFFINEHKIRAKTKTLKNMAKSILNIDVGALVARKGNVCIVDSGCSQRMPGDKNWFSSLEQASKTSAVFATGLVKVNDKFELKNVALVEDLNYNLLSVSQIVDENFEVHFKKTRSKVFDSCGDSVLNISRYGRVFKADFKNPVSPMITCLVAKFDKDVMFWHRRPGHVGFDHLMRLSGLHLIRGLPKLKKDLDLVCTSCHHAKMVASSHAPIVSVMTDAPGQLLHMDTVGPARVQTVGGKCYPAHPRGYRVLILETNKIVETSEVSFDETSPGTRPEIASTLSQVQEEDGHIFEDESDDDDEVDSAEATTSTNTGTERETTSEVAAPLHIQRRHPPEQITGNLGEQTIRSKEEVYVKQPPGFENPDFPNHVFKLSKALYGLKQATRAWYDRLKNFLLAKCFTIGKVDKTLLVLKHGDNQLFVQIYVDDIIFGCSTHALVVEFAETMRREFKISMMGELSYFLGLQIKQTPQAVLDPDEDGEAVTNNMIESLSYLIASRPDIQFADRKGPLQPQKLAIEVRGSPTYILGHLPFHIQCGTIQQSRPSHIGAP

SEQ ID NO: 121044 - protein, 1510 aa, Oryza sativa
  unsure (1)..(1510): unsure at all Xaa locations
  Clone ID: PAT_MRT4530_24107C.1.pep
RSILVRPTSIDFEARNILLSGISRSDYDRVAHFRTAHEIWNALSNFYQGTNNIKELHRDIFKKEYIKFEMKPEEALDDYLSRFNKILSDLRSVDSSYDANYPQSEISRHFLNGLDMSIWEMKVTYIQESVDMSSLTLDSLYTKLKTHEMNVLSRKVDSKSSVLVSSSSSLDVDVSLSKSSFLAVFNATSDDQLEQIEEEDLALVANKIARAMNNARNKKRGGPNRCFECGSIDHLRSHCPKLGRGXREDKDGEKTNNNKPKGSSQGRKLDNLRKAFQQVCAAFEPLSDVDGESGDDDKGNNISDVCFMARGESDTEYEDNEVSAFEEAINILSEKNKKCEKMYRKQEFIIESLKSEIARLKSLIPNDDDCSNCEVLMNEISKIRDVNAAHDLKNKSSLACSFALHTRTLDELFLTKKLLQKYQIAFHTSLMFNMISAKKLKQPHDVLDCLTCNLNKLKLKDALGRVEFMEDVVKNNEVLSCAKCRKSNGVMVDCENCANLEKEVSYLKNSLLRFSDGKKNLNMILDQXKVICLCVGFVARKENVWIVDSGCSRHMTGDKNWFSSLKKASKTESIIFGDASTSVVFATRLVKVNENFELKNVALVEDLKYNLLSVSQIVDENFEVHFKKTGSKVFDSYGDSVLNISRYGRVFKADFENPVSPVITCLVAKFDKDVMFWHRRLGHVGFDHLTRLSGLDHVRGLPKLKKDLDLVCTPCRHAKMVATSHAPVVSVMTDAPGQLLHMDTVGPARVQFVGGKWYVLVIVDDFSRYSWVFFMATKDEAFQHFRGLFVRLDLEFPGSLKRIRSDNGVSHLRVFGCKCFVLKSGNLDKFEARSTDGLFLGYPAHTRGYRVLILETNKIVETCEVSFDEASPGSRPDIAGTLSQVQGKDGRIFEDESDDNDDDEVSSAGQTERQAGQTAGTPPVRPAQEVRLDRPGSSAEGSINAVRDGPPETTTLTSTDTERGSTSEVATPLHIQRRHPPEQIIGNIGERTTRSKVTTHDVCANSAFVASFEPKDVSHALTDESWINAMHEELENFERNKVWTLVEPPSGHNIIGTKWVFKNKQNEDGLIVRNKARLVAQGFTQVEGLDFVETFAPVARIEAIRLLFAFAASKGFKLYQMDVKSAFLNGFIQEEVYVKQPPGFENPDFPNHVFKLSKALYGLKQAPRAWYXRLKNFLLAKGFTMGKIDKTLFVLKHGDNQLFVQIYVDDIIFGCSTHALVVDFAETIRREFEMSMMGELSYFLGLQIKQTPQGTFVHQTKYTKDLXILRRFKMENCKPILTPIDSTAVLDPDEDGEAVDQKEYRSMIGSLLYLTASRPDIQFAMCLCARFQASPRASHRQAVKRIMRYLNHTLEFGIWYSTSSSICLSGYSDADFSGCRINRKSTSRTCYFLGTSLIAWSSRKQSSVAXSNAESEYVAAASCCSQILWLLSTLKDYGLTFEKVPLFCDNTSAINIAKNHVQHSRTKHIDIRFHMDTKLQIADIFTKPLDSIRFAFLRGELGIIHPFGMV

SEQ ID NO: 121045 - protein, 79 aa, Oryza sativa
  Clone ID: PAT_MRT4530_24108C.1.pep
MAVDLTVVEPGRCAATMVVLQMRAVEELAFGRLRPWSLGCELFTVEAATGYGIVSLGQLPCALADTRVRILRRRPEGVN

SEQ ID NO: 121046 - protein, 703 aa, Oryza sativa
  Clone ID: PAT_MRT4530_24109C.1.pep
MGDSPVIPSLIGGSWGTVRIKGSSAWAPSSLAPPAKRQLGEGLGAKQCKGPRGITWHPEAPTPRPLLRNRKRGGPNRCFECGSIDHLRSHCPKLGRGKREDKDGENTNNNNNNKPKGSSQGRKLENLRKAFQQVCAAFEPLSDVDGESGDDDKGKSISNVCFMARGESDTEFEEAINILSEKNKKCEKMSRKHKFIIESLKSEIARLKSLIPNDDDYENCEVLMNEISKIRDVNAVHDLKNRSSLACSFALHTRTLDELFLTKKLLQKYQIAFHASLMFNMISVKKLKQPHDILDCSTCNLNKLKLKDALGHVEFMEDVVKNNEVLSCPKCRKSKCVMVDCENCANLDKEVSYLKNSLLRFSDGKKNLNMILDQSKVLVLEVALVARKENVWIVDSGCSRHMTGDKNWFSSLKKASKTESIIFGDASTSVVLAIGLVKVNEKFELKNVDLVEDLKYNLLSVSQIVDENFEVHFKKTGSKVFDSCGDSVLNISRYGRVFKADFENPGSPVITCLVAKFDKDVMFWHRRLGHVGFDHLTRLSGLDLVRGLPKLKKDLHLVCTPCHHAKMVASSHAPIVSVMTDAPGQLLHMDTVGPARVQSVGGKWYVLVIVDDFSRYSWVFLMATKDEAFQHFRGLFLRLDLEFPGSLKRIRSDNGGTLSQVQEEDGRIFEDESDDNDDEEVGSAGQTGRQAGQTTGTPPVRPA

SEQ ID NO: 121047 - protein, 52 aa, Oryza sativa
  unsure (1)..(52): unsure at all Xaa locations
  Clone ID: PAT_MRT4530_2410C.1.pep
PLGNHASWMLDWKRSCSPWLTMAQRPPVPLCLLCIXSSLLDVFCYSFIXLGI

SEQ ID NO: 121048 - protein, 1186 aa, Oryza sativa
  Clone ID: PAT_MRT4530_24110C.1.pep
MARGESDTEYEDNEVSAFEEAINILSAKNKKCEKMYRKQEFIIESLKSEIDRLKSLIPNDDDCSNCVVLMNEISKIKDVNAAHDLKNRSSLACSFALHTRTLDELFLTKKLLQKYQIAFHASLMFNMIFAKKLKQPHDVLDCSTCNLNKLKLKDALGRVEFMEDVVKNNEVLSCPKCRKSKGVMVDCENCANLEKEFSCLKNYLLRFSDGVGARSGEILVKPDTNKTVFKSAGIMFTLNASSSKSNVVHAKSPVVAGIAKSSNATNISSQTEKGERDCFCKIKVAKIGFSLEETGQIAVCPAVRPATGQTGTERWSDRAPALVARKENVWIVDSGCSRHMTGDKNWFSSLQKASKTELIIFGDASTSAILATGLVKMFASSHAPTVSVIMDAPGQLLHMDTVGPARVQSVGGKWYVLVIVDDFSRYSWVFFMATKDEAFQYFRGLFLRLNLEFPGSLKRIRSDNGGEFKNVSFEQFRTEKGLEHEFSSPRVPQQNGVVERKNRVLVEMARTMLDEYKTPKKFWAEAINVACYISNRVFLRSKLGKNSYELRFGHQPKVSHLRVFGCKYFFLKSGNLDKFEARSTDGLFLGYPAHIRGYHVLILETNKIIEICEVFFDEASPGTRPDIAGTQSQVQGEDGRIFEDESDDNDDDEVGSAGQTGRQASQTAGKTPVRPPQEERSDRPGTSGSGTVDADRDGPPEITTSTSTDTERGSTSEVAAPLHIQRQHPPEQIIGNIGERTTRSKVTTHDVCANSAFVAFFEPKDVSHALTDESWINAMHEERENFERNKVWTLVEPPSRHNIIGTKCVFKDKQNEDGLIVRNKSRFVAQGFTQVEGLDFDETFVPVARIEAIRLLLAFAASKGFKLYQMDVKSAFLNGFIQEEVYVKQPPGFENPDFSNHVFKLSKALYGLKQAPRAWYDRLKNFLLVKGFTMGKVDKTLFVLKHGDNQLFVQIYVDDIIFGCSTHALVVEFAETMRREFEMSMMSELSYFLGLQIKQTSQGTFVHQTKYTKDLLRRFKMENCKPISTPIGSTAVLDPDEDGEAVDQKEYRSMIGSLLYLTASRPDIQFVVCLCARFQASPRASHRQAVKRIMRKQSSVAQSTAESEYVVAASCCSQILWLLSTLKDYGLTFEKVPLFCDNTSAINFAKNPVQHSHTKHIDIRFHFLRDHVEKGDVELQFLDTKL

SEQ ID NO: 121049 - protein, 112 aa, Oryza sativa
  Clone ID: PAT_MRT4530_24111C.1.pep
SCRRRRSSPSPSPARHRRSSPSPARRRRSSRLARSGGAPKLACPGRRGKPPPPPVVHHRRRATAASLRLVTPRRWRVQAGVSRPFLFVPGVERRPRWPSPLRRPPPSPPQPP

SEQ ID NO: 121050 - protein, 85 aa, Oryza sativa
  unsure (1)..(85): unsure at all Xaa locations
  Clone ID: PAT_MRT4530_24112C.1.pep
LAGVXAGAVTXPFGDGYYLGDKDAALEACSACAGAYGSDSYPGYAGKVLVDETTGGSYNAVGAHGRKYLLPAVYDPATSRCTTLV

SEQ ID NO: 121051 - protein, 835 aa, Oryza sativa
  unsure (1)..(835): unsure at all Xaa locations
  Clone ID: PAT_MRT4530_24113C.1.pep
ARNWKRGGPNRCFECGSIDHLRSHCPKLGRGKXREDKDGEKTNNNKPNNYKSKGSNQGRKMENLRKAFQQVCAAFEPLSDVDGESGDDGKGKNVSDVCFMARGESDTDYEDNEVSTFEEAINILSAKNKKCEKMYKKQEFIIESLKSEIDRLKSLIPNDDDCENYCLTCNLNKMKLKDALGRVEYMEDIVKNNEVLSCPKCRKGECVMVDCENCANLEKEVSYLKNSLLRFSDGKKNLNMILDQSKVLVLEVALVARKENVWIVDSGCSRHMTGNKNWFSSLKKASKTESIIFGDAATSAVLATGMVKLMKILRFTLRKLEVFDSCGDSVLNISRYGRVFKADFENPVSPVITCLVAKFDKDVMFWHRRLGHVSFDHLTRLSGLDLVRGLPKLKKDHDLVCTRCRHAKMVSTSHAPIVSVMTDAPGQLLHMDTVGPARVQSVGGKWYVLVIVDDFSRYSWVFFMATKDEAFQHFRGLFLRLELEFQGSLKRIRSDNGNRHLHKERLAVYRWHASFICSGNTMPIVLVDWSDIREQKRLMVLRASVALHGRSVTLYEKAFPLSEQCSKKAHDQFLADLASILPSNTTPLIVSDAGFKVPWYKSVEKLGWYWLSRVQGEDGRIFEDESDYDDDEVGSAGQTGRQAGQTAGTPPVRPAHDVRLDQPGSSGSGTVDADRDGPPEITTSTSTDTEHGSTSEVAAPLHIQRRHPPEQIIGNIGERTTRSKEEVYVKQPPSFENLDFPNHVFKLSKALYGLKQAPRXWCDRLKNFLLXKIYVDDIIFGCSTHALVVDFAETMRREFEMSMMGELSYFLGLQIKQTPQDSLVFIYFERLWSYF

SEQ ID NO: 121052 - protein, 43 aa, Oryza sativa
  Clone ID: PAT_MRT4530_24114C.1.pep
MVQDLLELLSYAALFEDTPYTEYAEKYADVQVAFYKDYAQNYA

SEQ ID NO: 121053 - protein, 90 aa, Oryza sativa
  Clone ID: PAT_MRT4530_24115C.1.pep
ISEQNAELWLYPWFEGILLIIATRISFERVLLCSLPSRETATLTIKMEFSEIYSTYICATLEKRNQCWILCCMWYCKLVSSLNQCRDWIG

SEQ ID NO: 121054 - protein, 40 aa, Oryza sativa
  Clone ID: PAT_MRT4530_24116C.1.pep
MASSISIRAFLCYTQPEPQTKPNPLVMCKSGSALHQRFED

SEQ ID NO: 121055 - protein, 202 aa, Oryza sativa
  Clone ID: PAT_MRT4530_24117C.1.pep
MVNWVHQNGDRVKGAGPTREPPWVSTCGPHMTCLNATTMARKQRRDGERRRRGPVAHHGELVKRRRRRTMTGEDLAMEVLRWMGWRSFCGLRARRGMDKAQDDVAKIMVVIMDENALAKQRKAPPTDQTRVHGLKGPQADQITSKWANHFVSTPGPKEHHPRQRGGRKEAKEDQPNHSMSEFSPGRFRRSVGDVGILFMGVP

SEQ ID NO: 121056 - protein, 493 aa, Oryza sativa
  unsure (1)..(493): unsure at all Xaa locations
  Clone ID: PAT_MRT4530_24118C.1.pep
HCPPFARRCASPDPAGYRAPFPWPASRGVVWAGNSARGAKAAADAAAAANKWARVDGDMLRFTDAAAVRAYAYVVLRLVAAPVRAAVDVGAMVSAASPAPSPSTXGSWAAELMSRGVVTVSVAAPWGASDGAALVELALERGVPAVLAAAGGAPSRRLPFPAGAFDMAHCGRCLVPWHLHGXAVLDGDRPRAPARRLLGPLGAPANGTHERAAIEAAAASMCWRSVADQNGFTVWQKPVGHVGCDAGENSPRFCAGQNKKFKWCVSPSPGRHCSNASSSPXQTLCDFRDSDVEPCITPIQEGAAPPREASAAEALRRDSETWTRRVARYKAVATQLGQKGRLRNLLDMNARRGGFAAALADDPVWVMSVVPATGGGDTDTDTLPAIYDRGLIGAYHDWCEPLPTPALSYDLLHADSLFTMYRDRCDMEDILLEMDRILRPGRAVIIRDDIAILARIKNFLTDRMRWDCQIFDGEDGSDDREKILFAAKTCCND

SEQ ID NO: 121057 - protein, 120 aa, Oryza sativa
  Clone ID: PAT_MRT4530_24119C.1.pep
NPAPGVGGKQFFSVPGLTRTAGGHKGGKPHLVPAPVKEGKLVIFKGQAGAKRGVKGARKFVERATSPFRVAWLAKFLFQVFFYPQGIQIQSIGVVAQKNAGPAWGGGGVSLMGPGNLDPV

SEQ ID NO: 121058 - protein, 124 aa, Oryza sativa
  Clone ID: PAT_MRT4530_2411C.1.pep
MAVASAAALALALWRQQPGGRGGSGGPAAILLAAAPYALLLLLLWCLRAFERAAGAGDAAAQGRLRLAVWLLSSALTVTFAARVAPLMHGAAAVLVWAMSAATICGGFYMLDLFPLHRRLDRIN

SEQ ID NO: 121059 - protein, 58 aa, Oryza sativa
  Clone ID: PAT_MRT4530_24120C.1.pep
TNTSNKSEANRNKGMHPYSSYLRPISICFRESETERRSMPNCIKVAATTRRHWQLPRA

SEQ ID NO: 121060 - protein, 94 aa, Oryza sativa
  unsure (1)..(94): unsure at all Xaa locations
  Clone ID: PAT_MRT4530_24121C.1.pep
IEIQYELNSDRDPNRSPTGLGGPSDGSYIFVRGVTGGGIXASPWEYGEENARGGEGRAGAIDYFIYIDARYFARVPSTSQRLFPLLNASSGNDL

SEQ ID NO: 121061 - protein, 64 aa, Oryza sativa
  Clone ID: PAT_MRT4530_24122C.1.pep
RSKCSLPSGGTIEAKFIVSNINNLPTIACATQSTPKRLRKYNMPSPCRAVAACWCFFIVLSPFA

SEQ ID NO: 121062 - protein, 67 aa, Oryza sativa
  Clone ID: PAT_MRT4530_24123C.1.pep
CLSRSKRSGGESGEVHSVSCRRQVPRVPTWSSVELAVRPCQAKSTALSAFGLVGVRTISSVESGRIY

SEQ ID NO: 121063 - protein, 74 aa, Oryza sativa
  Clone ID: PAT_MRT4530_24124C.1.pep
KQKELNSAKVLAYLQRSYISCELCNYHHHSSSLSFAPEMSLNSGFSFFVCFFEFLLLYFLLYRSTKSFCFLVTR

SEQ ID NO: 121064 - protein, 65 aa, Oryza sativa
  Clone ID: PAT_MRT4530_24125C.1.pep
SVKEVSGEVSPAAPDIGAEATKAERAVADIEITDDWHIPLMKFINSEELPEDDTEAEKITRKAKI

SEQ ID NO: 121065 - protein, 66 aa, Oryza sativa
  Clone ID: PAT_MRT4530_24126C.1.pep
FFFYQGDPDFSGYIIYYTRLSSNPRVVGRDYRGRGYNTFYLEIIHTPKERCKKKKGWTHQGSRGLS

SEQ ID NO: 121066 - protein, 415 aa, Oryza sativa
  Clone ID: PAT_MRT4530_24127C.1.pep
MGQQAAEAQPLLLQGDQVDAEWGCRPHRIVLFVEPSPFAYISGYKNRFQNFIKHLREMGDEMLVVTTHKGAPEEFHGAKVIGSWSFPCPLYQNVPLSLALSPRIFSAVAKFKPDIIHATSPGVMVFGARFIAKMLSVPMVMSYHTHLPAYIPRYNLNWLLGPTWSLIRCLHRSADLTLVPSVAIAEDFETAKVVSANRVRLWNKGVDSESFHPKFRKHEMRIKLSGGEPEKPLIIHVGRFGREKNLDFLKRVMERLPGVRIAFVGDGPYRAELERMFTGMPAVFTGMLQGEELSQAYASGDLFAMPSESETLGQVVLESMASGVPVVAARAGGIPDIIPKDKEGKTSFLFTPGDLDECVRKIEQLLSSKVLRESIGRAAREEMEKCDWRAASKTIRNEHYCTATLYWRKKMGRTN

SEQ ID NO: 121067 - protein, 151 aa, Oryza sativa
  unsure (1)..(151): unsure at all Xaa locations
  Clone ID: PAT_MRT4530_24128C.1.pep
PFIKFLTKQELPQDKDETKRISRRGNLYVMVKAKLYKKSPLGILQRCVSLEEGRQLLQDIHSGICGNHAAVRTIVGKAYRXGFXWPXXVSDAEKVMRTCEGCQXSLTDKFTYQLRSCKLSLFLGRSRXGGLIWSVLSKGLPGFTLLFVWTS

SEQ ID NO: 121068 - protein, 101 aa, Oryza sativa
  unsure (1)..(101): unsure at all Xaa locations
  Clone ID: PAT_MRT4530_24129C.1.pep
GQPWSMVRTGTILREKRSSVVRIPCEKVTRVRILRGXLRPTMGIGTRLREELRSXRSRIPGDELGYEMSHDRWTPCEKDLRNGFHNVCVEVSLLPKEIGRY

SEQ ID NO: 121069 - protein, 64 aa, Oryza sativa
  Clone ID: PAT_MRT4530_2412C.1.pep
SSRYAGGHVLACLRDHRPHLDLEHLREGFARSRRTPAEIDHLARSMSPLAKKIFQSMDWRWPSW

SEQ ID NO: 121070 - protein, 1128 aa, Oryza sativa
  unsure (1)..(1128): unsure at all Xaa locations
  Clone ID: PAT_MRT4530_24130C.1.pep
MDDLTARPLLDSVVISATGEIERHRERFSARSLVAWQVGALGDKVEIGVFADDMRSAFHIRRADIQFTKFHPEVFFITCSNQSDRDAILRQPRLTAPSGRVYLFRPWDESLHGIPARYRYRARLCIEGVPMHRRTDEAAAKVIGRKCAIHYVEEYSRRGNYNRTYDMWVWTGEPRAIPRGGTFAITDADEEGLPTDIPLPELDPLRNPLPSEPKKGWTYNVLVHVDTLEDLHTRKARAYXGTMKFRMMVSASRSTLSPAELSQTLXRGPTMTMMIERTTPKAVIEAVHSGTGSVAALPVGIVSQTGAMASAATRKEGEDRETRNDMTIEAAPTILVNQARPASAPTLTPLAAAKDSQITEFINDIATSIQPPLLPAPDVNVRKPSRVKDNVYLFNWNVRGLNVKAKQDFVKVCIQQHSATIVCLQETKLAVVSDQIILNTLGQRFARQVAVLPAEGTRGGVILACDDNFFSISDVHLGRFSVSATITMREEAQQWSIIVVYGLQLETEKIAFLAELEGLQSLMKPAWLIIGDFNLIYKASDKNNDRLNRRMMQRFRGLIDKIQIKELNLPGRRFTWVGDGSNPTQTKIDRAFATTDWDSLFANSCLYPLSSACSDHAPIFLVGNEQRKNFPNFRFESFWLRIPGFLEEVQSSWQKPILATNSLVILRLKLRRLARDLRRWSRSQVGDIKLQLAIASEVILRLEIAQETRLLSDDGFIGAFFKAAWDIIKDDLLAAIISFMHLNTSQLADLNLAYICLIPQKDDASGAEHFCPISLIHSFAKIIAKIMANRLAPRLNEMISQNQSAFVHKRAIHDNFLYVQNMIDIAKAFDTVNWSYLLEILRQFGFGNRWLNWIANLFSTSTSQVLLNGSPGQKINHARGLRQGDPLSPMLFILAIEPFHRILKEAENVNVLAPLGVRNGRFRCSLYADDVAVFASPNQEDLSALSHIQVCFAQASGLHTNINKTEIYPIKCEDIDLQNLLVGWPGQIKQFPCRYLGLPLHLGKLRKIDFLPLIDKIGSRLPGWKGRLFTSAGRQALVSSILSAMPTHHLTVLQAPKWVFKRIDRFRRSFLWKGEDPDHSNPGDSLINWQTVCKPKGLGGAGLLELEHFSRALRLRWLWFNWKDEEKL

SEQ ID NO: 121071 - protein, 300 aa, Oryza sativa
  Clone ID: PAT_MRT4530_24131C.1.pep
MQSVGGKWYVLVIVDDFSRYSWVFFMATKDEAFQHFRGLFLRLDLEFPGSLKRIRSDNGGTLSQVQREDGRIFEDKSDDNNDDEVGSAGQTGRQAGQTAGTPPVRPAHEERSDRLMRSDVPHALTDESWIIAMHEELENFERNKVWTLVEPPSGLNIIGTKWVFKNKQNEDGLIVRNKARLVAQGFTQVEGLDFDETFAPVARVEAIRLLLSFAASKGFKLYQMDVKSAFLNGFIQEKVYVKQPPGFENPDFPNHVFKLSKALYGLKEAPRAWYDRLKNFFLTKGFTMGKVDKMLFVLKH

SEQ ID NO: 121072 - protein, 46 aa, Oryza sativa
  Clone ID: PAT_MRT4530_24132C.1.pep
ATMESCWIQVPSRAAQGYVFIRSNRRYMAVIWVVYTAGRLHVNPKE

SEQ ID NO: 121073 - protein, 1463 aa, Oryza sativa
  Clone ID: PAT_MRT4530_24133C.1.pep
MDSNFGASRPTSLTGSAGDPPLGVLSDITNLSAAELRRKRARERYALLSVDEKEARNKKAREKRRQKKEECQGGNQSGAAVKGSETHYDPILTSGNQNTHSPMHECGIFEGNDQNDDISLDNEVVCAPSSITKDHLQSKLPQCSDKPATLTTEQKQAKVNRQRSRHQSLTKEQRLDMNARRRVARQNMPDVEIHDMNARLRSRRQSVTPGERSALLARRNALYAARRDKPCAESIALECPEGSSPSLLDPTPCLETTGDVPATSNLQAEHAADHLARSSTFEDGIIYICYRSYLQFVTFRILTFHSTIDDMDSFMDDDTDDEYYLFARLGDDEDDDMVQSDDDDTQAPTSSIPDPFDCVYSNIPQSTNVLKPEPDCKHCGAKRFQESSPEHLELYFYDDDPTLSHRFRRSPSLDQDVIRTVSDVLWNNPYSETFRSLGQADDLANYRVTLNLDHRLDQRRYNVPVTTEVAAVWVEGNERRKFEPSVTIYGNDRTRKCIQPFYGCYDPLSYPLFFPRGESGWHQGLPKDKITMEAANTRHGDDPNCNSGIRVSVRDYYCYKFQMRRGIFNPILHGGRLFQQFAVDMYIKVESSRLDYVRNNQKEIRADLYQGLMDSIQAGESRASAVGKRTVLPASFVGGGRNMKRRYMDAMALVQKYGKPDVFLTMTSNPKWDEITRELEPGQTPQDRPDLVVCVFRAKLEDLKKQLFEKHILGKVIAHVYVEFQKRGLPHAHFLLIMSSRYKLTSADQYDCIISAELPDKKKYRELYDMVVKHMMHGPCGPLNGKCQCMRDGKCRNNYPREFNPTTSQGKDSYPLYRRRNDGKSRMVRGHPLDNRWVVPYNPYLLRMYNCYMNVEVCSSIKAIKYLFKYLYKGHERASISINEADNNGEIDEIQRYRDARWVTPPEALWRIYGFDICHISPSVRQLQLHLPNMHMLASDADKDLRDVLDKEDAGRSMLTAYFEANRQHVWARDILYRDFPMWFTWQTPGSTSFEDLRIVDGVVMPSFRAAAERRGLIEADNTLDECLTEAGVFQMPLSLRRLFATILVYCEPSDVRGLWDKHLDAMSDDYKRNNTCPHVVQQMVLIDIRGMLQSMGKEITSFPLPEIDESHDSTRGDPREIIEESSIGVETDDMNLSDQLNDEQRSAFNKIMNAVGSAQGGVFFVDGPGGTRKTFLYRALLATVRGKGDIAVATATSGVAASIMPGGRTAHSRFKIPLNIEEGSYCSFTKQSGTAKLLQMASLIIWDETSMTKRQAVEALNMSMRDIMGCPHSPFGGKTIVFGGDFRQVLPVIRKGTRSQITDATLRRNIDPANGLCNGTRLVVRQFGKNAIDAEIVVGQHAGKRVFLPRIPLCPSDDEMFPFRFKRKQFPVRLSFALTINKAQGQTIPNAGVYLPQPVFSHGQLYVALSRATSRTNIKILSMPVEDKKQNKKSKRTGVKDNEKKGKELSKQAATYTKKYCV

SEQ ID NO: 121074 - protein, 297 aa, Oryza sativa
  Clone ID: PAT_MRT4530_24134C.1.pep
MLENLRKAFQQVCAAFEPLSDVDGGSGDDDKGKNISDVCFMARGESDTEYEDNELKQPHDVLDCSTCNLNKLKLKDVLGRVEFMEDVVKNNEVLSCPKCRKSKCVMVDCENCANLEKEVSYLKNSLLRFSDGKKNFNMILDQSKVLMLEVALVARKENVWIVDSGCSRHMTGDKNWFSSLKKASKTESIIFGDASTSVVLATGLVKCFVLKSGNLDKFEAHSTDGLFLGYPAHTRGYHVLILETNKIVETCKVSFDEASPGTRPDIAGTLSQVQGEDDCIFEDESNDNDNDKVGSAG

SEQ ID NO: 121075 - protein, 1597 aa, Oryza sativa
  Clone ID: PAT_MRT4530_24135C.1.pep
MERRKGGQTGGGGRRQELIQAVRPELLPLSDWSALHITTASSSSTTQAADRKTEGVSAAAEDRDAVGDSDDDYRKEDDGVSKSNVSVFSSRSYAIFLPACSMLPKGRAHFNSWVFNEYLRFFPVPRAPRPASRAALDRRRCDPRRLLAAVAAPRVPRPAPPSTANAGAGGHAASTPPRSRFLAAVATTHAALDCRHLRRSRSPSSEGQDTQSRRTSLENSRNPVSRSLSQDQLQSRRAGDRAKYAAKTPEQKQVMLERQRSRRQSMTAEQKQEMNARLRVARQNLPDVDIHEMNARRRSRRQNVTPGERTAHLARRNARYAARRDKPCAESIALECPEGSSPSLLNPTPCLETTDDVPATSSRPTEHAADHLARSCTFDDDDMDSFMDDDTDDEYYMFAGLGDDDDDEMVQSDDDDTQSPTSSVPDPFDCVYSNIPQSTNVLKAEPDCKHCGAKRFQYEPPGFCCRDGKIKLVENETPPELMRLWTSSDPDAKHFRDNIRYFNGHFSFTTLGVSLDKAFANMSSGVFRRSPSLDQDVIRTVSDVLRNNPYSETFRSLGQADDLANYRVTLNLDHRLDQRRYNVPVTTEVAAVWVEGNERRKFEPSVTIYGNDCTRKCIQPFYGCYDPLSYPLFFPRGESGWHQGLPKDKITMKAANERHGDDPDCNSRIRVSVRDYYCYKFQMRRGIFNPILHGGRLFQQFAVDMYIKVESSRLDYVRNNQKEIRADLYQGLMDSIQAGESRASAVGKRTVLPASFVGGGRNMKRRYMDAMALVQKYGKPDVFLTMTSNPKWDEITRELEPGQTPQDRPDLVVRVFRAKLEDLKKQLFEKHILGKVIAHVYVVEFQKRGLPHAHFLLIMSGRYKLTSADQYDCIVSAELPDKKKNNYPRQFNPTTSQGKDSYPLYRRRNDDKDLRDVLDKEDAGRSMLTAYFEANRQHVWARDILYRDFPMWFTWQTAEGERYYLRVLLNHVAGSTSFEDLRTVDGVVMPSFRAAAERRGLIEADNTLDECLMEAAVFQMPASLCRGDPREIIEESSIGVETDDMNLSDQLNDEQRSAFNKIMNAVGSAQGGVFFVDGPGGTGKTFLYRALLATVRGKGDIAVATATSGVAASIMPGGRTAHSRFKIPLNIDEGSYCSFTKQSGTAKLLQMASLIIWDEASMTKRQAVEALDMSMRDIMGCPRSPFGGKTIVFGGDFRQVLPVIRKGTRSQITDATLRRSYLWDCMVQLKLVRNMRAQSDTWFADYLLRVGNGTEEVNKEGLIGLPSDICVSCKGNETDLERLIDTVFPNLNDNLTDPNYITCRAILSTRNEFVDRINMKMIERFRGDVMTYHSFDRADDDPHNYYPPEFLNSLTPNGLPPHVLKLKINCPIMLLRNIDPANGLCNGTRLVVRQFGKNAIDAEIVVGQHAGKRVFLPRIPLCPSDDEMFPFRFKRKQFPVRLSFALTINKAQGQTIPNAGIYLPEPVFSHDVIGLVVHVGDIEFRSLYLRQTPTRIIALVNPRSVEFDEIKMEHVFRTCWKFDLLVVSPPHNSPNTKADSSATTVVDDAAAAASPVVAGSAAVAAAAAVAAAAIAVAGSSSAALAVIFGAKQCQHRY

SEQ ID NO: 121076 - protein, 488 aa, Oryza sativa
  Clone ID: PAT_MRT4530_24136C.1.pep
MPTSRCTDAALCASPFLRGIFTRWAVDAMGDRLELWEISSSARRRRSGAEETAGDLVHPPQAVYIENLFINDIFEKLIRTLTISSPEEERKSNGIIAGTASARLANGINPSDPMCGMLPKSLGVVVFISTDQLDCDLSFNGVGQHSVAHLSGTIPSVDCLDYGTVVVVEETVAGIVYYLHLILIVILFLATVMETKGCLPRGMLLVHFVNTERINKVVNYFKSSSICVSPGFGGLTGDIPAVRPAASSSQNGGGEAEYIKFEMKPGEALDDYLSRFNKILSDLRSVDSSYDANYPQSEISRHFLNGLDMSIWEMKVTSIQESVNMSTLTLEKTNNIKPKDGESGDDDKGKNISGVCFMARGESDTEYEDNEALVARKENVWIVDSGCSRHMTGDKNWFSSLQKASKTELIIFGDASTSAILATGLVKGEDGRIFEDESDDNDDDEVGSAGQTGRQASQTAGKTPVRPPQEERSDRPGTSGSGTDADRD

SEQ ID NO: 121077 - protein, 116 aa, Oryza sativa
  unsure (1)..(116): unsure at all Xaa locations
  Clone ID: PAT_MRT4530_24137C.1.pep
AVATATSGVAASIMPGGRTAHSRFMIPLNIDERSYCSFTKQSGTAKLLQMASLIICDEACMTNRQAAEALNVSMRDIMGCARSPLXGETIVFGGDLRQVLPVIRXGTKSHITDATL

SEQ ID NO: 121078 - protein, 60 aa, Oryza sativa
  Clone ID: PAT_MRT4530_24138C.1.pep
DVGLAAVRRRCRRQARRPVKLVRVYGSQGYIRIGLICVNSFHICNPFLSHSHVLLYIPVP

SEQ ID NO: 121079 - protein, 1135 aa, Oryza sativa
  unsure (1)..(1135): unsure at all Xaa locations
  Clone ID: PAT_MRT4530_24139C.1.pep
MAAASVTFVSTLFRFREKLYRQENNRILLLTGSSIAWAACLGRYTACYKVCSPDLATYVVYAYYAATDSNIIFTDWLASVAAADWIQIQICIIGIHGFQSLSPTLQKWISQNITDRLAFVAADWCLRLHGWPIMPPLLGVYVFTDRLAFAAADWCFCLHGWPIMPPLLGVYVFTDRLPSSAADWCLRLHGWPIMPPLLGIYVFTDRLPSSATDWCLRLHGWPIMLPLLSVYVFNDRLAFVAADWCLRLHGRPIMPPLLGIYVFTDRPPRLLSTGVSACTASLLCRRCWASTSSPTGRLVRRRLPSTVFIFGKSTREIMAKMIEALGFRVIADLSFYVTGQTGLCMPVRPAVIERSDRPVRDRWVTYGLTGGDIRRDRDSRAVQPVGRGKREDKDGEKTNNNKPKGSSQGRKLENLSKAFQQVCAAFEPLSDVDGESGDDDKGKNISDVCFMARGESDTKYEDNEALVARKENVWIVDSGCSRHMTGDKNWFSSLKKASNTESIIFGDASTSAVLTTGLVKVHFKKTGSKVFDSHGDSVLNISRYGRVFKADFENPVSPVITCLVAKFDKDVMFWHRRLGHVGFDHLTRLSGLDLIRGLPKLKKDRDLDEAFQHFRGLFLRLELEFSGSLKRIRSDNGGLEHEFSSPRVPQQNGVVERKNRVLVEMARTMLDEYKTPRKFWHEAINTACYISNRVFLQSKLGKTSYELRFGHQPEVSHLRVFGCKCFVLKSGKLDKFEERSTDGLFLGYPAHTRGYRVLILGTNKIVETCEVSFDEASPGTRPDIAGTLSQVQGEDGRIFEDESDYDDNDEVGSAELENFERNKVWTLVEPPSGHNIIGTKWVFKNKQNEDGLIVRNKARLVAQGFTKVEGLDFDESFAPVARIEATRLLLAFAASKGFKLYQMDVKSAFLNGFIQEEVYVKQPPGFENPDFPNHVFKLSKALYGLKQAPRAWYDRLNNFLLAKGFTMGKVDKTLFVLKHGDNQLFVXIYVDDIIFGCSTHALVVDFAKIMRREFEMSMIGELSYFLGLQIKQTPQGTFVHQTKYTKDLLRLFKMENCKPIXTPIGSTAVLDPDEDGEAVDQKEYRSMIGSLLYLTASRPDIQFAVCLCARFQASPRASHRQAVKRIMRYLNHTCH

SEQ ID NO: 121080 - protein, 128 aa, Oryza sativa
  Clone ID: PAT_MRT4530_2413C.1.pep
MTERGAPHRETAQAPLCRGHHMGLWLPKKGNMLFTMRASLQPEVTSDKQSTRLLLRSPAFSVDAHFNLHLMASDFLAALALQPGMNLIGTDIPTPGVSTPAPARDESREALIIPTGRGEACDRPPVAT

SEQ ID NO: 121081 - protein, 43 aa, Oryza sativa
  unsure (1)..(43): unsure at all Xaa locations
  Clone ID: PAT_MRT4530_24140C.1.pep
SXPAXALPXXXXSHVIXFWYSCXQMLXMVNWXSGFNSMLSFYC

SEQ ID NO: 121082 - protein, 52 aa, Oryza sativa
  Clone ID: PAT_MRT4530_24141C.1.pep
LHLLPLVRQHQRHHSSTSADELHRLQDYLTLKLAGQTEIYHITLERDQALAN

SEQ ID NO: 121083 - protein, 1059 aa, Oryza sativa
  unsure (1)..(1059): unsure at all Xaa locations
  Clone ID: PAT_MRT4530_24142C.1.pep
MAVRFSTKPHVFDGTDFSHWCSRMQFYIMAEDYDIWRKVYYPYVIPEQINTAALKTEFEXNCKARNILLSGISRSDYDRVAHLQTAHEIWIALSNFHQGTNNIKELHQDLLKKEYIKFEMKPGEALDDYLSRFNKILSDLRSVDSSYDVNYTQSKISCHFLNGLDMSIWEMKVTSIQESVDMSTLTLDSLXAKLKTHKMNILSCKVDSKSNALVSFSTSLDVDSSSSKSSAFALFNAMSDDQLEQFEEEDLVLLSNRLSRAVTNVRYRKRGGPNRCFECGSRITFVRXCPKLGRARREDNGDEKTNDNKPKGTFKGRKMKETLKKAFDQVYAAFEPLSDVDGDSGDEDKGKNISGVCFMARGESDSXCEDNEVRVFEEAILILSEKNKKCEKMYRKQKFIIXSLNSXISRLKSLIPNDEYKTPRKFWAEAVNTTCYISNRVFLRSKLGKTSYELRFGHQPKVSHLRVFGCKCFVLKYGNLDKFEARSTDGMFLGYPTHSSNYHVLILETNKIVETCKVSFDEASPGTRPDIASTLSHVQGEDGRIFEDESDDDDDEVSSAGQTGRQADQTAGTPPVRSPXDERSDRPCSSGSGSVDADRDVPREATTSTSEGTECETTSEVTAPLHIQRXHPPEQIIVNLGEQTTRSKVTTHDICANSAFVTSFEPKDLSHALTDESXINAIHEKLINFEXNKVWTLVEPPSGHNIIGTKWIFKNKQNEDGLIVRNKARLVAQGFTQVEGLGFDETFTPVARIEAIRLLLAFATSKALYGLKQAPRVWYDMLKNFLLAKSFTMGKVDKTPFVLKYGDNQLFVQIYVDDIIFSCSTHALVVEFAETMQFEMSMMGELSYFLGLQIKQTPQAVLDPDEDGEVVDQKEYRSMIGSLLYLTVSRPDIQFALCLCARFQASPRASHRQAVKRIMRYLNHTLEFGIWYSTSSSICLSGYFDADFSGCRIDRKSTSGTCHFLGASLIAWSSRKQYSVAQSTAESEYVAAASCCSQILWLLSTLKDYGLTFDKVLLFCDNTSAINITKNPVQHSRTKHIDIRFYFLRDHVEKGDVEL

SEQ ID NO: 121084 - protein, 120 aa, Oryza sativa
  Clone ID: PAT_MRT4530_24143C.1.pep
TGGSEAVRLAAATGVESDFGSQTGDSTPVRPAASTRSDRLMTRGRTSGQALEYIWPGMGARAPGSGAWRSSRWRLSSTSPSSVLLVALSTFASHSPALRERRNLRPRGGTRAVSSEAGRS

SEQ ID NO: 121085 - protein, 472 aa, Oryza sativa
  Clone ID: PAT_MRT4530_24144C.1.pep
MVTSSHAPIIFVMTDAPGQLLHMDTVGPARVQSVGGQCSLKRIRSDNGGEFKNASFEQFCNERGLEREFSSPRVLQQNGVVERKNRVLVGMARTMLDEYKTPRKFWAEAINTTCYISNRVFLRSKLGKTSYELRFERQPKVSHLRVFGCKYFVLKSGNLDKFEARSTDGMFLGYPAHYWNQIYVDDIIFGCSTHALLVEFAETIRREFEMSMMGELSYFLGLQIKQTPQGTFVHQTKYTKDLLRRFKMENCKPISTRIGSTAVLDPGEDGKAVDQKEYRTSPRASHHQAVKRIMTYLNHILEFGIWYSTSSSICFSGYSNADFAGCRVDRKSTSGTCHFLGTSLIAWSSRKQSSVVQSTAESEYVAAASCCSQILWLISTLKDYGLTFEKVPLFCDNTSAINIAKNPAQHSHTKHIDIRFHFLREHVERGDVELTFLDTKLQLADIFTKPLDSNRFAILRVELGIVHPFGVI

SEQ ID NO: 121086 - protein, 111 aa, Oryza sativa
  Clone ID: PAT_MRT4530_24145C.1.pep
PPPRPLFMSPAPWRLLQQPMLPCSYQATDALRCPPVATQLPTMMPRAMQPQLFGAGTRASHATMMKMAIRRWPYMWQTWAPCQLSNSASCRLLVGCQRWVTCTASNKVLAY

SEQ ID NO: 121087 - protein, 249 aa, Oryza sativa
  Clone ID: PAT_MRT4530_24146C.1.pep
MQSQRERPREDRVHEETRGADHAHPSVPHAAAAASATATETATRTMSLHAGGVVVVDGKEKGKKEEGEGKRKGKAPATAEAVRGRARLRGEQLRQLHEIFLRFDLDGDGSLTKLELAALLRSLGLRPAAGDEIHALIAAIDADGNGTVEFDELASSLADLILGPCRPSVAVDQAELAEAFRAFDRDGNGFISAAELARSMARMGHPICYAELTDMMREADTDGDGLISFEEFTAIMAKSALDFLGLAAL

SEQ ID NO: 121088 - protein, 106 aa, Oryza sativa
  Clone ID: PAT_MRT4530_24147C.1.pep
FPFVIYPLFFFFFFRGIFYFFFSFFFPGGSPGKKHCIEFGPINPRPRALFGGKPFPKISKRSEPLKHAPLPGKQGTQRPPPQNYQIRRPKPPFPGEKAYFPPPSSG

SEQ ID NO: 121089 - protein, 1321 aa, Oryza sativa
  Clone ID: PAT_MRT4530_24148C.1.pep
PATHRRSDRRQGNGQTDGVPAVRPATVTGGRGNLQAVGPAINFGQTDGINSVRPADQSLRMQSYIMAEDYDIWRKVSHLYVIPEAINTAVEKTAFEQNCKARNILLSGISHSDYDRVAHLQTAHEIWVALSNFHQGTNNIKELHRDLFKNEYIKFEMKPGEALDDYLSRFNKILSDLRSVDSSYDANYPQSEISRHFLNGLDMSIWEMKVTSIQESVNMSTLTLDSLHTKLKTHKMNVLSRKANSKSSALVSSSSSLYVDASSSKPSFIAVFNATSDDQLEQIEEEDLALVANRIARAMNNARNRKRGGPNRCFECGSIDHLHSYCPKLGRGKREDKEGEKTSNNKPNNNKPKGSSQERKMENLRRAFDQVYAVFEPSSDVDGESGDDDKGKNISGVCFMARGESNIEYEDHECEKMYRKQEFIIESLKSEIDRLKSLIPNDDDCSNCHVEYMEDVVKNNELLSCPKCRKSKGVMVDCENCANLEKEVSYLKNSLQRFSDGVGARSGEILVQPDTNKTVFKSIGIMSTVNTSSSKSNVVRAKSPVVACVAKSSSSNNVSTQREILAHKQKKEREVAFAKSKWQKSGFPSRKPALVARKENVWIVDSGSSRHMTGDKNWFSSLRKASTTKSIIFGDASTSVVLATGLVEVNEKFELKNVALVEDLKYNLLSVSQIVDEEFEVHFKKTGNKVFDSRGDSVLNISRYGRVFKTDFENPVSPVITCLVAKFDKDVMFWHRKLGYVGVDHLTRLSGLDLVRGLSKLKKDLDLVCTSCRHAKIVSTSHALIVSVMTDAPGQLLHMDTVGPARVQSVGGKWYVLVIVDNFSRYSWVFFMATKDESFQHFRGLFLRLDHEFLGSLKRIRSDNGGEFKNASFEQFCNERGLEHEFSSPRVPKQNGVVERKNCDLVEMARTMLDEYKTPRKFWAEAINTACYISNRVLLRSKVGKTSYELRFGHQPKVSHLRVFGCKCFVLKSGNLDKFEARSTDGLFLGYPAHTRGYHVLILEINKIHETCEVSFDEASPDTRPEVAGFKLYHMDVKSAFLNGFIQAEVYVKQPPGFENSDFSNHVFKLSKALDGLKQAPRAWYDRLKNFLLAKGFTMGKVDKTLFVLKHGDNQLFVQVYVDDIIFGCSTHALVIDFAETMHKEFEMSMMGELLYFLGLQIKQTHQAVLDPDEDGEAVDQKQCRSMIGSLLYLTASSPDIQFVVCLCARFQASPCASHCQAVKRIMSCCSQILWLLSTLKDYGLTFEKVPLFCDNTSAINIAKNPIQHSRTKHIDIRFHFLRDHVEKGDVELQFLDTKLQIADIFTKPLDSNRFAFLRGE

SEQ ID NO: 121090 - protein, 2477 aa, Oryza sativa
  unsure (1)..(2477): unsure at all Xaa locations
  Clone ID: PAT_MRT4530_24149C.1.pep
MFDQVYAGFEPLSNVDGESKDEDKGKNISGVCFMTRGESNSKCEDNEVSSFEEAILILSAKNKKCEKMYKKQEFIIESLNYEIARLKYLIPNDDDCKNYEVLMNAISKIREPRLSTSSGRVYLFRPWDESLHGIQSRYRYRARLCIEGIPMHGRTDEAAAKVIGRKCAIYYVEEYSRRGNYNRTYDMWVWTDEPRAIPRGGSFASTDADEEGLPTDIPLPEMDPLRNPPPSEPKNGWTYNVLVHVDTLEDLHTRKARAYKWDYEGREDVLEILESHLDPMLHEAAVNHFIYSPDTNSPRVSAPVFVTSFAGPTAAPTLSSPAAAKDSQIDEFINDIATPIQPPLLPTPDVNVRKPSRVKVKIPAIASAQRHSERLLRKRRANAKFESFAQEILSKKFGIMNDSASFDDNVKKLYLQRYKKPLSPASLKTIADLVEKGGCKAIRLKDNVYLFNWNVRGLYAKAKQDSVKVCIQQHSATIVCLQETKLAVVSDQIILNTLGQRFARQVAVLPAEGTRGGVILACDDNFFSICDVHLGRFSVSATITMREEAQQWSITVVYGPQLEAEKIAFLAELEGLQSSMKPAWLIIGDFNLIYKASDKNNDRLNRRMMQRFRGLIDKIQIKELNLPGRRFTWVGDGSNPTQTKIDRAFATTDWDSLFANLCLYPLSSACSDHAPIFLDGNEQRNKFPNFRFESFWLRIPGFLEEVQISWQKPILATNNLAILRLKLHRLARDLRRWSRSQVGDIKLQLAVASEVILHLEIAQETRLLSDGERHLLSNLKSRFLGLSVLNKIQIRQRSRLTWLKEGDVNSKFFHIKANSRRRKNYIHSLQTPSGIAISSKDKEEELFRFFKDRLGTISQRTVSLNWLRLNLPDLDLTKLEEDVTEEELKLTVFDLEEDVTEEELKLTVFDLPPEKAPGPDGFIGTFFKASWDIIKDDLLAAIISFMHLNTSQLADLNSAYICLIPKKDDASGAEHFRPISLIHSFAKIIAKIMANRLAPWLNEMISQNQSAFVRKRAIHDNFLYVQNMVKLLHRTKKQSLFIKIDIAKAFDTVNWSYLLEILQQFGFGNRWLNWITNLFSTSSSQVLLNGSPGQKINHARGLRQGDPLSPMLFILAMEPFHRILKEAENVNAPCSPWDKIGSRLPGWKGRFFTSAGRQALVSSVLSAMPTHHLTVLQAPKWVFKRIDHFRRSFLWKGEDPDHSNPGDSLINWQTVCKPKALGGASLLELERFSRALRLRWLWFNWKEEEMPWVGMSLPCDESDHRLFQAAMTISVGNGAKTRFWHDNWLQNRCPKDIAPRCFSLAKRKQRSVQVELTNSKWLTSFRQFTSVEEIHELVQLGGLIHLVTLSQEPDNITWNWTDSGTYTAKSAYLYQFEGSFAKLDYLSLWKAPAEPKMRFFGWLVLHHKTLTAQNLLRRHWPCNWICCLCTCAFEDTNHLFSECIFTRQTWSLICQFQNLTPLTSSHSPDVETWWNGTNHVGSKVQMQALVARKENVWIVDSGCSRHMTGDKKWFSSLKQASKTESIIFGDDSTSAILATGLVKVNDKFELKNVALVEDLKYNLLSVSQIVDENFEVHFKKTRSKVFDSCGDSVLNISHYGRVFKADFENPVSPVITCLVTKFDKDVMFWHHRLGHFGFDHLTRLSGLDLVRGLSKFKKDLDLVCTPCRHAKMVSTSHAPIVSVMTVAPXQLLHMDTVGPARVQSVGGKWYVLDIVDDFSRYSWVFFMATKDEAFQHFRGLFLRLDLEFPDSLKRIRSDNGGEFKNASFEQFCNERGLEHEFSSPRVPQRNVVVEKKNXVLVEMARTMLDEYKTPRKFWAETINTACYVSNCVFLRCKLGKTSYELRFGHQPKLSHLRVFGCKCFVLKSRNLDKFEVCSTDIMFLWXPAHTRGYRVLILGTNKIVETCEVSFDEASPSTRPDIAGTLSQVKGEDXRIFEDESDYDDDDEVGSAGQTGRQAGQTAGTPPVKPAQDVRSDRPGLSAEGSGTVDADRDGPSETTTSTSNNTKRGSTSEVTAPLHIQXRHPPEQIIGNIGERTIKSKVTTHDVCANSVFVASFEPKDVSHALTDKSWINAMHEELENFERNKEEVYVKQPPGFENPDFPNHVFKLSKALYGLKQAPRAWYDRLKNFLLAKGFTMGKVDKTFFVLKHGDNQLFVQIYVDDIIFRCSTHALVVDFAKTMRREFEMSMMGELSYFLGLQIKQTPQGTFVHQTKYTKDLLRRFKMENCKPISTLIGSTAVLDPDEDGEAIDQKEYRSMIGSLLYLTASRPDIQFAVCLCARFQASPRASHRQAVKRIMRYLNHALEFGIWYSTSSSICFSGYSNADFGGCRIDRKITSGTCHFLGTSLIAWSSRKQSSVAQSPAESEYVAAASCCSQILWLLSTLKDYGLTFEKVPFFCDNTSAINIAKNPVQHSRTKHIDIRFHFLRDHVEKGDVELQFLNTKLQIADIFTKPLDSNRFAFLHGELGIIHPFGMV

SEQ ID NO: 121091 - protein, 118 aa, Oryza sativa
  unsure (1)..(118): unsure at all Xaa locations
  Clone ID: PAT_MRT4530_2414C.1.pep
SSPPCCQPFPQPPAAPPSRQPPPRARRPPSPPSPRPAPARPAFPAPMPPLPLAPTARDGRDSNLNPXLSLSPPPTSPLTPTKSNHSRPFPTSPPXPSPPSGLRGQGPPRPPLLRRIPP

SEQ ID NO: 121092 - protein, 92 aa, Oryza sativa
  Clone ID: PAT_MRT4530_24150C.1.pep
PYFLWFRVVSFFGLGSDSHFYQEKCLALSLRWFISGSNQDRGVLAGPGTGVSGWGQGAGFFRSPPWGFLLRGFWGPAARTFPGGVFFLVFHV

SEQ ID NO: 121093 - protein, 47 aa, Oryza sativa
  unsure (1)..(47): unsure at all Xaa locations
  Clone ID: PAT_MRT4530_24151C.1.pep
AMIRKKXDIFRVPFXLSRSSPYIYALYGLVSFHRFFSPKSCLWCTYM

SEQ ID NO: 121094 - protein, 40 aa, Oryza sativa
  Clone ID: PAT_MRT4530_24152C.1.pep
LRSGEKSTGVAGESMPLWYTSGQSKTIRIAVPAVMGGLSN

SEQ ID NO: 121095 - protein, 431 aa, Oryza sativa
  Clone ID: PAT_MRT4530_24153C.1.pep
MAAVVRAEAVDTSISPTMRALRSSKNMAITDQATTLRQAGELVIGLAAGEPDFNTPASLPSPQKLKCLFVYNLNWPILALAVQQTSNIFSYLCEAYIGVEPFLDLFRFYYELRWMEPNRIENSDPVLVVPEEQPDKIPEWTAKPALTPSLQSFIDIIDDLRTQGLSGYEVAADFVGRRIQPLQARAHAAFDYSGLEDVTRVSPRGLDSDTVGQLVGQVMISAPSAASDIPVPLCEKGPVERVAAINLYEKEETLHRAAQAKAAQGGTGAASSASPAVTSTDVVVATKDREATSSSPAVNLVSARGPSTDALTWGELQAEMERLLQAGARGVGREVEEARAAASSANQRADQLVRDLAEAREDLLKMRELVAGNERQRQGLEHRMLELENNPSEIRCSLRVSYTSLHQLAGERGVTTTSWPAKFAHERTTCL

SEQ ID NO: 121096 - protein, 852 aa, Oryza sativa
  Clone ID: PAT_MRT4530_24154C.1.pep
MRSSFVAACAISLVLVCSAATTPRALAAVYGDGGGLLSIPSNDSLAHCPSSCGDVDDIAYPFGIGPGCFREGFELKCNTSTKTPKLYMKDGTTQILYVGDDDLWAPMHFNITMKPGTDTYNISWVSPRKGVTISQRNTFYIIGCNIDVTLFEYGTRDAVGYCVSRCDGEKVPTEGPCNGKGCCSIKLSRDLRGFRSTLVQVDATAAQSYQLQLRHGVMAFMSYNDYYVDNATDLFLSWTNTSNIQEALVQFAIMDQPSCEIARMKNTSYACSTGSNCLNMSSGGYTYYNPKRKEHCRRSCGNMAIPFPFGLEEGCFASERFQLNCTTGNITLFNPRDARYNVTDVSIEEGTMVVSNLLNDTEYGGEDIISQVYGGAEIKWAVANLTCDAAVKKDATYACRSIHSNCLNVTHGNIFMGYRCKCLPGFRGNPYIQDGCEGITTGISCGIGSIIIALGAIILANKWKKSIQKRIRRAYFKKNQGLLLEQLISDESATNKTRIFSLEELEEATNNFDATRVLGRGGHGTVYKGILSDQSVVAIKKSKIVEQTEIDQFINEVAILSQIIHRNVVKLFGCCLESEVPLLVYEFIPNGTLHDRLHTDVSVKSSLSWDDRIRIASEAAGALAYLHSAAAIPIFHRDVKSSNILLDGNFTTKVSDFGASRSVSLDETHVVTIVQGTFGYLDPEYYHTGQLTEKSDVYSFGVILVELLTRKKPIFINDVGTKQSLSHYFVDRLREGSLIEIIDSHVLEEAHREDIDDIASLTEACLKLRGGDRPTMKEVEMRLQFLRTKRLRKFQFLPVPGIGGEIQHLLSPDTGKSQAQNNYTSAGDLSYEGISSCYSLEQELSSSVSLPR

SEQ ID NO: 121097 - protein, 167 aa, Oryza sativa
  Clone ID: PAT_MRT4530_24155C.1.pep
SPRGCCLEKPPLLSQARAFFWFFPGGGLPLSRGGGPLRFFPFTFLSPPPLKTSWCQFFPSPWGGRSVPLNGAPRWGGFSGFFGGSPPFFLKTPFFPPEIPGGPLPLRGFSPPTPVGFSGFFFSRVPPFFFFLGWLFWPFPFCPKLFPLALFLTLSFCPRFFFGFFPR

SEQ ID NO: 121098 - protein, 264 aa, Oryza sativa
  Clone ID: PAT_MRT4530_24156C.1.pep
MALIATGATATATAAPVASPAASSMASELMAQGRESAAVLEALLHGASLPPAHGGAHALAAEILRCCDRALAALRAGGDAESSSADTKRKPATAQPSTRRRRRYIYMYVSSRSCDGARDRAATQQEIFCRATASGGGAAAAAEPARVEKARTSEDGFLWRKYGQKEIKNSKHPRLYYRCSYKDDHGCTATKQVQQSEEDPSLYVITYFGDHTCSCQTAAAAAMDDDDDDENSQHFVINFGPATASRSGSPPLLYDDGDDGDVCA

SEQ ID NO: 121099 - protein, 63 aa, Oryza sativa
  Clone ID: PAT_MRT4530_24157C.1.pep
LFFFYILVFIYFCLPTKHHLIAFRTYCNKFCLLFPKKVLLQTNIPIWKAFQSRRELLSYHSAG

SEQ ID NO: 121100 - protein, 107 aa, Oryza sativa
  Clone ID: PAT_MRT4530_24158C.1.pep
MITPGPIEKKTQMIEWVTKDDGKSIQQMSRCVRARWSKLRRRGVGGICGRGAGIVDRACRDIAALEEENCRSEHEEDEGCVIACAGTEDGCFPALNSPRIDLAGGAS

SEQ ID NO: 121101 - protein, 54 aa, Oryza sativa
  Clone ID: PAT_MRT4530_24159C.1.pep
NLHNIYTEATERVLPNTVQLPYSLAELYYRQGTKTHTRATREERHSPVHIGDHD

SEQ ID NO: 121102 - protein, 131 aa, Oryza sativa
  Clone ID: PAT_MRT4530_2415C.1.pep
MPSAVTRRTQGITLHSAGSRCNVGARLSADDVTGVRPVTDRSFLSTTRQFSMPHVCPSSYNDFLVMVAMKPGMNLAGTDGVGAPQPSGPKREQPDPSGRQREGRPRHPRARPPPPPPRGSGHMVDRGCPSL

SEQ ID NO: 121103 - protein, 142 aa, Oryza sativa
  unsure (1)..(142): unsure at all Xaa locations
  Clone ID: PAT_MRT4530_24160C.1.pep
AMGYTALQCIILAIIKYYNHLWYHSKQQQHSMWFPNPWSASHFLISKSPIRYQRFPPXRYPQQVGPNCAHCTQGKGYYKLISPLHPPQSXTTXRAYSGRRQEFKSRAYIRLHNFHKGAXRPHSSXPTHLLVHHYVAQFSRLS

SEQ ID NO: 121104 - protein, 410 aa, Oryza sativa
  Clone ID: PAT_MRT4530_24161C.1.pep
MRWHWVIASTCARTTAASGAVEGFWDQRPYPVSSPPAAPTPAASGGGGGHAKAAARRRRRRPKVVKNKEEAESQRRNHIAVERNRRRQMNEYLAVLRSLMPPSYAQRGDQASIVAGAINFVKELEQLLQSLEAQKRRAEHAPPAPPFAGFFTFPQYSTTVGDNNAAGSGAADGEGGCGARPGAADIEVAMAESHANVRVLAPRRPRQLLRMVVALQCLGLTVLHLNVTTTADHLALYSFSLKMEDECRLSSVDEIAGAVNQMMSESEDEKSLSDEITDTSHLPWDPFWTRKCKYPSGGRSDNGWQRTEGWRAVGGASAGRRRGAAGGSEASAGRWVEQWGGRWKWSVGGAVGRATAGTRGGGRSERSGARRREIGETAGGREEHRAVGLPSSPSVIRGEEMGWKRGRSEQ

SEQ ID NO: 121105 - protein, 388 aa, Oryza sativa
  Clone ID: PAT_MRT4530_24162C.1.pep
MRGPPHAAAVLLVAAAALCLGGRAEELEASSPEFNYPAVFNFGDSNSDTGGRVAAGFESIAPPYGSTFFGSPSGRFCDGRLIIDFLMDAMDMPFLNAYLDSVGAPNLRAGVNFAQAGCSITPATATSVSPFSFGLQIKQFFAFKDKVTKLLSKGDTYRRYIPQSDYFSRGLYTFDIGQNDLAGEFYWKTEDQVAASIPTILLEFETGLKKLYEQGARKFWIHNTGPLGCLPQNVAFFGKDRSQLDELRCVAKHNRVAKLFNLQLHALCTKLRGEFAGASITYVDIYTIKYSLIANYSRYGFENPIQACCGYGGPPLNYDSRVPCGQTASLNGNLVTAKGCKDSTEFVNWDGIHYTEAANFHIASQILTGRYSDPPFADKMPFLIKPKF

SEQ ID NO: 121106 - protein, 368 aa, Oryza sativa
  unsure (1)..(368): unsure at all Xaa locations
  Clone ID: PAT_MRT4530_24163C.1.pep
MAAPELNSLMDDVVEEILLRLPPDDPSCAVRASLVCKRWRRLLTDDPCFQRRYRAFHRRRARAPPPLLGFIHHVSDDQHPGAPTVSRFVLTNAFRPAEPERRRGWWWPIDCRHGRALFHSAGEGLAVWDPMAGDVRWQQEPRIPASDCMYSTAAVACAAPGCDHDHDHGDCGGGPFVLVFVAVDERHETASAFSCSSETGEWSSAPSTVHLDREYLXQKPNVLAGGAVHFLTDYGRTVLRYDLAKLELSAIEPPEVHSDVLLTTTEGGDLGLAILDDQRYLRLWAWAADHGVTRRWVRRRVVDLFAELPFLQHVLPLNLTGFDEGTGMIFFQASDGDYAIDELMSSPRAKKLWGRDNFSNVFPYRSFY

SEQ ID NO: 121107 - protein, 73 aa, Oryza sativa
  Clone ID: PAT_MRT4530_24164C.1.pep
HRPQTMPFSFFRLSGRSNPELAHAAMSPPSPASSLPPLRPPPLRCRLPTPSSSPASAHPASLLPTILLIYGLT

SEQ ID NO: 121108 - protein, 588 aa, Oryza sativa
  Clone ID: PAT_MRT4530_24165C.1.pep
MTTKKKPLSSSPSTSAVAKLLLRWRGRSKAAKDESIEFFSELRSSQPDRRGAASDHAGGGGAPDGRGKAKSSAPAAAGGDAGGGGKLLSTGTEKHDYDWLLTPPASPLWSPATSAAAGHHVSAAPPPSRLERASSAPYAKGNSRLPLTRRENGPPASRLSRSSSATSQLSTVAHAPGTVFSGRRTLSSASVSSINTASSTSVGSTPRGSSASTSPRTPATARGAPAGAAWPRHRDRTQALHVFGAAAAAGQPSASSLVSRSRPSLTAPSSGALQRATPGAAGTSSPRSTAPACQQPAATRRGANSVARSGSTPRAASPSPRARDVSIAAGASRVAPPPMSSSKPRQAPASGKQSNGNGMAAASTAAQRWRSAGRNARREEAVTHESSRNSDSRRKIDVANTSAAARRTADLSSPRGASGGSPTSGGGGRNKSTDTDAKRSLWQGAAARHLMAAARRDATPTTRRSGGLSSVASRSRLGITPAASSGDISATPTGRRSTPAKGRPAADAAAAASSPRVAAGDAFPSSRYDAMLLREDPRNLTWLHGCDDGEEIDGGDLVEASLESFDVPAGLSSTGLHGGKTLNFGANL

SEQ ID NO: 121109 - protein, 408 aa, Oryza sativa
  Clone ID: PAT_MRT4530_24166C.1.pep
MENLRKAFQKVCAPFEPLSNVDGESGDDDKGKNVSDVCFMARGESDTEYEDNEHGSLRGARLRSGEKFVGVAGESMPLVVEGVIMIQWYTSGQSKTIRIAVPAVMGGLSNALVARKENVWIVDFGCSRHMTGDKNWFSSLKKASKTESIIFGDTATSVVLATGLVKEEDGRIFEDESDYDDDNEVGSAGQTGRQAGQTAGTPPVKPAHDVRSDRPGSSAEGSVDADRDGPPEITTSTSTDTERGSTSEVAAPLHIQRRHPPEQIIGNIGERTTRSKEKVYVKQPPGFENPDFSNHVFKLSKALYDFAETMRREFEMSMMDELSYFLGLQIKQTPQAVLDPDEDEAVDQKEYRSMIGSLLYLTASRPDIEFAFLDTKLQIADIFTKPLDSNLFAFLCGELGVIHPFGMV

SEQ ID NO: 121110 - protein, 864 aa, Oryza sativa
  Clone ID: PAT_MRT4530_24167C.1.pep
MPSFLAAFNATSDDQLEQIEEEDLALVANRIARAMNNTRNRKRGGPNRCFECGSIDHLRSHCPKLGRGKREDKDGEKTSNNKSQGSSQARKFKENLRRAFDQVYAAFEPSSDVDGESGDDDKGKNISGVCFMARGESDIEYEDHEVSAFEEAINILSAKNMKCEKMYRKQEFIIESLKSEIARLKSLISNDDDCSNCEVLMNEISKIRDVNAAHDLKNRSSLACSFALHTRTLDELFLTKKLLQKYQIVFHASLMFNMISAKKLKQPHDVLDCSTCNLNKMKLKDALGRVEYMEDVVKYNEVLSCPKCRKNKGVVVDCENCTNLEKEVSYLKNSLQRFSDGVGARSGENLIKHDTNKTVFKSVGIMSTMNASSSKSNVVHTKPPVVASVAKSSSAINALVARKENVWIVDSGCSQHMTGDKNWFSSLKKASKTESIIFGDASISTVLATGLVKVQGEDGRIFEDESDDDNDDDDEVGSAGQTGREAGQTGTGGERITRSKVTTHDVCANSAFVASFKPKDVSHALTDESWINAMHEELENFERNKVWALVEPPSGHNIIGTKWVFKNKQNEDGLIVRNKARIVAQGFTQVEGLDFDETFAHVARIEAIRLLLAFAASKGFKLYQMDVKNAFLNGFIQEEVYVKQPSGFENPDFPNHVFRLSKALYGLKQAPRAWYDRLKNFFLAKGFTMGKVDKTLFVLKHGDNQLFVQIYVDDIIFGCSTHALVVDFAETMHREFEMSMMYGEAVDQKEYRSMIGSLLYLTASRPDIQFAILWLLFTLKDYGLTFEKVPLFCDNTSAINIAKNHVQHSRTKHIDIRFHFLRDHVEKGDVVCDSMSRESICGDGPGVGLGIRRRPWWSEIMRDT

SEQ ID NO: 121111 - protein, 150 aa, Oryza sativa
  Clone ID: PAT_MRT4530_24168C.1.pep
MARGESDTEYEDNELKQPHDVLDCSTCALNKLKLKDALGRVEYIEDVVKNNEVLSCPKCRKSKGVMVDCENCANLEKEVSYLKNSLLRFSDGKKNLNMILDQSKVLVLEGYLHYYKGAPGLTIKNKQQRTSGPTAPSSQALNWGISQDST

SEQ ID NO: 121112 - protein, 87 aa, Oryza sativa
  unsure (1)..(87): unsure at all Xaa locations
  Clone ID: PAT_MRT4530_24169C.1.pep
KCSSVSSPLLLIMFVCCLWVVAPRNGWLNERGWVLVCSCILLEAAASRSEMAEAFCCSWFEFHFELIQSFLPSFSFLVYNLYYIYXM

SEQ ID NO: 121113 - protein, 164 aa, Oryza sativa
  Clone ID: PAT_MRT4530_2416C.1.pep
MGSERRPERGQRWPGFRGIEVKAAFGEGRRAKGGGRRGMGPWGCEGGGWRSLRRAKEKGKETERWRFGGGRRKPEVTSDKQSTRLLPRSPAFPVDAHFNLHSMASDFLAMLALKPGMDLTGTDVPTPGVSTPAPARDESREALIILTGRGEACDRPPVATQPAI

SEQ ID NO: 121114 - protein, 1402 aa, Oryza sativa
  Clone ID: PAT_MRT4530_24170C.1.pep
MSIWEMKVTSIQESVNMSTLTLDPLYTKLKTHEMNILSGKVDSKSSALVSSSSSLIVDASSSMSSFLAAFNATSDDQLEQIEEEDLALVANRIARAMNNARNRKRDGPNRCFECGSIDHLRSHCPKLGRGKREDKDGEKTNNNKPNNYNKSKGSNQGRKMENLRKAFQQVCAAFEPLSDVDGESGDDDKGKNVSDVCFMARGESDTEYEDNEVSAFDEAINILSAKNKKCEKMYKKQEFIIESLKSEIDRLKSLIPNDDDCENCEVLMNEISKIRDVNAAHDLKNRSSLACCFALHTRTLDELFLTKKLLQKYQIAFHASLMFNMISVKKLKQPHDVLDCSTCNLNKMKLKDALGRVEYMEDVVKNNEVLSCPKCPKSKGVMVDCENCANLEKEVSYLKNSLLRFSDGKKNLNMILDQSKVSTNNRGLGFDPYAHNSRHPPIVLGVGARRGEILIKHDTNKTVFKSAGIMSTMNASSSKSNVVHAKPPVSACVAKNSSSKNVSQQRNRSGRSGSRGQTGDRSDQLNSLGQTGHRSDLRYRGGQTGFRMDICLLDLLVVNEKFELKNVALVKDLKYNLLSVSQIVDEEFEVHFKKTGSKVFDSRGDSVLNISRYGRVFKADFENSVSPVITCLVAKFDKDVMFWHRRLGHVGFDHLTRLSGLELVRGLPKLKKDLDLDEAFQHFRGLFLRLELEFPGSLKRIRSDNGGEFKNASFEQFCNERGLEHEFSSPRVTQQNGVVERKNRVLVEMARTMLDEYKTPRKFWAEAINTACYISNRVFLRSKLGKTSYELRFGHQPKVSHLRVFGCKCFDLKSGNLDMFEARSTDGLFLGYLAHTRGYRVLILGTNKIVETCEVSFNEASPGTRPDIAGTLSQVQGEDGRIFEDESDYDDDDEVGSAGQTGRQAGQTAGTPPVRPAHDERSDRPGSSGSVDADRDGPPENSTSTSTETERGSTSEVAAPLHIQRRHPPEQIIGNIGERTTRSKVTTHDVCANSAFVASFEPKDVSHAITDESWINAMHEELENFERNKVWTLVEPPSGHNVIGTKWVFKNKQNEDGLIMRNKARLVAQGFTQVEGLNFDETFAPVARIEAIRLLLAFAASKGFKLYQMDVKSAFLNGFIQEEVYVKQPPGFENPDFPNHVFKLSKALYGLKQAPRAWYDRLKNFLLAKGYTMGKVDKTLFVHKHGDNQLFVQIYVDDIIFGCSTHTVVVDFAETMHREFEMSMMGESSYFLGLQIKHTPQAVLDPDEDGESVDHKEYRSMIGSLLYLTASRPDIQFAGSRWRIASQFQHQMVLQLCWILMKMILWLLSTLKDYALTFEKVPLFCDNTSAINIAKNPVQHSRTKHIDIRFHFLRDHVEKGDVELQFLDTKLRIADIFNKPLDSNRFAFLRGELGVIHPFGMV

SEQ ID NO: 121115 - protein, 840 aa, Oryza sativa
  Clone ID: PAT_MRT4530_24171C.1.pep
MAVRFSTKPHVFDGTDFDRYRVQSYIMAEDYDIWRKVSHPYVISKQLSTAALKTEFEQNCKARNILLSGISRSDYDRVAHFQTAHEIWIALSNFHQGTNNIKELRRDLFKKEYIKFEMKPREALDDYLFRFNKILSDIRSLDFSYDVNYTQSEISRHFLNNLDRSIWEMKVTSILESIDMTTSTLDSLYTKLKTHGMNILSRKVDSKSSALVSSSTLDVDASSSKSSFLALFNATSDDQLEQIEEEDLALVANRIARAMNNVRFRKRGGPNRCFECGSIDHLHARCPKLGRGRREDNNAREKTNDNKPKGTFKGEKVKEVLKKAFDQVYAAFEPLSDVDGDSGDEDKGKNISGVCFMALGELDSECEDNEVSALEEAINILRAKNMKCEKMYRKQEFIIESLNSKIARLKSLIPNDDDCKNYWLINRKRRERLLLQNQSGKNLVFPRGNRLDRSGSRGQTGYCAAVRSGTGQTGGTEAVRPATVPRSDRPRRNFAENSQTVFARGYMPIGSSGRVPQYWIPKFLLSSNPSTEASTSSCVYALVARKENVWIVDSGCSRHMTGNKNWFSSLKQASKTESIIFGDASTSAVLATGLVKDVRSDRPGSSAEASVDAVRDGPPETSTSTSTGTERESNSEVTTPLHIERRDPPEQIIGNLGERTTRSKEEVYVKQPPGFENPDFPNHIFKLSKALYGLKQAPWYDRLKNFLLAKGFSMGKVDKTLFVLKHGDNQLFVQIYVDDIIFGCSTHALVVEFAETMRREFEMSMMGELSYFLGLQINQTPQGTFVHQTKYTKDLLRRFKMENCKPISTSIGSTAMLDPDEDGEAVDQKEYRSMIESLLY

SEQ ID NO: 121116 - protein, 55 aa, Oryza sativa
  Clone ID: PAT_MRT4530_24172C.1.pep
RHHRSWHSYFFHYSHAVPNANLFGLANGIAKGTAPDETIADGVDVISISLATRLK

SEQ ID NO: 121117 - protein, 414 aa, Oryza sativa
  Clone ID: PAT_MRT4530_24173C.1.pep
TLSQVQGEDDCIFEDESNDNDNDKEEVYVKQPPGFENPDFPNHVYKLSKALYGLKQAPRAWYDRLKNFLLAKGFSMGKVDKTLFVLKHADNQLFVQIYVDDIIFGCSTHALVVDFVETMHREFEMSMMGELLYFLGLQIKQTPQGIFVHQTKYTKDILRRFKMENYKPISTPIGSTAVLDPDEDGEAVDQQEYRSMIGSLLYLTASRPDIQFVVCLCARFQASPRASHRQAVKRIMWYLNHTLEFGIWYSTSCSICLSGYSDADFGGCRIDRKSTSGTCHFLGTSLIAWSSRKQSSVAQSTAESEYVAAASCCSQILWLLSTLKDYGLTFDKVPLFCDNTSVINIAKNHVQLSRTKHIDIHFHFLRDHVEKGDVELQFLDTKLQIADIFTKPLDSNRFAFLCGELGIIHPFGMV

SEQ ID NO: 121118 - protein, 502 aa, Oryza sativa
  Clone ID: PAT_MRT4530_24174C.1.pep
MATPARFSTKPHVSDGTDFSHWCSRLQSYIMAEDYDIWIKVSHAYVIPEAINTAAEKTAFEQNCKARNILLSGISRSDYDRVAHLQTAHEIWVALSNFHQGTNNIKELRRDLFKNEYIKFEMKPGEALDDYLSRNRKRGSPNRCSECGSIDHLRSHCPKLGRGKREDKDGEKTNNNKPNNNKSKGSYQGRKMENLRKAIQQVCAAFEPLSDVDGESGDDDKGKNVSDVCFMACGESDTEYEDNEVSAFEEAINILSAKNKKCVSARSSEILVKPDTNKTVFKSAGIMSTMNASSSKSNVIHAKSPVVAHVAKSTNATNVPNHREKYTCSFCGKDGHIVGFCFRLAHKQKKEREIAFAKSKWQKSGFPSRKPVRPQWVPRSDWRLVKPAAHPWSDRSWWNFSENSKNDFARGYMPIGSSGHVSQYWIPKFLLSPNPSTEASTSACVYALVARKENVWIVDFGCSRHMTGDKNWFSSLKKASKTESIIFGDAATSAVLATGLVK

SEQ ID NO: 121119 - protein, 40 aa, Oryza sativa
  Clone ID: PAT_MRT4530_24175C.1.pep
PPNYADVGVLDAPVYDLVRAADEAGKEGVLGGVREARTQQ

SEQ ID NO: 121120 - protein, 492 aa, Oryza sativa
  Clone ID: PAT_MRT4530_24176C.1.pep
MEVLCAYGMRSRIWKESKFERSNKVVIHFKNSSICVSLGFGGLTDNSPAVRPVADQRSDRRRRQARQASRRFDRSIYIGQTDIHQVVRPAHTHRSDRDPSNSRLGKGKREDKDGEKNNNNKPKGSSQGRKMKENLRKAFEQVCAAFEPLSDVDGESGDDDKGKNISGVCFMARGESDTEYEDNELKQPHDVLDCSTSNLNKLKLKDALGRVEFMEDVVKNNEVLSCPKCRKSKGVMVDCENCANLEKEVSYLKNSLLRFSYGKKNLNMILDQSKVLVLEVVRFWLNLILTKLCLNLLALVARKENVWIVDSGCARHMTGDKNWFSSLKKASKTESIIFGDASTSAVLDTVSQIVDENFVVHFKKTRSKVFDSCGDSVLNVSRYGRVFKTDFENPVSPVITCLVAKFDKDVMFWHRRLGHVGFDHLTRLSGLDLVRGLPKLKKDLDLVYTLCRHAKMVASSHALIVSVMTDAPGQLLHMDTVGPARVQSVGGK

SEQ ID NO: 121121 - protein, 281 aa, Oryza sativa
  Clone ID: PAT_MRT4530_24177C.1.pep
TRRQFFRTVRIATPPTEFARNENFSAGRFRRTRKYISPRLIYPAATFVCPGNTPSERFPPRTQILPRKLPPQLFARPRVHRRTYTPRNCTAHLSPAKFAHARVSSGVSPRKFARPNFSPPIWHGNYCRPYSPRVIPPRNSDRRGSARNFRPAIFPAESPRRFIPDISHPPSSARFVARGLPPALPPEILPAMLPSETVLRICHPQQCRSVLPPPQHASSLSPPPTPRNPSSSSSSPSPRAPAPRRQQQQRWREREPSDHSIGRLMALRSSPSLLCFGATLV

SEQ ID NO: 121122 - protein, 438 aa, Oryza sativa
  unsure (1)..(438): unsure at all Xaa locations
  Clone ID: PAT_MRT4530_24178C.1.pep
CSPVSFDEASPGTRPDIAESEDDNDDKVGSAGQTGRQAGQTAGTPPVRPAQEVRSNXPGSSGSGTVDAARDGPPEITTSTSTDTERGSTSEVAAPLHIQRQHPLEQIIGNIGERTTRSKVTTHDVCANSAFVASFEPKDVSHALTDESWINAMHEELENLERNKVWTLVEPPSGHNIIGTKWVFKNKXNEDGLIVRNKARLVAQGFSXVEGLDFDETFAPVARIEAIRLLLAFVASKGFKLYQMDVKSAFLNGFIQEEVYVKPLGFENPNFPNHVFKLSKTLYGLKQAPRAWYDRLKNFLLAKGFTMGKVLXWSSRKQSSVAXSTTEFEYVAAASCCSQILCLLSTLKDYGLTFEKVPLFCDNISATNIAKNHVQHSRTKHIDIRFYFLMDHVEKGDVELQFXDTKLQLADIFTKPLDSNRFVFLCGELGIIHPFGLV

SEQ ID NO: 121123 - protein, 200 aa, Oryza sativa
  Clone ID: PAT_MRT4530_24179C.1.pep
MSGDQATVFARNYPVAFLLESVPGEIRDGAFVSPDSIRRHRKREDKDGEKTNNNKPKGSSQRRKLENLRKAFQQVCTAFEPLSGDDDKGKNISNVCFMARGESDTEYEENETGDRSNRLLSVGQTGHRSDGGTEAVRPAPGQTGHCTSALVVRKENVWIVDSGCSRHMTGDKNWFSSLKKACKTESIIFGDAATNAVSLQ

SEQ ID NO: 121124 - protein, 821 aa, Oryza sativa
  Clone ID: PAT_MRT4530_2417C.1.pep
MESVLQLPAPPSHATAATQDTSPTAGALAHNDAIDLTTNDDFEVLPPPGKKQKKCSSEVWQHYTKYKVSKKGSDDTVIVEEYVKCNKCSYKRRCESNCGTSVFWNHLNNKHNIKSGQQQLQMKKSEDGTEGAVETYRYDETVSLKKFYMAIIMHEYPFNIVEHDYFVDFIKYLRPTFPIKSRITVRKDIINIYEEEKKKLWQHLLTLSCRFSTTMDMWTSNQNKSYMCITVHWIDDTWKMQKRIIKFMHVEGHHSGSNMCKEFYDSIVDWNLDRRLVGLTLDNASSNDVCVKGVILKLRKISPLICDGIFFHVRCFNHILNLVAQDGLKQITGAVLKIRNTISILKHSPLQFEAFQKCALEVSLDNTKGLSMDTPIRWNSTFLMLKNAIYYRNAFDRLFLRHGRKYAKCAPTKVDWSMAIALCKCLKPFHEATELFSGTTYPTANHFFGKFCSIKLYIADWCNSTDGTIKTMANAMQTKYDKYWEKSNMALAVACFLDPRYKTSSIEYYGMKIYGLEAAKKFDEFNGVIKKLFDVYATSACATSKKKGAEMHVHQLQIQSDPVHNTDEFDDIFNENDSSHDHEQHFQRFLLERSQPICSDKTELQIYMEQPLLLWTSKDPFDILSWWKLKQAEFPILCKLARDFLCIQVSTVASESAFSAGGRVVDPFRTRLDPEAVQALVCTKDWIKAANNGYKTQAIINELDIESVERHLANLLIVLPKKGNMLFTMRASLQPEMTSDKQSIRLLPRSPAFPVDAHFNLHLMASDFLAILALKPGMDPTGTDIPTPGVGMPAPARDESQEAFIIPTGRGEACDRPPIAT

SEQ ID NO: 121125 - protein, 77 aa, Oryza sativa
  Clone ID: PAT_MRT4530_24180C.1.pep
MWRRVDGMQRYGNVWRMGEQSAGGTRAVRRRGERVTCRQHEGGAQPHNSSRGPGRVEKSVVWGGGIPARPAPLPTLI

SEQ ID NO: 121126 - protein, 89 aa, Oryza sativa
  Clone ID: PAT_MRT4530_24181C.1.pep
MARLDDGGDSPAVFGGCEGADGMLLHLANLTVAWVREIGLQTRGFEPENPTRSTLLVMKIGVAENRLWVAGNFEVVVGELKEEIGESFH

SEQ ID NO: 121127 - protein, 250 aa, Oryza sativa
  Clone ID: PAT_MRT4530_24182C.1.pep
MLAARALHAKCVPRLLLKVDIAKAFDMVSWPFLLEVLAQLGFSQRWRDWVSLILSASSSRVLVNGVPGWVIKAIDKKRHPFLWTGTDSANGGQCRVSWTKVCHPRYLSGMGIPDLRIAGFALRVRWLWLQRSGHPNWSDLKASVERSVSDMFAASTFTTLGDASIAPDLLHVVPPRFRGSRTVATGLANNSWVGDIRGALTVPVISQFLLVWDAVLPTQLSPGVEDRLVWCWTGDQCYSVRLAYQAFFLG

SEQ ID NO: 121128 - protein, 2160 aa, Oryza sativa
  Clone ID: PAT_MRT4530_24183C.1.pep
MDRDEEMGHGDRSLLFIGDEDDDLEADRDGGSTPSSDPGSFSDRSDPPSVDDIDEDDDDVVGDGRRAPRDDDDDQRGTWPQSFRQSIDMMSAVPSPAMSSIITAASPNLGRLAAVGSSLLKRATSSAVGQEGSSLPLSRPLLPPSSLSQLSTASGPPVRDSADSLPPRARPPPPPLQGESVVPPPLPRPSSACLRSNYIDLPPPSTRCGQKQAILNGASGLMFCVELEFSPQVTESNKKCIDSSPSIDTYPDIGQAAFGIYGRIFVSVVLYLELYACGVEYITLLGDSLSSVFPSADLAFGGIYLNAHNLFAITMALAILPSVWLKNLRLLSYLSAGGVIATTTVIVCLFWVGIGEGVGFHPGGTALNLTHFPVALGLYGYCYSGHSVFPNIYSSMEERPKFTFVLLFCFIVVTFVYAGVAVAGFLMFGESTMSQFTLNMPQQFIPSKIAIGMTIINPYTKYALTLTPVALSIEEALPRRMQTYQVGMCVRTALVASTVVVALTFPYFALVMALLGSVFTMLVALILPCACYLSIKKGSTPLWEEIPDPIATFKIGDMKKIAENYDTRVEDIIKAMRKDTDVKFTFVVDGKKMIVPVTPAQNLTDVNGIYIIEITDGNLRLCLVADKYQNWFRGFITDKGNRFEIDHDTLPNIMKNSQSLHTNGMYPSLLGCEVSELKIGYHQLLAAFHTLARYGEGRRDLKKAKEAVAIFLILLFEGPRLLPVEQKMMNSLTQNLVAVVGTDKELINNWCGMSRNFYDENGYEMEVIISEETSEIVKNAVKTFGIMCRSRWDEWNIEVCQISPLLADGIAASYAEPTGLFFNELDALAAEFGPAVPSPPRVSPVPPSASGAGTSLPRTACTPPTGGEWLRPESPLPQQAPTLVVDVPDGVLYDVPMVVLDLDGRPLAHSLPSSVADNAALRAFLTSCSRPLPPALLSPPLPLPPLAAKAVGVVPKRSERIAAKMALEALEGPIHAVSRAQRNLMRKLGLVPERGPVTAEAVAAYNALFSKPLSQEHIIALSSLFSSSLPPAKAAEELVETIMDVIPSRTILEMLGLDFDYSFLPAVGRSGGVLLAWRTTVWSVSDVHLAEFSLTALVRHSSDVAPWWLSVVYGPQEEPDKLRFLDELRSLRSSRTGPWAVVGDFNLILEAQDKNNLNLNRRMMGRFRRLVDELELRELPLHGRRFTWSNERESPTLVKLDRVLFSADWEELFPSCLLQAASSIASDHCALLLHTCVTSPKALRFRFEAFWPKFDGFLQVVQDAWHPPANLPPLAALAWCFSTTAKRLQSWSDRHIGSVRLQLQMAKELVFRLDVAQESRSLSSLETWLRRDLKLKCLGLASLERTIARQRSRLVWLKEGDANTKFFHLHARARRRKNFITRLCDGDQLAVSHDALQELASSHFCAILGTSVERELALDLHSLGLRPAQLEGLDCPFTEDEVWAVIKSLPSDKAPGPDDFTGRFYKSCWPVIKVEILAALNSLFLTNGQGFASLNDALISLLPKKDEAVDVKDFRPISLIHSFGKLFSKILASRLSPRLDELVAPNQSAFIKGRSLHDNFRYVQLAARALHAKRVPRLLLKVDIAKAFDTVSWPFLLEVLAQLGFSQRWRDWISLILSASSSRVLVNGVPGPRFPHRRGLRQGDPLSPMLFILVMDVLNAMLRKASDSGGFLPLNDHAIRHRASLYADDLVLFLSPVRQDLEFIQGILSVFGAASGLRTNFTKCSITPIRCSVLDLELVQSSFPCSISEFPCTYLGIPLSVRKLPKAALQPLVDKVSHRLPPWKGRLTTLAGRSVLVQSVLSSIPVHVSMAIGLPSWVIKAIDKKRRAFLWTGTDSANGGQCRVSWTRVCRPRDLGGLGIPDLRVAGFALRVRWLWLQRSGHPYWSDLKAPVERSVSDMFTTSTFSILGDGQSTLFWTDRWIDGRSIASIAPDLLHVVPPRFRGSHTVAAGLANNSWVGDIRGALTVPVISQFLLVWDAVVPTQLSPGVEDHLVWCWTGDQCYSAQSAYQAFFLGQHSFACADLLWHAKGPAKCKFFLWFAFQQRCWTADLLQKCGIDSHSACPFCAQELETANHILIDCVFARQVWLRVLSPPGWAALSPPHGSWLQDWWSSSRLWKERNSRVFDSALASVAVVLESFRSEGQLWSLAGVACFGDFLGV

SEQ ID NO: 121129 - protein, 121 aa, Oryza sativa
  Clone ID: PAT_MRT4530_24185C.1.pep
MAFINRPIVFFTVCLVLLGNGSLTQQLLSQNTNQWQNSCRGSPRKCKVDRVQAFEPIRNGKAQAGTTEFFDVFNEQFQWTGISGGRRVIEPKSLLLPHYTNGAFLIYIIQGRRITRPTFPS

SEQ ID NO: 121130 - protein, 106 aa, Oryza sativa
  Clone ID: PAT_MRT4530_24186C.1.pep
STGPPGFPPGKRAVSPTPIKWGRPPLRPPRLFPLFFPLVFFVEFLTENHFPPGTAFALVSPSFYTPPHKEKWVPPRDPARISRGTPAAPGSKKTNGGKKMNLHVFF

SEQ ID NO: 121131 - protein, 1546 aa, Oryza sativa
  Clone ID: PAT_MRT4530_24187C.1.pep
MAAGARALVPSPFIVVVFLLLAAAARDASALTRHDFPEGFVFGAGTSAFQVPNVLYLRMVALFQNEYVHDDGKVCHLIVWYSPGGAIADVSADQYHHYKEDVKLMYDMGLDAYRFSIAWPRLIPGIQPHVTIYHFDLPQALQDEYGGILSPRFIEDYTAYAEVCFKNFGDRVKHWVTVNEPNIEPIGGYDAGVQPPRRCSYPFGTNCTGGDSSTEPYIVAHHLLLAHASAVSIYRQKYQAIQGGQIGITLLGWWYEPYTDAVADAAAAIRMNEFHIGWFMNPLVHGDYPPVMRSRVGARLPSITASDSEKIRGSFDFIGINHYFVIFVQSSDANHDQKLRDYYVDAGVQGALSASSLGSWQDATSLKLKYGNPPVMIHENGDADSPETPGKIDYDDDFRSDFLQSYLEVLHLSIRNGSNTRGYFVWSLLDGFEFLSGYGNRFGLCCVDFTAPARTRTACTQPTGGEWLRPESPLPQQAPTLVVDGPDGVLYDVPMVVLDLDGRPLAHSLPSSVADNAALRAFLTSCSRPLPPALLPPPLPLPPLAAKVVEVVPKRSERIAAKMALEALEGSIHAVSRAQRNLMRKLGLVPERGPVTAEAVAAYNALFSKPLSQEHIITLSSLFSSSLPPAKAAEALVETIMDVIPSRTILEMLGLDFDYSFLPAVGRSGGVLLAWRTTVWSVSDVHLADFSLTALVRHSSDVAPWWLSIVYGPQEEPDKLRFLDELRSLHSSRTGPWAVVGDFNLILEARDKNNLNLNRRMMGCFRRLVDELELRELPLHGRRFTWSNERESPTLVKLDRVLFSADWEELFPSCLLQAASSIASDHCALLLHTCVTSPKAHRFRFEAFWPKFDGFLQVVQDAWHPPANLPPLAALAWCFSTTAKRLQSWSDRHIGSVRLQLQMAKELVFRLDVAQESRSLSPLETWLRRDLKLKCLGLASLERTIARQRSRLVWLKEGDANTKFFHMHARARRQKNFITRLRDGDQLAISHNALQELASSHFCAILGTSVKRELALDLHSLGLRPAQLEGLDCPFTEDEVWAVIKSLPSDKAPGPDGFTGRFYKSCWPVIKVEILAALNSLFLTNGQGFASLNDALISLLPKKDEAVDVKDFRPISLIHSFGKLFSKILASRLSPRLDEFVAPNQNAFIKGRSLHDNFRYVQLAARALHAKRVPRLLLKVDIVKAFDTVSWPFLLEVLAQLGFSQRWRDWISLILSASSSRVLVNGVPGPRFPHRRGLRQGDPLSPMLFILVMDVLNAMLRKASDSGSFLPLNDRAIQHRASLYADDLVLFLSPVRQDLEFIQGILSVFGAASGLRTNFTKCLITPIRCSVLDLELVQSSFPCSISEFPCTYLGIPLILGDGQSTLFRTDRWIDGRSIASIAPDLLHAVPPRFRGSHTVAAGLANNSWVGDIHGTLTVPVISQFLLVWDAVLPTQLSPGVEDHLVWRWTGDQCYSARSAYQAFFLGQHSFACANLLWHAKDPAKCKFFLWFAFQQRCWTADLLQKRGIDSHSACPFCAQELETANHILIDCAFARQVWLHVLSPPG

SEQ ID NO: 121132 - protein, 1199 aa, Oryza sativa
  Clone ID: PAT_MRT4530_24188C.1.pep
MPAAAVAAAGLTAPAVVAPDSPVAAMAVSSSPTAVAASSSPAASPVDIVAASSSPAAAVAAFGSPAVVVASNSPAVGSLAAVVSPVCATSPVAACHPPTASSLLSGPSGGGPAFPASPLCSRRSPLLADGIAASYAEPTGLFFDELDALAMEFGPAVPSPPRVSPVPPSASGAGTSLLRTACTPPTGGEWLRPESPLPQQAPTLVVDVPDGVLYDVPMVVLDLDGRPLAHSLPSSVADNAALHAFLTSCSRPLPPALLPPPLPLPPLTAKAVEVVPKHSERIAAKMALEALEGPIHAVSRAPAQPDVEARPSSGEGPSHGRGGRGLQRPLLQATFPGAHHRALLALLQLLAPGQGCGGVGRVWLIGFFSSALGVVPLNGIVQRERFGVERARSELARPPGCCLDFDYSFLPAVGRSGGVLLAWRTTVWSVSDVHHADFSLTALVRHSSNVAPWWLSIVYGPQEEPDKLRFLDELRSLRSSCTGPWAVVGNFNLILEAQDKNNLNLNRRMMGHFRRLVDELELRELPPHGRRFTWSNERESPTLVKLDRVLFSADWEELFPSCLLQAASSIASDHCALLLHTCVTSPKAHCFRFEAFWPKFDGFLQVVQDAWHPPANLPPLAALAWCFSTMAKHLQRWSDRHIGSEGDANTKFFHLHARARRQKNFITRLRDGDQLAVSHDALQEFASSHFCAILGTSVERELALDLHSLGLRLAQLEGLDCPFTEDEVWAVIKSLPSDKAPGPDGFTGRFYKSCWPVIKVEILAALNSLFLTNGQGFASLNDALISLLPKKDEAVDVKDFRPISLIHSFGKLFSKILASHLSPRLDELVAPNQSAFIKGRSLHDNFRYVQLAARALHAKRVPQLLLKVDIAKAFDTRSGHPYWSDLKAPVERSVSDMFAASTFSILGDGQSTLFWTDRWIDGRSIASIAPDLLHAVPPRFRGSCTVAAGLANNSWVGDIRGALTVPVISQFLLVWDAVLHTQLSPGAEDHLVWRWTGDQCYSARSAYQAFFLGQHSFACANLLWHVKGPAKCKFFLWFAFQQRCWTADLLQKRGIDSHSAGPFCAQELETANHILIDCVFTRQVWLRVLSPPGWAALSPPRGSWLQDWWSSSRVCLPEHLHSGFDSLVLLVSWQLWKERNSKVFDSALASVVVVLESIRSEGQLWSLASVTFFGISWECSVVLPPPAVWSCVFNRRSSS

SEQ ID NO: 121133 - protein, 258 aa, Oryza sativa
  Clone ID: PAT_MRT4530_24189C.1.pep
MALANKIGNLLKRATSSSPALYQSIRCMSSSKLFVGGLSYGTDEQSLRDTFANYGQVIEAKIINDRETGRSRGFGFITYASSEEASAAITALDGKDLDGRNIRVNTANERTGGFRSGGGGYGGGGYGGGGGGYGGGGYSGGGGYGGGGYSGGGGGGGGYQGGGGGYGGNNGGYGNRGGGGGGYGVAEGSADAFSGINLGGDGSFGGNPAGSFGDAGGSTGGGDFSGAGGDSFGSRKNDELMDDLFKDDEPDNYANKQG

SEQ ID NO: 121134 - protein, 281 aa, Oryza sativa
  Clone ID: PAT_MRT4530_2418C.1.pep
MARSPEPPRYYAAAGYHRPSPFSSVAASCVVAALFILLAAGGAAAALFLLYRPQAPAIAVTAVQLPSFASRNGTVAFTFQQLASVRNPNRSPLAHYDSSLRVAYAGGEVGSMYIPAGQIDGGRTQYMATSFTVPAFAVTSSATAAASSSPAQTITVPASGPSPAAVGAVALQQEQPPPQQQQVAALPVMEVDSLLVVKGKVTILRVFTHHVVAAKFQLDAYDFGCKLKYSQKCKLKMLFSHIRQIELIFSGHDWTFNRVSRQFAVIYFSSLNCLVSIIVGS

SEQ ID NO: 121135 - protein, 150 aa, Oryza sativa
  Clone ID: PAT_MRT4530_24190C.1.pep
GLSSIPVYVSVAIGLPSWVIKAIDKKCRAFLWTGTDSANGGQCRVSWMRRSGHPYWSDLKAPIKRSVSDMFVAYTFSILGDGQSKLFWIDRWIDGRSIASIAPDLLHAVPPRFRGSRTVATGLANYSWVGDIRGALTVPVISQFLLVWDA

SEQ ID NO: 121136 - protein, 658 aa, Oryza sativa
  Clone ID: PAT_MRT4530_24191C.1.pep
MAAASSLSPSRSLSVPSSSPAARLLAACLLRQPAAPRTVCGGEATVPYIDSWRVEVGNALGLEFDYSFLPAVSRSGGVLLAWRTTVWSISDVHLADFSLTALVRHLSDVAPWWLSIIYGTQEEPDKLRFLDELRSLRSSRTGPWAIVGDFNLILEARDKNNLNLNRHMMGRFRRLIDELELQELPLHGRCFTWSNERESPTLVKLDRVLFSADWEELFPSCLLQAASSVASVHCALLLHTCVTSPKAHRFRFKAFWPKFDGFSSSRAGRLASPCQPTPSCCSCLLKEGDTNTKFFHLHARARRRKNFITHLRDGDQLAISHDALQELASSHFCATLGTSVERELALDLHSLGLCPVQLEGLDCPFTEDEVWAVIKSLPSNKAPGPDSFTGCFYKTCCPVIKVKILVALNSLFLTNGQGFTSLNDALISLLPKKDEAVDVKDFRPISLIHSFGKLFSKILASCLSPRLDELVAPNQSAFIKGRSLHDNFRFVQLVARALHAKRVPRLLLKVDIAKAFDTVSWPFLLEVLAQLGFSQRWRDWISLILSASSSRVLVNGVPGPRFPHRRGLRQGDPLSPMLFILVMDVLNALLRKASDSGGFLPLNYRAIRHRASLYADDLVLFLSPVRQDLEFIQGILSVFGAASGLRTNFTKCSITPIR

SEQ ID NO: 121137 - protein, 46 aa, Oryza sativa
  Clone ID: PAT_MRT4530_24192C.1.pep
ASNCIRAHLAFLITTSGSINSISKKQRLASASSCHGLFYSGLSREL

SEQ ID NO: 121138 - protein, 250 aa, Oryza sativa
  Clone ID: PAT_MRT4530_24193C.1.pep
MRKDTDVKFTFVVDGKKMIVPVTPAQNLTDVNGIYIIEITDGNLRLCLVADKYQNWFRGFITDKGNRFEIDHDTLPNIMKNSQSLHTNGMYPSLLGCEVSELKIGYHQLLAAFHTLARYGEGRRDLKKAKEAVAIFLILLFEGPRLLPVEQKMMNSLTQNLVAVVGTDKELINNWCGMSRNFYDENGYEMEVIISEETSEIVKNAVKTFGIMCRSRWDEWVGEQTEAAHGRQARKQSRGQGSSSSSSKKH

SEQ ID NO: 121139 - protein, 1286 aa, Oryza sativa
  unsure (1)..(1286): unsure at all Xaa locations
  Clone ID: PAT_MRT4530_24194C.1.pep
MLQLNATLENADTAAANGGCAFCPPGRVLLLHLQPQFFLHLGSPGFLFLSPTFCFPMLDRLDLSLVSLWGHPLLSFVRPGGGGAPSLTSTSSRMNLYHPEAISEQNASIAARLVGCLPAVTSLAVYCCDPTTLANLTPHWQASLYRVKLVRWHQCPPNLPMVRISTDGWRNDGRRDTRESYIFALTKTDVVWPADGLALGQSLKSQVTGKAAPIKDAVTLSEGDGYYPASYSSPPPPPPPPASPSQSWLFRRGRTSCAPLAVGSDRDHSCSGCLGASNSGGAMWLWKSSAKETIHPCLECISDRIPASGMATTKDTGCDAYYGAPNAQHPSTQNYFEYVIMAIMSSSRSRHNISRTPTAAIEPREQEPPAVKFAAGKWNSRRIRPPSMAARASPAFFTAPRRCCWSSSRRPWATTSASAGARCRPPSTAARASPAYCAGTRRRYRIRPSAIKNPSHWATTVVIPNPIYGGDAGLLHVHNNKKTLAIREQVSVSPGREPGVKNRTSVCKRRPRTFISLRLLLRSSGLHIHHIVSDYKDRNEEEYEGMNISLLEEASVQKADAKPVYCTKFLSDWVCSLRNFKWKVVAGIHQALVPNEYSWEEVMGSPIIQYAGGCSLSACSVCIDRLAFERIHGRGSFAWRVESPPAKLRKECLKRNAWSQESGGKSDRVLDVIIDIGGLPTTDASNGRCPKAFQNALISLLPKKDEAVDIKDFRLISLIHSFGKLFSKILASRLSPRLDELVASNQSAFIKGRSLHDNFRYVKLAARALHAKRVPXLLLKVDIAKAFDTVSWPFLLEVLAQLGFSQRWRDWISLILSASSSRVLVNGVPGPRFPHRRGLRQGDPLSPMLFILVMDVLNAMLRKAFDSGGFLPLNDRAIRHRASLYADDLVLFLSPVRQDLEFIQGILSVFGAASGLRTNFTKCSITPIRCSVLDLKLVQSSFPCSISEFPCTYLGIPLDLSGLGIMDLMMAGFALRVRWLWLQHSGHHYWFVLKAPVEWSVSDMFAASTFSILGDGQSTLFWTDRWIDGRSIASIAPDLLHAVPPRFRGSRTVAVGLANNSWVGDICGALTVPVISQFLLVWDAVLPTQLSSGVEDHLAWRWTGDQCYSTQSTYRAFFLGQHSFACADLLWHAKGPAKCKFFLWFAFQQRCWTADLLQKRGIDSHSACPFCAQELETANHILIDCVFARQVWLRVMSPPGWAALSPLRGSWLQDWWSSSRACLPEHHCSGFDSLVLLVSWQLWKERNSRVFDSALASVAVVLESTRSEGQLWSLAGVAFFGDLLGV

SEQ ID NO: 121140 - protein, 86 aa, Oryza sativa
  Clone ID: PAT_MRT4530_24195C.1.pep
MYGAFWCSHCNEQKQIFGREATKILDYVECFPNGAGKGKKMAPECAAAGIEGFPTWIINGKVLGGDQELPILAEESGFTVEGTEQS

SEQ ID NO: 121141 - protein, 320 aa, Oryza sativa
  unsure (1)..(320): unsure at all Xaa locations
  Clone ID: PAT_MRT4530_24196C.1.pep
MPPPPPPAAAIGRRSSILSFAAARDRCFSRRFLRAGLRPLAIPLPTGVDDDAGTTVHVWVPANPPRNPLLLLHGFGASATWQWAPYLRPLIAAGYDPIVPDLLFFGASYTRLADRSEAFQARSIKAAMDAIGVARFGLVGVSYGGFVGYRMAAMYPDAVERVVLVCAGVCLEEKDLAGGLFPVAGVGEAADLLVPRRPEEVRRLVRLTFVRPPCIMPSCFLWDYIKXEKTELLYALISERQLSDLPIISQPALIVWGERDKVFPMELAHRLKRHLGESSRLVVIRNAGHAVNLEKPKDVCRNIIEFFQEGVTEPLNDEKV

SEQ ID NO: 121142 - protein, 583 aa, Oryza sativa
  Clone ID: PAT_MRT4530_24197C.1.pep
GAPCSAGSGGATSPGTTRRSRSGSARRRRRRRRGSRRSGPCGTTRGGSAGSRGSSTGRCTTYSVTARKNQSVNANYLLNFHYDPISRPQPRGPRTYPTRRQRKIRPYNKDLFLQANFKFVVLDTGSYEIELMDPDKMLQWEDIVCVRYYSPCEVQCPICLESPLCPQITSCGHIYCFPCILRYLLMGKEDYKGESWKKCPLCFMMISTKELYTIYITQVQHFHVGDNVTFTLLSRSKNSLTPSIKNLTDESTIDEDPCSAFSKFILTSDVELSVREAKTDLVNWLHMADLGLVDDLEKLPYVSTALEQLEERMKYWSEYKLLEYIKIDQSTTNSSGNGTQVTARKNQSVNANYLLNFHYDPISRPQPRGPRTYPTRRQRKIRPYNKDLFLQANFKFVVLDTGSYEIGVRDPDKMLQWEDIVCVRYYSPCEVQCPICLESPLCPQITSCGHIYCFPCILRYLLMGKEDYKGESWKKCPLCFMMISTKELYTIYITQVQHFHVGDNVTFTLLSRSKNSLTPSIKNLTDESTIDEDPCSAFSKFILTSDVELSVREAKTDLVNWLHMADGLVDDLEKLPYSTALEQ

SEQ ID NO: 121143 - protein, 138 aa, Oryza sativa
  Clone ID: PAT_MRT4530_24198C.1.pep
ALKAFFSWCLAISEASLGSYQGFPVLVEGASVCLHVKAFKFFSASGGGFRSFCASSVCIFRVLSVVWLSSVLSFGCQTLLSRSFVPVLFYNLYLSSGSCFLVFLYSNVAYGLLYPRLFFHAIFLLLFSAVLLCLFLLF

SEQ ID NO: 121144 - protein, 88 aa, Oryza sativa
  Clone ID: PAT_MRT4530_24199C.1.pep
MNWAKIHKSTEWSNRGGHQPKLGWIGPSLGSAEPGPILAPLDPGFDLDVQDCIPMTVGGHFGQFPFHNCHNYLYIRSSLSSLHTHLKQ

SEQ ID NO: 121145 - protein, 289 aa, Oryza sativa
  Clone ID: PAT_MRT4530_2419C.1.pep
MRASLQPEVTSDKQSARLLPRSPAFPVDAHFNLHLMASDFLAILALKPGMDLTGTDIPTPGVSTPAPARDESQEALIIPTGRGEAGSGHPSPRGRNGSGPTPRGDRGRGGHVTFGPDPPEEANQGKPRARQISSPTCCTQEQRTSSFGGEEESKEKEILMAEEAKPDTQLFQLLSDLLQQVESMSNQEEVELRAKIEALGLEVTKVPEQTPKQLDELEIAAELDKLSARLDNVDKMISSAMASDPEVKSLLSTTADIWMPVITASADERRGFAGTSGESNQEEQESSKQ

SEQ ID NO: 121146 - protein, 162 aa, Oryza sativa
  unsure (1)..(162): unsure at all Xaa locations
  Clone ID: PAT_MRT4530_241C.1.pep
KKPPASPSSAGKXEGPPKSRIPKLGGSEVHESNIVPVTIDKLTLEQKNNLEAMMQQTQNQFLNSFMETRQGTIVXRYKMKLVADVPRTSSSKDGEVEQVSDATAQLGDKSAADGSGDKGDCSQGVKDEDLSPDGNTAHIQFNNFQXNQSGVLVNTLSNMVKS

SEQ ID NO: 121147 - protein, 83 aa, Oryza sativa
  Clone ID: PAT_MRT4530_24200C.1.pep
FALRNNQVWQQPAKVAQQSPYQNINIVQAKAPHPPPPQFGDLNFERKPAQAQALLSFNVPPKYGIPPRGFGAPGSPTPRGGVL

SEQ ID NO: 121148 - protein, 44 aa, Oryza sativa
  Clone ID: PAT_MRT4530_24201C.1.pep
LIQQRDISNTTFTSSTQITIIISTSLEHIIFYLKHMHSTITNLK

SEQ ID NO: 121149 - protein, 140 aa, Oryza sativa
  unsure (1)..(140): unsure at all Xaa locations
  Clone ID: PAT_MRT4530_24202C.1.pep
AMTGQQRDGDDPVXAAEVEPANDRLLGGLLSTDFDDSLXLSRYRAGLYRRQSQYSVXPELIYLLRRYKCMHRRWSPCTCAYERSGERLRSMSSSNTCYAXCRNVWWTSLEGIXTDMLTLTCLSRNAMTTERTFILTQPGS

SEQ ID NO: 121150 - protein, 224 aa, Oryza sativa
  unsure (1)..(224): unsure at all Xaa locations
  Clone ID: PAT_MRT4530_24203C.1.pep
MSYAYLFKYIIIGDTGVGKSCLLLQFTDKRFQPVHDLTIGVEFGARMITIDNKPIKLQIWDTAGQESFRSITRSYYRGAAGALLVYDITRRETFNHLASWLEDARQHANANMTVMLIGNKCDLSHRRAVSYEEGEQFAKEHGLVFMEASAKTAQNVEEAFIKTAGTIYKKIQDGVFDVSNESYGXSKLAMRYQMLQVVELAHPLKVVAAAAKGSSSIQLVMYPA

SEQ ID NO: 121151 - protein, 83 aa, Oryza sativa
  Clone ID: PAT_MRT4530_24204C.1.pep
PLLVQILRHPNQQDSRTTRTKAKATENVQTTFVKTAEPLLKKIQDGVFDLSNEANGIKLGYTVPGQSGGAGSSSSQGGGCCSS

SEQ ID NO: 121152 - protein, 71 aa, Oryza sativa
  Clone ID: PAT_MRT4530_24205C.1.pep
MATTPPPPLSSHRRRLGEDAAAPGPLPFLSLADLLAARVTQIGSSADGSFLDSGIIVLYCSMVAEILEERS

SEQ ID NO: 121153 - protein, 599 aa, Oryza sativa
  Clone ID: PAT_MRT4530_24206C.1.pep
MDMDADEDSPSREHVSPINSSLATAECTGNVNTRKPACDVSNLVKDSGGKAKTTNVTDEGRSTFQLIQGYASDDSEDEDGACAVSNLVPLTENNEPVHSIGTNPDIGHQLLTEAAPCTERSLEDREHQLMSKSNPVKHDSYECGHPVKEDLSGNDSDRGQQTRRHGRSQWKRSRGQSPQGRRSCSPLSQSLSSGRQSNSPLAKRANLLESKSPDGVGQTFRAQPGVKLGISKDGFYNDKHDSPVKVATPFDIHPAGGHISGDRISEQDGLMGTKKFNGSPDDIDCNEKTNDASVGSFGPHGHGAVLTCGPSQSVASSANGSDPHKMQSRQKQPHREFTSSAPYDPLLDSIEPSSSSINKMDLGREANLSASNHNASKIVNIEVESKNMHGLGLVAESEVEEFGEVAADTEAGVVDNLSPEPLGAKDWSSDMPGDIDNDESVDKNKRTKDSRSMKLFKVAIADFVKEVLKPSWRQGNISREAFKTIVKKTVDKVSSSVPNNHIPKTPAKIKQYVQSSQKKVTKLVMPFPTPHTLATNSAIGGLFHWSSVGARPPPELERIPPGARWCYPNLARRGVALPDMELGLHQSSSISDLELDGAA

SEQ ID NO: 121154 - protein, 98 aa, Oryza sativa
  Clone ID: PAT_MRT4530_24207C.1.pep
RLLGSHQTLAGSPDLARKGKRRDRHRGDSSMALRALNREIQGMKAREVPEYLEPFLTCGNVEKSTDHCYLRYIDKVMVTSLPEPILHVMYGLMVLLLP

SEQ ID NO: 121155 - protein, 1650 aa, Oryza sativa
  Clone ID: PAT_MRT4530_24208C.1.pep
MATPARFSTKPHVFDGTDFSHWCSRMQSYIMAEDYDIWRKVSHPYVIPEAINTAAEKTAFEKNCKAPNILLSGTNNFKEIRRDLFKKEYIKFEMKPGEVLDDYLSRFNKILSDLRSVDSSYDANYSQYEISRHFLNGLDMSIWEMKVISIQESVNMSTLTLDSLYIKLKTHEMNVLFRKVDSKSSALVSSSSSLDVDASSSKSSFLAVFNATSDDQLEQIEEEDLALVANRISRVMNNARNRKRGGPNRCFECGSIDHFRLHCPKLGRGKREDKDGEKTNNNKPNNNKSKGSSQGRKLDNLRKAFQQVCAVFEPLSDVDGESGDDDKGKNISDVCFMTRGESDTEYEDNEVSAFEEAINILSEKNKKCEKMYRKQEFIIESLKSEIARLKSVIPNDDDCENCEVLMNEISKIRDVNAAHDLKNRSSLACSFALDTRTLDELFLAKKLLQKYQLAFHASLMFNMISAKKLKQPHDVLDCSTCNLNKLKLKDALGRVEYMEDVVKNNEGLSCPKCRKSKGIMVDCENCANLEKEVSYLKNSLLRFSDGKKNLNMILDQSKVSTRNRGLGFNPIAHNSRHPPVVLSVGARGGVILVKPDTNKTMFKSAGIMSTLNASSSKSNVVHAKSPVVACVAKSSNATNVSNHREKYTCSFCGKDGYIVGFCFRLAHKQKKEREIAFAKSKWQKYGFPSRKPVRPQWVPRSDRRPVRPASKHRSNRAPVRPAVQKRSDRPPVRPATIPRLGHVGFDHLTRLSGLDLVRGLSKLKKDLDLVCTPSRHAKMVSTSHAPIVSVMTDAPGQLLHMDTVGPARVQSVGGKWYVLVIVDDFSRYSWVFFMATKDEAFQHFHGLFLRLEFEFPGSLKRIRSDNGGEFKNASFEQFCNERGLEHEFSYPRVPQQNGVVERKNRVLVEMARTMLDEYKTPRKFWAEAINTACYISNRVFLRSKLGKTSYELRFGHQLKVSHLCVFGCKCFVLKSGNLDKFEARSTDGLFLGYHAHTRGYRVLILQTNKIVETCEVSFDEASPGTRPDIAGTLSQVQREDGRIFEDESDNNDDDEEVRLDRPGSSAEGSVDAVRDGPPEITTSTSTGTERGSTAEVAAPLHIQRRHPPEQIIGNIGERTTRSKVTTHDVCANSAFVASFEPKDVSHALTNESWINTMHEELENFERNKVWTLVEPPSGHNIIGTKWVFKNKQNEDGLIVRNKARLVAQGFTQIEGLDFDETFAHVARIEAIRLLLAFAASKGFKLYQMDVKSTFLNGFIQEEVYVKQPPGFKNPDFPNHVFKLSKALYGLKQAPRAWYDRLKNFLLVKGFTMGKVDKTLFVLKHGDNQLFVQIYVDDIVFSCSTHALVVDFAETMHREFEMSLMGELSYFLGLQIKQTPQGTFVHQTKYTKDLLRRFKMENCKPISTPIGSTAVLDPDEDGEAVDQKEYRSMIGSLLYLTASRPDIQYVVCLCARFQASPRASHRQAVKRIMRYLNHTLEFGIWYSTSSSICLSGYSDADFGGCIIDRKNTSGTCHFLGTSLIAWSSRKQSSVAQSTAESEYVAAASCCSHILWLLFTLKDYGLTFEKVPLFCDNTSAINIAKNPVQHSRTKHIDIRFHFLRDHVEKGDVELQFLDTKLQIADIFTKPLDSSRFAFLRGELGIIHPFGMV

SEQ ID NO: 121156 - protein, 51 aa, Oryza sativa
  Clone ID: PAT_MRT4530_24209C.1.pep
RQGAGDGVAGRRHAARRRCSVRNAGGRWREFEMEWSRMGGVAEHGGGVMME

SEQ ID NO: 121157 - protein, 324 aa, Oryza sativa
  unsure (1)..(324): unsure at all Xaa locations
  Clone ID: PAT_MRT4530_2420C.1.pep
MQHGPKSLTSYKCSEILVEEQLCTRVGCGRVHSIIKNILDKCGVIAPDLPTKTDDLSHSTDPGWTTREKVVXVIKRLLLLVLEPVKRSDLSRLTFKWSSYNYCLVLDQRCSVSPTTSTLXWSSYDYXWSSTSDVVFLPLLSLQVVELRLXLVLDQRCNVSPTTSTSSGRITTTTWSSTSNIAFLPLFPLKWSSYDSTTAWSSTTMVKLRLLPGPRPAWSSYDYCLVFDQRYSDSPNTSISTKLIAGTQYRQVFYXEIPYHXRHLALKPILLSLYAVLTRPPRNPRELRLGTPRADKALSDPSETKDHVRSGRVRVLAVRINQAV

SEQ ID NO: 121158 - protein, 1282 aa, Oryza sativa
  Clone ID: PAT_MRT4530_24210C.1.pep
MTNVRYRKRGGPNRCFECGSTDHFRSRCPKLGRARREDNGDEKTNDKKPKGTFKGRKIKETLNKAFDQVYAAFKPLSDVDGDSRDEDKGKNISSVCFMACGESDSGCEDNELKQPHDVLDCSTCTLNKIKLKDVLGRVEYMEDVVKNNEVLSCPKYRKSKGVMVDCENCANLEKEVSYLKSSLQRFYEDWLINKKGERNCFYKIKVAKIWFSLEETGLTAVGPAVRPATERRSDWLRSDRRTEASTSACVYALVARKENVWIVDSGCSRHMTGDKNWFSSLKKASKTESIIFGDASTSVVLAKGLVKKTGSKVFDSCGDSVLNISRYGRVFKADFDNHVSPAITCLVAKFDKDVMFWHRRLGHVGFDHLTRLSGLDLVRGLPKLKKDLDLVCTPCRHAKMVASSHAPIVFVMVDALGQLLHMDIVDPARVQSVGGKWYVLVIVDDFSSYSWVFFMATKDEAFQHFRGLFLRLDLEFPGSLKRIRSDNGGEFKNASFEQFCNERGLEHEFSSPRVPQQNGVFERKNHVLVEMARTMLDEYHTPRKFWAEAANTACYISNRVFLRSKLGKTSYELRFGCQPKVSHFACFWCKCFVLKSGNLDKFEARSIDIMFLGYPTHSHGYHVLILETNKIVETCEVSFDEASPGTRLDITGTLSQVQGEDSCIFEDDSDDDDDKVGSAGQTGRQAGQTASTPPGRPPQDERSNRPGSSGSGSVDADRDCPPEATTSTSTGTERETTLEVAATLHIQRRHPPEQIIGNLSERTTRSKITTHDVCANSAFVASFEPKDVSHALTDESWINAMHEELENFERNKVWTLVEPPFGHNIIGTKLVFKNKQNDDGLIVRNKARLVAQGFTQVEGLDFNETFAPVVRIDAIRLVLAFAASKGFKLYQMDVKSAFLNGFIQEEVYVKQPLGFENPDFANHVFKLSKVLYGLKQATRAWYDRLKNFLLAKGFTMGKVDQMLFVLKHGDNQLFVQIYVDDIIFGCSTHTLVVEFAGTMRREFEMSMMQTPQCTFVHQTKYMKDILRRFKMENCKPISTPIGSIAVLDPDEDGEAVDQKEYRSMIGSLLYLTASRPDIQFAVCLCARFQVSPRASHRQAVKRIMRYLNQTLEFGIWYSTSSSIYLSGYSDADFGGCRIDRKSTSGTCIFLGTSLIAWSSKKQSSVAQSTAESEYVAVTSCCSQILWLLSTLKDYGLTFEKVPLFCDNTSAINIAKNPVQHSRTKHIDIRFHFLRDHVEKGDVKLQLLDTKLQLADIFTKPLDSNRFAFLRGELGIIHPFGMV

SEQ ID NO: 121159 - protein, 100 aa, Oryza sativa
  Clone ID: PAT_MRT4530_24211C.1.pep
MQQIMAKLVVVFSRAAVVGVNDGGSASGGVLRGEVPFRACMCLYGTPGDSLEVVCAPAKLGQRWRTEERSGGGGKQQCDDVGFLRSSGCQGEKGNGLEMP

SEQ ID NO: 121160 - protein, 677 aa, Oryza sativa
  unsure (1)..(677): unsure at all Xaa locations
  Clone ID: PAT_MRT4530_24212C.1.pep
SSSVPCVLILETNKIVETCEVSFDEASLCTRPDISDILSXVQGEDGRIFEDESDDDDEVSSASQTERQAGQTAGMPPVKPPQGVRSDRPGLSGSGTVDADRDGPLEITTSTSADTERESTSKVAVPLHIQXRHPPKQIISNIGERTTRSKITTHDVCANSAFVASFEHKDVSHALTDESWINAMHEEHENFERNKVWTLVEPPSGHNIIGTKWVFKNKQNEDGLIVRNKVRLVAQGFTQVKGLDFDETFAPVARIEAIRLLLAFAASKGFKLYQMNVKSAFLNGFIQEEVYVKQSSGFENPDFPNHVFKLSKALYSLKQAPRAWYDRLKNFLLAXGFTMGMVDKTLFVLKHGDNQLFVQIYVDDIIFGCSTHALVVDFTETMRREFEMSMMGEVSYFLGLQXKQTSQGTFVHQTKYTKDLLRPFKMENCKPISTPNGSTAVLDPDEDGEAVDQKEYRSMIGSLLFLTASRPDIQFVVCLCARFQASRPDIHRQAVKRIMRYLNHTLEFGIWYSTSSSICLSGYSDADFGSCRIDRKSTSGTCHFLGTSLIAWSSRKQSSVAQSTAESEYVAAASCYSQILWLLSTLKDYGLTFEKVPLFCDNTSAINIAKNPVQHSRTKHIDIRFHFLRDHVEKGDVELQFLDTKLQIADIFSKPLDHNRFAFLRCELGIIHPFGMV

SEQ ID NO: 121161 - protein, 139 aa, Oryza sativa
  Clone ID: PAT_MRT4530_24213C.1.pep
HPLLTRCSSHPSPLPVAASKPLPLPLPPNPLPTAALKSPPRLRLAPTVKLAVEPSTPNAPTDLAGCRSGGSRILDCAAVYALGRRRLPYGASAPPLAAAFVPRTLAAGGDPGTRSRPALRAGPALGGRGLRGRPLSVWG

SEQ ID NO: 121162 - protein, 1261 aa, Oryza sativa
  Clone ID: PAT_MRT4530_24214C.1.pep
MKLSSTLRVLRFVFTGFRRSNRRSTGGQTGVIFIKELRRDLFKKEYIKFEMKPGEALDDYLSRFNKILSDLRSVDSSYDANYPQSEISHHFFNGLDMSIWEMKVISIQESVNMSTLTLDSLYTKLKTHEMNVLSRKVDSKSNALVSSSSSLDVYASSSKSSFLVVFNATSDDQLEQIEEEDLALVANRIARAMNNARNRKRGGPNRCFECGSIDHLRSHCPKLGRGKREDKDGEKTNNNKPNNNKPKGSYQGRKMENLRKAFQQVCAAFEPLSDVDGESGDDDKGNNVSDVCFTARGELKQPHNVLDCSTCNLNKMKLKDALGRVEFMEDVVKNNEVLSCPKCHKSKGVMVDCENCANLEKEVSYLKNYLLRFFDGKKNLNMILDQSKVLVLEVALVTRKENVWIVDSGCSWHMTGDKNWFSSLKKASKTESIIFGDAATSVVFATGMVKVNEKFELKNVALVEDLKYNLLSVSQIVDEEFEVHFKKTGSKVFDSRGDSVLNISRYGRVFKADFENPVSPVIRCLVSKFDKDVMFWHRRLGHVGFDHLTRLSGLDLVRGLPKLKKDLDLVCTPCRHAKMVSTSHPIVSVMTDAPGQLLRMDTVGPARVQSVGGKWYVLVIVDDFSLYSWVFFMANKDEVFQHFRGLFLRLDLEFPGSLKRIQSDNGGEFKNASFEQFCNERGLEHEFSSPRVPQQNGVVERKNRVLVEMARTMLDEYKTPRKFWAEAINTACYISNRVFLRSKLEKTSYELRFGHQPKVSHLRVFGCKCFVLKSGNLDKFEARSTDGLFLGYPAHTRGYRVLILGTNKIVETCEVSFDEASLDTRPDIAGTLSQVQGEDGHIFEDESDNDNDDDEVGSAGQTVGTPPVRPAQDVQSDRPGSSAEGSVDADRDGERTTRSKVTTHDVCANSAFVASFEPKDVSHALTDESWINAMHEELENFERNKDWTLVEPPSGHNIIGTKWVFKNKQNEDGLIVRNKARLVAQGFTQVEGLDFDETFAPVARIEAIRLLLAFAASKALYGLKQSPRAWYDRLKNFLLVKGFTMGKVDKTLFVLKHDFAETMRREFEISMMGELSYFLGLQIKQTPQGTFVHQTKYTKDLLRRFKMENCKPISTPIGSTAVLDPDEDGEAVDQKEYRSMIGSLLYLTASGPDIQFAVCLCARFQASPRASHRQAVKRIMRYLYHSLEFGIWYSTSSSICLSGYSDADFGGCRIDRKSPSGTCHFLGTSLIAWSSRKQSSVAQSTAEFEYVAAASCCSQIL

SEQ ID NO: 121163 - protein, 87 aa, Oryza sativa
  Clone ID: PAT_MRT4530_24215C.1.pep
VAAPQVHLMHYWYTLLLLFSVCLCFLALAHFGVLCLCLTKGPGSFSFGGFLFQAMCKFIRRGVSMGPMAWAYRGGILVHEVASPPTN

SEQ ID NO: 121164 - protein, 846 aa, Oryza sativa
  unsure (1)..(846): unsure at all Xaa locations
  Clone ID: PAT_MRT4530_24216C.1.pep
KKNMLWPLDLGHLSYQVILQLSGLDLIHDLSKLKKDFDLVCTPCRHAKMVSTSHAPIVSVMMDAPGQLLHMDTIGPARVQSVGGKWYVLVIVDDFSRYSWVFFMATKDEAFQHFRGLFLRLDLEFPDSLKRIRSDNGXEFKNASFEQFCNERGLEHEFSSPRVPQQNGVVERKNRVLVEMARTMLDEYKTPRKFWAEAINTACYISNQVFLISKLGKTSYELRFGHQPKVSHLRVFGCKCFVLKSRNLDKFEARSTDGLFLGYPAHTRGYRVLILETNKIVETCEVSFDEASPGTRPDIASDNDNDDDEVGSAGQTRRQAGQTAGTPPVKPAXEVRSDRLGSSAEGSVDAVRDSPSEITTSTSTDTERGSTSEVAAPLHIQRRHPPEQIIGNTGERTTRSKVTTHDVCANFAFVASFEPKDVSHALTDESWINAMHEELENFERNKVWTLVEPHSGHNIIRTKWVFKNKQNEDGLIVRNKARLVAQGFTQVEGLDFNETFAPVTRIEAIRLLLAFAASKGFKLYQMDVKNAFLNGFIQEEVYGKQPPGFENPDFTNHVFKLSKALYGLKQAPRARYDRLKNFLLAKGFTMGKVDKTLFVLKHGDNQLFVQIYVDDIIFGCSTHALVVEFAEAMCREFEMSMMVLDPVEDGEVVNQKEYRSMIGSLLYLTASRPDIQFVMCLCARFQASPRASHRQAVKRIIIDRKSTSGTCHFLGTSLIAWSSRKQSSVAQSTAESEYVAAASCCSQILWLLSTLKDYGLTFEKVTLFCDNTSAINIAKNPVHHSRTKHIDICFHFLRDHVEKGDVELQFLDTKLQIADIFTKPLDSNRFAFLRGELGVIHPFGMV

SEQ ID NO: 121165 - protein, 293 aa, Oryza sativa
  unsure (1)..(293): unsure at all Xaa locations
  Clone ID: PAT_MRT4530_24217C.1.pep
XXXXPPXKXXIFFXXKKRGGKIFWGGGXSFFLGGGGXKFFFFKXFXXKKXPXKXGXKXGFFFXGGEKPPPPKKKKKXPXXKKKKKPPXXKKKKXPQKFFFFFKXGXFFLKGGGXPPXXLIXXIXVXGXXWXEKXXXXXXXPXXXXGNXXPXGXXXXXXXFLXXXXFXAXXXXXXXGXXFSXXXXLXLXIXXXIFLNXCXXLXXKXXXXVFQXXXXFXXFFFXNLKXXVXXXKXNXXGKPGXEIXRXKXXXEIXFLVIFQXPXPEXKXFFFFPXLAXXGEIPPXLXGXNFXFPF

SEQ ID NO: 121166 - protein, 1181 aa, Oryza sativa
  Clone ID: PAT_MRT4530_24218C.1.pep
MATPARFSTKPHVFDGTDFSHWCSRMQSYILAEDYDIWRKVSHPYVIPEAINTAAEKTAFEQNCKARNILLSGISRSDYDRVAHFRTAYEIWNALSNFLQGTNNIKELRRDIFKKEYIKFEMKPGEALDDYLSKFNKILSDLRSIDSSYGANYPQYEISRHFLNGLDMSIWEMKVTSIQESVDMSTLTLDSLYTKLKTHEMNVLSRKVDSKSSVLVSSSSSLDVEASSSKSSFVAVFNATSDDQLEQIEEEDLALVADRIARAIVPGTGKEVGRGKREDKDGEKTNNNKPKGSSQGRKLENLSKAFQQVCAAFEPLSDVDGESGDDDKGKNISDVCFMARGESDTKYEDNEVSYLKNSLLRFSDGKKNLNMILDQSKVLVLEVALVARKENVWIVDFGCSRHMTGDKNWFSSLKKASKTESIIIGDASTSAVLAIGLVKDETFQPFRGLFLRLDLEFPGSLKRIRSDNGGEFKNTSFEKFCNERGLEHEFSSPRVPQQNGVVERKNRVLVEMARTMLDDYKTPRKFWAEAFNTACYISTRVFLRSKLGKTSYELRFGHQPKVSHLRVFGCKCFVLKSGNLDKFEARSTDGLFLGYPAHTRGYRVLILETNKIVETCEVSFDEASPEVAAPLHIQQRHPPEQIIGNTGERTTRSKVTTHDVCVNSAFVASFEPKDVSHALTDESWINAMHEEHENFERNKVWTLVEPPSGHNIIGTKWVFKNKQNEDGLIVRNKARLVAQDFTQVEGLDFVETFAPVARIEAIRLLLAFPASKGFKLYQMDVKSAFLNGIIQEEVYVKQPPGFENPDFPNHVFKLSKALYGLKQAPRAWYDRLKNFLLVKSFSMGKVDKTLFVLKHGDNQLFIQIYVDDIIFVCSTHALVVDFTETMRSEFEMSMMGELSYFLGLQIKQTPQGTFVHQTKYTKDLLRRFKMENCKPISTPIGSTAVLDPDEDGEAVDQKEYRSMIGSLLFLTASRPDIQFVVCLCARFQASRPDIHRQVVKRIMRYLNHTLEFGIWYSTSSSICLSRYSDADFGGCRIDRKSTSGICHFLGTSLIAWSSRKQSSVAQSTTESEYVAAASCCSQILWLLSTLKDYGLTFEKVPLFCDNTSAINIAKNPVQHSRTKHIDIRFHFLRDHVEKRDVELQFLDTKLQIADIFHKPLDHNRFAFLRCELGIIHPFGMV

SEQ ID NO: 121167 - protein, 681 aa, Oryza sativa
  Clone ID: PAT_MRT4530_24219C.1.pep
MAEDYDIWRKVSHPYVIPEVINTATAKTEFEQNCKARNILLSGISRSDDDRVAHFQTAHEIWNALSNFHQGTNNIKELRRDIFKKEYTKFEMKPGEALDDYLSRFNKILSDLRSVDSSYDANYPQYEISRHFLNALDMSIWEMNVTSIQESVNMSTLTLDSLYTKLKTHEMNVLSRKVDSKSSALIEEEDLALVANRIARAMNNARNRKRGGPNRCFECGSIDHLRSHCPKLGRGKREDKDGEKTNDNKQKGTFKGRRIMENLNKAFDQVYAAFEPLSDVDGDSGDEAKGKNISGVCFMACGESDSECENNEISAFEEAINILSAKNKKCEKIYRKQEFIIESLNSEIARLKSLIPNDDDCKSCEVLMNEISKIRDINAAHDLKNRSFLALSFALHTRTLDELFLTKKLLQKYQIAFHASLMFNMICAKKLKQPHDVLDCSTYNLNKMKLKDALGRVEYMEDVVKYNEVISCPKCRKSKGVMVDCKNCANLEKEVSYLKNYLLRFSDGKKNLNMILDESKVLVLEVALVPRKENVWIVDSGYSRHMTGDKNWFFSLKKASKTESIIFGDASTSVVLATGLVKILWLLSTLKDYGLTFEKVPLFYDNTSAINIAKNPVQHSRTKHIDIRFHFLRDHVEKGDVELQFLDTKSQLADIFAKPLDSNRFAFLRGELGIIHPFGMV

SEQ ID NO: 121168 - protein, 160 aa, Oryza sativa
  unsure (1)..(160): unsure at all Xaa locations
  Clone ID: PAT_MRT4530_2421C.1.pep
RGHPSLCLPEGSGRSRFGPEGWGAPTPCGFGTTCVGRIDERVTPHLMRRSARLSGPXPVAVCDRSQTAGAGVLAPGVGMSVPIHQNTGVGYYASQRPEPVYIARVLCICSLANIPQIEGEEPHLAPPAEPAKGGLRGLLFCQVKHLLGHDVRTRGGHETC

SEQ ID NO: 121169 - protein, 891 aa, Oryza sativa
  Clone ID: PAT_MRT4530_24220C.1.pep
MPTTKCAVPLVSGAAGGGGSAELTRQLSSTQASPRFSFSSGVLPSLGSRGGGERHARLRRFIVSPYDRRYELWNNYLILLVVYSAWVTPFEFGFVPEPAGALAAADNAVNAFFAVDIVLTFFVAYTDPKTFLLQDDPRKIALRYITTWFVLDVVATIPTELARRILPPDLRSYGFFGILRLWRLHRVGILFARLEKDRKFSYFWVRCVKLVCVTLFAVHCSACFYYLLADRYPDPTNTWISAYMPNFHKASIWSRYVASMYWSITTLSTVGYGDMHAENTGEMVFTTTYMLFNLGLTAYIIGNMTNLVVHGTSRTRKFRDMIQAATSFAQRHQLPARLQEQMVSHLSLKFRTNSEGLHQQETFEALPKAIKSSISHHLFFGLVQNVYLFEGVSNDLIFQLVSEMNAEYFAPREDIILQNEAPADFYIIVSGSMLAGMAKSGDVVGEIGVLCYRPQLFTARTRSLCQLLRLDRAAFLRIIQSNIADGTIVMNNLIQYLREKKEIASIVAVAKEIDDMLARGQMDFPITLCFAASKGDSFLLHQLLKRGLDPNESDHYGRTALHIAASNGNEQCVRLLLENGADSNSRDPEGRVPLWEALCRRHQTVVQLLVDAGADLSGGDAAPYARVAVEQNDAALLGEIVRHGGDVSGACSGDGTTALHRAVLDGNVQMARLLLEHGADADAEDVNGLTPRAVAEQGGHADMQLAFASATRHEPRKARPPPPASAIVPVPLRDGVDSSPSSSSRRGRTSSTSAASARSTPQRMANFRNSLFGVISSSHAFHHEGGYRGGGGGGGAAAERERSSSSPPLVRVAISCPESRGGKDHSSKLVFMPETLRGLLELGAARFGVSPTRVVTSGGADVDDARLVRDGDHLLLVTDKWVPPENRSRNQ

SEQ ID NO: 121170 - protein, 900 aa, Oryza sativa
  Clone ID: PAT_MRT4530_24221C.1.pep
MVLSVGQLLGEEYRQLRGVGGEVAQLRDELATMNALLRMQSEAGEGAVDHFVREWMRQVCEVAYDAEDCIDLYFCRCRVRLQLSDGVLSWARHLASTLFPRRRLAGDIKALRARAIEISERHARYGVNREELRGWTVSAAALVPATAAAFHPAACGSDQLVGIEGQANTLADKLKAVDESSNLKVFSIVGFGGLGKTTLAMEVCRKLESVFQRQAMVSVSQAFDASKDLQVLLKRIILQIIKPKKSNENSINEEQSTGDIDSMDVSTLFQKLEVSLTGMRYLIVIDDVWSTSAWNAIQSKLPENNCGSIIMVTTRVETVAKASSSPSVSGDYMHKINPLGEKDAEKLFVSRAFGYKESCCPEDLKEQMKSILKKCARLPLAIVSIAGLLSSYRSSSSGSIRMWQRISNSIGSQMEIHPTLEGMKQIIALSYNHLPHHLKACMLYLSIFPEDYVTKKKRLLLRWIAEGFVMEKRGLTMFEVAESYYDELVSRSLIDAVRVRLDGTVKAVKVHDMMLEVIVSKSLENFVNFLGAQYGGGTPSYDSVRRLAIHGDGGPKHVVDVMSATHVRSLSTFGAQGNIAVLHRLAEFTLLKVLDLEDCKEVKDCHVKYICRLFLLRFLSLRNTDVSTISSQISRLQHLQTLNLYGTRIENLPTSVTMLERLEYLFFSERWSMRRWEIPVGLKKMMALCTLRTIRLPNDPNVVKEIGALAQLQTLDITILNSSEEVLANLADALDKTNNLRSLYAYGTGKDEHKDRLLNFLLRLKTPPLLLESVRIDGVMDQLPKWFNSLLPNLASVSLGYDSCTDDELLVRSAFKFPALKSFYVDPYIMPRAIRFEKSTMEKIETFRVFFYDNDGTGRPILAGIENLTSLKKLEVLTHSINAEIEILEWLKVERARHQV

SEQ ID NO: 121171 - protein, 182 aa, Oryza sativa
  unsure (1)..(182): unsure at all Xaa locations
  Clone ID: PAT_MRT4530_24222C.1.pep
KSAYECFFVGTVRYAHWRKIWKNWAPLRCKFFTCLVFNNRCWTVDRLASTGLSHRSACALCDQAEETIHHLLVECDFSWQVXYIILQRMGLAHIAPGPDTTNLSRWWSRALRGRDKDTKKGLSSLIILVLWEIWKHRNDCVFNGDNPCVATVLQTVAKECIMWSLAGASRLKELIDRSIAPQ

SEQ ID NO: 121172 - protein, 1116 aa, Oryza sativa
  unsure (1)..(1116): unsure at all Xaa locations
  Clone ID: PAT_MRT4530_24223C.1.pep
LRQGAAGDLRAVGPFDLHRSDRRHRKRGGPNRCFECGATDHFRSHCPKLGRNRRDDKDGESGDEXEGKNISGVCFMARGESDIEYEDHEVSAFEEVTNILSAKNKKCEKMYRKQEFIIESLNSEIARLKSLIPNDDDWKNCEVLMNEISKIRDVNAAHNLKNRSSLACSFALHTRTLDELFLTKKLLQKYQIAFHASLMFNMISAKKLKQPHDVLDCSTCNLNKMKLKDALGRVEYMEDVVKNNEVLSCPKCHKSKGVMVDCENCANLEKEVSYLKNSLLRFSDGKKNLNMILDQSKVLVLEMKASKTESIIFGDASTSAVLATGLVKVNENFELKNVALVEDLKYNLLSVSQIVDENFEVHFKKTGSKVFDSCGDSVLNISRYGRVFKADFENPISPVITCLVAKFDKDVMFWYRRLGHVGFDHLTWLSHLDLVRGLPKLKKDLDLVCTPCRHAKMVASSHAPIVSVMTDAPGQLLHMDTVGPARVQSVGGKWYVLVIVDDFSRYSWVFFMATKDEAFQQFRGLEHEYSSPRVPQQNGVVERKNRVLVEMARTMLDEYKTPRKFWAEAINTACYISNRVFLRSKLGKTSYELRFGCQPKVSNLRVFGCKCFILKSRNLGKFESRSTNGLFLGYPAHTHGYRVLILETNKIVETCEISFDEASPGTRPDIAGTLSQVQGEDGRIFEDESDDNDDDEVGSAGQTGRQAGQTAGTHLVRPAQEVWSDRLRTSGSGTVDADRDGPPEITTSTSTDTERGSTSEVAAPLHIQRRHPPEQIIGNIGERTTRSKVEGLDFDETFAPVARIEAIRLLLAFAASKGFKLYQMDVKSAFLNGFIQEEVYVKQPLGFENPDFLNHVFKLSKVLYGLKQAPRACYDRLKNFLLAKGFTMGKVDKTLFVLKHSDNQPFVQIYVDDIIFGCSTHALVVDFAETMHREFEMSMMGELSYFLGLQIKQPXSTFVHQTKARHTIWLRGCVHAFKLLLVXSHRQAVKRIMRKQSSVAQSTAESEYVAAASCCSHIVWLLSTLKDYGLTFEIVPFFCDNTSAINIAKNHVQHSRTTHIDIRFHFLRDHVEKGDVELQFLDTKLQIADIFTKPLDSNQFTFFRGELGIIHPFGMV

SEQ ID NO: 121173 - protein, 1589 aa, Oryza sativa
  Clone ID: PAT_MRT4530_24224C.1.pep
MSLVRGFGLPTSCINRGGASDRRQAAVRPAAYGRSDQRRRQARQATSAVRPEVQHRSDQRHPLGQTGRSTSVRPISVEFEARNILLSGISRSDYDRVAHLQTAHEIWTALSNFLQGTNNIKELRRDLFKKEYIKFEMKPGEALDDYLSRFNKILSDLRSVDSSYDANYLQSEISRHFFNGVGMSIWEMKVTSIQESINMSTLTLDSLYTKLKTHEMNVLSRKVDSKSSALVSSLDVDASSSKSSFLAVFNATSDDQLEQIEEEDLALVANRIARAMNNARNRKRGGPNRCFECGSIDHLRSHCPKLGRGKREDKDGEKTNNYKPNNKSKCSSQGRKLDNLRKAFQQVCAAFEPLSDVDGESGDDDKGKNISYVCFMARGESDTEYEDSEVSAFEEAINILSAKNKKCEKMYRKQEFIIESLKSEIDRLKSLIPNDDHCSNCEVLMNDISKIRDVNAAHDLKNRSSLAFSFALHTRTLDELFLTKKLLQKYQIAFHASLMFNMISAKKLKQPHDVLDCSTCNLNKMKLKDALGRVEFMEDVVKNNEVLSCPKCRKSKSVMIDCENCANLEKEVSYLKNSLLGFSDGKKNLNMILDQSKVLVLEVALVARKENVWIVDSGCSRHMTSDKNWFSSLKKASKTESIIFGDAATSAVLAIGLVKVNEKFELKNIALVEDLKYNLLSVSQIVDENFVVHFEKTGSKVFDSCGDSVLNISRYGRVFKADFENPVSPVKTCLVAKFDKDVMFWHRRLGHVGFHHLTRLSGLDLVHGLPKRKKDLDLVCTPCRHAKMVSTSHAPIVSVITDAPGQLLHMDTVGPARVQSVGEKWYVLVIVDDFSRYSWVFIMETKDEAFQHFRGLFLRLELEFPGSLKIIRSDNGLSHLRVFGCKCFVLKSGNLDKFEARSTDGLFLGYPAHTRGYRVLILETNKIVETCEVSFDEASPGTRANITGTLSQVQGEDSRIFEDESDDNDDDEVGSAGQTGRQAGQIAGAPPIRPTHEERSDRPGLSGSGDAVRDGPSEITTSTSTDTECGPTSEVAAPLHIQRRHPPEQIIGNIGERTTRSKVTAHDICANSAFVASFEPKDVSHALTDKSWINAMHEELENFERNKVWTIVEPPSGHNIIGTKWVFKNKQNEDGLIVRNKAGLVAQGFTQVEGLDFDETFANVAIIEAIRLLLAFATSKGFKLYQMDVKSAFLNGFIQEEVYVKQPPGFENPDFPKHVFKLSKALYGLKQAPRAWYDRLKNFLLTKGFTIGKVDKTLFVLKHGDNQLFVQIYVDDIIFGCSTHALVVDFAEIMHREFKMSMMGELSYFLGLQIKQTPQGTFVHQTKYTKDLLRRFKMENCKPISTPIGSTVVLDSDEDGEAVDQKEYRSMIGSLLYLTASRPGIQFAVCLCVRFQASPRASHRQAVKRIMRYLNHTLEFGIWYSTSSSICLSGYSDADFRGCRIDRKSTSGTCHFLGKSLIAWSSRKQSSVAQSTAESEYVAAASCCSQILWLLSTLKYYGLTFEKVPLFCDNTSAINIAKNLVQHSRTKHNDIRFHFLRDHVEKGDVELQFLDTKLQIANIFTKPLDSNRFAFLRGELGIIHPFGTV

SEQ ID NO: 121174 - protein, 421 aa, Oryza sativa
  unsure (1)..(421): unsure at all Xaa locations
  Clone ID: PAT_MRT4530_24225C.1.pep
MENLRKVFQQVCAAFEPLSDVDGESGDDDKGKNVSDICFMARGESDTEYEDNELKQPHDVLDCSTCNLNKMKLKDALGRVEYMEDVVKNNEVFSCPKCRKSKGIMVDCENCANLEKEVSYLKNSLLRFSDGKKNLNMILDQSKVLVLEEALVARKENVWIVDSGCSQHMTGDKNWFSSLKKASKTESIIFGDASISTVLATGLVKVHFKKTGSKVFDSRGDFVLNISRYGRVFKADFEHPVSPVIKCLVAKFDKDVMFWHRRLGHVDFDHLTRLSGLDLVRSLPKLXDLVCTPCRYAKMVSTSHAPIVSVMTDAPGXLLYMDTVGPARVQYVEEKWYAINTACYISNQVFLRSKLGKTSYELRFGHQPKVSHLCVFGCKCFVLKSGNLDKFEARSTDGLFLGYPAHTRGYRVLILETNKNV

SEQ ID NO: 121175 - protein, 189 aa, Oryza sativa
  Clone ID: PAT_MRT4530_24226C.1.pep
MARPATAWITATPRRRRPTTAALCQQIEDGSMGVQIRTRRSRCEERETAARTTAAVAAGDVGTGGHASEKAGIHRSHNTTLVCWTWTWTVESEVGSHGGEWLCRTEGRLNLVISSAGESVVMQKGDAEVTEETQWEWTNLDTEEEAMCRIWYGNQNSQCERCIKKKKITIAASTYATAKNKQQDILTLA

SEQ ID NO: 121176 - protein, 63 aa, Oryza sativa
  Clone ID: PAT_MRT4530_24227C.1.pep
LIFYSRVLISSVGHHESGHANHLSFTSDSHQWLHPHVVHPTTQPHQAQQQVGKLHQGPVLCHQ

SEQ ID NO: 121177 - protein, 53 aa, Oryza sativa
  Clone ID: PAT_MRT4530_24228C.1.pep
MAAGGDLVERGIAWEKGDLINEELEAEIEFWNRAGIGWSPDRLQLGSAEIELN

SEQ ID NO: 121178 - protein, 109 aa, Oryza sativa
  Clone ID: PAT_MRT4530_24229C.1.pep
IRSPPFDFEPLPRLLLSSCGSFPFLSLVLLSGGRREIGRRRTRRERPSAIAIAFTITDRAPAAAVLATRAVWICGGQGGFEWRRVWGCREADSRGALWELVWGERSVRE

SEQ ID NO: 121179 - protein, 174 aa, Oryza sativa
  Clone ID: PAT_MRT4530_2422C.1.pep
MDISRANESYTSCGPVVEMSWHRAGVLLLGAQSCLPVPEPEATSDKQSTRLLPRSPALPVDAHFNLHSMASDFLAMLAPKPGLDLTGTDIPTPGVSTPAPAVCDRSHTATGHGPDKRALRRIKCGVAHSSNLPHTWRQNHRGSGHPSPRGRNGSGPTPRGDRGRGGHVTVGPDP

SEQ ID NO: 121180 - protein, 101 aa, Oryza sativa
  Clone ID: PAT_MRT4530_24230C.1.pep
ARWTPVSRPSYSSCSQHPSSSAAGLSTAHATRSTVLTTRPLHMRKAIVLQVRSAQTQCRLLTSDSCSSTNCALLDIAMHIVVSSPYTTICAANSIGTDGGD

SEQ ID NO: 121181 - protein, 451 aa, Oryza sativa
  Clone ID: PAT_MRT4530_24231C.1.pep
MEQPEDPKLNMVDLLPDDVLADILRRLAPRPLAACRCVCKPWRAVVDGHRLLRADLLPLSLGGIFINFHEVLTSFFLRRPSARPPAAAISGKFEDFTPSAARSTVVDHCNGLLLLRSRYVVNPATQRWAAFPEPPPPRPGITRSFYHDEYLVFDPTVSPHYEVFLIPSVTPEEFVSKKLRPKVEESEWPPSPCFLSVFSSSTGQWEERSFVREGEAAGTIADMRSQPLLEQYNAVYWKRALYVHREANFVMRISPSKSKYQVIKLPIAQDGYVDPFLARSEKGVYLAVLDRCHLRVWILNESCEQMKWELKYDKEIQLSFQRWNYDEESVGPWTLHYSRRDVYDGDDTNYNAEVAERKFEWDSDSDDVLDLEDRVQRSSHGGFLILGFHPYKEVIFLDEGSSRGLAYHLGTSKAQDLGRLRPNFFDHWHVEGVNRSFVYTPCWIGELSNGI

SEQ ID NO: 121182 - protein, 75 aa, Oryza sativa
  Clone ID: PAT_MRT4530_24232C.1.pep
VTTRKSIIASGRKGSSQAGRPSACKPTTVKITDLRRRGGRPPAKIIFAVGRWLVRSACENRNRPLAKKKKTSACE

SEQ ID NO: 121183 - protein, 62 aa, Oryza sativa
  Clone ID: PAT_MRT4530_24233C.1.pep
NNNCKYQSDESMLGKLLTLSNCAETQCLYHLSSALHPYYTKINSNSKYGTENKRRPTTKIRK

SEQ ID NO: 121184 - protein, 58 aa, Oryza sativa
  Clone ID: PAT_MRT4530_24234C.1.pep
LHATVHRTREAHSQLPTLGATPPKGLLVHSPTDSEKTLFTMGVADHSQLNLMNETDPD

SEQ ID NO: 121185 - protein, 695 aa, Oryza sativa
  Clone ID: PAT_MRT4530_24235C.1.pep
MGHVESRWVVVNEKEEKATKILSRARQIHRRCRRRRPRRRRRRLLLPLTPSPPRSSSTHGSARLTPPLPLPLPRRQPPWRDQLTLRGVAVAAVLGSLLCVVIHRLNLTVGVIPALNVASGLLAFFLATAWRGAAAVLGLGHHRGRPFTRQENTVIQTCAIACGSLAFSGCSSSYIFAMDRKTYELVGQDYPVHTRYTVMVIDYKLAFPGGTATALMINSLHGKTEADLAGRKVHCLVKYMSLSFGWSFFKWFFSGVGDSCGFDNFPSFGIEAFKNTFYFNFNPSYVGYGLISPHIVNCSVFLGSVISWGFLWPFIAKQAGDWYPDNLSNTDFRGLYGYKVFIAISVILGDGLYNLVKVFLIIAKEICNARSKEHDLPVQALLQDDDSSRQLLDEKRQTEIFLKDSIPTWLAVSGYIVLAAISTVAVPIIFPQLKWYLVLVCYFLAPAIAFCNSYGMGLTNLNLAPTYGKIALFVFASLVGSDGGVIAGLAACGVIMSIVCSTADLMQDFKSGYLTLSSPRSMFISQMIGVALGCIIAPLTLWLFWTAFDIGDPDGEYKAPFAIIFREMAIIGIEGFAALPRHCLEICCVFFLAALIINLMKDVVPNHVSRFIPIPMAMAVPFYIGAYFGVDMFIGTLILFAWQKIDRREADDYAVAVASGLICGDGVWSIPSAVLSILGVDPPICMSFRPSSASV

SEQ ID NO: 121186 - protein, 209 aa, Oryza sativa
  Clone ID: PAT_MRT4530_24236C.1.pep
MEGGGAADLQDGVVGRRWCLMSLFGWCAAVMRDGTVGKEAALLNDAAVKWTSTTSGSIGNIFPTFLLNIHASTVPRRPLRSSADSGTLVLVTGAAEFVDTHCSLALHKRDDGVGINDYCLLAKLFGVVSINDGRFLAKFFGIVPFTHVLHLTVQHHGEPGNRRQQRDVKRAKASSATADQRPLSHWPATDYFLDCHTLPSVAHCRPCRP

SEQ ID NO: 121187 - protein, 148 aa, Oryza sativa
  unsure (1)..(148): unsure at all Xaa locations
  Clone ID: PAT_MRT4530_24237C.1.pep
MTTRISSVGGAPHLRHCLGFGPCVGATDEATVHHGQATLPLPRAVLRYEYMRWGEPMISDPVTLLEKEVXLFLMHGKERKSINVLLGLPTSFMDVFQVLMDGGGRVTRGRGRGMGRGERREKSWPLACICMSHMSPTHHVSQTWPLCC

SEQ ID NO: 121188 - protein, 122 aa, Oryza sativa
  Clone ID: PAT_MRT4530_24238C.1.pep
VGNQAIACGSLAFSGCSSSYIFAMDRKTYELVGQDYPGNPMEDIRDPSLGWNNGFMFLIALIGPFSIVMLRKVMVIDYKLAFPGGTATALMINSLHGKTEADLAGRKVHCLVKYMSLSFGWS

SEQ ID NO: 121189 - protein, 66 aa, Oryza sativa
  unsure (1)..(66): unsure at all Xaa locations
  Clone ID: PAT_MRT4530_24239C.1.pep
RIISYTLALIYEEHTSYNSYNFLVQVAKSTDALTFNCMRFCNCYYFTSIVTFLXSCTNCMYCRLKF

SEQ ID NO: 121190 - protein, 475 aa, Oryza sativa
  Clone ID: PAT_MRT4530_2423C.1.pep
MDHSSSEESDVSDSDIGVHEEKTYNQLRAEKVKVKHGNNTFRCPFCPGKKKQDYSSKDLLQHASGVGAASKRKAKVKATHLALARYLKVDLAGSLESSPQLATVEHQPPGSEEKYVWPWMGILVNLPTELKGKGFVGESEERLRAQFSRFKPLQVTILWNSTDNADYAIVKFAENWNGMKDALAFEKHFNVERYGKTDWNKINCRRDDLFGWVARSDDYNSLEPTGKYLRKNGELKGVCDLEHEGQRKMGRHVGHYACQIEEKNKYLEELKLMNNQNGLKLERMMEEKDQLFEEHNRNIIELQQHACKDSKRIIDENLNLYEELQAKKHEIDRRCKELNYLATNTNIDRGKLVAEKEKNAKENELLNLANLKQKEADEELLRLVEKHKPEMTSDKQYTHLLLRSSALPVDARFNLHSMASDFLAMLALKPGMDLTGTDIPTPGVSTPAPARDESQEALIIPTGRGEACDRPPVAT

SEQ ID NO: 121191 - protein, 82 aa, Oryza sativa
  Clone ID: PAT_MRT4530_24240C.1.pep
RKRNRTRRIIKTAQIPSLVRALRTLLPLIHTALNIPTNHIPISFTNSNPNKLNIPIPKSNSNISAKKKYSRKGKIIPTIYIM

SEQ ID NO: 121192 - protein, 67 aa, Oryza sativa
  Clone ID: PAT_MRT4530_24241C.1.pep
PPPSVASAPEPWGPTAACTRHELVKSAAYIGTSDKSILAVGENTGTIGKLYGSMMVQNGVEKPPMPS

SEQ ID NO: 121193 - protein, 936 aa, Oryza sativa
  unsure (1)..(936): unsure at all Xaa locations
  Clone ID: PAT_MRT4530_24242C.1.pep
MAAFPSDDDDRSDGGARLDKRRRRRRKSSRGGGATDGGGLRRGWRRREEGVTIMAENYDLWRKVSHPYVIPEAINTAAEKTAFEQNCKARNILLSGISRSDYDRVAHLRTAHEIWNALSNFHEGTNNIKQLRRDIFKKEYIKFEMKPGEAFDDYLSRFNKILSDLIDSSYDTNYPQSEISRHFLNGLNMSIWEMKVTSIQESVDMSTLTLDSLYTKLKTHEMNVLSRKVDSKSTALVSSTSSLDVDASSSMPSFLAAFNAISDDQLEQIEEEDLALVANRIARAMNNARNRKRCGPNRCFECGSIDHLRSHCPKLGRGKREDKDGEKTNNNKPNNNKSKGTSQGRKMENLRKAFQQVWAAFEPLSDVDGESGDDDKGKNISDVCFMARGESDIEFEHNEMKLKDASGHVEYMEDVVKNNKVLSCPICRESKCVMVDCENCASLEKEVSYLKNSLQRFSDSKKNLNTILDQSKVLVLEVVRLAHKQKKKREIAFAKSKWQKFGFPSRTPALVERKENMWIVDSSCSRYMTSDKNWFSSLKQASKTESIIFGDASTIFLATVSVLVSDKFEFKDVALVXDLMYNLLLVSQIVDYVFNISCYGGVFKAGFENPVSPVVTCLVAKFIXDLMFWHRRLVYVGFDHLTKLSGLDLVCGSPILRKGLDLVCTPCHHAKMVASSHALIISMMTNAPGQLLHMDTVGPARVQSVXRKWYVFVIVDDFXRYSWVFFMATKDEAFQHFHGLFLRLDFEFSGSLKRIRSDNGGEFKNTFEQFCNERGLEHEFSSPRVPQQNGVVERKNRVLVEMAKTMLDEYKTPRKFWAEAINTACYISNRVFLRSKLGKTSYEFRFGHQPKVSHLCVFGCKCFVLKSGNLDKFEARSTVGLFLGYPAHTRGYRVLILETNKIVETCEVSFDEASPGTRHDIAGTLLQVQGEDGRIF

SEQ ID NO: 121194 - protein, 85 aa, Oryza sativa
  Clone ID: PAT_MRT4530_24243C.1.pep
IFLVGACSQGKKKNKTFLKFGGPPMAPLGEQNVIFNLKPKSCPLKLFCDWTCSQTPVYLWPPFFKPKNRFFFPFKFSGGAPRKRL

SEQ ID NO: 121195 - protein, 1275 aa, Oryza sativa
  Clone ID: PAT_MRT4530_24244C.1.pep
MATPARFSTKPHVFDGTDFSHWCSRMQFYIMAEDYDIWRKVSHPYVIPEAINTAAEKTAFEQNCKARNILLSGISRSDYDRVAHLQTVHEIWTTLSNFHQGTNNIKELRRDLFKKEYIKFEMKPGEALDDYLSQFNKILSNLRSVDSSCDANYPQSEISRHFLNGLDMSIWEMKVTSIQESVNMSTLTLNSLYTKLKTHEMDVLSRKVDSKSSALVFSSSSLDVDASSSKPSFLAVFNATSDDQLEQIEEENLALVANRIARAMNNARNRKRAWERQKEDKDGEKTNNNNKPKGSYQGRKMENLRKAFQQVCAAFEPLSDVDGESGDDDKGKNISDVCFMARGESDTEYEDNEVLMNEISKIRDINAAHDLKNRYSLACSFALHTRTLDELFLTKKLLQKYRIAFHASLMFNMISAKKLKQPHDVLDCSTCNLNKLKSKDALGRVEYMEDVVKNNEVLSCPKCRKSKGVMVDCENCANLEKEVSYLKNSLLRFSDGKKNLNMILDQSKALVARKENVWIVDSGCSRHMTGDKNWFSSLKKASKTESIIFGDAATSAVLATGMVKVNEKFELKNVALVEYLKYNLLSVSQNVDENFEVHFKKTGSKVFDSCGDSMLNISRYGRVFKADFENPVSPVITCLVAKFDKDVMFWHRRLGHVGFDHLTRLSGLDLVCGLPKPKKDLDLVCTPCRHAKMVASSHAPIVSVMTDAPGQLLHMDTIGPARVQSVGGKWYVLVIVDDFSRYSWVFFMATKDEAFQHFRGLFLRLELEFPGSLKRIRSDNGGEFKNASFEQFYNERGLEHEFSSPHVPQQNGVVERKNRVLVEMARTILNEYKTPRKFWAEAINTACYISNRVFLRSKLGKTSYELRFGHQPKVSHLHVFGCKCFVLKSGNLDKFVGRSTDGLLLGYPAHTHGYRVLILETNKIVETCEVSFDEASPGFTQVDGLDFDETFAPVARIEAIRLLLAFAASKGFKLYQMDVKSAFLNGFIQEEVYVKQPPGFENPDFPNHVFKLSKALYGLKQAPRAWYDRLKNFLLAKGFTMGKVDKTLFVLKHGDNQLFVQIYVDDIIFGCSTHALVVDFAETMRREFEMSMMGELSYFLGLQIKQTPQGTFVHQTKYTKDLLRRFKMENCKPISTPIGSTAVLGPDEDGEAVDQKEYRSMIGSLLYLTASRPDIQFAVCLCARFQASPRASHRQAVKRIMSAINIAKNPVQYSRTKHIDIRFHFLRDHVEKGDVELQFLDTKLQLADIFTKPLDSNRFAFLRGELGIIHPFGMV

SEQ ID NO: 121196 - protein, 128 aa, Oryza sativa
  unsure (1)..(128): unsure at all Xaa locations
  Clone ID: PAT_MRT4530_24245C.1.pep
IADEEDLEVNFGASQKKKGLFSSMSNSIADHNLLDTSDIQPALKALKDRLTTNSVDAQKPHKLCDSXQSSLEGKKLRSFIRIFSTVQTAMEEAIFXYLNQTRSIDIXRDGHADTERATPYAIVFCVVN

SEQ ID NO: 121197 - protein, 1511 aa, Oryza sativa
  unsure (1)..(1511): unsure at all Xaa locations
  Clone ID: PAT_MRT4530_24246C.1.pep
RSSGGQTGATTSVRPRSIDFEAHNILLSGISRSDYDRVAHLQTAHEIWTALSNFHQGTNNIKELRRDLFKKEYIKFEMKPGEALDDYLSRFNKILSDLRSIDSSYDTNYPQSEISRHFLNGLDMSIWEMKVTSIQESVNMSTLTLDSLYTKLKTHEMNVLSRKVDSKSSALVSSSSSSDVDTSSSKPSFLAVFNATSDDXLEQIEEEDLALVANRIARAMNNARNRKRGGPNRCFECGSIDHLRSHCPKLGRGKREDKDSEKTNNHKPKGSYQERKMENLRKAFQQVCAVFEPLSDVYGESGDDDKGKNISDVCFMARGESDTEYEDNEVSAFEEAINILSEKNKKCEKMYRKQEFIIESLKSEIARLKSLIPNDDDCENCEVLMNEISKIRDVNAAHDLKNRSSLACSFVSHTRTLDELFLTKKLLQKYQISFHASLMFNMISAKKLKQPHDVLDCSTCDLNKLKLKDALGRVKYMEDVVKNNEVLSCPKCRKSKGVTVDCENCANLEKXEVSYLKNSLLRFSDGKKNLNMILDQSKALVARKENVWIVDSGCSRHMTGDKNWFSSLKKASKTESIIFGDASTSAVLATGLVKVNEKFELKNVAWIEDLKYNLLSVSQIVDENFEVHFKKTGSKVFYSCGDSVLNISRYGRVFKADFENSVSPVITRLVAKFDKDVMFWHRGLGHVGFDHLTRLSGLDLVRGLPKLKKDLDLVCTPCHHAKMISTSHTLIVSVMTDAPGQLLHMDTVGPARVQSVGGKWYVLVIVDDFSXYSWVFFMATKDEAFQHFRGLFLQLELEFPGSLKRIRSDNGVSHLHVFGCKCFVLKSRNLDKFETRSTDGLFLGNPAHTRGYRVLILETNKIVETCEVSFDEASPGTRPDIADTLSQVQGEDGRIFEDERDENDDDEVGXPVRPAHEERSDRPGSSAEGSVDAIRDGPPEITTSTSTDTERGSTSEVAAPLHIQRRHPPEQIIGNIGERTTXSKVTTHDVCANSAFVASFEPKDVSHALTDESWINAMHEELENFERNKVWTLVEPPSGHNIIGTKWVFKNKQNEDGLIVRNKARLVAQGFTQVEGLDFDETFAPVARIEAIRLLLAFAVSKGFKLYQMDVKSDFLNGFIQEEVYVKQPPGFENPDFPNHVFKLSKALYGLKQAPRAWXDRLKNFLLXKGFTMGKVDKTLFVLKHGDNQLFVQIYVDDIIFGCSTHALVVDFTETMRREFEMGMMCELSYILGLQIKQTSQGTFVHQTKYTKDLLRRFKMENCKPISTPIGSTAVLDPDEDGEAVDQKEYRSMIGSLLYLTASRPDIQFVVCLCARFQASPRASHCQAVKRIMRYLNHTLEFGIXYSTSSSICLSGYSDADFGGCRIDRKSTSGTCHFLGTSLITWSYRKQSSVAXSTTEFEYVAAASCCSQILCLLSTLKDYGLTFEKVPLFCDNISATNIAKNHVQHSRTKHIDIRFYFLMDHVEKGDVELQFXDTKLQLADIFTKPLDSNRFAFLRGELGIIHLFGMF

SEQ ID NO: 121198 - protein, 1572 aa, Oryza sativa
  unsure (1)..(1572): unsure at all Xaa locations
  Clone ID: PAT_MRT4530_24247C.1.pep
MVTSNKFTTKPHIFDGTDFSHWCSRMQSYIMAKDYDIWXRKVSHPYVIPEEINTTALKLEFEQNCKARNILLSGISRSDYDRVAHLQAAHEIWIALSNFHQGTYNIKELRRGLFKKEYIKFEMKPGEALDDYLSRFNKILSDLRSVDSAYDTNYSQSKIPRHFLNGLDMSVWEMKVTSIQESVDMSTLTLDSLYTKLKTHEMNILSHKVDSKSSXALVSSSSSLDVDASSSKSSFLAVFNATSDDQLEQIEEEDLALVANRIARAMNNARNRKRGGPNRCFECGSIDHLCSHCPKLRRGKREDKDGEKTNNNKPNNNKSKGTFKGRKIKENLRKASQQVCAAFEPLSDVDGESGDDDKGKNVSDVCFMARGESDTEYENNEVSAFEEAINILSVKNKKCEKMYRKKEFIIESLKSEIDRLKSLIPNDDDYENCEVLMNEISKIRDVNAAHDLKNRSSLACSFALHTRTLDELFLTKKLLQKYQIAFHASLMFNMISAKKLKQPHDVLDCSTCNLNKMKLKDALGRVEYIEDVVKNNEILSCPKCRKNKGVMVDCENCANLEKEDFYLKNSLLRFSYGKKNLNMILDQSKVSTHNRGLGFNPYAHNSRHPPVVSGVGARSGEILVKTDTNKTMFKSAGIMSTMSASSKSNVVHAKSHVVAHVVKSTNATDVSNHREKYTCSFCGKDGHIIGFCFRLAHKHKKEREIXFAKSMWXKSGFPSRKPVRPQWVPRSDRQPVRPAEQPRSDRALGRPXTEALTSACVLALVARKENVWIVDSVCSRHMTGDKNWFSSLKKASKTESIIFSDAATSAVLATGLVKVNEKFELKNVALVEDLKYNLLSVSQIVDENFEVHFKKTGSKVFDSCGDSVLNISRYGRVFKADFENPVSPVITCLVAKFDKDVMFWHRRLGHVGFDHLTRLSGLDLVHGLPKLKKDLDLVCTPCRHAKMVSTSHAPIVSVMTDAPGQLLHMDTVGPARVQSVGGKWYVLVIVDDFSRYSWVFFMATKDEAFQHFRGLFFRLDLEFPGSLKRIRSDNGGEFKNASFEQFWNKRGLEYEFSSPRVPQQNGVVERKNHVLVEMARTMLDEYKTPRKFWAEAINTACYISNRVFLRSKLGKTSYELRFGHQPKVSHLRVFGCKCFVLKSGNLDKFKARSTNGLFLGYPTHTRGYRVLILETNKIVETCEVSFDEASPGTRPDIAGTLSQVQGEDGHIFEDESDDDDDEVGSAGQTGRQADQIAGTPPEEVYVKQPSGFENPDFPSHVFKLSKLLYGLKQVPRAWYDRVKNFLLAKGFRMGKVDKTLFVLKHGDNQLFIQIYVDDIIFGCSTHTLVVEFAETMRRKFEMSMMGELSYFLGLQIKPTPQGIFVHQTKYTKDLLRRFKMENYKPISTPIGSTAVLDPDEDGEAVDQKEYRTSPYASHRQAVKRIMRIDRKSTSGTCHFLGTSLIAWSSRKQSSVAQSTAESEYVAAASCCSQILWLISTLKDYGLTFDKAHLFCDNTSAINIAKNPVQHSRTKHIDIRFHFLRDHVEKGDIELTFLDTKLQLADIFTKLLNSNRFAFLHGELGIIHPFGMV

SEQ ID NO: 121199 - protein, 927 aa, Oryza sativa
  Clone ID: PAT_MRT4530_24248C.1.pep
MREDAQKGDGVEVQVKQRKAIEIQDKKKKLGRRRKKTARNIIFDYNSKVIQNLNMILDQSKVLVLEVALVARKENVWIVDSGCSQHMTGDKNWFSSLKKASKTELIIFGDASTSTVLATGLVKVNEKFELKNVALVEDLKYNLLSVSQIVDENFEVHFKKTGSKVFDSCGDSVLNISRYGRVFKADFENPVSPVITCLVAKFDKDVMFWHRRLGHVGFDHLTRLSGLDLVRGLPNLKKDLDLVFFMATKDEAFQHFRGLFLRLDIEFPGSLKRIRSDNGGEFKNASFEQFCNERGLEHEFLSPRVPQQNGVVERKNRVLVEMARTMLDEYKTPRKFWAEAINTACYISNRVFLRSKLGKTSYELRFGHQPKVSHLRVFGFKCFVLKSGNLDKFEARSTDRLFLGYPAHTRGYRVLILETNKIVETCEVSFDEASPGTRPDIASTLSQVKGEDGRIFEDESEDDNDDDDVGSASQTGRQAGHTAGTPLVRPPQEERSDRPGTSGLGTVDADRDGPPKITTSTNVSHALTDESWINAMHEELENFERNKVWTLVEPPSRHNIIGTKWVFKNKQNEDGLIVRNKARLVAQGFTQVEGLDFDETFAPIARIEAIRLLLAFAASKGFKLYQMDVKSDFLNGFIQEEVYVKQPPGFENLDFSNHVFKLSKALYGLKQAPRAWYDRLKNFLLAKGFIMGKVDKTLFVLKHSDNQLFVQIYVDDIIFGCSSHALVVEFAETMHREFEMSMMGELSYFLGLQIKQTPQGTFVHQTKYTKDLLRRFKMENCKPILTPIGSTAMLDPDEDGEAVDQKEYRSMIGSLLYLTTSRPDIPFAILWLLSTLKDYGLTFEKVSLFCDNTSAINIAKNPVQHSRTKHIDIRFQFLRDHVKKGDVELQFLDTKLQLADIFTKLLDSNRFAFLRGELGIIHPFGMV

SEQ ID NO: 121200 - protein, 173 aa, Oryza sativa
  unsure (1)..(173): unsure at all Xaa locations
  Clone ID: PAT_MRT4530_24249C.1.pep
LLISDELHIYIYTYIYIYMYIYICVYIYIYMCIYIYICVYIYICIYIYVYIYVYIYICIYIYVYMCIYIYIYIYIYIYIYIXTHTYLNCGVASIASFAMPCIHMATHNTXIYIYIYIYIYIYIYIYIYIYIYIYIYIYFYIYIYIYIYIYICVCVCVHIYIRTYVRTYIHTHN

SEQ ID NO: 121201 - protein, 111 aa, Oryza sativa
  Clone ID: PAT_MRT4530_2424C.1.pep
RVFDQIDECVRIDGVRACYFSRKMGGRAPGMACPRRETCRASCINELANARGEGGCVLGALPLPRSLTRCARAFGCGERYQLTQRRENGGCPPEETLGRALGSHPDALREN

SEQ ID NO: 121202 - protein, 1253 aa, Oryza sativa
  Clone ID: PAT_MRT4530_24250C.1.pep
MKPGEALDDYLSRFIKILSDLRSVDSSYDTNYPQSEISRHFLNGLDMSIWEMKVTSIQESVNMTTLTLDSLYIKLKTHKMNVLSRKVDSKSSALVSSSSSLDVDASSSKPSFLAVFNATSDDQLEQIEEEDLALVANRIARAMNNARNRKRGGPNRCFECGSIDHLRSHCPKLGRGKDKDGEKSNNSKPKDSSQGRKLENLRKAFQEVCAAFEPLSDVDGESGDDDKGKNISDVCFMARGESDTEYEYNELKQPHDVLDCSTCNLNKLKLKDALGHVEYIEDVVENNEVLSCPKCRKSKGVMVDCEICANLENVVKEPQNDFGSIKGVGARSGEILVKPDTNKTVYKSAGIMSTMSASSSKSNVVHAKSPVVACVAKSSNATNVSNHREKYTCSFCDKDGHIVSFCFRLAHKQKKEREIAFAKSKWQKIGFSLEETSQTAVGPAVRPATGQTGYRASVRPGTGQTGGTEAALVARKENVWIVDSGCSRHMTGDKNWFSSLKKASKTESIIFGDASTSAVLATVKKKFEVHFKKTGSKVFDSCGDAVLNISHYGRVFKTDFENPVSPVITCLVAKFDKDVMFWHRRLGHVGFDHLTRLSGLDLVRGLPKLKKDLDLFCTPCRHAKMVASSHDPIVSVMTDAPGQLLHMDTVGPARVKSVGGKWYVLVIVDDFSQYSWVFFMATKDEAFQHFCGLFLRLELEFPGSLKRIRSDNGGTLSQVQGEDGRSFEDESDDDYNNEVGSAGQTGRQAGQTAGTPPVRPPQEERSDRPGSSGSGIVDADRDGPPEITTSTNTDTERGSTSEVAAPLHFQRRHPPEQIIGNIGEWTTRSKVTTHDVCENSACVASFEPKDVSHALTDESWINAMHEELENFERNKVWTLVEPPSGHNIIGTKWVFKNKQNEDGLIVRNKARLVAQGFTQVEGLDFDETFALIARIEAIRLLLAFAASKGFKLYQMDVKSAFLNGFIQEEVYVKQPPGFENPDFSNHVFKLSKALYGLKQAPRAWYDRLNNFLLAKGFIMGKVDKTLFVLKHGDNQLFVQIYVDDIIFGCSTHALVVEFAETMRREFAMSMMGELSYFLVLQIKQTPQGTFVHQTKYTKVLLRQFKMENCKPISTPIGSTAVLDPDEDREAVDQKEYRSMIGSLLYLTASRPDIQFAVCLCACFQASPRASHRQAVKRIMSAINIDKNLVQHSRTKHIDIRFYFLRDHVEKGDVEFQFLDTKLQIADIFTKPLDSNHFAFLRGELGIIHPFGMV

SEQ ID NO: 121203 - protein, 1321 aa, Oryza sativa
  unsure (1)..(1321): unsure at all Xaa locations
  Clone ID: PAT_MRT4530_24251C.1.pep
MATPARFSTKPHLFDGTNFSHWCSRMQSYIMAEDYDIWRKVSHLYVIPEAINTAVEKTAFEQNCKARNILLSGISHSDYDRVAHLQTAHEIWVALSNFHQGTNNIKELHRDLFKNEYIKFEMKPGEALDDYLSRFNKILSDLRSVDSSYDANYPQSEISRHFLNGLDMSIWEMKVTSIQESVNMSTLTLDSLHTKLKTHKMNVLSRKANSKSSALVSSSSSLYVDASSSKPSFIAVFNATSDDQLEQIEEEDLALVANRIARAXIMPGTGKEVVQIVALNVVQLIIFIRIVLXLGRGKREDKEGEKTSNNKPNNNKPKGSSQERKMENLRKAFQQVCAAFEPLSDVDGENGDDDKGKNISDVCFMARGESDTEFEDNEVSYLKNSLQRFSDGKKNLNKINQRLVHKQKKEREIAFAKSKWQKSGVPSRKPVRPQWVPRSDRRQALVARKENVWIVDSGCSRHMTGDKNWFSSLKKASKTESIIFGDASTSAVLATGLVKVNEKFELKNVALVEDLKYNLLSVSQIVDEEFKVHFKKTGSKVFDSRGDSVMNISRYGRVFKADFENPVSPVITCLVAKFDKDVMFWHRRLGHVGFDHFTRLSRLDLVRGLPKLKKDLDLVCTPCRHAKMVSTSHAPIVSVMTDAPGQLLHMDTVGLARVQSVGGKWYVLVIVDDFSIYSWVFFMATKDEAFQHFCGLFLRLNLEFPGSLKRIRSDNGVFLRSKLGKTSYEHRFGHQPKVSHLRVFGCKCFVLKSGNLDKFEARSTDGLFLGYPTHTRGYRVLILETNKILETCEVSFDEASPGTRPEISGTLSQVQGENGCIFEDESDYDDDDEVDSADQTGRQAGQTAGTPPVRLAQEVWSDRPGSSAEGSVDADRDGPPEITTSTSTDTERFTQVEDLDFDETFAPVARIEAIRLLLAFAASKGFKLYQMDVKSAFLNGFIQDKVYVKQPLGFENPDFPNHVFKLSKALYGLKQVPRACYDRLKNFLLVKGFTMGKVYKTPFVLKHDDNQLFVHIYVDDIIFGCSTHALVVDFAETMRREFEMSMMANTSRYFCASTKYTKDLLRRFKMENCKPISTPIGSTAVLDPDEDGEAVDQKEYRSMIGSLLYLTASRPDIQFAVCLCVCFQASPRASHRQAVKRIMRYLNHTLEFGIWYSTSSSICLSGYSNADFGGCRINRKSTSGTCHFLGTSLIAWSSRKQSSVAQSTAESEYVAAASCCSQILWLLSTLKDYGLTFEKVPLFCDNTSVINIAKNLVQHSRTKHIDICFHFLRDHVEKGDVELQFLDTKIQIADIFTKPLDSNRFAFLHGELGIIHPFGMV

SEQ ID NO: 121204 - protein, 101 aa, Oryza sativa
  Clone ID: PAT_MRT4530_24252C.1.pep
MWPLEEEAQKSLTTFHLNVGSWISIISWFARGVRLGIESSMWNTAVCRGMSRGAEQYYGGAAWTLEDPYSVVEVRHISAEEVVLVEACVEVASKEANANAA

SEQ ID NO: 121205 - protein, 1513 aa, Oryza sativa
  Clone ID: PAT_MRT4530_24253C.1.pep
MATPARFSTKPHVFDGTDFSHWCSRMQSYIMAEDYDIWRKVSHPYVIPEAINTAAEKTAFEKNCKAPNILLSGTNNFKEIRRDLFKKEYIKFEMKPGEVLDDYLSRFNKILSDLRSVDSSYDANYSQYEISRHFLNGLDMSIWEMKVISIQESVNMSTLTLDSLYIKLKTHEMNVLFRKVDSKSSALVSSSSSLDVDASSSKSSFLAVFNATSDDQLEQIEEEDLALVANRISRVMNNARNRKRGGPNRCFECGSIDHFRLHCPKLGRGKREDKDGEKTNNNKPNNNKSKGSSQGRKLDNLRKAFQQVCAVFEPLSDVDGESGDDDKGKNISDVCFMTRGESDTEYEDNEVSAFEEAINILSEKNKKCEKMYRKQEFIIESLKSEIARLKSVIPNDDDCENCEVLMNEISKIRDVNAAHDLKNRSSLACSFALDTRTLDELFLAKKLLQKYQLAFHASLMFNMISAKKLKQPHDVLDCSTCNLNKLKLKDALGRVEYMEDVVKNNEGLSCPKCRKSKGIMVDCENCANLEKEVSYLKNSLLRFSDGKKNLNMILDQSKVSTRNRGLGFNPIAHNSRHPPVVLSVGARGGVILVKPDTNKTMFKSAGIMSTLNASSSKSNVVHAKSPVVACVAKSSNATNVSNHREKYTCSFCGKDGYIVGFCFRLAHKQKKEREIAFAKSKWQKYGFPSRKPVRPQWVPRSDRRPVRPASKHRSNRAPVRPAVQKRSDRPPVRPATIPRLGHVGFDHLTRLSGLDLVRGLSKLKKDLDLVCTPSRHAKMVSTSHAPIVSVMTDAPGQLLHMDTVGPARVQSVGGKWYVLVIVDDFSRYSWVFFMATKDEAFQHFHGLFLRLEFEFPGSLKRIRSDNGGEFKNASFEQFCNERGLEHEFSYPRVPQQNGVVERKNRVLVEMARTMLDEYKTPRKFWAEAINTACYISNRVFLRSKLGKTSYELRFGHQLKVSHLCVFGCKCFVLKSGNLDKFEARSTDGLFLGYHAHTRGYRVLILQTNKIVETCEVSFDEASPGTRPDIAGTLSQVQREDGRIFEDESDNNDDDEEVRLDRPGSSAEGSVDAVRDGPPEITTSTSTGTERGSTAEVAAPLHIQRRHPPEQIIGNIGERTTRSKEEVYVKQPPGFKNPDFPNHVFKLSKALYGLKQAPRAWYDRLKNFLLVKGFTMGKVDKTLFVLKHGDNQLFVQIYVDDIVFSCSTHALVVDFAETMHREFEMSLMGELSYFLGLQIKQTPQGTFVHQTKYTKDLLRRFKMENCKPISTPIGSTAVLDPDEDGEAVDQKEYRSMIGSLLYLTASRPDIQYVVCLCARFQASPRASHRQAVKRIMRYLNHTLEFGIWYSTSSSICLSGYSDADFGGCIIDRKNTSGTCHFLGTSLIAWSSRKQSSVAQSTAESEYVAAASCCSHILWLLFTLKDYGLTFEKVPLFCDNTSAINIAKNPVQHSRTKHIDIRFHFLRDHVEKGDVELQFLDTKLQIADIFTKPLDSNRFAFLRGELGIIHPFGMV

SEQ ID NO: 121206 - protein, 776 aa, Oryza sativa
  Clone ID: PAT_MRT4530_24254C.1.pep
MSTLTLDSLYTKLKTHEMNVLSRKVDSKSNALVSSSSSLDVDASSSTSSFLAVFNATSDDQLEQIEEEDLALVANRIARAMNNARNRKRGGPNRCFECGSIDHLRSHCPKLGRGKREDKDGEKTNNNKPNNNRSKRSHQGRKMENLRKAFQQVCAAFEPLSDVDGESGDDDKGKSVSDVCFMARGESDTEYEDNEVSDEAINILSAKNKKCEKMYKKQEFFIESLKSKIDRLKSLIPNDDDCENCELKQPHDVLDCSTCNLNKMKLKDDLGRVEYMEDVVKNNEVLSCPKCRKGKGVMVDCENCANLEKEVSYLNNSLLRFSDGKKNLNMILDQSKVLVLEVALVARKENVWIVDSGCSRHMTSDKNWFSSLKKASKTESIIFGDAATSAILATGMVKVNDKFELKNVALVEDLKLGHVGFDHLTRLSGLDLVRGLTKLKKDHDLVCTPCRNAKMVSTSHTPIVSVMTDAPGQLLHMDTVGPARVQSVGGKWYVLVIVDDFSRYSWVFVMATKDEAFQHFCGLFLRLELEFPGTLKRIRSDNGGEFKNASFEQFCNERGLLQEFSSPRVPQQNGVVERKNRVLVEMARTMLDEYKTPRKFWAEAINTACYISNRVFLRSKLRFRHQPKVSHLRVFGCKCFVLKSGNLDKFEARSTDGLFLGYAAHTRGYRVLILGTNKIVQTCEVSFDEASLGTRPDIAGTPSQVQGEDGRIFQDESDYDDDDEGRRLRVLLMLIEMVLQKLLLRSVLIQNVDQLQKLLLLCTFNDDIRRNKLLVI

SEQ ID NO: 121207 - protein, 596 aa, Oryza sativa
  Clone ID: PAT_MRT4530_24255C.1.pep
MAVRFSTKPHVFDGTDFDRYRVQSYIMAEDYDIWRKVSHPYVISKQLSTAALKTEFEQNCKARNILLSGISRSDYDRVAHFQTAHEIWIALSNFHQGTNNIKELRRDLFKKEYIKFEMKPREALDDYLFRFNKILSDIRSLDFSYDVNYTQSEISRHFLNNLDRSIWEMKVTSILESIDMTTSTLDSLYTKLKTHGMNILSRKVDSKSSALVSSSTLDVDASSSKSSFLALFNATSDDQLEQIEEEDLALVANRIARAMNNVRFRKRGGPNRCFECGSIDHLHARCPKLGRGRREDNNAREKTNDNKPKGTFKGEKVKEVLKKAFDQVYAAFEPLSDVDGDSGDEDKGKNISGVCFMALGELDSECEDNEVSALEEAINILRAKNMKCEKMYRKQEFIIESLNSKIARLKSLIPNDDDCKNYWLINRKRRERLLLQNQSGKNLVFPRGNRLDRSGSRGQTGYCAAVRSGTGQTGGTEAVRPATVPRSDRPRRNFAENSQTVFARGYMPIGSSGRVPQYWIPKFLLSSNPSTEASTSSCVYALVARKENVWIVDSGCSRHMTGNKNWFSSLKQASKTESIIFGDASTSAVLATGLVK

SEQ ID NO: 121208 - protein, 99 aa, Oryza sativa
  unsure (1)..(99): unsure at all Xaa locations
  Clone ID: PAT_MRT4530_24256C.1.pep
IQLNPKARPHQNKNKAKGTLSMRGNHLEAYQLNPMSYTKSYCRNQLYRLTQSDSDPADPXIVADLDSSRFLLCSRIDLRLRFHLDLILISNADIAKFGR

SEQ ID NO: 121209 - protein, 103 aa, Oryza sativa
  Clone ID: PAT_MRT4530_24257C.1.pep
YNIMRLACPILLSNVFSQSFRWLTVDDQIYQRLQNVCVFLKYVPLTLRIEYDWNNKWNMGILQKELGYRLHRKSLGREERISPRPSSVLFLEKKVCVSFLLFC

SEQ ID NO: 121210 - protein, 714 aa, Oryza sativa
  Clone ID: PAT_MRT4530_24258C.1.pep
MADAVQYRLERMSDELDDLERRGLFTRAELAEVVRRRRDFEFRLRRRSPLRSDFLDYIAYELRLDALRDLRKRAIIRATPDTTDHDADATDNDSSKKKKKKRNKGKAKKWKKSVSDIAGVLRVLDIYRMATVRYKGDLDLWFRYLEFCRDKRHGRMKQASLPRTFPPSCLILPITSFSILCGGGDMALAQAIRYHPKVPGLWIYAAAWEFDQNLNVAAARALMQTGLRSCPESEDMWIEYLRMELTYLNKLKARKVALGEDVKTLQKKNNDASTWKEENKELFMSLNEQDEGPKEPGSQGVALEGKEDLFWQQGLLIIQTIYHGATKALPSSLTLRKKFLEILSSVDLAHSDELKVEVMDDLKKEFSDSEDYWDWLARLQLSDSTSSSNLNRMEALSNKLNKSIQVYDEAVRRLPTSRMYSLYAKFWMGVLFADTEDSISLFHGGEFDASGFTSCILKVYQNAESSGCLTEDLACQYVSLYLRLGGLEEAPGRLEEARNLAKKLCNGPLSHAADLWNLRASIEMKSLATSTGISSFSKENLSSLFDLFNVALPKLPIPEAEELWHTAMKLFSHEKVYFEKLVKCAMLSLSSAGGNDCGASVSSAIVGWILQRDGIKQARKMYKRFLALPRPSFKFFQYCIELETNLASIGNQDSLVNARKLYDAALDLYPQERELWRNYYNMELKLGTSETANAIYWRARKVLGDSSALDIPHS

SEQ ID NO: 121211 - protein, 530 aa, Oryza sativa
  Clone ID: PAT_MRT4530_24259C.1.pep
MPSAMNMITAAFRRYLGCFSAGSTHRRRRGAAEPVLAGSLTLPAAAGGDNAARRLDVVVPAPSRPDGVTVSGEDFIGSLPGHVRSAIVSRLPVADAAARTGVLSSSQWNGLWSSTPLVFQDSDLILAANFTSVAPVAATVSRVIENHPGPFHTVTLTSYFPESERDTFAGWIRAVAAKGVRDLTLHNIPWSGLHVLPADLLQCCAALERLRVCVWRFPATAGVLHPGGGDGDGAAPPSFPRLRELVLNRSAIEEADLENVVACSPALRTLVLAFSRGAPGRVRLASGSLRCVVLCQSLVDELAVVAAPLLERIVLRWCASGTHHGHLMRIRISRASSIKAIGYLKPTCHGLHIDATVIKPGITASPDEVAVPSVKILGLQVRFGVAAEATMVSCMLRCFPNVETLHIMPIEDPQSTQLDDFEFWEEINSVECVRSSIKKVVFHGFSWKNSEIAFINSIAEGGLVLEKICIFQSRHGAAPDDDELNAKLSMVASLNIGLGRTEIIFSGEDPTWCYRAAADLSRADPFDCCR

SEQ ID NO: 121212 - protein, 114 aa, Oryza sativa
  unsure (1)..(114): unsure at all Xaa locations
  Clone ID: PAT_MRT4530_2425C.1.pep
MGHTNLHSAGSRCNVEARLFADDATGVRPPGMYLAGADVPTLGVPTPALARDECLEALIIPTGRGEACVKPPGVGAPQPPGGRNGSGPTPRGDRGRGGLINLGPDPPXGVRPRG

SEQ ID NO: 121213 - protein, 148 aa, Oryza sativa
  unsure (1)..(148): unsure at all Xaa locations
  Clone ID: PAT_MRT4530_24260C.1.pep
KPDPASPPKAPLAKKGERXEKFRLGDEAGRGHRPPTTGGCDAIATAAKGEGRRCSGAVGGGAVVAALARRDRRHHHRRCNAARRRAPRLLLLHLRPRFLLRRALSPLQAAAEGRGAAVGTPPQLASRPASYWRRPPQHGPTFFIILCV

SEQ ID NO: 121214 - protein, 1268 aa, Oryza sativa
  unsure (1)..(1268): unsure at all Xaa locations
  Clone ID: PAT_MRT4530_24261C.1.pep
MAALKKQVADLKGVRMLDQQRNIYLGQAGEGNQYAEAVLKGPRLEIPLFSGEDPIDWLKQCEKFFEITGTPLDQWVNLAVAHLNGRALKWFGGIGLPWQVIAWPQWCSMVCTRFSAASEHEAIELFQNVKQFGTTVEQYIDKGVLXVDLVKRDHPYLQEQYLTSCFIGGLRADIKYDVXWAANARKMVGNFNRNRNQNPLGGNQGRNANHRGQNRGEGDRREEKKCWFCKEPWFPRHQXYALRNSYPLKNTDTKKVVVAGGGELKTDVMVPDISYEIQGECFTNQFKLLPLKGYDIIWGADWIYNYSPISLDLKQRILGITKGNKVILLQDFTKPNKHFQISGKRLEKMLKKGALGMVIQVNVMSETVEEEGHVIPEDISDIIQQFPAVLKEPKGLPPKRECDHVINLQSGAVPPNIRPYRVPHYQKEAMENIINELIESKEIQTSDSPYSSPAVMVRKKDGSWRMCVDYRQLNAQTVKNKFPMPIIEDLLDELNGARIFSKLDLRSGYHQIRMAEKDVHKTAFRTHLGHYEYQVMPFGLTNDPATFQSLMNHVLAPFLRRFVLVFFDDILIYSKTRAEHLEHVKLVMQALQDNHLVIKLKKCAFGLASVSYLGHVISQDGVATDPKKVGKIKNWPTPKDVTDVRKFLGMTGYYRRFIQGYGTICRPIHDMLKKNGFQWGADQTTAFETLKHKLRTSPVLALPDFDQAFTIEADACGVGIGAVLMQGGRPIAFFSKALGPKAAGQSIYEKEAMAILEALKKWRHYVLGSKLIIKTDQQSLKFMMGQRLVEGIQHKLLLKLMEYDYTIEYKSGKENLVADALSRLPQKEAVADRCHPMTVVIPEWIVDIQRSYENDVQAHKILSLIGTAADPDREYKLEAGXAKIQREDLCGRSHGYQKAIDHNXHSSSFGGHSEIPDMAWTHITMDFIEGLPKSQGKDVILVVVDRLTKYAHFIALAHPYDVEQVVEAFMNNIHKLHGMPMVIITDRDRIFTSSLFQEIFKAMKVKLRFSTAYHPQMDGQTERVNQCLESYLRNMTFQEPHKWYSWLALAEWWYNTTFHTAIQMTPFKAMYGYSPPQINEFSVPCNISEEARVTIEEKEAILNKLKNSLADAQHRMKYFADKNRTERNLEVGDMVYLKLKPYRQSAFGIRGSLKLRSKFYGPFKVLQKIGQLAYKLQLPDDAQIHPVFHVSQLKKHLGKHAIPMSNLPSVGPDGQIKTEPLAVLQRRMVPRKGVAVTQWLILWQNLSPAEATWEDASVIQAMFPSFNP

SEQ ID NO: 121215 - protein, 252 aa, Oryza sativa
  unsure (1)..(252): unsure at all Xaa locations
  Clone ID: PAT_MRT4530_24262C.1.pep
TQLRCKVNWKRVCRPIKYGGLGVSNLRIIGKALRLRWLWYEWNXTDKPWIGMPTPCDDQDKELFAASTTVFIGDXKKAFFWESPWASYSTLKAMAPNLYCHSKRKKRTVVKALDGNKWIDDIRHNLTTSLLTKFFQVFELIXSLDTTLTQGVEDNIRWKWTPPGTYTAKSAYQMQFLGSTXSASANAVWKCWAPSKCEFFTWLLLQNRIWTADRLQQREWPNNYFCQLCFRNLETVHPSSTNVQARGQSGTL

SEQ ID NO: 121216 - protein, 79 aa, Oryza sativa
  Clone ID: PAT_MRT4530_24263C.1.pep
MCPNDTEVRQRYGATSLINGRSCRPLPRRPPPRRPPTRYPPRGPAVRRRAAAPPTTVRPPPGPAPACAPPVRPPATRWD

SEQ ID NO: 121217 - protein, 33 aa, Oryza sativa
  Clone ID: PAT_MRT4530_24264C.1.pep
MADLSDGSAKLREDTERHLLDGKLRVAVASKAS

SEQ ID NO: 121218 - protein, 51 aa, Oryza sativa
  Clone ID: PAT_MRT4530_24265C.1.pep
LHDTFLCCMLLLRFRLVIDYEHIWGELYFAVCSVYSFILNLLAVDIPSVFV

SEQ ID NO: 121219 - protein, 74 aa, Oryza sativa
  unsure (1)..(74): unsure at all Xaa locations
  Clone ID: PAT_MRT4530_24266C.1.pep
NISISSESMSVMESLITDMFRTLGKXTPCLARRSXQLTITCPKIKPSVIMVLRVKLFLHSVSQGVKSVIQFNCT

SEQ ID NO: 121220 - protein, 268 aa, Oryza sativa
  Clone ID: PAT_MRT4530_24267C.1.pep
MEADAEVAHPATATACREGKTLGNGAGGAETETETETVAADGTEAAEGGGLRAAARVEGDWDLWRGRRCSDLVADGDSTRLHRRSATATMSRTNFRVAPTEQPGRPKNFATKDLPPADPAATGEAVTGGGAGSGATPALLVSSPSSPSPLLFLPFSFGSSDSVAVFQILAITTMLCIGWRCGALWLAGGVASSSVLLDGATWQDSPGSGKQHSGGDADRGGGGARETGAKPSIPSSVIGGIGASSPSLPPSQATLVGGGGGAIGQRQG

SEQ ID NO: 121221 - protein, 289 aa, Oryza sativa
  Clone ID: PAT_MRT4530_24268C.1.pep
MATIVVPPVTPSPAEDADALLKAFQGWGTDEQAVIGVLAHRDATQRKQIRLTYEENYNENLIQRLQSELSGDLERAMYHWVLDPVERQAVMVNTATKCIHEDYAVIVEIACTNSSSELLALLLALVSTYRYDGDEVNDALAKSEAKILHETVTNGDTDHGELIRIVGTRSRAQLNATFSWFRDERGTSITKALQHGADPTGYSHALRTALRCISDANKYFVKVLRNAMHKSGTNEDSLTRVIVLHAEKDLKGIKDAFQKRASVALEKAIGNDTSGDYKSFLMALLGSGI

SEQ ID NO: 121222 - protein, 115 aa, Oryza sativa
  Clone ID: PAT_MRT4530_24269C.1.pep
TSVCTRIGRIGLRNHALLRRLHGRAGDQVSWERKAHSLLVNVYFVFTNMSNTGDNGNTGDKEKEVPVNTNGGNTASNSSGGPFLGSTAFVVIAAATTQPSFAVITAPQPNPPPSP

SEQ ID NO: 121223 - protein, 135 aa, Oryza sativa
  unsure (1)..(135): unsure at all Xaa locations
  Clone ID: PAT_MRT4530_2426C.1.pep
RRRRDDHAXXGGVAGAXGGVRADEGVVSPDAGGERMVPAVVDPHRRRRRRSELRRRRRRRGHVPWSAARRRGHHHTKKQSIDQFNSIQHRHQSKKREETTAPISLSLTQSWFGSMDTELGIIPTRSLPLLSPLMT

SEQ ID NO: 121224 - protein, 88 aa, Oryza sativa
  Clone ID: PAT_MRT4530_24270C.1.pep
LRWASPISPRRSRSLKVNKIKIGRPRHVLLCSDFLRTRSISHRQGAPSRTSPNHLADPVTINAWAYPTYFVPRQVKWGYRSLAVVNCG

SEQ ID NO: 121225 - protein, 530 aa, Oryza sativa
  unsure (1)..(530): unsure at all Xaa locations
  Clone ID: PAT_MRT4530_24271C.1.pep
MPRRARARGGGGGGGEEVKVEDDFIDSVLNFGGGGGGEEDGDDGEEEQQQQQAAASAIGKESTSHLFPPLPRGAHLPIPPSARSPIAPGGLFGHPVMDHAELTTEQVLKRDIPWESYMANKLISGTCLQLLRRYDHKPESQRGPLLDEDGPSYVRVFLNILRNISKEDTVEYVLALIDEMLAVNPKRAALFYDNSLSGEDIYDPFLRLLLKGNWFVQEKSCKILTQIISARTKMQNGIVPNGXVDNLKSKLTYPTHPNCSVPTAMHCLATLLREQYVRALFVQADGVKLLIPLISPASTQQSIQLLYETCLCIWLLSFYDAAVDYLSTTRVMPRLVEVVKGSTKEKVVRVVIMSIRNLLAKGAFAAQMIDLGLPHIVQNLKAQAWTDEDLLDALNQLEIGLKDNLKKLSSFEKYKQQVLLGHLDWSPMHKDPSFWRENINNFEENDFQILRVLMTIIDTSADTTALAVACYDLSQFLQYHPSGRIVVADLKAKDRVMKLMNHENAEVRKNALLCVQRLFLGAKYASFLQT

SEQ ID NO: 121226 - protein, 57 aa, Oryza sativa
  unsure (1)..(57): unsure at all Xaa locations
  Clone ID: PAT_MRT4530_24272C.1.pep
MGLDTGPENFERLRGSDXVTLXWAMLVVPGMLVTEALKLNNWVQAHEWAGRDRRAGH

SEQ ID NO: 121227 - protein, 227 aa, Oryza sativa
  unsure (1)..(227): unsure at all Xaa locations
  Clone ID: PAT_MRT4530_24273C.1.pep
MAAGAGGDGGGELKLLGTWASPFVQRVRLALNLKGLAYEFIEEEIGGGKSELLLASNPVHKKVPVLLHRSNPICESQVIVQYLDDRARVRGAVEGEGVLLRRGQAGVRRRGARRVRGLDARVRHGGRRGGARRRAHPAAGGVGGARRGARPRQGRHPRRRTRRRALALREEEVDTVTICVVLXCLYRQNKCGPKVVIISEHSCRFLLQFKCLCCFCLDCGDVRIYGS

SEQ ID NO: 121228 - protein, 130 aa, Oryza sativa
  Clone ID: PAT_MRT4530_24274C.1.pep
MAIQQHLSVEIEVVASVLRDPRSGGKDDDESTRSKTRAFDATTQATVEEDELTGAEEQGHDEISRSEVHGSRSKPLPRSNVTMVADSCTRRMGHQHELDHSARSGKREEEVGRSSWSSGRNLLGGGCKRC

SEQ ID NO: 121229 - protein, 460 aa, Oryza sativa
  unsure (1)..(460): unsure at all Xaa locations
  Clone ID: PAT_MRT4530_24275C.1.pep
GTLSQDQGEDGRIFEDESDNNDDDEVGSAGQIRRXAGQTAGTPPVRLAQEVRSDRPGLSAEGSVDAVRDGPPKTTTSTNTDTERGSTSEVAGPLHIQRRHPPEQIXIGNIASFEPKDVSHALTDESWINAMYEELENFDRNKVWTLVEPPSGHNIIGTKWVFKNKQNEDGLIEEVYVKQPPGFENPDFPNHVFKLSKVLYGLKQAPRAWYDRLKNFLLAKGFTIGKVDKTLFIPKHGDNQLFVQIYVDDIIFGCSTHALVVDFAETMRREFEMSMMSELSYFLGLQIKQTPQGTFVHQTKYTKDLLRRFKMENCKPISTPIGSTAVLNPDEDGQAVDKKEYRSMIRSLLYLTASRSDIQFAILWLLSTLKYHGLTFEKVPLFCDNSSAINIAKNPVQHSRTKHIDIRFHFLRDHVEKGDVELPFLDTKLQLADIFTKPLDSNRFAFLRGELGTIHPFGMV

SEQ ID NO: 121230 - protein, 538 aa, Oryza sativa
  Clone ID: PAT_MRT4530_24276C.1.pep
MPSRKRGRGPTKGDDPAPDEAAPPRKPSPPLGSGSRRARNHVPPPLGVGGDGREEGVDFVSHLPDAVLGIIISLLPSKDGVLLAHAGPVRRFCIPAQQIHERPAMVEGWLTSPRFNNLEELEFTEDLCYMRQLLPLPPSIFRFSNTLRVAAFSQCRVPDCTDLMLQFPHLKLLSLRQVKISETSLHSIIAGCPALEGLLLRNSYGFRCLRINSPTTRGVAFHSPYCWSHGDGEGFEVVNFTTPVSSVKVLSLVMKNLSLDRVIMNRKRGGPKSCFECGSIDHLRSHCPKLGRGKREDKDGEKTNNNKPNNNKSKGSSQGRKLENLRKAFQQVCAAFEPLSDVDGESRDDDKGKNISDVCFMACGESDTEYEDNEALVARKENVWIVDSGCSRHMTGDKNWFSSLKKASKTESIIFGDASTSVVLATGLVKINKNFELKNVALVEDLKYNLLSVSQIVDENFEVHFKKTGSKVFDSCGDSVLNISRYERMFKADFKNPVSPVITCLVAKFDKDVMFWHRRLGHVGFDYFTRLSGLDLVR

SEQ ID NO: 121231 - protein, 252 aa, Oryza sativa
  Clone ID: PAT_MRT4530_24277C.1.pep
MALQQRPGMLGIGCSNVLARARVQQCLAAASHSNMPCLPVLLHVNGSKKQGSSFLSSQRIGLSRRRRRRDLSGVVVAEVSAAAGVTPASSSSSPGGISVSDVLWPSAGAFLAMAVLGRMDQMMAYKGVSLTIAPLGAVCDVLFTAPGSPAAKKYNMFVAQIGCAAFGVLALSLFGPGWLARGAALSASIAFMTITGASHPPAASLPLLFIDGPKFHHLQLWYALFPGAAGCIILCLIEEEKKQIDRYLIVNL

SEQ ID NO: 121232 - protein, 80 aa, Oryza sativa
  Clone ID: PAT_MRT4530_24278C.1.pep
FGGESRSDPPIGSESRPIFVSIGFGFGPRISSLVENYLWDFADSTSVARVCEGSDSWLLRATERPVHYEGHRKLAHKVGA

SEQ ID NO: 121233 - protein, 1302 aa, Oryza sativa
  Clone ID: PAT_MRT4530_24279C.1.pep
MGCGVEFGRSPNLRSNRRHTGGQTGGATLVRPAARARSDRRIKMQSYIMAENYDIWRKVSHPYVIPEAINTDALKTEFENNCKARNILLSGISRSDYVRVAHLETAHEIWNALKNFHQGTNNIKELRRDLFKKEYIKFEMKSGEALDDYLSRFNKILSDLRSVDSSYDANYPQSEISCHFLNGLDMSIWEMKVTSIQESVNMSTLTLDSLYTKLKTHEMNILSRKVDSKSSALVSSSSSLVVDASSSMPFFLAAFNAISDDQLERIEEEDLALVANRIARAMNNARNRKRGGPNRCFECGLIDHLHSHCPKLGRGKREDKDGEKTNNNKPNNYKSKGSNQGRKMENLRKVFQQVCAAFEPLSDVDGESGDDDKGKNVSDICFMARGESDTEYEDNELKQPHDVLDCSTCNLNKMKLKDALGRVEYMEDVVKNNEVFSCPKCRKSKGIMVDCENCANLEKEVSYLKNSLLRFSDGKKNLNMILDQSKVLVLEEALVARKENVWIVDSGCSRHMTGDKNWFSSLKKASKTESIVFADASTSAVVATGLVKVNEKFELKNVVLVKDLKYNLLSVSQIVDENFEVHFKKTGSKVFDSCGDSVLNISRYGRVFKADFENSVSPVITFLVAKFDKDVMFWHRRLGHVGFDHLTRLSGLDLVRGLPKLKKDLDLVCTPCRHAKMVSTSHAPIVSVMTDAPGQLLHMDTVGPARVQSVGGTLSQVQGEDGRIFEDESDYDDDDESAGQTGRQAGQTAGTPPVRPAHEERSDRPGSSGSDTVDADRDGPPEKSTSTSTETERGSTSEVAAPLHIQRRHPPEQIIGNIGERTTRSKVTAHDVCANSAFVTSFEPKDVSLALTDESWINAMHKELENFERNKVWTLVEPPSGYNVIGTKWVFKNKQNEDGLIMRNKARLVAQGFTQVEGLDFDETFAPVARIEAIRLLLAFAASKAPRAWYDRLKNFLLAKGFIMGKVDKTLFVLKHGDNQLFVQIYVDDIIFGCSTHALVVDFAETMRREFEMSMMGELSYFLGLQIKQTPQGTFVHQTKYTKDLLRRFKMENCKPISTPIGSTAVLDPDEDGEAVDQKEYRSMIGSLLYLTASRPDIQFAVCLCARFQASPRASHRQAVKRIMRYLNHTLEFGIWYSTSSSICLSGYSDADFGGCRIDRKSTSGTCHFLGTSLIAWSSRKQSSIAQSTAESEYVAAASCCSQILWLLSTLKDYGLTFEKIPLFCDNTSAINIAKNPVQHSRTKHIDIRFHFLRDHVEKGDVELQFLDTKLQIADIFTKPLDSNRFAFLRGELGVIHPFGMV

SEQ ID NO: 121234 - protein, 63 aa, Oryza sativa
  Clone ID: PAT_MRT4530_2427C.1.pep
WQLSLWNELRKYSPHQPRLASLCQLAIGKGIPTSTAIFIWTKSMKMDSNISDEHPSVFFMSTK

SEQ ID NO: 121235 - protein, 119 aa, Oryza sativa
  unsure (1)..(119): unsure at all Xaa locations
  Clone ID: PAT_MRT4530_24280C.1.pep
KWKQVRVLSLLGASFIESSRCYYYYYYHYIVFPQLRGAKTRFQTVLKTRSRTLQYTNQRRQNRRQQGSSGIINSIGNRTFLXCTLDTCIHFPGSWPSLSLATGKQKTKSRATDKQYACL

SEQ ID NO: 121236 - protein, 535 aa, Oryza sativa
  Clone ID: PAT_MRT4530_24281C.1.pep
MGEPLLTTLSMENTNSHPCTRLSMDPAGSHAASGDSSGGGGGGGSTGAGGGGGGGGGDRELFIIPRRESAHPGPPDINLPLSADPSPPPPPHPPSWGIDQFDMLDVGLGTQTYESEVALTLPKLTGNGNTAVGVGARKCAKRGDSIWGAWFFFNHYFKPALVEKPKGKVTRDSSGSVSGFEKSDLRLDVFLVQHDMENMYMWVFKERPDNALGKMQLRSFMNGHSKHGEPSFPFSADKGFARSHRMQRKHYRGLSNPQCLHGIEIVSSPNLSAVPEAEMKRWAELTGRELNFSIPPEASDFESWRNLPSTDFELDRPLPLSSKITHGSHSHKKALNGSGLNLSTPPSSDDGMDLSPKCAKRRKDFFAHGADEDCVMANNSCSDREQEIEVHTGEPSWMHEFTGVAKHASGPVTAAKTIYEDDEGYLIMVSMLFSDPHSVKVSWRNTLTHGIVKISCVSTARMPFVKRHDRTFKLTDPFPEHCPPGEFVREIPLATRIPEDAKLEAYYDETGTGLEIMVPKHRVGPEEHEVQESNK

SEQ ID NO: 121237 - protein, 201 aa, Oryza sativa
  Clone ID: PAT_MRT4530_24282C.1.pep
MLRIDRAWKSVKPTSSASGSRGLMPVELLRPVVAAVASLARCVRACAEESNRIEGGSGWCVAAMDGDARVRSGYGARAGPGATTSATTSSSPSYMSIDGDDNGGAGGAKVWVLVLLFLLIVLMFLPSVVRRGRPWGGGGGEHHRGGGGLSLKSGRDVVNLCLVAFAILCGLLGRARRLAASPPSRLERTSSAPYTKGNSLK

SEQ ID NO: 121238 - protein, 219 aa, Oryza sativa
  Clone ID: PAT_MRT4530_24283C.1.pep
MPIVHHRIIIKNTFDFTQFTVGNIMLTGPSFATSAYAPIIFTLCLHDGSQEEDNNENEVEVIYNTCNGLFNNYNSTIIETVNTGYGPAEVSYAVLTNAVEGQVTVKLVRRDEHNDPTAITGVLGRIITRSKLLNVGCVLFYSDFGSIPHIGSDGLIPLARRALAVPAMMPLDLRSSSGDEIVRAAVEFDPTTSDQHVERVIGMGGHEIQVTISWLDFPW

SEQ ID NO: 121239 - protein, 730 aa, Oryza sativa
  Clone ID: PAT_MRT4530_24284C.1.pep
MVVETIRGIFKQDESTGTIGVEFWVVVTMVTLRLKFAVGAIAPLYYSLRPLNNAGRAILLLNYSLVHYTLGLMQLSSSDEKPDDFFQVWAVLLVTLQYSVRIGIPYRKSKDMSLIDLLMSLWAANLIRSQTVLSLKIPLWFIWSVNALRIIAFFISSNSAFDIHTNNMRLVSNYMRYEHELGNPEDVDPATMAGYRYLVLGEGKQEMKVEPPVFKLELDVTNPDEMVTVERVWSLRGSRFLGGGGVDQDNRLKDVCLSFALYKLLRRRFGNLPIHEARQPKTKRLVFDYILQRGSKNYERAFRVTEVELRFLRDFHYSKHAIMFAKGFPGWRMLLAGSLVSAVMYLGFVVHRLSKSPDTDSKLFVTYCIIVLVVIKEVWEIAIYVLSQWTKVLVLCKYVKDSRLRHPLFECALGFFCRLITNAKWNQRIGQYNILVDVLQERSVLFAYRHLKGRFLPVKIKLQGEVKSALFESFSALRNANDNDLESYFPLAFRTNQQDIVSDISWAGDELEADTHRILVWHIATCLCEINLSDQASARTIYSFGIITRPLVKKTAIIADDLWEHYIAAVTLSNHCAYLVTQSLVPDNGLVMNKVYEVVQKEASSAISGCKSMADIYRNLTRMARTPDGSEGRSIVKMGAQLAEQLRLAYGDDEQVALWRDLSRFWRGFLLHLAASTKAAKHDVHLRGPGELTTHLWALLSHAGFLGSGSHGEQMLDPADLNDVLYIPAI

SEQ ID NO: 121240 - protein, 152 aa, Oryza sativa
  Clone ID: PAT_MRT4530_24285C.1.pep
TLHPKKYIRGSVLLRHDSNYGSLLGPNRLPLFQVVYSTMRDMLQNLAHFDPNNYSDKHKRSMAALIIHTAETLKNKYISSLVLNSFNPHIGARLQALDDMGAAHINGWSTASELILKSIHLPSKVWDFQQQEFSKCNEFYKISAGLQIQMSQ

SEQ ID NO: 121241 - protein, 524 aa, Oryza sativa
  Clone ID: PAT_MRT4530_24286C.1.pep
MQGIRRSKVPLKIKHFVYHVGRGGFLVPFSWLRGTGREERINAVLCGVSETVNHVLFNCPIAKFTWCVVKEVLHFPAIPVSFWEGLDLLKQKLGGKLGVVVFASWIWVVYMIISLLQRWRLIQKKKRRGCGCPMPGCWNFSSNNDAVKSKEFFDLFFTGFRRSNWRHTGGIVAVRPAGARRSDRRRQQGRQAIPGRFNKILSDLRFVDSSYDANYPQFEISRHFLNGLDMSIWEMKVTSVQESVNMSTLTLDSLYTKLKTHEMNILSRRVDSKSSALVSSSSSLDVDASSSKSSILALFNATSDDQLEQFKEEDLALVANRIARAMNNVRFRKRGGPNHCFECGLIDHLRSHCPKLGRGKREDNDREKNNDNKPKGTFKGRKIKENLKKAFDQVYAAFEPLSDVDGDSGDEDKGKNISVVCFMARGESYSECEDNEKLKQPHDVLDCSTCTLYKKKLKVALGRVEYMEDVVKTNEVLSCSKCRKNKGVMVDCENCANLEKEVLYLKNSLQRFSEGKKNLNMILD

SEQ ID NO: 121242 - protein, 80 aa, Oryza sativa
  unsure (1)..(80): unsure at all Xaa locations
  Clone ID: PAT_MRT4530_24287C.1.pep
TITPKKPNYALRKIARVQLTVGFEIAAYIPGIGHNLQEHYVVLVRGGRVKDLLGVGYRIIRGALDAVVVXNRQQGRSTAL

SEQ ID NO: 121243 - protein, 464 aa, Oryza sativa
  unsure (1)..(464): unsure at all Xaa locations
  Clone ID: PAT_MRT4530_24288C.1.pep
MKSSSTLRVLRFVFTGFRWSNRRYTGGQTGDKRRSDRRRRQQATTDLGGQTGDLIAVRPTATRRSDRQSNFGQTTIRRIRGFNKILSDLRSVESSYDANYPQSEISRHFLNGLDMSIWEIKVTSIQESVNMSTLTLDSLYTKLKTHEMNVLSRKVDFKSSALVSSSSSMNVDASSFKSSFLAIFNATSDDQLEQIEEEDLALVANRIARAMNNARNRKRGGPNRCFECGSIDHLRSHCPKLGRGKREDKDGRKFKENLRNAFDQVYAAFEPSSDVGGETGDEDKGKNISGVCFMARGESDIEYEDHEALVARKENVWIVDSGCSRHMTGDKNWFSSLKKASKTESIIFGDASTSVILATGLVKVNEKFELKNVALVEDLKYNLLSVSQIVDENFEVHFKKTGSKVFDSCGDSVLNISRYGRVFKADFENSVSPVITCLVAKFDKDVMXWHRRLGHVGFDHLTRL

SEQ ID NO: 121244 - protein, 163 aa, Oryza sativa
  Clone ID: PAT_MRT4530_24289C.1.pep
NETRLPRRSPWSPSGGEGFRRLPSASLTSDPGLHPPRRPRTPASILLADDSPRVPLPVEPKWRRGFPPPLLRSPATAPRSRPPSPGPLPESHPLRADTASRVKPSPVAPSVSGTTIFSPTAHDGRAALRRRRSRNSRWRRQTTQCFSTKQLSSLLQVSKVTLG

SEQ ID NO: 121245 - protein, 93 aa, Oryza sativa
  Clone ID: PAT_MRT4530_2428C.1.pep
MLPLDTGHAAIASRWAPAVVTNQHGFLLPACATARARQPSLPRLPPPAFSCASSILSWRHRIRRLALRSVAASSSPHIACQAAFPAPRWSAAE

SEQ ID NO: 121246 - protein, 1262 aa, Oryza sativa
  unsure (1)..(1262): unsure at all Xaa locations
  Clone ID: PAT_MRT4530_24290C.1.pep
MANKFTTKPHVFDRSDFPYWCSKMQSYIMAEDLDILRKVSNPYVIPYQINIADLKTAFKNNCKACNILLSGISRSDFDHVSLLQTANEIWIALRNFHQXTTNIKELCRDVFKKEYIKFEMKPGEALDDYLSRFNKILSDLRYVDSSYDINYTQSEVSRHFLNGLDMSIWEMKVTSIQESVDMFALTLDSLYTKLKTHEMNILSREVDSKSSALVSSSTSLDIGASSLNSTILALINAMSDEQLEQFKEEYLVLVTFKFARAMNNVKXRRRGGPNRCFECGALDHIRLHCPKLGRGKRXDNGGEKTKENKPKSTFKGKKIKENLKKMFEKVYAGFKPLSDVDGESEDEDKGKNISSICFMPRGESDSXVKNNEALVARKENVWIVDSGCSWHMTGDKNWFSSLKQASKTESIIFADASTSVVLATGLVKVNDKFELKNVALVEDLKYKLLSVSQIVDENFDVHFKKTGSKVFDSCGDSVLNISRYERVFKADFENPVSPVITCLVAKFDKDVMFWHPRLGHVGFDHLRRLSGLDLFRGLPKLKKDLDLVCTPCRHAKMVATSHAPIFSMMTDAPGXLLHMDTVDLARMQSVGGKWYVLVIVDDFSQYPWVFFMATKDEAFQHFRXNHVLVEMARTMLDEYHTPRNFWAEAVHTVCYISNRVFLRSKFGKTSYELRFGCQTKVSHLRVFGCKCFVLKSGNLDKFKIRSTDGMFLGYPAHSRGYRVLVICXTCEVSFDEASPGTRPEIADTLSQVQGEDGHIFXDESNDDDNEVGSADQTGCQAGXTAGKPPVRPAQDVRSDRPGSSDSSSIDADRDGPPEATTSTSEGTERETSSEVTAPLHIHRRHPSEQIIGNIGEWTTRSKVTSHDVCANSTFVASFEPKDVTHALTNESWINSMHEEYENFERNKVWTLVEPPSGHNVIGTKLVFKNKQNEDGLIVRNKARLVAQGFTQVEGLDFDETFSPIARIEAIRLLLAFAASKALYDLKQAPRAWYDRLXMGKLDKTFFVLKHGDNQLFVXIYVDDIIFGCSTHALVVEFAKTLRKEFEMSMMGELSYFLGLQTKQTPQAVLDLDEDGEVVDQKEYRSMIGSLLYLTSSRPDIQFDLCXCAHFQACPRASHREAVKRIMRYLNYTLEFAIWYSTPSSICLSGYSDADFAGCRTDRKSASGTCHFLGTSLIAWSSRKQSSVAQXTVESEYVAAANCCSQILWLILTLKDYGLTFEKVPLFCDNTTAINIAKNPXTKHIDIRFHFLRDHVEKGDVEL

SEQ ID NO: 121247 - protein, 273 aa, Oryza sativa
  Clone ID: PAT_MRT4530_24291C.1.pep
MASPPGKKGEGGGDGGGGKAEWLIYAFVARGTAVLAEYTEFTGNFPALAAQCLQRLPASGGGGSGGGAPARFSYACDGHTFNFLLHRGYAYCVVAKESVPKNVSVAFLERLKDDFMKRYGGGKADTALAKSLNKEYGPVIKQHMQYVLDHSEEIEKTLKVQAQVSEVKNIMLENIEKVWSTFAVGCPLFFTELILMGFLFKKTLGRGEKLSELQDKTSDLQSQAQEFKKKGVKIRRKTWLQNMKIKLVVLGILLLLVIIVWVSVCQGFDCTKH

SEQ ID NO: 121248 - protein, 171 aa, Oryza sativa
  Clone ID: PAT_MRT4530_24292C.1.pep
MAEVAPPAPAPEPTKDIAEERAAVPAPEESKAMTVVDDAEKAAATGGSHERDALLTTVATEKRISLIKAWEENEKAKADNKAAKKLADIASWENSKVAEIEAEIKKYQEYLERKKAEQVEKLMNGVAKVHRAAEEKRAATEARRGEEVVKAEEAAAKYRAKGEPPKKLLFG

SEQ ID NO: 121249 - protein, 49 aa, Oryza sativa
  Clone ID: PAT_MRT4530_24293C.1.pep
MGPQAMSAMRKCPPTSSSKAAATSPAVTLTTTNRWNVAVAAESSENMEE

SEQ ID NO: 121250 - protein, 68 aa, Oryza sativa
  Clone ID: PAT_MRT4530_24294C.1.pep
WRDGRAGGGRHLCHHLPSCRDRENCLFPNASVLIPVPGKAGVHHTNMIQKAHLYYIDNIYIITKALKA

SEQ ID NO: 121251 - protein, 85 aa, Oryza sativa
  Clone ID: PAT_MRT4530_24295C.1.pep
PWGQSNKAGGVFNETLFFEVELVFFLPLSKVPLVNWFLFGVGGPRLVPSQLLQYYYYYVKYCYRPITPTWCGYACPVVYAPCRHA

SEQ ID NO: 121252 - protein, 45 aa, Oryza sativa
  Clone ID: PAT_MRT4530_24296C.1.pep
HQQQWAPILAITLAACHVTLHNSATSISRRLLGALELPNFDEPRL

SEQ ID NO: 121253 - protein, 50 aa, Oryza sativa
  Clone ID: PAT_MRT4530_24297C.1.pep
LMWKDQPAQNGGENLLRPLGYLSEDLHSGHTPMRDVHWSPVHTERLTLTE

SEQ ID NO: 121254 - protein, 93 aa, Oryza sativa
  Clone ID: PAT_MRT4530_24298C.1.pep
MELRSAAICYVFLLLKGFGTLRWLTEVALYEQLLGAAIASFSTNTEWIFVDEAPSRLQAMLRVNEKYKSNPDNDFNYYALLFAKNDLLDRSYV

SEQ ID NO: 121255 - protein, 143 aa, Oryza sativa
  Clone ID: PAT_MRT4530_24299C.1.pep
MAVLKSLVACKGLALCAPAIAQRHRNTPLSASAHRRQILITGLTMNSSGINSALPVRGAAQIPAVGSGPPAPSGGNLPVPSMPSWAKWVVGAIIVAIPIYRKIRALEDTVEKTAEVAIEVVDTVAEATEKVAGELADAFPGNE

SEQ ID NO: 121256 - protein, 62 aa, Oryza sativa
  Clone ID: PAT_MRT4530_2429C.1.pep
MLVHEYHLWLLPSFLHIGCPCSSFFTAMERWKSMKIREGGRKKINLTGGSLIQMEKKMETVT

SEQ ID NO: 121257 - protein, 164 aa, Oryza sativa
  unsure (1)..(164): unsure at all Xaa locations
  Clone ID: PAT_MRT4530_242C.1.pep
XXXXXPPXPPPPPPPPPXXPPPXXPPPXPPPXPPPPXPPPPPPPPPPXPPPPPPPPPPPXXPPXPPPPPXPPXPPPPPPPPPXPPXPPPPPPPLPPXPXPPXXPFSXPPPFFFFLPFFFLLSSSTLFFLLFLSPSLPYPLSHFFFLPFYLIIFSPLLHFYPSYS

SEQ ID NO: 121258 - protein, 295 aa, Oryza sativa
  Clone ID: PAT_MRT4530_24300C.1.pep
MAVLKSLVACKGLALCAPAIAQRHRNTPLSASAHRRQILITGLTMNSSGINSALPVRGAAQIPAVGSGPPAPSGGNLPVPSMPSCFFNVISSISISSCIPTYAPVRAKWVVGAIIVAIPIYRKIRALEDTVEKTAEVAIEVVDTVAEATEKVAGELADAFPGNENLKEVASKIKTVADVIEDDAEKAEALIQKEILEKQAAKHRLTGYLTIKNGETHCKWLKKRVGGSSGSHHRQDRQGRAVGEGPFWQEGESKQKLNTHLVAKKTATVTTQFFSLVAPRQQAKCVFDAIAFPID

SEQ ID NO: 121259 - protein, 53 aa, Oryza sativa
  Clone ID: PAT_MRT4530_24301C.1.pep
MGTRVHGTGATIVSNLILGMTKLMNIGKSWTTDNHEIGDGEPGCQSACGRFRS

SEQ ID NO: 121260 - protein, 527 aa, Oryza sativa
  unsure (1)..(527): unsure at all Xaa locations
  Clone ID: PAT_MRT4530_24302C.1.pep
MAAAAARSGAHPPSFASSLGRCRVLPVVVVRRPGGAARPSPLLAPARCAAAVGTAAPKVEGGGRRSSEQGQLAVAPARLVDELVEEALVGSSQHGLVVGDKNHPGDCCPILVDPTGNSQLDHTENRSGKAPGVGLLHARFALLPMSFSKVYWDQAVELAPLLNELVDHVGLDGVFLQYAMTSSSLSIYRTTEVDSFTGGLIDLQAEIKVLYYKEKVRLCLTKSNYLIDVASKQLQQDELNTLATSSESLDXSVCELHRNLIRQHERELGLDPESVVGNTAIAQHAEALAGAWAEFNNQRFSVVLVVVQPEERDGLPVAVVYFRAGYTPNDYPSEAEWRARLLIECSSAIKCPSIAHHLVGTKKIQQELAKENVLERFLDNKADIEKVRKCFAGLWSLENDSIVMSAIESPELFVLKPQREGGGNNIYGDNLRETLISLKKDGSNELAAYILMQRIFPPASLCYLVRDGTCIRENAVSEFGIFGAYLRNKDRVIINDQCGYLMRTKAASLNEGGVVAGYAFLNSVFLT

SEQ ID NO: 121261 - protein, 236 aa, Oryza sativa
  unsure (1)..(236): unsure at all Xaa locations
  Clone ID: PAT_MRT4530_24303C.1.pep
TRESDLHFSCFVLMSDDWLSVLSLISLLGVTTNLLXQLVTMWTAIQHISLPPDEADXDHISWKLTSHGEYTASSAYKVQFFGSLKTNFDTLIWKVWAQRKCKTFAWLIIQNRIWTLARQTRNXGWQNNGYCPLCRCTGETALHLMTECRYTKRVWEAIATWIAYDPMRLTNWVLATTVYDWXKKLATHQGVPKKGIRSLVLLISWEIWKKLNQRIFRNKELSHVDLIVKIKEESRS

SEQ ID NO: 121262 - protein, 1095 aa, Oryza sativa
  Clone ID: PAT_MRT4530_24304C.1.pep
MDRPPPPPASLSPQEWEQLIDDFPTPRRHRWLHLPLLDLALSSLPRRDLPSHLRPLLLSFLDDHLLPPSPTHLPLLLSSLLSFPSDHPLRDHLLLTVTSAFASALSLPVSTDHADPLSALVNALLASANRPNHAPDRAARALACDALRALDAALPGLLADVLGHVYALAAAERSPAAQSYLLLLASAARHVVRLGRLPSTTSILAVSGPPTPFFVPAHLLAPAPDPANPVPPPSEVNLRDIRKVLALIMDRPQVLTPASGMEMAAILAEVSAAVVGWAPAIAAHVKVQFGGMAHSSSLMLLHSLLTLFIQFPDAFGAEDERKMARRLALAACEAHRPLTARLLALHWLLGSGKFRYAVPGLAKWFYPGVFDPLAVKAKKLDCLALVAAGVDADKIEGGRDVDQTIGLVDDGLACVSAFRWLPGWSTETCVAFRALHVVLVAAAPHSTDGSGCSGAGELLNSTIFHHLQAMLVDMTSEHRGLVPVIADFINRLLACNTHRWAGEQLLQTLDENLLPRLEPGYQLASYYPLFEKIAENETVPQLRLIELLTKQMASLAKKHDPETELKTWSQGSKVVGICRVMMKHHHSSRIFFPLSCLLVLTIKSYPDLEVRDHARICLRMLSCIPGKKLRHLMGIGEQPAGVTPSHPGPLFDVPSPRPAQDLKSMPDLASYIHLERVVPLVVKQSWALTLPNFSIQSRASGQILSIQDVSSTPPEQEKTPQPTIERIAYTQEALRVMDSKGAETLEILRRHFACIPDYLHSVGLKIKIPCTFRFDSEPFNHAWGSDSAVPGSEGVDGLPALYAATINFSSSAQFGKIPSCHVPFLLGEPPGSGMDIMPLDNGHRLESSYCASVVIELEPREPSPGLIDVVITANTENCQVISGSIQPITVGIEDMFLKASVPPDILKEDAAEYYQDLFHALWEACNSCSNTGRETFPLTGGKGSAAINGTRSVKLLEVTPKVLIRAIERYLAPFVVSVAGDSLITILRGNAIIKNVVWEESDSAPIVGADALVPYSVDTNLSLQRIDEDEFEVGAETYAHLSKRDMGIVRVLIFLPPRYHLLFSMEVGYASTLVRIRTDHWPCLAYVDEYLEALL

SEQ ID NO: 121263 - protein, 1021 aa, Oryza sativa
  unsure (1)..(1021): unsure at all Xaa locations
  Clone ID: PAT_MRT4530_24305C.1.pep
MPRESICGDGPGVGLGIRRRLWRLPTSERINKVVIHFKSSSICVSPGFGGLTGGALAVRPAASQRSDRRGHGGQTGFGNKRQELISALGRGKREDKDGEKTNNNKPKGTSQGRKFKENLRKVFDQVYAAFEPLSDVDGECGDEDKGKNISSVCFMARGESDTEYEDHEALVARKENMWIVDSGCSRHMAGDKNWFSSLXKKASKTESIIFGDTSISAVLATGSVKVNEKFELKNVALVEDLKYNLLSVSQIVDEDFEVHFKKTGSKVFDSCGDSVLNISRCGRVFKADFENPVSPMITCLVAKFDKDVMFWHHRLGHVGFDHLTRLSGLDLVRGLPKLKKDLDLVCTPCRHAKMVSTSHAPIVSVMTNAPGQLLHMDTVGPARVQSVKESDFEFSGSLKRIRSDNGGEFKNTFEQFCNERGLEHEFSSPRVPQQNGVVERKNRVLVEMAKTMLDEYKTPRKFWAEAINTACYISNRVFLRSKLGKTSYEFRFGHQPKVSHLCVFGCKCFVLKSGNLDKFEARSTVGLFLGYPAHTRGYRVLILETNKIVETCEVSFDEASPGTRHDIAGTLLQVQGEDGRIFGDENDNDNDDDEVGSAGQTRRQAGQTAGTPPVRPPQEERSDRPGSSGSGTVDADRDGPPEITTSTSTDTGRGSTSEVAAALHIQRRHPPEQIIGNIGERTTRSKVEGLDFDETFAAVARIEAIRLLLAFAASKGFKLYQMDVKSAFLNGSIQEEVYVKQPPGFTKGKVDKTLFVLKHGDNQLFVQIYVDNIIFGCSTHALVVDFAETMRREFEMSMMGELLYFLGLQIKQTPQGTFVHQTKYTKDLLRRFKMEKCKPISTPIGSTAVLDPDEDGEAVDQKEYRSMIGTLLYLTASRPDIQFVVCLCARFQASPRASHRQPVKQIMRYLNHTLEFGIWYSTSSSICLSGYFDADFGGCRIDRKNTSGTCHFLGTSLIVWSSRKQSSVAQSTAESEYVAAASCCSHIFWLLSTLKDYGLTFEKVPLFCDNISAINIAKNLL

SEQ ID NO: 121264 - protein, 239 aa, Oryza sativa
  Clone ID: PAT_MRT4530_24306C.1.pep
GPPPQSSRRAGQLPPPPSSRPALAQASPPPSTRGASWPKPSHARPRPHARRTSVDCAPPDGVAATAPPPAASAAAPKHRSAVSSPPSAPQHRPPPRPHHLLARSSLELCPRRRRQGHPRPRLPSSRTPPIFVVVIRRVPRRPRLPTGVRRGRRRPLVVPGCARRGVRPPSSRSRPRPSSELLQPRCRLRPRLRVVKPCAGRVSPPSKDRRRSRSLAVRLRRPRAVSAAPVRRRRSHASL

SEQ ID NO: 121265 - protein, 235 aa, Oryza sativa
  unsure (1)..(235): unsure at all Xaa locations
  Clone ID: PAT_MRT4530_24307C.1.pep
PQRWISILLQYDMDFGDDHMEADSMAIPQPQSMKKSRKAHSSPQRITLDKPTSRGRGRGGKVQASFLAPKKLDLGKGHEETKGKEVQKKYVAPQEFQLGMPLIGDDVLATMGTSCKDLHVYXMEKSNARRQNIASNILGDHDRKPFLGPTNYIVVNFKDLFDLDRLRAVDTNLLKCYSLLSWQWCQENAPELAFFDPQVVTVTNLENNHXGLVNYIYDTFWSYQDKEYIMCAYNK

SEQ ID NO: 121266 - protein, 1516 aa, Oryza sativa
  unsure (1)..(1516): unsure at all Xaa locations
  Clone ID: PAT_MRT4530_24308C.1.pep
HCTSVRPASEEFKARNILLSGISRSDYDRVAHLRTAHEIWNALSNFHEGTNNIKQLRRDIFKKEYIKFEMKPGEAFDDYLSRFNKILSDLIDSSYDTNYPQSEISRHFLNGLNMSIWEMKVTSIQESVDMSTLTLDSLYTKLKTHEMNVLSRKVDSKSTALVSSTSSLDVDASSSMPSFLAAFNAISDDQLEQIEEEDLALVANRIARAMNNARNRKRCGPNRCFECGSIDHLRSHCPKLGRGKREDKDGEKTNNNKPNNNKSKGTSQGRKMENLRKAFQQVWAAFEPLSDVDGESGDDDKGKNISDVCFMARGESDIEFEHNEVSAFEEAINILSXKKKKCEKMYRKQEFIIESLKYEVARLKSLIPNDDDCSNCEVLMNEISKIRDINAAHDLKNRSSLARSFALRTRTLDELFLTKKLLQKYQITFHASLMFNMISAKKXKQPHDVLDCSTCNLNKMKLKDASGHVEYMEDVVKNNKVLSCPICRESKCVMVDCENCASLEKEVSYLKNSLQRFSDSKKNLNTILDQSKALVERKENVWIVDSGCSRHMTGDKNWFSSLKNSXTEFHYYIITESSYTTNSQASXHSKANKRMQIHKFALVEDLKYNLLSVSQIVDEKFEVHFKKTGSKVFDSRGDSMPNISRYARVFKADFENPVSPVITCLVAKFDKDVMFWHRRLGHVGFDHLTRLSGLDLVRGLPKLKKDLDLVCTPCRHAKMVSTSHAPIVSVMTDAPRQLLHMDTVGSARVQSIGGKWYVFVIVDVFSRYSWVFFMATKYEAFQHFRGLFLRLNLEFPGSLKRIRSDNGVSHLRVFGCKCFVLKSGNLDKFEARSIDGLFLGYPAHTRRYRVLILETNKIVETCEDSFDKASPGTRPEISGTLSQVQGEDGRIFEDESDDDNDDDDEVGSAGQTGRQAGQXAQDVRSDRPGSSAEGSVDADRDGPPEIPTSTSTDTERGSTSEVTAPLHIQRRHPPEQIIGNIGERTTSSKVTTHDVCANSTFVASFEPKDVSHALTDESWINAMHEELENFERNKVWTLVEPPSGHNIIGTKWVFKNKQSEDGLIVRNKARLIAQGFTQVEGLDFDKTFAPVARIEAIRLLLAFAASKGFKLYQMDVKSIFLNGFIQEEVYVKRPPGFENSDFPNHVFRLSKALYGLKQAPRAWYDRLKNFLLAKGFTMGKVDKTLFVLKHGDNQLFVQIYVDDIIFDCSTHALVVDFAETMCREFEMSMMGKLSYFLGLQIKQTPQGTFVHQTKYTKDLLRRFKMENCKPISTPIGSTAVLDPDEDGEAVDQKEYRSMIGSFLYLTASRPDIHFAVCLCARFQASPRASHRQAVKRIMRYLNHTLEFGIWYSTSSSICLSGYSDAEFGGCRIDRKSTSGTCHFLGTSLIAWSSRKQSSVAQSTAKSEYVAAASCCSQIIWFLSTLKDYCLTFEKVPLFCDNNSAINIAKNPVQHSRTKHIDIRFHFLRDHIEKGDVELQFLDTKLQLADIFTKPLDSNCFVFLHGELGIFHPFGMI

SEQ ID NO: 121267 - protein, 640 aa, Oryza sativa
  Clone ID: PAT_MRT4530_24309C.1.pep
MEAALLRPPPLAARGGVSIAIAFSVSRLPSAAAAAAAGKPRKLAPPACRCRATPQWQLDFLGAEADTEADGGDDDDDLDLDLSLPAETNDWCVRARRSALRSIEARGLSPSLQRMVASPKKKNKKKKSKKTNLKQKKAAEPKPPRDTDDDEDDEEEADDDLEALLAGGGELDDLELRVAQFADGMFDEKRQRNREQFIQTLSAFSPAAPSNRSQEVSLNRSIVEARTADEVLALTAEVVAAVAKGLSPSPLTPLNIATALHRIAKNMEAVSMLQTHRLGFARSRDMSMLVGLAMVALPECSPQGVSNISWALSKIGGDLLYLPEMDRIAQVAITKVDSFNAQNVANVAGSFASMRHSAPDLISALTRRAAELVYTFKEQELAQFLWGCASLNECPYPLLDALDTACRDAPSFDCHLHDTVPGMWQSSDKEASSLKNSSNAYALNFTRDQIGNIAWSYAVLGQMDRPFFSGIWKTLSQFEERKISDQYREDMMFVSQVYLANQSLKLEYPHLDMCLRGDLEENLTKTGRSKRFNQKMTSSFQKEVGRLLCSTGHEWNKEYTIDGYTVDAVLVDEKLAFEIDGPSHFSRNLGTPLGHTAFKRRYIAAAGWNLVSLSHQEWENLEGEFEQLEYLRRILGFDAE

SEQ ID NO: 121268 - protein, 133 aa, Oryza sativa
  unsure (1)..(133): unsure at all Xaa locations
  Clone ID: PAT_MRT4530_2430C.1.pep
YCRPRCLCRPLTPTAAYKELTLTNMCIATMLYMEMRNPRSGHQAADRTTILXQLNVCEMRSTLLTMSGNGATVEYESKSFTVWECERQRHSRPIVRHYLQRTPXLIFSRNSTDTQRVQRPHDXLHRLQYDDEL

SEQ ID NO: 121269 - protein, 1409 aa, Oryza sativa
  unsure (1)..(1409): unsure at all Xaa locations
  Clone ID: PAT_MRT4530_24310C.1.pep
MYKIEGERLTDDSPAVGPATRRRSDQRRRQAQQATSAVRPGNLYRSGWQHPLGQTGRSISVRLTSVNFEARNILLSGISRSDYDRVAHLQTAHEIWNVLSNFHQGTNNIKELRRDLFKKEYIKFEMKPGEALDDYLSRFNKILSDLRSVDSSYDANYPXSEISRHFLNDLDMSIWKMKVTSIQESVNMSTLTLDSLYTKLKTHEMNVLSRKVDSKSSALVSSSSSSDVDASSSKPSFLAVFNATSDDQLEQIEEEDLALVANRIARAMNNSKNRKRGGPNRCFECGSIDHLCSHCPKNGTGKREDKDGEKTNNNKPKGSSQRRKLENLRKAFQQVCTAFEPLSGDDDKGKNISNVCFMARGESDTEYEENEVSDFEEAINILSEKNKKCEKMYRKXEFIIESLKSEIARLKSLIPNDDDCENCEVLMNEISKIRDVNDAHDLKNKSSLACSFALHTRTLDELFLTKKLLQKYQIAFHASLMFNMISAKKLKQPHDVLDCSTCNLNKLKLKYALGRVEYMEDVVKNNEVLSCSKCRKSKGVMVDCENCANLEKVVSYLKNSLLRFSDGKKNLNMILDQSKALVVRKENVWIVDSGCSRHMTGDKNWFSSLKKACKTESIIFGDAATNAXLATGLVKVNEKFEFKNVALVEDLKYNLLSVXQIVNENFEVHFKKTGNKVFXSCGDPVLKISRYGRVFKADFENPVSPMITCLGAKFDKDVMFWHRKLGHVGFDHLTRLSGLDLVHGSSKLKKDLDLVCTPCRHAKMVASSHAPIXQGEDGRIFEDESDENDDDEVGSAGXTGRQAGQTASTPPVRLAXEVRSDWPGSSAEGSVDAIRDGPPETTTSTSTDTXRGSTSEVVAPLHIQRXHPPEQIIGNIGERTTRSKVTIHDVCANSAFVASFETKDVSRALTDESWINAMHEELENFERNKVWTLVEPPSGHNIIGTKWVFKNKQNEDGLIVRNKARLVAQGFTQIEGLDFDETFAPVARIEAIRLLLAFAASKGFKLYQMDVKSAFLNGFIQEEVYVKXPSGFENPDXFPNHVFKLSKALYGLKXAPRAWYDRLKNFLLAKGFTMRKVDKTLFVLKHGYNQLFVQIYVDDIIFVCSTHALVVDFAETMRREFEMSMMGELSYFLGLQIKQTPQGAFVHQTKYTKDLLRRFKVENCKPISTPIGSTAVLDPDEDGEAVDQKEYRSMIGSLLYLTASRPDIQFALCLCARFQASPRASRRQAVKQIMRYLNHTLEFGIWYSTSSSICLSGYSDADFGGCRIDRKSTSGTCHFLGTSLIAWSSRKQSSVAQSTAESEYVAAASCCSQILXLLSTLKDYGLTXPLFYDNTSAINIAKNPVQHSHTKHIDICFHFLRDHVEKGDVELXFLDTKLQITDIFTKPLDSNRFAFLHGELGIIHPFGMV

SEQ ID NO: 121270 - protein, 1334 aa, Oryza sativa
  unsure (1)..(1334): unsure at all Xaa locations
  Clone ID: PAT_MRT4530_24311C.1.pep
TKFEQNCKAHNILLSGISRSDYDRVSHLQTANEIWIVLSNFHQGITNIKELHRDLLKKEYIKFEMKPGEALDDYLSRFNKILSYLRSIDCSYDVNYTQSEVSRHFLNGLDMSIWEMKLTSIQEYVDRSTLTLDSLYTKLKTHEMNILSRRVDSKSSAXVSSSTSLDVGASSSKSFILALINGISDEQLEXFEEDLVLVTNKFSRAMNNVRYRKRGGPNCCFECGSLDHLRLHCPKLGRGKMEDNGGEKTNDNKPKSTFKGKKKKETLKKAFDQVYAAFEPLSDVDGESEDEDKGKNISGVCFMARGESDSECEDNEVRSFEKAILILSAKNKKCEKMYRKQEFIIESLNSEVARLKYLIPNDCDCKSCEVLMNEISKIRDVNAAHDLKNRSSLDLGFALRTHTLDELFLTKKLLQKYQIAFRASLMFNIIXSQKVKXPHDVLDCSTCTLNKMKLKDALGRVESMEDVVKTNEVISCSKYRKSKGVMVNCENCANLEKEVSYLKNSLQRFSDGKKQLNMILDQSKVTSYNRALVARKENVWIVDSGCSRHMTGDKNWFSSLKQASKTESIIFGDASTSAVLATGLLKVNDRXELKNVALVEDLKYNLLSVLQIVDENFEVHFKKTESKVFDSCGDSVLNISRYGRVFKADFRNPVSPVITCLVAKFDKDVMFWHRRLGHVCFDHLTRLSGLDLICGLPKLKKDLDLICTPCRHAKMVASSHAPIVSVMTDAPGRLLHMDIVGPARVQSVGRKWYVLVIVDDFSRYSWVFFMATKDEAFQHFRGLYLRLDLEFPGSLKIIRSDNGLSHLRDFGCKCFVFKYGNLDKFEARSTNGMFLGYPAHSRGYRVLVLETNKIIETREVSFDEASPGIRAKIAGTMSQVQREDGRIFEDESDDDDDEVGSAGQTGRQAGQTAGTPPVRPTQDERSDWPGSLASGSVDADRDGPLEGTTSTSTGTKRDITSXVAAPLHIQXRHPPKQIIGNIGEWTTRSKVMTHDVCANSAFVASFEPKDVTHALTDVSWINAMHEXLENFEGNKVWTLVEPPSRHNIIGNKWVFKNKQNEDGLIVINKARLVAQGFTQVEGLDFDETFAPVTXIEAIRLLLAFAASKGFKLYQMDVKSTFLNGFIQEEVYVKQPPGFENLDFPNHVFKLSKALYGLKQARRAWYDRLKNFLLVKDFTMGKVDKTLFVLKHGDNQLFVXDLCXDIIFGCXTHALVVEFAETMGSEFEMSMMGEXSFLLGLQIKKTPQGTFVHRTKYTKDLLRRFKMENCKPISTPTGSTAVLDPNEDGEAADQKEYRSMIGSLLWLVNIRYVIQWRYCVRMGCGVEFGRSPNLV

SEQ ID NO: 121271 - protein, 233 aa, Oryza sativa
  Clone ID: PAT_MRT4530_24312C.1.pep
MGALHVGEPRVSFQQQQQQQVGKNGQQGHGHGAVVEEIHGLIKVYRDGFVERIPAIPDVPCTWGTTASVPGVVIARDAVVDRATRVWARLYAPAAAAAAGRVPVVVYFHGGGFCVGSAAWSCYHEFLAKLAARAGCAVMSVDYRLAPENRLPAAFDDGVTTVRWLRQQAAISSAADELSWWRGRCRFDRVFLAGDSAGATIAFHVAARLGHGQLGALTPLDVKGAILIQPFFS

SEQ ID NO: 121272 - protein, 84 aa, Oryza sativa
  Clone ID: PAT_MRT4530_24313C.1.pep
MARIRRGRNVENTYGTDRYLLPDKVMVVLKALVGKPGPIGRGPLGTNSWAELSVEPGLLGTCRRAAQGSAPAEKSAAQGGLEAA

SEQ ID NO: 121273 - protein, 419 aa, Oryza sativa
  Clone ID: PAT_MRT4530_24314C.1.pep
DLPFNLCYFQNTLSECEFSSFGAIPYPQRQSHRHRPSPGAADVSSPPPALAGVTPSSVRRRPLSCAPRSRPSARRRRRQSATACTRVSRAVVRSPPPSSSSSAASGQASAATARVWGGAPHVGRGDAPGLSPELRQDGDDMTRAPRCLDWCRRCPGRRHDDATTKAVEAIAVEASCRDRENTSVLITGEKKEWLCGEQVEAATYDNVDELLVRTTTGRLMVGDDDGQADGGKRQDRGSLEVGPDATTNVGGEWRRAERSRKATTVTMERGTGNATKERVGAGVGSSRGLGVQNLDFYGSRFSSDERLLATMGARRAPHSLLQERGARGEAANGERSGGAAGQVAGELDLQPAPSLLGPPDVVVAARAVPPPGASVGTGSTLLPLLGTGGARSECCAGAALAAALCRRVSKQEFGNNKRG

SEQ ID NO: 121274 - protein, 570 aa, Oryza sativa
  unsure (1)..(570): unsure at all Xaa locations
  Clone ID: PAT_MRT4530_24315C.1.pep
FCGLFLRLDVEFPGSLKKIRSDNGGEFENASFEQFCNERGLEHEFSSPRVPQQNGVIERKNRVLVEMARTMLDEYHTPRKFXAEAVNTTCYISKLGKTSYELRFGRQPKVSYLRVFGCKCFVLKPGNLDKFEARSTDGMFLSYPAHPRGYRVLILETNKIVETSPGTRPEIASTLSQVQEXDGHIFEDESDDDDEVDSAGXTGRQADQTAGTPPVRQPQDERSDWPGSLASRSVHADRDGPPEATTSTNTGTERETTSEVAAPLHIQRRHPPEQITGNLGERTIRSKVTTHDVSANSAFVASFEPRDVTHALTDESWINAMHEELENFERNKVWTLVEPPSGHNIIGTKWVFKNKQNEDGLIVTNKARLGSQGFTQVEGLDFGETFAPVARIEAIRLLLAFAISKGFKLYQMDVKSAFLNGFIXEEVYVKQPPCFENPDFPNHVFKLSKALYGLKQATRAWYDRLKNFLLAKCFTIGKVDKTLLVLKHGDNQLFVQIYVDDIIFGCSTYALVVEFAETMRREFKISMMMLDPDEDGEAVTNNMIESLSHLIASRPDIQXFAVCLCARFQA

SEQ ID NO: 121275 - protein, 150 aa, Oryza sativa
  Clone ID: PAT_MRT4530_24316C.1.pep
MGPPPPPSCPRPTSSPPPSATVAQRRAPLPSPSPSPQPVAALLDPAGAARIWQSPHLGRLPYPPGKGLRIDPTLNPRGLWVPRRSELHLALPFFALPVVRWHRANGKKTVVAIEKTNGPRADPVVSLTNLLSDPLSGLAEPTNSVGWLWL

SEQ ID NO: 121276 - protein, 244 aa, Oryza sativa
  Clone ID: PAT_MRT4530_24317C.1.pep
MDLQRLQLRPVKVSGLRGLRILAIRLLLAVAASKGFKLYQMDVKSAFLNGLYKRKFMSNNHQIYVDDIYFGCSTHAWVAEFTETMHREFEMSMMDGQAVDQKEYRSMIGSLLYLTASRPNIQFVIRCLISISKDYGLTFENVPLFYDNTSAINIAKNPVQHSRTKHIDIRFDFLRDHVEKEDVELTFLDTNLLVKWFLEMNRYCWRFGPVRPGSGCRSDRCAQVILTPRESVAGDGSGVNFEIW

SEQ ID NO: 121277 - protein, 1450 aa, Oryza sativa
  Clone ID: PAT_MRT4530_24318C.1.pep
MHVVDGDSIWHTMEVLCAYGMRSRIWKESKFETNNIKELRRDLFKKEYNKFEMKPGEALDDYISRFNKILSDLRSVDSSYDANYPQSKISRHFLNGLNMSIWEMKVTSIQESVNMSTLTLDSLYTKLKTHEMNVLSRKVDSKSSFLAIFNATSDDQLEQIEEDLVLVANRIARAMNNARNRKRGGPNRCFECGSIDHLRSHCPKLGRGKREDKDGEKINNNKSNNNKSKGSYKGRKMENLRKAFQQVCAAFEPLSDVDGERGDDDKGNNISDVCFMARGESDTEYEDNEVSAFEEAINILSAKNKKCEKIYRKQEFIIESLKSEIDILKSLIPNDDDCENCEVLMNEISKIRYVNAAHDLKNRSSLACSFDLHTRTLDELFLTKKLLQKYQVAFHASLMFNMISAKKLKQPHDVLDCSTCNLNKLKLKDALGRVEYMEDVVKNNEVLSCPKCRQSKGVMVDCENYANLEKEVSYLKNSLLRFSDGKKNLNMILDQSKVLVLEVALVARKENVWIVDSDCSRHMTGDKNWFSSLKKASKTESIIFGDAATSAVLATGLVKVNENFELKNVALVEDLKYNLLSVSQIVDENFEVHFKKTRSKVFDSCGDSVLNISRYGKVFKADFENPVSPMITCLVAKFDKDVMFWHRRLGHVGFDHLSRLSGLDLVRGLPKLNKDLDLVCTPCRHAKMVSTSHAPIVSVMTDAPGQLLHMDTVGPAKVQSIGAKWYVLVIVDDFSRYSWVFFMATKDEAFKHFRGLFLQLELEFPGSLKRIRSDNGGEFKNASFEQFCNERGLEHEFSSPRVPQQNGVVERKNCVFVEMARTMLDEYKTPRKFWTEAINTACYILNRVFLRSKLGKTSYELRFGHQPKVSHLRVFGCKCFVLKSGNLDKFEPRSTDGLFLGYPAHTRGYRVLILETNKIVETCEVSFDEASPGERTTRSKVTTHDVCANSASVASFEPKDVSHALTDESWINAMHEELENFERNKVWTLVEPPFGHNIIGTKWVFKNKQNEDGLIVRNKARLVAQSFTQVEGLDFDETFAHVARIEAIKLLLAFLNGFIQEEVYVKQSPGFENPDFPNHVFKLSKALYGLKQAPRAWYDRLKNFLLAKGFTMGKVDKTLFVLKHGDNQLFVKIYMDDIIFCCSTHALVVDFAENMRREFEMSMMGELSYFLGLQIKQTPQGTFVHQTKYTNDLLRRFKMENCKPISTPIGSTAVLDPDEDGEAVDQKEYRSMIGSLLYLTAYRPDIQFAVCLCARCQASPRASHHQAVKRIMRYLNHTLEIGIWYSTSSSICLSGYSDADFGGCRIDRKSTSGTCHFLGTSLIAWSSRKQSSVTQLTVESEYVAAASCCSQILWLLSTLKDYSLTFEKVPLFCDNTSAINIAKNPVQHSRTKHIDIRFHFLRDHVEKGDVEFRFLDTKLQIADIFTKPLDSNRFAFLRGELGIIHPFGMV

SEQ ID NO: 121278 - protein, 95 aa, Oryza sativa
  Clone ID: PAT_MRT4530_24319C.1.pep
MARLGFVPVPSRPDYRAVPGLPHRHARPAWHERADMAKLAQRRRRGNRLISNKAQCATSSFGPAWPDPTAGGPCLGLRHGTWASTGRHEEPTVPY

SEQ ID NO: 121279 - protein, 95 aa, Oryza sativa
  Clone ID: PAT_MRT4530_2431C.1.pep
MSFLLKTRSESDKPKSPSSEELQQKIVQVRELLGSLAAEMPAFLSDTTIRRFLRARNWSTEQATKSLKETVKWRRQYRPESICWVLSQIPNQPLC

SEQ ID NO: 121280 - protein, 260 aa, Oryza sativa
  Clone ID: PAT_MRT4530_24320C.1.pep
MGRAVEQQQGGCCSEKKKKLRKGLWSPEEDERLATHIARFGVSCWSSVPDLAGLQRCGKSCRLRWMNYLRPDLKRGRFSHHEEELILALHDKLGNSWSQIAARLPGRSDNEIKNFWNARLRKKLRQTESSSSATTAAGAAATGHRRGEADRSRPPPPASFNTFSHDDRTTPAPAAHIAAAAAVEAPAAMTTTGGAVGGGVLVDNSGGHRDAVAEAARGHVGSGDDDGFLAVLLGEYYLDAGGHGDGFSFLGGGGGGHVFS

SEQ ID NO: 121281 - protein, 1668 aa, Oryza sativa
  unsure (1)..(1668): unsure at all Xaa locations
  Clone ID: PAT_MRT4530_24321C.1.pep
WTGSRLIVIHFKSSSICVSPGFGGLTGDIPAVRSAAXRRSDRREHGGQTGGXQQAQQAISAVRPVASTQSDRQINLGQTDFLRFRGRMQSYIMAENYDIWRKVSLPYVIPEAINTDALKTEFENNCKARNILLSGISRSDYDRVAHLETAHEIWNALKNFHQGTNNIKELRRDLFKKEYIKFEVKSGEALDDYLSRFNKILSDLRSVDSSYDVNYPQSDISRHFLNGLDMSIWEMKVTSIQESVNMSTLTLDSLYTKLKTHGMNILSRKVDSKSSALVSSSSSLVIDASSSMPSFLAAFNATSDDQLEQIKEEDLALVANRIARAMNNARNRKRGGPNRCFECGSIDHLRSHCPKLGRGKREDKDGEKTNNNKPNNYKSKGSNQGRKMENLRKAFQQVCAAFEPLSDVDGESGDDDKGKNVSDVCFMVRGESDTEYEDNEVCAFEEAINILSAKNKKCEKIYKKQEFIIKSLKSEINRLKSLIPNDDDCENCEVLMNEISKIRDVNAAHDLKNRSSLACCFALHTRTLDELFLTKKLLQKYQIAFHASLMFNMISAKKLKQPHDVLDCSTCNLNKMKLKDALGRVEYMEDVVKNNEVLSCPKCRKSKGVMVDCENCANLKKEVSYLKNSLLRFSDGKNNLNMILDQSKVSTNNRGLGFDPYAHNSRHPPVVLGVGAKSGEILIKHDTNKTVFKSAGIMLTMNVSSSKSNVVHAKPPVSACVAKSSCSNNVSKQREKYTCSFCGKDGHIVGFCFRLAHKQKKEREIAFAKSKWQKSGFPSRKPVRPQWISRSDRRPVRPAAEPRSDQTPVRPAVQRWSDRPPALVARKENVWIVDSGCSRHMTGDKNCFSSLKKASKTESIVFANASTSAVVATGLVKVNENFELKNVALVKDLKYNLLSVSQIVDENFEVHFKKTGSKVFDSCGDSVLNISRYFLASKLGKTSYELRFGHQPKVSHLRVFGCKCFVLKSGNLDKFEARSIDGLFLGYPAHTRGYRVLILGTNKIVETCEVSFDEASPGTRPDIAGTLSQVQGEDGRIFEDESDYDHDDEVGSAGQTGRQAGQTAGTPPVRPAHEERSDRPGSSGSDTVDADRDGPLENSTSTSTETERGSTSEVAAPLHNQRRHPPEQIIGNIGERTTRFKVTTHDVCANSAFVASFEPKDVSHALTDESWINAMHEELENFERNKVWTLVEPPSGHNVIGTKWVFKNKQNEDGLIVRNKARLVAQGFTQVEGLDFDETFAPVARIEAIRLLLAFAASKGFKLYQMDAKSAFLNGFIQEEVYVKQPPCFENPDFPNHVFKLSKALYGLKQAPRAWYDRLKNFLIAKGFTMGKVDKTLFVLKHGDNQLFVQIYVDDIIFGCSTHALVVDFAETMRREFEMSMMGELSYFLGLQIKQTPQGTFVHQTKYTKDLLRRFKMENCKQISTPIGSTVVLDPDEDGEAVDQKEYRSMIGSLLYLTASRPDIQFAVCLCARFQASPRASHRQAVKRIMRYLNHTLEFGIWYSTSSSICLSGYSDADFGGCRIDRKSTSGTCHFLGTSLIAWSSSKQSSVAQSTAESEYVAAASCCSQILWLLSTLKDYGLTFEKVPLFCDNTSAINIAKNPIQHSRTKHIDIRFHFLRDHVEKGDVELQFLDTKLQIADIFTKLFDSNRFAFLRGELGIIHPFGMV

SEQ ID NO: 121282 - protein, 71 aa, Oryza sativa
  Clone ID: PAT_MRT4530_24322C.1.pep
MAPQAQPTVGERDQTFAWRQEATTMRFRHESCVPHVYLVAHYYHMREKDLLAETTGDARSDPNANMTDNTE

SEQ ID NO: 121283 - protein, 185 aa, Oryza sativa
  Clone ID: PAT_MRT4530_24323C.1.pep
MTKLVALSFIVLLSVGLANATRVARYASAGGGGGGGGGGGGSNGGSGWGSGSGSGYGQASGDGSYASGDGGGGGGGGGQNGGSGYGSGSGSGYGQAGGYGPYGGGYAQGGGGGQGGGGGQNGGSGYGSGSGSGYGQAGGYGPYGGGYAQAGGQGGGGGGGQSGPGGSGYGSGSGSGSGSAYGGHP

SEQ ID NO: 121284 - protein, 1043 aa, Oryza sativa
  unsure (1)..(1043): unsure at all Xaa locations
  Clone ID: PAT_MRT4530_24324C.1.pep
QASGADLGGHTGDSTPVRPAATLQSDRLIYSGQTDLIEIEGVFAMATPARFSTKPHVFDGTDFSHWCSRMQSYIMAEGYDIWRKVSRPYVIPEEINTAALKTKFEQKCKARNILLSGISRSDYDRVAHLQTAHEIWNVLSNFHQGTNNIKELRRDLFKKEYIKFEMKPGEALDDYLSRFNKILSDLRSVDSSYDANYPXSEISRHFLNDLDMSIWKMKVTSIQESVNMSTLTLDSLYTKLKTHEMNVLSRKVDSKSSALVSSSSSSDVDASSSKSSFLAIFNATSDDQLEQIEEEDLALVANRIARAMNNARKNLNMILDQSKISTHNRGLGFNPYAHNSXHPPVVLGVGARSGEILVKPDTNKTVFKSAGIISTMNASSSKSNVVHAKSPVVAHVAKSTSATNVSNHREKYTCSFXGKDGHIVGFCFRLAHKQKKEREIAFTKSKKPVRPQWVPRSDRRPIRPAEQPRSDRPPTEASTSACVXALVTKKENVWIVDSGCSQHMTGDKNWFSSLKKASKTESIIFGDAATSVVLATGLVKVNEKFELKNVAFVEDLKYNLLSVSQIVDENFEVHFKKTGSKVFDSCGDSLLNISRYGRVFKPDFENPVSPVITCLVAKFDKDVMFCHRRLGHVGFDHLTRLSGLDLVRGLPKLKKDLDLDEAFQHFHGLFLRLELEFPGSLKRIRSDNGGEFKNASFEQFCNERGLEHEFSSPRVSQQNGVVERKNRVLVEMARTMLDEYKTHRKFWAEVINTACYISNRVFLRSKLGKTSYELRFGHQPKVSHLRVFGCKCFVLKSGNFDKFEARSTDGLFLGYPAHTRGYRVLILGTNKIVETSKVSFDEASPGTRPDISGTLSQVQGEDGRIFEDESDDDYNDEVGSAGQTKRQAGQTASTPPVRPAHEERSDRPGSSAEGSVDADRDGPPEITTSTSTDTERGSTSEVNAPLHIQRRHLPEQIIGNICERTTRSKVTTHDVCANSAFVASFEPKDVSHALTDESWINAMHEELENFERNKVWTLVXPPSTHNITGTQWVFKNKQNEDGL

SEQ ID NO: 121285 - protein, 964 aa, Oryza sativa
  unsure (1)..(964): unsure at all Xaa locations
  Clone ID: PAT_MRT4530_24325C.1.pep
MATPARFSTKPHLFDGTNFSHWCSRMQSYIMAEDYDIWRKVSHLYVIPEAINTAVEKTAFEQNCKARNILLSGISHSDYDRVAHLQTAHEIWVALSNFHQGTNNIKELHRDLFKNEYIKFEMKPGEALDDYLSRFNKILSDLRSVDSSYDANYPQSEISRHFLNGLDMSIWEMKVTSIQESVNMSTLTLDSLHTKLKTHKMNVLSRKANSKSSALVSSSSSLYVDASSSKPSFIAVFNATSDDQLEQIEEEDLALVANRIARAXIMPGTGKELGRGKREDKEGEKTSNNKPNNNKPKGSSQERKMENLRKAFQQVCAAFEPLSDVDGENGDDDKGKNISDVCFMARGESDTEFEDNEVSYLKNSLQRFSDGKKNLNKINQRLVHKQKKEREIAFAKSKWQKSGVPSRKPALVARKENVWIVDSGCSRHMTGDKNWFSSLKKASKTESIIFGDASTSAVLATGLVKVHFKKTGSKVFDSRGDSVMNISRYGRVFKADFENPVSPVITCLVGKFDKDVMFWHRRLGHVGFDHLTRLSGLDLVRSLPKLKKDLDLVCTPCRHAKMVASSHAPIVSVMTDAPGXLLHMDTIGPARVQSVGGKWYAINTACYISNWVFLRSKLGKTSYELRFGRQPKVSHLRVFGCKXFVLKSGNLDKFEACSTNGLFLGYPTHTRGYRVLILETNKIVVTSPGTRPDIVGSVGXDGRIFEDESDDNDDDEVGSAGQTGRQAGQTAGTPPEEVYVKQPPGFENPDFPNYVFKLSKALYGLKQAPRAWEFEMSMMGELSYFLGLQIKQTPQGTFVHQTKYTKDLLRRFKMENCKPISTPIDSTAVLDPDEDGEAVDQKEYRSMIGSLLYLTASRPDICCSQILWLLSTLKDYGLTFEKVPLFCDNTSAINITKNPVQHSRTKHIDIGFHFLRDHVEKGDVELQFLDTKLQIADISTKPLDSNRFAFLRGELGVIHPFGMV

SEQ ID NO: 121286 - protein, 730 aa, Oryza sativa
  Clone ID: PAT_MRT4530_24326C.1.pep
MARLGLVYSGRNDDDVGCGGAQSSGGHGGVSVAAMDEMRWCQRMDDQISFAGLDIGLVECIGLQAFAPNWYRDIKSKRDIEKIIQRLEDIQIIGEIPMKYWEKNAIECKINIINPEYIIKTSPIEATPKDIKEFKMHIEELLKLGAIRESRSPHRSAAFIVRNHAEEVRGKSRMVINYKRLNDNTIEDAYNIPNKQEWINRIQGSKYFSKFDLKAGFWQVKMAEESIEWTAFTCPQGHYEWLVMPLGLKNAPAIFQRKMQNIFNENQEFILVYIDDLLVFSRTYKEHIAHLEIFFRKVEQNGLILSKKKMEICKEKINFLGHEIGEGKIHLQEHIAKKILQFPDAMNDKKKLQQFLGLVNYARNYINNLAKLAGPLYAKLRKNSQRYFNSEDIKLVRLIKEKVKELKPLELPLEESYFIIETDASQYGWGAILKQRPTKFSAKSEEKICRYASGSYKLKTVNNTDREIMAIINAINAFRLYLGFKEFTVRTDCEAICRYYNQLNSKKSSTRRWVLFEDIITGNGYKVIFEHIKGKDNNLPDMLSRLPELQKPIYVVFDGKLPGVYISFEEIVAQKIDAKLMGGISWKKYKDIDEALSQARKILGINYYLEPAAKEYIQKCKKAKGKKTPEIPIKTTIKEEGYSKKPTYKECLTKGVDPLDGEYIDWKIIEKFEEASPQLKKELKEEILKELKQEMDQKFEQIKKAVDEKLEVSFSDLDTIDLGGHGQPDE

SEQ ID NO: 121287 - protein, 218 aa, Oryza sativa
  Clone ID: PAT_MRT4530_24327C.1.pep
MAPRVSLLAAGAVAVAVVLLLAAPARASNDEGDALYALRTRLSDPNGVLQSWDPTLVNPCTWFHVTCDHASRVVRLDLGNSNISGSIGPELGRLVNLQYLELYRNNLNGEIPKELGNLKNLISLDLYANKLTGTIPKSLSKLGSLRFMRLNNNKLAGSIPRELAKLSNLKVIDLSNNDLCGTIPVDGPFSTFPLRSFENNNRLNGPELQGLVPYDFGC

SEQ ID NO: 121288 - protein, 393 aa, Oryza sativa
  Clone ID: PAT_MRT4530_24328C.1.pep
MARMRVSAAAAAALFVAVVVASPLLASSQQPAMAPAAAAAPTNNSRLEKAYVALQALKRAITDDPKNLTHSWCGPEVCGYFGVYCAAAPDDPCARTVAGVDLNHGDLAGTLPEELGLLTDLAVFHLNSNRFCGSLPDSLRNLHRLHEIDVSNNHLSGSFPSQLLCLPDLKYVDLRFNNLCGEVPAAIFEKKIDALFINNNNFDFKLTESFSNSTASVIVLANLPKLGGCLPSSIGDMAETLNELVLLNSGISSCIPPEIGKLDKLTVLDLSFNDFAGALPETIGHMRALEQLNVAHNGLAGEIPDSICALPHLKNFTYSHNFFCGEPHRCLEVPHVDDRQNCIAGRPDQRSGEECIAFLHRPPVHCDAHGCIAPLSPPPPPPPVHYAPPPPVY

SEQ ID NO: 121289 - protein, 251 aa, Oryza sativa
  Clone ID: PAT_MRT4530_24329C.1.pep
QAQIVVTGLVVCGRSGPFRRSPRELAVPPATDAAALSSRRVIRTAIKKIVAALDGQTIQPRQHLHLRPRSAAPGTARNGLSSGRNEAARFQIWSGPEASFVSAGPDWKRARFGLPPPVPGPDPFPAGLGDTTSGSNPDARRRERRSEEATACGWRRERRRRRRPASHPTSTLSAAFSPVTHHRRLPCSFLSPALGLLLARVLGHRLLPCRCSTPPPPPWFLLARVLVLLLLFFRPNEGFPRAGVCWGFRSA

SEQ ID NO: 121290 - protein, 218 aa, Oryza sativa
  Clone ID: PAT_MRT4530_2432C.1.pep
MASWPEEEEEMYMIVLGHGDVLHGGGGGETKRMWATSQDGWVITYDAETLATALCRCSSNGGGGGAGRRKMVVVLPSFGRTPPADGSSCTLSGDPTDGGGFTVVIIEPPEGSALWYCHVGSSSAAPAKWDKVEVPARPTPTPHLHLHLPQSEPPPPVEGQGEMVFVWLTAFFLVVALIVLVIYQLMCLADLEFDYINPFDSSSRINKVDDLDCIIGGG

SEQ ID NO: 121291 - protein, 86 aa, Oryza sativa
  Clone ID: PAT_MRT4530_24330C.1.pep
MSSLSDIGKENVIPAKVEDLSEEQKAEMEQKMQELKKAYINSFSMTRQGKDRLDLAVHHALINQSGILVTTLSNLINSVVDGSIAE

SEQ ID NO: 121292 - protein, 139 aa, Oryza sativa
  Clone ID: PAT_MRT4530_24331C.1.pep
MSNADGGFAGLDDATSRATATASPEPRIKSMASFPLYLSSPLFSFPPITRTLSHLCASLYRSNISSREAEEKLREEMSFLVNLTARPEEKRREAERAAAMAMERRARRPKALSFPLFQQCPPFLAPILNSATSTTAPRG

SEQ ID NO: 121293 - protein, 157 aa, Oryza sativa
  unsure (1)..(157): unsure at all Xaa locations
  Clone ID: PAT_MRT4530_24332C.1.pep
IYLHHQQGFSSIQKLASFLPQLIVQLAFILRFSXDLPFCLFLQTVAFVAFNKVMTAQYFVWFFCLLPLILPWTTMKLKWKGLACILVWMGSQLHWLMWAYMLEFKGQNVFIPLWAAGLMFLAANIFVMLMVINHHKFTPLFSSSTVKSASKIAAKKE

SEQ ID NO: 121294 - protein, 866 aa, Oryza sativa
  Clone ID: PAT_MRT4530_24333C.1.pep
MAAPGGRGGAAEEEEEGCDLFQCFCKWRKRCSPRIPRVSPGRDYVCISSDASGDSTPKWSVLVGCTSIYEPFHNLRTHRFRVSDSGRVMGCSDDMLERFRGVSPHDDEHTVFSSATAAMAPNSRNMCIICAHSPSFDQRSTDTSGGGGGGGQDIGLLPKVFFMDCVDKSLTVLPPIPFPHGSYQSVSAHGELWTLATVEDPGPSGVKRRLLVYRLDGTSNSWAKISDIDFPYRRPSVNIFCGGPLLQGYAVISDRFILMSFIDLSFFCFDCVSSSLTRVTTEDETFQYVPIRGRAAHVAHNDNGIYFIERGTLFRYNYSPESNKPLKPPEVIDAICPYRKEGYGFVIHLRNDILCAVWMNMNIPCKCATRHVLITTFRIECQLDKDDFEPKVLEVLHSTCRRIGMLRSKAPGHESYDRLCFIQEYLDDSSEIDPSIALMMGARSSYSEADEVDPKMLLCCREFLSIRELSSCVVLEECRVMVKSEFYFICQSGQHTYLYKISTARGKLTCHETILEAEHSLETIRNGDVGIDDPPAWHFVNYGVKLYVIPSVPQYNHYYEVDVYRNSSLILESKRPSICFSAVCRVGQRIVALGDTLEAVYILDLQNVEWVFCKTSSTFLDLRKEIKISGFVDLGNDSMMISEVDACECFILDLKKKQWFVVEPPNGDIWQYCVGLLSGTCMFIEGFIYTCSDGEMVAYELIEKDGLYHWDAPVIMRLPWKKFSNRKFMAFCPICKDVIHDDIAFSIVEARPFGSSHTVATTIVQLEVSPAGTLLLEHGDGMLLTTTVDMSGVTVHVSPSSLRRRGRGLMSGVTAPARGSMKQASWEAPTARRRPLAPITMVCAGPAARLGGQGQSRVVPEKTKRL

SEQ ID NO: 121295 - protein, 183 aa, Oryza sativa
  unsure (1)..(183): unsure at all Xaa locations
  Clone ID: PAT_MRT4530_24334C.1.pep
MDSPATPVGLFPPLHSLLLYNEPYCXCWPWNSSNSSPAKSDSPGMSEWGNNDDDVSGDVITGGDSXAHARRXMTARRRKRRVSTRRGRRGELTGDPNDGGRQPDGDGDEDEAAATIGSTMTAVLRQSSAETEGGTRTATTWRSQQRPSRATVTTGATAAHGWTSGSDCGARVLAEAALQAAAG

SEQ ID NO: 121296 - protein, 77 aa, Oryza sativa
  Clone ID: PAT_MRT4530_24335C.1.pep
KKAEKRAILGVTYAVTHSFTKGGVGNIIPTNAITNATCASESAKQIFKLIKTGTKYVTNNLIYKTHIKTHKNAREKD

SEQ ID NO: 121297 - protein, 134 aa, Oryza sativa
  unsure (1)..(134): unsure at all Xaa locations
  Clone ID: PAT_MRT4530_24336C.1.pep
MADADVRSGALLPARPTPQRRRQKWAVEFARFFRTPRRDPSKPPPPGLRLVARGKLRHHGTWLPAASPAALSISCPSQSFAVPVLTVSIGDVVXSVPIPPRYLEEHFVSILNFSWPQVTCVTQCPISGSRVVFH

SEQ ID NO: 121298 - protein, 81 aa, Oryza sativa
  Clone ID: PAT_MRT4530_24337C.1.pep
MGAEEGSNPPPPPPQAAPAARPQPITPAEFLSWKQRKDAEEAARKAEAAQKREADIASGAVQMNGRELFKHEPWVFDNSIY

SEQ ID NO: 121299 - protein, 41 aa, Oryza sativa
  Clone ID: PAT_MRT4530_24338C.1.pep
GHKARGPTTQPKVRPFGPVQTRHGTIGVRPKPARADSWEQL

SEQ ID NO: 121300 - protein, 51 aa, Oryza sativa
  unsure (1)..(51): unsure at all Xaa locations
  Clone ID: PAT_MRT4530_24339C.1.pep
NLVQLHFWLWVFIHTYHPNTEQDYRTQYTARSNLLKXTLNQVSETRTFVHR

SEQ ID NO: 121301 - protein, 134 aa, Oryza sativa
  unsure (1)..(134): unsure at all Xaa locations
  Clone ID: PAT_MRT4530_2433C.1.pep
MPIRSIEAGSHHEVYTPXAVKAASDELISTLIFGFTGQGFGMALIKLTGGGSTTPAGLIAVAVAHAFAMFVAVYVSAIIICGHINPAETFRACGGSDINLSAGRLYWIGQLLGSTVACFLLRRELEELNDGAIM

SEQ ID NO: 121302 - protein, 1137 aa, Oryza sativa
  Clone ID: PAT_MRT4530_24340C.1.pep
MEVLCVYGMRNRIWKESKFGTNNIKELRRAIFKKEYIKFEIKPGEALDDYLSRFNKILSDLRSVDFSYYANYPQSEISHHFLNGLDMSIWEIKVTSIQESVNMSTLTLDSLYTKLKTHEMNVLSRKVDSKSSALVSSSSSLDVDASSSKSSFLAIFNATSDDQLEQIEEEDLALVANRIARAMNNARNRKRCGPNRCFECGSIDHLRLHCPKLGRGKREDKDGEKTNDNKPKGTFKGRKIKENLKKAFDQVYVAFEPLSDVDGDSGDEAKGKNISGVCFMARGESDSECENNEVSAFEEAINILSAKNKKCEKMYRKQEFIIESLNSEIARLKSLIPNDDDCKSCEVLMNEISKIRELKQPRDVLDCSTCNLNKMKLKDALGRVEYMEDVVKNNEVFSCPKCRKSKGVIVDCENCANLEKEVSYLKNSLLRCSDGKKNLNMILDQSKALVARKENVWIVDSGCSRHMTGLVKVHFKKTGSKIFYSCGDSVLNISRYARVFKADFDNPVSPVITCLVAKFDKDVMFWHHRLGHVGFDHLTRLSGLDLVRGLPKLMKDLDLVCTPCHHAEMVASSHAHIVSVMTDALGQLLHMDTIGPARVKSVGGKWYVLVIVDDFSRYSWVFFMATKDEAFQHFHDLFLRLDLEFPGSLKRIRSDNGGEFKNASFEQFRNKRGLEHEFSSPRVPQQNGVVERKNRVLVEMARTMLDEYKTPRKFWAEAINTACYISNWVFLRSKLGKTSYELRFGHQPKVSHLRVFGCKCFVLKSGNLDKFEARSTDGLFLGYPAHTRGYRVLILETNKIIETCEVSFDEASPGFTQVKGLDCDETFAPVARIEAIRLLLAFAASKSFKLYQMDVKSAFLNGFIQEEIYVKQPPGFENPDFPNHVFKLSKDLYGLKQAPRAWYDRLKNFLLAKGFTMGKVDKTLFVLKHGDNQLFVQIYVDDIIFGCSTHALVVEFAETMRREFEMSMMVELSYYLGLQIKQTPQGIFVHQTKYTKDLLRRFKMENCKPISTPIGSTAVLDPDEDGETVDQKEYRSMIESLLYLTAYRPDIQFAKVPLFRDNTSAINIAKNTVQHSRTRHIDIRFHFLRDHVEKGDVELQFLDTKLQLADIFTKPLDSNRFAFLHGELGIIHPFGMF

SEQ ID NO: 121303 - protein, 115 aa, Oryza sativa
  Clone ID: PAT_MRT4530_24341C.1.pep
MCCGPSARAANDRLALLASRPVTLTVLHAANLLLVCHLSRPRAQPTSLRACRASHPHVSLPRTASSHVDLRRCLHAAPSPRALRDPNFSTPCWATVHPPHHHRLVSLAEPPDLTM

SEQ ID NO: 121304 - protein, 1627 aa, Oryza sativa
  Clone ID: PAT_MRT4530_24342C.1.pep
MAEKTAPPSPGSGKGKPPKPGLTDIIDDNVLPVDPEKFTPEQKQDFEAMMQQARDQYQSSYMQTRKGSLVQKYKLKLVADIPGIGSSKDGDVKRDPDGSAQPSVKGATEGSAGNQGDNLPEVHGTPNRVYQELPGGNFSQGLQDSFNNFQDRIDYAVHHALINQSGVLANMLSNMAAPSVAPIAQPTASASTSVPAASATAAAQLMNPRLLMREYPQPAEQITNQPTQDQVAAMFLPPPVVNSVQQQPIQQAPPVQPTVQPVQQQVAPPVQPMVQPVQQQVAQPVQQASLPQQHFQSNQQTPPRQRLQLIQQTPVRHQPIQHLGSANASAGFAAPWGQLVQPFGNQATPEHLVHHIQPDGTVIPQMVPEHLARNIQSDLHDYQGGNLSYRYQPSAIQAQYQPGGSAQQQFAPQFGQFESMQQQPQGAAQQRQWADVIADVMRKQFGLKLKETGSLYRQPYPEWFERVPLPNRFKIPDFSKFSGQEGVSTYEHISRYLAQYGEASAVDALRVRMFRLSLSGSAFTWFSSLPYGSVNSWADLEKQFHSYFYSGVHEMKLSDLTAIKQRYDEPVHEYIQRFREMRNKCFSLSLTDAQLADLAFQGMIPPIREKFSSEDFDSLSHLIQKVTLHEHRSADVRRSSKKVNHVCQYMYESDDEDDDSEIAAAEWVRSKKVIPCQWVKSPGKEKKYDFDITKADKIFDLLLREKQIQLPAGHTIPSAEELGKKRYCKWHNSGSHSTNDCKVFRQQIQVAIEGGKIKFDDSKKPMKVDGNPFPVNMVHTASQAADGSRAKGFQVHSAKIINKYQRRYDKQQGRRYEENDNGFDPHWDCEFFRFCWNERMRLPSIKNCPGCSDIIESSSRPHSRVGEESAKLALSSEQAVFEKPEGTENRHLKPLYVNGYINGKPMSKMMVDGGAAVNLMPYATFRKLGRNAEDLIKTNMVLKDFGSNPSETKGVLNVELTVGNKTIPTTFFVIDGKGSYSLLLGRDWIHANCCIPSTMHQCLIQWQGDKIEVVPADSRLKMENPSYYFEGVVEGSEACAKDTVDDLDDKQGQGFMSADDLEEIDIGLGDRPRPTFISKGFRPHQQPPRRCKADMLEPVKAEIKRLYDAGFIRPCRYAEWVSSIVPVIKKNGKVRVCIDFRNLNKATPKDEYPMPVADQLVDAASENKILSFMDGNADVMFWHRRLGHVGFDHLTRLSGLDLIRGLPKLKKDHDLVCTQCRHAKMVSTSHAPIVSVMTDAPGQLLHMDTVGPARVQSIGGKWYVLVIVDNFSRYSWVFFMATKDEAFQHFRGLFLRLELEFPGSLKRIRSDNGGEFNNASFEQFCNERGLEHEFSSPRVPQQNGVVERKNRVLVEMARTMLDEYKTPRKFWAEAINTACYISNRVFLRSKLGKTSYELRFGHQPKVSHLRVFGCKCFVLKSGNLDKFEARSTDGLFLGYPAHTRGYRVLILGTNKIIETCEVSFDEASPGTRPEIAGTLSQVQGEDGRIFEDESDYDDDDGDEVGSAGQTGRQAGQTAGTPPVRLAQDVRSDRPGSSAEGSVDADRDGPPEITTSTSTGTERGSTSEVTAPLHIQRRHPPEQIIGNIGERTTRSKTGGGDRCGRDSRAVQPEYLYRSDRQLRFGQTG

SEQ ID NO: 121305 - protein, 135 aa, Oryza sativa
  Clone ID: PAT_MRT4530_24343C.1.pep
MYNRPSVAWSNDSKFTRKERKNHGRQPAKYLHYIWGKVTSPHGGLQEVAKILWLALLLKKNGELVALTAHFDTCESTLYNKGCDGLERTKLDKNMHETMKVQSWPHVGITKMPPCHLTQCQMQAQAQISDNVAFE

SEQ ID NO: 121306 - protein, 1281 aa, Oryza sativa
  Clone ID: PAT_MRT4530_24344C.1.pep
MATPARFSTKPHVFDGTDFSHWCSRMQSYIMTEDYDIWRKVSYPYVIPEAINTAAEKTAFEQNCKARNILLSGISRSDYDRVAHFRTAHEIWNALSNFYQGTNNIKELRRDIFKKEYIKFEMKPGEALDDYLLVISIQESVDMSTLTLDSLYIKLKTHEMNVLSRKVDSKSSALVSSSSSLDADASSSKSSFLAVFNATSDDQLEQIEEEDLALVANRIARAMNNARNRKRGGPNRCFECGSIDHLRSYCPKLGRGKREDKDGEKTNNNKPKGSSQGRKLENLRKAFQQVCAAFEPLSDRDGESGDDDKGKNISDVCFMARGESDTEYEDNELKQPHDVLDCSTCNLNKLKLRDALGRVEYMEDVVKNNEVLSCPKCRKSKGVMVDSENCANLEKEISYLKSSLLRFYDGKKNLNMILDQSKVLVLEVAFVARKENVWIMDSGCSRHMTGDKNWFSSLKKASKTESIIFGDASTSVVLAIGLVKVKEKFELKNVALVENLKYNLLSVSQIVDENFEVHFKKTGSKVFDSCGDSVLNISRYGRVFKADFENPVSPVITCLVAKFDKDVMFWHRRLGHVGFDHLTRLSGLDLVRGLPKLKKDLDLVCTPCRHAKMIAFSHAPIVSVMTDAPGQLLHMDTVGPAGVQSVGGKWYVLVIVDDFSRYSWVFFMATKDEAFQHFRGLFLRFELEFPDESDDNDDDEVGSAGQTGRQAGPTAGTPPDRPAHEERSNWPGSSGSGTVDADRDGPPEITTSTSTNTEHGSTSEVAAPLHIQRRHPPEQIIGNIGERTTRSKVMTHDVCANSAFVASFEPKDVSHALIDESWINAMHEELENFERNKVWTLVEPPSGHNIIGTKWVFKNKQNEDGLIVRNKARLIAQGFTQNEGLDFDETFAPVARIEAIRLLLAFAASKGFKLYQMDVKIAFLNGFIQEEVYVKQPPGFENPDFPNHVLKLSKALYGLKQTPRVWYDRLKNFLLAKGFTMGKVDNTLFVLKHGDNQLFVQIYVDDIIFGCSTHALVVDFAETMCREFEMSMMGELSYFLGLQIKQTPQGTFVHQTKYTKDLLRRFKMENCKPISTPIGSTAVLDPDEDGEAVDQKEYRRMIGSLLYLTASRPDIQFAVYLCARFQASPRASHRQAVKRIMRYLNHTLEFGIWYSTSSSICLSGYSDADFGGCRIDRKSTSGTCHFLGTSLIARSSRKQFSVAQSTAESEYVAAASCCSQILWLLSILKDYGLTFEKVPLFCDNTSAINIAKNPVQHSRTKHIDIRFHFLRDHVEKGDVEL

SEQ ID NO: 121307 - protein, 1277 aa, Oryza sativa
  unsure (1)..(1277): unsure at all Xaa locations
  Clone ID: PAT_MRT4530_24345C.1.pep
SYIMAEDYDIWRKVSHPYVILEAINTAAEKTAFEQNCKARNILLSGISRSDYDRVAHLQTAQEIWSALSNFHQGTNNIKELRRDLFKKEYIKFEMKPGEALDDYLSRFNKILSDRRSVDSSYDANYPQSEISRHFLNGLDISIWEMKVTSIHESINTSTLTLDSLYTKLKTHEMNVLSRKVDSKSSALVSSLDVDASSSKSSFLAVFNATSDDQLEQIEEEDLALVSYLKNSLLRFSDGKKNLNMILDQSEISTHNRGLGFNPYAHNFRHPPVVLGVGARSGKILVKLDTNKTVLKSVGVILVHKQKKEREXIAFAKSKWQKSGFPLRKPVXPQWVPRSDRRPVRPAEQPRSDRPPVRPAALVARKENVWIVDSGCSRHITGDKNWFSSLKKAAKIESIIFGDAATSAVLATGLVKVNEKFELKNVALVQDLKYNLLSVSQIIDENFXEVHFKKTGSKVFDSCGDSVLIISRYGRVFKADFENPISPMITCLVAKFDKDVMFWHRRLGLVGFDHLTRLSGLDLVRGLPKLKKDLDLVCTPCRHAKMVSTSHAPIVSVMTDAPRQLLHMDTVGPARVQSVGGKWYVLVIVDDFSRYSWLFFMATKDEAFQHFRXNRVLVEMARTMLDEYKTPRKFWAEAINTACYISNRVFLRSKLGKTSYELRFGHQPKVSHLRVFGCKCFVLKSGNLDEFEARSTDGLFLGXPAHTRGYRVLVLETNKVSFDEASSGTRPDIAGTLSQVXGEDGHIFEDESDDNDHDEVSSAGQTGCQAGRTAGTPPVRPTHEERSDWPGSSGSGTVDAVRDGPPEITTSTSTDTERGSTSEVAAPLHIXRRHPPEQIIGNIGERTTRSKVTAHDVCANSAFVASFEPKDVSHALTDESWINAMHEELENFERNKVWTLVEPPSGHNIIGTKWVFKNKQNDDGLIVRNKARLVAQGLDFDETFAPVARIEAITLLLAFATSKALYGLKQAPRAWYDRLNNFLLAKGFTMGKVEKTLFVLKHGDNQLFVQIYVDDIIFGCSTHALVVDFAEIMRREFEMSMMGELSYFLGLQIKQTPQAVLDPDEDGEAVDQKEYRNMIGSLLYLTASRSDIXFAVCLCARFQASPRVSHRQAVKRIMRYLNHTHEFGIWYSTSSSICLSGYSDTDFGGCRIDRKSTSGTCHFLVTSLIAWSSRKQSSVAQSTAESEYVAAASCCSQIFWLLSTLEDYGLTFEKVPLFCDNTSAINIAKNLVQHSRTKHIDIRFHFLTDHVEKGDVELQFLDTKLQLADIFTKPFGF

SEQ ID NO: 121308 - protein, 1644 aa, Oryza sativa
  unsure (1)..(1644): unsure at all Xaa locations
  Clone ID: PAT_MRT4530_24346C.1.pep
MAEDYDIWRKVSHAYVIPEVINTAAEKTAFEQNCKARNILLSGISRSDYDRVAHLETAQEIWNALKNFHQGTNNIKELRRDLFKKEYNKFEMKSGKALDDYLSRFNKILSDLRSVDSSYDANYPQSEISRHFLNGLDMSIWEMKATSIQESVNMSTLTLDSLYTKLKTHEMNILSRKVDSKSSALVSSSSSLVVDASSSMPSFLAAFNATSDDQLEQIEEEDLALVANRIARAMNNARNRKRGGPNRCFECGSIDHLRSHCPKLGRGKREDKDGEKTNNNKPNNYNKSKGSNQGRKMENLRKAFQQVCAAFEPLSDVDGESGDDDKGKNVSDVCFMARGESDIEYEDNEVSAFEEAINILSAKNKKCEKMYKKQEFIIESLKSEIDRLKSLIPNDDCENCEVLMNEISKIRDVNAAHDLKNRSSLACCFALHTRTLDELFLTKKLLQKYQIAFHASLMFNMISAKMLKQHDVLDCSTCNLNKMKLKDALGRVEYMEDVVKKNEVLSCHKCRKSKGVMVDCENCANLEKEVSYLKNSLLKFSDGKKNLNMILDQSKVSTNNRGLDFDPYAHNSSHPPVVLGVSARSGEILIKPDTNKTVFKSAGIMSTMSASSSKSNVVHAKPPVSACVAKSSSSNNASKQREKYTCSFCVKDGHIVDFCFRLAHKQKKEREIAFAKSKWQKSGFPSRKPVRPQWVPRSDRRPVRPAAEPRSDRTPVKLAVQRRSDRPPALVARKENVWIVDSGCSRHMTGDKNWFSLPRXASKTESIVFADASTSAVVATGLVKVNEKFELKNVALVKDLKYNLLSVSQIVDEEFEVHFKKTESKVFDSRGDSVLNISRYGRVFKADFENSVSPVITCLVAKFDKDVMFWHRRHGHVGFDHLTRLSGLDLVRGLRKLKKDLDLVCTPCRHAKMDSTSHAPIVFVMTDAPGQLLHMDTVGPARVQSVGGKWYVLVIVDDFSRYSWVFFMATKDEAFQHFRGSFLRLDLEFPGSLKRIRSDNGGEFKNALFEQFCNGRGLEHEFSSPHVPQQNGVVERKNRVLVEMARTMLDEYKTPRKFGAEAINTACYISNRVFMRSKLGKTSYELRFGHQPKVSHLCVFGCKCFVLKSGNLDKFEARSTDGLFLGYPAHTRDYRVLILGTIKIVETCEVSFDEASPGTRPEIAGERTIRSKVTTHVVCANSAFVASFEPKDMLHALTDESWINAMHEELENFERNKVWTLVEPPSRHNIIGTKWVFKNRLNEDGLIVRNKTRLVAQGFTQVESLDFDETFAPVARIEAIRLLLAFAASKGFKLYQMDVKSAFLNGFIQEEVYVKQPPGFENPDFPNHVFKLSKALYGLKQAPRAWYDRLKNFLLAKGFTMGKVDKTLFVLKHGDNQLFVQIYVDDIIFGCSTHALVVDFAETMRREFEMSMMGELSYFLRLQIKQTPQGTFVHQTKYTKDLLRRLKMENCKPISTPIGSTAVLDPDEDGEVVDQKEYRSMIGSLLYLTASRPDIQFAVCLCARFQASPRTSHRQAVKRIMRKQSSVGQSTAESEYVAAASCCSQILWLLSTLKDYGLTFEKVPLFCDNTSAINIAKNPVQYSRTKHIDIRFHFLRDHVEKGDVELQFLDTKLQIADIFTEPLDSNRFAFLRGELGIIHPFGMV

SEQ ID NO: 121309 - protein, 247 aa, Oryza sativa
  Clone ID: PAT_MRT4530_24347C.1.pep
PRVRTHMFNLEGLIPKLCQISQELREDDKGFRLRCAALQALASMVQYMGDHSHISMELDEVVSVIVSCYEVNQTLSIKEVVRLQDDDDLVINGSLTGLPVSGQNSAKVASDTMSASENPAHWARVCLRNMASIAKEATTVWRVLDPLFRLFDSHNYWSPENGIAFSILQEMQALMDKSGQNGHLLLSFTIKHIDHKSVAKKPAKQTSILKVASLLAKHAKLKASVTIASATSDLIKHLRKCMHCAVE

SEQ ID NO: 121310 - protein, 1003 aa, Oryza sativa
  Clone ID: PAT_MRT4530_24348C.1.pep
MGICLRDEVGHALCAGAGRLEFVSDAISAEAKACLAALLAILAQGVSVVDIESDSELLVSAIKSSSHDLATGATIFTEIKTVLQFQFSSFDFYFAPRSYNNVAHELARLGDRKGPFPPQKLAIEVRGSPTYILGHLPFHNQCGTIQQSPLHTLVSLSPSPPLHRIRAPTGPRSIRLAHKQKKEIEIAFAKSKWQKSGFPSRKPALMARKENVWIVDSGCSRHMTGDKDWFSSLKKASKTESIVFADVSTSVVVATDLVKMVSTSHAPIVSVMTDAPGQLLHMDTVGPNRVQSVGGKWYVLVIVNDFSRYSWVFFMATKDEAFQHFRGLFLRLELEFPSSLKRIRSDNVSHLRVFGCKCFVLKSRNLDKFEARSTDGLFLGYPAHTRGYRVLILGTNKIVETCEVSFDEASPGTRPEITGTLSQVQGEDGRIFQDESDYDDDDEVGSAGQTGRQAGQTAGTPPVRPAQDVRSNRPGSSGSGTVDADRDGPPEITTSTSTDTERDSTSEVTAPLHIQRRHPPEQIIGNIGERTTRSKVTAHDVCANSAFVASFEPKDVSHALTDESWINAMHEELENFERNKVWTLVEPPSGHNIIGIKWVFKNKQNEDGLIVRNKARLVAQGFTQVEGLDFDETFAPVARIEAIRLLLAFAASKGFKLYQMDVKSAFLNGFIQEEVYVKQPPGFENPDFPNHVFKLSKALYGLKQAPRAWYDRLKNFFLAKGFTMGKVDKTLFVLKHGDNQLFVQIYVDDIIFGCSTHALVVDFAETMRREFEMSMMGELSYFLGLQIKQTPQGTFVHQTKYTKDLLRRFKMENCKPISTPIGSTAVLDPDEDGETVDQKEYRTSPRASYRQAVKRIMRIDRKSTSGTCHFLGTSLIAWSSRKQSSVAQSTTESEYVAAASSCSQIFWLLSTLKDYGLTFEKVPLFCDNTSAINIAKNHVQHSRTKHIDIRFHFLRDHVEKGDVELQFLDTKLQIADIFTKPLDSNHFAFLRGELGIIHPFGMV

SEQ ID NO: 121311 - protein, 119 aa, Oryza sativa
  Clone ID: PAT_MRT4530_24349C.1.pep
MVLTADLVPGFERRERSRTGEVQTLSMHEVRPPPKPYLILVGMGKIKAPVFLMRRRFDDMGEEMPVVRKRKEGRLRLGRNGGAGGGTEFGNDSYTEKEKGVTLSRCGVKQQTHENAFLF

SEQ ID NO: 121312 - protein, 85 aa, Oryza sativa
  Clone ID: PAT_MRT4530_2434C.1.pep
TALLPMSDICAVRQHDVHMMNRISLYGIEGYNVQFCSSSLHYNTFSRFLGQWFCPCANYSGLGPRFDAAAVWVGLGGLPRGGWGG

SEQ ID NO: 121313 - protein, 502 aa, Oryza sativa
  Clone ID: PAT_MRT4530_24350C.1.pep
MATPARFSTKNHVFDGTDFSHWCSRMQSYIMAEDYDIWRKVSHPYVIPEAINTAAEKTAFEQNCKARNILLSGISRSDYDRVTHFRTAHEIWNVLSNFHQGTNNIKELRRDIFKKEYIKFEMKPGEALNDYLSRFIKILSYLRSVDFSYDTNYPQSEISRHFLNGLDMSIWEMKVTSIQKSVNMSTLTLDSLYRKLKTHEMNVLSRKVDSKSSALVSSSSYSLDVDAFSSKPSFLAVFNVTSDDQLEQIEEEDLAFVANRILELRIMPGTGKELGRGKREDKDDEKNNNNKPKGSYQERKLENLRKAFQQVCAAFEPLSDVDGESGDDDKGMNISDVCFMARGESDTEYEDNELKQPHDVLVCSTCDLNKMKLKDALGRVEYMEDVVKNNEVLSCPKCRKSKGVMVDCENCANLEKEVSYLKNSLLRFSNGKKNLNMILDQSKLINRKRRERLVLQNQSGNRVFPRGNRSDRSGSRDQTGDRSDRLLSTGQTGGTKAVRPVW

SEQ ID NO: 121314 - protein, 65 aa, Oryza sativa
  Clone ID: PAT_MRT4530_24351C.1.pep
MQATEAKRLGGGCLGAREGSCGTGVRHRGEKGKWRLQRRSHGRRCGREAGSTCGVGRSEGATEMQ

SEQ ID NO: 121315 - protein, 47 aa, Oryza sativa
  Clone ID: PAT_MRT4530_24352C.1.pep
VQFLNSSSVSIGINKIYILSKLAKMPVHHYNSLQASFYSLLKSARFL

SEQ ID NO: 121316 - protein, 358 aa, Oryza sativa
  Clone ID: PAT_MRT4530_24353C.1.pep
MVLLGMADTEPMEPDLYEKIMEEARRRFVSGLEFTTFGVKEELPRVIEAWQLTGGQTGGKRRSDRRRLQARQATSAIEEEDLALVANRIARAMNNARNRKRGGPNRYFECGSIDHLRSHCSKLRRGKREDKDGEKTNNNKPKGSSQGRKLDNLRKAFQQVCAAFEPLSDVDGESGDDDKGKNITDVCFMARGESDIEYEDNEALVARKENVWIVDSGCSRHMTGDKNWFSSLKKASKTESIIFGDASTSAVLATGLVKVNEKFELKNVALGEDLKYNLFSVSQIVDENFEFHFKKTGSKVFDSCGDSVLNISCYGRVFKADFENLVSPVMVVSSHAPIVSVKAGRPGKGYTQGPRWPK

SEQ ID NO: 121317 - protein, 405 aa, Oryza sativa
  Clone ID: PAT_MRT4530_24354C.1.pep
TLQLRKIRSSWRLKPTFGKASKALVARKENVWIVDSGCSRHMTGDKNWFSSLKKASNTESIIFGDASTSAVLTTGLVKVNENFELKNVALVEDLKSNLLSVSQIVDKEFEVHFKKTESKVFDSHGDSVLNISRYGRVFKADFENPVSPVITCLVAKFDKDVMFWHRRLGHVGFDHLTRLSGLDLIRGLLKLKKDRDLVCTPCRHAKMVSTSHAPIVSVMTDAPGQLLHMDTVGPARVQSVRGKWYVLVIVDDFSRYSWVFFMATKDEAFQHFRGLFLRLELEFSGSLKRIRSDNGGEFKNASFEQFCSERGLEHEFSSPRVPQQNGVVERKNRVLVEMARTMLDEYKTPTKFWHEAINTACYISNRVFLQSKLGKTSYELRVEIMGTPYPHGMVIRLVIGDSLYL

SEQ ID NO: 121318 - protein, 1619 aa, Oryza sativa
  unsure (1)..(1619): unsure at all Xaa locations
  Clone ID: PAT_MRT4530_24355C.1.pep
MDRLQLTSCISCTLESTQSLKKLMVARNILLSGISRSDYDCVAHLQTAHEIWTALSNFHQGTNNIKELRCDLFKKEYIKFEMKPGEALDDYLSRFNKILSDLRSIDSSYDANYPQSKISRHFLNGLDMSIWEMKVTSIQESVNMSTLTLDSLYTKLKTHEMNVLSRKVDSKSIALVSSLDVDASSSKSYFLAVFNATSDDQLEQIEEEDLALVANRIARAMNNARNRKRGGPNRCFECGSIDHLRSHCPKLGRGKREDKDGEKINNNKPNKNKSKGSYQGRKMENLRKAFQQVCAAFEPLSDVDGESGDDDKGKNISDVCFLARAESDTEYEDNEVSAFEEAINILSAKNKKCEKMYRKQEFIIESLKSEIDRLKSLIHNDDDCENCELKQPHDVLDCSTCNLNKLKLKDALGRIEYMKDVVKNNEVLSCPKCRKSKGVMVDCENCANFEKEVSYLKNSLLRFSDGKKNLNMILDQSKVLVLEVLINRKRRERLLLQNQSGKNRVFPRGNRSDRSGSRGQTGDRSDQLLSGGQTGGTETALVARKENVWIVDSGCSRHMTGDKNWFSSLKKASKTESIIFGDVATSAVLATGMVKVNEKFELKNVALVENLKYYLLSVSQIVDENFEVHFKKTGSKVFDSCGDSVLNISHNERVFKADFENPVSPVITCLVAKFDKDVMFWHCRLGHVGFDHLIRLSGLDLVRGLPKLKKDLDLICTPCRHAKMVASSHAPIVSVMTDAPGQLLHMDTVGPARVQSVGGKWYVLVIVDDFSRYSWVFFMATKDEAFQHFRGLFLRLELEFPGSLKRIRSDNGGEFKNASFEQFCNERDLEHEFSSPRVPQQKGVVERKNRVLVEMARTMLDEYKTRRKFWAEAINTACYISNRVFLRSKLGKTSYELRFGHQPKVSHLRVFGCKCFVLKSGNLDKFEARSTDGLFLGYPAHTRGYRVLILGTNKIVETCEVSFDEASPSTRPDISGTLSQVQGKDGRIFEDESNDNDDDEVSSAGQTGRQAGQTAGTPPVRPAHEERSDRPGSSGSGTVDADRDGPPEITTSTSTDTERGSTSEVVAPLHIQRRHPLEQIIGNIGERTTRSKVTTHDVCANSAFVASFEPKDVSHALTDESWINAMHEELEKFERNKVWTLVEPPSGHNIIGTKWVFKNKQNEDCLIVRNKARLVAQGFTQVEGLDFDETFAPVARIEAIRLLLAFAASKGFKLYQMDVKSAFLNGFIQEEVYVKQPPGFENPDFPNHVFKLSKALYGLKQAPRAWYDRLKNFLLAKGFTMGKVDKTLFVLKHGDNQLFVQIYVDDIIFGCSTHALVVDFAETMRREFEMSMMGELSYFLGLQIKQTPQGTFVHQTKYTKDLLRRFKMENCKLISTPIGFTAVLDPDEDGEAVDQKEYRSMIGSLLYLTASRPDIQFAVCLCARFQASPRASHRQAVKRIMRYLNHTLEFGIWYSTSSFICLSGYSDADFGGCRIDRKSTSGTCHFLGTSLIAWFSRKQSSVAQSTAESEYVAAASCCSQILXLLSTLKDYGLTFEKVPLFCDNTSAINIDKNLVQHSRTKHIDIRFYFLRDHVEKGDVEFQFLDTKLQIADIFTKPLDSNHFAFLRGELGIIHPFGMV

SEQ ID NO: 121319 - protein, 59 aa, Oryza sativa
  Clone ID: PAT_MRT4530_24356C.1.pep
MKVRSPVVVGSISEIPAVLPWSTRLNIAVGAAKGLAFLHDAEKPVIYRDFKASNILLDS

SEQ ID NO: 121320 - protein, 406 aa, Oryza sativa
  unsure (1)..(406): unsure at all Xaa locations
  Clone ID: PAT_MRT4530_24357C.1.pep
DSHTASQLCETASRRRSIALRPPLAPTAGPPSSAPRDLAPTVRAAQEPAGGGACAAAAVVRRHAERAHGVHGGRHAHXAPVNSAPAPAPAATYPPAGGNGAAALDAGEPVVKKKRGRPRKYGPDGSMSLALVPVSTAAVAASGPFSPAAAAKSPDAVSSAPPPGAKKRGRPKGSTNKKHVPSFGSAGAGFTPHVIFVKAGEDVSAKIMSFSQHGTRGVCVLSANGAISNVTLRQAATSGGTVTYEGRFEILSLSGSFLLSENGGHRSRTGGLSVSLAGPDGRVLGGGVAGLLTAASPVQIVVGSFNTEGKKGPKLHAPSDPMSAPLKMVPMSGTGPSSPPSRGTLSESSGGPGSPLNQGVTASNHGREMQSYIQEREREVAEREAAWKAELSRREVGDDLMLMIPF

SEQ ID NO: 121321 - protein, 82 aa, Oryza sativa
  Clone ID: PAT_MRT4530_24358C.1.pep
NPKGNFFKKNFPLKKISPEFLIKKKKRDQIKKTQGDLKKIFWLGGNFSKKIFGPPNLKKNQIGKKKRGKKLGGKNFFFFFFF

SEQ ID NO: 121322 - protein, 104 aa, Oryza sativa
  Clone ID: PAT_MRT4530_24359C.1.pep
MERAEHWLLPATLIDSGTSRRCQGQINGQLARFVSSVVLFREHGAVWEWDKGEKSEGARIKPATSDSRTMRDLEALLQWIFFCLNSALNLILVAWACKLLAFSC

SEQ ID NO: 121323 - protein, 117 aa, Oryza sativa
  Clone ID: PAT_MRT4530_2435C.1.pep
MAKSLLAASALLLALLLAVAGGAAAAGEVPLAWELGVGGGGGGGEEDSFGFSSEDAAADGAAVVRRVLQGQGYISYGALRRDTTPCSVRGASYYNCRPGGQANPYSRGCSAITRCRG

SEQ ID NO: 121324 - protein, 222 aa, Oryza sativa
  Clone ID: PAT_MRT4530_24360C.1.pep
MAESAARRRQQRRFSSPSLRAYLTPAFDAVAAGVDGVSPYSGSASSSGGMDLGLDDSLLRYRRACFSSAATTDLDHRLLVYSPQSAPVYPPPPAGDVVVAGGCRYDSKRQAGGQTGAPGYQDFNDISSLFSPWQPSADHPTATARGIPNKPPADIRSREDTVIQAARAELSTPKPDEATTPSAQPASAQAEPIEEDEELIIQTLYGQSNGRRLPIFRSICPE

SEQ ID NO: 121325 - protein, 131 aa, Oryza sativa
  Clone ID: PAT_MRT4530_24361C.1.pep
MSWQAYVDDHLMCEIDGNHLTAAAIVGHDGSVWAQSPNFPQYKPEEITGIMKDFDEPGSLAPTGLFLGGTKYMVIQGEPGVVIRGKKGTGGICVKKTGLSLILGIYDEPMTPGQCNMIVERLGDYLIEQGC

SEQ ID NO: 121326 - protein, 159 aa, Oryza sativa
  Clone ID: PAT_MRT4530_24362C.1.pep
MAAMLARLAGKQQQLLLQYALRRSPAPPGRRLPGVVRALPLLWSAPFLGGSRRLKSYNAAAGVAVGGDKAAADHHHRHAVGADLDVGELASEEHYSAAGTSSSSSREYHSVAQTVAAADGDFDGGEKMATRPAARGGGAKASVLLGWGEPEPGGGPHYN

SEQ ID NO: 121327 - protein, 143 aa, Oryza sativa
  unsure (1)..(143): unsure at all Xaa locations
  Clone ID: PAT_MRT4530_24363C.1.pep
MVGTILYPLHKDPARCFGNRRRRRCDRDGXGGHNRSCRHTTRVVAAATNPSPASAGSPARPPHRSTKKKVKPACALMAREAENGIHDPMKDLNLGSWDATQVTATTRLLRLDGIIGGRYAFVFRKINHEIKRDHELKPPKKVS

SEQ ID NO: 121328 - protein, 60 aa, Oryza sativa
  Clone ID: PAT_MRT4530_24364C.1.pep
SIECCLVISFESINWHAYPKILSFATKYIPIQSASLFCKFSKSTTSRCLLPVYKSIIILV

SEQ ID NO: 121329 - protein, 61 aa, Oryza sativa
  unsure (1)..(61): unsure at all Xaa locations
  Clone ID: PAT_MRT4530_24365C.1.pep
LQSIRRYFANQLIDYLHHEELSVVKDGKTNSGCVPFTNRWNRKIFSKLFEXTESCERIYIL

SEQ ID NO: 121330 - protein, 117 aa, Oryza sativa
  unsure (1)..(117): unsure at all Xaa locations
  Clone ID: PAT_MRT4530_24366C.1.pep
MESLPAPFVATPSPPTAPSPPPSMSQPTPSFRRSTTPAPTGFGPTGTMAACTGEPPLFTPSPTHRHVGAAAARRPGLRHTFIAVPHGSRSRTIPNGMGGXIRVRPVSDSDEESGLSA

SEQ ID NO: 121331 - protein, 643 aa, Oryza sativa
  Clone ID: PAT_MRT4530_24367C.1.pep
MADGGEMDEEAMRAFFPMSFGKAPTRAGAAASAHASTLRKPPQNPSAKPSTSSAAAAAAAGGDDDDDDDDGPMVGPPRPPPQPAGGGEGEDDEEGGGVMIGPPRPPPRSSSRGEGEDADGGMIGPPRPPPVKDDDEEDEDDDDDDGDDSDDEMEDDGERYNRIPLSNEVVLRGHTKVVSALAVDHTGSRVLSGSYDYTVCMYDFQGMNSKLQSFRQLEPFEGHQVRSLSWSPTSDRFLCVTGSAQAKIYDRDGLTLGEFIKGDMYIRDLKNTKGHISGLTGGEWNPKSKETILTSSEDGSIRLWDVSDFKSQKQVIKPKLARPMRIPVTSCAWDHEGKRIVGGIGDGSIQLWTVKTGWGSRPDIHVEKTHTEDITGVKFSTDGQILLSRSMDSTLKIWDLRKMKTPLKVFEDLPNHYAETNVAFSPDEQLIFTGTSIEKDGENGGLLCFFDRRKLELVSRVGISPHYSVIRCLWHPRINQVFATVGDKKEGGTHILYDPSISQRGALVCVGRAPRKKSVDDFEVQPVIHNPHALPLFRDQPSRKRQREKILKDPLKSHKPEAPVNGPGFGGRVGTTKGSLLTQYLLKEGGLIKETWMDEDPREAILKYADAAEKDPKFIAPAYSQTQPKPVFAESDSEGEEKK

SEQ ID NO: 121332 - protein, 246 aa, Oryza sativa
  Clone ID: PAT_MRT4530_24368C.1.pep
VGCGKSSLLNSIIGEIHVTSGSITSYGSIAYVPQVPWILSGSLRDNILLGEEFDPRRYEEVIHACTLDVDISAMVGGDMSHIGEKGLNLSGGQRARLALARALYHDSDVYLFDDVLSSVDSQVASYILEKAIMGPKMKRKTRILSTHNLQAISAADMIVVMANGLVKWFGTLDSFLATPYSTLSKPESSRVISSTFSEKNKGVSVAHESETNGLIDNDSVVDHEEQREQNSVEARKEGMVELSVYK

SEQ ID NO: 121333 - protein, 73 aa, Oryza sativa
  Clone ID: PAT_MRT4530_24369C.1.pep
IRNPGNNWYFKLLPQRFTKHTFNSYTSFKGAFCTRIKEWALLQACNRLQRISIPLANARRSTYGQTKATTTNY

SEQ ID NO: 121334 - protein, 66 aa, Oryza sativa
  Clone ID: PAT_MRT4530_2436C.1.pep
MMTVEKSNSDSNKNENVSHRKCCATKENPRNDLTFMNTGCKLTGTTNLKRLSRRLLCFGKGHGYTA

SEQ ID NO: 121335 - protein, 108 aa, Oryza sativa
  Clone ID: PAT_MRT4530_24370C.1.pep
VILLLSRHCALYDGLSSRRENTQPSSPTNVERNDRLSTNPVATGGALRATRRLDSWARTQTELLLELGDTWRTRRPRVATPSVWWLDEHVTELLHERAAAYALRPRIP

SEQ ID NO: 121336 - protein, 84 aa, Oryza sativa
  unsure (1)..(84): unsure at all Xaa locations
  Clone ID: PAT_MRT4530_24371C.1.pep
MKKMVVMVRQRQQRQPVMVVVMVCWALLATVARGNCRDXCLSWCQGWAIICHLFWWSSCLGXFCISTMSTSRPHSITDHDQHFP

SEQ ID NO: 121337 - protein, 1650 aa, Oryza sativa
  Clone ID: PAT_MRT4530_24372C.1.pep
MGFDPLEWYCQPVNGGVWSDVENAFGAYTPCGTETLVVCISYFALFGVCFYRIWRTTRDYTVQRYKLRSPYYNYMLGLLVVLCIAESLYRIATGTSIMNLDGETSLAPFEVTSSIIEIAAWCCMLVMIALETRIYIYEFRWYIRFVVIYILVGEAAMFNLVLSVRQYYSSSSIFYLYCSEIIFKLLFGILMVVYLPSLDSYPGYTPVRHEALVDNTDYEPLPGGEQICPERHANIFSRIFFSWMTPLMQQGFKRPITDKDIWKLDSWDETETLYNRFQKCWNNELQKPKPWLLRALHSSLGGRFWLGGFFKIGNDASQFVGPLILNLLLESMQKGDPSWSGYIYAFSIFAGVSLGVLSEAQYFQNVMRTGFRLRSTLIAAVFRKSLRLTNDSRKKFASGRITNLISTDAESLQQVCQQLHSLWSAPFRIVIAMVLLYAQLGPAALVGAAMLVLLFPIQTVIISKMQKLTKEGLQRTDRRISLMNEILAAMDTVKCYAWEQSFQSKVQDIRDDEISWFRSAQLLAALNSFILNSIPVIVTVVSFGVYSLLGGDLTPAKAFTSLSLFAVLRFPLFMLPNLITQVVNCKVSLKRLEDLLLAEERLLLPNPPLDPELPAISIKNGYFSWESQAERPTLSNVNLDVPMGSLVAIVGSTGEGKTSLISAMLGEIPPVSGSNTSVVLRGTVAYVPQVSWIFNATVRDNILFGSPFQPPRYEKAIDVTSLRHDLDLLPGGDLTEIGERGVNISGGQKQRVSMARAVYSDSDVYIFDDPLSALDAHVGRQIGTLSGCYRVIASIRYGTPFVTVFDKCIKEELQHKTRVLVTNQLHFLPYVDKILVVHDGVIKEEGTFDELSNSGELFKKLMENAGKMEEQMEEKQDESQRQDDIKHPENGGSVIADGDMQKSQDTSNKTKQGKSVLIKQEERETGVISAKVLSRYKNALGGIWVVSVLFFCYALTEVLRISSSTWLSVWTDQGSTKIHGPGYYNLIYGLLSFGQVLVTLTNSYWLITSSLRAAKRLHDAMLRSILRAPMVFFHTNPLGRIINRFSKDLGDIDRNVAIFVNMFMAQISQLLSTFVLIGIVSTMSLWAIMPLLILFYAAYLYYQTTSREVKRLDSITRSPVYAQFSEALNGLSTIRAYKAYDRMANINGKSMDNNIRFTLVNMSSNRWLAIRLETLGGIMIWFTATFAVMQNQRAENQKAFASTMGLLLTYTLNITNLLTAVLRLASLAENSLNAVERVGTYIELPSEAPPVIEDSRPPPGWPSSGVVKFEDVVLRYRPELPPVLHGISFIINGSEKVGIVGRTGAGKSSMLNALFRIVELERGRILVDDCDTSKFGIWDLRKVLGIIPQAPVLFSGSVRFNLDPFNEHNDADLWEALERAHLKDVIRRNALGLDAEVSEAGENFSVGQRQLLSLARALLRRAKILVLDEATAAVDVRTDALIQKTIREEFKSCTMLIIAHRLNTVIDCDRLLILSAGKVLEFDSPENLLSNEHSAFSKMVQSTGPSNAEYLKTLVFGDGEERLRKEESKMQDIQRKWVASNRWAVAAQFALAASLASSHSDLLALEAAEGNNILRKTKDAVITLQNVLEGKHNTEIDDTLAQYEVPSDRWWSSLYKVMEGLAMMSRLGRNRLQQPSYNFENNSSIDWDQM

SEQ ID NO: 121338 - protein, 145 aa, Oryza sativa
  Clone ID: PAT_MRT4530_24373C.1.pep
KIQTHSFGLGHSSNSATQLLANTAAKTGMQHGRCDPVPIPIACLPLAAGSSSSSKRQRWCKQPTVFFAGSCKRSSQARLCACTLQCGAPSCPCVAAAASVCPACDLLVRSHVAGCKRVGHEVGRSCTELAGTALDALTSSPSSFA

SEQ ID NO: 121339 - protein, 55 aa, Oryza sativa
  unsure (1)..(55): unsure at all Xaa locations
  Clone ID: PAT_MRT4530_24374C.1.pep
MGQSSSAARRXVVVVCAAMVVAAAAXQXYNXXYNFXDSITDTXNXCTNXTXSXIT

SEQ ID NO: 121340 - protein, 182 aa, Oryza sativa
  Clone ID: PAT_MRT4530_24375C.1.pep
MSFASHAGAGAGDQQHRCCSRTVHFVLVPMMAQGHTIPMTDMARLLAEHGAQISLVTTPVNAGRMAGFVAAVEEAGLPVQLLELPFPAADFGLPDGCENIDMLQCKDDMRKFLEACGALREPLMARLRQHDLPPSCIVSDMMHWWTSDIARELGLEEIREKIYDEEMRSDGKVMNSFDELET

SEQ ID NO: 121341 - protein, 379 aa, Oryza sativa
  Clone ID: PAT_MRT4530_24376C.1.pep
MDTAAKLHSPTTPLLAHAHHDDRLLLCSPPAAVEFPVLKSRAARGALLLAANYAALFVGSLSSSLLSRFYFAHGGADRWLATLVQSAGFPALLLPLMCARRPASRPFAGFTPRLVMYCVLLGLVMGLNNLLYSCGTSYLPVSTTALLLSMQLAFTLALAAALVRVPLSFANFNAVVLLTLSSLLLALRHGAGGGGGGADATSPDYLVGVAATLGAALLFALYLPAAELVYRHGGVTGFRMVVEAQVIMEAVATAVGAAGMVSSAGGKWPWDGVEATWDLSPAAYYAVVGAAVLSWQLCFLGTAGTVFLTTSLHGGICMTALLAVNVAGGVVVFGDEFGPEKAVAMLLCLWAFSSYVYGEYKKGDKAMANEEDQGILDRV

SEQ ID NO: 121342 - protein, 1046 aa, Oryza sativa
  Clone ID: PAT_MRT4530_24377C.1.pep
MDDDTAGHASGGYTTTAAAHFVLVPMMAQGHAIPMTDMARLLAEHGAARVSLVVTPVNAARMAGFAAGVEEAGLPVQLVELPFPAAEFGLPDGCENVDMLPSKDLFSNFLLACGALREPFAARLRQQRPPASCIISDMIHSWAGDIARELGVPWLTFNGSCTFSSFARDIIYRKNLLENLTDDEIVKVSGFPTPLELPKARCPGTLCVPGLKQISDKIYEAETRSDGRIMNSFQEMESLYIESFERTIGKKIWTIGPMCLCHRDSNAMAARGNKASMDDAKCLQWLDSKKPGSVIFVSFGSLSSTDPQQLVELGLGLEASKKPFIWVIKAGKKFPEVEEWLADGFEERVKDRGMIIRGWAPQMMILWHQAIGGFMTHCGWNSTLEGISAGVPMITWPHCSEQFVNEKLVVDHLKIGVEVGVKGVTQWGTEQKEVKVTRTAVETAVSMLMDEGEVAQEIRMRAKDFGMKARRALEEGEAREYLSILSTYCIDSNCGLCGCIKNGRSFMQAAHDFSVNAYLQGSNCSCHTLTVHACLGRLTRYNHTAMSFASHAGAGAGDQQHRCCSRTVHFVLVPMMAQGHTIPMTDMARLLAEHGAQISLVTTPVNAGRMAGFVAAVEEAGLPVQLLELPFPAADFGLPDGCENIDMLQCKDDMRKFLEACGALREPLMARLRQHDLPPSCIVSDMMHWWTSDIARELGIPWLTFSGFCTFASLARDIVYRNNLLRDLTDEEEVVKLSGFPTPLELPKARLPGSLCVPGLEEIREKIYDEEMRSDGKVMNSFDELETLYMESYKQVTDKVWTIGPMCLCHRDRNTMAARGNKASLDEVKCLQWLDSKKPGSVIFVSFGTLVSTAPQQLVELGLGLEASNKPFIWVIKAGNKFPVVEKWLADGFEERVIDRGMIIRGWAPQMMILWHQAIGGFMTHCGWNSTIEGICAGVPMITWPHFAEQFLNEKLVVDHLKIGMEVGVKGVTQWGSEQKEAQVTRNSVETAVSTLMNEGEAAQGMRMRAKDFGIKARRALEEGGSSYDNISLLIQEMGNKQNASG

SEQ ID NO: 121343 - protein, 106 aa, Oryza sativa
  unsure (1)..(106): unsure at all Xaa locations
  Clone ID: PAT_MRT4530_24378C.1.pep
MSDYSVTLCHLEGCRVVFNNVDMVSRLLSSIIWAYMLRVSRGGPLIVTAQYGYSSMIVYIPKKLSXGGYSSIFSXPGWTAMTGFRKKLGNPEWSLEAPGGHCYGVL

SEQ ID NO: 121344 - protein, 41 aa, Oryza sativa
  Clone ID: PAT_MRT4530_24379C.1.pep
NISLISMGVRWVCTPTKISNLLVKNSNVFFYKTLVYRCHLL

SEQ ID NO: 121345 - protein, 117 aa, Oryza sativa
  Clone ID: PAT_MRT4530_2437C.1.pep
MAMERFLTSLVFCECEAPGMDVFAYAAGTSLTAAVNKVSTASPGGRVVGPAVSAAAPSSEAKKDAAGKAPRRLLQAAYSPAFDGLNSFETIVPHAATQARTNQTKLVSKGKSEAQLH

SEQ ID NO: 121346 - protein, 145 aa, Oryza sativa
  Clone ID: PAT_MRT4530_24380C.1.pep
MAARGLAALSSPARVGASATPCSGRPVRVSATPAAGGWRRRRRSMVVRAGGPPSTNALILAFVLPLSLFVGTLITAARVADDLDERFLREMESNKAIMEENEDFEQDGGGEEEEEDAEQPAPVEKEGVLVAAAPRTRNRPKREVQ

SEQ ID NO: 121347 - protein, 62 aa, Oryza sativa
  Clone ID: PAT_MRT4530_24381C.1.pep
MHACIEPQEGEVGGGGAMMGVVGRRRQYVLRSIRDPNYTVCYRDRMESECIDITRSRRSRLE

SEQ ID NO: 121348 - protein, 945 aa, Oryza sativa
  unsure (1)..(945): unsure at all Xaa locations
  Clone ID: PAT_MRT4530_24382C.1.pep
MEPRVLMALALVVVAAGVPAVLCQTNAQDAAALEGLKSQWTNYPLSWNSGDPCGGGWDGIMCTNGRVTTLRLSSVSLQGTLSSSIGQLGQLTYLDLSFNINLGGPLPAEIGNLGELTTLILAGCSFTGNIPIAIGNLRKLGFLALNSNKFSGGIPSSIGVLTNLLWLDLADNQLTGSVPISTSTSPGLDQLVKTQHFHFNKNQLTGTLTGLFNSNMTLIHILFDSNKFSGSIPAEVGTVSTLEVLRLDRNGFTGAIPATIGSLVKLNELNLANNKLTGSVPDLSNMTNLNVVDLSNNTFDPSVAPSWFTSLTSLASVVLSNNQFNGTLEITGNISSSLQTVNLMDNRIVSTDTASYKKTLLLAGNPFCAEQDPNNRAFCSRQLQNASPYSTSMEKCGSAQCSDGQNVNPASCGCAFSYNGKMVFRAPFFVDLVSSTPFQLLESTMAAKLNLLPGSVALSDIHFNSDNYLQVQVKLFPTSGVTFNLSELTRIGSSLSNQIYKPPANFGPYFFIADPYAPLAVALGGKKSKMSTGAIAGIAVAGGVLVIALIFMSLFALRQKRRAKELKERADPFASWAAGQKDSGGAPQLKGARFFSFDELKICTNNFSDNHEIGSGGYGKVYRGILGDGTRVAIKRADRNSMQGAVEFKNEIELLSRVHHRNLVSLIGFCYEQGEQMPVXEYLSKGTLRGNLKASGIYWDGPRRLPIAVGSARGLAYLHELADPPIIHRDIKSTNILLENNLKAKVADFDPSARVADADNGHVSIQSKGTLGYLGPDHYRTPQLSPRSHVHSHAVVMPEPVSRRVPVEKGPYVRRDVRLAIDPAGHDHHYGLRGIVHPAIRDAARTPVFRRFVQLAMRCVDESAAARPAMGAVVKEIEAMLQNEPDDAGAGEGDSSADPSANEFDRHRGGGGPPAHPYSDVEISRGSYAGDGASDYMPYFEVKPK

SEQ ID NO: 121349 - protein, 91 aa, Oryza sativa
  unsure (1)..(91): unsure at all Xaa locations
  Clone ID: PAT_MRT4530_24383C.1.pep
IRAILYRALNSNKFSGGIPSSIGVLTNLLWLDLADNQLTGSVPISTSTSPGLDXIDCFAPNFKLMNSHFNKNQLTGTLTGLFNSNMTLIHM

SEQ ID NO: 121350 - protein, 143 aa, Oryza sativa
  Clone ID: PAT_MRT4530_24384C.1.pep
CRPIRRRRGRRSSSSTGSSSIGSSAPRAPQLHACMPKKKIINTSNKNQAILLRARRSCLTLESSMEETEVIAGGEARSLTVLGVGLAQHRRHARRHHHQRKSHQHPRLHPAPRRRRRGKPPGELAHACALLDRRSCRRRWRYK

SEQ ID NO: 121351 - protein, 219 aa, Oryza sativa
  unsure (1)..(219): unsure at all Xaa locations
  Clone ID: PAT_MRT4530_24385C.1.pep
YTNSPSHSFNLLNFQNTFTMKFSLFSVIALASAAMAAPAVQVQAKAAGAAADVHARQVPAVPAAVPAVPQVVSTTVSKTVIKKITSTKVTNTGGVVKVLTVAVDEVTVQVGTIKETITKVKSGALGKAAAITHIHQNVAIINQXXSPLSLTSSRMLSRSTSLSLTSRSLLALSSSLSNELVAVAKDILSTLGLDTFLGAVLNLVFRLLGTLINLVATSS

SEQ ID NO: 121352 - protein, 798 aa, Oryza sativa
  Clone ID: PAT_MRT4530_24386C.1.pep
MPPPPSTDCLPSPLRKIAVPEPGAAQDPASPTATASLHAVPEPGASLHAVREPDAAQDLRSRARCRPRPPSPSPGPLKIRPPKRPPPPSTPSPIPGLPPRRPRARHHPRPSSPSRRLPPRRPRAQRCPRPPSPSPAPPKTAVPEPASTSSPSPPPSEEFADDNVRGLVQLYGNKDRKGFGCFDIDSKFEWDTDVEVEFPAAPALLSMDAMVPSTRRTQIGDRGISNHQRMTQNKIPKEVYTITEVDDVGYPTAPTKAVKKFPTICGVLGRRNFTILKDHIDLVPQEEKEEAWRQFKESFQYPTEADAGLKRQAIRKMGNCWKNFKTTLVTEYVLNPAQPEPFGKYPFITQAVWDEFHAAKSTKESRAKSQANRDLQARNLHPHRLGTGGYAGKQAEWDKEDEAAAESNTPQVLADIPVQRARNWARAAPPPPAKRSKRAKSSPPKLDTCRKATRIGSGKVKVPLAPKKLDLGKALVAPPKPPAEFTLGMPLVGDDALFKMGPECKELHEYYMEKSNARRKNRETSMLGQHDGQPFLGPTAFIAVDFKDLWDHYRVRAIDTNLLKCYSLLTWKHVHCKAPHVALRDPVVVNETTLKNDRANMVGYIKDCLFACQDKDFIMCAYNQQQHWILLVKTPKWNLVHYLNSNIKREIYDWSAIESALNEAWDKYVARGGRHKDGHPKLGHKKDFPIRQQVGDQCGFHVCHNMRSFADKVTLLDPEILKKKTAAAPAGPPRPAALAPAAASPHPAPPPRRPGLRAQPPSRWPGLRAPWPSHRSPLHRAPRCRRMAASRRRAGLAS

SEQ ID NO: 121353 - protein, 78 aa, Oryza sativa
  Clone ID: PAT_MRT4530_24387C.1.pep
SACDLEETQRTLVGGGLFEPLASLVVIDSLRSLIRSLSLSSIVQMLDCFYKRTRAFLSLDTAFSWELFPESAGCSHWS

SEQ ID NO: 121354 - protein, 748 aa, Oryza sativa
  Clone ID: PAT_MRT4530_24388C.1.pep
MWGRGVGARRGAEKAAARTVSAAVAVVGRVAGGRGRPDSDIDSKFEWDIDVEVEFPAAPAVMNMDAMVLSTRQTQKKKKRPGGSSRKASDTLQRPRQGSSGKLSARWRIVGKISRQRWSRSTSSTPPSQNHLGNTHSSPDPCGMSSMPPNQRKSLRKKSQAYRDLQARNLHPHRLGTRGYAGKQAEWDKEDEAAAESNTPQVLADIPVQRARNWARARVKKNSDGTLSFPIPEDQAVYQKIVELNAERQASQEVCSQKREDDILMKALGNEEHRGRTRGIGSNVPWKFGFPQYAWQYKKHKLSKAQKAARIKAQLWEELKEELTAELLGMEARMEARIRDRSTDATPGPIVQERTSCTLVVRVTPGFAIPVAEGQAFKPTPETQVHGAQLLVGNAKVQVDLVKPDCVGYTIPHPPNDEILTLGAAHGTFIQWPKHIIEINITPRPAPSSRPPPTRPHPTVYDTDFGDDGMKVDSRPHLSPLAKSSKRAKSSPPKLDTRRKAAGTGRGKVKVPLAPKKLDLGKAPVAPPKLPAEFTFGMPLVGDDALFKMGPACKELHGYYMEKSNARRKNRETYMLGQHDGQPFLGPTAFIAIDFKDLWDLYRVRAIDTNLLKCYSLQHWILLVITLKWSSVHYLNSNIKPEIYDWSAIESALNEAWDQYVARGGRHKDGHPKLGHKKDFPIRQQVGDQCRFHVCHNMRSFADKVTLLDLEEFISRIPEINFEIIREEIAQFILDDILSPKGMFRVKS

SEQ ID NO: 121355 - protein, 789 aa, Oryza sativa
  Clone ID: PAT_MRT4530_24389C.1.pep
MSQQGEPMSMTTTGTTSSQNPRTHNKITKEVYTITEVDDVGYPTAPTKAVKKFPTICGVLGRRNFTILKDHIDLVPQEEKEEAWRGRGRTEAAGYPQDGELLEKFQDNAGHGARNLHPHRLGTGGYTGKQAEWDNEDEAAAESNTPQVLADIPVQRARNWARARVKKNSDGTLSFPNPEDQAVYQKIVELNAERQASQEVCSQKREDDIRTKALGNEEHRGQTKGIGSNVPWKFGFFQYAWQYKKHKLSKAQKAARIKAQLREELKEELREELTAELLDMEARMEARIRDRSTDATPGPIVQVSPTQRRSSCASTEAPTEQPEGPAAVDHITEPTSCTLVVRVTPGFAIPAAEGQAFKPTPETRVHGAQQQAGNAKVQVDLVKPDWVGYTIPHPPNDEILTLGAARGTFIQWPKHNIEINITPRPAPSSRPPPTHPHQTVVSLPPAVEQRDEDLQLQYDTDFWDDGMEVDSRPHLPPSAKRSKRAKSSPPKLDTRRKAAGTGRGKIKVPLAPKKLDLGKAPVAPPKPPAEFTLGMPLVGDDALFKMGPACKELHRYYREKSNARRKNRETSMLGQHDGQPFLGPTAFIAVDFKDLWDLYRVRAIDTNLLKCYSLLTWKHVHRKAPHIALLDPAVVNVTTLKNDRANMVTYIKDCLFARQDKDFIMCAYNQQRHWILLVITPKWSLVHYLNSNIKPEIYDWSAIESSLNEAWDQYVARGGRHKDGHPKLGHKKDFPICQQVSNQCGFHVCHNMRSFADKVTLLDPKVLMHVGGLERKMDVNDIYVNGLWM

SEQ ID NO: 121356 - protein, 248 aa, Oryza sativa
  Clone ID: PAT_MRT4530_2438C.1.pep
MAMERFLTSLVFCECEAPGMDVFAYAAGTSLTAAVNKVSTASPGGRVVGPAVSAAAPSSEAKKDAAGKAPRRLLQAAYSPAFDGLNSFETIAQAQEQHITSPARCGAVRCGGVCQVPNQTPITTAARSLKSQPKHTQIKPHWSAKAKVKHNCTSFLIMDKILAFSILSSSPAEIAAPGYYTRFSWRTTSAGKQQKAAAEKAPTRQQEGEKQQAGRSSPAAAAERKPVARPRFAPEFDGINCFETIVPF

SEQ ID NO: 121357 - protein, 362 aa, Oryza sativa
  unsure (1)..(362): unsure at all Xaa locations
  Clone ID: PAT_MRT4530_24390C.1.pep
MLVTEYVLNPAQPEPFGKYPFITQPMWDEFHAAKSTKESRAKSQAYRDLQARNLHPHRLGTGGYAGKQAEWDKEDEAAAESNTPQVLADIPVQQARNWARARVKKNSDGILSFLNPEDQVVYQKIVELNAERQASQEVGSQKREDDILTKALGNEEHRGQTRGIGSNVPWKFGFPQYAWQYKKHKLSKAVTPGFAIPAAEGQVFKPTSETRVHGAQLQAGNAKVQVDLVKPDWVGYTIPHPPNDEILTLGAACGTFIRWPKHSIEINITPRLAPSSRPPPTHPHQTVVSLPPAVEQRDEDLQLQYDTNFGDDGMEVDSKPHLPPPAKRSKRAKSSPPKLDTRRKAXGTGRGKINVPLAPKKL

SEQ ID NO: 121358 - protein, 743 aa, Oryza sativa
  Clone ID: PAT_MRT4530_24391C.1.pep
MARGSAATGDDGRRRRGERRRTRAAATHAREWWRNAARGGGNRLPSTTGSGAGAERGGDEPARRPPAATGSGEERRDAHQGRRRRDDNREAGGGLLGEATVVRRHTTGARRRTVTGTTGARRGRFQRFPVARKWWPGENRGVTITRTMWDEFHAAKSTKESRAKSQAYRELQARKLHPHRLGTGGYAGKQAEWDKEDEAAAESNTPQVLADIPVCSQKREDDILTKALGNEKHRGRTRGIGSNAPWKFGFPQYAWQYKKHKLSKVQKAVRIKAQLRVELKEELREELTAELLGMEARMEARIRDRSTNATPGPIVQVSPTQRSSNCASTEALAEQPEGPAAVDHITVDLMKPDWVGYTIPHPPNDEILTLGAACGTFIQWPKHNIEINITPRLAPSSRPPPTRPHSTVVSLPPAIEQRDEDLQLQYDTDFGDDGMEVDSRPHLPSPAKRSKRAKSSPPKLDTRRKAAGMGRAKVKVPLAPTKLDLGKAPVAPPKPPAEFTLGIPLVGDDALFKMGPACKELHGYYMEKSNARRKNRETSMLGQHDGQSFLGPTAFIVVDFKDLWDLYRVRAIDTNLLKCYSSLTWKHVHRKAPHVALLDPVVVNETTLKNDRANMQHWILLVITPKWSLVHYLNSNIKPEIYDWSAIESALNEAWDQYVARGGRHKDGHPKLGHKKDFPIRQQVGDQCGFHVCHNIRSFADKVTLLDPEEFISRIPEINFEIIREEIAQFILDDILSPKGMLE

SEQ ID NO: 121359 - protein, 124 aa, Oryza sativa
  Clone ID: PAT_MRT4530_24392C.1.pep
MMVVVPKFSEALSLAACMARWRRDGATAMRACAPESGLGSGNFGSMVPGLATGRGGGRVGQERPCPRPTNSSPGPDPAMESGAYLPAPERVEPRRESILQKNQTHMAQICPAAMMSTAAVSSQS

SEQ ID NO: 121360 - protein, 649 aa, Oryza sativa
  Clone ID: PAT_MRT4530_24393C.1.pep
MSTTTTGTTSSRNPRTQNKIPREVYTIKEVDDVGYPTAPMKDVKKFPTICGVLGRRNFTILKDHIDLARNLHPHRLGTRGYAGKQAEWDKEDEAAAESNTPQVLADIPVQRARNWARARVKKNSDGTLSFPIPEDQAVYQKIVELNAERQASQEVCSQKREDDILMKALGNEEHRGRTRGIGSNVPWKFGFPQYAWQYKKHKLSKAQKAARIKAQLWEELKEELTAELLGMEARMEARIRDRSTDATPGPIVQERTSCTLVVRVTPGFAIPVAEGQAFKPTPETQVHGAQLLVGNAKVQVDLVKPDCVGYTIPHPPNDEILTLGAAHGTFIQWPKHIIEINITPRPAPSSRPPPTRPHPTVYDTDFGDDGMKVDSRPHLSPLAKSSKRAKSSPPKLDTRRKAAGTGRGKVKVPLAPKKLDLGKAPVAPPKLPAEFTFGMPLVGDDALFKMGPACKELHGYYMEKSNARRKNRETYMLGQHDGQPFLGPTAFIAIDFKDLWDLYRVRAIDTNLLKCYSLQHWILLVITLKWSSVHYLNSNIKPEIYDWSAIESALNEAWDQYVARGGRHKDGHPKLGHKKDFPIRQQVGDQCRFHVCHNMRSFADKVTLLDLEEFISRIPEINFEIIREEIAQFILDDILSPKGMFRVKS

SEQ ID NO: 121361 - protein, 380 aa, Oryza sativa
  unsure (1)..(380): unsure at all Xaa locations
  Clone ID: PAT_MRT4530_24394C.1.pep
MVAGGGHRHGGAAAERGEGKGEKRRRSTVHPRSTATTKKAAGAEEGGGAARVDGVDGVPAVGDRNREVDEVGEDAAKPKEAAPRVLGRRNFTILKDHIYLVPQEEKEEAWRQFKESFQYPLEAEAGLKRQAIRKMGNCWKNFKTTLVTEYVLNPAQPEPFGKYPFITRTVWDEFHAAKSTKESRAKSQAYRDLQARNLHPHRLGTGAYTGKQEEWDKEDEAAAESNTPQVLTDIPVQRAWNCARARVKKNSDGTLLFPNPKDQAVYQKIEPTSCTLVVRVTPGFAIPAAEGQAFKPTPDTQVHGAQLLAGNAKVQXMIQILGSTVWRSTAGRTSPLLPKGARGQNLLHPSLTHAEKLLEWGEEKERCHLPQRSLILARRQ

SEQ ID NO: 121362 - protein, 676 aa, Oryza sativa
  unsure (1)..(676): unsure at all Xaa locations
  Clone ID: PAT_MRT4530_24395C.1.pep
MSQQGEPMSTTTTGTTSSHNPRTQNKISKEVYTITEVDDVGYPMAPTKAVKKFPTLCGVLGRRNFTILKDHIDLVPQEEKEEAWRQFKESFQYPTEAEAGLKQQAIRKMGNCWKNFKTTLVTEYVLNPAQPEPFGKYPFITRTMWDEFHAAKSTKESRAKSQAYRDLQARNLHPHRLGTGGYAGKQAKWDKKDEAAAESNTPLVLADIPFQRARNWARVRGKKNSDGTLSFSNPEDQAVYQKIVELNAERQVSQEYKKHKLSKAQKAARLKAQLRVELKEELREELTAELLGMEARMEVCIRDRSTDATPGPIVQVSPTQRHSSCASTEAPAEQPEGLAAVDHIMEPTSCTLVVRVTPGFAIPAAEGQAFKPTPETRVHGAQLLAGNAKVXDFGDDGMEVDSRPHLXPPPAKRSKRAKSSPPKLDTSRKAARTGRGKIKVPLAPKKLDLGKAPIAPPNHPAEFTLGMALVGDDALFKMGPACNELHGYYMEKSNARRKNRETSMLGQHDGQPFLGSTAFITIDFKDQWDLYRVRAIDTNLLKLTWKHVHRKAPHVALLDPAVVNETTLKNDRANMMGYIKDCLFARQDKDFIICAYNQQQHWILLVITPNWSLVHYLNSNIKPEIYDWSAIEYALNKAWDQYVTRGGRHKDGHPKLGHKKDFPIHQQVGDQCGFHV

SEQ ID NO: 121363 - protein, 211 aa, Oryza sativa
  Clone ID: PAT_MRT4530_24396C.1.pep
MEGSLRLGFLLVLCILAFLRPAAAIRFVIDREECFSHNVDYEGDTVHVSFVVIKAETPWHYTEDGVDLVVRDPNGNQIHDSRDKISDKFEFIVHRRGVHRFCFTNKSPYHETVDFDVLVSHFSYYDQHAKDEHFSALFEQIAKLDEALYNIQFEQHWLEAQTDRQAILNENMSRRAVHKALLESAALIAASVIQVYLLRRLFERKLGTSRV

SEQ ID NO: 121364 - protein, 526 aa, Oryza sativa
  Clone ID: PAT_MRT4530_24397C.1.pep
MGNCWKNFKIMLVTEYVLNPAQLEPFGKYPFITRTMWDEFHAAKSTKESQAKSQAYRDLQARNLHPHRLGTGGYTGKQEEWDKEDEAAAESNTPQVLADILVQRARNWARARVKKNSDGTLSFPNPEDQAVYQKIEPTSCTLVVRVTPGFAIPAAEGQAFKHTTETRVHVAQLLAGNAKVQYDIDLEDDGMKVDSRPHLPPPAKRSKRAKSSPPKLDTRRKAAGTGRGVGKVPLAPKKLDLVKALVAPPKPPAEFTLGMPLVGDDALFKMGPACKELHGYYMEKSNTRTKNRETSMLGHHNSQPFLGPSTFIAVDFKDLWDLYRVRAIDTNLLKCYSSLTWKHVHRKVPHVALLDPAVVNETTLKNDQANMVDYIKDCLFACQDKDFIMCAYNQQRHWIVLVITPKWSLVYYLNSNINPKIYDWSAIESALNEARDQYVAKGERHNDGHSKLGYKKDFPIRQQVGDQCGFHVCHNMRSFADNVTLLDPKGKISRILEINFDIIREEIAKFILDDLLSPKGMFRVKS

SEQ ID NO: 121365 - protein, 131 aa, Oryza sativa
  unsure (1)..(131): unsure at all Xaa locations
  Clone ID: PAT_MRT4530_24398C.1.pep
PSGIGRGEGAATTRRPPPAAFPPARSGGGEGAAAARXRHLPSCTATCRLPSCWNRRTGGCRRNPLPTAYRLPSRQIQQRGGGRRRPSTGTSHLRHRLSLPLPPDSADERVPPPPVARLPVSPPATAVRERE

SEQ ID NO: 121366 - protein, 45 aa, Oryza sativa
  Clone ID: PAT_MRT4530_24399C.1.pep
MSGSTPCLSCRPYLHMYTDVVSKCMVVSLSYLSGLTSTICDLLFL

SEQ ID NO: 121367 - protein, 204 aa, Oryza sativa
  Clone ID: PAT_MRT4530_2439C.1.pep
LGRLWFWNFGLGIGRVPSLPLVGGSFRNLEPETGSGELWGVKGPVVAKGWNGNPPRPGRAQNLGFRFRVSRREHGLPWWFRDLGVPDPPAPGKEPQPLMALGRPRKEGQGKAPCLAGQEVKWPGSNPLFLPTLPMWYTRDMYHCTVPGTCRTSTYACTRCRSCFTFCHCTALAFLAKACSSPGFVWLDRPATGPPLRPGSRGCR

SEQ ID NO: 121368 - protein, 132 aa, Oryza sativa
  Clone ID: PAT_MRT4530_243C.1.pep
MDLLSVLLIIASLLPFSASDRQGDALYDMKLKLNATGNQLSDWNQNQVNPCTWNSVICDNNYNVVQVTLASMGFTGVLSPRIGELQFLNVLSLPGNKITGGIPEQIGNLSSLTSLDLEDNLLVGPIPASLGQ

SEQ ID NO: 121369 - protein, 132 aa, Oryza sativa
  unsure (1)..(132): unsure at all Xaa locations
  Clone ID: PAT_MRT4530_24400C.1.pep
SQSYRQYEFMSHLIVQEEVLSSSSEFVRQQYSIVATPFWQQVTFQLINSQVMQHQCCQKLRLVAYQSFYKAISIVQVIVQKLHLQQFSDVXFDQSQAQAQTLLTFILPSICGMYLNYYSAPRSIATVGGVWY

SEQ ID NO: 121370 - protein, 84 aa, Oryza sativa
  Clone ID: PAT_MRT4530_24401C.1.pep
TFVIGQGFLPLLGPLKVGLFFFFPGGKLVMTPFVGLFLPETKGGPLQEINPVWNRPWFLGRYVPAPQVSGAGPGGGGNPQNPHV

SEQ ID NO: 121371 - protein, 133 aa, Oryza sativa
  Clone ID: PAT_MRT4530_24402C.1.pep
IYPFLFYQFSPHLVGRLAGGWGGSRRGEPGEEEVRRRGGGSCACRTGVPEDRASRGQSWRRRGPERPTGGAARAVAGGRWAGVLQERKGLRRQVDAVVATFKLGSRRCTARRRWPATTPPTASTRSTSTSSSH

SEQ ID NO: 121372 - protein, 69 aa, Oryza sativa
  Clone ID: PAT_MRT4530_24403C.1.pep
PSPTPPTPSTSRTQSINQPTNQSIKMMAAAAGEGEAEVTREVIICDAEKDFRGECAVGVVRADHGEVPG

SEQ ID NO: 121373 - protein, 293 aa, Oryza sativa
  unsure (1)..(293): unsure at all Xaa locations
  Clone ID: PAT_MRT4530_24404C.1.pep
MPTENGDDGFSSLSCNCVSGILTGGCVRQVLLKTEPGEWSWSDPTGGAKDSNLVVAGLRDDPVSGALPWPPPRSQLDRSLIIQIAPCDGVCNRQAINSLRAMRRGDCCLFYHSGAGAASRHIVGVVEVAREWARLNQQPAATRPFSVAVRAGLKDTLFPDDPFRGXGGMPPAQRAWWVARXCFVPPLVYAVMGSSRNLGVGPVATSSLLVASIVGGKXLMDFMSRSAITGFMGGTAVVIVLQQLKGFLGMTHFTTRKSPRSSPRSSSGPSRSSPRRSPSLLQRRARHCRARGA

SEQ ID NO: 121374 - protein, 210 aa, Oryza sativa
  Clone ID: PAT_MRT4530_24405C.1.pep
MGILLGQKLCPMGKWAWCGRRRGREVGGDRGRHRLSEGGRRLVLSLLLPPPKKATPNAAVVASGNCKYWLLKTESGEWSWSDPTGGAKDGNLIAPWDSVCNRQAINSLYALRRGDRCLFYHSSAGATSRHIVGVMEVAREWYEGEGEAASGGAVDVRAIIFRATHWLRFWAQLQRCDEDGEFLKVACRKLEKMVMQLKANYGWRFTNRLE

SEQ ID NO: 121375 - protein, 106 aa, Oryza sativa
  Clone ID: PAT_MRT4530_24406C.1.pep
PPLFFFFFFLIYTPKRNERFLKKTEPNPLPLFSAYSTQIISFTLQPSSPSFTTPPQQYTSIYSFTKKIPNTSTLTTKFTIKINILQPQIPFFSPPILPYLPIPTPH

SEQ ID NO: 121376 - protein, 1163 aa, Oryza sativa
  Clone ID: PAT_MRT4530_24407C.1.pep
MEKQNVDFGKVLLEIQELLGALNRAQVETQAVVVQQDQGVSSWRPQVEAAVQELRWEQITASFRIDAFPSSSVDGRGKEGTAAAHATANFSSGLGGGWKQIGSRPPLASELPGKDFRGKHDPGSNPGQGYNHRVPKLDFPKFDGLDPQDWCMKCEHYFNVNNMFPGLWVRVATIYFVGRAASWLRSSRAHLRFPMWGDFCAAVSEKFYREQHENLIRQMDSIKQSGTVWEFYERFDELMNQLLVYDPGVSAKYLTHRFIEGLRREIRNPVLLQRPKTLETVLSVSLLQEEVLENPQVSSVKEVKRMEGNSSFRSSGKGPWPLPQPPGKSGSFSLMNRPEEKRSTDTVRSPTNSTDKVTALKAYRRAQGLCYICVEKWSPTHKCAASVQLNVVQELFSLFLEGGAQESQEISILSYAKAGELMAISVQAIQGSEPDGTMRMLGCDLLSAKEMQQLQQKQAVAHMVQLCSPSQAEVSEEMPSAIHLLLQEFATVFTKPKGLPPTRQFDHTIPLIPGAQSVNMRPYRYTPTQKDEIEAQVTEMLQNGIIQHSSSPFASPILLVKKKDGSWRFCVDYRHLNAITVKNKYPLPIIDELLDELSGAKWFTKLDLRAGYHQIRMRTEDEHKTAFCTHNGHFEFRRLTMPWQHKALTKLLGLQYRIIYKKGVDNNAADALSRCPIPESVALSALSVCVPEWTQEVIEGYHQDPDSAGKVQTLCINNSAIPDFTIKNGLLYFKGRMWIGNNVPVQQKILANLHTAAIGGHSGITVTYHRIRQLFAWTSLRADVAKFVQHCDVCQKAKEEHVKYPGALQPLPVLEQSWQIVSLDFIEGLPRSSTFNCILVVVDKFSRYVHFVALAHPFTALDIAEAYMQHIHRLHGLPEALISDRDRIFTSTLWTTLSKLAGTQLRMSSSYHPQSDGQTERVNQCLETFLRCFVHSCPSQWSKWLALAEYWYNTSFHSSLGTTPFEVLYGHKPRYFGLTASAACTAPELVDWLHERDKMQTLIREHLLRAQMRMKHQADLKRSEHSFSVGDWVYMKLQPFVQQSVVTRTNRKLSFRFYGPFQVLAKVGTMAYRLALLDSSLIHPVVHVSQLKKALAPVERVLHHRLVRKGAKMVEQVQIRLKSPKINHGGLIYLLQLSLLQANQSGFVLLEKIPDGFSFGWRI

SEQ ID NO: 121377 - protein, 70 aa, Oryza sativa
  unsure (1)..(70): unsure at all Xaa locations
  Clone ID: PAT_MRT4530_24408C.1.pep
XHXKELXXPXXLILTASXRFXVIVDVNRIIIVCXXGLLPKXDLAGKKPXCGYLLHGVRHLLPPASGSPKK

SEQ ID NO: 121378 - protein, 1619 aa, Oryza sativa
  Clone ID: PAT_MRT4530_24409C.1.pep
MEKQNVDFGKVLLEIQESLVALNHAQAETQAAVVKLEQGASSWKPQVEAAVQELRGEVEEIKQQLDLIGKSQQASASASSPWVPSTDGERKAPLLPTPPPNSLMASVEGGSKSAQSHHQLQNHRGKTSGGNMTLGPTPVKGTYDSHSFQFPKFESSGVEGGEIDFEFGERQYNHRVPKLDFPKFDGLDPQDWRMKCEHYFDVNNTFPGLWVRVATIYFVGRAASWLRSSRAHLRFPIWGDFCAAVSEKFDRDQHENLIRQMDSIKQSGTVWEFYERFAELMNQLLVYDPGVSAKYLTHRFIEGLRREIRNPVLLQRPKTLETALSVALLREEVLENPQVSSVKEVKRMEGNSGFRSAGKGPWPLPQPPGKSGSFSLMNRPKEKRSTDTVRSPTNSTDKVTTLKAYRRAQGLCYICAEKWSPTHKCSASVQLNVVQELFSLFMEEGAQESRETSIISDAETGELMAISVQAVQGSEPDGTMRILGQVQGKQVLILVDSGSSVSFISSQIAAGLKGIQSLPRQLSVRVANGGTLCCDAMIPQCEWQVQGHRFRTTLRILPLNSYDMILGMDLLKEHSPMLVNWSQKTIRINLLGAMVTLTGVQSELSRCELLSAKEMQQLQQKQAVAHMVQLCSLSQDEESEEIPNEIQLLLQEYATVFAEPKGLPPTRQFDHTIPLIPGAQPVNVRPYRYTPAQKDEIEAQVTEMLQNGIIQHSSSPFASPVLLVKKKDGSWRFCVDYRHLNAITVKNKYPLPIIDELLDELSGAQWFTKLDLRAGYHQIRMKTEDEHKTAFRTHNGHFEFRVLPFGLTSAPATFQGIMNNILSSLLRRCVLVFVDDILIYSRTLADHINHLRAVFQILVKHGLKVKQSKCSFAQQKLSYLGHRISPNGVATEEDKIKAVKDWPTPKSLKDLRSFLGLAGYYRKFVQNFGIFSKPLTNLLRKGQPFIWNTVTDAAFQTLKQALMSAPVLAMPDFSLPFVVETDASDKGIGAVLMQNDHPIAFLSKALGPRHWGLSTYDKESLAIMMAVDHWRSYLQHDEFFIRTDHRSLSFLAEQRLTTPWQHKALTKLLGLQYKIIYKKGADNNAADALSRCPVPESVALSALSVCVPEWTQEVIEGYHQDPDSASKVQTLCINSSAIPDFTLKNGLLYFKGRMWIGHNVPVQQKILANLHTAAIGGHSGITVTYHRIRQLFAWTGLRADVAKFVQQCDICQKAKVEHVKYPGALQPLPVPEQSWQIVSLDFIEGLPRSSTFNCILVVVDKFSKYAHFVALAHPFTALDIAEAYMQHIHRLHGLPEALISDRDRIFTSTLWTTLFKLAGTQLRMSSSYHPQSDGQTERVNQCLETFLRCFVHSCPSQWSKWLALAEYWYNTSFHSSLGATPFEVLYGHKPRYFGLTAAAACTAPELVDWLHERDKMQTLIREHVLRAQMRMKHQADLKRSERSFSVGDWVYMKLQPFVQQSVITRTNRKLSFRFYGPFQVLAKVGTVAYRLALPDSSLIHPVVHVSQLKKALAPVERVQSHLPVLPADEAADISPCQVLNHRLVRKGAKLVKQVQVCWSRQDPAAVTWENLQELRQRFPQAEAWGQASFQGGENVMTTTSSDPPKGTDDQGDEPISHNG

SEQ ID NO: 121379 - protein, 153 aa, Oryza sativa
  unsure (1)..(153): unsure at all Xaa locations
  Clone ID: PAT_MRT4530_2440C.1.pep
FAPPPVSPRRRSPSSAAPDEFNPCAALLECEYKNDAAAENTLLYSAASVGDMAFVQEFMDRDPLLVFGEGEYGVTDMFYAAARGGNAEVFGLLLDHAMSPTCSTNCPNGEGAAAVVAXLLVFWLEMMGKGVHAAARGGSVEMLRELIERRFDV

SEQ ID NO: 121380 - protein, 80 aa, Oryza sativa
  Clone ID: PAT_MRT4530_24410C.1.pep
IDGRLRSSLHASSSELRLPPTPPLHFASHPFPVVRRRCPVASRWAQAPPPASSPTESYPPSPVPSSRGSRAPPPRPHCRR

SEQ ID NO: 121381 - protein, 662 aa, Oryza sativa
  unsure (1)..(662): unsure at all Xaa locations
  Clone ID: PAT_MRT4530_24411C.1.pep
MEKQNVDFGKVLLEIQELLGALNRAQVETQAVVVQQDQGVSSWRPQVEAAVQELRXSKSQQASASTLSPRVPSTDEERKAPLLPTPPPTSLLASAEGGSKSAQGHHXLQSYRGKTSGGNMTLGPTPVXGYNHRVPKLDFPKFDGLDPQDWCMKCEHYFNVNNMFPGLWVRVATIYFVGRAASWLRSSRAHLRFPMWGDFCAAVSEKFYREQHENLIRQMDSIKQSGTVWEFYERFDELMNQLLVYDPGVSAKYLTHRFIEGLRREIRNPVLLQRPKTLETVLSVSLLQEEVLENPQVSSVKEVKRMEGNSSFRSSGKGPWPLPQPPGKSGSFSLMNRPEEKRSTDTVRSPTNSTDKVTALKAYRRAQGLCYICVEKWSPTHKCAASVQLNVVQELFSLFLEGGAQESQEISILSYAKAGELMAISVQAIQGCEPDGTMRMLGCDLLSAKEMQQLQQKQAVAHMVQLCSPSQAEVSEEMPSAIHLLLQEFATVFTKPKGLPPTRQFDHTIPLIPGAQSVNMRPYRYTPTQKDEIEAQVTEMLQNGIIQHSSSPFASPILLVKKKDGSWRFCVDYRHLNAITVKNKYPLPIIDELLDELSGAKWFTKLDLRAGYHQIRMRTEDEHKTAFCTHNGHFEFRVLPFDLTSAPATFQGVMNSIMSSLL

SEQ ID NO: 121382 - protein, 122 aa, Oryza sativa
  Clone ID: PAT_MRT4530_24412C.1.pep
MAAWRGGGGGGGMGVDGGPVFFLRSHETEGSARAAPDGLAGGDRRRDWLGQRQGRLEGVLALTLDAAARPGEDGGAPWDYEEAYPVLYLGGGGPRWRGHELPRRSATAMVAADLRRRGPKLT

SEQ ID NO: 121383 - protein, 104 aa, Oryza sativa
  Clone ID: PAT_MRT4530_24413C.1.pep
MAKAVALAVLVVAVAAALLAVAPAPARAVCNMSNDEFMKCQPAAAATSNPTTNPSAGCCSALSHADLNCLCSYKNSPWLSIYNIDPNRAMQLPAKCGLTMPANC

SEQ ID NO: 121384 - protein, 130 aa, Oryza sativa
  unsure (1)..(130): unsure at all Xaa locations
  Clone ID: PAT_MRT4530_24414C.1.pep
RTRGLKVGQISVAEGTGFVAEAVGVQTTTYRTSNYKPSMNADAQESLRQRLPSAQLLTLANEEVAGMALAGPDSVADISEEECTTTLTGAGEMAPASXASLSEASTGASTLEGCCTEAWAAPVVMDEAFH

SEQ ID NO: 121385 - protein, 75 aa, Oryza sativa
  unsure (1)..(75): unsure at all Xaa locations
  Clone ID: PAT_MRT4530_24415C.1.pep
SGRGIADXHSLEAVEHGVEETXPWMMPRNTLFALPTPGDXEXLAGEDIRSRATYADDAGSGERPVSKNRXGTGGG

SEQ ID NO: 121386 - protein, 58 aa, Oryza sativa
  Clone ID: PAT_MRT4530_24416C.1.pep
FCGFNCDQMRFGCALAKLVQHSTLMILTRTHQTRQYFLSNYSFRDQMRKITLSACLKF

SEQ ID NO: 121387 - protein, 217 aa, Oryza sativa
  Clone ID: PAT_MRT4530_24417C.1.pep
MAAATMALSSSFAAAAAVGAPWRGVVGAGRAAVGFPPRRRAVTLVVRAQAEPEVEPTKEETITSTPSPVAAAPKAKPAASTGLWDVLAFSGPATERINGRLAMVGFVPVLAVEASRDAASASPAAAASVRLRAEGAAARCGRRLRLCVPCRHPHPPPSVPALRGAGLTTKNGQGTSRADSSPGIRAVAVTATCCCVPQLRPAGATGACDGGGPNKRD

SEQ ID NO: 121388 - protein, 218 aa, Oryza sativa
  Clone ID: PAT_MRT4530_24418C.1.pep
MSLATAAAGAQPFVRSSSSAAAASSSRPLLAVAAARHRRPHGSLAAAAAAARRRRRRPLLQLPEPLTGKLWTLDDFEGNPALLVMFVCNHCPFVKHLKKDIAKLTSFYMEDGPDYIAEEAKLYKYSFPYLYDESQEVAKAFRAVCTPEFYLFKKLLTDGRRPFELFYHGQFDDSRPSNNVPVTGRDLSRAIDCALSGQELPFVPKPRFPLVPRESVLL

SEQ ID NO: 121389 - protein, 202 aa, Oryza sativa
  Clone ID: PAT_MRT4530_24419C.1.pep
MAAAAMALSSSFAVAAAAAGGAPWRGVVSAGRAAPRRRVALVVRAQSEPEVEPTKEETATSSSSPSPATTPTPSPAAAAPKAKPAASTKLWDVLAFSGPAPERINGRLAMVGFVSALAVEASRGGGLLDQAGSWSGLPWFAATAAVLSAASLVPLLRGETAEARSGGVMSAHAQLWNGRFAMLGLVALAFTEFLTGSPLLNV

SEQ ID NO: 121390 - protein, 96 aa, Oryza sativa
  Clone ID: PAT_MRT4530_2441C.1.pep
RRVEKTNKISSKFWFIAMDGRHVILGLLIALVFVGNASFVIGECWETTSSSPICVGFMCKATCWIGAKATNGKVVEATCTGSVIKSECYCRYCDKN

SEQ ID NO: 121391 - protein, 250 aa, Oryza sativa
  Clone ID: PAT_MRT4530_24420C.1.pep
MAAATMALSSSFAAAAAGGAPWRGVVGAGRAAVGFPPRRRAVAFVARAQAEPEVEPTKEETTTSSTPTPTPSPAAAVPKAKSAASTGLWDVLAFSGPAPEPINRRLAMVGFVSALAVEASRSGELLEEASSGGGLAWFAATAAVRPSRPPRRRFRVPRRRCLCPTPRAGGGCSSWPPPPPPSLRPAPPPATASICPRAEGCLLVVAAADTAASSPAAAAAASVSPAAASAAASPVCAASDKAKGRVRERE

SEQ ID NO: 121392 - protein, 50 aa, Oryza sativa
  Clone ID: PAT_MRT4530_24421C.1.pep
RRCRKDHTSQSPLISNANIYVAYMSPESLNDSSLGTIFPVSQDKGGEKWR

SEQ ID NO: 121393 - protein, 37 aa, Oryza sativa
  Clone ID: PAT_MRT4530_24422C.1.pep
QHSSKKLAILKTNPRGSQNCNRFTNSSASQRISGFAV

SEQ ID NO: 121394 - protein, 192 aa, Oryza sativa
  Clone ID: PAT_MRT4530_24423C.1.pep
MAAATMALSSSFAAVAAAGGGAPWRAAVRFPPRRRVALVVRGHVEPDVEPTQEEPATSSSPTPTPPAVAPRAKAAATTGLWDVLAFSGPAPERINGRLAMVGFVSALAVEASRGGGLLEQAGSGDGLAWFAATATVLSAASLVPLLRGESAEARSGGVMSADAELWNGRFAMLGLVALAFTEFLTGSPFVNV

SEQ ID NO: 121395 - protein, 242 aa, Oryza sativa
  Clone ID: PAT_MRT4530_24424C.1.pep
MEYVNPLTGFRVDGRRPNEMRQLKGEVGVVPRVDGSALFEMGNTRVIAAVYGPREVQNKGQQVNSKDALVRCEYRMADFSTGDRRRKPKGDRRSTEISLVIRQTMEASILTHLMPRSQIDIFVQVLQADGGTRAACINAATLALADAGIPMRDIVTSCSAGYLCSTPLLDLNYIEDSAGGPDVTVGFLTKMDKVTLLQMDAKLPMDTFETVMDLAIEGCKAIANYIREVLLENTRRLECQRG

SEQ ID NO: 121396 - protein, 64 aa, Oryza sativa
  unsure (1)..(64): unsure at all Xaa locations
  Clone ID: PAT_MRT4530_24425C.1.pep
MEPQPGSPETAELPAPMVXEPPPPPSDEAAAEEEEAGVKPDRQSSSSSSSSSSEEEKEVSKDVA

SEQ ID NO: 121397 - protein, 200 aa, Oryza sativa
  Clone ID: PAT_MRT4530_24426C.1.pep
MAVATMALSSSFAAAAAGSAPWRGVVAAGRAAVGFPPRRRAAALVVRAQAEPEVEPTKEEAATSSSPTPTPSPAAAAPRAKPAASTGLWDVLAFSGPAPERINGRLAMVGFVSALAVEASRGGGLLEQAGSGGGLAWFAATAAVLSAASLVPLLRGESAEARSGGVMSADAELWNGRFAMLGLVALAFTEFLTGSPLVNV

SEQ ID NO: 121398 - protein, 261 aa, Oryza sativa
  unsure (1)..(261): unsure at all Xaa locations
  Clone ID: PAT_MRT4530_24427C.1.pep
MAYTGWVSRRCGSSRARSALFEMGNTRVIAAVYGPREGLFGXLQEGQEGGIEGEVQNKGQQVNSKDALVRCEYRMADFSTGDRRRKPKGDRRSTEISLVIRQTMEASILTHLMPRSQIDIFVQVLQADGGTRAACINAATLALADAGIPMRDIVTSCSAGYLCSTPLLDLNYIEDSAGGPDVTVGFLTKMDKVTLLQMDAKLPMDTFETVMDLAIEGCKAIANYIREAKFAEERNSDEAYVRDAKKYCGRFDKSKIGFRKW

SEQ ID NO: 121399 - protein, 137 aa, Oryza sativa
  Clone ID: PAT_MRT4530_24428C.1.pep
MDALQGLLAKATSWGLLAKLDTRRSIPNTSIYADDTIVFLGLPLSLRRPTKAEVQPILDRLSKKVAGWKPKLLSPDGRLRLIKSVLTALPVHFMFLEGELVAEGLHLCLLTFALHTPGQNEADCGGGALAESLGARH

SEQ ID NO: 121400 - protein, 114 aa, Oryza sativa
  unsure (1)..(114): unsure at all Xaa locations
  Clone ID: PAT_MRT4530_24429C.1.pep
LRIGPSCIAQALSPIPNPLLIHSALRPWPPAAPPSXPPSPPPPPSPSPASRLPRRTPSPSLAPXPPPXGPSASXPPPPDPPGQAASXPXPWNNAPVGKKPNSNAKSNKNSFFNN

SEQ ID NO: 121401 - protein, 67 aa, Oryza sativa
  unsure (1)..(67): unsure at all Xaa locations
  Clone ID: PAT_MRT4530_2442C.1.pep
SPPXCCASEPXSGRXXGPAPXAXASXSXAMAXTTRWRRXMGWRRGELGFGFLRLVASLCNFQVGEAA

SEQ ID NO: 121402 - protein, 83 aa, Oryza sativa
  Clone ID: PAT_MRT4530_24430C.1.pep
DPRRCVLQRYRRRFAAARRRLPSPSGHGRRAISLSQAHQLLLLLPARMSNSNWEVNSARRWRRTCTPPRRECGERNFYSGVGD

SEQ ID NO: 121403 - protein, 746 aa, Oryza sativa
  Clone ID: PAT_MRT4530_24431C.1.pep
MGREALTYHPADHHSGARRPPSKPQFGSWRDVVKKDRGLAAAEEAAWTEVRRKGSTEHSLRAERWPSGRREQQGKVKQVVVREVPPAKSKIVKPAPQATEKGAVIAMAGANLGGYQICAATPPQFVEKYRIGEPDSWLERGRVVLSWTSGMERHERYLQELSLMASVLKGRPPVSPAELAETIELHTGVQQRYFRVEVTRPEDFLISFRNQREKEAVLRCSKALFCNEVPVSFKPWNRCCWAEASAFQFFTKISLDGLPPHAWEEEAMHKLVNSLDGQLAELIPAADARCLGLFAWFKNPSDLPHHLDVEIPERPAAGRWREGTSATPPSPPREKPALTYPVIIHVEEVIDPTPLHTPPTSFDDNSDDEDVTRRNTFSCWAGRYDGAGPWPTEVGGGHVYGGATGSAGGLGARSFAPIPGEVSAPPRRLLQRLATMPAAGQSVTEESQDDAVLTAAVVGVIDMAAADRVLDRADIVVQDMKAGEVLASQPHSPTLVLQAPGVWFSPQAVQAVEQPGADVGIPTPLAAPVVATAKALIVLDDDCSWALVAGGVSPLSSPLQLSLDELTGGELSALGTENDGDRAELSDEVREATVDHVHVHGDDLASGQEVALTPNGGYALTRVASASPRIRASQSSFGTLAKKLSFEDTMAEVSLVEHGCERPALKATGDALSSTQESRSDRGFESAAKAGEFRVYVRKQAQKKPSHEQPGPEGIGLMGLAGQDLGQADLGRAVAGVGQEMSVGQV

SEQ ID NO: 121404 - protein, 93 aa, Oryza sativa
  Clone ID: PAT_MRT4530_24432C.1.pep
MDALQGLLAKATSWGLLAKLDTRRSIPNTSIYADDTIVFLGLPLSLRRPTKAEVQPILDQLSKKVAGFALHTPGQNEADCGGGALAESLGARH

SEQ ID NO: 121405 - protein, 1908 aa, Oryza sativa
  unsure (1)..(1908): unsure at all Xaa locations
  Clone ID: PAT_MRT4530_24433C.1.pep
MGREALTYHPADHHSGARRPPSKPQFGSWRDVVKKGRGPAAAEEAAWTEVRRKGSTEHSLRAGDPTSNKHDRAFKPRKEFSNHDRAFNSEKEIPRWLLGRCFKCLGLGHRKLDCKGETRCFHCWYPGHLAWACPERKEVSGGNPGRQSQGRAATEKGAVIAMAGANLGGYQICAATPPQFVEKYRIGEPDSRPERGRVVLSWTSGMERHERYLQELSLMASVLKGRPPVSPAELAEAIELHTGVQQRYFRVEVTRPEDFLISFRNQREKEAVLRCSKALFCNEVPVSFKPWNICCWAEASAFQFFTKISLDGLPPHAWEEEAMHKLVNSLDGQLAELIPAADARCLGLFAWFKNPSDLSHHLDVEIPERPAAGRWREGTSATPPSPPREKPALTYPVIIHVEEVIDPTPLHTPPTSFDDNSDDEDVTRRNTFSCWAGRYDGAGPWPTEVGGGHVYAAAVVGVVDMAAADRVLDRADIVVQDMEAGEVLASQPHSPTLVLQAPGVWFSPQAVQAVEQPGADVGIATPLAAPVVATAKALIVLDDDCSWALVAGGVSPLSPPLQLSLDELTGGELSALGTEKDGDRAELSDEDTMAEVSLVEHGCERPALKATGDALSSAQESRSDRGFESAAKAGEFRVYVRKQAQKKPSHEQPGTEGIGLMGLAGQDLGQADLRRAVAGLGQEMSVGQVVCGEDEPPQAHQEEVAHSDDERPVQETEIESSREALSGEMMLPPPASPSTALARARPTSEGSPANTPLPPEADQILQGFLASVATEPPPSLLGRRPPESVPKSKPCWRNVIPEWFTPWRSPRLQQQGNGARRHSTSKAQKVTMKKMGIIEEEEEADQDTFQQNTTVIDQPLSTQHMKVLAELLDVDVALEEADVPPPDLASLVAAGSKLEVVDLLVIHELCGPDFDDFVALPASHTRGGVIVAWKGSVFRGSQVHLGQWSVTAKLEWIAGNHSCFLTSVYGPQDDNEKILFLEELAEIRGICGEVWLVAGDFNLIAAAADKNNSRVNRRLMNAFRNKINELELKELYLFGRRYTWSSEQQIPTLVKLDRVLVSTEWEDAFPDAHLQALSSSSSDHCALLLSCGETPQGRRRFRFETFCSMFLDFDQEEAHSRPPPVEDSDPFVILYVKRARLPMPFCSWGPKRISRFRLLLQIANELIYRFAAAPEITLLCAVEPSSKAFLKNRSLGFATLXRLRLRQQGRISPLREGKVNSAKDYFQGILGVADPDSAELQFNQIFPPAPNLQELEVPFSEEEVWKVIKEMPNEKAPGPDGFTGLFYQRCWQVIKGEVLAALTKFHSGNHQNLDNLNTAVITLLPKKDAPTLIKDYRPISLIHSFSKLATKILASRLAPRMGDLVAENQTAFIRGRSIHENFIFVRGLALQFHRRKKPMILLKLDITKAFDTISWCFLLNLLRNRGFGSRWRSWIAALLLTSETRILLNGHESDSFKPARGLRQGDPLSPLLFVLVMDALQGLLAKATSWGLLAKLDTRRSIPNTSIYADDTIVFLQPIEREATAVNAILQLFGKATGLKTNLSKSALTPIRCDDDVLVGVQQLLGCRVENFPITYLGLPLSLRRPTKAEVQPILDRLSKKVAGWKPKLLSPDGRLRLIKSVLTALPVHFMSVLVLPKWAIKEFNKKCRAFLWKGQEEVNGGHCLVAWDIVCSPKECGGLGVKNLELFGQAMRMKWLARRLEQRGRPWTLINSVPTNDITGLFQSVASFQVGDGKDTDFWRANWLPRGCISVSSPLLFTHLGRTKLTVAEALSQNRWVRDIRGSFSALALSEYFRLWDEIQEVQLQEDAQDSTSWKLTPNRVFCTASVYEMFFAAREFADWWIKVRLCFQTGYRGAFDSLCILICWFVWRERNLRIFEQKARTAAELFSDIKDEVAVWRETNILREVG

SEQ ID NO: 121406 - protein, 120 aa, Oryza sativa
  Clone ID: PAT_MRT4530_24434C.1.pep
TQREAIKLCFDCFTGFWQSNRRLTGGKAAVRPARARRSDRRRLHTRQAIFRRLNRVINIGQTDSASAVRPADQLRLDRSTSNLRVTFISAKSLGFWVYQPFTPSGWLSYFVSILHNFSVS

SEQ ID NO: 121407 - protein, 1785 aa, Oryza sativa
  unsure (1)..(1785): unsure at all Xaa locations
  Clone ID: PAT_MRT4530_24435C.1.pep
MGREALTYHPADHHSGARRPPSKPQFGSWRDVVKKDRGLAAAEEAAWTEVRRKGSTEHSLRAGDPTSNKQDRAFKPRKEFSNHDRAFNSEKEIPRWLLGRCFKCLGLGHRKLDCKGETSVGVSGEEGGLWGQSGAAVRLGAERWPSGRREQQGKVKQVVVREVPPAKSKIVKPAPQATEKGAVIAMAGANLGGYQICAATPPQFVEKYRIGEPDSWLERGRVVLSWTSGMERHERYLQELSLMASVLKGRPPVSPAELAETIELHTGVQQRYFRVEVTRPEDFLISFRNQREKEAVLRCSKALFCNEVPVSFKPWNRCCWAEASAFQFFTKISLDGLPPHAWEEEAMHKLVNSLDGQLAELXSRRRTRAASVSSLGSRIRPTFPTIWTWKSRNARPQGDGGRGRARHHLPRRGRSRPSPIRSSSTXKKSLTLRRCILRRPPSTTTPMMKTSPGGTLSPAGQVATMALVPGRRRWEAXHVYGGATGSAGGLGARSFAPIPGEVSAPPRRLLQRLATMPAAGQSVTEESQDDAVLTAAVVGVIDMAAADRVLDRADIVVQDMEAGEVLASQPHSPTLVLQAPGVWFSPQAVQAVEQPGADVGIPTPLAAPVVATAKALIVLDDDCSWALVAGGVSPLSSPLQLSLDELTGGELSALGTENDGDRAELSDEVREATVDHVHVHGDDLASGQEVALTPNGGYALTRVASASPRIRASQSSFGTLAKKLSFEDTMAEVSLVEHGCERPALKATGDALSSTQESRSDRGFESAAKAGEFRVYVRKQAQKKPSHEQPGPEGIGLMGLAGQDLGQADLGRAVAGVGQEMSVGQVVCGEDEPPQAHQEEVAHSDDERPVQETEIESSREALSGEMMLPPPASPSTALARARPTSEGSPANTPLPPEADQILQGFLASVATEPPPSLLGRRPPASVPKSKPRRRNVIPEGFTPWRSPRLQQQGNGARRHSTSKAQKVTMKKMGIIEEEEEADQDTFQQYTTVFDQPLSTQHMKALAELLDVDVALEEADVPPPDLASLVAAGSKLEVVDLLVIHELCGLDFDDFVALPASHTRGGVIVAWKGSVFRGSQVHLGQWSVTAKLEWTAGNHSCFLTSVYGPQDDNEKILFLEELAEIRGICGEVWLVAGDFNLIAAAADKNNSRVNRRLMNAFRNKINELELKELYLFGRRYTWSSEQQFPTLVKSDRVPVSTEWEDAFPDAHLQALSSSSSDHCALLLSCGETPRGRRRFRFETFWTKLEDFDQVVADSWQQTVESTDPYVILYVKMARLAMSLCSWGQKKISRFRLQLQIANELIFRFDVAQENRLLSPLERRFRAILKGRCLALASLERIRVRQRARISQLREGDANSKYFHMKGILGVADPDSAELQFNQIFPPAPNLQELEVPFSEEEVWKVIKEMPNEKAPGPDGFTGLFYQRCWQVIKGEVLAALTKFHSGNHQNLDNLNTAVITLLPKKDAPTLIKDYRPISLIHSFSKLATKILASRLAPRMGDLVAENQTAFIRGRSIHENFIFVRGLALQFHRRKKPMILLKLDITKAFDTVSWCFLLNLLRNRGFGSRWRSWIAALLLTSETRILLNGHESDSFKPARGLRQGNPLSPLLFVLVMDALQGLLAKATSWGLLAKLDTRRSIPNTSIYADDTIVFLQPIEREATAVNAILQLFGKATGLKTNLSKSALTPIRCDDDVLVGVQQLLGCRVENFPITYLGLPLSLRRPTKAEVQPILDQLSKKVAGWKPKLLSPDGRLRLIKSVLTALPVHFMFVLVLPKWAIKEFNKKC

SEQ ID NO: 121408 - protein, 55 aa, Oryza sativa
  Clone ID: PAT_MRT4530_24436C.1.pep
RHQRGGTSIEVTKRLGPGGPLGRSVLFVDQAEDNAGTQAADGMLTTKLVQHDGPT

SEQ ID NO: 121409 - protein, 87 aa, Oryza sativa
  unsure (1)..(87): unsure at all Xaa locations
  Clone ID: PAT_MRT4530_24437C.1.pep
FWGLSQDVAILRDTMPTDHGIRVLRPIRFPSLRRPTLVFISVIRCFSYYLLAVSYPEIVXRQXAAYDISHNPFVCPXQTPXYVAVRT

SEQ ID NO: 121410 - protein, 805 aa, Oryza sativa
  Clone ID: PAT_MRT4530_24438C.1.pep
MTSRRQFLPRKWRTEYRRPQHLEEILKWLHRNLEPTRISTQKPRSWCPVHKTSKHTVQDCPVILHTKAELYACWERGIQRTSPTGVTYCPIHKSRSHYLTSCKIFLKILKSTCPYVQQPQVQLQCVAKERDVAMTSDWFVGFVSVNPDEPSVLHLLEDQESSSSSLPRDVNVINIGETTRLQIQQSSLHLKIHHEEMVNQLMGTRKRKTLLESVLTVLSHHGQHDIQLRHFTTGRGNDEIGMTLTVIGVVLPLDKEGTPSTVDTDTAPLHVEEGTTIEKDAPMNIEIRRPAMIAEITIVVTVAVTIGEIREPMDEFRETMVEIRGEMATTDGNVTLNLPRWDETDDTTTDRSGVRDKLFKIIDRCAHTDDALRWKEGKSKVGEENKPANKDAPESSKKRSHKSGKRKPSGEVHAAKQTDPPMCPNPQNDNSRKQWCPIHKTNNHSMEDYYVFKKELVRQLAIERGAFPSYTSKREFKKIEREVCSSSQGAATKMKWSQHKIELSEADHPKIATTPGRYLIVVEPTIRNIKVARVLIDGGSSINLLFTSTLDAMGIPQSELTTTPESSLKPLGKITLPATFGQTHNFRTKHIIFDVAEFDSTYNAIIGSALTKFMAASHYSYQVLKMPGPKGTTTIQGKVGVMVRKANGKWRMCADFTNLNKACPKDHFPLPRIDQLVDSTAGCELLSLLDAYSGYHQINMAKEDEEKMAFITPFGVFCYAKVPFGLISTGNTYQRGIQRALGDQLVRNIEAYVDDIAVKTKTSDSLINDLRETFDSLRRYQMKLNQEKCTLGVPSGKILGFLVSG

SEQ ID NO: 121411 - protein, 64 aa, Oryza sativa
  Clone ID: PAT_MRT4530_24439C.1.pep
MAQHAGVPLPPSVLGDTEVFALLGFCVLEMEYGGGSVTETIDREQSTDGRANGQRQPATTGLFT

SEQ ID NO: 121412 - protein, 38 aa, Oryza sativa
  Clone ID: PAT_MRT4530_2443C.1.pep
TGLNLKMSAPSVSSHVISYVSGKFSLIIIRNSLNECIV

SEQ ID NO: 121413 - protein, 112 aa, Oryza sativa
  unsure (1)..(112): unsure at all Xaa locations
  Clone ID: PAT_MRT4530_24440C.1.pep
AKRLQSQNDQRGEIXXVXXGXQXXKPTGTXXXEQAQAQDQYQQVQYRERQQTXPRWNGWEENXCTIKARVNRKIQSADQQPTAGENNAIAESHPPRAHRVTTEHPARRSQGQ

SEQ ID NO: 121414 - protein, 109 aa, Oryza sativa
  Clone ID: PAT_MRT4530_24441C.1.pep
RPRLSKSSSHASLIEPCPIQNSGYFHNHRCWKPSLLPTPEEEAALVAAVGSATAGSSGGFESFSPNVAAPSPCRSLPFAPSFSPAVTHLFAACCTVHPASRCSSRRPGR

SEQ ID NO: 121415 - protein, 245 aa, Oryza sativa
  unsure (1)..(245): unsure at all Xaa locations
  Clone ID: PAT_MRT4530_24442C.1.pep
MDINCDIANKVMQGEFRFNSIKEMGMYGSDDVDEEEDETIIVASRQLDMMRKFGPVLTSFDLVKPRDPNFTTIHPRLLGDRFEPHFNNCIGAIDGTHIPVVVPASKVVQHVGRNKYPTQNVLAICDFDMRFTFIVAGWPGSAHDMRVFNDALRKYAAIFPHPPPGKFYLVDSGYPNQLGYLSPYKGTKYHLPEFREGPRPSGKKEVFNHLHSSLRNVIERSFGVLKMKWRILLDLXVIRCSSKQK

SEQ ID NO: 121416 - protein, 808 aa, Oryza sativa
  unsure (1)..(808): unsure at all Xaa locations
  Clone ID: PAT_MRT4530_24443C.1.pep
ASRGRPARASSELGGVLRAAARSIAIPTEMDPADGEDSLSKAFRYRDDVVNKRSQSGGNHGVSGLHGSGSFSDGFWGDGVGEDGHIGDLHGSPGVHGHHVSPAPHGAGSSGGSPVFHGAGAGHRDATVFQAVADVSPPGRGRGRRGGHGGGPGRGKRSATQPSARGGRGNKVPYKPPRPSSSATVVGDAEGAAGVDNDFTEETMDSAPHGMKEELDKADWSSTHNRIFCELCVQQIEDGNRPIGIMTTRWYQIIAKKYFQKTGLRHNKTQLKNRWDVLKSMYSFWLGLLNDTGLGWDHAKGTVAAPVEYWKKVTKGHSEWKKLQHGPPECLELLDEMFGTIAVDGSSACAPGENAGGDDASGDVQDLGDTPVDCSLGKKPVKRGSSSTATSPYKKVKNPMVRIMRNIQTTMDTNCDIANKVMQGEFRFNSIKEVMDLVVDCGAAEGSAEHFMATRLFVKAEHRDMFKTLTTKMGMYGSDDDDEEEDETIIVASRQLDMMRKFGPVLTSFGMFYAENYLNKSKYRKANLAGHAWVMRNLEVPQDCYDMFRMSRPLFERLHNLLVSSYGLKSTSKMDSVEALEMFLWTIGAPQSFVQVKNRFERSKGKISRKFNEVLQSIYLLSKDLVKPRDPNFTTIHPRLLDDRFEPHFNNCIGAIDGTHIPVVVPASKVVQHVGRNKYPTQNGLAICDFDMRFALIVAGWPGSAHDMRVFNDALRKYAAIFPHPPPGKFYLVDSGYPNRLGYLSPYKGTKYHLPEFREGPRPSGKKEVFNHLHSSLRNVIERSFGVLKMKWRILLDLXVIQCSSKQK

SEQ ID NO: 121417 - protein, 717 aa, Oryza sativa
  unsure (1)..(717): unsure at all Xaa locations
  Clone ID: PAT_MRT4530_24444C.1.pep
MEERNANAVACLIMKLHITIPVSTLKMLELLKLMISACAFPHDTAEGNLFTRIHGNQSYMGMPVKPIVVTLGLEVVKPINLQKKLKAPSAPFVSGQPYDYPMANLSTRWVNNAAMLKHNSYTDGSAVRAIVLRSQKQLPGISFAAGFFCAPPCQSFLFAVFIVYTNSGAGITLSVNGMAQVIWSANRASLVGENATIELTGDGNLVLHEANGRLVWSSNTSVQLVAGMEITEHGNLVLFDQRNATVWQSFDHPTDVLVPGQSLLQGMKLRANTSTTNWTESKLYMTVLPDGLYGYVGSKPPQLYYTYLVDTNKSRKDPTRVTFTNGSLNIFLQSTQAGKPEAIIALPEAKSIQYIRLEYDGHLRLYEWSDEKWTXVCGEYGICAGGQCICPLQTNTSSAKXIANAKNREDCKQDCLKNCSCRAVMFXKLGEGGFGSVFEGKISEERVAVKCLESARQGNKEFLAEVETIGSIEHINLVRLIGFCVEKSNRILVYEYMPRGSLDKWIYYRHNNTPLDWNTRCRIILDIAKGLCYLHEECRRKIAHLDIKPQNILLDENFNAKLADFGLSKLMDRDQSKVMTVMRGTPGYLAPEWLTSQITEKVDVYSFGVVLMEIISGRKNIDFSQPEESVQLIKLLCEKAQNNQLIDMVDKHSNDMISRQEEVIQMMKLAMWCLQNDSCQRPSMSMVVKSCLLKAIHRYILLHLLHQYYLVQDEMGG

SEQ ID NO: 121418 - protein, 604 aa, Oryza sativa
  Clone ID: PAT_MRT4530_24445C.1.pep
MDAGDEGFPPPADTSRSSDPTLSAAPCSGSIPAAGEARHLRDIPPVDSRPVAWFFFADVIQAQLPALLAVATSIALDDTRPDGFVIAGHEGDAFAVPVRRDAVLGSIPGGEARGISWRAVVCTTTTTSRGQDDDAAGRALSLPAGPYVVLTKRARGSWPALLRTVADDGSLVRPSGYAVDALGEYVASSLRGFLGTVGGGYRALAVPDGREGDGRTWRIFLESGQAAGADSWPAHRRHSSADLLGHRRLGAERTAAEGGTSRRRRRFQEQRQNRAVPVPGVVWSRSSAPSRQRQRQRRTRWDEPPSPAVATPPPPPRCSSCDGGEERDDIDMVMTCCGAVLCRGCAEVNPCGCPEWQNRRGFAVRIPTDYHDVDVDGDCFVEGAVMLQRPRWHQFMAMRIGMDVFYGFYSVEDVYHSSSGVTYQIHSVSCTENPTRRGGWALGNSGCGGGDRVGHWRHGGLKRLAEGVGDDYIWPARHRLVEGSETGLAQRSTADDIGDRLGARGAGGGDGGWLGAGGAADGGRPDWREAHLVEEAGLAQSGAAGGGGGDLGVRRSCRWVWRGLRRIKTGRRGKPVQGSHMSAKLVWWWSIGASGVDSQVVSDR

SEQ ID NO: 121419 - protein, 98 aa, Oryza sativa
  Clone ID: PAT_MRT4530_24446C.1.pep
MAYARFGAWRGGEGRVAGEVDTRGGSRGASARGSSAHAGVEEPAPWRGLGLRFRRSATAAAEWGRRGDDPGRGLRFFVRAVVTWSVVVRHSVQARDSR

SEQ ID NO: 121420 - protein, 184 aa, Oryza sativa
  unsure (1)..(184): unsure at all Xaa locations
  Clone ID: PAT_MRT4530_24447C.1.pep
GPTNSPSPLCRHRRHCHGRNPRRHPLLPPASHLLHRELSPLFAPSVVTAALASHLGPVASTRLASAHLASVDPDIVASWFAFLASKEVXGELAIVNGSWHIEWGSPXDLLGCASLCRLWLGLCQFLDTVGLPPAFVNLQEIVVVHSSMQDHELHAVLPRYPGLESLALVLTHDYPRCVHIWSGK

SEQ ID NO: 121421 - protein, 70 aa, Oryza sativa
  unsure (1)..(70): unsure at all Xaa locations
  Clone ID: PAT_MRT4530_24448C.1.pep
PEIPPGLTKIKKEPPPELXAKLDKGAPRLEPEFVEALPTLXAQKKKAVKGLDAQIASLIHEFVKKGLPPG

SEQ ID NO: 121422 - protein, 71 aa, Oryza sativa
  Clone ID: PAT_MRT4530_24449C.1.pep
PGKEVVDLRIARRLCRLSGHRPLSPMPSCQTPVRARDSSIEPELRDAGDKEAVVSCQPRRVERRQPYALVL

SEQ ID NO: 121423 - protein, 78 aa, Oryza sativa
  unsure (1)..(78): unsure at all Xaa locations
  Clone ID: PAT_MRT4530_2444C.1.pep
TWESCMGIIRYPGVQQLKYAGPSIKHPQQCAVRAIHIIRQHTQLHXTARSTVHHAQHGSHTRQHGQTRQPSSHQHQFP

SEQ ID NO: 121424 - protein, 75 aa, Oryza sativa
  Clone ID: PAT_MRT4530_24450C.1.pep
MPQSHKPIQAYIRQDKLPDIDIRDMPRKTPYGTYGNQREESSAISDLAGCGFEEEGYPVVDYESTLQTAKSTTVI

SEQ ID NO: 121425 - protein, 347 aa, Oryza sativa
  Clone ID: PAT_MRT4530_24451C.1.pep
MPEMGARGGEAGAARVANGGGGGGTGGMRLFSPEYYALCTGGGMLAAGATHLAITPLDVLTVNMQVCYYCRRAVNPMKYNSIFSGLNILVKEEGASSLWRGWAGKFFGYGFQGGCKFGLYEYFKKKYSDVLVDRNKSTIYFISSASAQIIADVALCPFESVKVRVQTQPMFAKGLIDGFPRVYATEGLSGYNCTSHIADNKTLGVKYLIVYLITICSIRAVSMLMFSTFEHTVDILYRNVIQKKKEDCSTMQQLGATCLAGYISGAVGTVVSNPADNIVSSLYNKKAKNIIDAVKSIGFRGLFTRSLPVRITLVGPVITMQWFFYDTIKILTGLPTSGGLPRELEEV

SEQ ID NO: 121426 - protein, 79 aa, Oryza sativa
  unsure (1)..(79): unsure at all Xaa locations
  Clone ID: PAT_MRT4530_24452C.1.pep
HPRAHRAASAADSSLRLXPGGRHAPHDLXHGEAAXXVXVRDPRHDDAAVAGARRGPARAGSAIKTSSVTSCCLIVDNSV

SEQ ID NO: 121427 - protein, 520 aa, Oryza sativa
  Clone ID: PAT_MRT4530_24453C.1.pep
MMTLALPNFTVNKAVVCQIGEEFGRWRRASSGGWWRSMASMEESLEGTSDGVELQCHHASPCATAHRTSSTAPLVLCRRAAAHHPQPHAAVHRTCFKGHIDLHHHLYGYHKSMALLCATDLGIPGAIHRRGGAATISDIVADTMIPPAKLPHLRRLMRVLSVSGIFAVEEDVYKLTPASRILVGDKASCNFSPLVHLVVSPAMLTTFSSLSPWFRDGRNASPTALFEMAHGMPPWEMMKRDDTMNSALNDACVADSSFLMEIALRERGDVVFRGLRSLVDVGGGHGGAAMAIAKAFPDIKCSVLDLPHVISQAPDDGTVCFIAGDMFEDIPPADAVLLKVAPGPSLPDLARGRLGEGGGARWGGRQHGAAGRSAALCGGWKAVGRTAAPLRPSLPDLAGGGRGEEAGGQRLGVDGGRTAAAPLPPSLPDLAGERRGEIGGRPAARGQKAAATTGGDGKLPPYLPLTPALRGFRERLAAARRQVLHPGWGSGDGVAPLDDFYLNFVHVWRIVLMNEFCSCM

SEQ ID NO: 121428 - protein, 95 aa, Oryza sativa
  unsure (1)..(95): unsure at all Xaa locations
  Clone ID: PAT_MRT4530_24454C.1.pep
MAKEAELLNGVIPHLVDDDLSILQYADDTIIFLEHDLQQEFQCILGSFLIKIGKVIFRAQLERCDEDGELLKVTCCKLETTIMQLFXNYGWRFTN

SEQ ID NO: 121429 - protein, 181 aa, Oryza sativa
  Clone ID: PAT_MRT4530_24455C.1.pep
MPKRAMLYHRECGTRAAARQRRLSGDDDDSDKGGALATLTTTATTEGLVDNDGARWTATSGSGTTSSIHRATSISAPSHLFTLPRLAPLAREGRGLRPRECPGVSGSAGSTQIRNDGDGGCNDDDSGDGSCDDDDGDDSGCDENDNAVMQVAAVLSSSILRHQQHQYTLGRLPTFPAAGMS

SEQ ID NO: 121430 - protein, 96 aa, Oryza sativa
  Clone ID: PAT_MRT4530_24456C.1.pep
LFHQIVRENKDKTFDPYIAALEILVTVEDGTVFLRGERRGLQQIDQRQQSPRWATLELEEEFPASCRRHARGASTSAKGTDYRSHMATAESRHKPT

SEQ ID NO: 121431 - protein, 67 aa, Oryza sativa
  Clone ID: PAT_MRT4530_24457C.1.pep
PLQYYMQTTCELYDGSSMHFACRPGNTPTQFACQLDNMPVLYLNRTQSVPQINIDIQVTYQHLISKS

SEQ ID NO: 121432 - protein, 136 aa, Oryza sativa
  unsure (1)..(136): unsure at all Xaa locations
  Clone ID: PAT_MRT4530_24458C.1.pep
AARARLLPRLFSPPIPVAAAAAAPRQGRAAGAWFLPPLFSPSIPAAARRQVRDKGGGSATAAQRRRRRQQQGRGLGDFNDDRNDGGPRRQXRRAVDGDERIRQQLLHPPGNFISPQQXLTFPLVPSRKTVXGFPLR

SEQ ID NO: 121433 - protein, 211 aa, Oryza sativa
  Clone ID: PAT_MRT4530_24459C.1.pep
GRDPLPLHLPLPLLRSGRRLRPSGGGSLRSGQHPASPVQSGGGSVTRGGAARARLLPRLFSPPIPVAAAAAAPRQGRAAGAWFLPPLFSPSIPAAARRQVRDKGGGSATAAQRRRRRQRQGRGLGDFDDDRDDGGPRRQRRRAVDGDERIRHHLLHPPRHLHLRPQPPLHPSPPRSPSQGRTVARGSAASRRRERRRRMNPAASVLGSALA

SEQ ID NO: 121434 - protein, 353 aa, Oryza sativa
  unsure (1)..(353): unsure at all Xaa locations
  Clone ID: PAT_MRT4530_2445C.1.pep
MDSRDGFFNKLLDDFGPGRSNPARIGIIVINYSIRRDQSSSKISXAAKDNGSISSDKIFFRKQLSTRVGYGQVHRIIENDLDKCRVVAPNLPTKTDDLSHSTGRGWTIXERYVAISRTANLHWCSRDDSTRSLVLEPXVAISRTXNFHWCSRDDSTRSLVLEPWSSNRYVAIPRTATSIGVREIILLVHWSSNQYVAIPRTVTSDGRGTTTAXAAILVPRLQMIERHLPIGSQPVWLSYDYYLVLDXRCSDSPITSTSTKLISGTQYRQVFYPEIPYHXRHIALKPILMSLYAVLTRPLRNLRELWLGTPRADKALSDPLEMKDHTLRLLDHSRTVGGSRQAIRNEEMVYPLR

SEQ ID NO: 121435 - protein, 121 aa, Oryza sativa
  Clone ID: PAT_MRT4530_24460C.1.pep
MMSGRRRQKAAIQLMESGRIRERERPFDPSTRSKALIISTLNPPLLGRASHERTQPDSACRSDHVGMTDLTAGHGPWGSPRSICRRSVFVKKSWSPIARPLALIKWIVSGQVQHLKAVLKK

SEQ ID NO: 121436 - protein, 109 aa, Oryza sativa
  Clone ID: PAT_MRT4530_24461C.1.pep
MDNPNRGHEHAHQPSGQQTNVSSYTSPTDLVLGNHVNGSDWVNSSLSVFLEQHRLQLDRALQTHISLHNATLSAIVDSMITTALKEKDEEIARLHIMLNQLQELIINIE

SEQ ID NO: 121437 - protein, 165 aa, Oryza sativa
  Clone ID: PAT_MRT4530_24462C.1.pep
LPPIMVPRTVNNGTSGVTNDNNTHRGVTESSTERYGRGSSFGSHHSRYSSMHNQYQQGLQQQHHLNALQSHHPSTAGLNDSMILGDDCGSEPNSLAALLAPPSKQPRQHLATDAVTAAALARGDALDAYTVASRAIAGLENVGNVLGGTHPPCVSLRECGHIYTL

SEQ ID NO: 121438 - protein, 114 aa, Oryza sativa
  Clone ID: PAT_MRT4530_24463C.1.pep
MDALMHATTIRDWQGLSCDRDATGRRIETEAAILLGLSPDAGEVAEEEEDPFTLAGRRSVAAIDEGKGGDVCHLQMMTHTKLSIGKYKIHPLSALEKKCEGAAAAGRDKRTKES

SEQ ID NO: 121439 - protein, 368 aa, Oryza sativa
  unsure (1)..(368): unsure at all Xaa locations
  Clone ID: PAT_MRT4530_24464C.1.pep
MAARRWFEVVDLRLALHGFLVFEVSWRDVHGINYLNELLTDTSLALEARYMKKWEFYSAEQAAGCTKLWFLGRAPEAEALRGYLTTLYSLSQDNVVDNDDKDNNNINTSTREPKXRXRPFWAPPGNWKAEGDIMSDIRLLTLLESGLPSWVIFLQSYPLLCLLYRPWMRPLARTLYLLVSLATVIIGFYDLYKNVPLLKAAAARVCGPLFGWIETWDMVTRIQYLGTILFLRNHLRKCLQGMVALLRMARAVLRPLSAPLSAIAGPLLAACGEVCELLGDLAEALWAPLDAVLDCLNPLVQALLLPLRFAASLASCAGSLLSNTYNFGKDIWETVSSMFELNHMAEAQHSAFDVSLLKSLWNDLFSQA

SEQ ID NO: 121440 - protein, 399 aa, Oryza sativa
  Clone ID: PAT_MRT4530_24465C.1.pep
MAYAAFGAAVAYPASGAPAALALAFVLGYGALLFRLPFSVYALEFLRQEFPIARTPLSVQACVAVTPVALSVAVLAVLNQARAGGGGDVALATCVVWAADVAAVLSLAWCLTHGGALAMALTRRKQYEESGKALERMMKGYNPKDPAAVLFALDLGEIRDASVRLAAAVSAACAVAGGVAVGGGGGGMSYTGLSYAAAFFALPMLCLSYFQKTCAYPVDMPKHLAAYDRPHLKVIRYACVRFVAAVSAASAIAGGLVVGGVSWIGLSYAAVFFALPMCLLYFREKYGFSMSDMPSLLKWCNVSVPMAALALLFRLVTAARQAAAPDVRLVAIAGTVWAVDAAAIGFLGWRSTREMAKPILRANASEIFTSFVMVCLRYWLYLHVFYILGNGSQRWFNSL

SEQ ID NO: 121441 - protein, 962 aa, Oryza sativa
  unsure (1)..(962): unsure at all Xaa locations
  Clone ID: PAT_MRT4530_24466C.1.pep
MAAARAPWLWWWVVVVVGVAVAEAASGGGGGGDGEGKALMGVKAGFGNAANALVDWDGGADHCAWRGVTCDNASFAVLALSLDISEAILFVMLKRIFVMRVFPCVKNRNLSNLNLGGEISPAIGELKNLQFVDLSGNLLYGDIPFSISKLKQLEELILKNNQLTGPIPSTLSQIPNLKTLDLAQNQLTGDIPRLIYWNEVLQYLGLRGNSLTGTLSPDMCQLTGLWYFDVRGNNLTGTIPESIGNCTSFEILDISYNQISGEIPYNIGFLQVATLSLQGNRLTGKIPDVIGLMQALAVLYLHGNKLTGVIPPELGNMSIRSYGKWFDNELVGTIPAELGKLEELFELNLANNNLQGPIPANISSCTAQNTEMSYGSKILRDENFEAHLSDCGIAKCVPSAKSHASTYVLGTIIINLDTLDLSYNEFSGPVPATIGDVLLQLLTNKKAVDNESNLHQLILSKADANTVMEAXNNLSGSLPEELGQLQNLDSLILTNNKXFPSDRPTMHELQLVLLSLLPASSIATPRTVDYSPVAXSTIVGNPLLHVYCQDSSCGHSHGQRVNISKTAIACIILGFIILLCVLLLAIYKTNQPQPLVKGSDKPVQGPPKLVVLQMDMAIHTYEDIMRLTENLSEKYIIGYGASSTVYKCELKSGKAIAVKRLYSQYNHSLREFETELETIGSIRHRNLVSLHGFSLSPHGNLLFYDYMENGSLWDLLHGPSKKVKLNWDTRLRIAVGAAQGLAYLHHDCNPRIIHRDVKSSNILLDENFEAHLSDFGIAKCVPSAKSHASTYVLGTIGYIDPEYARTSRLNEKSDVYSFGIVLLELLTGKKAVDNESNLHQLILSKADDNTVMEAVDSEVSVTCTDMGLVRKAFQLALLCTKRHPSDRPTMHEVARVLLSLLPASAMTTPKTVDYSRLLASTTTAADMRGHDVTDIGDNSSSDEQWFVRFGEDCPKIVPRNLQ

SEQ ID NO: 121442 - protein, 66 aa, Oryza sativa
  Clone ID: PAT_MRT4530_24467C.1.pep
SIALSEAGDSLDHCDKLIELVASSESGIMHLFSQQQLQEFLLFERECYLSKMELEEEQLEQLPADG

SEQ ID NO: 121443 - protein, 120 aa, Oryza sativa
  unsure (1)..(120): unsure at all Xaa locations
  Clone ID: PAT_MRT4530_24468C.1.pep
VSRKCLPTVSVNGLSTGSVWSIAFGILVAKCLQYKPVKKELVVIMPTFGVQLEIHFWSGRVHRRFVPIGKILKPLLNECVTPVTCYWSLALLLRDEXNLCLFFRNSTLLSKCLVPDWMAF

SEQ ID NO: 121444 - protein, 817 aa, Oryza sativa
  Clone ID: PAT_MRT4530_24469C.1.pep
MAMEEEEAAACEIARLPEELLVEVLSLTGPRDASRAAADSDAVWSRFLPRGLPRLARRELPRSPPPPPSRKAHFLRLSAGPLLLPRKLMSMWLDREKGAKCYMLSARALQISWGDSPQYWSWIPLADSRFKEGAELLSVCWLEIRGKLPGKKLSQNTNYAAYLVYKIADRSYGLDFPFQEASVSIGGSITARQDIENPQKRADGWMELKLGELYNEEGDDGESMWLDRETGFKCYMLSARALQIVNLTHSWRWISLTGSSRFSEVVEFLKGYRVEVCGKIPCKMLSGNSNYAAYIVFVVAEDSCGLASVWVATVGVGGRQSTRQVCLDSSNRNDYYYEGEIEVPQDGSVILPQERADGWMELELGEFYNQEGNNQGEGIWFDRETGAKCYVLSARTLVIKCSETSDYRRWIPLADSRFAEAVEFMDAPPRMEIRSKIDSMVLTPNSTYAAFMVFKIADGLYELDTSPHDATVSIGENESRREVAFTGRYPERRADGWMEVELGEFFNEDGEDGAVYMRLMSEGPNRMRGPGKNHLLLERGKFPRVEAAAQRRRDGGGSARCDPEATATATATTRLSPPAATLSPSFPKAKKFRTKSFPLFEALGELYDEGTYNFTSTEPLQHPIITQVESDQDDLGNTEIIFPDYEDTLTYQVQDDADATEDDNANAERLKEMPHRRVVAVPRNKEEKEPKRQKKSVGVEGLMERYLDMRTKQTEDEAAQLAREKEAHLAREKEAQLAREKEAHLAREKEAYLAREKESNDFSIKRCISVLNSMDVRKAEKVKAYTVFKNAENREIFVSACDEDPESALSWLRSEMA

SEQ ID NO: 121445 - protein, 46 aa, Oryza sativa
  Clone ID: PAT_MRT4530_2446C.1.pep
MAKILKVWTLDSSTKVANIDRPIEAWPMLTNGVAAATIFTVTDISS

SEQ ID NO: 121446 - protein, 122 aa, Oryza sativa
  Clone ID: PAT_MRT4530_24470C.1.pep
MWTNIFKLGELQNVSWFQFLPVEPDPSTASERSSKAEQKDALNNIVLSAHLHLQSEGFLSTWTNSFVGPWDPSQGEHNPDEKNKLLLFLSGRHSFVPEIAQHAVAKLRVVSNGLWVAPSNLE

SEQ ID NO: 121447 - protein, 209 aa, Oryza sativa
  unsure (1)..(209): unsure at all Xaa locations
  Clone ID: PAT_MRT4530_24471C.1.pep
RGTHVDPTCQRNLRHHPPLSPRLSFWARQAAGGRQARRERGERRRRDGGQQHDGGRRPAAAAAAXETRRHGRRGARRQPRFVPTSSXAAFSFSSKSNPPSPPSPERRWRRRHRRSRRSLGSPKGNPRHPSLPPSCFRSGRQRRSARTSSRSPTTSRRCRSDLLRFSRSSPRSSPPPTPRPSSGPFPAPPSTPSRTPSSTSSSLPPPPPP

SEQ ID NO: 121448 - protein, 40 aa, Oryza sativa
  unsure (1)..(40): unsure at all Xaa locations
  Clone ID: PAT_MRT4530_24472C.1.pep
CVFTSYFEEVPLYVLELXKKYCKKKKKEGRVYRILAFAGV

SEQ ID NO: 121449 - protein, 69 aa, Oryza sativa
  unsure (1)..(69): unsure at all Xaa locations
  Clone ID: PAT_MRT4530_24473C.1.pep
SLAAVTGIRAIXMQLXEVQPSWLXSLPCYWRKALWASXEKLRKLDSCFFLYTSCHDMKESPXISFYEMS

SEQ ID NO: 121450 - protein, 61 aa, Oryza sativa
  unsure (1)..(61): unsure at all Xaa locations
  Clone ID: PAT_MRT4530_24474C.1.pep
LAVQLVPRGWPLAGDAGAQLCTLLDMCRCXGQVSNGHLAGEQPSGDHLYGVFDHQVPPALE

SEQ ID NO: 121451 - protein, 490 aa, Oryza sativa
  Clone ID: PAT_MRT4530_24475C.1.pep
MLAFAVIVSPSAWPRAVSSAFAAAVFAFLDVVDVLLCFVYGFLDAVFEDSPVSCYCHGSHSAAALDDDDEVSDTLYHRRSALRDALMGLVRGRSGGSPETETERRKGRSPRWSDCGCDSCRAWQRHDDGRLHFVANQPPPPPNDGAVTTTQQSGEEDAIFIHGFTSSSSFWATVFRESSILNNCRMLAVDLLGFGKSPKPANCMYRLKDHVEMIERSLIDPLNLSSFHLVSHSMGCIIALALAAKHPERVRSITLIAPPYFGACEEKASQVALKRLAEKKLWPPLQFGSAVMSWYEHIGRTVCFLVCKNHLLWERLFRLITGKRDVDFLLGDLTKHTHHSAWHTMHNVICGGAMLQDRNLEAVEAAGVPVQVIHGGDDQVVPAECGRHLKAKLPGAELRLMEGCDHKTVVFGRERGFAEELRAFWHTKLTNDNMSTTGRALLVALAAVLLVTGDALLAPAGGQEQYTKAPAEAHKGYSIVPAEGGENVPS

SEQ ID NO: 121452 - protein, 125 aa, Oryza sativa
  Clone ID: PAT_MRT4530_24476C.1.pep
MINLIDLSAGASARVATRDGSPVRETQSERKEYADLKTVTGSVRRSSSDRSCGSGTPMKVLIAQEMAKEGDTNQKTTSVVAKLMGLDDDAALPKPVQPFTTGGDFQMAICLLCWHELITKCRLTT

SEQ ID NO: 121453 - protein, 43 aa, Oryza sativa
  Clone ID: PAT_MRT4530_24477C.1.pep
EKKTGVYQKKFSREKRGLKFKGVFQHFTNLQEGANYTRPNLFL

SEQ ID NO: 121454 - protein, 118 aa, Oryza sativa
  unsure (1)..(118): unsure at all Xaa locations
  Clone ID: PAT_MRT4530_24478C.1.pep
TSPDLDIRDXTKHTPSGTYGGRQEGSSSISDLDKFTLEEEDYPVVDYXLMNKEQHRLRPTGCRAITCQIRGPNLYKNLCLHLFYLNLAYTLVPTIPIPSKYRSRDLKRRQWHQWRTQD

SEQ ID NO: 121455 - protein, 721 aa, Oryza sativa
  Clone ID: PAT_MRT4530_24479C.1.pep
MAHHAQESGRGGAQEGAALGGGGRGDGAWGAARRRRSGGGGTAAAHGRGGAEGRRGGGQMTARRHTGGVARRRGGAREGAGGGGAREGRRRHTGGAARGYPLGMPVPVGHGHGHGVLPDRAGGRGSGTGMWVSGRAWNRSARARPDPLPSLRFGSTHSLPFARDQFLASEVVDGEYMLYHLRRRRHLLLRDRHVVLPFVSVSGRGADGDGDPRGARSEEVGEPRRPEMEEVRRIPSGVARWPAAGRRKRRRGWRRKGERQPPEEGRRGEERRSEMEERMTFTKNCETCASKNPAPPQPQPLPLSWLSPRRQWRWRSDYGDADAAEEESPAPLVEDGVSGGGEKKSFWAAVSLIVGTAVGPGMLGLPSATIRSGPVPSTAAIVLSWVYVVSSIVLVAELSFAAMEDGGVDEVSFTGLASSTLGATLGAVVAVVYAALSFSLLVACVAGIGSLVSQLFPAVDPALANAIFPCFAGTLIAFFPFKAVDGANRALCGLMLASITALVVTGVSVGRSSMLRSLGYACWRPATILPAIPVTVLTLGFHVITPFICKIVGDSVYDARRAILIGGAVPLAMVLSWNAVILGLASSSGGARFDDPIKLLLSVNPAALPAVRGFAFAALATSLIGYAVSFPKQLADTVELIGQRFSPKRGIGQLSESSGGHGRNGAILTWIVLIIPIVIASFFSAAFSKALDFAGVYANCFLFGILPPVMAWIHRSQKRKR

SEQ ID NO: 121456 - protein, 71 aa, Oryza sativa
  Clone ID: PAT_MRT4530_2447C.1.pep
PSPAGPPPPKRSSRGMGIPPPFWVQTAVFFLEGGKPPPHFFSPLILAKGFLLKPIFFPGLKKVPFPPPAFF

SEQ ID NO: 121457 - protein, 979 aa, Oryza sativa
  Clone ID: PAT_MRT4530_24480C.1.pep
MLEVLDMAPPRHQPAAGKAGGGRGHGHGHGHGGGGGGPAARKQPLQSSMAQPKAETPAATAPVAPPEGGTECGGGGGRRRGGRGRGGRAGAGPGPGLAAAPAVVVAPAARAVIGPPVASKGLSFCRRPGFGTVGARCVVKANHFLAELPDKDLTQYDVKITPEVSSRSVNRAIMSELVRLYHDSDLGGRLPAYDGRKNLYTAGTLPFDAREFVVRLTDDDDGTGVPPREREYRVAIKFAARADLHHLRQFIAGRQADAPQEALQVLDIVLRELANRRYVSIGRSFYSPDIRKPQRLGDGLQSWCGFYQSIRPTQMGLSLNIDMSSTAFIEPLPVIEFVAQILGKDVISRPLSDANRIKIKKALRGVKVEVTHRGNVRRKYRISGLTTQPTHELIFPIDDQMNMKSVVEYFKEMYGFTIQHPHLPCLQVGNQKKANYLPMEACKIVEGQRYTKRLNEKQITSLLKVTCRRPREQEMDILQTVQQNGYEQDPYAKEFGINISEKLTSVEARVLPAPWLKYHDTGKEKECLPQVGQWNMVNKKVINGCKVNHWACINFSRSVQETTARGFCQELAQMCQISGMEFNSEPVIPIYSARPDQVEKALKHVYNMSLNKLKGKELELLLAILPDNNGSLYGDIKRICETDLGLISQCCLTKHVFKISKQYLANVSLKINVKMGGRNTVLLDAISWRIPLVSDIPTIIFGADVTHPETGEDSSPSIAAVVASQDWPEVTKYAGLVCAQAHRQELIQDLYKTWHDPQRGTVTGGMIRELLISFRKATGQKPLRIIFYRDGVSEGQFYQVLLYELDAIRKACASLEPNYQPPVTFVVVQKRHHTRLFANNHKDRSSTDKSGNILPGTVVDSKICHPSEFDFYLCSHAGIQGTSRPAHYHVLWDENNFTADEMQTLTNNLCYTYARCTRSVSVVPPAYYAHLAAFRARFYMEPEMSENQTTSKSSTGTNGTSVKPLPAVKEKVKRVMFYC

SEQ ID NO: 121458 - protein, 151 aa, Oryza sativa
  Clone ID: PAT_MRT4530_24481C.1.pep
MAKSSSSSIRSLLLAAALLVAVGISPHAAEASSGGAVMGLVTGVVPCSAGSSINAASVPGFPNAAVQLECGGRAVAGATADGSGAFAINLGKLTAATLTPLLNDRCRVVVTTPLAACDASLAGVAGTLAAPIISGVLGNIISIVPSAFSVV

SEQ ID NO: 121459 - protein, 114 aa, Oryza sativa
  Clone ID: PAT_MRT4530_24482C.1.pep
CVVGNPPPPLLPDLARRELPWGVRCRCPGEPSLPVGCLKRETEREAPKERGREKRQNKKPKLRKLRRLNPNSKQWEGAEPYYTPLKAHAFDGPISYEARSLGERHFGNATYAVA

SEQ ID NO: 121460 - protein, 127 aa, Oryza sativa
  Clone ID: PAT_MRT4530_24483C.1.pep
SRRRSRRCSTTGAAWSSPPRWPRATRRSPASPGRWRRRCSSSATAAPVAAAPSAAWAASSAASPASSGRSSVASSATSLASSHRPSPSSRSTSLLSWITISGAASPRASPSAAASSVALLAHYPAPL

SEQ ID NO: 121461 - protein, 118 aa, Oryza sativa
  Clone ID: PAT_MRT4530_24484C.1.pep
MEFRLAATVPSPVLTGASDSIDSLDFDPTGHHIAIGGIARKIRIYRVAEPSSPVGCIYIPAKLSSVRWRPGRRRARGLEARFAGFSNGKLGPAGSTTASYHGGGDGSVPNLDASCSPI

SEQ ID NO: 121462 - protein, 77 aa, Oryza sativa
  Clone ID: PAT_MRT4530_24485C.1.pep
YELRPPIPFSLIPLLPQPRAASCDPIPHILLPSPFSLPSRGRRSRSVSRGRPARTMTPPPQPRPIMPVGAHFSSSPG

SEQ ID NO: 121463 - protein, 370 aa, Oryza sativa
  Clone ID: PAT_MRT4530_24486C.1.pep
MSGRKNAGKASPFLLLLISVGCFFATYNFLTMVGHGRSRDAGPRKILGGVGGVGGGGSDPSKRFHVALTATDALYSQWQSRVMYYWYREMRDRPGSDMGGFTRILHSGKPDGLMDEIPTLVVDPLPEGADRGYIVLNRPWAFVQWLKKSNIKEDICSYVLMAEPDHIFVRPLPNLAHGDEPAAFPFFYIKPTENEIILRKFFPEENGPVSKIDPIGNSPVIIKKAQLEKIAPTWMNISLKMKEDVETDKAFGWVLEMSVLLCVQYAYAVASALHGVHYSLRKDFMIQPPWDAKSDNTFIIHYTYGCDYTLKGELTYGKIGEWRFDKRSYLRSPPPRNLTLPPPGVPESVATLVKMVNEATANIPGWDEER

SEQ ID NO: 121464 - protein, 79 aa, Oryza sativa
  Clone ID: PAT_MRT4530_24487C.1.pep
KHTIFIPFHPPPLICPPKACRPGGGRGTPGPSRAPPRAFCTPPPPWAPRWGGTPQAPPPWARRGRPTSPCTPPPGSCGP

SEQ ID NO: 121465 - protein, 196 aa, Oryza sativa
  Clone ID: PAT_MRT4530_24488C.1.pep
MDRALPLALSVSLWWLLVGDLGELELRRGGGGGVSRFGSWYRMCGWWWVWADWIIELGASSWGNLFGLVLKRRKNEAVERDSSDGWEKSWEAAVTPWDLGKPTPIIEHLVKSGTLPKGRALGYDVVALASPERFVVGLDISSTAVEKAKQWSSSLPNADCFTFLADDFFKWKPSEQFDLIFDYTFFCALDPSLRLD

SEQ ID NO: 121466 - protein, 459 aa, Oryza sativa
  Clone ID: PAT_MRT4530_24489C.1.pep
MEANASVDIDDQHVCLKISNQESTTSMFRSHKQRHLVRLTDAQLALRQDASTENKETLCSVIQSIKLPYGYASNIASFGETIGSAQDVKFDAKTLTQAHRYVLRHLDEIEDFRREFLEEEKRKQKKSVFTSFESDKLINERFHDWLYHKCEWLRGPRHYRGLDLLQNGVRNPEIDIPRNDQYVEEQNISNENWCTNWHEYLLGSYLGTLVRKPHLAPLNILKWNDKIFIRIYHQKMITEVKRKFAIDGRAKSWLLHQLDGKWRQYKGKLKGKYYKPNLPMERVLQTVPNTVDESRWPTLVSYWYSKDSKKISDRNQENALKHPHTLGRKSFTRKRKELNEVYMKLAEKRVDSPRLTEADLEQAMLDMFGKDHSGRVRGMGPTITPTNYYGGRFLNISAINEQGTSSKKYPEDNLLARLPPSLTRLIPTSEVNQNQEVQAPNTAPSPSQRASSQPSTEEE

SEQ ID NO: 121467 - protein, 226 aa, Oryza sativa
  Clone ID: PAT_MRT4530_2448C.1.pep
IESNDQFSLIIILIEIYLLIETIPIYLVEHRATLKKINNKLKNISSEYKLYVTERGAPHRETAQAPLCRPGPPFYLVRGHHIGLLLPKEGYMLFTMRASLQPEVTSDKQSTRLLPRSPAFPGDAHFNLHLMASDFLAILALKPGMDLTGTDIPTPGVSTPAPARDESQEALIIPMGRGGRGAPALGAETGAARPLGETEGGVATSPSGPTPPRGSGHVGDRGYPSL

SEQ ID NO: 121468 - protein, 253 aa, Oryza sativa
  Clone ID: PAT_MRT4530_24490C.1.pep
MEKLFIPSFFTIMVHLIVHLVDESKLGGPVNYRWMYPFESFGETIGSAQDVKFDAKTLTQAHRYVLRHLDEIEDFRREFLEEEKRKQKKSVFTSFESDKLINERFHDWLYHKRKFAIDGRAKSWLLHQLDVPNTVDESQWPTLVSYWYSKDSKKISDRNQENALKHPHTLGRKSFTRKRKELEVNEVEVDRETFFDECHKTKDGRYVTDATQEKMVLTDTCNLYNLTPRRTTVAQVKTSVPRALPNLSVIATK

SEQ ID NO: 121469 - protein, 52 aa, Oryza sativa
  Clone ID: PAT_MRT4530_24491C.1.pep
KQLVGLLILDLSENSVRYSLFTVDTLNLRFARYQYILQGGGSDTIYSGILPI

SEQ ID NO: 121470 - protein, 206 aa, Oryza sativa
  Clone ID: PAT_MRT4530_24492C.1.pep
RKFAIDGRAKSWLLHQLDGKWRQYKGKLKGKYYKPNLPMERVLQTVPNTVDESRWPTLVSYWYSKDSKKISDRNQENALKHPHTLGRKSFTRKRKELEVNGVEVDRETFFDECHKTKDGRYVTDATQEKMNEVYMKLAEKRVDSQQLTEADFEQAMLDMFGKDHSGRVRGMGPTITPTNYYGGRFLNISAINEQGTSSSNVNAFIS

SEQ ID NO: 121471 - protein, 221 aa, Oryza sativa
  Clone ID: PAT_MRT4530_24493C.1.pep
MEANASVDIDDQHVCLKISNQESTTSMFRSHKQRHLVRLTDAQLALRQDASTENKETLCSVIQSIKLPYGYASNIASFGETIGSAQDVKFDAKTLTQAHRYVLRHLDEIEDFRREFLEEEKRKQKKSVFTSFESDKLINERFHDWLYHKVFLFKCDWYDVHHRVGTREDEFGFTLLNFSWGIHIGNKLMDDPFVFSSQVEQVFYVQDLFDMGKVGDEDDEI

SEQ ID NO: 121472 - protein, 39 aa, Oryza sativa
  unsure (1)..(39): unsure at all Xaa locations
  Clone ID: PAT_MRT4530_24494C.1.pep
HFISDTCNXYNLTQRRTTVAQVKTSVPRALPNLSVITTK

SEQ ID NO: 121473 - protein, 368 aa, Oryza sativa
  Clone ID: PAT_MRT4530_24495C.1.pep
MGASSLVGFLMAAVAALLVAAATPAAAAPRAFFVFGDSLVDNGNNNYLMTTARADAPPYGIDFPTHMPTGRFSNGLNIPDIISEYLGSQPALPYLSPDLRGENLLVGANFASAGVGILNDTGIQFVNIIRIGQQLDNFENYQRNLAAFVGEDAARQVVQQSLVLITLGGNDFVNNYYLVPFSVRSRQFAIQDYVPYLISEYRKILTRLHDLGPRRVIVTGTGMIGCVPAELAMHSIDGECATDLTRAADLFNPQLERMLAELNSELGGHVFIAANTNKISFDFMFNPQDYGFVTAKVACCGQGPYNGIGLCTPASNVCANRDVYAYWDAFHPTERANRLIVAQIMHGSTDHISPMNLSTILAMDERRN

SEQ ID NO: 121474 - protein, 100 aa, Oryza sativa
  Clone ID: PAT_MRT4530_24496C.1.pep
MVNGDYLCKLRLRDGYGHGRTDRIGSGIDGRHAHETWAVRVAGSQRKWWLTREPSKSQPPVPCRALYPPFLLSTRRENASRNAHAHERAARGRRIAAHRR

SEQ ID NO: 121475 - protein, 100 aa, Oryza sativa
  Clone ID: PAT_MRT4530_24497C.1.pep
MELTKAEVIGDGSVSRRGRDSGGGRGFRPPFPRGDSPVHAAAAAGAENPTSGGDEADEPSTDAISLTSTPFLSASWRATACLPPLRVATSTSSVYHPSSP

SEQ ID NO: 121476 - protein, 78 aa, Oryza sativa
  Clone ID: PAT_MRT4530_24498C.1.pep
MAHQILVNESQASNVAGGASTGTAVTSGDRRPDPYMSACEAMMGIFLIVVYTNEILAFNSRQRLDSFKESQKCVGHDL

SEQ ID NO: 121477 - protein, 74 aa, Oryza sativa
  Clone ID: PAT_MRT4530_24499C.1.pep
RLVPFLSTLPLLSGAHFITIYRPPQVRKKTKNRRATYNHHICAIKYQILDGSMGITYHHHIARSNVNSPCFNRR

SEQ ID NO: 121478 - protein, 110 aa, Oryza sativa
  unsure (1)..(110): unsure at all Xaa locations
  Clone ID: PAT_MRT4530_2449C.1.pep
RRPSGDEAGREEGVIVVISGCRGGRXRHCVGEVSQPTAGSPSSSPPLVALARHPRRSGVCRGVVAPGRAEAGAPLVLVLVLSLGVTVVPAAACHFCASGMDAGSPHRPAT

SEQ ID NO: 121479 - protein, 556 aa, Oryza sativa
  unsure (1)..(556): unsure at all Xaa locations
  Clone ID: PAT_MRT4530_244C.1.pep
MAARAPPRQHRSNSCCFLESTAPAQRPTHAFYPRPSGGGAGGGVRRCHTGLACLLTGLARDSGDALYDMKLKLNATGNQLSDWNQNQVNPCTWNSVICDNNYNVVQVTLASMGFTGVLSPRIGELQFLNETRSWSLPGNKITGGIPEQIGNLSSLTSLDLEDNLLVGPIPASLGQLSKLQILRLAYNKLSGSIPGSLFQVARYNFSGNNLTCGANFLHPCSSSISYQGSSHGSKVGIVLGTVVGAIGILIIGAVFIVCNGRRKSHLREVFVDVSGEDDRRIAFGQLKRFAWRELQLATDSFSEKNVLGQGGFGKVYKGALPDGTKIAVKRLTDYESPGGEAAFLREVELISVAVHRNLLRLIGFCTTQTERLLVYPFMQNLSVAYRLRDSILDAXARGTMFHFAPENLSIGNQSWSTEVFSLWILVLELANGSGAIDFSRLEEEDDVLLLDHVKKLQREGQLGAIVDRNLSSNYDGQEVEMMIQIALLCTQASPEDRPSMSEVVRMLEGEGLAERWEEWQQVEVTRRQDYERMQQRFDWGEDSIFNQEAIELSAGR

SEQ ID NO: 121480 - protein, 108 aa, Oryza sativa
  unsure (1)..(108): unsure at all Xaa locations
  Clone ID: PAT_MRT4530_24500C.1.pep
TRKDSVKEDELRDKPGYEHLNDPLHVLVEAEFPSDIADVRLNQAVAILEDLLKPIDESMDYYKKQQLRELAIVNGTLREETPSPHLSPKSXSVSPFNSTGMKRAKTGR

SEQ ID NO: 121481 - protein, 141 aa, Oryza sativa
  unsure (1)..(141): unsure at all Xaa locations
  Clone ID: PAT_MRT4530_24501C.1.pep
RPTNLTYLDISNNILSGLVASNFGAPRXDTMNLSSNSIQGQIPSSICRLKYLSTLDLSNNLLNGKLPRCIGMRNLQKLLLSNNNLSGTFPSLLQGCTLLRYIDLSWNRFYGRLPSWIGDFQELVSLQLRNNTFSWGWSFTG

SEQ ID NO: 121482 - protein, 138 aa, Oryza sativa
  Clone ID: PAT_MRT4530_24502C.1.pep
LARDSEQRARKSDRAHSMAMMKRFVLPLMMAVLMLLVVSGSARPLGGDKWVGAATSGDHPLIQFLKQLYLVLSLIVMVMVFLVVSGTAAARPLAGQEWAGEDTAGDDSVVVRFLRQLYLHKLAGPGHSCKTYSPNGGC

SEQ ID NO: 121483 - protein, 88 aa, Oryza sativa
  Clone ID: PAT_MRT4530_24503C.1.pep
FGRMLKTAVWCLTSPEKHFAEVIRHSILGLGTYEDMLTRVIVSRAEIDMRHIREEYKVRYKTTVTRDVVGDTSFGYKGFLLALVGRED

SEQ ID NO: 121484 - protein, 439 aa, Oryza sativa
  unsure (1)..(439): unsure at all Xaa locations
  Clone ID: PAT_MRT4530_24504C.1.pep
PSPSPLTYLSRLLLKLRCLCSVVFPISSSSPRSNPPSPTVGTTPSPPAHRPPPPXHARSPHRPLPVSPTPRXWMDPPPLTPGNGVDGSAAVEPRRARDPPPPXTGRAEPPPAVGPPSPLFPSSFSSPLMSLPSPVHEIXPPVALATDKGDXWRREEASPHPSPPPPSPKRXSPPQTPRNPPIFSFKAPPSPARRPPPXTPPPARRVSPSPYSPPLLLLGFHSPPPLGFPPPLVSSQSRSPVCLSKSPFPHQPPHPTPKWYQGKFPRSQSGIPPCLPPSPAPXAPYPPPSLVPTSSLPPSKPXPAHLYYSSPVQCPSXPPPLLAGTPPPLXPPPPPVXPARRRSQPPPISLPNVPLPSPSPPPPPPEIPPAFTRGSCGPAPPPPSXSLERPPPPESRSSASPPELDRRRAASQLECPPPPPPPPPPHFQLLXNQPTGPAY

SEQ ID NO: 121485 - protein, 46 aa, Oryza sativa
  Clone ID: PAT_MRT4530_24505C.1.pep
MVNRGWWIQMNGVVPTVGDGGFDRGELLEMGKTTEQRHLNLRRRRE

SEQ ID NO: 121486 - protein, 354 aa, Oryza sativa
  unsure (1)..(354): unsure at all Xaa locations
  Clone ID: PAT_MRT4530_24506C.1.pep
RPTPPPPGRRIRAPHSPTVTTRSATQPTTRPHGRWWLRSPRVLAAVDPALSVARRRRIHPPRCPASTVADPSTPRPGSAGSALPAARRRRIRPPSGPAATTVTTRPCGGQWLPRAPRVPPAADPSPSPLLSLGRMRRRRWKPRQPAVXELPHPRRRAPPPPHRRAPPPTHRRAPPPTHRQAPPPPXPASSSSHTPASSSSPTPASFFMQRQAPPPPCQRAPDARAGSGAWRTSATRSSRLQAAAVDGGAHRQWPVGRTGVSTEEVAGGCTAFFARTVRSSSWGKRYMHLRRRRGGGPPTPPAARRDAAARGRRRGGRWRRGRGRGGSRRRVDLERREPSAVLRCIFATSLPPPL

SEQ ID NO: 121487 - protein, 110 aa, Oryza sativa
  unsure (1)..(110): unsure at all Xaa locations
  Clone ID: PAT_MRT4530_24507C.1.pep
RASPPFPSPWSPPSPPCPPFCFPPLPAPSPFFYFPWRPWFSGFLAAITLPPLNXHFAPSSPPPGFPLLLPVGPPPGPVPGFPFPPAPPLAHDFPPPQKDPQKEKKENQQE

SEQ ID NO: 121488 - protein, 552 aa, Oryza sativa
  Clone ID: PAT_MRT4530_24508C.1.pep
MSEAIPSTRPALRHCVALLRLHLAAPSLAAAKQIHARALRAGVPTSHPLLAKHLLFHLAALRAPPLRYAVAVLSRLLPHGPLDPFPLNTVLRIAAGSPRPRVALELHRRRLALPDTHTYPPLIQACARLLALREGECLHAEAAKNGFVTLVFVQNSLVHLYGACGLFESAHKVFDEMPVRGRNLVSWNSMLNSFAANGRPNEVLTVFWEMLGVDFAPDGFTIVSVLTACAEFGALALGRRVHVYVEKVGLVENSHVSNALIDLYAKCGSVNDARRIFEEMGLGRTVVSWTSLIVGLAANGFGKEALELFSLMEREKMKEDYGISPRIEHLGCMVDLLGRAGRVEEAYDYIITMPLEPNAVVWRTLLGSCAMHKKLELGKVAWERLVELDPGHSGDYVLLSNLYAAVGMSHPESEQIYEMLAEIAERLRREGARVAPQEKAESATPIPTLSPPEGNMTFVDGVTWCVARPGVSQEDLQNALDWACGQGGADCTPLQPGGRCYQPDTLLSHASYAFNIFYQQNGNSDIACNFGGAGTIIKRNPSFGSCKFLASE

SEQ ID NO: 121489 - protein, 66 aa, Oryza sativa
  Clone ID: PAT_MRT4530_24509C.1.pep
EMVWRSVVTLARLYDIMFGVIVMAPVAVLSWLPGLQEMQTRILFNEAFSRGLHISQIITGKKSHGV

SEQ ID NO: 121490 - protein, 166 aa, Oryza sativa
  Clone ID: PAT_MRT4530_2450C.1.pep
MAERAVAHTLSPSASGDDSEQNPRRRARTPPPPSRRSLRREEALEGVERSATSPPTSDGEGRRDGERRLLVYGDGSTPQGALQAAGALLRHPPVVPDPETPARCWLDDVADLVMTAQQRLGAGGRSSATKASGAATAGSVSSRRRARRAAAVTRRSSAIPSSTVTP

SEQ ID NO: 121491 - protein, 145 aa, Oryza sativa
  Clone ID: PAT_MRT4530_24510C.1.pep
EREISPPQKKKYVLQKKIFFKRRGGGKKEKNFPKKKIFPKGGNFKRPFFMGGLKKGGFPLGAPLFFFFQRFLFLNQYWKFRPNPPRQFCGTWDLHFPPFPPTGGGEEKKKENEFFFSFLVPNSAARGIHSLERPPRRGLQQHQVP

SEQ ID NO: 121492 - protein, 63 aa, Oryza sativa
  Clone ID: PAT_MRT4530_24511C.1.pep
TSVTDTNVREALGHYHGTFRDPYSELSRDKDNEYEPDTSSEERHLGTDKEDQRDYATRELPPG

SEQ ID NO: 121493 - protein, 108 aa, Oryza sativa
  Clone ID: PAT_MRT4530_24512C.1.pep
MESWRLDLELGRAERYSMEIGDCRTGEVEMVPPLAGAGLPCARAAVLVQQFVAAAATEVTAAPTLLVAAMRPTARRRQSANSFANGWRNDGGGCGAATFQCLPSAVAS

SEQ ID NO: 121494 - protein, 66 aa, Oryza sativa
  Clone ID: PAT_MRT4530_24513C.1.pep
MAAGDAATPLLEMAYQYHEGCPACAVERSKALNPGIPYMRFFHIWIIILVSSSSNVQTCGSKTSLA

SEQ ID NO: 121495 - protein, 54 aa, Oryza sativa
  Clone ID: PAT_MRT4530_24514C.1.pep
PPRFLFPPAIDGGDFCINGKNKRLINFLCLTHKLPPVPEIRFQVFSWRPGGLIF

SEQ ID NO: 121496 - protein, 85 aa, Oryza sativa
  Clone ID: PAT_MRT4530_24515C.1.pep
GGGGRRRRRRAESGPTAKEDGRRAAAARVRGEWTGGEGRGWLRERSYASSSSSSSTSSSSSSSRARRAMADFSAASFSSRGRGLV

SEQ ID NO: 121497 - protein, 162 aa, Oryza sativa
  Clone ID: PAT_MRT4530_24516C.1.pep
EVAVLVFLTITDKSASTRNTAVALHLRVTPKGYRTQGTITRTGFRAVTTYHLPLTNPWDTQQTKKKFFEPEEKCTDSSGIPPEFLLEGYTRRERSRMSTKLPGTPPKVPLTLYLILMYKRYNRASCNSAQSSVSEMRVRSSIYSLHMTVTGMGNDQTTPELL

SEQ ID NO: 121498 - protein, 78 aa, Oryza sativa
  Clone ID: PAT_MRT4530_24517C.1.pep
LSCTLCPHSCAPGKNFPVGHPSQIAPGQARLTLKFFGHRLPEKKCSLVCTSLILILLSPGPGCYSSVQWCYTLGIGSQ

SEQ ID NO: 121499 - protein, 67 aa, Oryza sativa
  Clone ID: PAT_MRT4530_24518C.1.pep
YLYGWPVHAFMAIPIRWSRGVTPMFPWNFECVNVGINLLCSSLFPPGISSCPLIPFSGQPISDLLLF

SEQ ID NO: 121500 - protein, 107 aa, Oryza sativa
  Clone ID: PAT_MRT4530_24519C.1.pep
VLWLDPTCQINKYENAPFFPPLIACSISLFPCMVAAELISGALSLSFSSTIITLKACWSCTNKNLNALMRENRIMCFHLLCSETDWRQVCMGGFRELGACGKIDGKG

SEQ ID NO: 121501 - protein, 62 aa, Oryza sativa
  Clone ID: PAT_MRT4530_2451C.1.pep
MASARRSRGVTAVGIAVFVAVVVVAAGAGGAATVSCGDADILSGSGGDDDAATWREFVAIGA

SEQ ID NO: 121502 - protein, 88 aa, Oryza sativa
  unsure (1)..(88): unsure at all Xaa locations
  Clone ID: PAT_MRT4530_24520C.1.pep
SSFSLLARHNLXRXFDYSWRRATTXLLLLXAAAAAAADAAAAVCTTTTAKSQAGRTDPPYDDEEGLVGPSTPPLPPSFRPPTCPQNDF

SEQ ID NO: 121503 - protein, 113 aa, Oryza sativa
  Clone ID: PAT_MRT4530_24521C.1.pep
ASFRSVMMINKMTNTSCTAACFHVDVKNTHFVMTEEKRLFLEALKLELFSNSSSRSNVANKIKDNSQQSSTYSRVASDGDVDFDKSLENSRNLMCHKRHDVLTQQESEYFLYL

SEQ ID NO: 121504 - protein, 91 aa, Oryza sativa
  Clone ID: PAT_MRT4530_24522C.1.pep
MGIEGFSCQDCRGKKRALLPHAMAMGTGEPTDGDGRGRMEWRWWRRSHRAEDRGRPQLSKRRRKNTLGKGGGDAAGGAGWIDGGSVWTACR

SEQ ID NO: 121505 - protein, 246 aa, Oryza sativa
  Clone ID: PAT_MRT4530_24523C.1.pep
MDAATTSGRAVDCDPVPVRDEGYVDALVRASLHLIRKDFPHEVRGHGVRLLQHLMRFRWEEVSIINWSKFADVFSLLGVELGVLDDLVWKNAAADLVAEVVWSHGISLLHDLIPCLVCLSAKRATETELVCFILKSISDNRIAHVSHFGGDKGELLSLSEFLPQILPFISSLLEKHVGAVLGEKEKCQVEVAEEHASVVKAVLDAAITYAGWAHVVDLGKHGLIKGYAIDKVETGCYMMWMPTFLQ

SEQ ID NO: 121506 - protein, 629 aa, Oryza sativa
  Clone ID: PAT_MRT4530_24524C.1.pep
MELDDQTLSTTWAVYSLQSRILYLKHSLLCHPGPGFSNTRKFLLVYSVLLAKFGPSQTGKFVKNVHDVVKSWEGQLKRRAEESHAIQMPDKYSVSLLGLILPLLLRYLQCVHALWNREITFDLSKKLAKAKRFGIDEEEGFQEIEMRQWLQDIRESGYLLLNDCLGRLRMSLFGYLVDGEAATKAIPFCRALIHLAGAANDDKLRDLVKEQKEIEDAADSFTCWLVKQKEDLHAKACSAPPKEFFGQTQLEWNWELEDEFRRYLPVYFDTMQEVDAMVDCLEVDFFDLEVLYKNLRPEFRSKYAIDSSKHPHLRIMSNMRERKYYSMISAKHHKQICEILGELITLKPYIKGSDHYYEIVERIGEKIEIPSRIFDRDDAKKSIRVLLQILHFWEPQFHPLIREGHKDFLLDIARRLAKAKATEYSEPLIPQMEDFLPHLQPYAFAFIVATLKDPMAVMWITHKGGRPTVCSGNGKMVRGEIRGKTTWPLVEQRKGDPDPGAPIIAAAATTTTAPVIAITATATAASVEATMSSGNLAPGAQNRHYQMRFLPPNDDEGWLDIIGDEKFYKLLGLRAEDEQAEMSKQVVSGDGAYAAADGVGAADAATGADGGTEDTKGAAIPVMKCLESW

SEQ ID NO: 121507 - protein, 858 aa, Oryza sativa
  Clone ID: PAT_MRT4530_24525C.1.pep
MDTVLPSAVPDSAAPVAGDSGLSEQQLIQYIHSLRENQVVDGLFEDLKKEKHMSLTKLAHILKITDGLSNINIVESSVEPKTRALLEGIQQKVYDGIGLCPSIGGSFSELLGSLSLSATITKDLGSMEEFSREGKDNCSAECSFSVWIEKLKKDLELKASSASKELPEGCEWNWEFEEEFQRYLHVYMDILQEVNAMDDCMERDYLDKETLFQKLKFEFRYKHAINSYQHPYMVTISSLRQRQFYTRTCFRCNMQICKFLSELVKLKPYIKVSDCSYDVIENLKQNHEILTEISDCEVRPPTCRYALRSVFPYVHGRLPAAYSSTPSSTLRPAPPPAAPPSPPIGWCVGAPPITLPAPIEPFLLPEPPLDQPPLEGAPMDAATTSVRAVDCNPVPVRDEGYVDALVRASLHFIRKDFPHEVRGHGVRLLQVDGRFRAADNSGNRQEGRVAGWVASCELVCAVWKTILLGVELGVPDDLVWKNAAADLVAEVVWSHGISLLHDLIPCLVCLSAKGATETELVCFILKSISDNRIAHVSHSGGKNHNSFMGSSSTNRCGCLLSCNDFCVHASQFFKHILQRKRPVAIAVADHDFADYLFCPHTTFHYVPALQGALSISANPKDTSSSSSSRYSNSSGTIFQKTSVQKRLSSGSSSSSKNKRSTAVVMSSPDCELDLLLLVNVRHNNVSRESMLDAADPRVGNDGARRANSFHHLGCLLLAEHNIISEAFLTASSWSRCVIMIQRYKEVLVYSVLLAKFEPSQSGKANTHIMHGASHFLQCVHALWNRDITYDLSKKFAKAKRLGIDEEEGFQEIEMRQWLQDIREIGKCIKLQQAHKGKICTWNWEFEDEFEDIFQFILR

SEQ ID NO: 121508 - protein, 62 aa, Oryza sativa
  unsure (1)..(62): unsure at all Xaa locations
  Clone ID: PAT_MRT4530_24526C.1.pep
GXGPKITFISLSEQENCPFLEKLFLSSSSNGGTPGQGIEIHHKHPNGTGCDHKAGPGHPEFG

SEQ ID NO: 121509 - protein, 62 aa, Oryza sativa
  Clone ID: PAT_MRT4530_24527C.1.pep
VKKKMQFLAGSTVDQFHPWLMYRRSQKSHPMDGLPLLLPQAPRSSETMAQAWQTCHLPPRLR

SEQ ID NO: 121510 - protein, 129 aa, Oryza sativa
  Clone ID: PAT_MRT4530_24528C.1.pep
EPNTNKMQECRHQMCAACTLALCCHAKPSAAAATPCQQPLPTCPFCRGGISRLVVATTKTRAGGDDEEDDEEAGSRLASPLHRRSRRAVNHPSGDGGSTSSIMGSIASSIGKMGRRRTDSSEHVDVDKP

SEQ ID NO: 121511 - protein, 44 aa, Oryza sativa
  Clone ID: PAT_MRT4530_24529C.1.pep
IMAENFSQCTHLVYSSWICIPRGLICCLQFDQRMGKPGFICFAS

SEQ ID NO: 121512 - protein, 51 aa, Oryza sativa
  Clone ID: PAT_MRT4530_2452C.1.pep
DAWAVLLFAFKNEDMLCIKHSAKLSTVICDEFCRMLYTVLLFAFKNEDMLC

SEQ ID NO: 121513 - protein, 40 aa, Oryza sativa
  Clone ID: PAT_MRT4530_24530C.1.pep
MDAGFPCRANPSKIATGVGRLTKMNMSTWDDRDWAEAEVG

SEQ ID NO: 121514 - protein, 52 aa, Oryza sativa
  unsure (1)..(52): unsure at all Xaa locations
  Clone ID: PAT_MRT4530_24531C.1.pep
RRWRRRRQRGAKAEAAEMDLLRDDDESEESEIDQXWDDKEDGDXATRQWEDD

SEQ ID NO: 121515 - protein, 237 aa, Oryza sativa
  Clone ID: PAT_MRT4530_24532C.1.pep
MSLSLGFSAGAGVGADRLAAAPALQAAGALPPRVDVSLSLARAANGQPSSYLPLNENDSLDMVLFDVLREASAVAALSSSSSSSPELGARTTAPVVAGHPAGRKGGGGGGGGRGAAARGGAAGGRHYRGVRRRPWGKYAAEIRDPTRHGARLWLGTFGTAEEAAAAYDRAAFRMRGAKALLNFPPAVAGDGARRGAAAAAKQVGMSDVVPRACHVVCYSVLSAHIFYDIFRGVIPIP

SEQ ID NO: 121516 - protein, 49 aa, Oryza sativa
  Clone ID: PAT_MRT4530_24533C.1.pep
GPNTHNGCVIFGKLCLVGDHALCYLVTCTPAYILAGQSIQCYLRQLVVI

SEQ ID NO: 121517 - protein, 199 aa, Oryza sativa
  Clone ID: PAT_MRT4530_24534C.1.pep
MSLLTSPTPFGGAAVRRRAPPASAAAATRLDLPLVGSRAALHVARARRGGVSSRTQRRLEERGKNKRRGGGSVTAPAPPDMDEDAAAGEGVDWEGEPLGFEVSTTPMPELPDPEKPDFWEGPQWDALGFFVQYMWAFGVFFGLVACGFAVATYNEGATDFRETPSYKESVQTQEFPEESESSGSDVFEGNPTEVAPALE

SEQ ID NO: 121518 - protein, 444 aa, Oryza sativa
  Clone ID: PAT_MRT4530_24535C.1.pep
MDDLDMALPQAFELLLGRDRDAWPRGAAFLVAAHYGDVREMKRIAKELDEDGKGIEATVANTSFLGMNALHALGWLGKVPAYRYLVEEVKMDVNKADTAQGFTPLEHAVYHGRLPATRYLLDHGADVHQIRSTGNVSLLHSAAVKGFSEVAKFLLSRGVNVDAESEMGTPLALAAFRGYDSTVKVLLEHNADPNKVTNKALGAPLDLALTSSSVSCVKLLVQAGAEVKVEGPNNHLVRAAEKGLTEAIKCMLEAGANPNVPDRLGRMPIELAAEYGTREDVEILFPFSSAIPTVANWSVDGIINHVQSEIKQLEILFTQDDNFIKKRRSDMKQQGDAAFKKQDYLNASVFYTQALKVDPFDGTLFSNRSLCWLRMGDGERALDDANACEKLRPKWAKSYYRQGAALMFLKEYERAHRALGRALELDPESEEIENLYWESMELCG

SEQ ID NO: 121519 - protein, 246 aa, Oryza sativa
  Clone ID: PAT_MRT4530_24536C.1.pep
MASADLLRREEEFYASLFDSAKGGDAVKSRGQMIERKIEVLEDMAAKVSNRRSRRWLNDRLLIELVPRLHVEEIKGLFAPPPWGEELPVSAFCRTSVGEWDAFRSIDMDVEARLVQQMKQSSTKQKNHLDRDELVALNSWHHIDRQTREAIKRNFLPDLLEIYEERVRTFIEDTSGKDMLVLNVQDPFQRLLLHGVCEFYNVSSTTTTTVRDGKLCKTTAIKKRSGTGAPSRITLVSFLRMKKKSH

SEQ ID NO: 121520 - protein, 81 aa, Oryza sativa
  Clone ID: PAT_MRT4530_24537C.1.pep
WLCMSGLPYALEFWSQEGHCLVSFGSWLGAALRWYVAPLAHGCFRVAESVVCPECSDGLVLVPFPHHFVSCARDVADVPPP

SEQ ID NO: 121521 - protein, 52 aa, Oryza sativa
  Clone ID: PAT_MRT4530_24538C.1.pep
TVTHIKFKQVILSHITMTKIYIQIQSHLLASSISKCSSLFRVYTLLSVSSLT

SEQ ID NO: 121522 - protein, 71 aa, Oryza sativa
  Clone ID: PAT_MRT4530_24539C.1.pep
MIFSGSSCRKAAAAVTGRPLTDSAYRDGHTSQILARIDRVSGKARPPRRESTLVGYFLMVTFIGKPHFIRS

SEQ ID NO: 121523 - protein, 100 aa, Oryza sativa
  Clone ID: PAT_MRT4530_2453C.1.pep
MPHRRHCHGCGWMDGIMEEVGGNAWEAEEAGFIRELRMMVFAIRYDVTPEYSQIPHDRNEEEAALVAIGELRHHFDEELELAAASNIIDGRSSRSLISVT

SEQ ID NO: 121524 - protein, 57 aa, Oryza sativa
  Clone ID: PAT_MRT4530_24540C.1.pep
LIPGCVDPTQQQPIQQTPPRQQVAQSIQQTPAVQQVVQPIQQTPPRRQILQPVQQTP

SEQ ID NO: 121525 - protein, 356 aa, Oryza sativa
  Clone ID: PAT_MRT4530_24541C.1.pep
MDEKPPASLSSAGEPGSVKAKIQKLGLSEVEEGNIVNITPDKLTPDQQKDLEAMMQQARNLFLNSFMQTRKGTVVQKYEVKVVADVPGTGSSKDREVKQAPSDVAQPSDKGAADGSQGNQGVGSNQDGNMAQLQFNNFQDQVDYAVHHALINQSGILVNTLSNMVKTMVDGSMAEYQAIGLVYLPGGVFPNYRPLVTDNQPAVQPISLNAPSAQPTAPLSAPSPAAPSSAPGQLVNPRLLVREQPQHSGQNVNRLTQDQVAAKFLPPQPTVDPTQQQPIQQTPPRQQVAQSIQQTPAVQQVVQPIQQTPPRRQILQPVQQTPSRQQVIQPIQQQGLMNASAGFATPGSQPGQHAAN

SEQ ID NO: 121526 - protein, 895 aa, Oryza sativa
  Clone ID: PAT_MRT4530_24542C.1.pep
MSTSPGRTRSGRPLSSSSSSSSSSSAPAPAPKRRRRPDKPPDHDPAPAPAPDKDLLVSPHTPPMDAEAPKPIHLLNDKDKDKEGDDGSHQDTPTLQSPPRGSDAHPIPTELNVSAAVARPPQPPHAQPTELNAVAAAASALPMELDAAAAAAVPAESTELNAAATAVPAQPTEVNAAAEIVKPIGLNAVAAETAKPDMAMELQEPPTVTAANGRDVSHESFEQNLQHQVLDNALTDPSLLAESTATPASTAGLKPARRFTRSLLKNKPEEEPTASKSQDPAVSMISEDNNEASVDLALAPGKPQRRFTRSLLKVKVEARSTNNLLQSKEAIDSTSDSSRSVKKMEMKMSKKVACLTKHPSNIRELLNTGLLEGMPVRYIIPSSKLQKAVLKGVITGCNIRCFCLSCNGSKNIFLHHKLKSLEAFCVNVALSQNNIKIPLPHLMLVRAIPGTPGYTNWSLKFCLMRKVDGYIKDQRIYCNHCNRVVSPSAFEAHAGEGTRRKPYDNIFTSNGVSLHELSMKISKDMELSERETDDLCRECGQGGDIFPCKMCPRSFHPACVGLSGVPSEWYCDNCSNLVQKEKALAENKNAKAAGRQAGVDSIEQIMKRAIRIVPISDDLGGCALCKQKDFNNSVFDERTVILCDQCEKEYHVGCLRSQWQVDLKELPEGEWFCCNSCSEIRSSLDKIISDGALILAESDIDIIRKKHEMKGLSMDTNTDLRWRLLAGRKASEDGDLLLSAAVPIIHQSFDPIIEVQSGRDLIPEMVNGRRPKDGMPGQDYSGMYCAVLTLGTSVVSAALLRVMGGEVAELPLVATSKDLQGLGYFQALFSCIERMLISLKIKHFMLPAAQEAEGIWMNKFGFTKIPQEQSDAYLNGAHLTIFHGTSNLYKAIPSS

SEQ ID NO: 121527 - protein, 77 aa, Oryza sativa
  Clone ID: PAT_MRT4530_24543C.1.pep
MEQRKRQESLMEAEMKALLLFEMDTLVEENYVLAVDPPIMIFGEIQGWMFNMKDFFKDGRARNYSNQLWQCCCNPRA

SEQ ID NO: 121528 - protein, 119 aa, Oryza sativa
  Clone ID: PAT_MRT4530_24544C.1.pep
MPQNVFKGNLKDKEAKIEFGEAATAKVLRLPESSSSLTAAMTSSQAYMDQCVIVDILAPALVETQAIRLYPPMPIDLPKMERRDRKKRDGKMTLTYSGHCFFYTSRSTVPETGSNRLRM

SEQ ID NO: 121529 - protein, 826 aa, Oryza sativa
  Clone ID: PAT_MRT4530_24545C.1.pep
MALCPDCGAITVCEVCGVLGYKNLLLSCKNCNGAAVHRYCLDKVDFDGTVDWSCDECHPRHGKGTNRRSLEVTLDDKTVVGKQPENQSSLDTNHDKPGMNGGNDDYVSDDLMLERNKERFQLHDEANNDIHLKSMSANVPRSSTLHENSVARNVSSSANTGLPMDSNCVPSAHIDIGNPRDSSVRLILTGENRRESSMLLDGACSGSLSKDSSKEKIDREANSSHMEPSDAVKNFCKDNPMKRRKLMLLDDDDDDVGVELSDTVQNVVKDNPSKRRKLILPDDDDVEVELCNTVQSIAKDNPGKTIQLIVLDDDDDKQEDAENLNHLSLEFEGPIEKHKIHIGYATGQRCLEDDEHGLLDSLDHRSLENTCPTKKRRRYICPSDDEEEEVIKGSTTTGCAPNDVANTASQHVDAKDHHLQSRMAFASDFTKHQYYIYSEPMGEPAWSGIFMTDSNVPIMLAAHLSTKACQRVSEFARSLQPVVEVIKLPRLKAWPERWDKSGPTDDSIGLFFFPHSMRPNEELDKLVKEVIESDVVLKAVLGTVELLIFPSILLPEQYHEFQGKYYLWGVCKARKHNPDTAVLVEEQCGLVSASEEGSSDKESYVMKHVEDRLPADCNPEAREGDIKTALGEGCFSPDSCLSSNKASPVKGGSPCFMQPGLGDKPHEPGVADQKEDEQDFTSLPRRNDQNATNPPIDSLPSATRLFGFVTARSERCQQLIQEMVKEGALLFSVPEDMTINRSTISKSNGVGAAQAPDSGCQHVQERCEPIEFVPIDHNDPDSASEACLDLFPVRHEQIGLTSQVDVKEVELDLSLGAFRRAPSELP

SEQ ID NO: 121530 - protein, 77 aa, Oryza sativa
  Clone ID: PAT_MRT4530_24546C.1.pep
VGLFFHHDSLVYSDLMSSCFSERVLTALSIHVKDHHADKRKVVFVHFPQTKGGPSPQTIDDERAHHALIRSQSAVMS

SEQ ID NO: 121531 - protein, 76 aa, Oryza sativa
  Clone ID: PAT_MRT4530_24547C.1.pep
SLLPAVLKHINRSERLPGHDRSHIQREHIMGLRGRLETRVPIDFVSVAGADCQGCARGGRAGHTARGHAFAAGSVA

SEQ ID NO: 121532 - protein, 813 aa, Oryza sativa
  Clone ID: PAT_MRT4530_24548C.1.pep
MACLPVFISLLFLISSCKGDDQLTQANRLISPGDVLISKGRVFALGFFSPTASNQSFFLGIWYHNISESERTYVWVANRDNPITTPSFATLAISNSSNLVLSDSGNHTLWTTNVTATGGDGAYAALLDSGNLVLRLPNGTTIWQSFDHPTDTLLMGMRFLVSYKAQVAMRCIAWKGPDDPSTGDFSISGDPSSNLQIFLWNGTRPYIRFIGFGPSSMWSSVFSFSTSLIYETSVSTDDEFYIIYTTSDGSPYKRLQLDYTGTLKFLAWNDSASSWTVVVQRPSPTIVCDPYASCGPFGYCDATAAIPRCQCLDGFEPDGSNSSSRGCRRKQQLRCRGRDDRFVTMAGMKVPDKFLHVRNRSFDECAAECSRNCSCTAYAYANLTGADQARCLLWSGELADTGRANIGENLYLRLADSTVNKKKSDILKIELPVITSLLILMCICLAWICKSRGIHRSKEIQKKHRLQHLKDSSELENDNLELPFICLEDIVTATNNFSDHNMLGKGGFGKVYKGVLEGGKEVAVKRLSKGSQQGVEEFRNEVVLIAKLQHRNLVRLISYCIHEDEKLLIYEYLPNKSLDTFLFDAKRKSVLDWTTRFMIIKGIARGLLYLHQDSRLTIIHRDLKASNILLDTNMSPKISDFGMARIFEGNKQQENTTRVVGTYGYMSPEYALEGSFSVKSDTYSFGVLLLELVSGLKISSPHLIMDFQNLITFAWSLWKDGNAMDLVDSSIRESCLLHEVLRCIQIALSCVQDDPTARPLMSSIVFMLENETAALPTPKEPAYLTAMVYGTKDTRENKERSVNNVSITALEGR

SEQ ID NO: 121533 - protein, 128 aa, Oryza sativa
  Clone ID: PAT_MRT4530_24549C.1.pep
PPRPPRGLPACSGYGDSSSSAAAAGDAAATAAVCVAADGGGGGGGGAGGEGVPDGAAGADGAADEAEAEAGKGAAGGGCCCVCMARAKGAAFIPCGHTFCRTCARELLAGRGRCPLCNAAILDVLDIF

SEQ ID NO: 121534 - protein, 1067 aa, Oryza sativa
  Clone ID: PAT_MRT4530_2454C.1.pep
MAGKKRPPTALSEPEAAAAAEEEEAAAKTAPAAEAPAKKKKLAMERKKQRKEIDKERHRQSAESDAAAAKPKQPAEVAPEAAAAAAAAPVAPPPVIPVVSGPGLHMNVFRDLASPEASQREAAAEALVAELRQVQVAHEKGGRKEGESEAEGGDGSSRMEAEKDDGLENCAPSVRYAIRRLIRGISSSREFARQGFALGLAVVLESIHAISVEAIMKLIPNLLEYSASMRGPEAKDNLLGRLFGYGSIVRSGRVSGQWAHEEGSPIVKDFVDEVIKLGSKKRYLTEPAVAVILDLAGKLPEEAIISEILEAPSVQDWFNRAADAGDPDALYLALKLQEKTNAQEIFGKLLPYPFSPEGFFAEEHLLSIAACFKKYTGGRFDCMTKTRTVKDLVAKFRSGQDSSLGYEVTSFELHEKFKWPKPAISTSIRNECIEQLQFLIEDAQKDEALHVSEVKSNDLGFYFMRFINTLCNIPSVSLFRTLSSNDDNAFKKLLDVESLLFYELLLQVLLHPDEYWEAAIDVTICCKKSFPSIVQNDKSSGQPSNEGAEVFNEDGPGKSNKDGPEEHNDDASEDSNEDGPLEFMDVFRVVCDEITETGLLDMLRVVKIDLKGSRRQSGSDDDEDDACVDIEDDDETIVEDAEVGDTDSTADGLDEEMDDDSADEVDEGQDDLKESVAHESKDGDGAEVTKDGDDSDDSDGMDDDAMFRIDPYIARIFKERNLPGSETKQSQLMRFKLRVLTLLEIYLQRNTGNNLVLEVYSFLMQAFVKSHSADGSEQFKQRIGGILQKRIFKAKDYPKGDGVEISTLESLLEKALKLASRSRYTTVASVAQNAAFWLLKIINSKSHSKQELASVVEKFQYILTDYFNNKKSRLKLGFVKEAVRRNPWVGEELFGFVLQKIGCTKAEYRRVQTLELVDCILKSWAGDDSSASKVLKKHLSQLCELIQEVLTKIPENKGHHMGLQLPKKGNMLFTMRASLQPEVTSDKQSPRLLPRSPAFPVDAHFNLHSMASDFLAMLALKLGMDLTGTDIPTPGVSTPAPARDESQEALIIPTGRGEACDRPPVAT

SEQ ID NO: 121535 - protein, 128 aa, Oryza sativa
  Clone ID: PAT_MRT4530_24550C.1.pep
ARGKPGGVDFNALSRHGYRGGPSVLTVRPPGVEPNWSWSTGKDRNDKEDQTESYEERERTRTAVTEGEKLIGVRNPQPRQMEKENKDASFSQKEKRKRDRGQASRGKNYVEEEKRLLRGSGVYSGFDT

SEQ ID NO: 121536 - protein, 894 aa, Oryza sativa
  unsure (1)..(894): unsure at all Xaa locations
  Clone ID: PAT_MRT4530_24551C.1.pep
MSSRGGGVGGRRGGPGGASSVRGGERGRKRGRGALDAVEPRVPLPRGTGSGPGAGRDGAAAPVPALQPAEADVLSGEVETEMAAGMEAREGASSSSSASAPAVGEVEPPSRAVGALPPTSSKAVVLQARPGFGTVGTSCRVRANHFVVQLADKEIYHYDVAIAPELRSRERNRNIINELLRSHKKYLDGRRSPAYDGRKGMFTAGALPFTDREFVVKIANDPERGNQGEKEFKVTIKCAGAANLYMHSLKQFLAXYISISRSFFSQAFGHKDIDCGVEWWRGYFXTTFYKAQPVIDFALDYLNMNIRDAYSRFDQDGTRVSVVQYFNRQYSYSLKYINWPCLQAGSDSRPTYLPMEVCRIVKGQRYSRKLNECQVTRMLRLARETPEERENSILEIANENNYGNDYHAREFGIGVTNQLALVDARVLPAPMLKYHDSGQEKVCNPSIGQWNMNNKRMLNGGSINYWACLTFASCVRLAEVRTFCKELVRVCNSIGMQITGEPCVRIRQERQDHLDAAVRDIHRQSAEFLSQQGVIGQQLELLVIVLPDANATVFYGRIKRLCETELGVITQCCLARNVQNVRQXQYLRNLALKINVKNXNRSVYVIRQLRAGEYKLKRFAPVEKKYLEVVASMDWPEVSKYKCSVSSQSHREEIIADLFTEVKDSQNRLVYGGMIRELIESFRKANGSYKPGRIIFYRDGVSEGQFSQVLLSEMDAIRKACASIEEGYLPPVTFVVVQKRHHTRLFPEDHHARDQMDRSRNILPGTVVDTKICHPSEFDFYLCSHSGIQGTSHPTHYYVLFDENNFSADALQTLTYHLCYTYARCTRSVSIVPPVYYAHLAASRARHYLEEGSLPDHGSSSASAAGGSRRNDRGVPVKPLPEIKENVKQFMFYC

SEQ ID NO: 121537 - protein, 154 aa, Oryza sativa
  Clone ID: PAT_MRT4530_24552C.1.pep
RPVERRARQVLTGLKPYGLSCGGAPGPPFHRWAGSPPPGDCPRVWRGRLSAAVDTQAAHGTVRVDSGTAGFSLTRPARAHDRQVCYRGRGAPRAVTPRALCVCLRQYTFVSKAKNSLQCSIQRVYSLPKKKKKKKKKKKKKKKRAAVKDPVRGE

SEQ ID NO: 121538 - protein, 556 aa, Oryza sativa
  Clone ID: PAT_MRT4530_24553C.1.pep
MAAAAAAAAAEDEEKRPLLLRPNGGGGKEEEDKGGGGGWRACVLILGTELSDCLAFAGIARNLVSYLTGVVGESNVAAARDVSAWTGTCFLTPLVGAFIADSFLGRRTTILLFLSIYSMGMITLTVSASFATPHLDASSDGVLRATVFLGLYLVALGVGGIKPCASPLGADQFDDDDAAPAARASFFNWYYFCINVGSLLAATVLVWVQERAGWWLGFAIPAAVMTAALAAFLFCSTLCGLRAFHTPPGSPLTRLCQVVVAAVRNRGVELPGDSSLLHQLPDGDYRIIEHTNQFAFLDKAAVVASPPAVAMASPWMLCTVTQVEEVKMLLRLSTVWPTVVFFFAATAQMSSTFVEQGKAMDTRVGPLDVPPATLSTFEVVSILLCVPAYDAALMPLARRVTGDRRGLSQLQRLGVGLALSALAMAYSALLEASRRRRAATSIVWQAPSYMALGAAEVFTSVGLLEFFYDQAPDTIKSLCTAVSLVAVAAGSYLNSAIVAVVAWATAPEKGGGGGWIPDDLNRGRLDCFFWLMFGLSCVNLLAFVYSSTRYSYRVAN

SEQ ID NO: 121539 - protein, 223 aa, Oryza sativa
  Clone ID: PAT_MRT4530_24554C.1.pep
MVQLDADDANSGSAASATHSHAIGDMPQPDASSRTSADEDDHGHNVGIDDIDDAGDNGSIGSDSDVPSCAVCTEPLEWAAVGPCGHRAVCSACAARVRSAPNPDNRCCICRTICPFVVVTKAAAGVVSFSTLPAVASHDDGRVGEYWYCAAVSAYFDDEQQYEAAKAVASRRHGDQPAMVHRAVHGVGSPKAPTMQIALRVYKTHSHIEIGPDFTEPGFPVME

SEQ ID NO: 121540 - protein, 94 aa, Oryza sativa
  Clone ID: PAT_MRT4530_24555C.1.pep
MEEDDEENDNVPDWAQYGGFADTTGDGGGAVEENNGADDLGQILCDVKKDCESEKEVQKLERYEQGAQKVGYHAGIAAMEGKIMALLTRHLASY

SEQ ID NO: 121541 - protein, 117 aa, Oryza sativa
  Clone ID: PAT_MRT4530_24556C.1.pep
TRLPPADHRRRFSPRHAHATASAPPAAAAPPRTRRRRTPPRRSHCCRTRRGPSSGTAPPARRSRSPGGGPRRRRRRGRRGCTSRCPGRRRCRAPFGRGSTRCCLATAASSPSSSSPP

SEQ ID NO: 121542 - protein, 524 aa, Oryza sativa
  Clone ID: PAT_MRT4530_24557C.1.pep
MSSTAYTRPSKPPGPAGERRPPRLAKELGRIEPKKLGIGLVAGCCLALLTYISFARLFAIYSPVFESTSLVMKNAPPASTQQNPVLAQQQSKEEDEKDVGEDETDRKVPSFAETTEKNEEEETVTKPSGDEAEATISCDENGVDEGFPYARPPVCELTGDIRISPKEKTMFFVNPSSAGAFDGNGEKKIRPYARKDDFLLPGVVEVIIKSVSSPAIAPACTRTHNVPAVVFSVAGYTDNFFHDNTDVMIPLFLTTSHLAGEVQFLITNFKPWWVHKFTPLLKKLSNYGVINFDKDDEVHCFRRGHLGLYRDRDLIISPHPTRNPRNYSMVDYNRFLRRAFGLPRDSPAVLGDKTGAKPKMLMIERKGTRKLLNLRDVAALCEDLGFAVTVAEAGADVRGFAEKVNAADVLLAVHGAGLTNQIFLPTGAVLVQIVPWGKMDWMATNFYGQPARDMRLRYVEYYVSEEETTLKDKYPRDHYVFKDPMAIHAQGWPALAEIVMKQDVTVNVTRFKPFLLKALDELQE

SEQ ID NO: 121543 - protein, 61 aa, Oryza sativa
  Clone ID: PAT_MRT4530_24558C.1.pep
MDREAVGSTLSQRLMNIMMTKISHTGKVHHMRAKHRMAQSLGQIAKFKRRYELEAEENNGR

SEQ ID NO: 121544 - protein, 1498 aa, Oryza sativa
  Clone ID: PAT_MRT4530_24559C.1.pep
TQCGRSMVFVTPCQEQKKKQSSTPGAVFSPDMIGEAVADRTIELLRLTNSETQCWQDWLLFADIFFFLMKSGCIDFLDFVDKLASRVTNSDQQILRSNHVTWLLAQIIRIEIVMNTLSSDPRREHLNSDQLQKGKQIDEWWRQMTKASGERMIDFTSLDERAMGMFWVLSFTMAQPACEAVMNWFTSVGVADLIQGPNLQPNERMTMMRETYPLSMSLLSGLSINLCLKLAFQLEETIFLGQNVPSIAIVETYVRLLLITPHSLFRPHFTTLTQRSPSILSKSGVSLLLLEILNYRLLPLYRYHGKSKALMYDVTKIISMIKVKRGEHRLFRLAENLCMNLILSLRDFFLVKKELKGPTEFTETLNRITIISLAITMKTRGIAEVEHIIHLQPLLEQIMATSQHTWSEKTLRYFPPLIRDFLMGRMDKRGQAIQAWQQAETTVINQCNQLLSPSAEPTYVMTYLSHSFPQHRQYLCAGAWMLMNGHLEINSANLARVLRELSPEEVTANIYTMVDVLLHHIQLELQRGHQIQDLLSKAITNLAFFIWTHELLPLDILLLALIDRDDDPYALRLVINLLERPELQQRIKAFCTSRSPEHWLKNQPPKRIELQKALGNHLSGKERYPPFFDDIAARLLLVIPLIIYRLIENDATDIADRVLAVYSTFLAFHPLRFTFVRDILAYFYGHLPSKLIVRILNVLGVSTKTPFSESFAQYLASSNSSICPPPEYFANLLFGLVNNVIPPLSCKSKSNPSDAAGSTARTTYNKPYTSSAGGISNSDGQRAFYQNQDPGSYTQLVLETAAIEILSLCVPASQIVSSLVQIIAHVQAMLIQSNSGHGMSGGLGQNSGVPTSSGGGVEPVGANRPNTTASGINASNFVSRSGYSCQQLSVLMIQACGLLLAQLPPEFHTLLYAEAARIIKDCWWLADSSRPVKELDSAVGYALLDPTWASQDNTSTAIGNIVALLHSFFSNLPHEWLESTHTVIKHLRPVNSVAMLRIAFRILGPLLPRLAFARPLFMKTLALLFNVLGDVFGKNSQASPPVEASEIADIIDFLHHAVMYEGQGGPVQSTSKPKLEILTLCGKECAAISGVMLLDKQLVDGQSQASPSMLLPPHSCTADYCRQYYIEGERAVTQLLKDVDPLQTAVVLTLRRQRPRRELSPDYTCTRNSILEAWRARRLAADVSDGLTPSRLRLASAFPLLAASINPRAAPEPLQIKTRVSSSGSVHPSREIQIASQIRDQRVMGRQPCCEKVGLKKGPWTADEDQKLVTFLLSNGHCCWRLVPKLAGLLRCGKSCRLRWTNYLRPDLKRGLLSEEEEKLVIDLHEQLGNRWSKIAARLPGRTDNEIKNHWNTHIKKKLKKMGLDPVTHRPVMSLAQPDPLKQQQQQHEPSVSGGTGADDKEEEEEETPTSAQPQGVACAASSASAVSSSCSSSASASAATPGADVDWPGLFEVDAILDIDWAGLLSACGDDGGCSAIGVDMLFDQCSDVGFDQDVWM

SEQ ID NO: 121545 - protein, 124 aa, Oryza sativa
  unsure (1)..(124): unsure at all Xaa locations
  Clone ID: PAT_MRT4530_2455C.1.pep
MASARRSRGVAAVGIAVFVAVVVVAAGAGGAAAVSCGDAVSALAPCGPFLLGGXGGPGDRCCGGARALRGMAGTAEARRALCRCLEQSGPSFGVLPDRARRLPALCKLGLAIPVGAATDCSKIS

SEQ ID NO: 121546 - protein, 78 aa, Oryza sativa
  Clone ID: PAT_MRT4530_24560C.1.pep
ESYMYLIVLIQSDQHEKLPLPPKDQRKHDFIHASMILFVYSIEVRKRNKNMGGIESYMYLIVLIQSDQHEKLPLPPKD

SEQ ID NO: 121547 - protein, 129 aa, Oryza sativa
  unsure (1)..(129): unsure at all Xaa locations
  Clone ID: PAT_MRT4530_24561C.1.pep
GERDPEPPDHRAHRNQGREDXARDAATAPTEGPPERKHAEDKKRKGRPRSRREKEAAEHKETGGQQPEGGGRRQKNGGGRGSAATRNRRAKRHTERTTKQEQAKPAARATDRPAHGGETGKEPSKAGQA

SEQ ID NO: 121548 - protein, 56 aa, Oryza sativa
  Clone ID: PAT_MRT4530_24562C.1.pep
TKIFGKRTLKIVDFIELILTKLGSKLNEKPGMPTLLLFYTARSLASNRPNIANFIN

SEQ ID NO: 121549 - protein, 189 aa, Oryza sativa
  unsure (1)..(189): unsure at all Xaa locations
  Clone ID: PAT_MRT4530_24563C.1.pep
VWNAIQAMQLTVGQIDHVTWILTNHGKYTAGXAYKTSTSTYYRVIIWKPWAPKKCKIFAWLVVQNRXWTSDXLATHGWPNNTYCLLCRHTPETIFYLLMEXRYTTRIWRTLLAWTSREHIIPESWGPATTVHEWWIGLETTKGVPKKGLRTLILLTAWEVLKEQNQRVFRHKELLAANVVTKIKEKAKT

SEQ ID NO: 121550 - protein, 51 aa, Oryza sativa
  Clone ID: PAT_MRT4530_24564C.1.pep
NIIPSKIFTEVAPAAQLESGKAQVDEAFSILNEKGPRDIYGSSRKRFTLLL

SEQ ID NO: 121551 - protein, 69 aa, Oryza sativa
  unsure (1)..(69): unsure at all Xaa locations
  Clone ID: PAT_MRT4530_24565C.1.pep
CSPKCEVHIAQKWLDKLPPPSXREAXVFTRGSRNRELKKNARLGCQVVLTPKLQGMVVPVPKPKPWDIP

SEQ ID NO: 121552 - protein, 100 aa, Oryza sativa
  unsure (1)..(100): unsure at all Xaa locations
  Clone ID: PAT_MRT4530_24566C.1.pep
NLNNTEAQRLVNFLLWHTDPMSLVLIEYHLRFGSFFILPWFLPRSSVCHIHLTIVRLISSRXVHGAPXDANQLASCCFTGTFVQNTPISWTLQAIPNDIQ

SEQ ID NO: 121553 - protein, 79 aa, Oryza sativa
  Clone ID: PAT_MRT4530_24567C.1.pep
GVQKGGRTSLMEDSEWSKNTSPLSTTLKLDVMFSDTETDMLRGDLSASCVQGSDDSRNSAIRIVIALAALFIVMGTKIS

SEQ ID NO: 121554 - protein, 87 aa, Oryza sativa
  Clone ID: PAT_MRT4530_24568C.1.pep
MGWASCCKGVDGVLPGRRKKKKETTWRIFSLKELQSATNNFNYDNKLGEGGFGSVYWGQLWDGSQKNGKALEGPSDVDDCCLTDIHF

SEQ ID NO: 121555 - protein, 73 aa, Oryza sativa
  unsure (1)..(73): unsure at all Xaa locations
  Clone ID: PAT_MRT4530_24569C.1.pep
GALVGNAASGKKIFRTKCAQCHTVERGGSPSLGPTFIGLFRRYVXTTPGFLYFTSNKEHCLRMSLRFFLRLPF

SEQ ID NO: 121556 - protein, 199 aa, Oryza sativa
  Clone ID: PAT_MRT4530_2456C.1.pep
MADERRVTAAARRALRLDDMEPAAAAPEASVAEDRPPAPRRCCAVMTKSATLERALGRAAIAVDEAATRPVSPSSPVAREWRSRGTSDLPERLPPPKISARGGWWGASPTARPEVTSDKQSTRLLPRSPAFPVDAHFNLHLMASDFLAILALKSGMDLTRTDIPTPGVSTPAPARDESQVALIIPMGRGEACDRPPVAT

SEQ ID NO: 121557 - protein, 72 aa, Oryza sativa
  Clone ID: PAT_MRT4530_24570C.1.pep
NYLGTYTPVRTKFGKYSDHQAIPFHIWSKQLRPNKTLKIPMSILTIRRKYSVFCFCEEEIHSGVMHAWIDER

SEQ ID NO: 121558 - protein, 124 aa, Oryza sativa
  Clone ID: PAT_MRT4530_24571C.1.pep
MVNAVLSAIPIYLLVVIDAPKWVVKGIDKIRRGFLWADAGPLTVCAVEGCHTRIVAIRSPNCLPVNEPSFHNWLCDSRMKIGARNWCQPERGRDEAGGRGGKKRPLLSPTAFISASAAVEGEGG

SEQ ID NO: 121559 - protein, 433 aa, Oryza sativa
  Clone ID: PAT_MRT4530_24572C.1.pep
MEWLDEYEKLVIRMNTPRVVIDNAVCSTATLVQVDSARKTGVLLEAVQVLADLDLSINKAYISSDGRWFMDVFHVTDRLGCKLTDDSVITYIEQSLGTWNGPARPAALEGLTALELTGADRTGLISEVFAVLADMDCAVVEARSWTHRGRLGCLVFLRDEEADTERMARIEARLGHLLRGDSTGAGGAVAAVPAAAVAHAERRLHQLMSADRDQEERAAAAAAASPTPAVSVQSWAERGYSVVTVQCRDRPKLLFDVVCTLTDMDYVVFHGTIDTTGDQAHQEFYIRHADGSPISSEAERHRVSQCLQDAIERRSLEGVRLELCTPDRPALLSDVTRTFRENGLLVAQAEVSTKGDMASNVFYVTDAAGHAVEQSAIDAVRQRVGMDCLVAREEHRPQLYQKAGPRDAVDGNGGGGGIGLFYLGNFVKRNLLC

SEQ ID NO: 121560 - protein, 104 aa, Oryza sativa
  Clone ID: PAT_MRT4530_24573C.1.pep
MAGGASSPRVVACVVVALLLLSFAVEPLEAVAAAAAPATATKPIRCRKCDHACKKSCKGYGRNSDCSVPCGDPSNKAGCKSCLQAYYSKCLNYCGQACRAVCIN

SEQ ID NO: 121561 - protein, 167 aa, Oryza sativa
  Clone ID: PAT_MRT4530_24574C.1.pep
MANAKQLALFAMLVLLLASCAAARRHGKPDPCDGGGGGVDSHLPPGMRRCSSPAVSEDGTPAVMTVNGFEEGEDGGGPAACDGRYHSDRSLVAALSTGWFAGGRRCHRGIRITSRQNGRSVVATVVDECDSRHGGCKDDIVDTSAAVWSALGLDTNVGEVPVTWSDA

SEQ ID NO: 121562 - protein, 36 aa, Oryza sativa
  unsure (1)..(36): unsure at all Xaa locations
  Clone ID: PAT_MRT4530_24575C.1.pep
RISRRRRAADXXLAAAPQLRHRAXGNLTLAPAPXPT

SEQ ID NO: 121563 - protein, 250 aa, Oryza sativa
  unsure (1)..(250): unsure at all Xaa locations
  Clone ID: PAT_MRT4530_24576C.1.pep
WSITVVYGPQLEADKIAFLSELESLQPSMKRAWLIIGDFNLIYKASDKNXNDRLNRRMMQHFRGLLDKIRVKELNLPGRRFSWAGQVQDSWQRPILATNSLANFRLKLRRLARDIKRWSRNQVGDIKLQLAVASEVIFQLEVAQETRTLSNEERLLISNLXNQILALLVLNKIQIRQRFRQTWLKEGDVHSKFFHIKVNFRXKNFIPSLHTPSGIAISTPDKEGELFRFLKERPGTCFQKRPGINWNMKE

SEQ ID NO: 121564 - protein, 689 aa, Oryza sativa
  unsure (1)..(689): unsure at all Xaa locations
  Clone ID: PAT_MRT4530_24577C.1.pep
MVPALRRGGGGPRFPQCVAWIQRNQRGDGSWRHAAAAHQQLGSSPEIVTERDLSSTLACVLALARWDAGSEHVRRGLQFIGRNMSVAMDDQTAAPASGSVVSFAAMLRMAMEMGLEVPAVSQADVRDRDAGVICHGGRTEYTAYVSEGLGNIQNWNEVMKFQRKNGSLFNSPYTTAAALVHNYDAKALQYLDMLLDKFGSAVPAAYPANIQSQLYMVDVLEKMGISRHFVGEIKSILDMTYSCWKQRDEEIVLDMQTCGMAFRMLRMNGYDVSSDELSHFSEPSSFHNSLQGYLNDTRSLLELHKASKVSIAEKEVEYALEFPFYTILDRLDHKRNIEHFDITSSQMLETAYLPCHSNEEIMALGVRDFSSSQFIFQEELQQLNSWVKESRLDQLQFARQKLDYFYFSAAATIFTPELSDVRILWAKNGVLTTVVDDFFDVGGSKEELENLVALVEKWDKNDKTEYYSEQVEIVFSAIYTSTNQLGSMASVVQGRDVTTHXVEIWQELLRSMMTEVEWRQSRYVPTAEEYMENAVVTFALGPVVLPALXILLGPKMPDSVIRSQECSELFRLMSKCGRLLNDVQSYEREGSQGKLNSVSLLALHSGGSVSMEEAVKQIQRPIEKCRRELLKLVVSRGGAVPRPCRELFWSMCKVCHFFYSGGDGFSSPTAKAGALDAVIHEPLNLSCSV

SEQ ID NO: 121565 - protein, 730 aa, Oryza sativa
  Clone ID: PAT_MRT4530_24578C.1.pep
MNGRARRPAAAAHGAKAASTKSDRMMEKDQRKGAMPVKKGSSANAVDKLKKKLRHEENVHRALERAFTRPLGALPRLPPYLPSQTLALLAEVAVLEEEVVRLEEQVVNFRQGLYQEAIIFSSAKNTSLPGGEGCVPAQLMPSSPVPNSEVSPANCHSPPTRPSMNGVAGAKQTPRKPSPSAAVAQDDRSGAGKENQSCSNTPARNCRHSPLLQKASKSRLPTAAAPEKRRATAQTISTVPDRKRLADTVSNNSEKASQDDSSVPNRLSEELLRCLLAIFSQMGGSSASGQDEEQAALSPSVSGSCESSEDAYPQDPYGILEFGTRDVGSYKRFHVIDATSFDQTAMENDTMLTRKLKALIRRLSSVDLTGLSHQQKLAFWINIYNSCMMNAFLEQGIPTTPHMLVAMMPKATINVGGRTHSAMSIEHFILRLPYSVKHVNPGGVTKGAADDVTMRGVFGLEWPEPLVTFALSCGSWSSPAVRVYTARGVEEELEAAKRDYLQSAVVVSAPAKVAIPKLLHWYLLDFAKDVDSLMDWVCLQLPSELRQKAMRIVEDGRRGVAAESRRVQVLPYEFRFRVAGVLEGQAGMSQQGIWYGDVFPLTRSLAAKPIVPWDAATMQSAENLVLGKTVKGGPAAAMESATSRNEEMGVIGHDQSTDATAEHGVNISDTLVPGGGRIVTEFVPARMMAPPPSDSRNPSSASQTAEEACRDRKRALAVAGRPGMSPAWGR

SEQ ID NO: 121566 - protein, 113 aa, Oryza sativa
  unsure (1)..(113): unsure at all Xaa locations
  Clone ID: PAT_MRT4530_24579C.1.pep
GIPVDPASGPSGKKGSSATAVTKGMTNRIQARRERKLALQQDVDKLKKKLRHEENVHRALERAFTRPLGALTQLPSYVPCETLALVAEVAVLEEEVVMLEEQVVNXRGGLYQE

SEQ ID NO: 121567 - protein, 107 aa, Oryza sativa
  Clone ID: PAT_MRT4530_2457C.1.pep
MGLSLPKKGNMLFTMRASLQPEVTSDKQSTRLLPCSPAFPVDAPFNLHLMASDFIAILALKSGMDLTGTNIPTPGVSTPAPARDESQETLIIPTGRGEACDRPPVAT

SEQ ID NO: 121568 - protein, 114 aa, Oryza sativa
  Clone ID: PAT_MRT4530_24580C.1.pep
LCLVLGQVFFFQVRVYTARGVEEELEAAKRDYLQSAVVVSAPAKVAIPKLLHWYLLDFAKDVDSLMDWVCLQLPSELRQKAMRIVEDGRRGVAAESRRVQVLPYEFRFRYLLAS

SEQ ID NO: 121569 - protein, 105 aa, Oryza sativa
  Clone ID: PAT_MRT4530_24581C.1.pep
MSQQGIWYGDVFPLTRSLAAKPIVPWDAATMQSAENLVLGKTVKGGPAAAMESAASRNEEMGVIGHDQSTDATAEHGVNVSDTLVPGGGRIVTEFVAGQCHVTAT

SEQ ID NO: 121570 - protein, 637 aa, Oryza sativa
  Clone ID: PAT_MRT4530_24582C.1.pep
MNGRARRPAAAAHGAKAASTKSDRMMEKDQRKGAMPVKKGSSANAVTKGITNRIQARRERKLALQQDVLPEFCPKFSQFEKRIGSSELCFVTQFAAWILQVDKLKKKLRHEENVHRALERAFTRPLGALPRLPPYLPSQTLALLAEVAVLEEEVVRLEEQVVNFRQGLYQEAIIFSSAKNTSLPGGEGCVPAQLMPSSPVPNSEVSPANCHSPPTRPSMNGVAGAKQTPRKPSPSAAVAQDDRSGAGKENQSCSNTPARNCRHSPLLQKASKSRLPTAAAPEKRRATAQTISTVPDRKRLADTVSNNSEKASQDDSSVPNRLSEELLRCLLAIFSQMGGSSASGQDEEQAALSPSVSGSCESSEDAYPQDPYGILEFGTRDVGSYKRFHVIDATSFDQTAMENDTMLTRKLKALIRRLSSVDLTGLSHQQKLAFWINIYNSCMMNAFLEQGIPTTPHMLVAMMPKATINVGGRTHSAMSIEHFILRLPYSVKHVNPGGVTKGAADDVTMRGVFGLEWPEPLVTFALSCGSWSSPAVRVYTARGVEEELEAAKRDYLQSAVVVSAPAKVAIPKLLHWYLLDFAKDVDSLMDWVCLQLPSELRQKAMRIVEDGRRGVAAESRRVQVLPYEFRFRYLLAS

SEQ ID NO: 121571 - protein, 55 aa, Oryza sativa
  unsure (1)..(55): unsure at all Xaa locations
  Clone ID: PAT_MRT4530_24583C.1.pep
MGSGSSCPFLGFTLKDSSYKXSPMPTSTTSGIKDGSSTKTCNRAMSYLLVKCIST

SEQ ID NO: 121572 - protein, 262 aa, Oryza sativa
  Clone ID: PAT_MRT4530_24584C.1.pep
MDYDYRGRPGSGSYGGGVGGGGGSSSLYPRVGQPSHGVANAPPPEPPRAAPYHHHGPPTVSAAPHPVPASSSTSMGIQVVIKPAYRITPPPQLPPQLTEIPRSTFNFDFEYERKILAEAEKENPNWSKFVIESQPPPPPQPPRGPKLTTPTTSVATPGDPVVDKYISMGLGREAVSFAVLNYGDNPAKACFFPYLSCDLSLPSFNISSRTKTIALITQKGFQSNFFPPLFSKLRTLCAAQQQPDSCGNLLAGAHYWIVHVRG

SEQ ID NO: 121573 - protein, 204 aa, Oryza sativa
  Clone ID: PAT_MRT4530_24585C.1.pep
MGESPLGESSAPHPLSLYKFVEVHEEADGLQLRQQWVQGNNVTTRYAWLFDMGQPGASPTASSPKWANPPLLATPISTSAAAVRLLRHRREHHWSAVVLLLVERSFEGSAGVLTGAWGSGLAGAGSGGSSGALEKRGERRAGQAKRRSQRRAGRAERRGQWPTVMPAASLERSSARQRNGLVSRPSGVASNVAGANLRQAAEHP

SEQ ID NO: 121574 - protein, 37 aa, Oryza sativa
  Clone ID: PAT_MRT4530_24586C.1.pep
VGAYQILINKLNSAYVLSLPLYNLLYTRFYRPDISCN

SEQ ID NO: 121575 - protein, 112 aa, Oryza sativa
  Clone ID: PAT_MRT4530_24587C.1.pep
MAVLPSSTAADCTMARIAFPCDGGRQATSRTPTRQRRRRSSDCFLLGWEPPFGCLGVVASIGAAGTNVYGRFVTFTMDSRPADCLHVVLDGPVPMAREALQPHKTGSSMLLR

SEQ ID NO: 121576 - protein, 113 aa, Oryza sativa
  unsure (1)..(113): unsure at all Xaa locations
  Clone ID: PAT_MRT4530_24588C.1.pep
FFFFFFFFFFXTQNSICFKXQDXKDRGSQGNRDVVIKWSXQDSTKLLAVALDAPGEAVHESRRLKPRRMXDQLGMFDASIPNMVPADFXSFAAVETQVDRITGDGGKCARRNR

SEQ ID NO: 121577 - protein, 57 aa, Oryza sativa
  Clone ID: PAT_MRT4530_24589C.1.pep
NSSLLIKLAVFLSLFGANYTEKYRKSCSYNNHYQTGDITFELSILDCHGPPTKLPLI

SEQ ID NO: 121578 - protein, 108 aa, Oryza sativa
  unsure (1)..(108): unsure at all Xaa locations
  Clone ID: PAT_MRT4530_2458C.1.pep
MGHTYLHSAGRRRNVGARLSADDATGVRPVTNRSFLSTTRXFSMPHVGPSSYNDFLAMVAMKPGMYLAGTDVPTPRVSTPAPARNERLEALIIPTGRGEACVRPPVAT

SEQ ID NO: 121579 - protein, 422 aa, Oryza sativa
  unsure (1)..(422): unsure at all Xaa locations
  Clone ID: PAT_MRT4530_24590C.1.pep
DGGGGGGGGGGEGGGGGGAGGGGGVASKAGGEGDPGWLGRRGGGGGGPWAGGGRGRGKGGGGGRXGEVGGAEAGQRGGSGLPAMGGSAVGGFESGRPRGXGRSSGGGLGAMTVAGESGGGRLGSGNGGRGEGDGGELGAGSVGRDDGGGWIHRHDDGGGWVRHRDDGGGQRGGQQWWWEGGHGSGGSGGAQAVLHNSEGSGSGGGGGNGGGGGGDGXGGWAGGDRHEGAVPVGEGGRRRAGGAGGGEAGAGEGGGGGGGCRXDGGGGEGGGGREVVAIGCGGGGEYGHRTRACASSSXGCGGGGGDGGASRGGGGGGGSGGQWTVAGGLVGARXQRRQSSEGHDGGGSGXGAQAGEGHQDVGGGREGGVGGGGGGGGARRHRRAASSGGGGGRPGGGQGRRGGGSGDGGGRGHGDACTWELR

SEQ ID NO: 121580 - protein, 113 aa, Oryza sativa
  Clone ID: PAT_MRT4530_24591C.1.pep
MASTHLTTCSASTRSSTKPEAGHRTGPASPMRQSTPARCAAKSCELTALTRANATAAVNTTVRSIVTNTCAPALVYFYRVAEAAAGRRYSASSPDAIWGSYAILFGRREERLS

SEQ ID NO: 121581 - protein, 484 aa, Oryza sativa
  Clone ID: PAT_MRT4530_24592C.1.pep
MPGSSGRAPLFACRGAAAVSASSMLGGGGAAYQAAVVAHVAPVPAIRPCASWVVEAMRASSPTRPAAAAVDAEYDAWTQRKHPSALGSFEQVAAAASGKRVVVFLDYDGTLSPIVADPDMAFMSDEMRAAVRDVAEHFPAAIVTGRCVDKVQSFVGLPELYYAGSHGMDIKGPSSNEEEDTKILLQPAREFLPVINKAYKALMEKTKSTPGARVENNKFCLSVHFRCVDEKRWNPLAEQVKAVLRDYPELKLTQGRKVLEIRPSIMWDKGKAVEFLLKSLGFDDDRRDVLPVYIGDDRTDEDAFKVLRKRGQGLGILVSKCAKETDASYSLQDPAEKYTNAGAHVFVTMLLTVVFTAAVALALVNAVNSHDFAAHLAGVDCRMGLAGPVRCPASGFVELLVLALHVVRCVLAILDRLHACLMSPSLQLSIASPCHGVPCSIGAVEASAIIVSDAPEGLISTLTTDHIYYMTVFPAKLALTSEEV

SEQ ID NO: 121582 - protein, 44 aa, Oryza sativa
  Clone ID: PAT_MRT4530_24593C.1.pep
MAGQEEEIEASWPMLAPYMQDAVHFSCCKRAYGYQVSLPSSHVP

SEQ ID NO: 121583 - protein, 150 aa, Oryza sativa
  Clone ID: PAT_MRT4530_24594C.1.pep
VARVHGGCGVSAEFCGNEAVAGVWQRAAEPTVQAVRRSGGYSDGGVQPELAGKRQSAGATRGERLGVQQVRENWGKGGGWHGDHFYRLGEEKSWPDVADLKRQRPATWVTSWAKWGSIRRQKLGKNGGGVAGPGWRLGMTGGAHGSHLSA

SEQ ID NO: 121584 - protein, 85 aa, Oryza sativa
  Clone ID: PAT_MRT4530_24595C.1.pep
ATSMENIHAACARTQARSLYFGRPLFFSWGVTISLRIYYIFQLFENKNMGSAAWINHAFYNNTYVSYKTEPLMPRNTQACLQHPT

SEQ ID NO: 121585 - protein, 49 aa, Oryza sativa
  unsure (1)..(49): unsure at all Xaa locations
  Clone ID: PAT_MRT4530_24596C.1.pep
ILGCXHGKAPLHPPRYALNQAKSKYSALFILLELNEIKESECFFLCSLL

SEQ ID NO: 121586 - protein, 1496 aa, Oryza sativa
  unsure (1)..(1496): unsure at all Xaa locations
  Clone ID: PAT_MRT4530_24597C.1.pep
MAERVVAHNLSPSASGDDRERNPRRRARTPPSPSRRSLGREEALEGIERSATSPPTGDGEGRRDGERRLLVYGDGSTPQGALQAAGALLRHPPVVPDPETPARRWLDDVANLVMTAQQRLGAGGRSYAPKASGAATTGSVSSRRRARRKAAVTRRSSAIPSSTPPTQEDVRGGPDARLNIERRRNGRRAAHATEGASSSGAPLQFGHGGQPPMSPVGGAGCRAFVASLRNVRWPPRFRPTITEKYDGSVNPAEFLQIYTTGIEAAGGDDRVMANFFPMVLKGQAWGWLMNLSPASVHSWEDLCQQFTMNFQGTYPRPGEEADLHAVQRGDDESLRSYIQRFCQVRNTIPCIPAHAVIYALRGGVRHNRMLEKIASKEPQTTAELFQLADCVARKEEAWTWNSSGSGVAAXAAPGSAARSGRXRDRRRKKRXSAHSDEEGNVLAVEGASRATRKGRPASDRKKEAGAPTRERPXGKWCSVHNTSLYELXDSRAVKSLAERTRKWEEERRQERREGKAPAAHTSRXNRRGEAKQKAPPEDXVDDGDXDNLGFQEPQATGCXTVDGGACAHTSLRSLKAMKRELLAAAPTHEATRXRARWSEVALTFDQTDHPPCVARGGQIAMVVSPTICNVKLGRVLIDGGAALNILSPAAFDAIKAPGMVLRPSQPIIGVTPGHTWPLGHIDLPVNFGGSANFRTERVNFDVADLSLPYNAVLGRPALVKFMAAVHYAYLQMKMSGPGGPITVHGDLQVALACMEQHADQLAAASKPEGGDERLSASVPAAPRQRMITCDEVPEDALVSFLRANADVFAWRPADMPGVPREVIEHRLAVRPGARPVRQKVRRQAPERQAFIREEVARLLEAGFICEVIHPEWLANPVVVPKANGKLQMCIDYTDLNKACPKDPYPLPRIDQIVDSTAGCDLLCFLDAYSGYHQIRMVREDEEKTAFITPIGTYCYTTMPFGLKNAGSTFQRTTRISLGSQLGRNVEAYVDDLVVKTRNQETLLLDLAETFESLRSARIKLNPDKCVFGVPAGKLLGFLVTARGIEANPEKIRAIERMRPPSKLRDVQCVTVCMAALSRFISRLGEKALPLFKLLKRSGPFTWTEEAERALSQLKAYLSSPPVLVAPKPDEPLLLYLAATPQVVSAALVVERDEDNPRSAHPHPVSVRPGREQGGEAPEPNGGPRPPTAGAGPLPACPTLPGAPDPQDGPGATAGRPRPLPSDPEVDDTEAECAPRGLSDEKRPGDAAPDEGDRPRRKAHRVSVVTSYPLGQILHNREGTGRVVKWAIELSEFDLHFEPRHAIKSQALADFVAEWTPAPEPVSVPEASSGPSQLPHTAYWVMQFNGSLSLQGAGAGVTLTSPSGDVLRYLVRLDFRATNNMAQYEGLLAGLRVAAGLGIRRLLVLGDSQLVVNQVCKGYRCSDPQMDAYVRQVRRMERHFDGIELRHVPRRDNAVADELSRLASSRAQTTPGTFEERLAQPSARPDCHAQKFSNQNF

SEQ ID NO: 121587 - protein, 54 aa, Oryza sativa
  Clone ID: PAT_MRT4530_24598C.1.pep
CLHLEPLPPPEPLPPSLKMARREPEPLRTSTSTEAILPHNPVEGHSRVAILLHS

SEQ ID NO: 121588 - protein, 50 aa, Oryza sativa
  Clone ID: PAT_MRT4530_24599C.1.pep
KKQFLPFYIKFNPKPSIFSIKISPTKKIFFLAKPLFSLFYRKIFIKKNKT

SEQ ID NO: 121589 - protein, 78 aa, Oryza sativa
  Clone ID: PAT_MRT4530_2459C.1.pep
LGGQGDIHNETINRINTQHNRHRSHNIEVYIRQDTPPDIDFRDRHGYSPTVSPDTVRRYESAISDLAGHGFEEEGYPL

SEQ ID NO: 121590 - protein, 89 aa, Oryza sativa
  unsure (1)..(89): unsure at all Xaa locations
  Clone ID: PAT_MRT4530_245C.1.pep
EEAXQLXRGXRRGRRRRTPSRCRAPPPPPPAHVPVVVCLERPRRSARSPHHNADKHNHHQDHRHRRHRRRRPPSHHGRHCTHLDLSLNS

SEQ ID NO: 121591 - protein, 158 aa, Oryza sativa
  Clone ID: PAT_MRT4530_24600C.1.pep
GLQANFDEPIRSPLAPTVLLTGVIPQESSIFKSALHPLRLAFKTANGGISKIIYKKGDDLRQDQLVIQMVSLMDRLLKLENMDLHLTPYRVLATQPDEGMLEFIPSSSLAQILSEHRTITSYLQKFHPDEDGPFGITAQCLETFIKSCAGYSVITYIM

SEQ ID NO: 121592 - protein, 85 aa, Oryza sativa
  Clone ID: PAT_MRT4530_24601C.1.pep
MASWRGVAVRPTTIACALRRPARHESGGGPRCANPKRAAMSAGTTWNHRPRRMGPSRNPLPPLDSHLTGGGCGCSVRGVCEPDLV

SEQ ID NO: 121593 - protein, 113 aa, Oryza sativa
  Clone ID: PAT_MRT4530_24602C.1.pep
WPSPRRGRERRATPADVGEWGRRERRDSKIESRPSRARARAGERGEWARGTRRTRGRGRRGPEEAEAWTRRRFRARRLLAQRRPETLQLRKIRSTWRLKLTFGKASKASHIIL

SEQ ID NO: 121594 - protein, 130 aa, Oryza sativa
  unsure (1)..(130): unsure at all Xaa locations
  Clone ID: PAT_MRT4530_24603C.1.pep
PSLALSFLVLLGLATFTTXSGLATSNLSPSSAPGVSAACCAGERSXYXRPALTRQNHXNFAATLSXRTPAXSMADEEKMLESSXGSAIERHRGLLDELRGLKPXPXDVDAERRMXRDAXGRLVAGLRPRL

SEQ ID NO: 121595 - protein, 67 aa, Oryza sativa
  Clone ID: PAT_MRT4530_24604C.1.pep
PTSGGVWGVPSPITFSNGLAFPLRHLDRSVRLVSPCSPFKGDWVLLLLPLPFIASCWRRFTATFFFP

SEQ ID NO: 121596 - protein, 68 aa, Oryza sativa
  Clone ID: PAT_MRT4530_24605C.1.pep
RRTHYAPPRSRRGVEDPNWRSDTCVYLLPPWCQRPLCLCGDRCQLMASRNRAQPLYGRQKLQLAHCRP

SEQ ID NO: 121597 - protein, 169 aa, Oryza sativa
  unsure (1)..(169): unsure at all Xaa locations
  Clone ID: PAT_MRT4530_24606C.1.pep
FRGKPLEHEDELTTHFGCMDTEEGTMLCVGGIGKRTPSSGSDDNLTPMSNDNVGLSSAGRVAXRAGKEQVVDRPPPKKSKNMEYYVGCVSESMLERSRNESSVLRGEQDEIKELLQLVEEDGVAQGSELYFIATDLFRSAARWAAFRCIYPAENRKAWLRWTWDNARKK

SEQ ID NO: 121598 - protein, 55 aa, Oryza sativa
  Clone ID: PAT_MRT4530_24607C.1.pep
ISAAKNQRRNKILPPVKNYSSPSLTFSHFIVYFRLSIEPLVYIILSPSFSNPASN

SEQ ID NO: 121599 - protein, 33 aa, Oryza sativa
  unsure (1)..(33): unsure at all Xaa locations
  Clone ID: PAT_MRT4530_24608C.1.pep
GSKEIERHHRFYFIMRRIKKLNWGPTFLNVFXV

SEQ ID NO: 121600 - protein, 57 aa, Oryza sativa
  Clone ID: PAT_MRT4530_24609C.1.pep
RGTQQNKLLLLPFLPLCTSFHKNLTQTFFKVVGFTFAHDLVGKGCDANGNANGPTKL

SEQ ID NO: 121601 - protein, 158 aa, Oryza sativa
  unsure (1)..(158): unsure at all Xaa locations
  Clone ID: PAT_MRT4530_2460C.1.pep
GHPSLCLPEGSGRSHFGPEGWGAPTPPRPIPSXMMRASWLSSLAGAGVLTPGVGMSVPIHQNTGVGCYASQRPEPVYVARVLRISSLADVPQIEGEESHLAPPAESAKGGLRGLPFCEHNRVFVNSVKFPTNLSFRYAGLDLDIFIYNSMKISNFFRF

SEQ ID NO: 121602 - protein, 54 aa, Oryza sativa
  Clone ID: PAT_MRT4530_24610C.1.pep
PPKVFHITNYNCPSGQGASTWDRFELRFLKRVAAVIGSTDVVNSITSFTIDLGV

SEQ ID NO: 121603 - protein, 700 aa, Oryza sativa
  Clone ID: PAT_MRT4530_24611C.1.pep
MVLRWLTTALPLAAAAARHAAAAPSSAATLAAAAARHAAAASSSSAARHAAAAPSSAATLATAAAPSSSSAATLAAAAAPSSAAVAVLPEAARRVSAASLLEELNAFPEMSLVVRWLGAARRPGAEVVSKIAGRRHHLTTTAAAAAPSSAAVAVLPEAARRVSAASLLEELNAFPEMSLVVRWLGAARRPGAEVVSKIAGRRHHLTTTAAADSNLPSQAPGRLVNRGGAQVIGAGDFFGWESNDCGCLADLAPFPHRGAPFPRRRCGAASPSLPWWFAAEQVRFGVGDPFESDDGGILPDLAAFLRRRRRCAHSRRIFEFESTHHGFGKSNNGMSGGFRFMLDDTDKRFRHVRARRNRWQQLVIRKMFSSSGKRSSSTSRQQTPSPTSLPAAIPSQPAAAISSSSSETNSSSEQEKGASSSACYIDESFGNQEIIDAETYVKANPMLVKANVLGSAKTFWRMSDIAVRLIRRLARILKILHEQKRYLLAPLSVQNLVIVSGELKLRNVTLADDDFSFDRIKCDYQYMSVVLEELIMLSVGQNGLSNIPPDFGKYLGLLKGLVKPDDEFLITNHASLLPMANRTDAFMMMYNHIMGYLGRKDPKKKIYILSHLKYDTDWLRTASGNSEIGKWLWRRRYGQTVKEFLHLNRNIRSHPYEHSEEKIEEALYGEWPELLVEMQEKLHKEGELQNTEMESKFGQQ

SEQ ID NO: 121604 - protein, 575 aa, Oryza sativa
  Clone ID: PAT_MRT4530_24612C.1.pep
MAGNHISLEEITEYESVITKEFRSEDEGYKFYNDYAWSKGFSIRKDNVRYNGDELGVSGLRTCNIMDVMEKNHGGYDQVGFVSRDLYNFVARYKKERIEGMDTQFALSLLNEQKERDAEFFFEYNTDAGGVVVFDATYRVNRYNLPFVPFIGVNHHRSTVVFGCCLLSDETVSSYVWLLETFIKAMGGKHPRSFITDGDLSMANAIAKVCPDADHRLCTWYIEENAKRHLHGDALTKFRRLVYEVMKADEFERRWCAFKNRDNVPEKELWLAMMYALREKWAAAYTDGRYFLGMRSNQRSEGLNSRIHSHLDRKMSLIDVIEHFMCCVSRMRRNEAEMDARASQSVPFTKISAARFFTHVIFREVRAEIRKICKWVILEVRQLDEARRYSIASKYDHKVHGEVSCSFDGALLMGVKCYCQMMDSKEIPCSHIFTVLKYLRIDIIPQCCVAVRWTLQAKAAFPSIRTANVHEWSEQMDQYRLLRNIANEALVKASLSFERSQQVIDFFENFMREGAENEGSVNETTLGPLPAHFSASNQPSGERVLDPHKIVPKGRIPSKRLKPCRESYANKRASH

SEQ ID NO: 121605 - protein, 139 aa, Oryza sativa
  Clone ID: PAT_MRT4530_24613C.1.pep
MSNSASGMAVCDECKLKFLELKAKRSFRFIVFKINEKVQQVVVDRLGQPGESYDDFTACLPADECRYAVFDFDFVTDENCQKSKIFFISWAPDTSRVRSKMLYASSKDRFKRELDGIQVELQATDPSEMSMDIVKSRAL

SEQ ID NO: 121606 - protein, 278 aa, Oryza sativa
  unsure (1)..(278): unsure at all Xaa locations
  Clone ID: PAT_MRT4530_24614C.1.pep
PDSRVDPRVRVVRVSRDLYNFVARYKKERIEGMDTQFALSLLNEQKERDAEFFFEYNTDAGGHLKNMFXADAQSRINYDAFGGVVVFDATYRVNRYNLPFVPFIGVNHHRSTVVFGCCLLSDETVSSYVWLLETFIKAMGGKHPRSFITDGDLSMANAIAKVCPDADHRLCTWYIEENAKRHLHGDALALFRCLVLRCFEGRMLWAPLAGPFLSGFCAGVGVVGSPVCLPFGFSCVLGFSGGGFFFWACGPLPAPPGLPSPFVFLFPGCFPRFLFFDN

SEQ ID NO: 121607 - protein, 105 aa, Oryza sativa
  unsure (1)..(105): unsure at all Xaa locations
  Clone ID: PAT_MRT4530_24615C.1.pep
TNLPWNSSSRQLQGIPSRMIXSRPXHTDNKPPXPNYYXGGEAXQKIEXGGXYPXPXXNPHGPRXKHSXEPNTFLTLGPKKIXIESXSTXKTXXLKKGLNPEEKNA

SEQ ID NO: 121608 - protein, 189 aa, Oryza sativa
  Clone ID: PAT_MRT4530_24616C.1.pep
MACLESELPPAPVLLSLEMARREPEPLRASTPTEAILPHNPAEGHSRGPSDDVACHGGAYVSVGTPHVIHMRCRTRLGLGSLRWPSASSSATSAGCTGFRAPASAPQVTPHSPRPRPFPRHLRCRRRDLAQLAAATTTCDSAGHARLRRLPTQARHGEPLMRMHVGPHRGAGAARRRCRARPAVNDQIW

SEQ ID NO: 121609 - protein, 87 aa, Oryza sativa
  Clone ID: PAT_MRT4530_24617C.1.pep
GSPGCRCLNLKGSNTFNICVQVCTYALPKFDHGPISYSGQWYRCWVYGNTYLFCGVRELPSICLVLRYFSKYKGTNKDCFLLSCITY

SEQ ID NO: 121610 - protein, 387 aa, Oryza sativa
  Clone ID: PAT_MRT4530_24618C.1.pep
GFHCPAAAAAAAAAGAAAGGGGGGADSGSSGFRGAAAEADEGIVVVRGDLQALLATNRRGSLHPRCLHQRFEEDLPQPRHRQVAVSKAVGGFNNLQAANRTAAKKQKAIIRSFNHSTCGFWDALGAKQTEDMLVSGKSGDDTKNAEREKAKGLLEISKVAKQKALSASGLSTWDIGLVPAPYDDLLSLLKRFAAFVLTLKSGHIDRSPGAFQGVAKSQQGSSKAGQVSPPGKQNVLGGSAILSYGTQTKGIPTYMDDFKYGFPSSGLSLQTMKWWGTDSHTETTPAKDDNGEAPESANEASKGMTDDELDWGADEAEAEADADSAITTEPSAQLCSLRRKAVDDGRKLLTGKSCGGLELCRLNKRQKMALAQVFGASLPEQLRSKLG

SEQ ID NO: 121611 - protein, 78 aa, Oryza sativa
  Clone ID: PAT_MRT4530_24619C.1.pep
VSVTFCQLLFTMSSRVSTGLALLLQKLVMRTTTCAFNVVCWCDTRLEYSISLCCSACSDRAAQRHRSIMCHSFLNNAA

SEQ ID NO: 121612 - protein, 108 aa, Oryza sativa
  Clone ID: PAT_MRT4530_2461C.1.pep
MGHTYLHSAGSRCNVGARLSADDVTGVRPVTDRSFLSTTRQFSMPHICPSSYNDFLAMVAMKLGMNMAGTDIPTPGVSTPAPARDECLETLIIPTGRGEACDRPPVAT

SEQ ID NO: 121613 - protein, 50 aa, Oryza sativa
  Clone ID: PAT_MRT4530_24620C.1.pep
MACDGDIVFVWDEELNLEFGGSTGGTSLVTLAVGTSNDGDSGRSNRITNT

SEQ ID NO: 121614 - protein, 171 aa, Oryza sativa
  Clone ID: PAT_MRT4530_24621C.1.pep
MAAAVASHRFLSVAEAGAAFRWTPSQLDPKMLSLQNEIFITSGGDRDLINRILSKSKTETVPENKDDGESDDDNDEEGDDEDAENQGDDDAGDEDASEEEGNDEDEDGDPEANGEGGSDDDDGGEDDDDEDEDGDDDEGEGEGEDDDEDEEEEEEEDDDDDVPQPPAKKRK

SEQ ID NO: 121615 - protein, 95 aa, Oryza sativa
  Clone ID: PAT_MRT4530_24622C.1.pep
MDILHIRHGYDTTSIPRPPPSRSQGCRRIGHRLHHLITAAGTTAVPATSQLRQPTHQPLPPPHHHLVTGTGTIAPATKSPSRDQLISTTEAPQVH

SEQ ID NO: 121616 - protein, 139 aa, Oryza sativa
  Clone ID: PAT_MRT4530_24623C.1.pep
MVKQWMLPLRHVSSVDVDNVWNLLDDEVEVGDDESTISGEDELGGVGDKHQQASSTSGLVSTMVEESMACTNQVDVEAAHHINWKFRKSARGVKTPFEQAEKSDQATFKYSAMQGEEILKYCASLEVETLNHSSLEEVT

SEQ ID NO: 121617 - protein, 874 aa, Oryza sativa
  unsure (1)..(874): unsure at all Xaa locations
  Clone ID: PAT_MRT4530_24624C.1.pep
MYSPXHAADSDSEGSLLSDVSASPPRRRSPPRPAPPPPPPPPPPKHRTRPAAPTKPKLKPTPPAASAPAPAPPPPPTLRAAALSDPHGLAARIAAGSALTAASGTASSSSFRRLVQSRNPSFDPATAFTAPASSAPSEVPSAAPRPPPTAATDAPPQTRPKRVHPNSVSEVAAASAAAEQPKRARGGSEGNFVRLNINGYGRRRTFKNSQAKRSTKCRSWRRQRAAGATPRSQGDEEGDLVAEALLEREKQAASDSVLEAVESVREDPSEQNLKSLLNAAYGHDSFRQGQLEAIQQIVAGESTMLVLPTGAGKSLCYQVPAMILPGLTLVVSPLLSLMVDQLRKLPAFLPGGLLASSQTSDEFHDTLQRLRAGEIKVLFVSPERFLNEEFLLIFRDTLPISLVAIDEAHCISEWSHNFRPSYLRLRASLLRRKLNVQCILAMTATATTQTLEEIMNALEIPSDNLIQTSQIRENLQLSISTSDNRLKDLMLLLKSPPFVDMRSIIVYCKFQAETDFVSKYLCDNNITAKSYHSGLLIKNRSRVQELFCSNKIRVFSYNFTEQPFLGSDGVDGYAMSKFLYQIFSSENTTGCIGSLAKELTSRKFDIKEEVLLTILTQLEIGDQQYIRLLPQFSVTCTLYFHKTSPQLLADKDILIRSVLNRSEMKDGHYVFDIPRIANDLKITMNEVFDHLHKLKFSGEISFELKDPAYCYVILWRPDDFNALSANLTKWLSEVESSKISKLDAMFALANFAVKGCKRTGGCSGSQHTPCIQKKIMEYFSKDDGTSENDCRTQLQKSSPFLQADIKVFIQSNSFAKFTPRAVARIMHGISSPAFPSVTWSKNHFWGRYVEVDFPLVMEAAKAELVKLVGKGEQC

SEQ ID NO: 121618 - protein, 146 aa, Oryza sativa
  Clone ID: PAT_MRT4530_24625C.1.pep
MAAAAGWMRQRRQDGIGEGEGWGGGQRGRGKARRSTPSSAATRVEPVDAELHRLGQVAPPLLRGRCRSSALRTTPLHGPEDSAAAARPGGRRRRRSARRTTPPLGPEKMRAGRRRRREKRSRRREEGIASGRGGGGGGMGDGGGLS

SEQ ID NO: 121619 - protein, 208 aa, Oryza sativa
  unsure (1)..(208): unsure at all Xaa locations
  Clone ID: PAT_MRT4530_24626C.1.pep
STYHPQPLSLAPAVYAAVPARLRNRRTVAEALTDRRWIRDXQFGVGYSSDSGVFQALGLPSVSAAFRRTGLSILAHKPILQSLAPPRCRYFLWLVALNRCXTVNRXLQSRGLSYLDRCVLWDQCEETIDNLLVACPESRQLWWVALRAIGGHSQCLPLNEHSFFSWLCDCRKKMIKKHHQDFDTIATLVAGSCIVLRNSIFLTSKPRR

SEQ ID NO: 121620 - protein, 53 aa, Oryza sativa
  Clone ID: PAT_MRT4530_24627C.1.pep
PEMYEVAISKNVIRHPFTSSGNVGRSASPALVLRNWDVYKGNGTRKLYEKHAL

SEQ ID NO: 121621 - protein, 390 aa, Oryza sativa
  Clone ID: PAT_MRT4530_24628C.1.pep
MRHIDIYTLCLDRFLYPRKTRGDSLTLTGMLMDADESSAYQPDDKGSFPIHVAAAEGNDGTINILLNKSPNCATLRNAQGRTFLHIAVENGRHTIIMFVRRRRRLAAKIMNLQDNDGNTALHLAIQDGDLHAVLCLLMNPVVKVDCLNKEGLTPLDISRKLIPEGLLHGSKCICRTVREERDSKIVEKDDDEQEDSKTITESTQVMAVCSTLIATVAFAAAFTLPGGYRADDHTNGGTPTFVGSYGFDAFVLAITFAFVYSLLATFSLVYSGMTKVDYSIRLEHLNSANSLVWLSIRCLLAAFALGLYVVLAPVAHKTALLICLMCSVGLLHGHTSMKTQIRMAVLLQGRIGFKVWWILGRKILRNFLHSFWPFLIIFGWPAYLKWRHQQ

SEQ ID NO: 121622 - protein, 417 aa, Oryza sativa
  Clone ID: PAT_MRT4530_24629C.1.pep
MRHIDIYTLCLDRFLYPRKTRGDSLTLTGMLMDADESSAYQPDDKGSFPIHVAAAEGNDGTINILLNKSPNCATLRNAQGRTFLHIAVENGRHTIIMFVRRRRRLAAKIMNLQDNDGNTALHLAIQDGDLHAVLCLLMNPVVKVDCLNKEGLTPLDISRKLIPEGLLHGSHQRIWIKRSLHLANAHHANPSLDHRQEKCICRTVREERDSKIVEKDDDEQEDSKTITESTQVMAVCSTLIATVAFAAAFTLPGGYRADDHTNGGTPTFVGSYGFDAFVLAITFAFVYSLLATFSLVYSGMTKVDYSIRLEHLNSANSLVWLSIRCLLAAFALGLYVVLAPVAHKTALLICLMCSVGLLHGHTSMKTQIRMAVLLQGRIGFKVWWILGRKILRNFLHSFWPFLIIFGWAAYLKWRHQQ

SEQ ID NO: 121623 - protein, 99 aa, Oryza sativa
  unsure (1)..(99): unsure at all Xaa locations
  Clone ID: PAT_MRT4530_2462C.1.pep
SPWRKDHFVPLHNNSAAPEKQDNPIDHASHPSRSVPGAIPRMSEIDVWALXQWLRRHGRHHHQYDRRLPSTRTSRTPSPFSRTRNTDLIRASMVKEQLI

SEQ ID NO: 121624 - protein, 102 aa, Oryza sativa
  Clone ID: PAT_MRT4530_24630C.1.pep
MVMMLFPPFRALQSLAPFKGVVFFFLPVHGFSVFFRLLSNSARPFFLGRGRAFFPPRFFGPVAWVKKKKKKKKKKKKKKKNPKKKKKKKKKKKKKQQKIKKH

SEQ ID NO: 121625 - protein, 335 aa, Oryza sativa
  Clone ID: PAT_MRT4530_24631C.1.pep
MAASQPSVHGENHDEPDSPITRAEVQQIGNNLLQAMEHLLNARLPAAGGGAVQPPFGDPKDDIVDAQSADVADSELHGPPNGGGRGFVAAGARGGENDLEQQHARPCRGAVLGNGEHHRGHHDRDDSDNVARMFPYNTLQDLLDQAQCTERSIQQEWRNWFSSGRSNAAPWRRTQQATTFVGNHSQGASTRASPPAATAKPQPSSASSPAACTESRRPTAPTPTSSSRSRDIVCHKCQGHGHIAAECPSRRTMLVTETGEWESASETKDDSLREDEMVNKQADSDAIQVDNGDNNCFISRRVLSVQVAKEDNGQRHNIFHTRAATTLLVWSWWKD

SEQ ID NO: 121626 - protein, 2031 aa, Oryza sativa
  unsure (1)..(2031): unsure at all Xaa locations
  Clone ID: PAT_MRT4530_24632C.1.pep
MAEQTKAPDLSPSVSGDDGEPNPRRRARTPPPPPRQSPKQGEALERVERSAASPIAGDGGERRDGERRLLVYGDGSTPQGALQAAGALLRHPPVVPDPESPAQRWLDDVAKLVMTARQRLDAGGRSSATKTSGAATTGSASSRRRARRAAAAVRRSVATPSSTPSTREDLRREQGARASLERRRNDRSAAHAMEGASSSRVSPRHGPGNQPSVPPVGGVGCRAFVASLRNVRWPPRFRPTIAEKYDGSVNPTEFLQVYTTGIEAAGGDDRVMANFFPMALKGQARGWLMNLPPASVHSWEDLCQQFTMNFQGTYPRPGEEADLHAVQRGDDESLRSYIQRFCQVRNTIPCIPAHAVIYAFRGGVRHNRMLEKIASKEPQTTAELFQLADRVARKEEAWTWNPSGSGVTASAAPGSAAQTGQRDRRRKKRSVYSGDEGHVLAVEGASRATRKGRPSSDKKKEASVPSRERPTGKWCTVHNTSLHDLADCRAVKSLAERTRKWEEERRQERREGKSPAVPSGRRRSEAKQKAPAEDIDDGDNDLGFQEPGATIATVDGGACAHVSRRSLKAMKRELLAAAPTHEATRRARWSEVALTFDQTDHPPCVARGGQIAMVVSPTICNVKLGRVLIDGGAALNIISPAAFDAIKALGMVLQPSQPIIGVTPGHTWPLGHIDLPVTFGGSTNFRTERVNFDVADLSLPYNAVLGRPALVKFMAAVHYAYLQMKMPGPGGPISVHGDLKVALACMEQRADHLAAASKPEGGDERLGTSAPAAPKQRIVTSDEVPVKEEDALVSFLRANADVFAWRPADMPGVPREVIEHRLAVRPGARPVRQKVRRQAPERQAFIREEVARLLEAGFIREVIHPEWLANPVVVPKANGKLRMCIDYTDLNKACPKDPYPLPRIDQIVDSTAGCDLLCFLDAYSGYHQIRMAREDEEKTAFITPIGTYCYTTMPFGLKNAGPTFQRTTRISLGSQLGRNVEAYVDDLVVKTRNQETLLSDLAETFESLRSARIKLNPDKCVFGVPAGKLLGFLVSARGIEANPEKIRAIERMRPPSKLRDVQCVTGCMAALSRFISKLGEKALPLFKLLKRSRPFTWTKEAERALTQLKAYLSSPPVLVAPEPNEPLLLYLAATPQVVSAALVVERDEGNPHSAHPHPVLTWPGSEQGGEAPEPNGGLRPLTTGVGPLPARQTVLGAPDPQEGPEATAGRPHLSPFDPEANPVPIRPGREQGEEAPEPNGGLRPLTTRVGPLPACPTTPGAPDPQDGPEATVGRPPLSSSDPEVIGTEDECAPRGHLDEERPGDMALSEGDRXPHRRVQRPVYFVXEALRDAKTRYPQAQKMLYAILMASRKLRHYFQAHRVTVVTSYPLGQILHNREGTGRVVKWAIELSEFDLHFEPRHAIKSQALADFVAEWTPAPETVSIPEGSTDPSQLPHTAHWVMQFDGSLSLQGAGAGVTLTSPNGDVLRYLVRLDFRATNNMAEYEGLLAGLRVAAGLGIRRLLVLGDSQLVVNQVCKEYRCSDPQMDAYVRQVRRMERHFDGIELRHVPRRDNMVADELSRLASSRTQTPPGAFEERLTQPSARPDPLGETDAPDRPPRPVGVQASGPEGSAPSSLRLIAWISEIQAYLTDKTLPEDREGSERVQRISKRYVLVEGTLYRRAANGILLKCIPQEQGVELLADIHEGECGAHSASRTLVGKAFRQGFYWPTALNDAVDLVRRCRACQFHAKQIHQPAQALQIIPLSWPFAVWGLDILGPFKRAPGGFEYLYVAIDKFTKWPEAYPVVKIDKHSALKFIKGITARFGVPNRIITDNGTQFTSELFGDYCEDMGIKLCFASPAHPRSNGQVERANAEILKGLKTKTFNILKKHGDSWIEELPAVLWANRTTPSRATGETPFFLVYGAEAVLPSELTLRSPRATMYCEADQDQLRRDDLDYLEERRRRAALRAARYQQSLRRYHQRHVRARSLCVDDLVLRRVQTRAGLSKLSPMWEGPYRVIGVPRPGSIRLATGDGTELPNPWNIEHLRRFYP

SEQ ID NO: 121627 - protein, 2030 aa, Oryza sativa
  Clone ID: PAT_MRT4530_24633C.1.pep
MAEQAKAHNHSPSVSGDDGEPNPRRRARTPPPPPRQSPKRGEALERVERSATSPIAGDGKERQDGERRLLVYGDGSTPQGALQAAGALLRHPPVVPDPESPAQRWLDDVAKLVMTARQRLDAGGRSSATKTSGAATTGSASSRRRARRAAAAVRRSAATPSSTPSTREDLRGEQDARASIERRRNDRSAAHATEGASSSRVSPRHGRGNQPSVPPVGGVGCRAFVASLRNVRWPPRFRPTIAEKYDGSVNPAEFLQVYTTGIEAAGGDDRVMANFFPMALKGQARGWLMNLPPASVHSWEDLCQQFTMNFQGTYPRPGEEADLHAVQRRDDESLRSYIQRFCQVRNTIPCIPAHAVIYAFRGGVRHNRMLEKIASKEPQTTAELFQLADRVARKEEAWTWNPSGSGVAASAAPGSAAQTGRRDRRRKKRSVRSDDEGHVLAVEGASRATRKGRPASDKKKEASAPSRERPTGKWCTVHNTSLHDLADCRAVKSLAERTRKWEEERRQERREGKSPAVPSGHRRSEAKQKAPAEDIDDGDDDLGFQEPGATIATVDGGACAHVSRRSLKAMKRELLAAAPTHEATRRARWSEVALTFDQTDHPPCVARGGQIAMVVSPTVCNVKLGRVLIDGGAALNILSPAAFDAIKAPGMMLRPSQPIIGVTPGHTWPLGHIDLPVTFGGPANFRTERVNFDVADLSLPYNAVLGRPALVKFMAAVHYAYLQMKMPGPDGPISVHGDLKVALACMEQRADRLAVVTKPEGGDERLGTSAPAAPRQRIATCDEVPVKEEDALVSFLRANADVFAWRPADMPGVPREVIEHRLAVRPGARPVRQKVRRQAPERQAFIREEVARLLEAGFIREVIHPEWLANPVVVPKANGKLRMCIDYTDLNKACPKDPYPLPRIDRIVDSTAGCDLLCFLDAYSGYHQIRMAREDEEKTAFITPIGTYCYTTMPFGLKNAGPTFQRTTRISLGSQIGRNVEAYVDDLVVKTRNQETLLSDLAETFESLRSARIKLNPDKCVFGVPAGKLLGFLVSARGIEANPEKVRAIERMRPLSKLRDVQCVTGCMAALSRFISRLGEKALPLFKLLKRSGPFAWTEEAEHALTRLKAYLSSPPVLVAPEPNEPLLLYLAATPQVVSAALVVERDEDNPHSAHPHPVLTWPGSEQGGEAPEPNGGLRPLMTGVGPLPARQTVLGAPDPQEGPEATAGRPHLSPSDPEANPVPIRPGREQGGEAPEPNGGPRLPTTGDGPLPACPTTPGAPDSQDGPEATVGRPPLSSSDPEVIGTEDECAPRGHLDEERPGDMAPSEEDRPHRKVQRPVYFVSEALRDAKTRYPQAQKMLYAILMASRKLRHYFQAHRVTVVTSYPLGQILHNREGTGRVVKWAIELSEFDLHFEPRHAIKSQALADFVAEWTPAPETASVSEASSDPSQLPHTAHWVMQFDGSLSLQGAGAGVTITSPSGDVLKYLVRLDFRATNNMAEYEGLLAGLRVATGLGIRRLLVLGDSQLVVNQVCKEYRCSDPQMDAYVRQVRRMERHFDGIELRHVPRRDNMIADELSRLASSRAQTPPGVFEERLAQPSARPDPLGETDAPDRPPRPVGAQASGPEGSAPSSLRLIAWISEIQAYLTDKTLPEDREGSERVQRISKRYVLVEGILYRRAANGILLKCIPQEQGIELLADIHEGECGAHSASRTLVGKAFRQGFYWPTALNDAVDLVRRCRACQFHAKQIHQPAQALQTIPLSWPFAVWGLDILGPFRRAPGGFEYLYVAIDKFTKWPEAYPVIKIDKHSALKFIKGITARFGVPNRIITDNGTQFTSELFGDYCEDMGIRLCFASPAHPRSNGQVERANAEILKGLKTKTFNILKKHGDSWIEELPAVLWANRTTPSRATGETPFFLVYGAEAVLPSELTLRSPRATMYCEADQDQLRRDDLDYLEERRRRAALRAARYQQSLRRYHQRHVRARSLCVDDLVLRRVQTRAGLSKLSPMWEGPYRVIGVPRPGSIRLATGDGTELPNPWNIEHLRRFYP

SEQ ID NO: 121628 - protein, 125 aa, Oryza sativa
  Clone ID: PAT_MRT4530_24634C.1.pep
MARPGAVKNIESWDEFTKHFVKSEDKLVVLVFMAPWSEPWKLMRPAVEKMASGLKSEEAEVCTISVDRFNTLGRLLRVEALPTFVLVKRHRAVARVVGVNRDDLHSSINKHLAPPSSSPQPINIS

SEQ ID NO: 121629 - protein, 2030 aa, Oryza sativa
  Clone ID: PAT_MRT4530_24635C.1.pep
MAEQAKVHDLSPSVSGDDGEPNPRRRARTPPPPPRQSPKQGEALERVERSAASPIAGDGGERRDGERRLLVYGDGSTPQGALQAAGALLRHPPVVPDPESPAQRWLDDVAKLVMTARQRLDAGGRSSATKTSGAATTGSASSRRRARRAAAAVRRSVATPSSTPSTREDLRREQGARASLERRRNDRSTPRATEGASSSRVSPRHGREDQPSVPPAGGIGCRAFVASLRNVRWPLRFRPTITEKYDGSVNPTEFLQVYTTGIEAAGGDDRVMANFFPMALKGQARGWLMNLPPASVHSWEDLCQQFTMNFQGTYPRPGEEADLHAVQRRDDESLRSYIQRFCQVRNTIPCIPAHAVIYAFRGGVRHNRMLEKIASKEPQTTAELFQLADRVARKEEAWTWNPSGSGVAASAAPGSAAQSGRRDRRRKKRSVRSDDEGHVLAVEGASRATRKGRPASDKKKEASVPSRERPTGKWCTVHNTSLHDLADCRAVKSLAERTRKWEEERRQERREGKSPAVPSGRRRSEAKQKAPAEDIDDGDNDLGFQEPGATIATVDGGACAHVSRRSLKAMKRELLAVAPTHEATRRARWLEVALTFDQSDHPPCVARGGQIAMVVSPTVCNVKLGRVLIDGGAALNILSPAAFDAIKAPGMMLRPSQPIIGVTPGHTWPLGHIDLPVTFGGPANFRTERVNFDVADLSLPYNAVLGRPALVKFMAAVHYAYLQMKMPGPDGPISVHGDLKVALACMEQRADRLAVVSKPEGGDERLDTSAPAAPKQRIVTSDEVPVKEEDALVSFLRANADVFAWRPADMPGVPREVIEHRLAVRPGARPVRQKVRRQAPERQAFIREEVARLLEAGFIREVIHPEWLANPVVVPKANGKLRMCIDYTDLNKACPKDPYPLPRIDQIVDSTAGCDLLCFLDAYSGYHQIRMAREDEEKTAFITPIGTYCYTTMPFGLKNAGPTFQRTTRISLGSQLGRNVEAYVDDLVVKTRNQETLLSDLAETFESLRSARIKLNPDKCVFGVPAGKLLGFLVSARGIEANPEKIRAIERMRPPSKLRDVQCVTGCMAALSRFISKLGEKALPLFKLLKRSGPFTWTEEAERALTQLKAYLSSPPVLVAPEPNEPLLLYLAATPQVVSAALVVERDEGNPHSAHPRPVLTWPGSEQGGEAPEPNGGLRPLTTGVGPLPARQMVLGAPDPQEGPEATAGRLHLSPSDPEANPVPIRPGREQGEEAPEPNGGLRPLTTRVGPLPVCPTTPGAPDPQNGPEATVGRPPLSSSDPEVIGTEDECAPRGHLDEERPGDMAPSEGDRPHRRVQRPVYFVSEALRDAKTRYPQAQKMLYAILMASRKLRHYFQAHRVTVVTSYPLGQILHNREGTGRVVKWAIELSEFDLHFEPRHAIKSQALADFVAEWTPAPETISVSEASSDPSLLPHAAHWVMQFDGSLSLQGAGAGITLTSPNGDVLKYLVRLDFRATNNMAEYEGLLAGLRVAAGLGIRRLLVLGDSQLVVNQVCKEYRCSDPQMDAYVRQVRRMERHFDGIELRHVPRRDNMIADELSRLASSRAQTPPGAFEERLTQPSARPDPLGETDAPDRPPRPVGVQASGPEGSAPSSLRLIAWISEIQAYLTDKTLPEDREGSERVQRISKRYVLVEGTLYRRAANGILLKCIPQEQGVELLADIHEGECGAHSASRTLVGKAFRQGFYWPTALNDAVDLVRRCRACQFHAKQIHQPAQALQIIPLSWPFAVWGLDILGPFKRAPGGFEYLYVAIDKFTKWPEAYPVVKIDKHSALKFIKGITARFGVPNRIITDNGTQFTSELFGDYCEDMGIKLCFASPAHPRSNGQVERANAEILKGLKTKTFNILKKHGDSWIEELPAVLWANRTTPSRATGETPFFLVYGAEAVLPSELTLRSPRATMYCETDQDQLRRDDLDYLEERRRRAALRAARYQQSLRRYHQRHVRARSLCVDDLVLRRVQTRAGLSKLSPMWEGPYRVIGVPRPGSIRLATGDGTELPNPWNIEHLRRFYP

SEQ ID NO: 121630 - protein, 49 aa, Oryza sativa
  unsure (1)..(49): unsure at all Xaa locations
  Clone ID: PAT_MRT4530_24636C.1.pep
PFTRAEFSSKIFLQTFNFSITSKFYYTHKLLXFLSHRSNFXQTXNFDVN

SEQ ID NO: 121631 - protein, 70 aa, Oryza sativa
  Clone ID: PAT_MRT4530_24637C.1.pep
PEDRRRPIYIEEDIYIDVCVRINPYDLPKRKDCQRKVGMPNTPLLLHMKKTIIIDHPFAAPKTALNQFQV

SEQ ID NO: 121632 - protein, 39 aa, Oryza sativa
  Clone ID: PAT_MRT4530_24638C.1.pep
DDQQKLVMPISGYDTPSFLITYTHMTGKDGLYHASHPTD

SEQ ID NO: 121633 - protein, 338 aa, Oryza sativa
  Clone ID: PAT_MRT4530_24639C.1.pep
VVFKSISLMQRWKVLLREKDHEALNALLEKLKSKMEALRPVDVLPDNGVASTRHPARVPDHHHATPSPSSHHSPPPRHAVSAARRARRAAPRHAVSAAPRCPPRHADAMVRMKAKLVYNMDELRTMVRDAVGQRHVDVRSLEALRDAPAVFDILHDLSSTAGYGWKVRNIQPMSDLSELVGLLQLMKWVNIPQLLIHLCNLDQRREMLLALGGFQVRGSLSVQVLAQDLIDRVPASNPRAHWSREMSATTLKSRLEEATATAVNTLLNNSIRAETLARQGGGTVMARVRELRRLLRQISNAVLAADHLPPTIGSDLEQAIALIRNILQLPVQVRDASM

SEQ ID NO: 121634 - protein, 82 aa, Oryza sativa
  Clone ID: PAT_MRT4530_2463C.1.pep
RSAIPGWAPPSGLVAGHSRYQGITFVRAKAKELQLHQFGYLYFDRNMAPAQNFLAFTAPSKYGIDPRSYGAPSPIATLGGVL

SEQ ID NO: 121635 - protein, 45 aa, Oryza sativa
  unsure (1)..(45): unsure at all Xaa locations
  Clone ID: PAT_MRT4530_24640C.1.pep
ECKDYADCLLRRIELENMRXEGKRLILNILKKRKKGGVSTAYKXR

SEQ ID NO: 121636 - protein, 186 aa, Oryza sativa
  Clone ID: PAT_MRT4530_24641C.1.pep
MASPRCAAVALLHPAGVAAGGGARRRVLLLDQERPLWGTEVRRRRRRRFSSLETPPRCSKMYVPGFGEGSPEKKAARNLQHFFNYIAVRVVLTQLESYNREAYGELMDFVNRNSLNDADTFCKKLIRESPRHKQLAMRILEVRSAYVKHDFEWDNLKRLSFKMVDEANTKLMRDYVLETSHIEDDN

SEQ ID NO: 121637 - protein, 37 aa, Oryza sativa
  Clone ID: PAT_MRT4530_24642C.1.pep
LALEAYWHPFYANCTLLRLPSTTGDLMNSAYGVLIPY

SEQ ID NO: 121638 - protein, 159 aa, Oryza sativa
  Clone ID: PAT_MRT4530_24643C.1.pep
MAVLGYLMYGDGVLSQVTLNLPSARLSSKVAIYTTLLNPVTKYALVVTPIAAAVEERIRGAAGKGARAVSVAVRTLLVLSTVAVALALPFFADLMALVGSMLNVAVCMLLPCACYVRIFGAPSMSSVEAVAIGGILVLGSLVAVTGTYYSLMKIIRELV

SEQ ID NO: 121639 - protein, 79 aa, Oryza sativa
  Clone ID: PAT_MRT4530_24644C.1.pep
PGFMSKKSQFFDILDLGIIFFVFCLKKYPLLALKQKGLLIFNKFPLIFKKIPFYKSQKKKKKKKKKKKKKKKKNKNPKI

SEQ ID NO: 121640 - protein, 84 aa, Oryza sativa
  Clone ID: PAT_MRT4530_24645C.1.pep
GGRREGRRRSGEGAGARASPVAEPSRAASRWCSPRAARFSPDPRKESVITILDGLYRDRNYARFFVLETIARVPYFGEDLVVHA

SEQ ID NO: 121641 - protein, 76 aa, Oryza sativa
  Clone ID: PAT_MRT4530_24646C.1.pep
GTRKRSDRSSFWVKIGDQIQRHNRQGQILSMKICPNPGGGGLKLNQGGTSFTMRPKARVHGCPLTPGRPYPSRLSI

SEQ ID NO: 121642 - protein, 518 aa, Oryza sativa
  Clone ID: PAT_MRT4530_24647C.1.pep
MATLRVDEIHKILRERIEQYNRKVGIENIGRVVQVGDGIARIIGLGEIMSGELVEFAEGTRGIALNLESKNVGIVLMGDGLMIQEGSFVKATGRIAQIPVSEAYLGRVINALAKPIDGRGEIVASESRLIESPAPGIISRRSVYEPLQTGLIAIDSMIPIGRGQRELIIGDRQTGKTAVATDTILNQKGQDVICVYVAIGQRASSVAQVVTTFHEEGAMEYTIVVAEMADSPATLQYLAPYTGAALAEYFMYRERHTLIIYDDLSKQAQAYRQMSLLLRRPPGREAFPGDVFYLHSRLLERAAKLNSLLGEGSMTALPIVETQSGDVSAYIPTNVISITDGQIFLSADLFNAGIRPAINVGISVSRVGSAAQIKAMKQVAGKSKLELAQFAELQAFAQFASALDKTSQNQLARGRRLRELLKQSQANPLPVEEQIATIYIGTRGYLDSLEIGQVKKFLDELRKHLKDTKPQFQEIISSSKTFTEEAEILLKEAIQEQLERFSLQEQTKYLIQMLILFL

SEQ ID NO: 121643 - protein, 122 aa, Oryza sativa
  Clone ID: PAT_MRT4530_24648C.1.pep
MALFGFIKQLIGYNIIAFCHPSTVFIFGKSLRGYCGDYGYPIPTRHARWSHGSSLNHDRLASVKGDENGSSADNRWLRQDTLELLTIRPEMDTVLQEATLNGAIWEEISRICDVFFVGDFVM

SEQ ID NO: 121644 - protein, 85 aa, Oryza sativa
  unsure (1)..(85): unsure at all Xaa locations
  Clone ID: PAT_MRT4530_24649C.1.pep
SSAGTARRPPESTGRAMEFQVKAGMQRQVLTCNFISRPNITTILYQLPTGWCGRARIQPSIEAVSPTSWQWLPLAPGGRRDXVET

SEQ ID NO: 121645 - protein, 200 aa, Oryza sativa
  Clone ID: PAT_MRT4530_2464C.1.pep
MEALSGRVGVKCGRWNPTAEQVKVLTELFRAGLRTPSTEQIQRISTHLSAFGKVESKNVFYWFQNHKARERHHHKKRRRGASSPDSGSNDDDGRAAAHEGDADLVLQPPESKREARSYGHHHRLMTCYVRDVVETEAMWERPTREVETLELFPLKSYDLEVDKVRYVRGGGGEQCREISFFDVAAGRDPPLELRLCSFGL

SEQ ID NO: 121646 - protein, 124 aa, Oryza sativa
  unsure (1)..(124): unsure at all Xaa locations
  Clone ID: PAT_MRT4530_24650C.1.pep
ALWNSVKIVEYLVFSVFLPRXAPXMALGVFVWLVYHYXLCVRTRAGLQLXSVGASYARTPHWCFKACFXCSPCLGVVGTPHGVGGSGXCGGCFXGGECLPLGPGPNAGXXILKKIGXFKKKKKK

SEQ ID NO: 121647 - protein, 164 aa, Oryza sativa
  Clone ID: PAT_MRT4530_24651C.1.pep
SNNRGGYDVCTTIGRVSKSHISLIDDINPQKGVVVKMFSSKCSISVYIYCDSTVAHVSDQFVLSGSCDYATTLRHPSGCAQSMSASGNGWGWLATSFVTILCLLGGYILIGSIYRYYFLGIHSVEAIPNLEFWISLPQTIKSMLLPAARGRNRQSRDTYAPVDH

SEQ ID NO: 121648 - protein, 198 aa, Oryza sativa
  Clone ID: PAT_MRT4530_24652C.1.pep
MHASLRRRGHLWIEHPPPLEQTTFGHPARPLDRPLLPCNGAGLQPAGHALAGLHRPARARCRLQDAVRDRERERARASGVRRTPGFSLSAPHRWMEEYARVVVASWAPGWLPRRPRRGERGGSTYRCSRGVRVCMRAHAHSVSCGLQDARSYQTAPITHGIKASHGHGKWRIKLIKDHTEVASVPNLLMRERSAGSGK

SEQ ID NO: 121649 - protein, 60 aa, Oryza sativa
  Clone ID: PAT_MRT4530_24653C.1.pep
SISPLSIQPVLGVLRTSCYHELSPLGLWCLSRGVYSPGMKSKIKPGGIKEFETLVRQKTQ

SEQ ID NO: 121650 - protein, 103 aa, Oryza sativa
  Clone ID: PAT_MRT4530_24654C.1.pep
MVFMCFSEKCEQTKNDPSSLVSNLPPNVHRAQAEAFRRRWIQRTSCGANMLGWPDLHDSRLTIDRQQSGEAVVEIHPQHGTGQPRGCKYYLYLSALQLAIMFK

SEQ ID NO: 121651 - protein, 62 aa, Oryza sativa
  Clone ID: PAT_MRT4530_24655C.1.pep
MEQPVDGDIHQMMDSITACVDSVWLVYLPRLLASKVLPSCTLHCIAADGHSRGNGYWSITPC

SEQ ID NO: 121652 - protein, 431 aa, Oryza sativa
  Clone ID: PAT_MRT4530_24656C.1.pep
MYEDSKEFARRCTSYQRQGGITARDAMPLTYNLQVEIFDVWGIDFIGPFPKSRNCEYILVAVDYVSKWDEAMPCSACGCEACQEDVHRNHLPKIWYPQDAYKTPIGMSPYQIVYGKSCRLLVELEHRAYWAIRNWNMDFEGAGEWRKMQIAELEEWRERAYHNVRICKERKKRWHDKRIKIKKFKPGDKVLMFNSRVKLFGHRKLCSKWEGPFDVIDTSSHGAITLRDKLVNIFKGDSPARWQTTGELGLLKAQRLFQDDGNAAAPLAERYVGTLFTKAGDEVLHKYTTPTATPSTQKEERFRIQGVRTPGGGYGKGLLRPLTASEKEGAAVSCSPPPRKVKHHLTPPPIVRAPGQFQEDEVKSPEPSIHKLAAQVKKLRKENIELRDRNAELGVELAEIRNNFDTLSRGLCAKIKRAFIEMGKENKYYAN

SEQ ID NO: 121653 - protein, 418 aa, Oryza sativa
  Clone ID: PAT_MRT4530_24657C.1.pep
MEQPLFELSAPRGEFYEPPPSSEPIYTTGYEIRPELITWSRFTNLVQSGPTLSLPEYVLLPHFHTSLDKESAFYLDITAGGSFIHKMPSQGKTILDRILENTSFMTQSNEPQSEASVSKIEEPLTIEPLAEPSTFASSVDEKVPEQPSVENEEIQTLDSAAILFRDGFDEEYGNTINYFSKRKPPVPLSPPDPMELGFLRETVRELTSIMSDEWLREAELSSEGTTSSLSPTVGANLVSESFAFAYLIDKAVTPTNKFFKHPNGNIIEGFGIVQDVPVCFENREAILDFHVFEIQDFDILIGLPIEQLIINTPRFGSLKIILGENEFSIPFSRARITLTDPLPEIESVEEVTAVPPHESPEALLEDEVPPISSKRKRIPARLSTCQSWNHHLDLRLSLNLYLQAYDMPSYTMTERLLS

SEQ ID NO: 121654 - protein, 74 aa, Oryza sativa
  Clone ID: PAT_MRT4530_24658C.1.pep
MTNEISSTEDKEKNCISSKKKNSSNYQNIVEDKQLQSTGFKDGNNEDSNSRVTKHVPSSGISQSFYQKKKLTWT

SEQ ID NO: 121655 - protein, 129 aa, Oryza sativa
  Clone ID: PAT_MRT4530_24659C.1.pep
MEVVDAEELAALDGNAYSAEFAGAGSSRRRLPSSPPRTALRLLRSSLLAEPMAPAVVPYLTDGRAPGRTDRADPTSPTGREGPYGWAAVDSWERRRGRRTKAGKCVHHFYITATEDLDNHYNLEVEDDS

SEQ ID NO: 121656 - protein, 131 aa, Oryza sativa
  Clone ID: PAT_MRT4530_2465C.1.pep
MGMAPFAAVLRGHSQSSTALGHPLPRSRATDAFGRGEEGWTTWRGGRHRGARRSPRLRDSLRLLPAAPLELASHTPPDPRRPPLAAGHASPRFAVAGRGGREGGSGHAAPSIYLSEREGEMRLRSARGERR

SEQ ID NO: 121657 - protein, 532 aa, Oryza sativa
  Clone ID: PAT_MRT4530_24660C.1.pep
MPGNGLIPEQPSVENEEIQTLDCAAIMFREGFDKDYGNDVGIIYSPTVEANLVSESFAFAYLSDKAVTPTNKFFKHPNTGLIGLPIEQLLINIPRLGSLKITLGENEFSIPFSRARITLTDPLQEIESAEEVTAVPPHESPEALLEDEVPDFIKEEADPGLRYDFLHNDREAPVIISDKLSEDETQHLLTVLQITNKQEQPINDFLRDDMLMTVRDSNPCYANIVNYMVSKYIPPGKNQQKLNAADARHARKMFTEIIFPRFGTPRMVISDRGSHFIDKTFRDLLREMGAKHNVATPYHPQTSGQAETSNKQIKNILQKTVNKMGTGWKDRLPDALWAYRTAYKTPIRMSPYQIVYGKPCRLPVELEHRAYWVKLFGHGKLRSKWEGLFDVIDTSSHGAITLRDESGNIFKAAPPPAERYVGTLFTKGVRTPGGGYGKGLLRPLMASEKEGAAESRSPPPMKVKRHLMPRPIVRAPGQFQEDKYVEVGVEVVTALKITEVLPVRRAGSQRPGGAAPCGYRTAGGRCRPCEQR

SEQ ID NO: 121658 - protein, 212 aa, Oryza sativa
  unsure (1)..(212): unsure at all Xaa locations
  Clone ID: PAT_MRT4530_24661C.1.pep
ANLYVRLKELAARVRIGGAAVGESDLAVRLVSAELTVSDMHCALYSSIGEAESLRFVGEMVPDMLCYSVLRMDRAGRQACLWKGQTRTLSCNLEGLAPLLNRMAXVLERLPEELEMTIKSSSMDLARGAXELVLASYQARYPDFSPWMXALEEFPPGTEVDARSRVXDAADHIVNGFEGSALSLAFVSSSDEEGDVIGVDDGGDEAGYPCCI

SEQ ID NO: 121659 - protein, 1172 aa, Oryza sativa
  Clone ID: PAT_MRT4530_24662C.1.pep
MEQPLFELSAPRGEFYEPPPSSEPIYTTGYEIRPKLISMVRENPFSSFDLENPYHHLRDFEQVCSCLKIRGMRQEIVLWKLFPFSLQERAKQWYTSTVGCVNGSWEKLRDRFCLAFFPVTRITTLRVEILSFKQIENESIGAAWSRFTNLVQSGPTLSLPEYVLLQHFHTGLDKESAFYMDITAGGSFMHKTPSEGKTILDRILENTSFMTQSNEPQPEASMSKIEEPLTIEPLAEPSTSASSIDEKVPEQPSVENEEIQTFDCAAIMFREGFDEDYGNTLNYFSKRKPPVPLSPPDPMELGFLRETVRELTSIMSDEWLREAERSSEDHLDRPSPKALLEDEVPDFIKEEADPGETLDLPIVEPLPRPLLELKPLPPGLRYAFLHKDREAPVIISDKLSEDETQRLLTVLEKHRSVLSYSLQDLRGINPALCTHRIPIDPESTPSREPQRRLNNAMREVVKKEVLKLLHARIIYPVPYRIVLGHRVSEQGIEVDHAKIDVIDQLPPPVNIKGIRSFLGHVGFYRRFIKDFSTIARPLTNLLAKDVPFELDDACLKSLKIMCDASDFAVGAVLGQTKDKKHHAICYASKTLTGAQLNYATTEKELLAVVFSIDKFRSYLVGAEVIIYTDHAALKYLLTKKDAKPRLLRWILLLQEFDLEIKDRKGVENSVADHLSRLQITNMQEQPINDFLRDDMLMTVSDSNPWYVNIVNYMVSMYIPPGENQRKLKYESRRHIWDEPYLYREDSREFIRRCTSCQRQGGITTRDAMPLTYNLQVEIFDVWGIDFMGPFPKSRSCEYILVAVDYVSKWVEAMPCSAADARHAKKMFTEIIFPRFGTPRMVISDGELEHRAYLAIRNWNMDFEGAGEWRKMQIAELEEWREKTYHNTKIYKEKTKRWHEKRIKIKKFKPGDKVLMFNSRVKLFDHGKLRSKWEGPFDVIDISSHGAITLRDDSGNIFKEKFGGLPDPPGFGRPDGLAEPGRPPIGPNFEWQSPPLILSLFRCELGAPCNSARLRSKFGARRRAPWFGRTRGSAPRSAARSLSPRHVARMKIRGDSPARWPTMGELGLLKARCLFQDDKKATTPPAEHYVGTLFTKARDEVLHKYPTPTATPSTPKGERFCIQGVRTLGGGYGKGLLRPLTASEKEGAAESCSPPPVMVKRHLMPPPMVRAPG

SEQ ID NO: 121660 - protein, 717 aa, Oryza sativa
  unsure (1)..(717): unsure at all Xaa locations
  Clone ID: PAT_MRT4530_24663C.1.pep
MAKGGRTFIRGNLDKYHSPSHSLPSXEGNDVGILYSPTVGANLVSKSFAFAYLSDKLVTPTNKFFKHPNGNIIEGFGIVQDVPVCFEDREAILDFHVLEIQDFDILIGLAIEQLLINTSRLGSLKITLGENEFSIPFSRARITLTDPLPEIESAEEVTAVPPDESPEALLEDDVPDFMNEEADPGETLHLPIMEPPPRPPLELKPLPLGLRYAFLHNDREALVIISDKLSEDETQHPLTVLEKHCSVLGYSLQDLRGINPALCTHRIPIDPENFMGPFPKSRNCEYILVAVDYVSKWIEAMPCSAADARHAKKMFTETIFLRFGTPRMVISDGGSHFIDKTFRDLLREMGAKHNVATPYHPQTSGQAETLNKQIKNIMQKTVKKMGTGWKDRLSDALWAYRTVYKTPIGMSPYQIVYGKSYRLPVELEHRAYWAIRNWNMDFEGAGEWRKMQIAELEEWREKAYHNAKIYKERTKRWHDKRIKIKKFKPGDKVLMFNSRVKLFGHGKPRSKWEGPFDVIDTSSHGAITLRDDSSNIFKARHLFQDDGRAAPPPTERYVGTLFTKAGDEVLHKYTTPTATPSTPKEERFRIQGVRTPGGGYGKGLLRPLTASEKEGAAEFRSPLPLKVKSHLMPSPIVRAPGQFQEDEVKSPEPSIHNLAAQVKKLRKENIELRDHNSELGVELAEIRNNFDTLSRGLCAKIKRAFIEIGKENKYYAN

SEQ ID NO: 121661 - protein, 138 aa, Oryza sativa
  Clone ID: PAT_MRT4530_24664C.1.pep
PSAGRRPHQAASRAVVPPLLAAAPRLRPLRRLAAPAAPGRRTAVPTGQRPRRTAAPCTAAPLPKPRTALPRRAPHRLPRVAPGRRALRRAAWPPAPPDHPAAAPPRHPGHRTWQVRSQREWRKEVKEKTRKEKNGKKI

SEQ ID NO: 121662 - protein, 823 aa, Oryza sativa
  unsure (1)..(823): unsure at all Xaa locations
  Clone ID: PAT_MRT4530_24665C.1.pep
LYQIPTSISGVVAEERLLIISEPNSWHETRNCAVEIVLIFSSRESKAMVHXTVGCVNGSWEKLRDRFYLAFFPVTRITALRVEIRSLHXIKNESIGAAWSRFTNLVQSGPTLSLPEYVLLPHFHTSLDKESAFYLDITAGGSFIHKMPSQGKTILDRILENTSFMTQSNEPQSEASVSKIEEPLTIEPLAEPSTFASSVDEKVPEQPSVENEEIQTLDSAAILFRDGFDEEYGNTINYFSPTVGANLVSESFAFAYLIDKAVTPTNKFFKHPNGNIIEGFGIVQDVPVCFENREAILDFHVFEIQDFDILIGLPIEQLIINTPRFGSLKIILGENEFSIPFSRARITLTDPLPEIESVEEVTAVPPHESPEALLEDEXPPDFIKEEADPGETLDLPIMEPPSRPPLELKPLPPGLRYAFLHNDREAPVIISDKLSEDETQRLLTVLEKHRSVLGYSFQDLRGINHALCTHRIPIDPESTPSREPQRRLNNAMREVVKKEISSNSHPSGGPESFIGHRLPSQTNTCLLEFFGDXLPDMIEDIMDDFSVYGKNFELPPPVNIKGIRSFLGHAGFYRRFIKNFSAIARPLTNXLAKDAPFEFDDACLKSFEILKKALVSAPIIQLPDWTLPFEIMCDASDFAVGAVLGQTKDKKHHASCYASKTLTGAQLNYATTEKGLLVVVFAIDKFRXGAKVIIYADHATLKYLLTKKDAKPRLLRWILLLQEFDLEIKDEKGVENSNLWYANIVNYMVSKYVPPGEINXKLKYESRRHIWDEPYLYRVCSDGLLRRCVPTEEGLKIIERCHASPYGGHYGAFRTQAKIWQSG

SEQ ID NO: 121663 - protein, 56 aa, Oryza sativa
  Clone ID: PAT_MRT4530_24666C.1.pep
QLFLLLNPIHFLKFNKVLMKQLRCIQTMLAMLLMGSKQPEGRVTHIFWYIFYKWKC

SEQ ID NO: 121664 - protein, 185 aa, Oryza sativa
  unsure (1)..(185): unsure at all Xaa locations
  Clone ID: PAT_MRT4530_24667C.1.pep
EEEEKEEIEKKIKKTERREGDAGHAETTATRATAARQRGRHGPCSHQAPAPAASGEPXRTGVDCRTRAMHPDRRTPPHRAALPSCPAAAQRRSPATPXASRAVVPPLLAAAPRLRPLRRLAAPAAPGRRTAXPPASALAAQPRPARPRRCRSRAPPCLAARHTACRALRQAAVRCAAPLGRQRHL

SEQ ID NO: 121665 - protein, 723 aa, Oryza sativa
  unsure (1)..(723): unsure at all Xaa locations
  Clone ID: PAT_MRT4530_24668C.1.pep
MAKGGRAFIRSNSDKYRXPNHSLPSXEGNDVGILYSPTVGANLVSESFAFAYLSDKAVTSTNKFFKHPNGNMIEGFGIVQDVLVCFEDREAILDFHVFEVQDFDILIGLSIEKLLINTPRLGSLKITLGENEFSILFSRARITLTDPLPEIESAEEVTAVPPHESPEALLEDDVPDFIKEEADPGETLDLPIMEPSPRPPLELKPLPPGLRYAFLHNDREAPIIISDKISEDETQHLLTVLQITNMPEQPINDFLRDDMLMTVRDSNPWYANIVNYMVFKYIPPGKNQRNLKYESRRHIWDEPYLYRVCSDGLLRRCVPTEEGLKIIERCHASPYGGHYGVFRTQAKIWQSGFFWPTMYEDSKEFVRRCTSCQRQGGITARDAMPLTYNLQVEIFDVWGIDFMGPFPKSRNCEYILVAVDYVSKWVKAMPCSATDARHAKKMFIEIIFPKFDTPRMVISDGGSHFIDKTFRDLLREMGAKHNVATPYHPQTSGQAETSNKQIKNILQKTVNKMGTGWKDRLPDALCAYWIAYKTPIRMSPYQIVYRKPCRLPVELEHRAYWAIRNWNMDFEGAGEWRKMQIAELEEWREKAYHNAKIYKERTKRWHDKRKKIKKFKPGDKVLMFNSRVKLFGHGKLRSKWEGPFDVIDTSSHGAITLRDELGNIFKGQHDQIVRMNAKAKVATQPVSAQEPAKKKTSAGPAPSKKAKTPGSILMLPPWESDKL

SEQ ID NO: 121666 - protein, 912 aa, Oryza sativa
  Clone ID: PAT_MRT4530_24669C.1.pep
MEQPLFELSAPRGEFYEPPPSSEPIYTTGYEIRPELISMESAFYLDITAGGSFMHKTPSEGKTILDRILENTSFMTQSNEPQPEASVSKIEEPLTIEPLAEPSTSASSIDENVPEQPSVENEEIQTPDCAAIIFREGFDENYGNTLNYFSKRKQPVPLSPPDPMELGFLPTVGANLVSESFAFAYLSDKAVTPTNKFFKHPNGNIIERFGIVQDVPVCFEDREAILDFHVFEIQDFDILIGLPIEQLLINTPRLGSLKITLGENEFSIPFSQARITLTDPLPEIESAEEVTAVPPHESPEALLEDEVPDFIKEEADPGETLDLPIMEPPPRLPLELKLLPPGLRYAFLHNDREASIIISDKLSEDETQRLLTVLEKHRSVRGYSLQDLRGINPALCTHRIPIDPESTPSREPQRRLNNAMREVVKKEVLKLLHAGIIYPVPYIEWVSPVQVVPKKGGMTVVANAQNELIPQRTVTGCRMMSFGLCNAPASFQRCMMSIFSDMIEDIMEVFMDDFSVYGKTFGHCLQNLDKVLQRCQEKDLVLNWEKCHFMVREGIVLGHRVSKRGIEVDRAKINVIDQLPPPVNIKGIRSFLGHAGFYRRFIKDFSTIAKPLTNLLAKDAPFEFDDACLKSFEILKMALVFATIIQPPDWTLPFEIMCDASDFIVGAVLGQTKDKKHHAICCASKTLTGAQLNYATTEKELLAVVYAIDKFRSYLVGAKITNMQEQPINDFLRDDMLMMLRDSNPWYANIVNYMVSNYLPPGENQRKLKYESCRHIWDEPYLYRVCSDGLLRRCVPTEEGLKIVERCHASPYGGHYGAFRTQAKIWQSGFFWPTMFEDSREFVRRCTSCQRQGGITARDAMPLTYNLQVEIFDVWGIDFMGPFPKSRSCEYILVAIDYVSKWVEAMSCSAVG

SEQ ID NO: 121667 - protein, 80 aa, Oryza sativa
  Clone ID: PAT_MRT4530_2466C.1.pep
IVIISRHKKKKKKKKKKKKKKKKKKKKKKKKKKKKKKKKKKKKKKKKKKKKKKKKKKKKRGGPFKKTKFKNPGREKKIFF

SEQ ID NO: 121668 - protein, 237 aa, Oryza sativa
  unsure (1)..(237): unsure at all Xaa locations
  Clone ID: PAT_MRT4530_24670C.1.pep
MTSLCKPLQFWSRSTSSLVRPNPSQPRSAACPSPPRHVXKDKIWGDSPYATPTTGELGLLKARRLFQDDGKAGATSRRALCGHPEGAAESRSPPPMKVKRHLKPPPIVRAPSQFQEEEVKSPEPSIHKLAAQVKKLRKENIELKDRNAELGRDQALEWFGRTTRFGRTKSGPNPSQLSQVSRYVTVYPYQAPHISLLIGMNYGTFCLGKQGLESRSFYFSITQDDENPEVGRKIRLK

SEQ ID NO: 121669 - protein, 69 aa, Oryza sativa
  unsure (1)..(69): unsure at all Xaa locations
  Clone ID: PAT_MRT4530_24671C.1.pep
SQELRLIAQQSHYHCIRRQEXLTVHHLQLAKVRVDYCDQTQAQAQGLLELNLPSICGLYSIYYIAPTNI

SEQ ID NO: 121670 - protein, 158 aa, Oryza sativa
  Clone ID: PAT_MRT4530_24672C.1.pep
MREVVKKEVLKLLRAGIIYPVPYSEWVSPVQVRRMSFGLCNAPASFQRCMMSIFSDMIEDIMEVFMDDFSVYGKTFGHCLVLNWEKCHFMVREGIVLGHRVSERGIEVDRAKIDVIDQLPPPMNIKGIHSFMGHAGFHQGLLYNCQTSDQFASQGRAL

SEQ ID NO: 121671 - protein, 75 aa, Oryza sativa
  Clone ID: PAT_MRT4530_24673C.1.pep
MSRPPVPHIVISSFSSALPPRRLSRYFSHKFTPQDEDEETLIGAPCPLRGHLILITGRHSLLSRQIRRRVGRIMP

SEQ ID NO: 121672 - protein, 50 aa, Oryza sativa
  Clone ID: PAT_MRT4530_24674C.1.pep
MKPRRIPMPTTRREMKTMALSRDAPDPLLMTIAGDSAVRGGFSKYHEGIG

SEQ ID NO: 121673 - protein, 145 aa, Oryza sativa
  Clone ID: PAT_MRT4530_24675C.1.pep
MSSSSLSPAGSSDGDSAGVVVAADHRREKRRLSNRESARRSRLRKQQHLDELVQEVARLQADNARVLARASEIAGQYARVEQENTVLRARAAELGDRLRSVNEVLRVVEEFSGVAMDIQEECPPDDPLLRPWQIPCPAAAHMLQY

SEQ ID NO: 121674 - protein, 620 aa, Oryza sativa
  Clone ID: PAT_MRT4530_24676C.1.pep
MDASSSASAGGEADAMALVQGYNADELAIAGEFLTTWLPFLSAGLCASCADSLRSRVSSLLPPQAEESPSSPPPRIDQIEPSGWESDPATAHPQHLPFEPSGWDSDPPQLPPEQEQQKQKPQPAEKPRKSWADMAQEDELAAAAEEDAAAAAADDGEEGSEAGRPGVQLTREQRELRRFRNVVRRKDFICFERVNGRLVNILAGLELHCGVFSAAEQKRIVDYVYDLQEMGKHGELGATNFFGNYSTKSLDLPTTSSRLAFVISSRKINMDKNGNPPGIIRTIASDPMPSLFKIMIKRLVRWHVLPKTCIPDSCIVNIYDPGDCIPPHIDSHDFVRPFCTVSFLSECNILFGSTLKIAGPGEFTGSLPIPLPVGSVLILNGNGADVAKHCVPAVPTKRISITFRKMDPAKRPFNFRDDPELLNIIPLETAVQETGRSSDEGKGKQPDIQIRNPSKAHRNKKSKVRTSPGKGGRGGILGDGPPQYAQAQVTGISSQQNFHGQPTISGSSAERERRPVGPLRESRYQQDAPGMQSNMDGIRERANWLAQERMHGNSMNSIDDGTESQERRQRMEHRQILMINRTINDDMDSLSIGSHESDQTRVSVRTLYNKPRRTRVNLDE

SEQ ID NO: 121675 - protein, 65 aa, Oryza sativa
  Clone ID: PAT_MRT4530_24677C.1.pep
APVMGHLQGSVSLLFDQLPFIALFLHHTRVRQGIQPLAGLFIHSTASLEHRDIQSTRVCHLEFYG

SEQ ID NO: 121676 - protein, 123 aa, Oryza sativa
  Clone ID: PAT_MRT4530_24678C.1.pep
SALGPMALSSSTLLSAEVVTTVTGCRAGDWAYKLTWQRSPPASVLTSPTSMPSLWALSVTFLGALPSSFFLPVLLAQDTWVWESNDDTLVIESAFSCFGVAGSSSQGLYGWSYVPSEKNMGTI

SEQ ID NO: 121677 - protein, 73 aa, Oryza sativa
  unsure (1)..(73): unsure at all Xaa locations
  Clone ID: PAT_MRT4530_24679C.1.pep
MLGASPKAKKGATVKFGSMKNPPPPPVVESRRRSSGAXAGGXVPAEEVWEVRXGGMLVQKRGGGXDEEPVNVX

SEQ ID NO: 121678 - protein, 485 aa, Oryza sativa
  Clone ID: PAT_MRT4530_2467C.1.pep
MPGNYVVVVVLSSLAALVLLLPPLFAAVDDGMRSGGKCTNSCGNVGFEYPFGVEDGCYRGGGFNLTCNHTYQSPRLFLGDGSVQVLDISVPHGWALINNTGMVFNSTETRVVLNRTWDQLVGGPYSLSGSNKIALVGCNARVDLRARVKVKHGGRGGDDDTGSNLISSCTAVCPLDLEDMTPVFAIGSGGSSAACSGVGCCQADINLDIPSSYTIQIHNLQELGGSISPTDLVFISKEEFSYTNDMAFGNNIPQALPALLDWYISSDPSECTYESAPDCLSANSFCHAYDLGYKCHCSDGYQGNPYIRGGCHDIDECKSPQDYSCYGNCNNTPGSHICDCPRGYERNASTPNGCKVGAPFLSRKMKGTIGYLDPEYYYTGHLMDKSDVFSFGVLVIELLTRKRPTYRTDQGDSLVLHFASLLRQGQLVGILDPQVLTEGGGEVMELEMIVPGVGLDASTDCWLTASMTPNNSSATKPNLVLIFSI

SEQ ID NO: 121679 - protein, 91 aa, Oryza sativa
  unsure (1)..(91): unsure at all Xaa locations
  Clone ID: PAT_MRT4530_24680C.1.pep
QSWSLALLFPTNLFPDKHQIVHGEHDDXSHDTIYLXYLSTSAGFXVGLWPVFCTFLFKKAWRIAYFQLNDQIYDKIYVQMAISKAALIRKF

SEQ ID NO: 121680 - protein, 99 aa, Oryza sativa
  Clone ID: PAT_MRT4530_24681C.1.pep
VHDRRRHRCPSRCASPAPGSPPIASRTSSCPCSTSISRPSSSKMLVKCDLCYCSHFYWLVAQWAFFCFCFVCVVRLDWSLKMGWSPCCVKMVHSSWFNR

SEQ ID NO: 121681 - protein, 79 aa, Oryza sativa
  Clone ID: PAT_MRT4530_24682C.1.pep
PSPFPPPAADGGIDDYNLRLPSCRAVRSSPPPRRRLEQSPSSSPQWLVPYLLVMEAGAWWSTMPLRAQKYRTRGREDAA

SEQ ID NO: 121682 - protein, 132 aa, Oryza sativa
  unsure (1)..(132): unsure at all Xaa locations
  Clone ID: PAT_MRT4530_24683C.1.pep
PCLNISSNLVFSFLRITHVPGNTGENIMQCRAYANKWCSWRDKVDCFSSARWRPPTRGQIDAPHLNLLAGGGGSGGWGLGKKQKTKTLYSLLKKKKTYTEFGGTHGMYSGAPAESDTSXAVTCTFESQSISC

SEQ ID NO: 121683 - protein, 51 aa, Oryza sativa
  Clone ID: PAT_MRT4530_24684C.1.pep
MEEWDGLCLHLHPFPVTCLKAVTNAGGGALRVAAIGKERTLHKQRRAKGSS

SEQ ID NO: 121684 - protein, 181 aa, Oryza sativa
  Clone ID: PAT_MRT4530_24685C.1.pep
TLVVGVRADAASRTLLTWTFINVAAPGDRIVAVHVVLASAPVAAATTAVDFDTMLAVYEGFCNLKQINLKLKICKDSSVRKALVREANLFGASKVIVGIAKKKRGISSLHSVAKYCSKKLPAKCAVLAVDSGKIVFRRESNVHSGKVSAEIPGCGDNELYCEVPFLARQCKEEPLPLHEPP

SEQ ID NO: 121685 - protein, 311 aa, Oryza sativa
  unsure (1)..(311): unsure at all Xaa locations
  Clone ID: PAT_MRT4530_24686C.1.pep
MEQLLFELSAPRGEFYEPPPSSEPIYTTGYEIRPELISMVREKPFFGFDLENLYHHLRYFXQVCSCLKIRGMRQETVRWKLFPFSLQERAKQWYTSTVGCVGGSWEKLRDRFCLAFFPVTRITALRVEILXFQHINKESIGQAWSRFTNLVQSERTLSIPEYVLLQHFHTGLDKESAFYMDITAXGSFMHKTPSEGKIILDRILENTSFMMQCDEPPPEASVSKIEEPSIVELQPKPSTSTNSTDELAPEPSSVEDEEIWTPDQALVLFRDGFDEDYNNTLNYFSKKKPLVPLPPPDPTATSIMSDEWLSR

SEQ ID NO: 121686 - protein, 80 aa, Oryza sativa
  Clone ID: PAT_MRT4530_24687C.1.pep
LVQLPTHESPEALLEDEVPDFIKEEADPVETLDHFMGHEGIVLGHRVSERGIEVDRVKIDVIDQLPPPVNIKGIHSFLGH

SEQ ID NO: 121687 - protein, 114 aa, Oryza sativa
  unsure (1)..(114): unsure at all Xaa locations
  Clone ID: PAT_MRT4530_24688C.1.pep
TDFLLHHHYHPPTVSPHATEKDTPTPTPPPTAPTPTQSSPTENWDALDALVXLDLDRSDRLLLPPASQSSSSCPSSSSTITDTFSSSSEPSPTSFYRSGQVIRRARTELEEGGR

SEQ ID NO: 121688 - protein, 56 aa, Oryza sativa
  Clone ID: PAT_MRT4530_24689C.1.pep
FCRTDFCVYSRYRVLNVQFFPQCGSRRSTWSASLGYGSTCPYKCTSNVQSVSKVFC

SEQ ID NO: 121689 - protein, 123 aa, Oryza sativa
  unsure (1)..(123): unsure at all Xaa locations
  Clone ID: PAT_MRT4530_2468C.1.pep
SLSSQLWALSRCCSDILVPQHELEPYCEFQRELAGILVNPLVDQATIQQVNNHLSQQXTRLTQQYIYLDIDIAHDLQQQLTLHXLVDLYLDQTQAKAITLVAHRLPCTCANYPRPYGTPIFIT

SEQ ID NO: 121690 - protein, 209 aa, Oryza sativa
  unsure (1)..(209): unsure at all Xaa locations
  Clone ID: PAT_MRT4530_24690C.1.pep
MEQPLFELSAPRGELYEPPPSSESIYTTGYEICPELISMLGKAARPTLSLPEYVLLQHFHTGLDKESAFHLDITAGGSFMHKTPSEGRTILDRILENTSFMTQSNEPQQEASVSKIEEPLMIEPPAEPSTSASLVDEKVPEQPSVENEEIQTLDCAAIMFRDGFDEDYGNTLNYFSKRKPPVPLSXPPDPMELGLLXETVRELTSVMSD

SEQ ID NO: 121691 - protein, 251 aa, Oryza sativa
  unsure (1)..(251): unsure at all Xaa locations
  Clone ID: PAT_MRT4530_24691C.1.pep
MEQPLFXLSAPRGEFYEPPSSSEPIYTTGYEIRPELISMVREKXFSGFDLENPYHHLRDFEQVCSCLKMRGMRQETVRWKLFMFSLQERAKKWYTSTVGCVNGSXEKLRDRFCLAFFPVTRITALRVEILSFKQIKNGSIGAAWSRFTNLVQSGPTLSLPEYVLLQHFHTGLDKESAFYLDITAGGSVMHKTPSEGRTILDRILENTSFMTQSNEPQPEASVSKIEEPLTIEPLTEPSTSASSIDEKFPEQ

SEQ ID NO: 121692 - protein, 1031 aa, Oryza sativa
  unsure (1)..(1031): unsure at all Xaa locations
  Clone ID: PAT_MRT4530_24692C.1.pep
MAKGGRAFIRSNSDKYRSLNHSLPSXEGNDVGILYSPTVGVNLVSESFAFAYLSNKAVTPTNXFFKHPNGNIIEGFGIVQDVPVCFEDREAILDFHVFEIQDFDILIGLPIEQLVINTPRLGSLKITLGENEFSIPFSWARITLTDPLPEIESAEEVTAVSPHESPGALLEDEVPDFIKEEADPGETLDLPIMEPPPRPPLELKPLPPGLRYAFLHNDREAPVIISDKLSEDKTQHLLTVLEKHRSVLGYSLQDLRGINPTLCTHRIPIDPESTPSREPQRRLNNAMREVVKKEVLKLLHVGIIYPVPYSEWVSPIQVVPKKGGMTVVANAQNELIPQRTVTGWRMCIDYRKLNKATKKDHFPLPFIDEMLERLANHSFFYFLDGYSGYHQIPIHPEDQSKTTFTCPYGIYAYRRISFRLCNAPESFQRCMMSIFSDMIEDIMEVFMDDFSVYGNTFGHCLQNLDKILQRCQEKDLFRSYLVGAKVIIYTDHAALKYLLTKKDAKPRLLRWILLLQEFDLEIKDKKGVENSVADHLSRLQITNMQEQPINDFLRDDMLMTVHDSNPWYANIVNYMVSKYIPRGENQXKLKYESRCHIWDEPYLYRVYSNGLLRRCVPTEEGPKIIERCHASPYGGHYGAFRTQAKIWQSGFFWPTMYEDSREFVRRCTSCQRQGEITARDAMPLTYNLQVEIFDVWGIDFMGPFPKSRSCEYILVAVDYVSMVISDAGSHFIDKTFRDLLREMGAKHNVATPYHPQTSGQAETSNKQIKNILQKTVNKMGTRWMDRLPDTLWAYWTAYKTPIGMSPYQIVYGKPCRLPVELEHRAYWAIRNWNMDFEGAGEWRKMXIAELEEXREKAYHNAKIYKERTKCWHDKRIKIKKFKPGDKVLIFNSRVKLFGHGKLRSKWEGPFDVIDTSSHGAITLHDESGNIFKAQCLFQDDGKAAPPPAERYVGTLFTKAGDEVLHKYTTPTATPSTPKGERFRIQGVRTPGGGYGKGLLRPLTAWEKKGAAESHSPPPMKVKRHLTPPTCY

SEQ ID NO: 121693 - protein, 370 aa, Oryza sativa
  Clone ID: PAT_MRT4530_24693C.1.pep
MAAATEAFSRRLSDAVRGLSGAWYGRHMAAADRAIRSRLPLVDLVLEVRDARVPAASAFAPLRRRSPEPDRRRLVVLNKADLADPSQTEKWMAYMKQTSCSCVALNSHSREGIKELLNAVRAKIREIKLGESDCTGTVLLVGIPNVGKSAIVNAMHRIGRIGAAEKGKLKHAIVSSHPGETKDISGYKVASHPNIYVLDTPGVLSPVFFNDESGPLLALTGAIKDSMMQEFEIAQFLLAILNSRETYKKWENMNQAGDMPSFSHAMSSSSHHNKRQYASDHTQDFVVKAVRQVLFDSISSFKGYLENENELKSLIECQFIALQEAFRVSADLSEDVRKLVAMKLLNLYRTGRLGRYTLDCAPDVRKEIVS

SEQ ID NO: 121694 - protein, 69 aa, Oryza sativa
  Clone ID: PAT_MRT4530_24694C.1.pep
MVVRASGGEERLGESVKRSVRKAMPVGEIAAEQIGAGGDLATGGDETLKRTVCDVVALWVLLEPTGVLM

SEQ ID NO: 121695 - protein, 967 aa, Oryza sativa
  unsure (1)..(967): unsure at all Xaa locations
  Clone ID: PAT_MRT4530_24695C.1.pep
MEQLLFELSAPRGEFYEPPPSSEPIYTTGYEIRPELISMVREKPFFGFDLENLYHHLRYFXQVCSCLKIRGMRQETVRWKLFPFSLQERAKQWYTSTVGCVGGSWEKLRDRFCLAFFPVTRITAIRVEILSFKQIKNESIGAAWSKFTNLVXSGPTLSLPEYVLLQHFHTGLDKESAFYLDITAXGSFMHKTPSEGRTILDRILENTSFMAQSNEPXPEASMSKIEEPLTIEPLTEPSTSASSIDEKVPKQPTVENEEIQTPDYAAILFRDGFDEDYGNTLNYFRKRKPPVPLPPPNPMELGFLRETVRELTSIMSDEWLREAELSSKQLPTHESPEALLEDEVPDFIKEEADPVETLDLPIMEPSPRPPLEHKPLPPGLRYAFLHNDREAPVIISDKLSENETQRLLTMLEKHRSVHGYSLQDLRGINPVLCTHRIPIDPESTPSREPQRWLNNATREVVKKVVLKLXHAGIIYPVPYRIVLGHRVSERGIEVDRVKIDVIDQLPPPVNIKVIQPPGWTLPFKIMCDASNFAVGAALGQTKDKNHHAICSASKTLTGAQLNYATTEKELLAVVFAIDKFRSYLVGGKLIIYTDHAALKYLLTKKDAKPXRWILLLQEFDLEIKDKKGVENSIADHLSRLQITDTQEQPINDFLRDDMLMMVRDSNPWYANIVNYMVSKYIPPGENQQKLNYESRRHIWDEPYLYREDSKEFVRRCTSCQRQGGITARDAMPLTYNLQVEIFDVWGMDFMGPFHKSRNCEYILVAVDYVSKWVEAMPCNTADARHAKKMFTEIIFTRFGIPRMVISDGELEQVYWAIRNWNMXDFDGAGEWRKMQITELEEWREKAYHNAKIYKERTKHXHDKRIKIKKFKPGDKVLMFNSEVKLFGHGKLRSKWEGPFNVINTSSHGAITLRNDSVSLEISRLRKENGGLPDPPGFGRTRAAPVRSAAMSYSTSSRRRRKIRGAPP

SEQ ID NO: 121696 - protein, 714 aa, Oryza sativa
  unsure (1)..(714): unsure at all Xaa locations
  Clone ID: PAT_MRT4530_24696C.1.pep
RYAFLHNDREARIIISDKLSEDETQRLLTVLEKHRSILGCSLQYLRGINLALCTHRIPIDPESTPSREPQRRLNNAMREVVKKEVLKLLRAGIIYPVPYSEWVSPVQVLPKKGGMTVVAKNNGGRRMCIDYRKLNKATKKDHFPLPFIDEMLERLANHSILCFLDGYSRYHQIPIHPEDQSKTTFTCPYGTYAYRRMSFGLCNAPASFQRCMMSIFSDMIEDIMEVFMDDFSVYGKTFGHCLRNLDKVLQXCQENDLFRSYLVGAKVIIYTDHAALKYLLTKRDAKPLLLRWILQLQEFDLEIKGKKGVENSVADHLFRLQLTNMQEQPINDFLRDDMLTTVRDSNPWFANIVNYMVSKYIPLGENQQKLKYESRRHIWDEPYLYRVCSDGLLRRCAPTEEGLKIIEQCHASPYGGHYGAFRTQAKIWQSGFFXPTMYEVSKEFVRRCTSCQRQGGITARDAMPLTYNLQVEIFDVWDIDFMGPFPKSRNCKYILVAVDYVSMVISDGGSHFIDKTFQDLLREMGAKHIVATPYHPQTSGQAETSNKQIKNILQKTVDKMGTXWKERLPDALWAYQTAYKTPVGMSPYQIVYGKSCRLPVELEHNAYXAIRNWNMDFEGAGXWRKIQIAEFDEWREKAYHNAKIYREWTKRWHDKIIKIKKFKPGDKVLMFNSRVKLFGHGKLRSKWEGPFDVIDTSSHGAITLRDDSGNIFKV

SEQ ID NO: 121697 - protein, 39 aa, Oryza sativa
  Clone ID: PAT_MRT4530_24697C.1.pep
MVSVNFFSSSYSLACSSSATMVINLLVFVFPSIVRRLSS

SEQ ID NO: 121698 - protein, 627 aa, Oryza sativa
  Clone ID: PAT_MRT4530_24698C.1.pep
MAAAAAVAKSVEAGGEPGGGGGGAWSTVSRSGRSSYSAGGGVGGGKVGELAEGLAGVEIGGERRLDKYDIPVEVSGEDVPPPADGFEAAGLVEAVLRNVARCGYESPTPVQRYSMPIALAGRDLMACAQTGSGKTAAFCLPVVSGLVAAGGSGIGHRERSSFNRAAAKPRALVLAPTRELAAQSFDNVIFIDTVNQNFSLFCYEELDMINEEAKKFSFQTGLRVVVAYGGTPMYNQLRDLERGADILVATPGRLVDMVERSKVSLEAIKYLVMDEADRMLDMGFEPQIRKIVERMNMPRKSVRQTMLFSATFPPEIQRLASDFLSNYIFITVGRVGSSTDLIMQKVELLSDGEKRGYLLDLLQRQSVGVANSKLQQPLTLVFVETKREADSLRYWLYSKGFPATAIHGDRTQQERESALRSFKTGLTPIMVATDVASRGLDVPNVAHVINYDLPKSIEDYVHRIGRTGRAGKAGSATAFFTESDHSLAKGLLELMTEAKQDVPDWLVQYAERPYYGGSSYGGRNRRSGGGGNRFAGRDFRQGSGGGYSGGGGGGGYSGGGGGGGYSGGGGGYSGGGRGGGYSRGGRGGYSGGGGGGGGDPYRASAPPPRYYPSYPMGTADINASGWD

SEQ ID NO: 121699 - protein, 1031 aa, Oryza sativa
  unsure (1)..(1031): unsure at all Xaa locations
  Clone ID: PAT_MRT4530_24699C.1.pep
MAKGGRAFIRSNPDKYRSPNHSLSXEGNDVGILYSPTIGANLISVSFAFAYLSDKAVTPTNKFFKHPNRNIIEGFGIVQDVPVFFEDREAILDFHVFEIQDFDILIGLPIEQLLINTSRLGSLKITLGENEFSIPFSRARITLTDPLPETESAEEVTAVPPHESTKALLEDEVPDFIKEEADPSETLDLPIMEPPPRPPLELKPLPPGLRYAFLHNDREAPVIISDKLSEDETQRLLTVLEKHRSILGYSLQDLRGINPALCTHRIPIDLESTPSREPQRRLNNAMREVVKKEVLKLLHAGIIYPVPYSEWVSKVQVMPKKGGMTVVANSQNELIPQRTVTGWRMCIDYRKLNKATKKDHFLLPFNDEMLEWLANHSFFCFLDGYSGYHQIPIHPEDHTKTTFTRPYGIYAYRRMSLGLCNAPASFQRCMMSIFSDLIEDIMEVFMDDFLVYGKTFGHCLQNLDKVLQRCQENDLFRSYLVGAKVIIDTDHAALKYLLTKKDAKPRLLRWILLLQEFDLEIKDKKGVENSIADHLSRLQITNMEEQPINDFLRDDMLMTVRDSNPWYANIVNYMVSKYIPPGENQXKLKYESRRHIWDEPYLYRVCSNGLLRRCVPTKEGLEIIERCHASPYGGHYGAFRTQAKIWQSGFFXPTMYEDSKEFVRRCTSCQRQGGITARDAMPLTYNLQVEIFDVWGIDFMWPFPKSRNCEYILVAVDYVSMVISDGGSHFIDKTFRDLLQEMRAKHNVATPYHPQTSGQAETSNKQIKNILQKTINKMGTGWKDRLPDALXAYWTAYKTPIGMSPYQIVYGKPCRLPVKLERRAYWAIRNWNMDFKRAGEWRKMQIAELEEWREKAYHNAKIYKERTKRRHDKRIKMKKFKPGDNVLMFNSRVKLFGHGKLRSKWEGPFDVIDTSLHGAITLRDEXGNIFKARCLFQDDGKAAPPPAERYVGALFTKAGDEVLHKYTTPTATPSTPKGERFCIQGVXTPGGGYGKGLLRPLMASEKERAAESRSLPPKKVKYRLTPPTCYE

SEQ ID NO: 121700 - protein, 476 aa, Oryza sativa
  Clone ID: PAT_MRT4530_2469C.1.pep
MGRAAARLPGCLYLCLWAPAAAIAGGVQPNHLFCLDAWIGGGGGVGAGGGGGDRALELFEAYRGALCAAVSGCVPGWAYKEGAACMELTEHDLAASASLQVQQQFYHETGTKMAVFMGCDSGEIEVGLSAASATATAAVVGEMQQSILEELLQMPPPPPSPSSATAFKAYNAALSPRARPRPGAPGQRMIKTGISLLASVHMQTRSRELAAARQRDTHAAPPPPPPPPPPSSSQLHHMISERRRRERINDSFQTLRALLPLPPDSKKDKAAILASTTEYMDKLISQVSELGEKNRQLEAQLAARSGEAQWPAASGGGGGESSSERVQVDVVIAGSSASTDQPREVSIRVTVRAECDVSELVVAVLARLREMGRFAVVSVDAGRRSSSFAQASLTFRVMNYKYKTNSVTVGKSQLIVHTEKYKAGDVCDETSLKEAVAKAVDGAAFFKFQRTPFMHSKNYDQSDDLEGEAKLLPLDS

SEQ ID NO: 121701 - protein, 64 aa, Oryza sativa
  Clone ID: PAT_MRT4530_246C.1.pep
DACADAWVFLFTIHTLLNLSALPEKINYRLPCAHNTHCICTLYITIHTSDHYRNLSFSQIPITP

SEQ ID NO: 121702 - protein, 225 aa, Oryza sativa
  unsure (1)..(225): unsure at all Xaa locations
  Clone ID: PAT_MRT4530_24700C.1.pep
NYVADHLSRLHITNMQEQPINDLLRDDMLMTVRDSNTXYANIVNYMVSKCIPPGENQRKLKYESHRHIWDEPYLYRVCSDGLLRRCVPTDEGLKIIERCHASPYGGHYXAFRTQAKIWQSGFFWPTMYEDSKEFIRRCTSCQRQGGITARDAMPLTYNLQVEIFDVWGIDFMGPFPKSRNCEYILVAVDYVSMVISDRGFHFIDKTFRDLLREMEAKHNVATPYH

SEQ ID NO: 121703 - protein, 115 aa, Oryza sativa
  unsure (1)..(115): unsure at all Xaa locations
  Clone ID: PAT_MRT4530_24701C.1.pep
HITQPYSPNTGPPPLADSLRRLRHPAPPLHPHPAPPSPISSLASAPSVCILRAPIXPSPPRTDLLPRCRAEEXGAASPVASPPQDHEAPVPHRRSSSLSPPPPPGRRLRPPAWRH

SEQ ID NO: 121704 - protein, 84 aa, Oryza sativa
  unsure (1)..(84): unsure at all Xaa locations
  Clone ID: PAT_MRT4530_24702C.1.pep
LVEEVTAVPPHESPEALLEDEVPDFIKEEADPGETLDLVLNWEKXHFMVCKGIVLGHRVSERGIEVDRTKIDVIDQLPPPYGGH

SEQ ID NO: 121705 - protein, 76 aa, Oryza sativa
  Clone ID: PAT_MRT4530_24703C.1.pep
LILKVILLHIQGIPSVCIEITCSHYYDCKLVTAWYLIHPFSKSRVHIKVLQHHCYRYVQYYFFLCEQCSENLSHWI

SEQ ID NO: 121706 - protein, 69 aa, Oryza sativa
  Clone ID: PAT_MRT4530_24704C.1.pep
MMKANPLTHTEPRAAQTTKNNSTWLTKTESMRDERVHASVRQNRRLTIKQIQPLLPSKPMGRLIPERRT

SEQ ID NO: 121707 - protein, 420 aa, Oryza sativa
  Clone ID: PAT_MRT4530_24705C.1.pep
MGNQVGGRRRRRPAVEERYTRPQGLYPHPDIDLKKLRRLIVEAKLAPCFPGSDDPRADLEECPICFLFYPSLNRSKCCAKGICTGEFVLLAAHVVFFFVGCGGLGWCPYCKMASYAVEYRGVKTKEEKGTEQIEEQRVIEAQIRMRQQELQDDAERMKKKQAAALTDVVTTAQVEHCDTGGASTTVKSSGQGSDMLSSQVQHAELLLKTSERLKQMRNNNFDMDPDEVMLVEALWLSLQDQEASGNPTCGNTVSSVHPPRSFEGSMTIPAEAASSSSAFACAVAALAEQQQMYGEASSTATCHTSRCDILSRSDRSFTEDLSINGSGSSGARSEEPSSNKMHQTREGMEYSNERWSEMAEASSSFTGSDLTTEAGAANSGGSDTGAGSIPDSFEEQMMLAMALSLADARAKASSPGLTWR

SEQ ID NO: 121708 - protein, 68 aa, Oryza sativa
  Clone ID: PAT_MRT4530_24706C.1.pep
FMCKKNLTFNGENIYSPQQAGGQLNFFRGFGIFSVCFSLSVFTTVKGSRRAPFFPQFLIFLIIPPFFF

SEQ ID NO: 121709 - protein, 411 aa, Oryza sativa
  Clone ID: PAT_MRT4530_24707C.1.pep
MATAEKKRPRSRSGGGGGGGVEKRPSRKQILGRKKAVEELIRKAVAVKDHLAQFPDFHKYQRNGLLVYLESGHGNQLPLSTRKYIQNLLKVNMEGQYGPEWPSEEKIKRREMVAPEARYIFVRQSSNAITTQNIMKQDSGLEFTHEACNEDRLIGFVHYRFVLEEDVPVVYVYELQMVPSAQGKGLGKFLMELIELIACKHEGSADFDGVYMQSQMGAVMLTVQKANNLAMAFYKKLSDCWLKHFNVTLILQICNIQYFAITSRSTGRMADGKFAGTHRYDPESSSRSRRVVALLPRGSLPPCDDDRVAAPGLHLLLRLRLRLLLFCTSAPEQETLARRQVVLVPDAGVGAVLRAAQPAARAYAPPHLDGILALFLRERAVLLATGERRAHRGQRKRERPIARAQHRPAPL

SEQ ID NO: 121710 - protein, 57 aa, Oryza sativa
  Clone ID: PAT_MRT4530_24708C.1.pep
NLAKNKKKFYKLEKKRAIIIWKLTKGAVGFLFNGEKKNQRCQINKSNSQKKVTKRTL

SEQ ID NO: 121711 - protein, 53 aa, Oryza sativa
  unsure (1)..(53): unsure at all Xaa locations
  Clone ID: PAT_MRT4530_24709C.1.pep
IARLPAVRPAVTARVDLVALPIPRVDXLPDGAECTNDVPXSGKFDLLWKAFDA

SEQ ID NO: 121712 - protein, 85 aa, Oryza sativa
  Clone ID: PAT_MRT4530_2470C.1.pep
LSSNGSDGNSEKWNNDEAFFAWKDDPTNYENQLEELKAERVSKWLSRLAESPDVKALPNGLSIVLNKMNPSKREQVIDGLRQLLG

SEQ ID NO: 121713 - protein, 66 aa, Oryza sativa
  unsure (1)..(66): unsure at all Xaa locations
  Clone ID: PAT_MRT4530_24710C.1.pep
PLKGVFPALAILXMCLQKKGSNRPLINDVVAALPFLAGPNYDPPDDVEPLPIKAPNFAKKSSPKKA

SEQ ID NO: 121714 - protein, 94 aa, Oryza sativa
  Clone ID: PAT_MRT4530_24711C.1.pep
AVVQSEPWHCRIVICSSGKLVLPGEWAGYGDVFTLCNYHLCTGIIRDVGEQERCVNDPLGKPMLFRHFFPSSAPTATSIVISCSLPDYNEKKKK

SEQ ID NO: 121715 - protein, 455 aa, Oryza sativa
  Clone ID: PAT_MRT4530_24712C.1.pep
MAAESSAAAAAGGGERRGPMDLNLYLGLPPLPPPPGRLDVAADYPSLLLNSAATVANEQRGSVVVAAPPPAAAAYSPSNALSAPEQVLVDPVAAWLVDPGEQQPVPPLETPSYMARASSTLPQIFACAALEMLVQTGGAIPPTGLIRGAEIAAASRPMTPENRLRRLIQVSDQHGVGNGRAGTGPVSRSRRANSPEADNLARAIQRSHNSLEASRRQMLDGDGSDATKKDDGCGCNGSFECNICFESAKDPVVTPCGHLFCWPCIYQWLHGHSEHSDCPVCKGEVLEVNVTPIYGRGGGEENSSRNDIQIPPRPSAQRTESLRQQLQRPDTRGGIANMVRRLMQNQDIVVGQAASSAPRPRGRGRRQAKQDAPSAPATQQQVVNADAGSGNQAPLPPPDANGAAPAAAVAPQQSSSVEQASTSSTVGVIAGGPAQGRRSRVSESTPARRTRRRHQ

SEQ ID NO: 121716 - protein, 194 aa, Oryza sativa
  unsure (1)..(194): unsure at all Xaa locations
  Clone ID: PAT_MRT4530_24713C.1.pep
MAATRQDAARRTSAAAVRQGHGEEDCSKDATGRSEDQDGGGAAGRGEEVYGGGGPRRWLDGCPRRWLWLGGGPLLRRRSEEDHGGDAIGRGEEDXGGDGVAGCSEEDHGGGGAAGRGEEVHGGGGTAGCGEDVHGGAAIAGCGAGAVDAGEERSVGAGEEGEERPAAAVAEVRGGGSYSPSWCCNSDVEIFPFV

SEQ ID NO: 121717 - protein, 140 aa, Oryza sativa
  unsure (1)..(140): unsure at all Xaa locations
  Clone ID: PAT_MRT4530_24714C.1.pep
LWLGGGPLLRRRSEEDHGGDAIGRGEEDXGGDGVAGCSEEDHGGDEAGRGEEVHGGGGAAGRGEEVHGGGGTAGCGEDVHGGAAIAGCGAGAVDAGEERSVGAGEEGEERPAAAVAEVRGGGSYSPSWCCNSDVEIFPFV

SEQ ID NO: 121718 - protein, 184 aa, Oryza sativa
  Clone ID: PAT_MRT4530_24715C.1.pep
MAATRQDAARKTSAAAMRQGHGEEDRSKDATGHGEDQDGGGAAGRGEEVHGGGGPRRWLDGGPRRWLWLGGGPLLRRRSEEDHGGDAIGRGEGVAGCSEEDHGGGAAAGRGEEVHGGGGTAGCGEDVHGGAAIAGCGAGAVDAGEEGEKRPAAAVAEVREGGSCSHADHGGHHRRVVVRRRRRP

SEQ ID NO: 121719 - protein, 149 aa, Oryza sativa
  Clone ID: PAT_MRT4530_24716C.1.pep
MAAALTRPPPGTVQCFGRKKTAVAVSYCKPGRGLIKVNGVPIELIRPEMLRLKAFEPILLAGRSRFKDIDMRIRVRGGGKTSQIYAIRQAIAKALVAYYQKYVDEASKKEVKDIFARYDRTLLVADPRRCEPKKFGGRGARARFQKSYR

SEQ ID NO: 121720 - protein, 124 aa, Oryza sativa
  unsure (1)..(124): unsure at all Xaa locations
  Clone ID: PAT_MRT4530_24717C.1.pep
LLPNLETYMQLLEPELQLDKQKNEMKRKEAWRVYGALLCAAGKCLYDRLKLFPNLLSPSTRPLLRSNKRVVTNNPXKRKSSTDLSTSQPPLKKMTTDGAMNSMTSAPMPGTXMDGFSTQLPTLA

SEQ ID NO: 121721 - protein, 96 aa, Oryza sativa
  unsure (1)..(96): unsure at all Xaa locations
  Clone ID: PAT_MRT4530_24718C.1.pep
RWPSGRCRSAGYLPQRXASTGYGPRIRGEPSPVARDSRARRSAGDAITKAASLPGGAQAGNVPSALQAMAPSRVHGEAAPPASPIEPEQSSVNGAN

SEQ ID NO: 121722 - protein, 154 aa, Oryza sativa
  Clone ID: PAT_MRT4530_24719C.1.pep
MAQMLDGLRHDEQASLHAPQEASTMPTMSCSDLLLAMMCPLILLLIIFRCYAYATRSGGMLSRVPSPPGRLPVIGHMHLISSLPHKSLRDLATKHGPDLMLLHLGAVPTLVVSSARTAQAILRTHDRVFASRPYNTIADILLYGATDVAFSPYG

SEQ ID NO: 121723 - protein, 153 aa, Oryza sativa
  unsure (1)..(153): unsure at all Xaa locations
  Clone ID: PAT_MRT4530_2471C.1.pep
SAPLPPVQXIVDMRRKLKQGNRSIFSRALQTALGELKAKQQQGILFINRRGHSTFVSCRSCGYVLECPNCDVSLSYHYVQGNGQPLLRCHYCNHAEIQPKVCPECSSPYLKFFGSGTQKVTEALTQEFPDLRWIRIDSDTTRRKGAHRALWIP

SEQ ID NO: 121724 - protein, 79 aa, Oryza sativa
  Clone ID: PAT_MRT4530_24720C.1.pep
GFEGIESSHRKHLFQGQLPAKRGNTIGKVLKLLGSGQPLKSMGMCKTKCARQRKKARVDINHLAEDFFDGPEVELNVVM

SEQ ID NO: 121725 - protein, 43 aa, Oryza sativa
  Clone ID: PAT_MRT4530_24721C.1.pep
LEAAVCLCTAIRGNILGINLNLPVDLSLILNYCGKRVPTGFKC

SEQ ID NO: 121726 - protein, 563 aa, Oryza sativa
  Clone ID: PAT_MRT4530_24722C.1.pep
MAPGAAGAEEASGSVKTRSSARRRRSVNRDGGSGVVASLASQSAARAERSERRSAKRSATLADQSSEGERAAKKMDLGVHEEEEGVKVAPPSASASVAEEQQGGKGGEDDGFGGSAGGGEGGALALPSASGVEEGIPVEDEASSCCSSPLRKPYIPRVVIGHNAMGREIYKPIGGEDFRALDPWEAKYQAKRDCQMKLPTLLPCVPDTCLTDRNLLHIRESSTKTVLHAAKFVVGLSSTIDGKSLSKSSGFMIDWDEKSKTGTILTSALLICKQSPSLDDWKSANQYASNAKVAVRFVDGTTVEGHFLYCQEHYNLAFYKIVVDRSIHLPSFNEGVKWAEEVFILGRDENSYLRTSYGRVQYLNPHMNERRHYVYIDGFSAPPEYYNGGPVIDLRGDVVGMSIRSTRGSFIPSNIILKCLQMWRKFHWRRYNLKNTDVAAVVVPAPGVNHLAADIEAIIRGEMSHLHADIEAIKGSIGWGRKEASVGGGEAGLPRDHRLHLWVSPTVAAIARIRLRRRRRRNEAGRARGHSPVFLTKFYKTTYKEHVPNLVQLTMPCMRYKVG

SEQ ID NO: 121727 - protein, 73 aa, Oryza sativa
  Clone ID: PAT_MRT4530_24723C.1.pep
MVTSGMHPGPWFDMGHVMSYVEARTTVIIGVHVPSEQISDYNQYVDNNQINFFSHKDRFLPCGRAVSSKGPTG

SEQ ID NO: 121728 - protein, 1397 aa, Oryza sativa
  Clone ID: PAT_MRT4530_24724C.1.pep
MPWAESLLFLLLLFSLPIPFSHSWSFDYPSPIANINSLWTNNNATIPYSATYPDGSTIRAILVRQNPTWYSPFFACGFICTAPCNDFLFAIFSVSVGDPSNPAFNTSSMPRIMWTANRSRPVKDNASLQFKDGNLILRDFDGSLVWSTNTSDSRVVGLNLAETGNMVLFDAMGKTVWESFEHPTDTLLLGQSLRQGKRLTSDSLATNWTQGQFYLTVLDNGLYAFIEADPPQLYYQRRFNITDAIVQPNMNISSDGAKNYTTYISFLKGSLSAFVSFNNTDINLFDISLPSPSSAQFMSLENDGHLRVYRWDGTSWKPQADVLHVDLDDCAYPTVCGDYGICSEGQCSCPSRNSGDEDQFFRQLDNRQPNMGCSLAIPLSCDLTQYQQLLPLPNVMYFNLGQNWTTDEYSCKEACLKACSCKAAFFKYNNVSNGSCYLMPKLFSLMNYQPEVVGYNLSAYIKVQMLPPPPRSKQLNPLVYHVGAPIIVAVICIIILIIRRIMKRKMDDDDPFKGLAGMPTRFSYKQLREATNNFSKKLGQGGFGPVYEGKLGNVKIAVKCLRDIGHGKEEFMAEVITIGSIHHINLVRLIGYCSDKFHRLLVYEHMTNGSLDKWIFRKNPRGTLSWATRYKIILDIAKGLAYLHEECRQKIAHLDIKPGNILLDDKFNAKISDFGLAKLIDRDESHVMTKIRGTRGYLAPEWLSSTITEKADIYSFGVVVLEIVSGRKNLDNNQPEASNNLINLLQEKIKVGQVLDILDNQNEEIQLHGEEMIEVIKLAVWCLQRDCSKRPAMSQVVKGGFAASCSTRRNHRVIFLGSRQFSPIIYSPARRASSRLSRREVIAFAGQQSWDIGRFVRTLYFFNGPPNPLKIVESILSSFTGSAPGEVPKKMESSDVVLVTGATGGVGRRVVDILRNKGIPVRVLARNEEKARSMLGPDVDLIIGDVTKENSLDPKYFKGIKKVVNAVSVIVGPKEGDTPDRQKYKQGIKFFEPEIKGPSPEMVEYLGMQNLINAVKNSVGLTEGKLLFGGTGNLSGKIVWGALDDVVMGGVSESTFQIQPTGSETDGPTGLFKGTVSTSNNGGFTSIRTKNFTVPEDLSAYDGIELRVKGDGRRYKLIVRTSFEWDTVGYIASFDTTKGEWQSVKLPFSSLNPVFRARTMPDAAPFDASNVTSLQLMFSKFEYDGKLNPTFTEGSFELPFSSIRAYINEPITPRINEHCNRPIVWKSSRLTRINDNSTCRFVHVSSAGVTRPERPGLDLSKQPPAVRMNKELGSILTYKLKGEDLIRESGIPYTIVRPCALTEEPAGADLIFDQGDNITGKISREEIAFICVAALASPNAVEKTFEVKSTVPFSEPFVVDPSNPPPEKDYDVYFKELKAGITGKEALEGTPAQVLTT

SEQ ID NO: 121729 - protein, 259 aa, Oryza sativa
  Clone ID: PAT_MRT4530_24725C.1.pep
MAPMAISTPLALRASPTRLLSRRRSGAKSGVALPGPQFVPPGISSKLDERIHCHSSLRKNTIVASENENPPLMPAIMTPAGALDLATVLLGNRIIFIGQYINSQVAQRVISQLVTLAAVDEEADILIYLNCPGGSLYSILAIYDCMSWIKPKVGTVCFGVVASQAAIILAGGEKGMRYAMPNARVMIHQPQGVSEGNVEEVRRQVGETIYARDKVDKMFAAFTGQTLDMVQQWTERDRFMSSSEAMDFGLVDALLETRY

SEQ ID NO: 121730 - protein, 269 aa, Oryza sativa
  unsure (1)..(269): unsure at all Xaa locations
  Clone ID: PAT_MRT4530_24726C.1.pep
MEQPLFELSAPRGEFYEPPPLLEPIYTTXSMVRENPFSGFDLENPYNHLRDFEQVCSCLKIRGMKQETVRSKLFPFSLQERAKQWYTSTVGCVNGSWEKLRDRFCLAFFPVTRITALRVEILSFKQIENESISAAWSRFTNLVQSVPTLSLLEYVLMQHFHTGLDKESAFYLHITTGGSFMHKTPSEGRIMLDRILENTSFMTQTNENQSKASVSKIEEPLTMKPLAQPSTSASSIDEKVPEQPSVENEEIQTPDRESSTTHRSPPVVH

SEQ ID NO: 121731 - protein, 105 aa, Oryza sativa
  unsure (1)..(105): unsure at all Xaa locations
  Clone ID: PAT_MRT4530_24727C.1.pep
SWLQPRFNSWETYIHRVQLVLASNYADTAGDECRFHGHRHHTSGTTPTGAAALPKMRRSWASVGSVLCGSSXHGHCPRCVCAPDITHGYYXCQLHRRNCHQHLSS

SEQ ID NO: 121732 - protein, 598 aa, Oryza sativa
  Clone ID: PAT_MRT4530_24728C.1.pep
MTQSIEPQPEASVSKIEEPLMIEPRAKPSTSVSSIDEKVPEQPTVENEEIQTPDHAAILFRDGFDKDYGNTLNYSSKRKPLVPLQPPDPMELGILRETVRELTSIMSDEWLREVELSSEVIWINTTPRVIPCHLEGNDVGILYSPTVGANLVSKSFAFAYLSDKLVTPTNKFFKHPNGNIIEGFGIVQDVPVCFEDREAILDFHVLEIQDFDILIGLAIEQLLINTSRLGSLKITLGENEFSIPFSRARITLTDPLPEIESAEEVTAVPPDESPEALLEDDVPDFMNEEADPDFMGPFPKSRNCEYILVAVDYVSKWIEAMPCSAADARHAKKMFTETIFLRFELEHRAYWAIRNWNMDFEGAGEWRKMQIAELEEWREKAYHNAKIYKERTKRWHDKRIKIKKFKPGDKVLMFNSRVKLFGHGKPRSKWEGPFDVIDTSSHGAITLRDDSSNIFKARHLFQDDGRAAPPPTERYVGTLFTKAGDEVLHKYTTPTATPSTPKEERFRIQGVRTPGGGYGKGLLRPLTASEKEGAAEFRSPLPLKVKSHLMPSPIVRAPGQFQEDEVKSPEPSIHNLAAQVKKLRKENIELRDHNSELG

SEQ ID NO: 121733 - protein, 1093 aa, Oryza sativa
  Clone ID: PAT_MRT4530_24729C.1.pep
MEQPLFELSAPRGEFYEPPPSSEPIYTTGYEIRPKLISMVRENPFSSFDLENPYHHLRDFEQVCSCLKIRGMRQEIVLWKLFPFSLQERAKQWYTSTVGCVNGSWEKLRDRFCLAFFPVTRITTLRVEILSFKQIENESIGAAWSRFTNLVQSGPTLSLPEYVLLQHFHTGLDKESAFYMDITAGGSFMHKTPSEGKTILDRILENTSFMTQSNEPQPEASMSKIEEPLTIEPLAEPSTSASSIDEKVPEQPSVENEEIQTFDCAAIMFREGFDEDYGNTLNYFSKRKPPVPLSPPDPMELGFLRETVRELTSIMSDEWLREAERSSEDHLDRPSPKALLEDEVPDFIKEEADPGETLDLPIVEPLPRPLLELKPLPPGLRYAFLHKDREAPVIISDKLSEDETQRLLTVLEKHRSVLSYSLQDLRGINPALCTHRIPIDPESTPSREPQRRLNNAMREVVKKEVLKLLHARIIYPVPYSEWVSPVQVVPKKGGMTVVANAQNELILQQTFLKKALVSAPVIQPPNWTLPFEIMCDASDFAVGAVLGQTKDKKHHAICYASKTLTGAQLNYATTEKELLAVVFSIDKFRSYLVGAEVIIYTDHAALKYLLTKKDAKPRLLRWILLLQEFDLEIKDRKGVENSVADHLSRLQITNMQEQPINDFLRDDMLMTVSDSNPWYVNIVNYMVSMYIPPGENQRKLKYESRRHIWDEPYLYREDSREFIRRCTSCQRQGGITTRDAMPLTYNLQVEIFDVWGIDFMGPFPKSRSCEYILVAVDYVSKWVEAMPCSAADARHAKKMFTEIIFPRFGTPRMVISDGELEHRAYLAIRNWNMDFEGAGEWRKMQIAELEEWREKTYHNTKIYKEKTKRWHEKRIKIKKFKPGDKVLMFNSRVKLFDHGKLRSKWEGPFDVIDISSHGAITLRDDSAPCNSARLRSKFGARRRAPWFGRTRGSAPRSAARSLSPRHVARMKIRGDSPARWPTMGELGLLKARCLFQDDKKATTPPAEHYVGTLFTKARDEVLHKYPTPTATPSTPKGERFCIQGVRTLGGGYGKGLLRPLTASEKEGAAESCSPPPVMVKRHLMPPPMVRAPG

SEQ ID NO: 121734 - protein, 134 aa, Oryza sativa
  unsure (1)..(134): unsure at all Xaa locations
  Clone ID: PAT_MRT4530_2472C.1.pep
HRLHGLRXRLGATFWSHPSEMIALFSKDGNHTKIMLPCNQMLAEXDDWIXPEKERYVPFEDILRHRYRKTLALAPXVALXIKTPAVVCNYLRMNAMELXAKSCTATDHLQFQEQSADGHTNSHYVIDVDYETYH

SEQ ID NO: 121735 - protein, 74 aa, Oryza sativa
  Clone ID: PAT_MRT4530_24730C.1.pep
QRKKGAVGPPYLCGPPGANAAIGGGGGVPFCANVVNNCGLFFFMIPPPAIRRDIVRVICLLPQVSTQLNGSGQA

SEQ ID NO: 121736 - protein, 927 aa, Oryza sativa
  unsure (1)..(927): unsure at all Xaa locations
  Clone ID: PAT_MRT4530_24731C.1.pep
MAKGGIAFIRSNSGKYRSPNHSLPSXEGNDVGILYSPIVEVNLISESFAFAYLSDKAITPTNKFFKHPNGNIIEGFGIVQDVHVCFEDREAILDFHVFGIQDFDILIGLPIEQLLINTPRLDSLKITLGGNEFSVPFSRARIALTDPLPEIESAEEVTAVPPHKSPEALLEDEVPDFIKEEADPGETLDLPIIEPLPRLPLELKPLPPGLCYAFLHNDREAPIIISDKLSEDETQRLLIVLENHRSVLGYSLQDLRGINPALCTLRIPIDPESTPFREPQXRLNNATREVVKKEVLKLLHAGIIYPVPYSEWVSPVQVVPKKGGMTVVANAQNELIPQRTVTGWRMCIDYRKLNKATKNDHFPLPFIDEMLERLANHSFFCFLDGYSGYHQIPIHPEDQSKTTFTFPYNTYAYHRMSFELCNAPASFQRCMMSIFSDMIEDIMEVFMDDLSVYGKTFGHCLQNLDKVLQRCQEKDLFRSYLVGAKVIIYTDHTALKYLLSMKDAKPHLLRWILLLQEFDLEIMDKKGVENSVADHLFRLQTTDTQEQPINDFLRDDMLMTVRDSNPWYANIVNYMVSMYIPPGENXRKLKYESRCHIWDEPYLYRVCFDGLXSPYGGHYGAFRTQAKTXQSGFFWPTMYEDSKEFVRRCTNCQRQGGITTQDAMPLTYNLQVEIFDVWGIDFMGLFPKSRNYEYILVAVDYVSMVISDGGSHFIDKTFRDLLREMGAKHNVATPYHPQTSGQAKTLNKQIKNILQNTVNKMGTXWKDRLPDTLTCKRLEFWIEIPGVTTLWAYRTAYKTPIGMSPYQVVYGKSCXLPVELEHRAYWAIRNWNMDFEGAGEWRKMQIAELEEWREKAYHNVRIYKERMKRWHDKRIKIKKFKSRDKVLMFNSRVKLFGHXKLRSKWEGPFDVIDTSSHGAITLRDDSG

SEQ ID NO: 121737 - protein, 43 aa, Oryza sativa
  unsure (1)..(43): unsure at all Xaa locations
  Clone ID: PAT_MRT4530_24732C.1.pep
SASARIYRCSTSPXEYSKGIESKGTCVVRSSSGSSKDTKQLIG

SEQ ID NO: 121738 - protein, 52 aa, Oryza sativa
  Clone ID: PAT_MRT4530_24733C.1.pep
YKRYVAACARSREWGPYIWGAFFFFFFFFGDNGIMDTFFYQFLSLFTHEMHQ

SEQ ID NO: 121739 - protein, 337 aa, Oryza sativa
  unsure (1)..(337): unsure at all Xaa locations
  Clone ID: PAT_MRT4530_24734C.1.pep
MDRGRSRESTDRRPGQQGPAQVRPNTLSNELQPEVSVSKIGEPLTIELLAEPSTSVSSVDEKVPEQLSVENEEIQTSDCTAILFRDGFDKDYGNTLNYFSKRKPLVPLPPSDPMELGFIRETVRELTSIMSNEWLREAKLSSEVIRINTTPRIIPCHLKGNNVGILYSPTIGANLVSESLAFTYLSNKAVTPTNKFFKHPNGNIIEGFGIVQDVPVCFEDKEAILDFHVFEIQDFDILIRLPIEQLLINTPRLGSLKITLGENEFSIPFSRARITLTDPLPEIESAKEVTAIPPHESPEALLDDEVXPISSNRKWIPTRLNVFSPCWKSIVLFLATR

SEQ ID NO: 121740 - protein, 365 aa, Oryza sativa
  Clone ID: PAT_MRT4530_24735C.1.pep
METATVAVGNGGGEWWTGGGGGGRGRRRCRTRRHDGSDGGGDGGDEYGDAMVAARGGGDGDLSSPQGEFYEPPPSSEPIYTTGYEIRPELISMVREKPFIGFDLENPYHHLRDVEQVCSCLKIRGIRQETVRWKLFPFSLQEIAKQWYTSTVGCVNSSWEKLRDRFCLAFFPVTRITALQVEILSFKQIENESIGAAWSRFTNLVQSGPILSLPEYVFLQHFHTSLDKESAFYLDITTGGSFMHKTPSEGRTILDRILENTSFMTQSNELQPEASVSKIEEPLTIEPLAEPTTSASSNDEKVPEQPSVENEEIQTPDRATILFRDGIDEDYGNTLNYFSKKTPLIPLSPPDPMELGFLRETVREL

SEQ ID NO: 121741 - protein, 1084 aa, Oryza sativa
  unsure (1)..(1084): unsure at all Xaa locations
  Clone ID: PAT_MRT4530_24736C.1.pep
MEQPRFEMSAPRGEFYEPPPSSKPIYTTGYEIRPELISTVRENPFSGFDLENPYHHLRDFEQVXSCLKIRGMRQETVRWKLFPFSLQERAKQWYTSTVGCVNGSXGKVXDRFCLAFFPVTRITAFRVEILSFKQIKNESIGATWSRFTNLVQSGPTLSLPEYVLLQYFHTGLDKESAFYLDITVGGSFMHKTPSEGRTILDRILENTSFMTQPNEPQPKASLSKIVEPLTIEPLTEPSTSASSIDEKVPEQPFVENEEIQVPDCATIMFRDGFDKDYGNTLNYFSKRKPPVPLSPPNPMELGFLRETVRELTSIMSDEWLREVELSSEDHLDRPSPRALLEDEVPDFIKEEADPGETLDLPIMEPPPQPPLELKPLPLGLRYAFLHNDREAPVIISDKLSKDETQRLPTVLEKHRSVLGYSLQDLRGINLALCTHRIPIDPKSTPSREPQRRLNNEIXEVVKKEVLKLLHAXSIYPVPYRIVLGHRVSERGIEVDRTKIDVIDQLPPPVNIKVIQPPDWTLPFEIMCDASDFAVGAVLGQTKDKKHHAICYASKTLTGAQLNYATTEKELLTGVFAIDKFRSYLVGAKVIIYTDHAALKYLLTKKDAKPRLLRWILLLQEFDIEIKDKKGVENYVADHLSRLHITNMQEQPINDLLRDDMLMTVRDSNTXYANIVNYMVSKCIPPGENQRKLKYESHRHIWDEPYLYREDSKEFIRRCTSCQRQGGITARDAMPLTYNLQVEIFDVWGIDFMGPFPKSRNCEYILVAVDYVSKWVEAMPCSAADARHAKKMFTETIFPRFGTRRMVISDRELEHRAYWAIRNSNMDFEGAGEWRKMQIAELEEWREMAYHNAKIYKERTKRWHDKRIKIKKFKPGDKVLMFNSRVKLFGHGKLRSKWEGPFDVIDTSSHGAITLRDDFAPCSCARLPCNFGADRRAPWFGRTXSQPRSAAXSLSPRHVTRTKIWGDSPTRRPTTGELGLLKARRLFQDDGKAAPPLAERYVGTLFTKEGDEMLHKYTTPTATPSTPKEERFRIQGVRTPGSGYGKSLLRPLMASEKEGAAESRSPPPMKVKRHLKPPPIVRAPS

SEQ ID NO: 121742 - protein, 541 aa, Oryza sativa
  unsure (1)..(541): unsure at all Xaa locations
  Clone ID: PAT_MRT4530_24737C.1.pep
MAAIGNMNLFDLFFVLQLLLSGVCVLVICYRYQRLKSMKKCSLWVAQWPIVGVLPAIAANMHRLLDGVTFLLATSQLNFQCRFWLAGFRFFVTCDPDNVRHIFTVNFGSYPKGDVFADMFDVLGGGIFNTDGERWRRQRNKAQMLMTTPRFRAFVARSSLDKVEKGLLPFLAHVADARKTCHLQDVFTRNGRSDANGCHLVXFGVDPGCLDIGLPEVPFARAMDDVLRTIFLRHTMPVSFWKTMRWLGIGHEKRNAAARRTVESFVASAIAKHRADDESKSRQGGGGGGDKQSVADLLSSFLCDDEIAGSADADVYIRDMAMNLLVAGRDTTSSALSWFFYLLSTNPRVEQKLLQELAPIASRKPQLQQGRLFPGNGGMVTFDASEVRNLLYLHAALCEAMRLYPPVPLEHKAAVADDVLPSGHEVMAGDKVLVFYYSMGRMKRVWGKDCREFRPERWITEDGKLRYVPSNKFVAFNSGPRTCLGKEMALVQMKVTAAAMAWNFAVEVVPGHVVEPRLSVILHMKNGLLVRVKRREPVMNT

SEQ ID NO: 121743 - protein, 996 aa, Oryza sativa
  unsure (1)..(996): unsure at all Xaa locations
  Clone ID: PAT_MRT4530_24738C.1.pep
MAKGGRAFIRSNSDKYCSPNHSLPSXEGNDVGILYSPTVGANLVSEFFAFAYLSDKAVTPTNKFFKHPNGNIIEGFGIVQDVLVCFEDREAILDFLIFEIQDFDILIGLPIEQLLINSPRLGSLKITLGENEFSIPFSRARFTLTDPLPEIESVEEVTAFFPHESPEALLEDEVPEFIKEEADPGETLDLPIMEPPPRPPLELKPLPLGLRYAFLHNDREAPXVIFSDKLSEDETQRLLTVLEKHRSVLGYSLQDLRGINPVLCTHRIPIDPXESTPSREPQQWLNNAMREVVKKEVLKLLHARIIYPVPYSEWVSPVQVVLNKGGMTVVANAQNELIPQRTVTGWRMCIDYKKLNKATKKDHYPLPFIDEMLERLTNHSFFYFLDGYSGYHHIPIHPEDQSKTTFTCPYSTYAYRRMSFRLCNAPASFQRCMMSVFSDMIEDIMEVFMDDFSVYGKTFGHCLQNLDKVLQRCQEKDLFRSYLVGAKVIIYTDHAALKYLLTKKDAKPRLLRWILLLQEFDLEIKDKKGVENSIADHLSRLQITNMHXQPINDFLRDDMLMTVRDSNPWYANIVNYMVSKYIPLGENQRKLKYESHHHIWDEPYLYRVYSDGLLRRCVPTEEGLKIIERCHASPYGGHYGAFRTQAKIWQSGFFLPTMYEDXKEFVRRCTSCQREGGITAHDAMPLTYNLQVEIIDVWGIDFMGPFPKSRNCEYILVAVDYVSMVVSDGGSHFIDKTFXDLLQEMGAKHNVATPYHPXTSGQAETSNKQIKNILQKMVNKMGTGWKDRLPDALWAYRTAYKTPIGMSPYQIVYEKSCRLPVELEHRAYSYKERMKRWHDKRIKIKKCKPRDKVLMFNSRVKXFGHGKLRSKWEGPFDVIDTSSHGAITLSDESGNIFKARRLFQDDGKAAPPPTERYVGTLFTKTGDEVLQMYTTPTATPSTPKEEQFRIQGVRTPGGGYGKGRLRPLTASEKEGAAESRSPPPMKVKRHLEHEAT

SEQ ID NO: 121744 - protein, 367 aa, Oryza sativa
  unsure (1)..(367): unsure at all Xaa locations
  Clone ID: PAT_MRT4530_24739C.1.pep
MRAPHGSDSGGXSAVDRVHEPGKGXVPRGADVGPTPRPRGSHVGARTDGPDLPSAAGARGRRAQVAQAGPAAMAYGNATASGGGKRRRPTETKWEKLEGKRKITEGGNAGQRRRPWPNSPAHGAGWVPAAESDGRGVDGVARSTANATASTARLGTAASGGRSNGGGGGEVGDGASAKESTGAAAKAKPSSVADAVPIKRRIHSYKERRRHHQLTMRSSFGGKARGAAAPAPATHPRYVPQRGVVLKSVLGWFFGCFRPAKTRPLPAGRHVGLLAASSGFNQIDYLFVSGKESLVFGGGKKPPPPGVHPRYVPKRGSVLKGIVRRMLGLFVFLLPQQGGGGAANGSGGGGRVRPAAPPVDDGGEQGK

SEQ ID NO: 121745 - protein, 173 aa, Oryza sativa
  Clone ID: PAT_MRT4530_2473C.1.pep
MSRSVEPLVVGRVIGEVIDSFNPCTKMIVTYNSNKLVFNGHEFYPSAVVSKPRVEVQGGDMRSFFTLVMTDPDVPGPSDPYLREHLHWIVTDIPGTTDASFGREIISYESPKPSIGIHRFVFVLFKQKRRQAVVVPSSRDHFNTRQFAEENELGLPVAAVYFNAQRETAARRR

SEQ ID NO: 121746 - protein, 1351 aa, Oryza sativa
  unsure (1)..(1351): unsure at all Xaa locations
  Clone ID: PAT_MRT4530_24740C.1.pep
ATKKDHFPLPFIDEMLERLANHSFFYFIDGYSGYHQIPIHPEDQSKTMFTCSYGTYAYRRMSFGLCNAPASFQRCMMYIFLDMIEDIMEVFMDDFSVYGKTFGHCLQNLDKVLQRCQEKDLFRSYLVGAKVIIYTDHAALKYLLTKKDAKPRLLRWILLLQEFDLETKDKKGVENSVADHLSRLQITNMQEQPINDFMRDDMLMTVRDSNPWYANIVNYMVSKYIPPGENKRKLKYESRRHIXDEPYLYRVCSDGLLRRCVPTDEGLKIIERCHASPYGGQYGAFRTQAKIWQSGFFXPTMYEDSKEFIRRCTSCQRQGGITTRDAMPLTYNLQVEIFDVWGIDFMGPFPKSRNCEYILVAVDYVSKWVEAMPCSAAEARHAKKMFTEFIFPRFGTPRMVISDGGSHFIDKTFRDLLREMGAKHNVATPYHPQTSGQAETSNKQIKNILQKTVNKMGTGWMDRLPDALWAYRTAYKTPIGMSPYQIVYGKPCRLPVELEHRAYWAIRNWNMDFEGAGEWRKMQIAELEEWREKAYHNAKIYKERTKRWHEKRIKIKKFKPGDKVLMFNSRVKLFGHGKLRSKWEGPFDVINTSSHGAITLCDDLGNIFKGDSPAQRPTTGELGLLKARCLFQDDGKAAPPPAERFVGTLFTKAGDEVLHKYTTPTATPSTPKGERFRIQGVRTPGGGYGKGLLRPLMASEKEGAAESRSPPPIKVKLHLTPPPIVRAPGQFQEDEVKSPEPSIHKLAAQVKKLCKENIELRDRNAELGKINPEVGRKIRLKESTDQRPGQEGLAQVRPNPLVQPNPEVVTALEITEVLPVRGPSVPPHMVPTEGMAFPTYDNAYNFYQRYACHAGFDIKKSRTHKAFREVCCTREGKHVSKVTDGDRQRRRPSKKMGCKAFMKLRHNYDGGALSSVVYDVVELQHNHPLTPSPSAVKHMRAHKNRDDTVMQFVDTMQESHVPQSCIMGVLSDLHGGQDNIPFTSRDVENRTFPSDRCRKVANVRKENANDINKLLEFFNECTLQNPKFYWDAQLDENGVIKNLFWSHASSQVEFADFGDASTLFGCALLRDEKVQSFEWLFNTFNKWHILNRHSDPLNTIFARDAQIEPDMMLCINQTYTPYEFETSWDQFIKSYDLEGCPIMKALYDIREKWVPAFFKKEYCRRMTSTQRSESMNKLVKHKFADHQTALHRFARRMLEVITDRKEKEAAETRACSMSRLYTRAAFRLFEEVLQDSTDFRITQDDNFRNGWKQFKVIADVDEGVFTCKCKQWEHTGMFCTHMLRAFVHVQVEKIPAVYILKRYTMKAKSNVPFDRRDRETTRPDGVQESYRTNMMMIEAFGVARAACKLKG

SEQ ID NO: 121747 - protein, 1160 aa, Oryza sativa
  unsure (1)..(1160): unsure at all Xaa locations
  Clone ID: PAT_MRT4530_24741C.1.pep
MDRRSWPWKKKSSDKSSAGDVLKSSGQAEQDEQVPKFVQISPERYTNLTESEEQVKILCDKVNVLNEKLSAAQSDITTKDSLVKQHVKVAEEAVSGWEKAEAEALALKHQLETVTLSKLAAEERAAHLDGALKECAENDALSRSLEEREHLMMKVGGEKEQAESQIEVLKGTIQSGEKEISSLKYELHVLSKEFEIRNEEKNMSVRSADVATKQHVEDVKKISKLEAECQRLRGLVRKKLPGPAALAQMKLEVDSWGRDHADNRLRRSPSRSSNFHHPLSPSPDNSLENLQHMQKENEFLTARLLSMEDETKMLKEALSKRNNELQVSRNTCAKTAGKLRSMDVHMVSARQYKNPTNSNLDVHHDGALSLNGSNPPSLTSMSEDGVDDATSCAESWANALISELSHIKKDNGGKGSLTENSNQMVLMDDFLEMERLACLSPEGKECGSFIDKKKATKVHTTLTTITKRESDRDSWPSSQFPDTPSSSEHLPENSPLSKLHSRISSLLGSHSPQNNVGKVLEGIRNILRDIKEEAESVSAKKNQPDNMNGLADNGSLTKQSKNLRDVDHGLRHAILEILDFFQPFKRQLSEVQGKSSHQNTILEKIEKFSTIADKVVLNENALAEMVIALPEILAGNSAIKLTLPRDSITETESNNLDYVDKVTLLENKVHHEPIKDSLADICSLAPHSSSDPDFEGSRDAFVVKTTVQMCSMEEYEQLKSEKRKLEMELAKCNETIECRKLEFSLMEKNMEELTSKLSACEKSNSLTETQLKCMAESYKSLELHKLKLESEIEVMHRQINTLRTELADERQNHQDDLAKYRDLKEKIERYENEKNTSSVDEDAGVKIKQDKEIAAAAEKLAECQETILLLGRQLQTLRPPPAEPLGSVLNQQPVGVFSEDQARPTQSLHFKKLSGKFDKNTTFSSAPGSGNVSPLNGQSKHTSAXILDGFTYFASPNNSKQPKQRSNFINVAEDQAFLAESSGVFHMSFSHSPSILSSSSCLLLVGGDVCFEPHFASPALPRLGVLVINTSNAEHQASTTKYELSLEMVFVGCCDVDVIGAPGKLLTTARARVRRXCSSPHEISGDXIRATGKFAGDCXGLRHFSSSKVGRLIRNSXTKMNHMNVVLWASNVSCHSSLVNIGGIRSLNGGFQKGKIRGSE

SEQ ID NO: 121748 - protein, 83 aa, Oryza sativa
  Clone ID: PAT_MRT4530_24742C.1.pep
ENEKNLILSAQAVKPPLYTLDIPVCMLFVKITPLGFSWTKKKGKVDLPLFGYPIAIWSVSLSLSVETNFESYEAILSIFRKLL

SEQ ID NO: 121749 - protein, 87 aa, Oryza sativa
  Clone ID: PAT_MRT4530_24743C.1.pep
LSALLCYTPTFDRDSLHIEIHIRPSSTTSIVRVSLSSCLSNRPMPTICARKSFHSMSHSHIWHHKRSSLRRRQFRLKVIYTPPKPGR

SEQ ID NO: 121750 - protein, 356 aa, Oryza sativa
  unsure (1)..(356): unsure at all Xaa locations
  Clone ID: PAT_MRT4530_24744C.1.pep
MKISPAEKMTPERIYGKTGSMRKTKVPITATPYTVASLQVATNSFCQDSLLGEGSLGRVYKADFPNGKVLAVKKIDSSALSLQEEDNFLEAVSSMSRLRHPNIVPLTGYCVEHGQRLLVYEYIGNGTLHDVLHYSDELSRKLTWNIRVRVALGTARALEYLHEVCLPSVVHRNFKSSNILLDEEHNPHLSDCGLAALTPNTERQASTEVFGSFGYSAPEFAMSGIYTVKSDVYSFGVVMLELLTGRKPLDSSRERSEQSLVRWATPQLHDIDALAKMVDPALNGMYPXAKSLSRFSDIIALCVSLSPEFRPPMSEVVQQLVRLMQRASIVRRQSGEELGYSYRAPEREGDMRDLSF

SEQ ID NO: 121751 - protein, 156 aa, Oryza sativa
  Clone ID: PAT_MRT4530_24745C.1.pep
LEGIKAGDVAVAAASSGGGAITVLQLETFRPLSYLPDAAYQALEKVVTAALGSPSMANPPEPFDLCFQNAAVSGVPDLVFTFQGGATLTAQPSKYLLGDGNGNGTVCLSILSSTRLDSADDGVSILGSLLQENVHFLFDLEKETLSFEPADCSSLT

SEQ ID NO: 121752 - protein, 96 aa, Oryza sativa
  Clone ID: PAT_MRT4530_24746C.1.pep
PDLVEEVFEDGCPSLSRRLDSEYPVRNMFKLFICAICQVELESGQGISIHEGLSKSGKLRPWDGPFLCHSCQEKKEAMEGKRHSRDSSSRNSGSSE

SEQ ID NO: 121753 - protein, 66 aa, Oryza sativa
  Clone ID: PAT_MRT4530_24747C.1.pep
PGPPNSRSPPVRRLFCLPSNTTQRGGFVLNCRRTIPMNQALTQNLEALTYNKTDHSCTSHLKQIHR

SEQ ID NO: 121754 - protein, 35 aa, Oryza sativa
  Clone ID: PAT_MRT4530_24748C.1.pep
GVWLNLDLCYMSSGRSDLDRHWMVPVATAGLLELD

SEQ ID NO: 121755 - protein, 222 aa, Oryza sativa
  Clone ID: PAT_MRT4530_24749C.1.pep
QQQANLTSLPLSSPPCDPRTTQPNPTPPQPKPKPREGREIPPPPQPPPPATSDLGCVLRRRRRRRRKEEKMFYGAMVWDPWLIVSQIVCLQCLYYLALGLLMALLVGTRVPRLTLLYLFDFATLTPRTTTGWCVIAAFLLAAAAGAAFMLYVIERAKKCLDFAATLYIIHLFICIVYGGWPASVTWWVVNIAGLAIMSLLGEYLCIRRELKEIPISRLRASV

SEQ ID NO: 121756 - protein, 77 aa, Oryza sativa
  Clone ID: PAT_MRT4530_2474C.1.pep
YCLVLDQRCGVSPTTSTLSGRVTTTAWSSTSDVAILPLPAVLTRPPRNLRELRLGTPRANKALSDPSETKDHVRSGR

SEQ ID NO: 121757 - protein, 997 aa, Oryza sativa
  Clone ID: PAT_MRT4530_24750C.1.pep
MAATVEEQMVVKAIREECPWESLPKRLQSTLHTKEEWHRRIVDYCIRKRLQWNTCFARRVCREGEYYEEMMKYLRRNLALYPYHLADYICRVSRISPFRYYCDILFEAMKNGLFSIALRISLYLQLIISDGNNLVITLKHGEQPYDSIPNFTAADALRLTGVGRNEFIDIMNKCRSKKLMWKLNKSIAKELLPTQPVDFPIDPWWGVCLVNFTIEEFKKLSEEETATIDKICKEEANSYVLFDPKVIDGLYKRGLVYFDVPVYPDDRFKVSRLEGFVSNKDQSYEDPIEELLYAVFVVSSANATVAELAATLLADLYQLQAAASFACRLGWAVKLMDADSVLEDAPTFPSNILSDDEEGSNASINSEKSGQQLLSVDAGPRKISGTAHVALVVDANVTSYLMMGSLSPGLKSHAVTLYEAGKLGDSCIAELCSDLASLEGKKFEGVLEEFANHAFSLRCFLECLQSGGVSTNVNIDKAGEAKLTTSSLQDNVTAHLTKINIEDTDEMPQQKHSGLNSSDGKMLTSSATLLESGEGMEGNDVEGSGTTELDGSTDINVVKTKRKYRVDILRCESLASLPPATLERLFLRDYDIIVSMVPLPSSSVLPGSSGPIHFGPPSYSSMTPWMKLVLYTAGDCGPLSAVFMKGQRIRLLPKPLAGCEKALIWSWDSSVVGGLGGKFEGNLVKGNLLLHCLNSMLKQSAVMVQPLSVNDLNASGNLVTVDIPLPLKSDDQSIASVIAQTNLPQEQVLNLASVLKDLSSKFELSTLGYLRLLRLHRLTESDESHLENGSYQWVPLSLEFGIPLFSPKLCERICERVVESCILQKEDLAEHYDVMQTVRRRLRELCSEYQATGPVAKLFNKRGSSKDLPRVLINTISGRWNPVNDPSAPSEHERLKLAGRQRCQTEVVGFDGTFIRSYALPPEHDEAGTKSLSEEQSSAHDGKPDTEDADSKDVLLPGVNLIFDGAELHPFDISACLQARQPLWLIAEASAASSTMI

SEQ ID NO: 121758 - protein, 62 aa, Oryza sativa
  Clone ID: PAT_MRT4530_24751C.1.pep
EEALETGYIICRIKLKKNRMVRYRPSLKNTGFKVLVSSHTNCQVISFFVNSMRLSIEKRRLE

SEQ ID NO: 121759 - protein, 93 aa, Oryza sativa
  Clone ID: PAT_MRT4530_24752C.1.pep
TPPPPGGGGFPPTWGGPCPPRSPCRSGGSSGSPGPPPSPRGRVFPTPRGRSTSPPPASGGKFPPRGFPPSRPRKTWQLASLTGLGWDGLAAPI

SEQ ID NO: 121760 - protein, 256 aa, Oryza sativa
  Clone ID: PAT_MRT4530_24753C.1.pep
MVWDPWLIVSQIVCLQCLYYLALGLLMALLVGTRVPRLTLLYLFDFATLTPRTTTGWCVIAAFLLAAAAGYICLVPAEILHPNLPFNMRANKFHSPNHPRTAYNRERELYLHFLILPAFITDRRIYYPHITHYYTFGDYCNLRGPVENNSLLPNFFMHFNSAAFMLYVIERAKKCLDFAATLYIIHLFICIVYGGWPASVTWWVVNIAGLAIMSLLGEYLCIRRELKEIPISRLRASVFMLLTDWDYRKGRVQKFN

SEQ ID NO: 121761 - protein, 70 aa, Oryza sativa
  unsure (1)..(70): unsure at all Xaa locations
  Clone ID: PAT_MRT4530_24754C.1.pep
GPLVLSAFSAPVAPCSSVVFSAXPVGSVVLGKKYEYAIVVVGEPPYAEGFGDNLNLTIPEPGPPVIQSVC

SEQ ID NO: 121762 - protein, 38 aa, Oryza sativa
  Clone ID: PAT_MRT4530_24755C.1.pep
IQHSAILSHVDASVIDPQCPVPQVLDLMPRYPMRQYRC

SEQ ID NO: 121763 - protein, 118 aa, Oryza sativa
  Clone ID: PAT_MRT4530_24756C.1.pep
MRAPTRALFLVILHSPTIELIMNPMAPTLPPPAPMAAGPTAPEVEVEHHLSSAGLPKWTSSQLRSQDIHSNGPVIDETIFADPDVMGTYCDLTYTNLISDCFVDRQPKVYETYATRPT

SEQ ID NO: 121764 - protein, 190 aa, Oryza sativa
  Clone ID: PAT_MRT4530_24757C.1.pep
MRRCRAFGGDAVPVHLPIDWLVLNGFLKRERGEHGVGGGGEGGGCRQRWPVRRLRMRKQSHLDDLTSQVAHLRRDNAHVAAALSLTTQGLLVVDAENAVLRTQAAELAARLASLNDILCSHRLTAETAMVETNNNKKKIYLPLGAILSFRKNTRHFQSENNKIMRSVSYGKFHIFCSVLEQFHVFSVYLS

SEQ ID NO: 121765 - protein, 542 aa, Oryza sativa
  unsure (1)..(542): unsure at all Xaa locations
  Clone ID: PAT_MRT4530_24758C.1.pep
MVGCSRGGGGLPAWMTAAAARVDLSSAGGGGGIPGSGASSSSSSSSQPGYSGPHQQAGVAGAAADQELGMAERALSAAGAAFVSAIIVNPLDVAKTRLQAQAAGVPYYQPSQMASLGPDACYLLFCLMLAYEVFSCLYYASQSKIAFVSAIFTYGESIYILSDFRCSPSCTRGVILGSEPICPPDCFQYKGTLDVFLKVVRQEGFGRLWRGTNAGLALAVPTVGIYLPCYDLFRNWIEDFTQSNAPGLTPYAPLVAGSVARSLACIACSPIELARTRMQAYKEFRPGVKPPGMWKTLLGVVLDDRRRRPRRSLQRRRRRRDTAQLARDVPFSAICWSTLEPVPAKWGGGGGXDQELGMAERALSAAGAAFVSAIIVNPLDVAKTRLQAQAAGVPYYQPSQMASLGPDAILSDFRCSPSCTRGVILGSEPICPPDCFQYKGTLDVFLKVVRQEGFGRLWRGTNAGLALAVPTVGIYLPCYDLFRNWIEDFTQSNAPGLTPYAPLVAGSVARSLACDCLFPLLEDLSFCHGVISSFVRDGPCII

SEQ ID NO: 121766 - protein, 60 aa, Oryza sativa
  Clone ID: PAT_MRT4530_24759C.1.pep
HSQSPGGRSDRACAAVQTGLMHRSDRRLVVGQTGQGTPVRPPLCAPVQHHEEEVEGNGEV

SEQ ID NO: 121767 - protein, 144 aa, Oryza sativa
  unsure (1)..(144): unsure at all Xaa locations
  Clone ID: PAT_MRT4530_2475C.1.pep
ARPEAATSVRPAGGSAPAPPGSTATTEXGTGAEESXGAARVDGVDGAPAVDERNGGVDXVGKDPATPKKAAPRWEVVGGDDGGGPELDGDGGKRERRRELDSGGETGRXVAITVVGSLGEGLYRVGSEKGRPEEGETGAGDPAA

SEQ ID NO: 121768 - protein, 44 aa, Oryza sativa
  unsure (1)..(44): unsure at all Xaa locations
  Clone ID: PAT_MRT4530_24760C.1.pep
IXFELDTDDHEEFTISCNHQIYLLDLVHELRFRXERNILSSILI

SEQ ID NO: 121769 - protein, 249 aa, Oryza sativa
  unsure (1)..(249): unsure at all Xaa locations
  Clone ID: PAT_MRT4530_24761C.1.pep
MATARAVRLIASRPPSTNLRSLVVVPGRRRLLSTSTEAGGAGDPSVHSGDPPSDDYPDRPPKFSGAEEATGGGDHGKNPSTAAATPSESTKERVPPFAMSDKLGSQELADPAGGSSFTQKRRRSSSSRPADSREEATPGGEEAAGRKVREEDREYYQTHKPSPLAELEFADTRKPITRATDGGSAADRLSDVPGKVAEDTADDSLARAEAMFXRGNPEWPHSRALAEMLARRRGEGDAAGSRSSAPWGS

SEQ ID NO: 121770 - protein, 555 aa, Oryza sativa
  Clone ID: PAT_MRT4530_24762C.1.pep
MAAEMISSAVVGETLNRVVSRLVSGGSHNDDGMRGNNMERLEMAHSRMKPSSTSRRGGRLKRATEECDGALRRRRCKQRAVEDEAAAVSRSSFPRRVAHAARSYVVSALIGGYDSSSSSDVRRFERVADGASEFLKLVELGGTTRPRLAFFDDPLIGRIMAGETLRYLALRGSRLYYVGARPMSFEERGVEAMVGFVVQDFEAPSRSFSVGLMMRLSESTDVLGTMIDCMQSVVTSHFRVAAEEVRKELIQLPTQDLTWVARSPYGHNKYWIDVHTTLTQWYRPNPLCCTEHQHSHLDDMGTSPSPATPLSTTYPEHVIALQLQCYVPAPTTDQSPNDDHGREEQLLPPPLNMKLSMLFIPHDTPDPEEEDDDGEKHGGSYGHHHQSRALEVIDEEERDGGACQLQDVDERLLPRAMDRLRRNAASRTYQVCLTSGHGAAHICVEKTSPSTASASGRRRRRIRRSSTGGAAAAARSAARSSVGTRQGETAEKRRERYSIEGWRESARQLLKLWVVRSSEKLRGSVSSWTTEHYYKNTPQCQFLSSNRYRFQAQHL

SEQ ID NO: 121771 - protein, 567 aa, Oryza sativa
  Clone ID: PAT_MRT4530_24763C.1.pep
MAAEMISSAVVGETLNRVVSRLVSGGSHNDDGMRGNSMERLEMAHSRMEAVLDLSTRWPVTDVSLLRWRRRLKRATEECDGALRRRRRKQRAVEDEAAAVSRSSFPRRVAHAARSYVVSALIGGYDSSSSSDVRRFERVADGASEFLKLVELGGTTRPRLAFFDDPLIGRIMAGETLRYLALRGSRLYYVGARPMSFEERGVEAMVGFVVQDFEAPSRSFSVGLMMRLSESTDVLGTMIDCMQSVVTSHFRVAAEEVRKELIQLPTQDLTWVARSPYGHNKYWIDVHTTLTQWYRPNPLCCTEHQHSHLDDMGTSPSPATPLSTTYPEHVIALQLQCYVPAPTTDQSPNDDHGREEQLLPPPLNMKLSMLFIPHDTPDPEEEDDDGEKHGGSYGHHHQSRALEVIDEEERDGGACQLQDVDERLLPRAMDRLRRNAASRTYQVCLTSGHGAAHICVEKTSPSTASASGRRRRRIRRSSTGGAAAAARSAARSSVGTRQGETAEKRRERYSIEGWRESARQLLKLWVVRSSEKLRGSVSSWTTEHYYKNTPQCQFLSSNRYRFQAQHL

SEQ ID NO: 121772 - protein, 88 aa, Oryza sativa
  Clone ID: PAT_MRT4530_24764C.1.pep
RCMRLFFFLWGQGLPHFKIFFHGRMYGKLNHFNFGARNFKSLFTTYLAKLGDKAILSFSYKHWHCKGTPRGLKQKCKLVMETSRIRLR

SEQ ID NO: 121773 - protein, 105 aa, Oryza sativa
  unsure (1)..(105): unsure at all Xaa locations
  Clone ID: PAT_MRT4530_24765C.1.pep
ATGHAPGKGXRXAPGXSEGGPXXGXTKANEXXXGRXAQXGXAPXNNGENNTGKGAXAQXNXETXRPNNENEPXRXXNXXXXXNAAXNPGTGKXXSDDDEEERRAA

SEQ ID NO: 121774 - protein, 728 aa, Oryza sativa
  Clone ID: PAT_MRT4530_24766C.1.pep
MAQPPDAAAAAAVPPPVVIDRDVWHACAVPYSGVLPGVGTLVYYIPHGHIEQCAEDPALLLSRLPDPIHPVPCTVADLVLDVDAESGEAYATISLLPGSHDDTTARRQVPAHGEPGFRFFEKQLSPADVTSNALVLPAGAEHVLPPLDIAAYQTARLFDVRDLRGKRFEFVHIWDKKRCRYMLGDLGVNDNDGWRGFVKAKRLATRDTVVFMRRGGGDGDGDGELLVGVRRAPRARGGHHPRPGVEDNKVVSEVWLAMQGVTPFEVTYYPREGTFEFVVSRDEYIGFSFSPFYPFVPGTTVHLRMNPLQIAQSISGTVRTFDHLRPWRMLEVDWDQAASPISYRIHRQVNSWQVLRQPQPAATTSAVRIRDAIVATPQVQIMALPRPPPPTTTTGMVPSDDSYAMISLFPGDCYVTHRPLPAARDPVGGQREFCFFDKKLSPSDAAANGGGSGALFVIPKPSAAEHVLPRIPDLRVTNLQGGRWEFGHTWSDADTDRRSSSHTLAAGWSAFVKAKRLCVGDTVIFMRRRPGGEPLVGVRRKPHGGMPVGIPDKHVADAWLDASSAQPFRVTYCPWQGTAEFVVRREEVEGSPPLAPGTRVRLLMNPDDARRRSQPPVYGTVRDVHCRSEWRMLEVDWDRDSPLAPTMNRRVNSWQVQPVQLALPPQGSDEEAAAATTSTAHAGDATTSAPSLALQLQTMASSSSSSAPIIPSRGSAFRIVNPRDGSQG

SEQ ID NO: 121775 - protein, 442 aa, Oryza sativa
  Clone ID: PAT_MRT4530_24767C.1.pep
MAAASSSRVLLAAVAVLAAALAGCGAGAALDDPAGLLRRAKEAEFAGWMVGLRRRIHENPELGYEEFATSELVRRELDALGIPYRHPFAVTGVVATVGTGGPPFVALRADMDALPMQESVEWEHKSKVPGKMHGCGHDAHVAMLLGSARILQEHRDELKGTVVLVFQPAEEGGGGAKKMIDDGAVENIEAIFGVHVADVVPIGVVASRPGPVMAGSGFFEAVISGKGGHAALPHHTIDPILAASNVIVSLQQLVSREADPLDSQVVTVGKFQGGGAFNVIPDSVTIGGTFRAFLKESFNQLKQRIEEVIVSQASVQRCNAVVDFLDKDRPFFPPTINSAGLHDFFVKVASEMVGPKNVRDKQPLMGAEDFAFYADAIPATYYYFLGMYNETRGPQAPHHSPYFTINEDALPYGAALQASLAARYLLEHQPPTTGKAKAHDEL

SEQ ID NO: 121776 - protein, 113 aa, Oryza sativa
  Clone ID: PAT_MRT4530_24768C.1.pep
FFFFFFFFFFFFFFFFFFFFFFFFFFLKKKRLGLNSQKKSLKLGKNLENGGKKGNQLRPFYSKNMEKKKKNWEKEKQEINKKAGWVFQKEKKGMLWEIWGFLKFKGDSLKRRT

SEQ ID NO: 121777 - protein, 39 aa, Oryza sativa
  Clone ID: PAT_MRT4530_24769C.1.pep
MDFPTSRLGARISVYSTKASQRSKSLIFREEFSDDKAGG

SEQ ID NO: 121778 - protein, 108 aa, Oryza sativa
  unsure (1)..(108): unsure at all Xaa locations
  Clone ID: PAT_MRT4530_2476C.1.pep
MGHTYLHFAGSKYNMGAXLSADDVTGVRPVTDRSFLSTTRQFSMPHICPSSYNDFLAMVAMKPGMNLAGTDVPTPGVTTPAPARDECLEALIIPTGRGETSVRPPVAT

SEQ ID NO: 121779 - protein, 689 aa, Oryza sativa
  Clone ID: PAT_MRT4530_24770C.1.pep
MDAYEATKVVFSRIQALDPDHAAKIMGLLLIQDHGDKEMIRLAFGPEALLHSVMAQARKELALLPPPQAASPSPTVPAAPSPFLLSRQTSGRSPRRGPSPSPLSVSSPSSWAPPPVFSRNNSISNGAGEEMVGLGDELISPANGGGPPSPFFGGDPLMDELQLQDQLAFLNEGGVPAGHQMPMFDGGECRSPGGGDGGLFSYNLGWANGGPGHRRSASVSELCLGGADGLGWKPCLYYARGYCKNGSACRFVHGGLPDDAAGKMDPSAVEQQCQDFLIRSKSQRLAAAAFPYSPTGSLPGSPSAATKCLSLLLQQQQQHNESQRAAAAAALMLGGDEAHKFMGRPRLERADFASMMNPGSRQIYLTFPADSTFREEDVSNYFSIYGPVHDVRIPYQQKRMFGFVTFVYPETVKLILAKGNPHFICDARVLVKPYKEKGKVPDKYRKQHQPGERVDFSSCTTPTGLDARDPFDMHQLGARMLQHSNSANEMLLRRKLEEQQQAAELQQAIELHSRRLMGLQLLDFKSRAAAAPTPIGNPFSASQTAANATGESPPDSGELGKGSGFLLAHKKAVNGADKEESTGESSSPNTDSDQSVEHNLPDSPFASPTKSAGFARDPFAPTEAEISATASTGCSATYVGINNGASNGGTNHLLPSALDMPSPKPYFFPMSRLVSDRAAIRMESGSKWK

SEQ ID NO: 121780 - protein, 102 aa, Oryza sativa
  unsure (1)..(102): unsure at all Xaa locations
  Clone ID: PAT_MRT4530_24771C.1.pep
MSTSPLVAPARTKGLASICRRGSYLAIRCRGAKNIKTDTPYLIGGDMPVHIDASGTMRTEHGAAQDPDKYVPNRHRYSPIXSRGKGLYTGDTYLGGTTGLVI

SEQ ID NO: 121781 - protein, 68 aa, Oryza sativa
  Clone ID: PAT_MRT4530_24772C.1.pep
MAQSQDNERGARLAGGRSCGQVLASGVGFNGSGFGSRKMRGGIIRIKGSLISYLFEPFIMVVVPGRQL

SEQ ID NO: 121782 - protein, 773 aa, Oryza sativa
  Clone ID: PAT_MRT4530_24773C.1.pep
MVFPSNVHSGRVVEGKGREEDGQNGSDKSSAWPAREGGGGGLPQSGGRGERGKMESPQRGGVGGARVWLAKLRKYLLGYLYQTLSSASAKIAVNSVVGAGGPCWLLQVWLNLHTIKVSKRSDLAEADFLALEPTEDDEGNEITTRRCMSFGEAACSYAGSEQSTEFFSNWFSNFYDGFLRDSRILFAYEHSNNFEYPADFRFDDINSEKFEKSREVFAMAISPCILPVGIHQGRNIQVSYEFYHPMSAARQHGMGQLPIGLFFANKIQTTGEITSALMMDRLLNIPGPPLGSIENIQLALARSKAFDQWWIEWKKHIFHESASMYLTKYLSRAGYTRLLPKGGGLAPSIIGYNAPKTSTLLYGRVREPIPSETVKRKRTKSSAADPSAAKKNKSKKQKTATADDLPSIDLDVEKFLDDEEIEEGVDDAAADISEAREQMPPADILLADVKQIQSFQPPHSPTHLHHESSEHTPSAVGSHHLKEEVEPTPAIPVSILSKNSYRLLYNFSDNQQSQYSHFQALADMFSFDIKQFFDKEEETTSLPLALLADDVKATLRDIAHRLGSSLESLVVDCGPIRARFEEIHDQIPEDQAKIISPAVYLELHRFKLEKARQRIADRRERKELEATIQANRQTINEEKSTLDEMTIDSVQANIDRLKTRRTELLAELEKCEAEISSEEQRLADFPRAIEEQRSKIRKSIKHLSDLSKSLKVILGTNVTNAQAIDDIEQIRQRAISATNKLVSGKKLSARNTCNTDKNIFCFEMCIFSYMYAP

SEQ ID NO: 121783 - protein, 73 aa, Oryza sativa
  Clone ID: PAT_MRT4530_24774C.1.pep
MGGNLSCFGSAAAGSGYGDIADDQPAAAAAYELRRSSRKVRPSDEDRLWYVGERDVDRKAAEFIAKFHASART

SEQ ID NO: 121784 - protein, 138 aa, Oryza sativa
  Clone ID: PAT_MRT4530_24775C.1.pep
INESSPSRNPCQAGEPWSFGRRIAYLCGGLADWRPARLAEPQRRTAAAVDAPPARLGASCRRRSRARRSRKPPPQPPTSTLQTRLQSPPPDAPPRLLPALAPPSADAAGSRRRRTFLSSPLDPHRPFLPHRSSPLISR

SEQ ID NO: 121785 - protein, 107 aa, Oryza sativa
  Clone ID: PAT_MRT4530_24776C.1.pep
AAGAAAANSLALCGGLADWRPARLAEPQRRTAAAVDAPPARLGASCRRRSRARRSRKPPPQPPTSTLQTRLQSPPPDAPPRLLPALAPPSADAAGSRRRRTAARPRR

SEQ ID NO: 121786 - protein, 508 aa, Oryza sativa
  Clone ID: PAT_MRT4530_24777C.1.pep
GPITCAVWRRGRAAVRRRRLPAASAEGGAKAGRSLGSASGGGDCSLVCSVLVGGCGRGFRLRRARLLLLQEAPRRAGGASTAAAVRRWGSARRAGRQSTRPPYSEKSMAWGGLFLSFSRPSQDQQKSCLSAAGGFNYDAPLHGASRPKSVAKLTAGDTEASDKALVERGFFVNRSRVLVGSGTTTFNHAKSALLSWKHLALGWANVEPDTPVKAGTRFCICYKELIPWVMLPLQIAYVTDGNGGNSSGHGKGCVFAYGSGTLQGHLLAGEERFSVQLDEDDQVWYEVMSFSKPAHILSSLCYPYVQLRQKHFAHQSGQALLRHVASRSRDTRFPWFVTKSKGRMKDKHKRNPTVPRNRRPTLVGMSRSDPDAQTQVINGGETKPIGIIREEEEEEAVGQAPAMSASPEFYRPSPPAFSPSCAAGTSTTEVDEYSCCRTPTPGIREPATCPPAPRKPRPVACRKLLFDPAQQQGKGKAISLRLDELERLFRPITNNANLHLQTNKPTHP

SEQ ID NO: 121787 - protein, 180 aa, Oryza sativa
  unsure (1)..(180): unsure at all Xaa locations
  Clone ID: PAT_MRT4530_24778C.1.pep
DTGDVGPHAFNGEGFGDTRAPGTQSRACPERSSRFQXVERPITSHHHDGTGHTCRTPPDTRVERVWLAAVPSVIRPVTYRSHASQARSTPHLMQRGALAPLALNAIRXTPGSVHLTSYARWPHGDXGSPTPQARKGRLPPIHGTDPLGGWGERHVKVGGGXLPFKFXYPGPISPTTGISS

SEQ ID NO: 121788 - protein, 51 aa, Oryza sativa
  unsure (1)..(51): unsure at all Xaa locations
  Clone ID: PAT_MRT4530_24779C.1.pep
LKVGWVGIWEQIXSKXENXSVEWVMVSWTPRQIHMNCFFXFVENLDSKVQN

SEQ ID NO: 121789 - protein, 67 aa, Oryza sativa
  Clone ID: PAT_MRT4530_2477C.1.pep
PGPRIIGAPRPWEKAPGPTRVENTVEVGRNVSPGRASVGNGKKKIPFWFPQGLTEGGSTPPPWIYKF

SEQ ID NO: 121790 - protein, 276 aa, Oryza sativa
  unsure (1)..(276): unsure at all Xaa locations
  Clone ID: PAT_MRT4530_24780C.1.pep
MAAGVDGDTAAAAAAGGGVVVVFDFDRTIIEWDSDDWVITKLGASDAFRRLRPTMRWNPLMDRMMVELHAQGRSADDIRDCLKSAPLDAHVLSAITTASALGCDLRVASDANAFFIETVLEHHGVLGCFSEISTNPARVDGNGRLRISPFHDPDDSSPHGCSLCPENMCKGKIIERIQATANGKRHFIYIGDGRGDYCPSLKLGEGDYVMPKEKYPLWNLISSNKQLLKAEVHPWNNGEELEQTLLKLVNKLIXPPAQPSQFEYKCDMRKACMVPR

SEQ ID NO: 121791 - protein, 156 aa, Oryza sativa
  Clone ID: PAT_MRT4530_24781C.1.pep
MDVNGIITVLITYELLVRRVSHRPHYPDIAGTTFHPRVAGHAARCLLLRLRPPLTSAGRNGQPRCSSLQYPNGLVPPSHSDLVAPVLITAGLIDAMKGIGKEENGCCSSQGSEPGKKTQIWLRTFESPKMAAVANYVASLRLHGLEPRLNFLALII

SEQ ID NO: 121792 - protein, 398 aa, Oryza sativa
  unsure (1)..(398): unsure at all Xaa locations
  Clone ID: PAT_MRT4530_24782C.1.pep
MTRSSVPLDGSFLPPSRITNERFAGLPRKFMPTTSSGRAMIILGEACPTLRYPERPVFFLLFVMIQMAHLTLNAVLTLAIFAHLCEMFIGVRPCLRLFRWFLTMQLVSPATEADGCYFXPRANTQQHYFGQTLRKKWDDWKHDWFYTVLPDNVHLWLPTAPPVQTSSWRSLSVLGDTYDAVIDYLAGLQYKGLTGAMVFSDYTRCRIAPLRERVRGAWSYTGSDDSIRTHPGQTWDXNYANLKLVVQWVLSLRDVEPSLIPHNILPXILAIMQAIGAGGDRSGGDGAGGSHVLGDRYLSARGGHGGMSTGGGSGSSRPSDPKGKRKQRDSSPSPSRPCGGGAECAVGRRPMGTEPAQPSMTAXLVAGRRKKWPCKTAETKPCRGEFIKSPEWSSSATP

SEQ ID NO: 121793 - protein, 101 aa, Oryza sativa
  unsure (1)..(101): unsure at all Xaa locations
  Clone ID: PAT_MRT4530_24783C.1.pep
PNLYKNHRLRLFYLNLAYILVPTILVGDIGLGVSGLEGGGCPPMPRGPPPRGVRPEVTTYGGLGVRLPXLWRPKRSRYAAFNVACSALNRSVTGRMTDETG

SEQ ID NO: 121794 - protein, 100 aa, Oryza sativa
  Clone ID: PAT_MRT4530_24784C.1.pep
IFFKKNTPLSSLKSVHTPIIGDMGPGVLGLEGGARSPMPRGPLPRGVRPEVTTYGGLGVRLQVPTYPHLWRPERSRHAAFNAACDALNRSVTGRITDGTD

SEQ ID NO: 121795 - protein, 337 aa, Oryza sativa
  Clone ID: PAT_MRT4530_24785C.1.pep
MAASISPVVISIGRPCSAGVPPGAPRRRGGRGGDGLPLPPATASMTETPLKAREELGVDGGGAGGGGGGGEGGGGGGVGSGSGARDVAVAGGGSGGGVGGGSDFLVQEQEDQGGNQTIRMQPQQGRFFGRGKVLDSVPSIRKAPSFAKPLPEKKGSMKFEQEQAIPTVPPNVRPTALFPREKKESKKFDQDQAIPRVPPDVRPTASFSREKKESKKFEQDKANQMPSLASAPTSSYSSEAEAMADTYNMTMDTIVEWEAEKKAKAKRQMELKEGDNSERKREKALEEYNDEITRINKVAAASRLTAEEKRRSAERKVREKAERIRVTGKLPGACGCF

SEQ ID NO: 121796 - protein, 98 aa, Oryza sativa
  Clone ID: PAT_MRT4530_24786C.1.pep
FDPQSKKIKNKHLIDRSIMRFTAVVAAIVAVILLVFLVSGGMAARPMVNMEKTTAVPVVRKSGVVVESWTMESSSLPSGCTNGNGAGGYCRPPAPAGH

SEQ ID NO: 121797 - protein, 86 aa, Oryza sativa
  Clone ID: PAT_MRT4530_24787C.1.pep
FAIFYFTWLNFFPSRYRHCWYPFIYVTLFTYSTHPSFPFMLSFSILCAIVTSSYFTHHFTFFILASVLYSFFFVFPSFFFFFFFFF

SEQ ID NO: 121798 - protein, 165 aa, Oryza sativa
  Clone ID: PAT_MRT4530_24788C.1.pep
MHPIIATLLLAAAIAPGLTVGSPSLINETCTATSNYGYCLGVLSADPAGASATDKRGLAIAAANITMRNVTSTVRVLTELVEELKLCIKYYQDMDDLVASAIDDLRVGRPAVTSFYKLHRASDEPGNCDIMLFEGSAHKNPVSSENMYNEAISKLTSDIVYQLVH

SEQ ID NO: 121799 - protein, 565 aa, Oryza sativa
  Clone ID: PAT_MRT4530_24789C.1.pep
MASSAFKSTTRRTLHPAADDRPPARPRKAPPPCPRRSRSASVEPRARGIGEYAAGNTRTNPLFDDSASPPPPQPQVDTEAAGCRGGEARRERGREVARNGSCAGGSGRARSVSLAPRGRGADSSPSWGNGDGGGGRRASRAPSVAVDLQPYRGDEKRREIETRSLHSISTNPLLASSVLAKFEQSDAEIRDMSIEFQFWESMHSVSSSVEVIWQSNHSNVPVQQVIEIPPEFDPDSSEFVSDISDYTTEFKKEEILHIPFEFDLDRADLAPDIEHHSIELQREQMEIPLDFDPDSAELSPDITEYTTKLKQSHERARKLRADLAVEEQREQELSRVLKGIVTTPNFTEAHKRRPRRKSSVERLKVSKHLAEEAMNYFEECVSISTLDSTDFSSLEDPQINSVVNIPQKSRNTSFNKGGSSIAEIHYPTDRHWHNEESDNQTQCSVSLTGSDVSGGRTFSHNMMTPVSRTTNNSSDDLDGFDTPKSRSSCFSFTHEPTKTVEGDDVQQYLRSFGRGISKDLREIRSNYCDDDYVFQKMNADLIMDTVTFKNMVNFGGLLICNIRRY

SEQ ID NO: 121800 - protein, 165 aa, Oryza sativa
  Clone ID: PAT_MRT4530_2478C.1.pep
RHACGLGEHSGAHLPAFIAGLDERATPHLMRRSARLSGPRLVAVCDRSQTAGAGVLTPGVGMSVPIHQNTGVGCYASQRPEPVYVARVLRISSLADVPQIEGEESHLAPPAESAKGGLRGLPFCEHNRVFVNSVKFPTNLSFRYAGLDLDIFIYNSMKISNFFRF

SEQ ID NO: 121801 - protein, 169 aa, Oryza sativa
  Clone ID: PAT_MRT4530_24790C.1.pep
RHDIIHYNLKSSNILLDGSGDAKVGDYGLAKLLPMLDRYVLSSKVQSALGYMAPEFACRTVKITEKCDVYGFGALALEILTGRTPVQYMEDDVIVLCDVVRAALDEGKVEECVDERLCGKFPLEEAVPIMKLGLVCTSQVPSNRPDMSEVVNILELIRCPQDSPETELG

SEQ ID NO: 121802 - protein, 119 aa, Oryza sativa
  unsure (1)..(119): unsure at all Xaa locations
  Clone ID: PAT_MRT4530_24791C.1.pep
GEYGWTANRGGFFKAQALLDSSMCGYMSSKKNMEINPENAIMEELSKRAEADKNDKPAKDHVMLLLETALLTSGFSLDDPNTFGSRIHRMLKLAXSIDEDEEAPEADTDMPPLEDDPGE

SEQ ID NO: 121803 - protein, 131 aa, Oryza sativa
  Clone ID: PAT_MRT4530_24792C.1.pep
MASTTKVVAPLLAFTLLILAVAARGCEPNCSGGPVIPTPTTPSYDRHGHCPIDALKLRVCANVLNGLVGVKIGAGPNECCSLLQGIADLDAAVCLCTAVKANVLGINLNLPVDLSLILNKCNKIYPSGFTC

SEQ ID NO: 121804 - protein, 159 aa, Oryza sativa
  Clone ID: PAT_MRT4530_24793C.1.pep
TPSTSFLLQSSSSLHHHHYSPLLPYSPRREGDHHAHALRYSRRARPRPPPPAAAASPMAKSTPAAAAAAPEEATVVELRLRLRRLVVVATAGGVGGGEAFDEAASALAALRDAELGPPPKDRPSASADRTRSGHTEAVAVPEQFLCPISSEIMRDHVLL

SEQ ID NO: 121805 - protein, 67 aa, Oryza sativa
  Clone ID: PAT_MRT4530_24794C.1.pep
LHQTEPIKYEEDTERSFFYVAQHQIILVLRHLAMFRASEFLIVMGNLNALLIYTSVHCCGTGIISSI

SEQ ID NO: 121806 - protein, 80 aa, Oryza sativa
  Clone ID: PAT_MRT4530_24795C.1.pep
QLSALCGVLKDHASHFQYTALYILQHRLEPVLFIHTLYARYVKFTEHCHICARVAVYLCDHIDQVSSIHLSPHDTLLNSS

SEQ ID NO: 121807 - protein, 97 aa, Oryza sativa
  Clone ID: PAT_MRT4530_24796C.1.pep
LTAITIIIIMTTFWNRRNWRRIRPNHHLLVLHLHHRRCCDQIIRSCSMHASSLHKISSKNTHLTHTLCTKQDLTTYLDPFLIFFLYCSCSHGHHHLD

SEQ ID NO: 121808 - protein, 69 aa, Oryza sativa
  Clone ID: PAT_MRT4530_24797C.1.pep
ERFLLFLEAINGDRFCRLTTAGRTFGNNGHTLHWQMLKEEPTLTAQQGLMLYNKGYCHLKDTIQLHMES

SEQ ID NO: 121809 - protein, 64 aa, Oryza sativa
  Clone ID: PAT_MRT4530_24798C.1.pep
VGEPSIALSVDQNQYHNQVDNAMTAISFEKESFFRYLLWGRLRLHRCLLSLPCPLELMTKPTHL

SEQ ID NO: 121810 - protein, 96 aa, Oryza sativa
  unsure (1)..(96): unsure at all Xaa locations
  Clone ID: PAT_MRT4530_24799C.1.pep
METHGTSCGMWTHGPTCPCGGQFQPMRYEHKTGWLLQHYGIYSSSSSQDDGMHCRTIHGIKENIKXKAANTLHGEPMHTLGGTTLHLQNSWFTAMP

SEQ ID NO: 121811 - protein, 109 aa, Oryza sativa
  Clone ID: PAT_MRT4530_2479C.1.pep
SFHSIPPGWRSGDRGYHYAPDPRDSSWPGSPAGRGAYWCDYSPDLGPHSTEDLPDSRSPTSMLSITLLNLPSSPTLRLKVRAHIWTVCTLQRSCAVDIESMNILFNSRK

SEQ ID NO: 121812 - protein, 87 aa, Oryza sativa
  unsure (1)..(87): unsure at all Xaa locations
  Clone ID: PAT_MRT4530_247C.1.pep
GVIIXEXELXXPXXSLXXXKKXXXRXXXXFWPXXXXKXGXDIXMYXKRFXXEXXKXGFXVSWTXIFPRECPTXLXFNSXHLGILQXX

SEQ ID NO: 121813 - protein, 480 aa, Oryza sativa
  unsure (1)..(480): unsure at all Xaa locations
  Clone ID: PAT_MRT4530_24800C.1.pep
SGGPDLPPYGGARRSAVDLGAAVAATVSGGGGGGLGEREALLAFKRGITGDPAGRLTSWKRGSHDCCQWRGVRCSNLTGHVLELHLRNMGPAGRFPRFVSSLRNLIYINFSGMPLTGMVPPQLGNITKLQYLDLSHGIGIASQSFSQLNLTRLEKLDLSYNNFNQPLASCWFWNLTSLTYLDLIMNILPGQFPDSLGDMKALQVFRFSSNGHSIIMPNLLQNLCNLEILDLGGNNITGTLPTGVGKFTSLDTLDLSHNQLTGSVPYEISMLTSLAKIDLSLNNLTGEITEEHLAGLKMSLERLYLGSNQITGVIPILPPNLTWLEIQNNMLSGSVASKTFGSAPQLGFMDLSSNNIKGHIPGSICELQHLQYLNLANNHLEGEFPQCIGMTELQHFILNNNSLSGKVPSFLKGCKQLKYLDLSQNKFHGRLPSXIGNFSEVQILILNNNSFSGHIPTSITNLAKLARLNLANNNISGVLP

SEQ ID NO: 121814 - protein, 645 aa, Oryza sativa
  Clone ID: PAT_MRT4530_24801C.1.pep
MDPTQKFLLFLLVGVAATLSLATNSPVPQWPASCTPREREALLAFKRGITGDPAGRLTSWKRGSHDCCQWRGVRCSNLTGHVLELHLRNNFPRYDEATALVGHISTSLISLEHLEHLDLSNNNLVGPAGRFPRFVSSLRNLIYINFSGMPLTGMVPPQLGNITKLQYLDLSHGIGMYSTDIQWLTNLPALRYLGLSNVNLSRVSDWPRVVNMNSYLIVLDLSGCSLTSASQSFSQLNLTRLEKLDLSYNNFNQPLASCWFWNLTSLTYLDLIMNILPGQFPDSLGDMKALQVFRFSSNGHSIIMPNLLQNLCNLEILDLGGLSSCNITELLDSLMHCLTKRIRKLYLWDNNITGTLPTGVGKFTSLDTLDLSHNQLTGSVPYEISMLTSLAKIDLSLNNLTGEITEEHLAGLKSLKSLNLYYNPYLKIVLGDEWLPPFRLEVARFGSCQLGPMFPSWLQWMVNIKELDIWSTGITDQLPHWFWTTFSKATDLVISSNNISGSLPANMETMSLERLYLGSNQITGVIPILPPNLTWLEIQNNMLSGSVASKTFGSAPQLGFMDLSSNNIKGHIPGSICELQHLQYLNLANNHLEGEFPQCIGMTELQHFILNNNSLSGKVPSFLKGCKQLKYLDLSQNKFHGRLPS

SEQ ID NO: 121815 - protein, 42 aa, Oryza sativa
  Clone ID: PAT_MRT4530_24802C.1.pep
SSRIHFRLKMMYFSRVGRGSLTLAGSQKLLSRLGNISFSSPQ

SEQ ID NO: 121816 - protein, 378 aa, Oryza sativa
  Clone ID: PAT_MRT4530_24803C.1.pep
MATAVASQVAVSAPAGSDRGLRSSGIQGSNNISFSNKSWVGTTLAWESKATRPRHANKVLCMSVQQASESKVAVKPLDLESANEPPLNTYKPKEPYTATIVSVERIVGPKAPGETCHIVIDHGGNVPYWEGQSYGIIPPGENPKKPGAPHNVRLYSIASTRYGDSFDGRTTSLCVRRAVYYDPETGKEDPSKNGVCSNFLCNSKPGDKVKVTGPSGKIMLLPEEDPNATHIMIATGTGVAPFRGYLRRMFMEDVPKYRFGGLAWLFLGVANTDSLLYDEEFTSYLKQYPDNFRYDKALSREQKNKNAGKMYVQDKIEEYSDEIFKLLDGGAHIYFCGLKGMMPGIQDTLKKVAEQRGESWEQKLSQLKKNKQWHVEVY

SEQ ID NO: 121817 - protein, 198 aa, Oryza sativa
  Clone ID: PAT_MRT4530_24804C.1.pep
MAAAGPILQRRSISGMGEAEEMWSAVAEASAVEREFENRLVPNDYIVIMNNGRDKETLGEGLRVMEDHPGCPSQGGGNDEDILYYYPLAKTQSRAATVEIEPFPKADVSAGRRGADMWDPPADRTDDGGGNPGLGSASKPIGRPELAAAAAVGMALTRARGEGVPATNLDGGGADEVDLGRAKLTAATAQDGGESSGG

SEQ ID NO: 121818 - protein, 53 aa, Oryza sativa
  Clone ID: PAT_MRT4530_24805C.1.pep
ICCFTIRPCLCNSWDAPAHGVYFMALVFYQCLGMIVVQSIMCWHAIVYPGGLI

SEQ ID NO: 121819 - protein, 308 aa, Oryza sativa
  Clone ID: PAT_MRT4530_24806C.1.pep
MGYKLEAHGCAYRGVFTCAPKAREKRFQELPAFWEMSNPGDGIKWTYMPIISSIELSKSSSILIFISSMDKMLTRIINLILRKTDIFDTKEMAIAPPRIQPVSAHLHSSASPKDSDHQEKKQVCYTVWMKSLVFNGRGCTVYGQDGRAAYRVDNYACRRSREVFVMDSGGKTLLKLLKKNFGVFKTWQGYSCCNNNNGDAAATMEDQPWFRVQKEYKILKKEGRYNVRAAVEVALTGEVYRIIDGASHKSEYRIVGAGGEVLAEIRRKQTDAGVVLGDDVLTLTVGPTADRLLVVGLMVVCGLLDRCI

SEQ ID NO: 121820 - protein, 305 aa, Oryza sativa
  unsure (1)..(305): unsure at all Xaa locations
  Clone ID: PAT_MRT4530_24807C.1.pep
MKYVDWIFMRHKNNAVFNEVIKIIGQFYATAYFGTTKKGNHFIKWMTLGKSYRVTMGQFAAALELDPEDLTRPHLFDLEALPMHRTSFMYEKGTPSNCMGTTKGLHPNYKECDHKVFHPHXAPSTSLAAPPPPSRSTIGSASAASSVXPQRTSSSSPIKEALQAIFCMCAETSKKVKKIERRQKADWRAAGKDASDVLEDEAYEDPFAAYEAARDVAAGEGPSHSFREDSSTSSDDDDDDDDDGDELPDIESPRTDPEDAVDSAAEESDAEDSDAATEKAASGDESKQVPSDAAIEIVPSDEDED

SEQ ID NO: 121821 - protein, 273 aa, Oryza sativa
  Clone ID: PAT_MRT4530_24808C.1.pep
MSGNDDKSQAAAERIKAQALSAAKGLSRTQAERAAAAAARNVNAYGQKEEGPSRWQERKEAKRQMYLMSTEKAVILGVKPKAAQTSSSSGGAYTQCQKCFQPGHWTYECKNERVYISRPSRTQQLKNPKLKKTAAPVSYQFQNPDLEKEKEEERKLMKAKLKKEKSEKSKRKSKRKYRSRSDSDSSEASVFDSDSESSVTGSEYSSGSSSSYSSSDSEDKKRRPKRKQQKRRHRRETSSSASSESDSESASASDSDSDDKGSRKKSRKRSARR

SEQ ID NO: 121822 - protein, 80 aa, Oryza sativa
  Clone ID: PAT_MRT4530_24809C.1.pep
MWGRSGEAVRLGWQGRGERQAWRRGGYGRRTVLGERHGWQRRGEQRAWRRGGRPLRARQSRHMVGCHKAIVPEDGAVGGW

SEQ ID NO: 121823 - protein, 142 aa, Oryza sativa
  Clone ID: PAT_MRT4530_2480C.1.pep
CRFHGYRILPRSDVYTCTRPLDISTARFFMVSGFQNIKTLEVPTNGVHFRSFQSLNEPNKNNTSAQMSSESHDLLTADIEKKNASLQINCANLIRGDTKKRSLYFYIALSSMVMKQHPCPHQCTPTTQNVQQRIDVSARTCE

SEQ ID NO: 121824 - protein, 361 aa, Oryza sativa
  Clone ID: PAT_MRT4530_24810C.1.pep
MESMEGNGGGRLVVTELSHIKELVRQLEGHLGGSGSPDLCKHLASQIFSVTERSIGMIRSGHFDGHRKRSAAAVAAGDLDSATPSPLSDVSDLPFKATKKRKTSTEKKRHQIRVSSTGGVENPPVDDGHSWRKYGQKEILGAKHPRGYYRCTHRHSQGCMATKQVQRTDEDATVFDVIYHGEHTCVHKAVAAGAGKPETETDTNAAAESRLHDLSSGLTVKIEGLTAPPQQQQGGGGWNAMPPFCLSSPVSGLAPPDQHNPFSAPSTPENRLAAAASSAASPATSDSMAAAPFHQAAAGGGDEAWRDAELQEVVSALVAATTTTATAQPAPATAMVDADLSALDAFEFDPGFTIDITSFFA

SEQ ID NO: 121825 - protein, 382 aa, Oryza sativa
  unsure (1)..(382): unsure at all Xaa locations
  Clone ID: PAT_MRT4530_24811C.1.pep
REKRVCVDCRNVDGCGLLRSGEPVAGDAGVLRRTAGXHTQSWRPPPPPFFPASAAVKCRRPTLPVARSVGPPEKHRPVLNIPPTALLYQVPPPEGKERWEIKDDEGNVQLWLQVPGLTEDDLEITTTDELLEIKRKAGRGDPRRLDDVQGVGSFHLRLLLTKEFVSSQVTAELNAGMLEVTIPKNTNLRRTVVRIGQQSQSPAAVRTAQPKVVDPPPANSPPKNNNHRRAESVQSKKDISVEPDCLSCERATGSTILPEVEMCQRRMKLLQGSGRNMPTTDDPTARELPKNNLAGGRNVPPKDDPIAREPPKNNLXGGRNVAPKDDPPANEGTXGNNLAGGTGVPTKDPPSNANEPPKNPPGTREANLGWASQPWWACENKD

SEQ ID NO: 121826 - protein, 93 aa, Oryza sativa
  unsure (1)..(93): unsure at all Xaa locations
  Clone ID: PAT_MRT4530_24812C.1.pep
KKGGLXFQIKKEKILKRQSGGAFXILTQMVKKQFFPKTLNLEKQRFFQTRRFKNTANKINLSSXKKKIIPSPXREGXXXSLKSPPPXFYFLLV

SEQ ID NO: 121827 - protein, 77 aa, Oryza sativa
  Clone ID: PAT_MRT4530_24813C.1.pep
PATSQPALTLCSTDTHPKTFFAHPLMSRKQELRDNRPVNSSMAPAVTKLGASLLRAVTIEAVRRWSRPAGQTTACCP

SEQ ID NO: 121828 - protein, 435 aa, Oryza sativa
  Clone ID: PAT_MRT4530_24814C.1.pep
MERDTSSSDVSASHVGRARQRRRPTEATADGNRTNGPALLVNDQNKYKSMLIRTYSTVWMIGGFVLIVYMGHLYIWAMVVVIQIFMAKELFNLLRKSSEEKQLPGFRLLNWHFFFTAMLFTYGRFLSRQLVNTVTSDHLLYKVVSGLIKYQMFICYFLYIAGFVWFILTLKKKTYKYQFKQYAWTHMILLTVFAQSSFTVANIFEGMFWFLLPASLIVINDIAAYLFGFFLGRTPLIKLSPKKTWEGFIGASVTTIISAFVLANVMGRFQWLTCPRKVRYHFLWNVIDLSTGWLRCDPGPMFKPEHYSLGEWVPKGFPWKEVVLLPVQWHALALGLFASIIAPFGGFFASGFKRAFKIKDFGDSIPGHGGITDRMDCQMVMAVFAYIYHQSFISPQNYSVELILEQILRNLTFEEQKFLYQQLGEIYRERQLMQS

SEQ ID NO: 121829 - protein, 162 aa, Oryza sativa
  Clone ID: PAT_MRT4530_24815C.1.pep
PRVRSIRGGVQWAAIPRWRKRRRAAASGGRHYCIPSTSIPYPHGGWRSCFRLAMSPVSPPLPRCSSLLMGMGGSGMGSSLEDVPLCRCWCDPRRPRTNGIDGDRFVQHRLLVSTIVPGLVVVLARQGGHQMQTVNLVRAVFSVAFCVVLCSSEQIITYFTYY

SEQ ID NO: 121830 - protein, 86 aa, Oryza sativa
  Clone ID: PAT_MRT4530_24816C.1.pep
GPPFGGGNPTNPVHARKALRRAKSKFPGPPKFFQGKKWGFPKFTPDEYVRLKSGGKTLPDGVNAKPLGSQGPPSPGAPGKPFLSAA

SEQ ID NO: 121831 - protein, 197 aa, Oryza sativa
  Clone ID: PAT_MRT4530_24817C.1.pep
MQQGRGRRRMMQGSSYYAVLGVHPGASAAEIRAAYHRLAMKWHPDKITSGRVDAEEAKSRFQQVHEAYQVLSDEKRRALYDSGMYDPLDDDQEEDVEGFHDFLQEMVSLMATVGREEPVYCLDELRSMLDGMMQDFASSELPSPSGGFFAGAPSSPFADTGAAQQQRGVGSASARAHAHPQVVGNSACLSRMAFSSY

SEQ ID NO: 121832 - protein, 66 aa, Oryza sativa
  Clone ID: PAT_MRT4530_24818C.1.pep
PPRGLIPFGEPSPTTTSPGVQWSFPKTSLPFGGLLSTFFLVREESPVVAFPSDSDLIWPKSLRPPS

SEQ ID NO: 121833 - protein, 864 aa, Oryza sativa
  unsure (1)..(864): unsure at all Xaa locations
  Clone ID: PAT_MRT4530_24819C.1.pep
MSKDIAPIGEELCLVDSGTTNSILREIKYFQTLKKREGKVLTIAGSDTVIVGSGRAIITLPMGTQITIEDALLYPDSTRTLLSYRDIRQNGFHIETHMDNREEFLLLTKQNGYGKRICEKIPSLTSGLYYTYIKPIAHVAYKVIFQNVDAFHTWHDRLGHPEXEPLKFLECIQGDICGPIVPRXDRSGYLFIARFADSIFDEEHFPALGGEFKYQKECQEIDWDAQGIPVSDPRTTEAELQVQKIIHLQRLANNLPDAFTNFKGVTKSFIPAQNAPERVEVPNKTTQLPLTKKRGRSMATQRETIANKQRKTVNANQPLVGTHQIDTICQADHDSLQPSSVVHNAETRNSEDHRHIVSGDHNESIRVDEIAINYSETRESFDRRATIVDTNFSEQIAECLQVDPEPRSIKECQKRFDWNKWKDAIDIELASLYKRDVFSAVMPTPRGIFPMGYKWVFVRKRNENNEVMDVVTAYLYGSLDSDIYMKVPGGIDIPNQKGYTKNDDCPCVFIKKSPTGFCIISVYVDDLSIIGNTQDINEARHHLKTEFEMKDLGQTKFCLGLQLEHLPSGILVHQSAYTQKILEKFNMDKSYPSKIPMVVRSLDVEKDPFRPKEDGEDVLGPDFPYLSAIGALMYLANSTRPDIAFSVNLLARYSAAPTKHHWTGVKNVFRYLNGTRDLGLFFKKNQDSTLIGYTDASYLSDPHNARSQTGFVFLQGGTAISWKSSKQTLVATSTNHSEIIALYEASRECVWLRRMVNHILTSCGIGSLESPTIIYEDNAACVVQMKTGYIKSNITKHIAPKLFYPHELQQHGEINILQTKSCDNLADLFTKSLPYSTFFKYVEGIGMRRLKNLQDSRGVSSSGK

SEQ ID NO: 121834 - protein, 140 aa, Oryza sativa
  unsure (1)..(140): unsure at all Xaa locations
  Clone ID: PAT_MRT4530_2481C.1.pep
RSLGLLTGRPRRPPFVGLGLLFYLVRGHHMGLXLPKKGNILFIMRASLQPEVTFDKQSARLLPRSSAFPGDAHFNLHLMASDFLAMLVLKPRMDLTGTDIPTPGVSTPAPARDESQEALIILTGQGEARDRPPVATHPAI

SEQ ID NO: 121835 - protein, 112 aa, Oryza sativa
  Clone ID: PAT_MRT4530_24820C.1.pep
REPKRKPQIKQQGENPQRGPKNKERNPRARGRKARKRKGKGRGGYTPPRGKKAPEGGGPRTKPKGPGVRGGARGGASLKKTTTEKGNDAQGQKVGQPPGFPRNRLEKRGPRN

SEQ ID NO: 121836 - protein, 935 aa, Oryza sativa
  Clone ID: PAT_MRT4530_24821C.1.pep
MGTQITIKDALLYLDSTRTLLSYRDIRQNGFHIETHMDNREEFLLLTKQNRYGKCICEKIPSLTSGLYYTYIKPIAHVTYKVIFQNVDAFHTWHDRLGHPSIGMMRKIIGNSIGHHLITDKFPKSSDFVCTACATGKLILRPSYLKIRAEPLKFLERIQGDIYGPIVPRSGPFRYFMVLIDASTRWSHVCLLSTRNHAFAKLMSQIIRLKANYPEHRIQSIRMDNAAEFTSHAFDDYCMALGIQVQHFVPYVHTQNGLAESLIKRIKLITRPLLMNCKLPSSCWGHAVLHAADLVQLRPTAYHETSPMQLVRGNLPNISHLRGDFKYQKECQEIDWDAQGVPASDPRTTETELQVQKIIHLQRLANNLPDAFTNYKGVTKSFIPAQNAPERVEVPNKTTQLPLTKKRGRSMATQRETIANKQRKTVNANQPLVGTHQIDTIYQADRDSLQPSSVVHNAETRNSEDHRHIVLGDHDESIRVDEIAINYSETGESFDRRATIVDINFSEQIADCLQVDPEPRSIKECQKRSDWNKWKDTIDAELASLYKRDVFSAVMPTPRGIFPVGYKWVFVRKRNENNEVVRYKARLVAQGFTQKPGVDFNETYSPVMSGITFRYLISLAVQNRLFMQLMDVVTAYLYGSLDYDIYMKVLDGIDIPNQKKSLYGLKQSGRMWYNRLSEFLSLKGYTKNDDCPCVFIKKSPTGFCIISVYVDDLNIIGNTQDINEARHHLKTEFEMKDLGQTKFCLGLQLEHLPSGILVHQSAYIQKILEKFNMDKSYPSKTPMVVRSLDVEKDPFRPKEDGEDVLGPDFPYLSAIGALMYLANSTRPDIAFSITNRIRILQGGTAISWKSSKQTLVATSTNHSEIIALYEASCECVWLRRMVNHILTSCGIGSLESPTIIYEDNAACVVQMETGYIKSNITKHIAPKLFYPHELQ

SEQ ID NO: 121837 - protein, 746 aa, Oryza sativa
  Clone ID: PAT_MRT4530_24822C.1.pep
MAATTRSPSPELRKPNHRAIEFASTSGSYISPREGGKYMPRRANVIFTEAQFSLKTPGTPELLSLLITLHSERMGTRVHGTGLDTVKHVGFRIVSFGSRQATQRETIANKQRKTVNANQPLVGTHRIDTIYQADRDSLQPSSVVHNAKTRNSEDHRHIVSGDHGESVRVDEIAINYSETGESFDRRATIVDTNFFEQIADCLQVDPEPRSIKECQKRSDWNKWKDAIDTELASLYKRDVFSAVMPTPRGIFPGGYKWVFVRKQNENNEVLMDVVTAYLYGSLDSDIYMKVPDGTISRIRSAYTHKILEKFNMDKSYPSKTPMVVRSLDVKKDPFRPKEDGEDVLGPDFPYLSAIGALMYLANSTRPDIAFSVNLLARYSAAPTKRHWTGVKNVFQYLNGTRDLGLFFKKDQDPTLIGYTDAGYLSDPHNAISQTGFVFLQGGTAISRKSSKQTLVATSTNHSEIIALYEASRECVWLRRMMETGYIKSNITKHIAPKFFYPHELQQHGEINILQTKSCDNLADLFTKSLPYSTFFKCVEGIDTIWFPLRTEKSALERLDGYQLRLRKNEEDLRHKDDKRRVVANALKKTNAENKTLTGEVKSLRAELETANKRDTEWERQLAAAEEKIKSLEARLVPAEAVASTMAPAAESAKQAYYTLRLALNDLGARAKGAPGDDGMAFDFSEWTQEGAGSVVEVASAYGDCCARVLVGFVLSLLHEHGCGHVENFSELVNGTGPKTPRSPERL

SEQ ID NO: 121838 - protein, 808 aa, Oryza sativa
  unsure (1)..(808): unsure at all Xaa locations
  Clone ID: PAT_MRT4530_24823C.1.pep
VDAFHTWHDRLGHPXGIGMMRKIIGNSVGHHLITDKFPKSSDFVCTACATGKLILRPSYLKIRAEPLKFLERIQGDICGPIVPRSGPFRIQSIRMNNAAEFTSHAFDDYCMALGIQVQHSVPYVHTQNGLAESLIKRIKLIAQPLLMNCKLPSSCWGHAVLHAADLVQLRPTAYHETFPMQLVRENPPSISHLRKFGCAVYIPISPPQRTAMGPHRKVGIYVGFKSLSIIKYLEPLTGDLFTARFADSIIDEEHFPALGGDFKYQKECQEIDWDAQGVPASDPRTTEIELQVQKIIHLQRLANNLPDAFTNYKCVTKSFIPAQNAPERVEVPNKTTQLPLTKKRGRSMATQRETIANKQRKTVNANQPLVVTHQIDTIYQADRDSLQPSLVVHNAETRNLEDHIHIVSGDHDESIRVDEIAINYSETGESFDRRATIVDINFSEQIADCLQVDPEPRSIKECQKRSDWNKWKDAIDAELASLYKRDVFSAVMPTPRGIFPVGYKWVFVRKRNENNEVVRYKARLVAQGFTQKPGVDFNESYSPVMSGITFRYLISLAVQNRLFMQLMDVVTAYLYGSLDYDIYMKVPNGIDIPNQKGYTKNDDCPCVFIKKSPTGFCIISVYVDDLNIIGNTQDINEARHHLKTEFEMKDLGQTKFCLGLQLEHLPSGILMHQSAYTQKILEKFNMDKSYPSKTPMVVRSLDVEKDPFRPKEDGEDVLGPDFPYLSAIGALMYLANSTRPDIAFQVNLLARYSAAHTKRHWTGVKNVFRYLNGIRDLGLFFKKNQDSTLIGYTNAGYLSDPHNAGSQT

SEQ ID NO: 121839 - protein, 751 aa, Oryza sativa
  Clone ID: PAT_MRT4530_24824C.1.pep
MDLTIMSLKIATSQQYIVLLYQRSLKEKKSSKELRFEAHFNLTKERPEVESSHQAPIEPENNLVLLPEDTAALSAMDDMLIEYCSTDSLGDLLRYLWPYCAKIWTVQVQHSVPYVHTQNGLAESLIKRIKLIARPLLMNCKLPLSCWGHAVLHAADLVQLRPTAYHETSPMQLVRGNPPSISHLRKFGCDVYILISPPQRTAMGPHRKVGIYVGFKSPSIIKYLEPLIGDLFTARLADSIFDEEYFPALGGDFKYQKECQENDWDAQGIPASDPRTTEIELQVQKIIHLQRLANNLPNAFTNYKGVTKSFIPAQNAPKRVEVPNKTTQLPLTKKRGRNMATQRETIANKQRKTLMDVVTTYLYGSLDYDIYMKVPDGIDIPNQKGYTKNDDCPCVFIKKSPTGFCIISVYVDDLNIIGNTQDINEARHHLKTEFEMKDLGQTKFCLGLQLEHLPSGILVHQGAYTQNILEKFNMDKSYPSKTPMVVRSLDVEKDPFRPKEDGEDVLGPDFPYLSAIGALMYLANSTRLDIAFSVNLLARYSAAPTKRHWTGVKNVFRYLNGTRDLGLFFKKNQDSTLIGYTDAGYLSDPHNATSQTGFVFLQGGTAILWKSSKQTLVATPTNHSEIIALYEASRECVWLRRMVNHILTSCGIGSLESPTIIYEDNAACVVQMETGYIKSNITKHIAPKLFYPHELQQQGEINILQTKSCDNLADLFTKSLPYSTFFKCVEGIGMRRLKNLQDSGGVSSSGK

SEQ ID NO: 121840 - protein, 908 aa, Oryza sativa
  Clone ID: PAT_MRT4530_24825C.1.pep
MMRKIIGNSISHHLITDKFPKSSDFVCTACATGKLILRPSYLKIRAEPLKFLERIQGDICGPIVPRFGPFRYFMVLIDASTRWSHVCLLSTRNHVFAKLMSQIIRLKANYPEHRIQSIRMDNAAEFTSHAFDDYCMALGIQVQHSVSYVHTQNGLAESLIKRIKLIARPLLMNCKLPSSCWGHAVLHAADLVQLRPTAYHETSRMQLVRGNPPSIFHLHKFGYAVYIPISQPQHTAMGPHRKVGIYVGFKSPSIIKYLEPLTGDLFTARFADSIFDEEHFLALGGEFKYQKECQEIDWDAQGIPASDPRPTEAEFQVQKIIHLQRLANNLPDTFTNYKGVTKSFIPAQNAPEIVEVPNKTTQLPLTKKRGRSMATQRETIANKQRKTVNANQPLVGTHQIDTICQADRDSLQPSSVVHNAETRNSEDHRHIVSGHHNESIRVDEIAINYSETRESFDRRATIVDTNFSEQIAECLQVDPEPRSIKECQKRSDWNKWKDAIDAELASLYKRDVFSAVMPTPRGIFPVGYKWVFVRKRNENNEVLMDVVTAYLYESLDSDIYMKVPDGIDIPNQKSPTGFCIISVYVDDLNIIGNTQDINEARHHLKTEFEMKDLGQTKFYLGLQLEHLPSGILVHQSAYTQKILEKFNMDKSYSSKTPMVARSLDVEKDPFRPKEDGEDVLGPDFPYLSVIGALMYHANSMRPDIAFSVNLLARYSAAPTNRHWTGVKNVFRYINGTRDLGLFFKKNQDSTLIGYTNAGYLSDPHNARSQTGFVFLQGGTAISWKSSKQTLVATSTNHSEIIALYEASHECVWLHRMVNHILTSCCIGSLESPTIIYEDNAACIVQMETGYIKSNITKHIAPKLFYPHELQQHGDINILQTKSCDNLADLFTKSLPYSTFFKCVEGIDI

SEQ ID NO: 121841 - protein, 701 aa, Oryza sativa
  unsure (1)..(701): unsure at all Xaa locations
  Clone ID: PAT_MRT4530_24826C.1.pep
MSQIIRLKGIPASDPRTTEAELQVQKIIHLQRLANNLPDAFTNYKGVTKSFIPAQNAPERVEVPNKTTQLPLTKKRGRSMATQRETIANKQRKTVNANQPLVGTHQINTIYQADRDSLQPSSVVHNVETRNLEDHRHIVSGDHNESIRVDEIAINYSETGESFDRRATIVDTNFSEQIAECLQVDPEPRSIKECQKRSDWNKWKDSIDAELASLYKRDVFSAVMPTPRGIFPVGYKWVFVRKRNENNEVVRYKARFVAQGFTQKPGVDFNETYSPVMSGITFRYLISLAVQNRLFMQLMDVVTAYLYGSLDSDIYMKVPDGIDIPNQKKSLYGLKQSGRMWYNRLSEFLSLKEYTKNDDCPCVFIKNSPTGFCIISVYVDLNIIGNTQDINEARHHLKTEFEMKDLGQTKFCLGLQLEHLPSGILVHQSAYTQKILEKFNMDKSYPSKTPMVVRSLDVEKDPFRPKEDGEDQLGXFPIRLGRPEGEVAPAPPPPPPAAAAAWIGAMXGGEDWREPWRLPPLGGRRKGTRDLGLFFKXNQDSTLIGYTSADCLCDRHSAGSQSCCVFLQGGTAISWKSSKQTLVATSTNHSEIIALYEASRECVWLRRMVNHILTSCGIGSLESPTIIYEDNAACVIQMETGYIKSNITKHIAPKLFYPHELQQHGEINILQTKSCDNLADLFTKSLPYSTFFKCVEGIGMR

SEQ ID NO: 121842 - protein, 194 aa, Oryza sativa
  Clone ID: PAT_MRT4530_24827C.1.pep
LSFPTDKSSLPPLPAIFLPPSPPPSPSSLATTAYMAAAMAKTIVGATATATAAMRSGGADPPPAGSKRADPPLAVLGVADPSPSSLTTADPIPAISGAADSPPGPAAVKGRVDGALAAMALNKGLIVEVSLADEPNLPPGQSSNECTPPPTVVEGDGEASSSSGANPPLSNPRSSPTLVPMFARVSVMATTVDR

SEQ ID NO: 121843 - protein, 305 aa, Oryza sativa
  Clone ID: PAT_MRT4530_24828C.1.pep
MAMATTSVTSLAMAMAAAASADATQAPHKLSALPFHHLLFSRAPPLLRASRRLPLAPLVASSDAAAAAEAGVEWSETEEADEGSQEEEEEEVVEEQAEAEEEVVASVEEEEEEAVEEEFAAEPPEEAKVYVGNLPYDVDSEGLAQLFEQAGVVEVAEVIYNRETGQSRGFGFVTMSTIEEADKAIEMLNRYDINGRLLNVNRAAPRGSRVERPPRQFAPAFRAYVGNLPWQVDDSRLLQLFSEHGEVVNASVVYDRESGRSRGFGFVSMASKEELDDAISALDGQELDGRPLRVNVAAERPQRGF

SEQ ID NO: 121844 - protein, 806 aa, Oryza sativa
  unsure (1)..(806): unsure at all Xaa locations
  Clone ID: PAT_MRT4530_24829C.1.pep
MRPFGFYIYIPISPPQRTAMGPHRKMGIYVGFKSPSIIKYLEPLTGDLFTTRFADSIFDEEHFSALGGDFKYQKECESESADNVLIPASDPRTTETELQVQKIIHLQRLANNLPDAFTNYKGVTKSFIPAQNAPERVEVPNKTTQLPLTKKRGRSMATQREIIANKQRKMVNANQSLVGTHQIDTIYQAYRDSLQPSSVVHNAETRNSEDHRHIVSGDHDESIRVDEIAINYSETRESFDRRATIVDINFSEQIADCLQVDPEPRSIKECQKRSDWNKWKDAIDAELASLYKRDIFSAVMPTPHGIFPVGYKCVFVRKRNEYNEVVRYKARLVAQGFTQKPGVDFNETYSPVMSGITFRYLISLAVQNHLFMQLMDVVTAYLYGSLDSDIYMKVPDGIDILNQKVNRNMYCVKLQKSLYGLKQSGRTWYNRLSEFLSLKGYTKNDDFLCVFIKKSPTGFCIISVYVDDLNIIGNIQDITEARHHLKTEFEMKDLGQTKFCLGLQLXHLPSGILVHQSAYTXKILEKFNMDKSYPSKTPMVVRSLDVGKDPFRPKEDGEDVLGPDFPYLIAIGALMYLANSTRPDIAFSVNLLARYSAAPTKRHWTGVKNVFRYLNGTRDLGLFFKKNQDSTLIGYTDAGYLSDPHNARSQTGFIFLQGXTAISWKSSKQTLVATSTNHSEIIALYEAXRECVWLRRMVNHILTSCGIGSLESPTIIYEDNAACVVQMETGYIKSNITKHIAPKLFYPHELQQHGEINILQTKSCDNLADLFTKSLPYSTFFKCVEGIGMRRLKNLQDLGGVSSSGK

SEQ ID NO: 121845 - protein, 358 aa, Oryza sativa
  unsure (1)..(358): unsure at all Xaa locations
  Clone ID: PAT_MRT4530_2482C.1.pep
MGLRDGFSNNKLFDDFGCGEIXPDRNISSDKIGTIVVNNLVYRDHSSLKVRGVPKDVRSHDIERVRSEEQLSTQVGCGRVHPIIENDLDKCRVVAPNLPTKTDDLSHSTGHGXTTREKTVAISRTXNFHWCSRDNSTRSLVPEPVNRSNLSHRNFHWCSRDISTCSLVPEPWLRDSCDWSSTGSIVALVPTSNGQETPTHXVLNQSIIAISRTFTSSGRITTTTWSSTSSVAILPLFPLXVVELGLQLVFDQRCSDPPITSTSTKLISGTQYRQVFYSEIPYHXRHLALKPILMSLYAVLTRPLRNLRELWLGTPRADKALSEHVETNDHILRLLDHSRTVGGSRQGIRNEKMVYPPR

SEQ ID NO: 121846 - protein, 625 aa, Oryza sativa
  unsure (1)..(625): unsure at all Xaa locations
  Clone ID: PAT_MRT4530_24830C.1.pep
MDILTARPLLMNCKLPSLCWGHAVLHAADLVQLRPTAYHETSPMHLVRGNPPSISHLRKFGCVVYIPISPPQRTAMGPHRKVGIYVGFKSPLIIKYLEPLTGDLFTARFADSIFDEEHFPALGGDFKYQKECHEINWDAHGIPATNSRTTETDLQVQKIIHLQRLANNLPDAFTNYKGVTKSLIPAQNAPERVEVPNKTTQLPLTKKRGRSMATQRETIVNKQRKTVNANQPLVGTHQIDTIYQADRDSLQPSSVVHNVETRNSEDHRHIVSGDHDESIRVDEIAINYSKTGESFNRRATIVDTNFSEQIAECLQVDPEPRSIKECQKGSHWNKWNDAIDVELASLYKRDVFSAVMPTPCGIFPVGYKWVFVRKRNENNEVVRYKARLVAXGSTKSSPIFNIIGSTSGITFRYLISLAVQNRLFMQLMDVVTAYLYGSLDSDIYMKVPDGIDIPNQKVNRNMYCVKLXKSLYGLKQSGRMWYNRLSEFLSLKGYTKNEDCPCVFIKKSPTRFCIISVYVDDLNIIGNTQDINEARHHLKTEFEMKDLGQTKFFLGLQLEHLPSGILVHQSAYTQKILEKFNMDKSYPSKTPMVVRFLDVEKDPFIPKEDGEDVLNQFYPHSTPLL

SEQ ID NO: 121847 - protein, 473 aa, Oryza sativa
  Clone ID: PAT_MRT4530_24831C.1.pep
MQQQGVNPMVDRKEKGRFCTLLTLSNYDQLHIMKLPPMQLVRGNPPSISHLHAFTNYKGVIKSFIPAQNAPERVEVPNKTTQLPLTKKRGRSMATQRETIANKQRKTLMDVVTAYLYGSLDFDIYMKVPDRINIPNQKKSLYGLKQSGRMWYNRLSEFLSLKGYTKNDDCTCVFIKKSPTGFCIISVYVDDLNIIGNTQDINETRHHLKTEFEMKDFGQTKFCLSLQLEHLPSGILVHQSAYTQKILEKFNMDKSYPSKTPMVVRSLDLEKDPFRPKEDGKDVLGPDFPYLSAIGALMYLANSTRPYIAFSDSTLIGYTDVGYLSDPHNARSQTRFVFLQGGTAISWKSSKQTLVATSTNHSKIIALYEASRECVWLRRMVNHILTSCGIGSLESPTIIYEDNAACVVQMETGYIKSNITKHIAPKLFYPHELQQHGEINILQIKSSDNLADLFTKSLPYSTFFKCVEGIGMR

SEQ ID NO: 121848 - protein, 51 aa, Oryza sativa
  Clone ID: PAT_MRT4530_24832C.1.pep
MVDEPSGSGFDGGGGDGGGCGQAAVSNSGGIDDGSLQEIHVSIFSYLKEIE

SEQ ID NO: 121849 - protein, 203 aa, Oryza sativa
  unsure (1)..(203): unsure at all Xaa locations
  Clone ID: PAT_MRT4530_24834C.1.pep
MVGGWRAGGERRAGLRASDDGGRWRTSMAALGGMMTVAPRVLVKSEDGCRCRARRRVDRGCRRLLVKTVVGAVPTGASTEAVGGSRRVTAGAGTLIPDGRAYGIPPIKLRFMIVVFKVVCSPKVEVGADLTVNIVNVERXLCFAKTRSQYTTTTSECGENLVKRVTFXSSVPSHGPRPSSNMDFMVAFASLVPSNGIALPSIR

SEQ ID NO: 121850 - protein, 65 aa, Oryza sativa
  Clone ID: PAT_MRT4530_24835C.1.pep
SPLPPPFFPPPRGCPTPSSPSPSRSPPRRWPRSSPSLPPKSPSRFKFLRRRILWKVLGFQPFLKI

SEQ ID NO: 121851 - protein, 42 aa, Oryza sativa
  unsure (1)..(42): unsure at all Xaa locations
  Clone ID: PAT_MRT4530_24836C.1.pep
SPYSSMAXLLPLFFIVIEFLKSNMIIIGVYFFYYLEARTFKN

SEQ ID NO: 121852 - protein, 272 aa, Oryza sativa
  unsure (1)..(272): unsure at all Xaa locations
  Clone ID: PAT_MRT4530_24837C.1.pep
MSSSSSSSASSAAAAAFRPAVVQREQQVVEEKFPAAAAAMREMVLPPVAAAAADSEQEQLCYVHCHYCDTVLVVSDLRSNHAHFLSICVHLALDSRAFLVHPWRRVLQDEISTANSPTQLLLEQHGLGGLMASAASCRNNNSPAAAAAPPPPTSQGKAGARRNSPRRRRRCGRWSSRRWRGRRADSEQEQLCYVHCHYCDTVLVVSVPSSSLFKTVTVRCGHCSSLXPSNRGASSSRPPPQDHQRKDGLLKEGLYAAAAAAAAAANMGVAPY

SEQ ID NO: 121853 - protein, 59 aa, Oryza sativa
  Clone ID: PAT_MRT4530_24838C.1.pep
MIESVIPVIEISKLTVCLGELQSPHVKLHRNRLREKIDADRHSNESNQDVLTHLLLFEK

SEQ ID NO: 121854 - protein, 90 aa, Oryza sativa
  Clone ID: PAT_MRT4530_24839C.1.pep
ATRTHPGVCKNHDFRVQMLISSVRKNKNPEKKISKQMKNLESGGGAAASSSSSSSAEDTAGRVGGGSGGLRAGLRWICPLAGLHAPLRAP

SEQ ID NO: 121855 - protein, 96 aa, Oryza sativa
  unsure (1)..(96): unsure at all Xaa locations
  Clone ID: PAT_MRT4530_2483C.1.pep
XVFGXGFLNVFFFFFFVXFFFFFIFFFFFFFFFFFHNFFFFFFFFXQVNITLIYSHCKVVETEDETETAYSYTKCNIKLNPSQTCDASSGYVMLQL

SEQ ID NO: 121856 - protein, 71 aa, Oryza sativa
  Clone ID: PAT_MRT4530_24840C.1.pep
MKSIPTSTSAPNVYEWFLCSPREGGQTHNRYPKPGVKKLGMREAIGKRYANPLVKPFLQPLGMIPPFPLLC

SEQ ID NO: 121857 - protein, 145 aa, Oryza sativa
  unsure (1)..(145): unsure at all Xaa locations
  Clone ID: PAT_MRT4530_24841C.1.pep
EADRLTLGAQRQRDVQRRSIIRSASHGAAASFVPHRTSAARTAHXAHLRATTEGQKXTRLLVIRQSAIAQKKXKEKKKQSPAWLPAAPLRLAAFLDAGVAVLDNDGFHSGGGAKLFTTTHVEGIARAEQKSSYSYMHALKSERIL

SEQ ID NO: 121858 - protein, 81 aa, Oryza sativa
  unsure (1)..(81): unsure at all Xaa locations
  Clone ID: PAT_MRT4530_24842C.1.pep
YALRSVRFHGPADPSHMGLYDLPPEFHFGMLGWDGKAAGAAWPDMIGXGAPCYPGGLNLQHSVEYWLTLDILSSTSGDRRH

SEQ ID NO: 121859 - protein, 168 aa, Oryza sativa
  unsure (1)..(168): unsure at all Xaa locations
  Clone ID: PAT_MRT4530_24843C.1.pep
RPTKGRRRRLTDDGGGDGGTTTAHGAAARRRRCGGARATRRRRTVRRHEGGGAARWRGRGKKEGKEGGNGVGREGKGXGGIYRARGRGGRLXNDDGTAWRRGARAMATRGDGTARRDGDSARRGRGSRRXMATAVTRWRGSGTGLGARQRLMAWRRGSGARRRRRDGG

SEQ ID NO: 121860 - protein, 107 aa, Oryza sativa
  Clone ID: PAT_MRT4530_24844C.1.pep
MDKSCRVTYGLNSAASFSVKQTPIQAMMIGIGFTLPLPYTGRLHHHVVGDAQAPIPESKVVDKLLRVVPEHLSHIACSMKTLLDIDTLSLYEVTGRLHDDKEHKGRS

SEQ ID NO: 121861 - protein, 389 aa, Oryza sativa
  Clone ID: PAT_MRT4530_24845C.1.pep
MIDDLWITVCQNAWGSEATQVLETVAGTRSLAWGRLARELTTLEAVTWRKLTVGGAVEPSRCNFSACAAGNRVVLFGGEGVNMQPMNDTFVLDLNASKPEWRHINVRSAPPGRWGHTLSSLNGSRLVLFGGCGRQGLLNDVFMLDLDAQQPTWREIPGLAPPVPRSWHSSCTLDGTKLVVSGGCADSGVLLSDTYLLDVTMERPVWREIPASWTPPCRLGHSLSVYDGRKILMFGGLAKSGPLRLRSNDVFTLDLSENKPCWRCITGSGMPGASNPAGVGPPPRLDHVAVSLPGGRILIFGGSVAGLHSASKLYLLDPTEEKPTWRILNVPGRPPRFAWGHSTCVVGGTKAIVLGGQTGEEWTLTELHELSLMFPTLNQKDLELYSWKL

SEQ ID NO: 121862 - protein, 137 aa, Oryza sativa
  Clone ID: PAT_MRT4530_24846C.1.pep
GLWGTWIGTNRPRPGVPQLLAYERRHRLPPPPRQSSPSSPTASPTQRRHRRPPPQRRRPSSSPHPSHTSSLPHCCPRHRHRRPPPARRRPSAPLRRSPPRSLSRHTGSCPPVLRSSLVAVGRWMQYSGRPSPLHHRV

SEQ ID NO: 121863 - protein, 64 aa, Oryza sativa
  Clone ID: PAT_MRT4530_24847C.1.pep
YLLDPTEEKPTWRILNVPGRPPRFAWGHSTCVVGGTKAIVLGGQTGEEWTLTELHELSLVSSLV

SEQ ID NO: 121864 - protein, 77 aa, Oryza sativa
  Clone ID: PAT_MRT4530_24848C.1.pep
PRVRAGLHSASKLYLLDPTEEKPTWRILNVPGRPPRFAWGHSTCVVGGTKAIVLGGQTGEEWTLTELHELSLVSSLV

SEQ ID NO: 121865 - protein, 115 aa, Oryza sativa
  Clone ID: PAT_MRT4530_24849C.1.pep
GRGQPSVQTHGCAEESPPQRREQGQDSCRVYHGDVAPCWSGEHTRRTVDKVFGRQSSDWLKSHSQPAQHASQRSGEGQQVVQVRSQQCQQCLRVIHGRIQSKSTGAANKRLWIDW

SEQ ID NO: 121866 - protein, 188 aa, Oryza sativa
  unsure (1)..(188): unsure at all Xaa locations
  Clone ID: PAT_MRT4530_2484C.1.pep
LLSTWRSEVLTRSRQQGSLPPRIRARXYVVSITLTVASDFNANERVHILNRRPWRNCYRAHMTILGECRDNIFAVREIAMYWFENQRASRIISRTPMEVAVREIATYWFENQRTSRIISRTSMEVAVREIATYWFENQRASRIISRTPMEVAVRESATYWFEDQIATYWFENQQASRIISRTPMEVLE

SEQ ID NO: 121867 - protein, 916 aa, Oryza sativa
  Clone ID: PAT_MRT4530_24850C.1.pep
GLEHLMANGTSQDDNIEGNFKLLWSLRKYLILLGTIAVGVTYNAGLTPPGGFWTLNKDKHQAGNPVLPVGYFQRYEVFFYCNATAFAASLVLIILLLSKSATKHVLWLRSMQFTMILDLFSLMGAYAAGSCRALKSSIYTWILVFAVFLYVGVHVLVFMRVIPDKLKEMIQKLWGVHDRQSDRHQDKDVEDARKFILILVTFTATVTYQAGLSPPGGFWAENDYKHQPATSVLRSNYLDRYKLFVSCNSTSFVASLVTVILLLSTELSKHGIRSKAVIVCVVADLLCLVGAYAAGCCRDVATSFYVMFIIMIVLICLALLVGIFAYKPVAIWLQNFKKVSLRCVSATGWMLSSSSRRNGFSNGDHNHDTEIVGTNDDTEPVANGHIHSNQAAPIQNVNGNQIEEHLNKTRKNLLLLAILAVSLTYQSGLNPPGGFWSGNEFRHADGDHILEEYHHSAGDRILEDTYHSRFIAFFYLNAVAFVASVVMIILLLNKVMIMKVTKQCTLQIVMIVNLLSLTGAFVMGSCREANKSIYISVLLCLVLAYVLVHVLIAIHVLCGMASPASSVSPQNRTEDTKELGRRRNLLLTLSVLAATVTYQAGMNPPGGVWSDDKDVSGKPGNPILQDTHPKRYDVFYYSNSLSFVSSVVTTILLVNKESCEHGIKSHALRVCLVVGLVGLLIAYAAGSCRKAIQSIYLIIIAVAVLISVVIQVFLLSSTNSNTLQTFLSIRDVNQDSSSGPQESTDPQEKKERKRKKYLMLLAVLAASIAYQAGLNPPGGFWPDDGGHKAGNPILHDVNHRRYKTFFCFNAFSFMSSIVVIMLLLSRTIREKDVHIDVLYLIMILDLLGLMTAFAAGSCRRFRTSVYVYGLVICVVVYLLLVTVLSSGIAKYLRSRKVQIPSQDHPENASRADTPNA

SEQ ID NO: 121868 - protein, 342 aa, Oryza sativa
  unsure (1)..(342): unsure at all Xaa locations
  Clone ID: PAT_MRT4530_24851C.1.pep
QTPRHFRALGGEFKYQKECQEIDWDAQGIPASDPRTTETELQVQKIIHLQRLANNMLDAFTNYKGVTKSFIPAQNAPERVEVPNKSTQLPLTKKRGRSMATQRETIANKQRKTVNANQPLVGTHQIDTICQADRDSLQPSSVVHNAETRNSEDHRHIVSGDHNESIRVDEIAINYSETGESFDRRAIIVDTNFSEQIAECLQVDPEPRYIKECQKRSDWNKWKDAIDAELASLYKRDVFSAVMPTPRGIFPVGYKWVFVRKRNENNEVVRYKARPVAQGFTQKPGVDFNETYSPVMSGITFXYLISLAVQNRLFMQLMDVVTAYLYGSLDSDIYMKVPCGID

SEQ ID NO: 121869 - protein, 50 aa, Oryza sativa
  Clone ID: PAT_MRT4530_24852C.1.pep
CVLNRSLTSLLTVEYAMFSFQIKLKGLTFIICMSTRLCLYIPPQLNPCLS

SEQ ID NO: 121870 - protein, 1092 aa, Oryza sativa
  Clone ID: PAT_MRT4530_24853C.1.pep
MGTQITIEDALLYPDSTRTLLSYRDIRQNGFHIETHMDNREEFLLLTKQNGYGKRICEKIPSLTSGLYYTYIKPIAHVAYKVIFQNVDAFHTWHDRLGHPGIGMMRKIIGNSIGHHLITDKFPKSSNFVCTACATGKLILRPSYLKIRAEPLKFLERIQGDICGPIVPRSGPFRLKANYPEHRIQSIRMDNAAEFTSHAFDDYCMALGIQVQHSVPYVHTQNGLAESLIKRIKLIARPLLMNCKLPSSCWGHAVLHAADLVQLRPTAYHETSPIQLVRGNPPSISHLRKFGCDGYIPISPPQRTAMGPHRKMGIYVGFKSLSIIKYLEPLTGDLFTARFADSIFDEEHFPALGGDFKYQKECQEIDWDAQGIPASDPRTTETELQVQKIIHLQRLANNLPYAFTNYKGVTKSFIPAQNVPERVEVPNKTTQLPLTKKRGRSMATQRETIANKQRKMVNANQPLVSTHQIDTIYQADRDSLQPCSVVHNAETRNSEDHRHIVSGDHNEFIRVDEIAINYSKTRESFDRRATIVDINFSEQIADCLHVDPEPRSIKECQKRSDWNKWKDVIDAELASLYKRDVFSAVMPTPRGIFPVRYKWVFVRKRNENNEVVRYKARLVAQGFTQKPGIDFNETYSPVMSGITFRYLISLAVQNRLFMQFMDIVTAYLYGSLDSDIYMKVPDGIDIPNQKVNRNMYCVKLQKSLYGLKQSGRMWYNRLSEFLSLKGYTKNDDCPCVFIKKSTTGFCIISVYVDDLNIIGNTQDINEARLHLKTEFEMKDLGQTKFCLGLQLEHLPSGILVHQSAYTQKILEKFNMDKSYPSKTPMVVRSLDVEKDPFRPKEDGEDVLGPDFPYLSAIGALMYLANSTRPDIAFSVNLLARYNAAPTKRHWTGVKNVFRYLNGTRDLGLFFKKNQDSTLIGYTDVGYLSDPHNARSQTGFVFLQGGTDISWKSSKQTLVATSTNHSEIIALYEASRECVWLRRMVNHILTSCGIGSLESPTIIYEDNAACVVQMEIGYIKSNITKHIAPKLFYPHEFQQHGEINILQTKSCDNLADLFTKSLPYSTFFKCVKGIGMRRLKNLQDSGGVSSSGK

SEQ ID NO: 121871 - protein, 195 aa, Oryza sativa
  Clone ID: PAT_MRT4530_24854C.1.pep
MAATTAAAAVPGVVRAERLLRGGCVVMAATAALLLGFSAETKTVLFVRKTAVAKDVQALWVLTVAAAAAAGYQFAQLVRCMYCSSSGDAGAMAVAWTSFLLDKGCAYVVFASTAAALQACMVGLIGVEALQWSKLCNIYTRFCEQAAAGMLCSFLAAAGMAVLSAFSARRLFRLYSPAGHRRSCPRAAVLATSPH

SEQ ID NO: 121872 - protein, 743 aa, Oryza sativa
  Clone ID: PAT_MRT4530_24855C.1.pep
MWSRVWDRQRKARAHMGPHRKVGIYVGFKSPSIIKYLEPLTGDLFTARFADSIFDEEHFPALGGEFKYQKECQEIDWDAQGIPASDPRTTETELQVQKIIHLQRLANNMLDAFTNYKGVTKSFIPAQNAPERVEVPNKSTQLPLTKKRGRSMATQRETIANKQRKTVNANQPLVGTHQIDTICQADRDSLQPSSVVHNAETRNSEDHRHIVSGDHNESIRVDEIAINYSETGESFDRRAIIVDTNFSEQIAECLQVDPEPRYIKECQKRSDWNKWKDAIDAELASLYKRDVFSAVMPTPRGIFPVGYKWVFVRKRNENNEVLMDVVTAYLYGSLDSDIYMKVPGGIDIPNQKKSLYGLKQSSRMWYNRLSEFLSLKGYTKNDDCPCVFIKKSPTGFCIISVYVDDLNIIGNTQDINEAHHHLKTEFEMKDLSQTKFCLGLQLEHLPFGILVHQSAYTQKILEKFNMDKSYPSKTPMVVRSLDVEKDPFRPKEDGEDVLGPDFPYLSAIGALMYLANSTRPDIAFSVNLLARYSAAPTKRHWTGVKNVIRYLNGTRDLGLFFKKNQDSTLIGYTDAGYLSDPHNARSQTGFVFLQGGTAISWKSSKQTLVATSTNYSEIIALYEASRECVWLRRMVNHVLTSCGIGSLESPTIIYEDNTACVVQMETGYIKSNITKHIAHKLFYPHELQQHGEINILQTKSCDNLADLFTKSLPYSTFFKCVEGIGMRRLKNLQDSGGVSSSGK

SEQ ID NO: 121873 - protein, 155 aa, Oryza sativa
  Clone ID: PAT_MRT4530_24856C.1.pep
MGDTERSSILVHILVIALCLTAFGFAIAAERRRSTGSIVTDSFNSTFCVYDSDIATGYGVGAFLFLLSGQSLLMVVTKCMCFGKPLAPGGSRAWSIIYFASSESLRKGVFIAGAVFVVFTMILNVYFYMYYTKSTSQAAKKINKTTPNVGMTGYA

SEQ ID NO: 121874 - protein, 949 aa, Oryza sativa
  Clone ID: PAT_MRT4530_24857C.1.pep
YSTDLLLYMAKEKAPCCSTNNSSKAPATARPTTKGSTTASGNGRPPPTTLHDVPDKLLELILQNLDSSLSLVRAAATCQRWRRVITQQSFVLDYDIPPHQIVGHYHHRLHPPSFTTPKPRGCCSSVAFVPTSPEFLTTGRRRRRFSLDFLPGGGSRWEIVDSRGSLLLLAKKKKSNWMRRCFPDLVVCEPVTRRHKVIPRMEVMKYHHCVGVFLLDFDRNGSFSMSNFKVTCVVYQPYFGVSGDVGTITVCEYMEDMWDWTRHMKPDEDDEVPKLFEWYVVVTHLRTRPGIHLHDRDSLRFLGHAGGSIFWAIKEDEGSLLILDENGIDPHILRTPAGVRGSELRAIVDGNGDRHNVRVVVLEGETLRVVTWLCDTDELVLEKSLHLVEATRRLQGYKESCFCGGVDIVTVSTSCAVVTPVEEKTTWMVSIDLETMEVTECKYASVAYPCGDNDSHGDVTSRLHTPGATAHGDADGDATPTETRRRGRRGGKLNKARRKPPVDPPKVVDGGTTTTTVDDVPDHLLQDILLCLGSSACLVRAAYACKRWRRVVTAAGFLDAFRSLHGATHHVAGHYHTVDDAYDRQAAPGAFPDGGRSFVFVPSDELADTDRRRFSSLDFLPDCESGYSWELADSRGGLLLLTKMKQRTGDGSPARRHCFTFPDIVVCEPLTRCHQGILCPPDLSGYQCLGVFLLDGDGDGGRIGMSNFKVICALYDRYLLNYILPLSETLACTFTSGSGGGGWRLPHSTAAGGDVTLEHVRLDATSFVGRANGRVYWEIEGDEGGDMLVLDETTAGFSLVTFPENVRESYDKRTFRIIAGGDGVAMRVVRVINNDLKVFAQLDGDGEWVLEKRVWLPAAARGLPGYDEGYFQEQNGEAIVVAASAAYVLLTPPVEDTWLFSVELETMAVERWHERNKSEVGKMDIGGMKKEKRPVGCPARKARGLPGLA

SEQ ID NO: 121875 - protein, 41 aa, Oryza sativa
  Clone ID: PAT_MRT4530_24858C.1.pep
LLQEQHHTSAMQTTYVEQKKDVLTIISNSPIKFDQKSLGTS

SEQ ID NO: 121876 - protein, 465 aa, Oryza sativa
  Clone ID: PAT_MRT4530_24859C.1.pep
MPMQTTDKTDAVKSMLSGENSEGSDGSKSSDTVEWDPWDPPHPPCPTLPPTASLMSQVEMVKQHHFQVLAVLAASRATNIIAPDRTPQEVRRKFAEICNELADILEKDSVRRFLNLYRRNMRIMGWGLVITSQTMNFIVSFNALRCAKVVLEGKAPKLCQIRANPNYMTSYGYFPLHKAAEKFSVDMIKLLLCYGASANLRTSGQKVIEGLLPLHVAIENTCMHKYLEDNLLTDRKLKQVDLDFIYKLIHLLCLPEMKIFLDTTRLLADNTDNIVDELWNYIKEGRLVHAAILLLAAQRKIRTCASSNRNISCNLNGFDIIRDRVMGSIVSIEREGRGLTSGKNSKAHKQLEEKRKFFHNSLMLIFVISKTGEALDEYIQSHSEVSHQEVLEGVSSILDDHGFAPTGKGISIGDLECRPYDCNASNSVPKCNYEDSGTTKAVGESPNLNVKAKKSAPVVMLYGFG

SEQ ID NO: 121877 - protein, 213 aa, Oryza sativa
  Clone ID: PAT_MRT4530_2485C.1.pep
MAKVHPNVVPVAAAAGPAGGERRGEEEEEAAALTVWRKSLLFNCKGFTVFDAKGNLAYRVDSYDTESGDEVVLMDAAGAPAFTVRRKRQLSLQGEQWLVFAGEADGRRPPVYAVRRTGRGGGKSLARVTPCAGAAAAGASAAYEVEGSYARRCCVVYDGERRAVAEVRPKEAVGTDVFRLVVQPGVGVSLAMAVVVALDQMFGRPSLLRSWSS

SEQ ID NO: 121878 - protein, 70 aa, Oryza sativa
  Clone ID: PAT_MRT4530_24860C.1.pep
MINSMRWARGLTKGGEILPPPFAGAELRLSKSTFTYEEVWRAKGGLSDANLIVQVWFRYVHRGALPTGKE

SEQ ID NO: 121879 - protein, 77 aa, Oryza sativa
  unsure (1)..(77): unsure at all Xaa locations
  Clone ID: PAT_MRT4530_24861C.1.pep
PTRPPTRPRRPRPVQKQLDXCYFPVHGCPRSPSSPTGCPTIGELSRADQSTVTSTIRQEIPEASNSSIITITTISCY

SEQ ID NO: 121880 - protein, 380 aa, Oryza sativa
  Clone ID: PAT_MRT4530_24862C.1.pep
MVISAEPHPPPPPDPVADGAAAVEAAASSARHQAAVLSSFPSLKTWGSHRVLRCAHVNRAGDAIAAARRSPEQLDGVKERLLLHLREVDGSDVVADAEVAAAVAAPAPAAAASRPWKLRSRRRPAVAPASSASPPPERRAARARAEALDRARFSVTLTSEEIEEDVYAVTGARPRRRPRRRPRPVQKQLDGPIRNFVKIHVPSCYFPVHGCPRSPSSPTGCPTIVPRGTHLSEELRMVDTYLITGGPGRGRGPGQVCSASRTMKGKIHNVNEHHSFLSPWNYLEPGEVELDALRCRQLSCSSDCAPRPRSSSSRSIYYNYQHLQAQMFFLHGQDRLGGTGICKDGELSRADQSTVTSTIRQEIPEASNSSIITITTISCY

SEQ ID NO: 121881 - protein, 375 aa, Oryza sativa
  Clone ID: PAT_MRT4530_24863C.1.pep
MAPPTARSLLASHAAVRAAASARRGRLAGDHHPPQVAALRRGDWVKLICGASFEDAADVRNLSLVYTLAGVDCIDCAADASVVGAVNEGIDVAASIVPAVQRPWVMVSVNDDCRDLHFRKAEFDPEDCPPDCSKPCEKVCPADAILLERVMIEEEHSQSDPSCGKLEGGVITERCYGCGRCLSVCPYDRIRAMSYVRDPAMTAELLKRNDVDAIEIHTTGKGTDMFNTLWSNLGESINNVKLIAVSLPDVGDSTVNLMNAIYTTMQSHLQGYNLWQLAGGTNSYTIESLKKAGLFQSTCNPGAATSGVTDCQQAFIGGIAYGGYARKIVGRVLRKIPAQFGHARIEDHPDYLLEALQEALSLVGPVKGYPTLPSL

SEQ ID NO: 121882 - protein, 38 aa, Oryza sativa
  Clone ID: PAT_MRT4530_24864C.1.pep
EARNRHKGHMCLFWEQGSLCRSRYACLMKVRLVYCNPN

SEQ ID NO: 121883 - protein, 61 aa, Oryza sativa
  Clone ID: PAT_MRT4530_24865C.1.pep
MALGVFLWMVDVRGTIYECKKDPATALLQAWSDNNLQCLVVGENEGGNGEGYVNNSTIGFI

SEQ ID NO: 121884 - protein, 106 aa, Oryza sativa
  Clone ID: PAT_MRT4530_24866C.1.pep
CFFFFFGFSFFFFFFFLFFFFFLPNQKRGSMGQRVLGAPHKKANPGTGSRPLGGDPHKPRGQPTNIFPPPKFKLKGSKGGGETKDTTLVKGPPPQGDRGQGPKTRD

SEQ ID NO: 121885 - protein, 86 aa, Oryza sativa
  unsure (1)..(86): unsure at all Xaa locations
  Clone ID: PAT_MRT4530_24867C.1.pep
KRSWELLIPPGVQEGKEPIHGTGQLIKLARSXQVLGRTGXQGQCTQVRVEXMDDTSRSIIRNVKGPVREGDVLTLLESEREARRLR

SEQ ID NO: 121886 - protein, 164 aa, Oryza sativa
  Clone ID: PAT_MRT4530_24868C.1.pep
MLDTGLWRDGAMTRSTPSSPRWHSGLTAYSMSRVMSSARRCSRRIASMANSPARRASLSISRSASRAFALSASRPRHRCRRRRSSSSAAAATAARLARRPFAFSGTAASRHSPRRSPTGDAADDLLLLLPPSRRGAAGPLAFLRRRRAGAASSRSCCASGGASA

SEQ ID NO: 121887 - protein, 68 aa, Oryza sativa
  Clone ID: PAT_MRT4530_24869C.1.pep
IPKLGQSFLQSMLFQYYVFFSLGHVQSQASKPNKQCQAFLVRKNASRFQGIFKHHSSSSTNQTHPWSI

SEQ ID NO: 121888 - protein, 80 aa, Oryza sativa
  Clone ID: PAT_MRT4530_2486C.1.pep
MGHTYLHSAGSRRNVGARLSADDVTGVRPVTNRSSLSTTPGTDVLTPGVPTPAPARDECLEALIIPTGRGEACERPPVAT

SEQ ID NO: 121889 - protein, 438 aa, Oryza sativa
  Clone ID: PAT_MRT4530_24870C.1.pep
MSRLSFRPRPLDIHKKLPIVKSARELEDDETTLALRAAPPVLRHSQPEPAADGEAHPTSSKKNVQEIPYTTWLHFLEKLLLAARAEIGEFVEYDLDNEDEDWLEDYNNERKNLNPEKLEVLLFKLETLDHKARERAGIITPTFLGPIPVILQLDSAMEALQYLSVRYAVFQAVYNYWKSKRERWQKPILRRLQPPPPVNDTNPYNVFRPREKAYRLHTRRMQRRENSVQSFDKLRVVRRNLEQAKALMGALIKREERKRETMECEVHLRRIQMRYKHEAQLIDDGIALSGLQQAGSSEDDYADSDDTANEQPYVRSVAFHPRFPDNKLSAVPPLRLKRERELKRRPHQNGWLFKRVPEMRDPEEPVMLFTRPIDPDKLKMAGIRPPLDPPIDSGTTAPPFRWQARIGRGGRIIFDRWNPFLQVPVGQETNHRPSMPEG

SEQ ID NO: 121890 - protein, 831 aa, Oryza sativa
  Clone ID: PAT_MRT4530_24871C.1.pep
MAGCSEGGGGDGEVACCGVGDTSPGTIVWVRRRNGSWWPGRILGPDELPPSQIMSPRSGTPVKLLGREDASVDWYNIEKSKRVKAFRCGEFDACIEKAEATEGTSVKKREKYARREDAILHALELEKKLLASKHQTQGSRPANVSVCSKHNKDLGSTRYKSKKSKKRKGITASSDIKKEAEQYVLHAGSKRNFQDSPTRGISDNLFGNHLGDISHVRHIQAGENLDSKEKITTAEKIRSDGSDFDESIEKCDRRQPLVQILHSSPKLPHQSQHNDGYGDVLTQGEMDRSPANYRAKRSRYVFLPTDSGETHSHSDLPSVQVASTGGDFETESYLHHPAFSEEQTSSDLVEKHIYESSERECSESETEDDAELLQCSDLILHPASHAHDPYFLPASDKFRHANIDADADELTYSSYMCQVNESEEDGSSELGVSQWHMKGKRNSRNAPKRSDMADGNPWLDKSDGFMEGSPYKINGRNPREGSMQIPNQQLLGQNFYQNEEVNYDSEETDFFEDTGHSEVNLYHGRTYSSCLKATRDFSRSYSYFNDYGNDSSKVSPLNRDSDKIFHFDRNAYWSGPSFYQKYSSRLRGRGPMLFDVDLKVQASYQGEHVPLVSLMSRLNGKAIVGHPVQIEILEDGSTDHLVFCGDVSLEGRTGGQPAWCTGRRTAMQRIPRSNPSGALDCDDEGTLAYPDWEMKPDFRKYSNSDFRKYSNSNHQVKVDKKSISNVRRPSASKSQKKQSKKASLSSQKVRTLSSISTGKKHHGVGGQAKAHKQSGIFGGLIKPGGSGLVTCVPAKVAFTRILEAVGRPPLAVAHRVRWLVLPCEILHRRQL

SEQ ID NO: 121891 - protein, 459 aa, Oryza sativa
  Clone ID: PAT_MRT4530_24872C.1.pep
MSRLSFRPRPLDIHKKLPIVKSARELEDDETTLALRAAPPVLRHSQPEPAADGEAHPTSSKKNVQEIPTPQYDDVDTYERDYTRTFAQPTSYIRARGEKLLLAARAEIGEFVEYDLDNEDEDWLEDYNNERKNLNPEKLEVLLFKLETLDHKARERAGIITPTFLGPIPVILQLDSAMEALQYLSVRYAVFQAVYNYWKSKRERWQKPILRRLQPPPPVNDTNPYNVFRPREKAYRLHTRRMQRRENSVQSFDKLRVVRRNLEQAKALMGALIKREERKRETMECEVHLRRIQMRYKHEAQLIDDGIALSGLQQAGSSEDDYADSDDTANEQPYVRSVAFHPRFPDNKLSAVPPLRLKRERELKRRPHQNGWLFKRVPEMRDPEEPVMLFTRPIDPDKLKMAGIRPPLDPPIDSGTTAPPFRWQARIGRGGRIIFDRWNPFLQVPVGQETNHRPSMPEG

SEQ ID NO: 121892 - protein, 550 aa, Oryza sativa
  Clone ID: PAT_MRT4530_24873C.1.pep
MSGPMQRSSQPQFISSVERNNQSNGPGTPLIDSIDVDQIVIPEKNSWKNLFSYIGPGFLVSIAYIDPGNFETDLQAGAQYKYELLWIILIASCAALIIQSLAARLGVVTGKHLAEHCRAEYPKATNFILWILAELAVVACDIPEVIGTAFALNMLFKIPVWCGVLITGLSTLMLLLLQQYGVRKLEFLIAILVSLIATCFLVELGYSKPNSSVVVRGLFVPELKGNGATGLAISLLGAMVMPHNLFLHSALVLSRKVPRSVHGIKEACRFYMIESAFALTIAFLINISIISVSGAVCGSDNLSPEDQMNCSDLDLNKASFLLKNVLGNWSSKLFAVALLASGQSSTITGTYAGQYVMQGFLDLRMTPWIRNLLTRSLAILPSLIVSIIGGSSAAGQLIIIASMILSFELPFALVPLLKFTSSRTKMGQHTNSKAISVITWGIGSFIVVINTYFLITSFVKLLLHNGLSTVSQVFSGIFGFLGMLIYMAAILYLVFRKNRKATLPLLEGDSTVRIVGRDTATEGEGSLGHLPREDISSMQLPQQRTASDLD

SEQ ID NO: 121893 - protein, 88 aa, Oryza sativa
  Clone ID: PAT_MRT4530_24874C.1.pep
MSGPMQRSSQPQFISSVERNNQSNGPGTPLIDSIDVDQIVIPEKNSWKNLFSYIGPGFLVSIAYIDPGNFETDLQAGAQYKYELLWII

SEQ ID NO: 121894 - protein, 58 aa, Oryza sativa
  Clone ID: PAT_MRT4530_24875C.1.pep
MGEGAAHGRGSSSAVDVSAAGVNRADTVQHQGRYPAPPSAFPYSLGPILALGPNVPSR

SEQ ID NO: 121895 - protein, 218 aa, Oryza sativa
  Clone ID: PAT_MRT4530_24876C.1.pep
PVSSAAFQTTQSQPASSAVSQNSVSAARPLRVQTTQSQPPSSAVSQNSVTAARPLRGYSPQNSFSAPVRVQSTSYHQVAPGISQGLQVQSTSYLQVDPGRAVSAELQLSQCSSLQTQGIQHQHDPSADIYQNIWKEALAKLASELGVSDYNIDPPGRLPSTPQPNQLHAQMRPGHQPTQATARQGVQANGGHVAAASQKRTSNGHHLPNHKQFNPGAN

SEQ ID NO: 121896 - protein, 59 aa, Oryza sativa
  Clone ID: PAT_MRT4530_24877C.1.pep
MYVSGHGQADHQVKLSAFEVECINMISLPYYWSRHPIQSLVMTSNSLSACINVFSDIVE

SEQ ID NO: 121897 - protein, 390 aa, Oryza sativa
  Clone ID: PAT_MRT4530_24878C.1.pep
MSVLGVFLASLLLAAVAPARAAGGGCAAERFSSNRVYAACSDLPHLGASVHWTYDAAASASLSVAFVAAPPSPGGWVAWGLNPTGGGMAGTQALVALPKGGGGGYEVQTFDIEGYSLSAPGKLKYPATDLAAEVAADGRVSVFGKLALQNGTAEVNQVWQVGPVSSGSMVPHAMSSDNKAAMGKLNLLTGAATSSGGGGSNLRKKNTHGILNAVSWGLLLPMGAIFARYLKTFKSADPAWFYLHVACQLIGYGVGVSGWATGIHLGNLSKGITYSLHRNIGITVFALGTLQIFALFLRPKKDHKYRIYWNAYHHSVGYTIIILGIVNIFKGMSILNVEQKWKTGYIITISILGGIAVILEAVTWSIVLKRRKEENKSYNGASNGHLPLSM

SEQ ID NO: 121898 - protein, 74 aa, Oryza sativa
  unsure (1)..(74): unsure at all Xaa locations
  Clone ID: PAT_MRT4530_24879C.1.pep
NWSITTVNRGTIGSWGELFDHFIANFQGTFERPSTHFELHNVIXRPDESLRDYIWRFSEQRNKISDITDDNIIA

SEQ ID NO: 121899 - protein, 574 aa, Oryza sativa
  unsure (1)..(574): unsure at all Xaa locations
  Clone ID: PAT_MRT4530_2487C.1.pep
MAERAVAHNLSPSASGDDSEQNPRRRARTPPPPSRRSLRREEALEGVERSATSPHAGDGEGRRDGERRLLVYGDGSTPQGALQAAGALLRHPPVVPDPETPTRRWLDDVANLVMTAQQRLGAGGRSSATKATGVATAGSVSSRRRARRAAAVTRRSSAIPSSTPPTQEDVREGPDARLNIERRRNDRRAAHASEGASSSGAPLRSGHGGQPPVSPVGGAGCRAFVASLRNVRWPPRFRPTITEKYDESVNPAEFLQIYTTGIEAAGGDDRVMANFFPMALKGQARDWLMNLPPASVHSWEDLCQQFTMNFQGTYPRPGEEADLHAVQRGDDESLCSYIQRFCQVRNTIPCILAHAVIYAFRGGVRHNRMLEKIASKEPQTTAEXFQLADRVARKEEAWTWNSTGSGVAASAAPGSAARSGRRDRRRKXEGASRATRKGRPXSDKKKEAGAPSRERPTSKWCTVHNTSLHDLADCRAVKSLAERTRKWEEERRQERREGKAPAAPSSNRRSEAKQKAPAENIDDGDDDLGFQEPGATIATVDGGARAHASRRSLKAMKRXLLAAAPTHEATRRAR

SEQ ID NO: 121900 - protein, 220 aa, Oryza sativa
  unsure (1)..(220): unsure at all Xaa locations
  Clone ID: PAT_MRT4530_24880C.1.pep
MPGLTIGDTVPNLELDSTHGKIRMDDXVGDTYVILFSHPGDFTPVCTTELAAMAGYAKEFDKRGVKLLGISCDDVQSHKDWIKDIEAYKPGNRVTYPIMADPSREAIKQLNMVDPDEKDSNGGHLPSRALHIVGPDKKVKLSFLYPACVGRNMDEVVRAVDALQTAAKHAVATPVNWKPGERVVIPPGVSDDEAKEKFPQGFDTADLPSGKGYLRFTKVG

SEQ ID NO: 121901 - protein, 59 aa, Oryza sativa
  unsure (1)..(59): unsure at all Xaa locations
  Clone ID: PAT_MRT4530_24881C.1.pep
FGTRCXXIXGNXEVVFPGSNQCQPXXXSXDTXXDXLXRPXHYIIXDXYVHXHIYXEYXV

SEQ ID NO: 121902 - protein, 55 aa, Oryza sativa
  Clone ID: PAT_MRT4530_24882C.1.pep
KNFSAQDRVGLYELWKPGFLMQACSKLNKFGNFLPLLTKHGRAGNLFQGWQHVIK

SEQ ID NO: 121903 - protein, 79 aa, Oryza sativa
  Clone ID: PAT_MRT4530_24883C.1.pep
MGYPWVKCKTWLLSTISSGLGRAYPRAVVATAPEDAASAAAAAAAEEEAAWGFHGGDEEDYAAALLWSEPDPWFDLFLK

SEQ ID NO: 121904 - protein, 47 aa, Oryza sativa
  Clone ID: PAT_MRT4530_24884C.1.pep
MTLHRRTSSPPAFGVIASDIEGRSGGRQPARQVSSQQPLGLTLGILI

SEQ ID NO: 121905 - protein, 724 aa, Oryza sativa
  Clone ID: PAT_MRT4530_24885C.1.pep
MASSVVTLNVGGEVFQTTVATLSRAGASSPLASLAPTPASAPHFLDRDPRLFATLLSFLRRGRLAPTSPDSDPPSPALLAEARHFGVEGALLASLSPASAFSPLALRPSALLPLAGRVPPSAVAVPPSPHPASVFAAHGGVVTRFDAALASRGSVLTPLPAVDSLVAVSPTLALAGARDFAGVHLCLYPDDAPATAREVLSWPGSPSATVLSMAATSATEVSSPWLFTSFESARRNSSAVVTFDMNSLSPVAEIGRKEVYGADVEAAIPASRLSWLGRHNLLLAAGSHSGPAGVVGDICLWDVRASATVPVWELREKEDCFADIAASEALSSLFKVGAASGEVFMADLRMLGGGGISIEPIECYLNWVFVARGGEVEVWTQVELAQEAGGKKLMRRNWVGNGPSFVIAGGSGHESVKEKTKIVSWAFGGSRMALARDDKRSIEEKPGRESMAMGDFLPASTAAAFFVLLLGVNAAVNFTFHFHNNCPETVWPAALSSAGRPPFPTTGFALPPGASLSVAGVTATWSGRVWGRHRCATGGGRFSCESGDCGTGQVACNGAGGAPPATLAEFTLGGGGGGAGALSDFYDVSNVDGFNLPVEVRPELLERRQEGAAAALCRTTACPADINRVCPSELAVRAADRGGAAAAAVVACKSACLAFGTDEQCCRGRFASPDKCAPSEYSRLFKAQCPQAYSYAFDDRSSTFTCANATGYRITFCPAAAAKN

SEQ ID NO: 121906 - protein, 367 aa, Oryza sativa
  Clone ID: PAT_MRT4530_24886C.1.pep
MFSLCNPDGAHLFSILKPLLSEILLRLPPLPSSLPRASLVCTRWRRLVSDRGFLRRFRARHRKPPLLGVIQVCAYPIFAPALDPPDRIPAARFSWRLDNRHDLNDLLGVRHGRALVHVNTCRYSQRRLIVWDPVAGDRRAVAIPGGFRDRGVVVRAGEVRCVAGDGDPGHVHGGCHSSPFEVVILGTNKNRTHAFACVYSSETGIWGNITAQIDVPPDMHPDGNGHHRFGDTICRFAPAENGGLLFLVVTHYTLNVWKSETNADGVAGWVLEKTIELDRLLSLEPGPQKTAPMLLGFSEEHNVAFVCTMLGARQATRKVAAGQSHPETLRVEKMLMAATWVVEVFLEVRGTGNDDFRMEAYEIFGLV

SEQ ID NO: 121907 - protein, 133 aa, Oryza sativa
  unsure (1)..(133): unsure at all Xaa locations
  Clone ID: PAT_MRT4530_24887C.1.pep
GGRIRCMXVWPIEGIXKFXYLSYLPPLTVEDLLXQIEYXLRSKWVXCLXFSKVXFVYRXXHXSPXYYNGRYWTMWKLPMFGCTDATQVLKELEEGQKGFPXXFXXXLRFXNXRXVQLXSXXPTTXGCEESGGX

SEQ ID NO: 121908 - protein, 93 aa, Oryza sativa
  Clone ID: PAT_MRT4530_24888C.1.pep
MVRKQHDTQNKEEKDLHSNPKERNTNPIKKEQPAQKPPPPPQQKKRNNDSKEPKEQTRPPPPPPLERHTATGRVRTTQPRRTHAHIDHRNNAE

SEQ ID NO: 121909 - protein, 254 aa, Oryza sativa
  unsure (1)..(254): unsure at all Xaa locations
  Clone ID: PAT_MRT4530_24889C.1.pep
ESQNRRDWHTFGHCLRNHRPPLELSRCGGAPPLEFLRYLDQFGKTKVHAAGCPFFGHPSPPAPCPCPLRQAWGSLDALVGRLRAAFEEHGGRPEANPFGARAVRLYLREVRDSQAKARGIAYEKKRRKXPPTSSSSSQAAAAAAAATSPASPAASPTPPPPPPTERSADVRPMPPEGHFFIPHPHFMHGHFLVPGGDADHHHQVSNAGNGGNTNTNTNTNTGGGGGNGDEMAVAMAAVAEAHAAGCMLPLSVFN

SEQ ID NO: 121910 - protein, 108 aa, Oryza sativa
  Clone ID: PAT_MRT4530_2488C.1.pep
MGHTYLHSAGSRCNVGARLSAYDVTGVRPVTDRSLLSTARQFSMPHVCLSSYNDFLAMVAMKPGTNLAGTDIPTPGVSTPAPARDECLEALINPTGRGEACDRPPVAT

SEQ ID NO: 121911 - protein, 924 aa, Oryza sativa
  Clone ID: PAT_MRT4530_24890C.1.pep
MEEAAAAVHRRWRRRLLPKLMLLLCAVVHGQQPDSLGFISIDCGIPDGGGYSDESTRGLRYVPDAGFLDAGAGLSAGINPPYTDRDLAARYLTVRYFPGAASAAGERGGCYTLRQLSPGGRYLVRATFYYGNYDGAIAMLPVVFDLHLGANRWTAVNVTAADAIYIFEAVVSPPADFLQVCLVNIGKGTPFISGLDLRPLKPELYPEATANQSLLLLNHDRPPARFAFNRYQFWRPASYYKLFRYPFDPYDRLWQPYGDDPSWTNITVAAAVDVTNISRSDDPSPILRSAATPANATVRRLDFPWSSDDAATTTYLLLLYFAELQRLPAGAARRLRRPRRWRRLRRRRAARVHAPVPRGGGREVDAKAMMEIRDNYELKKNWMGDPCAPKAFAWVGLNCGYSSSDPALVTALNLSSSVLIGPVNLSFGDLKSLQYLDLSNNSLSGPIPDFLVQMPALKFLDLSSNKLSGSIPSDLLQKRENGSLVLRIGNNANLCYNGANNTCAPESKQSKRILVIAIAVPIVAATLLFVAAKFILHRRRNKQDTWITNNARLISPHERSNVFENRQFTYRELKLMTSNFKEEIGKGGFGTVFLGYLEDGTPVAVKMCSKTSSEGDKKFLAEAQHLTRVHHRNLVSLIGYCKDKKHLALVYEYMQGGNLEDRLRGEASIAAPLTWHQRLKIALDSAQGLEYLHKSCQPPLIHRDVKTRNILLSGDLDAKIADFGLTKVFAGDVVTHVTTQPAGTLGYLDPEYYHTSRLSEKSDVYSFGVVLLELVTGRPPAVPLGDGDGGGGESVHLAVWARQRLAEGDIESVADAAMGGCFEVNSAWKVAELALRCKERPSRERPAMADVVAELKECLELEASRALGRGYSCYSSGSGGGSSVATTTTTSGAANISAAASAASVSDAQIGELRQESVLELGPR

SEQ ID NO: 121912 - protein, 158 aa, Oryza sativa
  Clone ID: PAT_MRT4530_24891C.1.pep
PLRRTASVLLRARCVRPSPAPPRCAMPSPLSSWPRSRTPPSGSAMCAARHRHPQPRRPAPPPRASALPPLPLPPPSPPDPSRHGVGPSADVRSPPRPPPCSPSSAFPSTVTSVPPLCVASRPPRQAVARRPHRGSLSSPPPVSSPSPPSSSSPSQHAG

SEQ ID NO: 121913 - protein, 168 aa, Oryza sativa
  Clone ID: PAT_MRT4530_24892C.1.pep
MKKAIASIASSTFVASSGSGSHRRPPPTSTRQLARTGDPPRCHLPTALPQPAVDHSSRASMPAATADAAPAPPQPRSSGGDIGSSYGGARSGDGGAGSAAMRRRRVAFPALRATPSRRDGHAHRVTVGAWRDAARWPRVRYTVGGSTIVLRVRPLFAASLKIRSSLRR

SEQ ID NO: 121914 - protein, 45 aa, Oryza sativa
  Clone ID: PAT_MRT4530_24893C.1.pep
MDTTQLSSGHTRTWHDVYGGNTERPRRGSEGGILTTTRQGTKRQR

SEQ ID NO: 121915 - protein, 65 aa, Oryza sativa
  unsure (1)..(65): unsure at all Xaa locations
  Clone ID: PAT_MRT4530_24894C.1.pep
VHHPHXXXVLPXPAGRSRXXHKXXEKXAAXREQXQRRXRXRGARHKWXHGMHLTWGKYAFHPDAW

SEQ ID NO: 121916 - protein, 35 aa, Oryza sativa
  Clone ID: PAT_MRT4530_24895C.1.pep
MARFEVVAISRRHGRTRSSFYSASSITTVMSCVLG

SEQ ID NO: 121917 - protein, 249 aa, Oryza sativa
  Clone ID: PAT_MRT4530_24896C.1.pep
MAARQRRRAGAARGQAHPRPPRLSATVLADGGHACVPDSPRQRLRPSATSPRASSPAAATAVLATILADGGYGRTRLCHRPRQRLCSRPSATFETSPRASSVAAATAALATILGNLRDLPASVLTGGGRGHGRSRDLLLRWRLCPRPPLRPSSPAAAPLRNLPASVLADGGLVLSPLAFSLSSRPLAASWSCLILTARRRRVAFSPRRRKRGGWRRERGGRKSDRSGMVSILKIFSGTQPITRIVVAFF

SEQ ID NO: 121918 - protein, 149 aa, Oryza sativa
  unsure (1)..(149): unsure at all Xaa locations
  Clone ID: PAT_MRT4530_24897C.1.pep
RLRPRLLVYRTQPSLPPSARRQQPSPPPAARRRRLLASPPPAAIRPIPAAIRPIPAAGRPSASTPRPPTAIHAAXPPIGVGSSPAHRPPPATRRQVGLLLVFLNDITRNIISSNGAEILLVYYGYRVHPQAHGYTIIWNSCSGRCGCRL

SEQ ID NO: 121919 - protein, 62 aa, Oryza sativa
  Clone ID: PAT_MRT4530_24898C.1.pep
MAIGDTRMVNDVYSATRNFLNLTCHQKKNNVSYIFHNRKLGRDSAEPSGPSGDGTEKSGGGA

SEQ ID NO: 121920 - protein, 216 aa, Oryza sativa
  Clone ID: PAT_MRT4530_24899C.1.pep
MASEMVKAATSEKLKEMDWAKNIEICELVAQDPGKAKDVIKPIKKYLGSRSKNTQLYAVMLLEMLMNNCGEPIHKQVIDNGLLPILVKIVKKKTELPVREKIFLLLDATQTSLGGVKGKFPQYYGAYYELVSAGVQFSNRPNVVVTQAQAPVPVPEPTIEPNNNSLSRRLDEGQKEVHAQPVSESSIIRKASSVMEVLKDVLDSVGPRRPEGATGE

SEQ ID NO: 121921 - protein, 660 aa, Oryza sativa
  Clone ID: PAT_MRT4530_2489C.1.pep
MGLLMFLYANMILAPTMYIFFASALPVIAFGAQLSRETNGILTTVETLASTALCGIIHSILGGQPLLIVGVAEPTIIMYTYLYNFAKNQQALGERLYLAWAGWVCIWTALMLFLLAMFNASNVISRFTRVAGELFGMLITVLFLQQAIKGIIEEFKVPRDADHSSPIYQFQWLYVNGLLGVIFSIGLLYTALRSRRARSWVYGQGWLRGFIADYGVPLMVIVWTAFSYTLPKDVPSGVPRRLFSPLPWESSSLQHWTVAKDLFSVPPAYIFAAILPALMVAGLYFFDHSVASQLAQQKEFNLKKPSAYHYDILVLGFMVLLCGLIGIPPSNGVLPQSPMHTRSLAVLKGQLLRKKMVQTANEGLMNRASSLEIYGKIQGVFIEMDCEKNVVLYGKCSSKSTYRSKIVLQTDSVDKELKSLKDAILQEVDKEGTLAEEFDPIKHIEAHLPVRVNEQRLSNLLQSLLVGACVGAMPVIKMIPTSVLWGYFAYMAIDSLPGNQFWERVLEGPHASFMESVPSKTITVFTIFQLVYLLICFGITWIPIAGILFPLPFFLMILIRQHVLPKFFEPNDLRELDAAEYEELEGVHHDHTLEDGESDSGSCGSRDDAEIFDELTTNRGELKHRTSSHREERHLQVHSNAIQPSKQKQLDFTEGGCKLV

SEQ ID NO: 121922 - protein, 99 aa, Oryza sativa
  Clone ID: PAT_MRT4530_248C.1.pep
MPGSYRDEIPLSRRAEQRGEGGRLRRLSTRAKEEGLLSGRRTWPSATSFGETGSPCPDKLSSEEEVAACEDLRRPPVTSSGVRRDSEGSGQRRRYGHRR

SEQ ID NO: 121923 - protein, 607 aa, Oryza sativa
  Clone ID: PAT_MRT4530_24900C.1.pep
KTILISRRSRHFAGTRYLKRGVNDHGKVANDVETEQIVFEEEAGSWKGRMSAVVQMRGSIPLFWSQEAGRLSPKPDIIVQRYDPTYEATKLHFDDVAQRYGHPIIILNLTKTFEKRPREMMLRREYFNAVGYLNQNVPEEKKLRFIHWDFHKFAKSKSANVLGVLGGVASEALDLTGFYYSGKPKVQKKRDGSIDIRASSGDLSRLSSNADSLGPTASQDIRKDDSKQELLGDDSSIASALMDLYQSMGDALAHQYGGSAAHNTVFPERQGKWKATTQSREFLKSIRRYYSNAYTDGEKQDAINLFLGYFQPQDGKPALWELDSDYYLHVTTYGDDLISDSYHMTSSTGNSAPGESGAALSPGATLSPVPACKEDFSRMKLTSFDKLIERTCSSIRNVRLHCDADLKQSGTVGTSGMAPDAVEIQLRTPNWLFGQRKHAETVPTVKVIPVENANEGNGEDTNVSLCGELNWLSSADTCEEDNFRRYLAFTTADVENGWYGGTLIYDQDENSGAYKHYSEFCQGSVMDPLEHDPEKEMHYAEALSVDIDITDDATVEAEMQAALDDYQIIGSDLSIIPSCGSLAEDPSQLTRWIIDFYSSLVIHKPVA

SEQ ID NO: 121924 - protein, 78 aa, Oryza sativa
  Clone ID: PAT_MRT4530_24901C.1.pep
DAGGSFWQSASDSRRHELQGLHWGYSRSFSSSGLPPSSWMHHSISSRGHLGGLTRRTDTLELQAGNMQHTLEDHVQVD

SEQ ID NO: 121925 - protein, 64 aa, Oryza sativa
  Clone ID: PAT_MRT4530_24902C.1.pep
KNYLNQLKYQISNSIGLLRSLKPVQSFYSILLYVLTVLCIFFMLLHDVVLLSRSCFTFQLSMYI

SEQ ID NO: 121926 - protein, 72 aa, Oryza sativa
  Clone ID: PAT_MRT4530_24903C.1.pep
MGASPSIGIPMPPVREQRARRRKKGEKQRKRKSGKKAGADMDTLTCGTHVGPTLTQPPRRIKPESKPLKELK

SEQ ID NO: 121927 - protein, 172 aa, Oryza sativa
  Clone ID: PAT_MRT4530_24904C.1.pep
YDPSLVLAGVRSLTFEHEEAQAGTPVLFVGYTTNTIMAHTPTTITRIRPINVDPLSPPQYRPTNIDCIAVDSPMSNRCNSGVILTPDGSRVLAVWMHCLWGKEWFRFGLRSHALIGVLGQIREGKVPKLRTPPAEFIPITTVEGSAMGLSKEWTANVSEKDPRHQLLQVHRV

SEQ ID NO: 121928 - protein, 110 aa, Oryza sativa
  unsure (1)..(110): unsure at all Xaa locations
  Clone ID: PAT_MRT4530_24905C.1.pep
TSPDIDIRDXPRQTQSGARGGRQEGSNAVSDLVSTSSYSRGEDYPIVDYVLMNXEQDRFRPTGVGLLPSYXRGPNLYKNICFCLFYLNLAYTLVPTIPIPYKYRSRDLKR

SEQ ID NO: 121929 - protein, 184 aa, Oryza sativa
  Clone ID: PAT_MRT4530_24906C.1.pep
MYRGGLRTPNAAQIQQITAHLSTYGRIEGKNVFYWFQNHKARDRQNAAAASASPTTSSPAPTTTTTTSPPPPPSFRRRSFCRRCTPPPPPPPAAGGGGVVLPAAEAIGRSSSSSDYSLGKLVDNFGVALEETFPAQPQQPATTMAMTAVVDTTAVAAAAGGFCRPLKTLDLFPGGLKEEQHDVV

SEQ ID NO: 121930 - protein, 235 aa, Oryza sativa
  unsure (1)..(235): unsure at all Xaa locations
  Clone ID: PAT_MRT4530_24907C.1.pep
MYRGGLRTPNAAQIQQITAHLSTYGRIEGKNVFYWFQNHKARDRQXSAAASASPTTSSPAPTTTTTTSPPPPPSFRRRSFCRRCTPPPPPPPAAVASSTTLIPFSPPPAAAAAYTTSYYYPFTAAAAPPPPRTSPAASPLFHYNQGGGGVVLPAAEAIGRSSSSSDYSLGKLVDNFGVALEETFPAQPQQPATTMAMTAVVDTTAVAAAAGGFCRPLKTLDLFPGGLKEEQHDVV

SEQ ID NO: 121931 - protein, 97 aa, Oryza sativa
  Clone ID: PAT_MRT4530_24908C.1.pep
MAAQESAAGTTNQVMRWRYGDVDDSNFAVHGRAVYLLVGLLVAVVVFVALCLYLRWACHRYTPDPEASSSSSAAGAAGAAAAASMHGLDAEAIGGLP

SEQ ID NO: 121932 - protein, 60 aa, Oryza sativa
  Clone ID: PAT_MRT4530_24909C.1.pep
MAARRVERRLMEKEMEARLWSSRDPVLLSTKMRSKASSIKRSWKEPMAWSVPLNRSKKKM

SEQ ID NO: 121933 - protein, 70 aa, Oryza sativa
  unsure (1)..(70): unsure at all Xaa locations
  Clone ID: PAT_MRT4530_2490C.1.pep
FFFFFFLXVFFFFFITMLKXXRWRGLNILLHLASISITHSIVRSVCPNYKPNTGNVPRRTVQHEFPTIPF

SEQ ID NO: 121934 - protein, 123 aa, Oryza sativa
  unsure (1)..(123): unsure at all Xaa locations
  Clone ID: PAT_MRT4530_24910C.1.pep
YIVPVKQNSERVEDVDLLIRRAXRCLEAGADMIMIDADDICQRADSIRADMVAKIVGRLGLEKTMFEASNPNTSEWFVRRYGPRVNLFVDHSDVMNLERLRGFNMRGVCNSPLFGIGSPFFLM

SEQ ID NO: 121935 - protein, 64 aa, Oryza sativa
  Clone ID: PAT_MRT4530_24911C.1.pep
IDRSIIYTKQRCLTVHGNFLVPQKQNMNLVKGYINAYKLKGVLAATVSPYRCFPTFQGLISWTV

SEQ ID NO: 121936 - protein, 588 aa, Oryza sativa
  Clone ID: PAT_MRT4530_24912C.1.pep
MASARCGQTMAPSHLKSVYYGIHLTLTQKSNEGDNETMLTENLELEKCDIPSLSDIAKQMEEEECDEEDSFQEVPYKKNRPMKAEPAITSRMSLRNRAELLTKKKNLESTGNSNPFAVFQLIDPFELNNIAIAANISLDSNLVEINNTVRVMDKKEKEKETHDIPHTDLRDVLENKSEEVDIVDNTEQEDFSWAWESSRGASGVILLDTNNEVIERLGTHVGAFFLSTDIKYRKDNSIWEVIVVCGPVVDSLTDEFLEELRCDLAYTTTFIPGRFILKGCIILHEVLHVLKTKSKKGIIMKIDFEKAYDSVSWNFLFEVLEKKNFPNRWIDWIKACVMGAILDSAKRSFVLIGLVPEIFPGRITYLQYADDIVIFISFDAKQVIVTKILLYCFEEMAGMKINYHKSEVFIVGLERLEIEEVAKMLNYPIGEFSMKYLGLPIGPNKILNQEFDFLPQKMEKRPSLWIGGNLTYAGRAIHINACLSSIPSYAVGFYQLPEGIHHKFDSIRGENIFKRMVSSNTLVTRVSILERPGVYQLINFIQQNRSMRLWLLEWKALCRSEVTLLMETMAEKLKVTTTTLGAQRTGVG

SEQ ID NO: 121937 - protein, 309 aa, Oryza sativa
  Clone ID: PAT_MRT4530_24913C.1.pep
MAMRRWREDAVALSLRGCGFGDGDDDRPEKPRRYGVTEMRSPFYAFRPAHHALQGHHIGIFSLCDQRSVSVCRSSGPFVDGLKFTGGSHSLMGKELVREITDLAHKHDIYVSTGDWAEHLLRQGPSFFKQYVEECKALGFDTIELNAGSLKLPEEALLRLVRLIKTSGLQAKPLFSVKFDSSDIPPSGDRAFGAYIVPVKQNSATSLRTKQFEDVDLLIRRAERCLEAGADMIMIDADDICQRADSLRADIVAKIVGRLGLEKTMFEASNPNTSEWFVRRYGPRTILQARSLDSFMRHFQVYLTCCVVN

SEQ ID NO: 121938 - protein, 348 aa, Oryza sativa
  Clone ID: PAT_MRT4530_24914C.1.pep
MYMDHKSLKYIFTQPDLNMRQRRWLELIKDYHLGKANVVADALSKKSYCNMSEGRHLPWELCEEFEKLNLGIVNKGFVAALEAQPTLFDQVREAQVNDPDIQEIKKNMRRGKAIGYIEDEQGTVWLGERICVPDNKELKDTIMKEAHETLYSIHPGSTKMYQDLKQQFCYQASLQMAPYKALYGRKCRTPLLWDQIGERQVFGIDVLREAEEKVKIIQERLRVAQSRQKSYADNRCRDLTFEEGDYVYLRVTPLRGVHRFQTKEKLAPRFVGPFKILKKCLSVPTEEADPERLEIQEDLTYVEKPVRILEFPMFRRRAFTLRKVQKCLKKLKASHTDPKQPFEHVEPV

SEQ ID NO: 121939 - protein, 91 aa, Oryza sativa
  Clone ID: PAT_MRT4530_24915C.1.pep
MRVFLRKEHHSEMKAKVSPKTSLCVFIVGLMRRTRRVNAKRAKRTEWLNSSILVVRFFLPINTSFTATAWILHLRRVGTISLFLGILGFVQ

SEQ ID NO: 121940 - protein, 444 aa, Oryza sativa
  unsure (1)..(444): unsure at all Xaa locations
  Clone ID: PAT_MRT4530_24916C.1.pep
MKAAAMEEPLIAGSSGGAAEKNGGEEEGLVVTEIKKQLYLAGPLVVGMLLQNVVQMISVMFVGHLGELALSSASMATSFAGVTGFSLLAFGAKQHHMLGVYKQRAMLVLALVSVPIAAVWAFTGEILLVVGQDPEIAAGAGSYIRWMIPTLFVYGPLQCHVRFLQTQSAVVPVMLFAGATAANHVLVCWLLVHRLGLGAKGAALANAVSFLTNLSVLAIYVRLSPACRRTWTGFSGEAFRDVLGFLRLAVPSALMVCLNTNSFAFMVPLGLGAAISTRVSNELGAGRPQAARLATRVVMLLAFLVGTSEGLVMVIVRNLWGYAYSNEEEVADYIAKMMPILAVSILFDAIQCVLSGVVRGCGRQQIGAFINLGAYYLAGIPVAFFFAFVCHLGGMGXWFGDILYRLEVQMLLLLTIPLCTNWDKEALKAKDRVCSSSLPKDLAT

SEQ ID NO: 121941 - protein, 92 aa, Oryza sativa
  Clone ID: PAT_MRT4530_24917C.1.pep
MGLEMEGMAAATGVSVPVLRLLLCIAATMPTGLMWRAEPGAAGRHLYAELTGAALSYLWFGATSNLLFGVPMACGYLAMLLWARIRGACNLP

SEQ ID NO: 121942 - protein, 226 aa, Oryza sativa
  unsure (1)..(226): unsure at all Xaa locations
  Clone ID: PAT_MRT4530_24918C.1.pep
MKAAAMEEPLIAGSSGGAAEKNGGEEEGLVVTEIKKQLYLAGPLVVGMLLQNVVQMISVMFVGHLGELALSSASMATSFAGVTGFSLLAGMASSLDTLCGQAFGAKQHHMLGVYKQRAMLVLALVSVPIAAVWAFTGEILLVVGQDPEIAAGAGSYIRWMIPTLFVYGPLQCHVRFLQTQSAXVCRVMLSAGATAANHVLVCWLLVPGSGWGAKGAALANAVSFLT

SEQ ID NO: 121943 - protein, 67 aa, Oryza sativa
  Clone ID: PAT_MRT4530_24919C.1.pep
QANYIHLYFFGPHITVAVHLNLQMIGNTCIVQRVYERRVVNNAFMYDSSQNFTGNHRQFSKKKSRTW

SEQ ID NO: 121944 - protein, 140 aa, Oryza sativa
  Clone ID: PAT_MRT4530_2491C.1.pep
RRSRHQQTTVLPRCTCFRRSGGWYDPSHRRVIQTAAIANLRPLMREDRAIPVSDKSTSQILLKIRQNTGVGYYASQRPEPVYIARVLCVCSLANHSTDQGLRTSLSAPGRTGKGGPARSPGEEPHAPSYLIKLLNSINII

SEQ ID NO: 121945 - protein, 192 aa, Oryza sativa
  Clone ID: PAT_MRT4530_24920C.1.pep
MAAAVRAYCRPIPTRRYPPLPPSPLPAARARHRCPSEPRLPRRPLALPPPPLRRRSPEQPPRRQHLSVVLIVTIHSSIAILNATVLPWCTTRRGAGGKHARRRRKGWPVTNARGEAFCSASSSPMRHRHRHSRMCVVLVCCLLLALVAPSVVAVARHDYGEGFRDFCSVHGATIAEGLVCKIGACVACHVGG

SEQ ID NO: 121946 - protein, 390 aa, Oryza sativa
  Clone ID: PAT_MRT4530_24921C.1.pep
MGSYALPRRSLVLFLLSAAAVASTAAWAAASSAAGGGDDAARRSLLDNGLGRTPQMGWNSWNHFGCNINENTIRSTVGGYIAADPKKFPSGIKALADYVHSKGLKLGIYSSAGSRTCSKTMPGSLGYEDIDAKTFASWGVDYLKYDNCNSDGSSETVRFPKMSFALRKTGRPIFYSICEWGQRNVATWGGQYGNSWRTTGDINDSWASMLSNIDSNDASASYAKPGGWNDPDMLEVGNGGMTNDEYVVHISLWAIAKAPLIIGCDVRSISRETMEILSNPEVIAINQDPLGVQGKKVRKYDNEIEVWAGPLSQQRTAVLLLNRGATGSRQITAAWQDIGVGPGVAVEAKNVWLHATAPGRFTGSLTAEVAAHSCKLFVLTPVGRASEERS

SEQ ID NO: 121947 - protein, 435 aa, Oryza sativa
  Clone ID: PAT_MRT4530_24922C.1.pep
MAAIQAHQRLFLASTCAGQRLRPRPSRIAAPCRAAVSGGVRTAQSPSSSSGSGSPSSMSLNLDWIAAVPAKEDVSGAAAVELEKLRAIAEAAADRAEMHDIIGRQRDNWNHLLLHSNNSLLLAASVMAALAPAAPTVVALKASAGVLLASAAVTMAAVNKIQPSQLAEEQRNATRLWRQLERDVRATLALAAPVTRADVHDAMDRVLALDAAYPLPLLPGMLEKFPKTVEPTRWWPKKKQQQQQQQRAAVNKSNSFGSSSRRRGARGNGWTPELEEEMRGILRVIKAKDEHQYITVGKMVLGLNKGLAVAGPALAGTAAVAAAFIGSGEAGAWASGAAVLGGALAAAANTVEHGGQLGMVFELLRNCAGFYRKMQEEIEANLGEADVERREDGEVFETKVALQLGRSTSELKQFRRMASPAVKDDDVKDFAGKLF

SEQ ID NO: 121948 - protein, 151 aa, Oryza sativa
  Clone ID: PAT_MRT4530_24923C.1.pep
MAMAGIIEGGSSVAEGELRTVVAGRDGEGTSKQRQQAGTMEPARSGGGGAKNGGGGARLLLCVLAAKAHAGLLRGAPYEHHRPVHRRRFPFRPSPPASVARAPPPPPLESHRPQLHSSSTAATATRSSPVVVVIAFRLGARATSAVAQPHP

SEQ ID NO: 121949 - protein, 232 aa, Oryza sativa
  Clone ID: PAT_MRT4530_24924C.1.pep
MATTAATTMVAAVHHPRPCFRVRAAWDMNPSASPKPKAKPPPPPPPPLPTAPAPTHADLFARHSNSEGQVPKKTTSMGFERWWLPPPPEVKKPRSLYNAASLAYLGDCIYELYARRHFFFPPLSINDYNKRVMDVVKCESQDLLLNKLLGEDFLTQEERDILRWGRNIVSSKTRTRKRAGIAVYNRASSLETLIGYLYLTNFKRLEQLMFQLGFTSGASSHHIADELVSGFK

SEQ ID NO: 121950 - protein, 328 aa, Oryza sativa
  Clone ID: PAT_MRT4530_24925C.1.pep
MDFHHGDADDFALEFIREHLLGVDGATATATEPADLEVVEPAAAYPPMSWQEQRQQEQHGCHVELTDEHLESAPAAEAAAAFRTAPAQPAAEVMIKFGGEPSPVRPSSSLTISLPPSSFGSWASAAAPAAAAVEDFRKYRGVRQRPWGKFAAEIRDPKRRGSRVWLGTYDTPVEAARAYDRAAFRMRGAKAILNFPNEVGTRGAELWAPPPPPPAHSAAASTTNKRKRQPSEDPDDGVEVIGVVSKAVKTEAPTSNSSSLSSSLTSRDTTPATSSAGAEHAGAAAESSPATPSSWSWEQYWEALLGGLPPLSPLSPHPALGFPQLTVN

SEQ ID NO: 121951 - protein, 168 aa, Oryza sativa
  Clone ID: PAT_MRT4530_24926C.1.pep
EEPTVGDLPDITRRRELTLFIRKTGPKNLTTAHFAKGKLAKPYTEDTKSLRQNDQTTKVTKGRARPSRQSLTTTEAVVDLQGGEQRQKPLSTPAHKLDWVFTQRGREPTEQHLQGGYGTHKSRRNRCHRSWTTGRGFGPRLPPKVDLQGARAKVFVLSLPSSSAKPDA

SEQ ID NO: 121952 - protein, 377 aa, Oryza sativa
  Clone ID: PAT_MRT4530_24927C.1.pep
MADAEDIQPLVCDNGTGMVKAGFAGDDAPRAVFPSIVGRPRHTGVMVGMGQKDAYVGDEAQSKRGILTLKYPIEHGIVSNWDDMEKIWHHTFYNELRVAPEEHPILLTEAPLNPKANREKMTQIMFETFSVPAMYVAIQAVLSLYASGRTTGIVLDSGDGVSHTVPIYEGYALPHAILRLDLAGRDLTDSLMKILTERGYSFTTSAEREIVRDIKEKLAYVALDYEQELETAKSSSSVEKSYELPDGQVITIGAERFRCPEVMFQPSLIGMEAPGIHETTYNSIMKCDVDIRKDLYGNIVLSGGSTMFPGIADRMSKEITALAPSSMKIKVVAPPERKYSVWIGGSILASLSTFQQMWISRAEYEESGPAIVHRKCF

SEQ ID NO: 121953 - protein, 320 aa, Oryza sativa
  Clone ID: PAT_MRT4530_24928C.1.pep
MSSSSSLYKQLGLGAGSPVSASHLLLLVLGAGFLALTVFVVHPNEFRIQSFFSGGCGRPGTDAATAAVAASPVKNVSGGASDAAAATTAARSPDNDVRVLIGIQTLPSKYERRNLLRTIYSLQAREQPSLAGSVDVRFVFCNVTSPVDAVLVSLEAIRHGDIIVLDCAENMDNGKTYTFFSTVARAFNSSDGEGSGSGSPPPPRYDYVMKADDDTYLRLAALVESLRGAARRDAYYGLQMPCDRENFYPFPAFMSGMGKAKNRYDMSPRMYNYRGASPPSCFRRDFAPDTIAVHMLKDAARWAETLRYFNATAALRPSHL

SEQ ID NO: 121954 - protein, 357 aa, Oryza sativa
  Clone ID: PAT_MRT4530_24929C.1.pep
MSSSSSLYKQLGLGAGSPVSASHLLLLVLGAGFLALTVFVVHPNEFRIQSFFSGGCGRPGTDAATAAVAASPVKNVSGGASDAAAATTAARSPDNDVRVLIGIQTLPSKYERRNLLRTIYSLQAREQPSLAGSVDVRFVFCNVTSPVDAVLVSLEAIRHGDIIVLDCAENMDNGKTYTFFSTVARAFNSSDGEGSGSGSPPPPRYDYVMKADDDTYLRLAALVESLRGAARRDAYYGLQMPCDRENFYPFPPFMSGMGYALSWDLVQWVATAEESRRDHVGPEDMWTGRWLNLASKAKNRYDMSPRMYNYRGASPPSCFRRDFAPDTIAVHMLKDAARWAETLRYFNATAALRPSHL

SEQ ID NO: 121955 - protein, 615 aa, Oryza sativa
  Clone ID: PAT_MRT4530_2492C.1.pep
MHFWLVLSGIQLMELLKIPFKGVVADIEGRAAWYKHDWLEGFHSGFRVCIWTAIMLFLLAMFNASNVISRFTRVAGELFGMLITVLFLQQAIKGIIEEFKVPGGVDHSSPIYRFQWLYVNGLLGVIFSIGLLYTALRSRRARSWVYGQGWLRGFISDYGVPLMVIVWTALSYALPKDVPSGVPRRLFSPLPWESSSLHHWTIAKDLFSVPPAYIFAAILPALMIAGLYFFDHSVASQLAQQKEFNLKKPSAYHYDILVLGFMVLLCGLIGIPPSNGVLPQSPMHTRSLAVLKGQLLRKKMVQTANEGLMNRASSLEIYGKMQGVFIEMDCEKNMPLLVLYGKCSSKSTYRSKIVLQTDSVDKELKSLKDAMLQEGDKEGTLAEEFDPIKHIEAHLPVRVNEQRLSKSVQSLLVGACVGAMPVIKMIPTSVLWGYFAYMAIDSLPGNQFWERIRLIFIPSSRRYKVLEGPHASFMESVPSKTITVFTIFQLVYLLICFGITWIPIAGILFPLPFFLMILIRQHVLPKFFEPNDLRELDAAEYEELEGVHHDHTLEDGASDSESCGSRDDAEILDELTTNRGELKHRTFNHREERHPQAHTKAVQPRCGDTENWSEC

SEQ ID NO: 121956 - protein, 39 aa, Oryza sativa
  Clone ID: PAT_MRT4530_24930C.1.pep
MTCSWPERSSRLLKSSKNKGICGTAKCNQQRGLKRIGGD

SEQ ID NO: 121957 - protein, 417 aa, Oryza sativa
  Clone ID: PAT_MRT4530_24931C.1.pep
MRQQRCATLLASLLQLVAVAVLPAAAAAAAAAAAGGAAGRCTTSTPLKTYAKCIALPTQGATLAWTYDARNATLDAAFTGSFISPSGWVAWGVNKDAPAMTGARVLAAFSDPSTGALLALPFLLSPDVKLQASPLVSRPLDIPLLASSASLVDPARTVRDGATVTIAATIRLSPNRTKLHFVWNRGLYVQGYSPTIHPTDASDLASHATVDILTTATEASPTASATLQWTHGSLNALSWGFLLPVGAAVARYLRPCASTGPAWFYAHAAIQATGYALGAAGFALGLVMGSASPGVTYKLHRGLGIAAATAGSLQTLAMLFRPKTTNRYRKYWKSYHHLVGYGCVVVGVVNVFQGFEVMGLGASYWKLGYCMALATLAGGCVALEVNAWVVFCRRQQEEKLMRREVEDVVVKDRAAAF

SEQ ID NO: 121958 - protein, 70 aa, Oryza sativa
  unsure (1)..(70): unsure at all Xaa locations
  Clone ID: PAT_MRT4530_24932C.1.pep
MGTSSSHVVSQPVEDNGNNXSDGCNTASGNGGNNNGDNNCNGNNTSSLNANDGSNIGRNNNSGGCNTSTS

SEQ ID NO: 121959 - protein, 108 aa, Oryza sativa
  Clone ID: PAT_MRT4530_24933C.1.pep
MPTVRKSLPMCALHAYLATRGELNGAQLRGVVGGERGTTSAASALVNRRPPPSAASHFPAPPSAFHLPRRCTTMRHASAVVGNNVIDGKEGKGKRRKHKEEWEREEEE

SEQ ID NO: 121960 - protein, 101 aa, Oryza sativa
  unsure (1)..(101): unsure at all Xaa locations
  Clone ID: PAT_MRT4530_24934C.1.pep
LARVQVPVRYTADGLMVVLYMPRMCWTTDRIMTAHDHASLQINIAHVLENGLFDGRSTTXALCDMIRAQGVTDRALDSLYCWRTADVMLCHMLLLALPVRT

SEQ ID NO: 121961 - protein, 661 aa, Oryza sativa
  Clone ID: PAT_MRT4530_24935C.1.pep
MGLRDGFSNNKLLDDFGYGGIQPNRNHPSLKILDVSKDVRLYDVKRVCNKETVLAGHENVVNPLLWIPFKWLRYDYDWSSTSNIAVLAPRLLMVKNGWFSVGSMYLALINNGCIERNKIIWKLKMPLKIKIFMWYLLKGISCLSLRSVPPAKSDGDFVDAAASSRPRSKDLRSPMDDSTDDDSYHPRKHYAYDRQVSSSRWRTSREYIRGPGPETHTTESAQDGQDPPAGVYSYGYFSGSGNDPQVQGHFVPEIQKYNPYVIFKGEQLPVPIWELPEEKVQDFHDRYFIAKDKSRVEARKTLNRLLEGNINTIERGHGYKFNIPKYTDNMEFNEEVKVSLAKAGKTISRSFCNANQREVASRTGYTIDLIERTLGAGLNISKRTVLYTNKDLFGDQSKSDQAINDICALTNIRRGSLGIIAAEKGIVVGNIFLELTNGKSISCSIGVQIPHRLDQIKDVCVEIGSRNIEYILVVEKHTMLNYLLEMDYHTNNNCIILTGCGMPTLQTRDFLRFLKQRTGLPVFGLCDPDPEGISILATYARGSCNSAYDNFNISVPSICWVGLSSSDMIKLNLSETNYSRLSREDKTMLKNLWQDDLSDVWKRRIEEMISFDKKASFEAIHSLGFDYFATNLLPDMINKVREGYVQVQEKKEPQDTEASED

SEQ ID NO: 121962 - protein, 61 aa, Oryza sativa
  Clone ID: PAT_MRT4530_24936C.1.pep
EEIKSLGFDDKFIRIWEYYFIYCAAGFKSRTLGNYQIVLSRPGNDKLLPFADNPYATFPAA

SEQ ID NO: 121963 - protein, 56 aa, Oryza sativa
  Clone ID: PAT_MRT4530_24937C.1.pep
LFCKGFFLSLNFSFFLSVNQKKIGFIPVVSIWLVIPVWHFGSKKKKKKKKKKKKKN

SEQ ID NO: 121964 - protein, 484 aa, Oryza sativa
  Clone ID: PAT_MRT4530_24938C.1.pep
MEKSEIFVGAHSYAAICAFTLIIGWLAHWVYRWINPPCNGRLPPGSMGFPIVGETFQFFRTSPSIDMPIYYKRRLERYGPIFKTNIGGQHVVISLDPEVNQFIFQQEGKLFQSWFPETTLNIFGKKTLTTYNRTAHKLIRSFVCKLYGPENVKKSLLPELENSMRESLASWIGKPSVEVNDGVSNMIFGLAAKHLIGLDITNSGELKKNFQEIFQVMVSIPFPIYFPGTSFYRCMQGRRNVWTTLTNVMKKRLSAPGNKFGDLVDLIVEELRSENPTIDESFAIDTLSGLLFASFAPLSCTLTTTFKFLNDNPEVFDKLKEEHEMILKKREGANSGFTWEEYKSLKFSTQVVNEINRITTVIPGGFRKALTDVQVNGYTIPSGWLVMISPMGVHLNPKLFEDPLKFDPWRWTEEKRISMQRNFMPFGGGIRMCPAAEFNKLFITLFLHIVVTEYRWKDIDGGNVKRISEVLVAQEYHIQLVPQT

SEQ ID NO: 121965 - protein, 41 aa, Oryza sativa
  Clone ID: PAT_MRT4530_24939C.1.pep
MPNSTKEEQFVIERAHECVRAGVEANEGDKMMADDNQPQPA

SEQ ID NO: 121966 - protein, 98 aa, Oryza sativa
  unsure (1)..(98): unsure at all Xaa locations
  Clone ID: PAT_MRT4530_2493C.1.pep
RAATHAAPPLRAXERCLRRXIITGRRIDRRRRRHPIRFHLACGLDALLVRWVFVHLSWNSKQGLTLLMQFLFFNFPGFTPYLSVMGLMEQVIKRVSFL

SEQ ID NO: 121967 - protein, 37 aa, Oryza sativa
  Clone ID: PAT_MRT4530_24940C.1.pep
SSPLLYSILFIYPSFTMIMVASYTCSCHGVSLSCDEQ

SEQ ID NO: 121968 - protein, 369 aa, Oryza sativa
  Clone ID: PAT_MRT4530_24941C.1.pep
MPPPPPATSPAPAAIRLGAPHPYLRTHGTKVARLHLLDWIVLALLVAIDAGLNLIEPFHRFVGEDMMISLRYPLKRNTVPIWAVPVRLHLPPFLDFRKKKTVPDRLLFSVLITAVLTDAIKDGVGRPRPNFFWRCFPDGIPKYNNITRGVICHGDKSVIKEGHKSFPSGHTSWSFAGLGFLSWYLAGKIKAFDRGGHVAKLCIVVLPLLIAAMVGVSRVDDYWHHWQDVFTGGILGLVVASFCYLQFFPPPAGEQGGGEHDLHGPRGWASTEAELTDGGALAAEEGVEVRDAIVEPVNGGWGGGRGKDVAAVVRVCGGGFWPHAYFEHILHPEVENQVQLTATSNHHQGLDMRTNNQSLDSMEEGRRAR

SEQ ID NO: 121969 - protein, 87 aa, Oryza sativa
  unsure (1)..(87): unsure at all Xaa locations
  Clone ID: PAT_MRT4530_24942C.1.pep
NPFPRVPTPFLLGLGLLFIWSGVTTWASSSDKQSTRLLPRSPAFPVDAHFXPTPGVSTPAPARDESQEALIIPTGRGEACDRPPVAT

SEQ ID NO: 121970 - protein, 53 aa, Oryza sativa
  Clone ID: PAT_MRT4530_24943C.1.pep
PITKKGGNGGWEGSHPFTGRGEGKTNYHPSLKGVGKAPHPGGDPEKGDPFPGS

SEQ ID NO: 121971 - protein, 144 aa, Oryza sativa
  Clone ID: PAT_MRT4530_24944C.1.pep
MADGGEVLSTAATVFRRRAAATEGWTSFSSQLRIQWKRRRPKATIDDNERRGWRSEHDGNPLVHGEIDFRRGFGARGTAAGVALTLAKPREVTGLTGDGRGDGARRLERRPEVEREGARGEAARAREKLGKKRERKRRSWDCYL

SEQ ID NO: 121972 - protein, 129 aa, Oryza sativa
  unsure (1)..(129): unsure at all Xaa locations
  Clone ID: PAT_MRT4530_24945C.1.pep
QGSLPPRIHIRRDQRQRYISPHVAPSEGGRAWAAAAAAPSQLGVGPSPNPRGXPPRGVEPGVERRPPPPSLGSGLLHLKRSMQPRHAAFNAACCASDWSVIGRMTDGTATVYPRPGFPFPGANGNPEVL

SEQ ID NO: 121973 - protein, 169 aa, Oryza sativa
  unsure (1)..(169): unsure at all Xaa locations
  Clone ID: PAT_MRT4530_24946C.1.pep
MGWDGARRTPLDTLTGQGYTVVVPSVIRPVTDRSDAQHAALNAAWRGCMDRFKCSKVGVRHAHLTLYTWADTWRGSGQPDPKLGGGSRRSTPGSTPLGGSHVGSGTARPQAMRGQLPLRPRLDPPRGEPHGVXGRPNPKLGGGSCRSTPGSTPLGGCHVGLGAASSLST

SEQ ID NO: 121974 - protein, 57 aa, Oryza sativa
  unsure (1)..(57): unsure at all Xaa locations
  Clone ID: PAT_MRT4530_24947C.1.pep
NLCYGVGPAFNFKRAMGAKLEXXVIWAPRVPCRGPLGPFVGSKGGPPLCRFYRVMKC

SEQ ID NO: 121975 - protein, 94 aa, Oryza sativa
  unsure (1)..(94): unsure at all Xaa locations
  Clone ID: PAT_MRT4530_24948C.1.pep
GPKPKSFSRARLYEIEKXSTPYXPVKXSIQSRIXSGDRSERIRTYNFPQGRVTDHRVGITHHSIEDVMEGESLDIFIDALLLRYEMDAIASFAS

SEQ ID NO: 121976 - protein, 119 aa, Oryza sativa
  Clone ID: PAT_MRT4530_24949C.1.pep
MLKRLFGIHVTCLELLQTLLNLPQRKRSPVQRTTTDDDEQRPATRTEDGAARLDGGDGALAACDGGEGVAGVLLLRTHPTAAMGSGGDGYSGGAARLERHRRRRRLVQRGGGAMGNGDG

SEQ ID NO: 121977 - protein, 60 aa, Oryza sativa
  Clone ID: PAT_MRT4530_2494C.1.pep
MRTGRRDRLLTAKIHSEQQKRRPPAEFGQVGPAHGGFGGTLLSAIRSRASLRRCGLGPND

SEQ ID NO: 121978 - protein, 165 aa, Oryza sativa
  unsure (1)..(165): unsure at all Xaa locations
  Clone ID: PAT_MRT4530_24950C.1.pep
TLGFIDFPPHCVAKMPAKLEDWDDELDGEWEAPQIPXPEYKGEWRAKQIPNPAYKGEWVHPLVDNPEFFEDDKLYLFKDNAYLGFELWQVKAGTIFDNILVTDSVQEAKDFAXETFEKTIKGEKAAKEADDKKQEEERKKAEEAAAEKDTEEDEEESEPKDKDEL

SEQ ID NO: 121979 - protein, 357 aa, Oryza sativa
  unsure (1)..(357): unsure at all Xaa locations
  Clone ID: PAT_MRT4530_24951C.1.pep
NTGLVAAKRDRPPLNQXRNTDEIALRLGDAKTTSSRREATEXPPPPSVGAXRSQDRAFTQQPPLKNETAPTATTPSATVARVSAADASARAFAADAVPPRLPRPPAVAGTPRLCYRPVTYVSPPTPRPCLHGPDPAAASADPAARVLDPAVAALDSLPQRLATARPSWRSAPPLRAETAAPPRRRRRRWRPRRLGPPPRPARLPRRRRILPGRRRRRQMAPRRTLRMGRSPPPPPRRRGRPPGPPPPPPPPRSRRAQTPASSSRRRFRSSRLRCRRHRRRRSSNSSSSSCRRPLRSRRRLRSGSRRRCTSRASRLSPPPPFPTGPTRSTSLATVNCLLLITSVDFTCLSPRICCSIN

SEQ ID NO: 121980 - protein, 604 aa, Oryza sativa
  Clone ID: PAT_MRT4530_24952C.1.pep
MDPDGDGSFHRNEAISAVQDVDQYYGDDDDYDDLYNDVNVGDGFLQSSHPPPQPPPPPQQQQQPPPISQQPPPLQAPPPPPQQQQQQQQLQAPPSLPPPPPQRQPEKVHIPGVAAVPPAPVPDRPNPVHLPPQPQPPVAAAPPPPPHNQIQPGGGDGFHRQGGGNYGGGPIVVGNGGGGDGPGGTTLFVGELHWWTTDADLEAELSKYGQVKEVRFFDEKASGKSKGYCQVDFYDPGAAASCKEGMNGHLFNGRPCVVAFASPHTVRRMGEAQVKNQQSMAQQNSGVQKGGRGGGAAGGPGGAQVGGNYGGGRGGGGGGPGGGGGGGGGGNWGRGGGGMGGRGQAGNMRNRMGPVGGRGLMGNGGMVAPPPPMLHPGGMLGQGFDPTGYGAAMGRMGGGFGGFPGGPGAAPFPGLMQPFPPVVAPHVNPAFFGKEGGMGAGGVGMWPDPSMGGWGGEEQSSYGDDAASDHQYGEGGSHGKKRPPEREWSGASDRRREREKDLPPPPDWPERRHRDERDAGRERERERDRDRERERDRDRERERERDRDRERERYRDDRDRHGDYHRHGKRESDRNEDWDRGRSSGRRSRSREVDHSKRRRMSPE

SEQ ID NO: 121981 - protein, 553 aa, Oryza sativa
  Clone ID: PAT_MRT4530_24953C.1.pep
RMRSATDVPMLHHRSTFADMWDHCTGAPRRLAFVRRRPRTSIGSSSSHRGHLLYRWPRLSRQVGLLHCTRLSCQSGLPPSAAPLCAKPVSDPSSKRCLAGQMQPSAMPSARRPRPPCLLPSASAPPATAAATSGHGHSYHRRWPCQLATATTPSATVARVSAADASARAFAADAVPPRLPRPPAVAGTPRLCYRRRASTASTAVRCRRRPCLRCRCRASAAATPRLAAVAVTYVSPPTPRPCLHGPDPAAASADPAARVLDPAVAALDSLPQRLATARPSWRSAPPLRAETAAPPRVGASPTPSRRAARFPPTRFGGGEAGERREEWWRPEAAPPSIRQPATSILQGKDGGADEEHGGGGEAATLRRGARAALVLLLVGGRGAGTFRGALGDGDRGRGDVGGGGGLGGWGLPRGRLGFLAAAGFFRGGGGGGRWLLGGRFGWAARRLLRLGVGGARRGLLLPLRLLARAGRRRRRRGARVFLFVSLLRRRGGCACRCRGSRALGRSSTVVVVVEHVHVHAHRLERPGPQAKLLGGFRQHPRALRSPLGLFRLR

SEQ ID NO: 121982 - protein, 57 aa, Oryza sativa
  Clone ID: PAT_MRT4530_24954C.1.pep
YYSFGSITTSSVMIVICNLVTVTSIQGEPIVCSSLSVFSLLCPASKARQHIVPIISN

SEQ ID NO: 121983 - protein, 133 aa, Oryza sativa
  Clone ID: PAT_MRT4530_24955C.1.pep
PPGAMSHQPPPIPIRGASWGDVPASAAQFGAPGGIPQAAPPQLWCAVAGILRADCGSRSSVVPSYGVEFRVSTAAAVRWGTPVWASAVPVRSHPFLHNRRHCRSRRRTWDRRGVAPLRLELRRGSLRDLGLVL

SEQ ID NO: 121984 - protein, 108 aa, Oryza sativa
  Clone ID: PAT_MRT4530_24956C.1.pep
LRYYMKDSEVTLGRETEDIKVDVDLGKEGRANKISRRQAVIKMDEAGSFHIKNIGKCSIFVNSKEVPSCRRIILSSDSLIEIKDMRFILHVNQDAVTQFVTRTPKPEH

SEQ ID NO: 121985 - protein, 146 aa, Oryza sativa
  Clone ID: PAT_MRT4530_24957C.1.pep
MAIWGLHGEFLPKAQRDEFSFKDMIRYECPMMIPVLLGDARLHYGDADILMTTRRTLRDGKINTQHAQVTTVMNHLPLTKKMLRIDGLQRAWGLNSNGPYDQTPNKKSTEDNGFEFKQRAEIGSPSLIGSTGLVAGASSELGFSNP

SEQ ID NO: 121986 - protein, 334 aa, Oryza sativa
  Clone ID: PAT_MRT4530_24958C.1.pep
MECSISRTNLNCISLGDPDTKKSVALLKQACLDSGFFYVVDHGISQELMDDVFAQSKKFFDLPINEKMELLRDEKNRGYTPMLDEILDPENQVNGDYKEGYYIGIEIPEDDPQANRPFYGPNQWPSDEVLPRWRKVMEQYHSEALRVAKSIARIIALALNLEEDFFDKPEMLGEPIATLRLLHYEGGQKTGKVSNPAEGVFGAGAHSDYGLITLLATDDVVGLQICKDRNAQPQVWEYVAPVKGGFIVNLGDMLERWSNCIFRSTLHRVVLDGRERHSIAFFVEPSHDCVVECLPTCKSESNPPKFPPITCSAYLSQRYKDTHADLTAYSSNKA

SEQ ID NO: 121987 - protein, 496 aa, Oryza sativa
  Clone ID: PAT_MRT4530_24959C.1.pep
MAELPLAAGLLDLRPCKLAPPPPPPLPVSPSPRHHRRPHSTATACRAAPDLHSSTELADGSIVFRFARPRDDDDEEQQQRRADAVAPEAAAVVESGLDGDAAAAAEPEARDGGGEGEVTATATGLDAEEVVASGGAEATATSGLEDAGEEASDGSTARDSDTDVDTESSASTAADDDQPAEFAVPPPPAEEVCNKVDWEKDTSEVKNTDRMVPVASSTLVLASGAAILPHPSKVLIIALRVLFYAVYLWTLVYLDPITEANSFKAATGGEDAYFIACDGWFGVADGVGQWSFEGINAGLYARELMDGCKKFIMENQGAADIKPEQVLSKAADEAHSPGSSTVLVAHFDGQFLNASNIGDSGFLVIRNGEVYQKSKPMVYGFNFPLQIEKGDNPLKLVQNYTIELEDGDVIVTASDGLFDNVYEQEVATMVSKSLQADLKPTEIAEHLAAKAQEVGRSAAGSTPFSDAALAVGYLGFSGGKLDDIAVVVSIVRKSEI

SEQ ID NO: 121988 - protein, 111 aa, Oryza sativa
  Clone ID: PAT_MRT4530_2495C.1.pep
GAAAAGGRRRRRSLLLRVRACSSSAFGDALPLPSPSDDPFSRKPILVFTMIQRKKRERHLVGGGISMITYKIISKSSAEDWKAVISKKKSRKPYFCNEHDIRHMLLMKCFN

SEQ ID NO: 121989 - protein, 286 aa, Oryza sativa
  Clone ID: PAT_MRT4530_24960C.1.pep
LTHSLNNFFFFFFFFFFFFFFFFFFFFFFILSWTTKNIMGFPVGGYSGVPRLLLHLLFLLTHLRRLSSCLLRLAGADIDDSPTAVDAEYDGSYSYSSQSSQLLELDDHSPALRFDALSSSLQPPLHVATCAVCLRDFHKSAQALVEQSVSDMFEASTFFVPGDGESMLFWTDHWIDGGRSVASLAPDLLFAVPQRLRSRTVASGLANNSWVSDIHGALTVPVISQFLLIWDAALRIQLSPGVRDRLVWRWTSDQLYYARSAYQAFFFGQHSFACADLLWHAKGPAK

SEQ ID NO: 121990 - protein, 1574 aa, Oryza sativa
  unsure (1)..(1574): unsure at all Xaa locations
  Clone ID: PAT_MRT4530_24961C.1.pep
MMQIMDSVENHYIYEEIGRPKVRFKDQKVLANLICKLGLFLSPQLKGPMSIVAGGGDLGIVGETIAHPKPADSTMAGPMSAAPDSRALFPVEDGHEEQVSSQALKMDTGSGDNTLRPEKFTEGEMNEEEEDVVEVILEEGEVQEAGQWTILARFYSLRVPNQAALFDDMRRAWRLRADMSYKSLWDNMFIITFSAEGDYEFVLKGGPWIHRGDALLVARFDGLSRPSEVPLETVPIWVRIYDLPLVLMMKARGELYGSKLGQVREVDVGDDGRNKHDFFRIRVDLSVKRPLKSKLAIKMLAQGKEVTKRFDLWYERVPHFCFICGYLGHSDKECNRKGVNNDQPFKFSAELRCSPLKPFERKVSKVKVPSSSGVVRNLFFRGAGSASSLSSRQKQGDQGEDLVPPRVDAHDGFESAKKEGDTQIDEQLAGYAEKMKVGETEVQKVSLPGREGASHKRGPEIRLDGVEDTTSLPSCEMIPAIKTISQQASYGDELSEDCSGEDRREPQTQGATKKSGRVMQALLEYQQMVEESSKSVFESGVSSRALKRARKTEGVVTGKEKEATSPGAAGAMNCMAWNCRGIGNAASVHDLCALVKEAGSHIVFLSETRQKVDRVKRLRSRLGLKGFVGVNYEGMSGGLALFWHESIHMEIISINERFIDAYVRLSSDGPLWHVTFVYGEPRVENRCRMXAHLNALKQTSSLPWLVVGDFNEALWQFEHTSVRKRSNAQMQAFRDVLQTCQLVDLGFSGVPHTYDNKRQGSANVKVRLDRALADESWRDIFTNAQVVHLTSPCSXSFSHPTKCLHYEICWEREPAVQDIVKDAXVESDEMLHLGDISKALKRVMGALQSWMWRAKKNRISRLRASDGTIHNTATTMEKLATDYFKEIYKADPNLDQASVSQLFQKKVTAAMNENLCKEFTDEEIADALFQIGPLKAPGPDGFPVRFYQRNWATIKSDVVAAVKEFFHSGIMPEGANETAIVLIPKIDQPVELKDFRPISLCNVLYKIVSKCLVNRLRSILDELISVNQSAFVPGRLITDNALLAFECFHFIQKNKHQNKAACAYKLDLLKAYDSVDWVFLEQAMYKLGFAHXWVKWIMECITTVRFVVKFNGTLLDTFAPTRGLRQGDPLSPFLFLFVADGLLLLLDEKVNQGNLTPVKVCXSAPGISHLLFADDMLLFFKAEVEQAETIKSVLGQYAAGTGQLINPLKCSILFGESCPADTQTAIRNCLQLGNKSFEDKYLGFPTPEERMSKGKFQSLQEKIWKRIIMWGENFXLSSGGKEIMLKAVIQAIPVYVMGLFKLSNSVCEDLNKISRSFWWGADRGKRKTYWRSXDQLVKPKQNGGLGFRDFRLFNQALLARQAWRLIDRPESLCARVLRAKYYPSGSLIDXTAFGGNASPRWRAIEYGLELLKKGVIWRVGNGHSIRIWRDPWLPRNHSRRPITVRGNCRTKWVADLMGVDGTWDEQVVKRIFWPVDAELILTIRPSARAEEDFLAWHPDKLGIFSVRSAYKLALQLAAIDNGSGSSEAEISKAWNLVWKCNVPQKVKVFTWRAATNSLATMENKNKRKLEASGT

SEQ ID NO: 121991 - protein, 88 aa, Oryza sativa
  Clone ID: PAT_MRT4530_24962C.1.pep
ELWEFAYTWNGNDHTYTGTAKTDGKTSILFEVPFAKDVTVAHSHHCWVPIRLKRVVETENGPRKSQTSRNRFLPRQSPDDDITGCQMR

SEQ ID NO: 121992 - protein, 74 aa, Oryza sativa
  Clone ID: PAT_MRT4530_24963C.1.pep
CCSAPVCSGTVHQSFLFRLRLSFGVAQVCLSFLPSTTRYHSIITFPTVHRPRLYEFYLVVFYCSSSLSNWVKIF

SEQ ID NO: 121993 - protein, 98 aa, Oryza sativa
  Clone ID: PAT_MRT4530_24964C.1.pep
PLVAAVMIVIVPSSSRMLGSAQTSSKIVTTSADPSSWLTTKMVVYGTVQLQSFPSAIALISKFMHFKEWLQRSPMSDQRTWFDTLLGSAPCSSRTFAT

SEQ ID NO: 121994 - protein, 848 aa, Oryza sativa
  unsure (1)..(848): unsure at all Xaa locations
  Clone ID: PAT_MRT4530_24965C.1.pep
MDEGYANLPTSHLLGSVPAALTPEERKPSPVAEVGTSRLQQFPPALGGTGGVGGGGGGYQPPGTPADGDVETQTNWKGYFNVASYAPYFNVDTDVVVDRLISSVYPMDGFFRKIDANPDIMTPRTAAALSGLLRGKNAVNLAPEQVPKLLATRASPARVEDGVCLRDPPGARYPLDEIPRRDAAVGANRVLFDYARRGMVLEVLDQFSVARRGGVLVDSATLSCVLKACRSVPDRVLGEQLHCLCVKCGHDRGEVSAGTSLVDMYMKCGSVCEGIEVFEGMPKKNVVTMRAEGIWPNPFTFASVLSAVASQGALDLGQRVHAQSVKFGCRSSVFVCNSLMNMYAKCGLVEDAKSVFNWMETRDMVSWNTMREDRVMPNEFTYSAMLKASLSILPPQIHAQVIKTNYQHIPFVGTALLASYSKFGSTEDALSIFKMIEQKDVVAWSAMLSCHAQAGDCEGATYLFNKMAIQGIKPNEFTISSVIDACACPSAGVDQGRQFHAISIKYRYHDAICVSSALVSMYSRKGNIDSAQIVFERQTDRDLVSWNSMISGYAQHGYSMKAIETFRQMEASGIQMDGVTFLAVIMGCTHNGLVVEGQQYFDSMVRDHKINPTMEHYACMVDLYSRAGXLHETMSLIRDMPFPAGAMVWRTLLGACRVHKNVELGKFSADKLLSLEPHDSSTYVLLSNIYAAAGKWKERDEVRKLMDYRKVKKEAGCSWIQIKNKVHSFIAFDKSHPMSDQIYKKLKVIITRLKQDGYSPNTSFVLHDIAEDQKEAMLVAHSERLALAFGLIATPPGTPLQIVKNLRVCGDCHMVMKMVSMIEDREIIMRDCSRFHHFNGGACSCGDF

SEQ ID NO: 121995 - protein, 82 aa, Oryza sativa
  unsure (1)..(82): unsure at all Xaa locations
  Clone ID: PAT_MRT4530_24966C.1.pep
XFXXXXFYFXLRXPXTGRXVASAXAATPAXMSRPMAALTGVAPGDRRGGPGLRGPPAGGRAGRAPTRPGGSGNSRGCRCPET

SEQ ID NO: 121996 - protein, 204 aa, Oryza sativa
  Clone ID: PAT_MRT4530_24967C.1.pep
TRGDSGSILYKAGPIIGSGGHSSGKSPYSSRIRDADPTDQSASNKKQRLPYTSAELAAMEVRAIECLRRLLRRSGEALFLLQLICQHNVARLVQTLGNDLRKKLVQLTFHQLVCSEDGDQLAMRLISALMEYYIGPEGRGTVDEISTKLREGCPSYFNESDYKYYLAVECLERASMTNNHDEKDILARDAFNLLTKIPDSADLS

SEQ ID NO: 121997 - protein, 104 aa, Oryza sativa
  Clone ID: PAT_MRT4530_24968C.1.pep
MMSKRKIANNLHHQWTPPYPLRPATWSTMASCVKLKESMQMQIRVLFPYLLVLSMSSTWSSRWLLLLAQRPAARLEIVPSPQPPPATARRPPPSTATVSSSSSM

SEQ ID NO: 121998 - protein, 101 aa, Oryza sativa
  Clone ID: PAT_MRT4530_24969C.1.pep
VFSWLHHTPICSQLCYITGHRSTNWPCMECSRQFHPAFLNLSFCIYNHYQTNGISLPTTLPKVSSAIDCSKHSQACCIPYNFLTVILIYCKQIKLTTLHVN

SEQ ID NO: 121999 - protein, 139 aa, Oryza sativa
  Clone ID: PAT_MRT4530_2496C.1.pep
LIAIYPVLVSYSSPDKQAFPRHTLSRAALIMSESPIFLLDAFTNLIVYYSPSADPSLPFPPPHDCLLRTMINELKQGRCITPKLTFIHGGREDPALFERYLIEEQDVDGTGFTSGKGFVSFRESIRHAATDIIETESSI

SEQ ID NO: 122000 - protein, 372 aa, Oryza sativa
  Clone ID: PAT_MRT4530_24970C.1.pep
MALWRCSSSWLSSVSRSSGGVGGGESKVSPEIAPVSGGEGEGEEEEGEEERWSRLLPELLTEIMRRVDAGAERWPPRRDVVACACVCRRWRDAAVSVVRPPLECGRITFPSSLKQPGPRDAPMHCFIRRNKKNSTFYLYLSLTQALTDKGKFLLAARRFRNGAHTEYIISYDCDDLFPGSNSYVGKLRSDFLGTKFIIYDSQPPYDGAKPSRSQSSRRFASKQINPNVSGGNYEVGQVSYKFNFLKSRGPRRMQCNIQCPVGQSTASDPLKKLISTSSPLALRNKAPRWHEHLQCWCLNFHGRVTVASVKNFQLVAPAGTSDPWGIADEETVILQFGKIEDDAFTMDYRQPLSAFQAFAICLTSFGTKLACE

SEQ ID NO: 122001 - protein, 61 aa, Oryza sativa
  Clone ID: PAT_MRT4530_24971C.1.pep
VRHSQVLIAARSSCRRPGMSRNISIACERIWSTHLSSTSLFLRLVEGPQSCSLGELCTWKV

SEQ ID NO: 122002 - protein, 59 aa, Oryza sativa
  unsure (1)..(59): unsure at all Xaa locations
  Clone ID: PAT_MRT4530_24972C.1.pep
IASGRSRSGQIYDVTXSRMFYGPGGPYALFAGKDASRALAKMSSSPGFDRDIWLALTRH

SEQ ID NO: 122003 - protein, 51 aa, Oryza sativa
  unsure (1)..(51): unsure at all Xaa locations
  Clone ID: PAT_MRT4530_24973C.1.pep
LPALDPSIEHALDEEDIEDDVDQATAEASDNLSFYXPPPPPSSPVQQSLSD

SEQ ID NO: 122004 - protein, 292 aa, Oryza sativa
  Clone ID: PAT_MRT4530_24974C.1.pep
MPFHFQFPWLPNNPTSSSSSPTKPPSPAIPNPFLPIQAGLASFLSSLPLPRAAFPPPPWARISSASASAASASALPVAEIEERLAGVPVYALANSSQEFVLVSSAPGGGGGGGGARAAVPPPALGLLCFRREDADALLAQMDGDMAAGSTVVPVALNKVIQLKSDGVAFRFVPDSSQVANAMKLMENEGQYVNDGFPGVPVFQSRSLVLMSDNKRYRPVFFRKEDLDNSLHRASRDQQKPNPAVKMGDIQVSSLENIIKSMKDSSSSKWDDAVFIPPGFDLATSSKQSNHDN

SEQ ID NO: 122005 - protein, 55 aa, Oryza sativa
  Clone ID: PAT_MRT4530_24975C.1.pep
AAPSTSSSLHRRPSVVVGVVGIDGGRGGLELGVERVGPLPGELGRGRTWAAGRDA

SEQ ID NO: 122006 - protein, 65 aa, Oryza sativa
  unsure (1)..(65): unsure at all Xaa locations
  Clone ID: PAT_MRT4530_24976C.1.pep
MATAGKVIKCTAAVAWEAAKPLVIEEVEVAPPQAMVVRVKILLPSLCPXXVCFWAAARPTAPFPP

SEQ ID NO: 122007 - protein, 158 aa, Oryza sativa
  Clone ID: PAT_MRT4530_24977C.1.pep
ALPVLLLQSSSEQASRLAHRCRRRRGGRRAATWRRGRPAGRRGGRRRGRPRTPRRTRGSPRRGRGPRRPARPCPPPRRCSSAPAGAPRRGGRSPGPPRRNPATSSARGPAAAGEPRRGGRGRRPPGTPRRCLSASAAPGAPAVAAGRAPPQRRRGRRP

SEQ ID NO: 122008 - protein, 76 aa, Oryza sativa
  Clone ID: PAT_MRT4530_24978C.1.pep
RLSLLFKYNQGHTLHLCDGPCNITNYPYQNTQRLFLININNMIIVLRIITITFAHYKLTYNIIPNISNFIISCPQL

SEQ ID NO: 122009 - protein, 167 aa, Oryza sativa
  Clone ID: PAT_MRT4530_24979C.1.pep
MACTQEVAFGVNLIGNGAGAGAVDKLLLILRRRCLTLLGGGAARSGAHQVGERSWQNPKTTPWMDLARIHGKELGQEKHDADELHKSTKEEEKTIRVREELYPLPHCRQPEPPELIKERGRTERDLLYRLERGHRQGQKVPSGRTVKWIAIFNLEGQWQLGKYYLRV

SEQ ID NO: 122010 - protein, 109 aa, Oryza sativa
  Clone ID: PAT_MRT4530_2497C.1.pep
MSVTLGGIIQLDKLLVRTIDSTQAIFELKLRLGLGSWDGDGDGDEKVSGGCVEARKWRQWVRGGAGGLCEEEMPVAERGRGNDAGGGKEKATSWESGWMERQMRNFAGW

SEQ ID NO: 122011 - protein, 133 aa, Oryza sativa
  Clone ID: PAT_MRT4530_24980C.1.pep
MAPKAEKKPAAKKPAEEEPAAEKAEKAPAGKKPKAEKRLPAGKGEKGSGEGKKDRAGRKKAKKSVETYQIFLFKGLKPVHPDIGIFFKGLFIMDFFINHLFEKVGRQGRQVGRFHQKATLTFREIQNFGRLVL

SEQ ID NO: 122012 - protein, 67 aa, Oryza sativa
  Clone ID: PAT_MRT4530_24981C.1.pep
TLKMAWLMIDWLMLIYRHSDEQNLPKLMEVDKSTQGTLEAPMFYNRKTLQEITNMGHDACAEFLQPG

SEQ ID NO: 122013 - protein, 136 aa, Oryza sativa
  unsure (1)..(136): unsure at all Xaa locations
  Clone ID: PAT_MRT4530_24982C.1.pep
MTLCSTVTTTDMQAKLDLRMRFSRHGNLEGNIAGADATVVSTVASVARAMMMAWTMACMNATVHALIIGPVIGTAYFMAYYKNILXMILRLSLKNSPENVTNTFLNSSVQGTRWLFQCMIKKLMLMVVRCAKCLRK

SEQ ID NO: 122014 - protein, 632 aa, Oryza sativa
  unsure (1)..(632): unsure at all Xaa locations
  Clone ID: PAT_MRT4530_24983C.1.pep
MSANYRTHISNRVHAPTSEQLPDASQPVTIIKPFNRKGYFTCLLFFFYLSFCVKFYIKFSSVEFDEIKMEHVFRTCWKVSAKVVFKSPVQQNKFGAQYIRFILKDAXDVVGVLIYVGEIHHHXLYGQSIPTRDIALVNRRVVASTCITVLLHVCYMAQEIRYSNXSRRLKDKIIEVSRRLKDKIIEGRKKHETASTPAYPGHVNQDAIHADIITTPPSKKATNSESEEHGVCKVSMPNINVPSNLIRSMFGQTYEYLPQDYELTDEDVMAIFLIEDLTENCTLVISAYIHCMREQANNDKKVKYENPFLSDMLKAAGVNGVNEDKDNFITKIVKNYLDHELIFIPINMKDKHRYLPVVNTEKQQIQVLDSMCMTFNRVDLANTLQGLQYHLNIIGRQQDLPSHKWGDLNVIKWPIIEQLKERIQEDSSSCGLFMLKLMENWTGESLSRSITQMSKQELISGLLHYIQQINCAEAMEKIWVQSSMPHFISLSLKQLQTILKKDEPLESECFNMAIHKFMYEKIEMIHKTKEAISNHCLDLQFWILILVRHARSFIVLVVDQESQTLYVLDPNPLMPEYKNNPNMRYTRKLITICDHFNKAMRKACPGSRWNEDINLWRQVIVNNPVYNRMVTS

SEQ ID NO: 122015 - protein, 984 aa, Oryza sativa
  Clone ID: PAT_MRT4530_24984C.1.pep
MENAVVVQPWRIVRFHDIQMDHIHWKWWIVRARVIKKGHLQENYYGDLQIRLILIDELGTKMEAIVYRRQAEHFNQLLRCGSVYDFYNVGFDPTEMIVHLRFKIRSQFCMILNNVTTTRTPHDVIGLVVHVGDIEFRSLYLRQTPTRIIALVNPRLQIIFVRVWDQQLTRNLTRWRSARTHFDCFVATLTRVDRRADELSTTYESDIIFNPDSASANEFNVLRQALAVSPSNVQEQERIFHMFVILLLFVILCKNFYIKFSSVEFDEIKMEHVFRTCWKQNKFGAQYIRFILKDTTDTRMEALAYDQQADRFNGTIQSGLVYNFTNVGFQPTDVPTYANLTMQAKFCMILTPKTALRKPRFVDFSAIFTDAISDDMFIDVVGVLIYVGEIHHHQLYGQSLPTRDIALVNRRVVASTCIIVLLHVCYMSQEIRYSNRYPCLISCGTQVNQDAIHADMITTPPSKKAKNSESEEHGVSKVSMPNIDVPSNLIRSMFGQTYKYLPQDYELTNEDVMAIFLIEDSAENCTLVDMGHFYNKKRHLTCLLSGDKFLNDDVISAYIHCLSEQANNDKKVKYENPFLSDMLKAAGVNGVNEDEDNFITKIVKNYLHHELIFIPINMKDNHWYLAVVNIEKKQIQVLDSMCMTFNRADLANTLQRLQYHLNIIGRQQDLPSHKWGDLNVIKWPIIEQLKERIQEDSSSCGLFMLKLMENWTGESLSRSITQEDITLFRSKLASVLLRWKTNKAVMTTGEQIEDTKDSDDDVVILVSKMSKQELISGLLHYIQQINCAEAMEKIWVQSSRPHYISLSLKQLQTILKKDEPLESDCFNMAIRKFMYEKIEMIHKTKQAISNHCLDLQFWSATGFGKVPVHHDNINLAETVGSWSEIHYKLSQCKAILIPVRHARSFIVLVVDQESQTLYVLDPNPLMPEYKNNPNMRYTRKLITICDHFNKAMRKACPGSRWNEDINLWRQVIVNNPVYSRMVTS

SEQ ID NO: 122016 - protein, 160 aa, Oryza sativa
  Clone ID: PAT_MRT4530_24985C.1.pep
PSELGGLPRLQELRLAGSGYSGQIPAAFGQLASLTTLSLEDNNLTGEIPPVLTRLTRMYHLNLSNNGLGGAVPFDGAFLRRLGQNLDLSGNAGLCLDDRMVVRGVGVGVGACHAGGGGDGSLAPGGVTGAAATVRGSVDGYPFRLLDHACLVVACLVSLN

SEQ ID NO: 122017 - protein, 68 aa, Oryza sativa
  Clone ID: PAT_MRT4530_24986C.1.pep
DSGSSIVQNVRIPPNVRLCEVLSPSPSCVRLVPRIFTMRLVCCNNMDPVFCLSVLLDLISILKSFLLY

SEQ ID NO: 122018 - protein, 651 aa, Oryza sativa
  Clone ID: PAT_MRT4530_24987C.1.pep
MGAARGVLQAALLLAGGDADFLLVSPAAAAAVNSTSATLDNIQPLLTLNMAAARVAMDAGSAIRASPELLGTNGEDSVWDTVNFTTPAPTDGHWIALFSPADFDLIMGGKQSSSRINAAGEDEAPAGLPIAPIKYKFANISPSFMSSGSGDTSFLLINQRYDYAFGLFSGGKDNPKLVAVSNKISFANPKAPVFPRLSQGKGWNEMAVTWTSGYNVDEAYPFVEWTMNEKENARARRSPADTLTFTRNHLCGKPANAEGYRDPGFIHTAFLKNLWPNREYSYQIGHELLDGTIVWGKSSTFRASPSPGQASLQRIVIFGDMGLGQSDGSNELAGFQPGAQVTTERLIKDLPNYDAVFHIGDLSYANGFLAQWDQFTAQISPVASRVPYMVASGNHERTSRDTGGFYGGDDSHGECGVPAETYFRAPAAANRGKPWYAADHGMFRFCVGDTEHDWRPGTAQHAFLDGCFAAADRKHQPWLVFAAHRPLGYSSNEYYAREGSFSEPMGRTLQPLWQKHRVDLAVYGHVHNYERTCPVYENTCTAAPAAAGGGGNGSSPAAAYTGALGGTIHVVAGTGGARLRGYAGGEWPQWSAARSESYGYVKLTARDHSRLELEFIRSDDGEVLDAFSITRGYKDVLACAVDACDPHTLAN

SEQ ID NO: 122019 - protein, 137 aa, Oryza sativa
  Clone ID: PAT_MRT4530_24988C.1.pep
MKGLIRSGGGDATPAEGDQVIVHCTTRTIDGIIVNSTRREHGGKGVPLRFVLGKSKMILGFAEGFPTMLMGEIAMVVLRKYLSFSHSIFSQFKMKPQIHYAEEDCPVTAPDGFPKDDELQFEIEMLDFFKAKVSLVE

SEQ ID NO: 122020 - protein, 762 aa, Oryza sativa
  Clone ID: PAT_MRT4530_24989C.1.pep
MQGSKTKSGHAEAKSNGKAEAKGTPPTPKSAKIARKPAVPKAPPRPSADKSQSPGSADRKKSASRITTPPEKQGKATKPAQESVAAKPSPQEPVAVKPSSQEQEQQALLAAVQQELVKAKEELVEKEKERGKVLDELERAKRAADEANAKLQEALAAQSKAAEESAAEQSGDAEAEQASASMEDELRTKLASMQSQQEADMAALRSTVEQLEQARYELADAIDAKNAALTQADDAMRASDENAEKIKLLDAEVAHLKGLLDSEVGSSSKGAVEHIRKLEEENSGLKLELEKANVAEQRAVELEGVVEQLEVEIADVKKARARSEELLGKWKTKALELEVRLEEADQSNILKGESLESAMKELDAKMTLLQEKESEIEALQDKVRSLEDEVAKQKEDFHTADKEADELRLEIEDLRLKLEAAEEDLNNDKIASSEMETLIEQKNMLAKELEASKAEVEKIKKAMEGQASALHEMSAQLRVAQEKYLDKQEEIDRARAQVEELNVSLQNTKESYEVMLDEANYEKVCLKKSVERMEAETKSASEEWQSKELSFVNSIKKSEEEIINARAQMDKTLEAVKGKESENAELQEKLKHLEAQLMEANKTCEEAKAETFQWKEKLLDKENELQNIKQENDDLQAKELVASEKIKELSVLANAKDGATNGSHKEESNVKGDSEDDEPVMVVAKMWENSKVTDDASSKEKGNDGESEVDLESNTGDSIVDGNGLHSTTASNGNASPPKQQPQKKKPLLKKFGGLLKKKTQP

SEQ ID NO: 122021 - protein, 60 aa, Oryza sativa
  Clone ID: PAT_MRT4530_2498C.1.pep
HIELYYSMGQFIQYKAPNYSWGYHGHVPNNMQFCVSMFASPRPMHDCYSKQIMLRNYISL

SEQ ID NO: 122022 - protein, 101 aa, Oryza sativa
  unsure (1)..(101): unsure at all Xaa locations
  Clone ID: PAT_MRT4530_24990C.1.pep
MRSQLVGHSELVEFTPDTQLEKLEYPVERLVRHLLPPVVDXAPSSLMLHGINFSARFFWWVSPPFAHLAVLHLNSVRITFDVFHGMASLCWPALRESVPFL

SEQ ID NO: 122023 - protein, 252 aa, Oryza sativa
  Clone ID: PAT_MRT4530_24991C.1.pep
MASETTSQKASSDLMSMTLLIDTKAQRVLYAEARKDVVDFLLSLLALPIASGIKLLGKGSMVGCVGNLYASFEKLDDAFVQADTAKDSLLSPVVLSPAASSNTSVLRLPAPSSAQSSKSFFRCSYSSNACRSFVTNASGTKCPNCGNQMATACTYVAGGQDQNTQNAAAEGAKGGGFVQGIVTYTVMDDLTVAPMSSISSITLLNRFAVKDLGALKEKTVQLGYTEGLAILKASLQSKTVLTDVFIGLKPAS

SEQ ID NO: 122024 - protein, 135 aa, Oryza sativa
  unsure (1)..(135): unsure at all Xaa locations
  Clone ID: PAT_MRT4530_24992C.1.pep
PFFKLKFKVSPPSPVGPPKNFSRGPXRKXPRGPETSPFPGPRANFPPGKAKKPKRPPAPAPAPEXXNPLXPFPPPEFPAGGPICFXKGPXGAETWGVSLPKKKTKTGAGGEFSRPHSRPGGGRGNLTLAWGWPAK

SEQ ID NO: 122025 - protein, 213 aa, Oryza sativa
  Clone ID: PAT_MRT4530_24993C.1.pep
MAITVRTHRTTKLFGRERPLHDALGGHKAADIILWRERRVSASIVAGATVAWYLFEVAEYHFLSLACYLAMLGMLVVFIWANASAFFNLPAPRIPEIFVSERTTRQVILALHSRLTWFVHRLYDIACGKDIKMFILTVFSLFIASVIASCFSSLTLLYLVVLGTMTLPVMYENYESEVDHLVSTAVHDLRSHVGDIDSGVFKKIPRGRGATAN

SEQ ID NO: 122026 - protein, 50 aa, Oryza sativa
  unsure (1)..(50): unsure at all Xaa locations
  Clone ID: PAT_MRT4530_24994C.1.pep
VKERFPNSGKASAMFQHEXSPKSVWTISAKVDTMSIDKSSKVGSAVALKP

SEQ ID NO: 122027 - protein, 101 aa, Oryza sativa
  unsure (1)..(101): unsure at all Xaa locations
  Clone ID: PAT_MRT4530_24995C.1.pep
KTLSKFSKQYSSTHRYSSTPSEFLLGSYTRRGRSRMSAKLPGTPSELPLAFYLFLMYKRYNRASCNSAQSCVCXSEMKTSLYRLQMTVRGMGNDQNTLQLP

SEQ ID NO: 122028 - protein, 116 aa, Oryza sativa
  Clone ID: PAT_MRT4530_24996C.1.pep
AGPRPSCREMAQHRPPGQEPVHPQAGDVRPHLGHGQLRAGHRPGAHAQGHPRVGGGVQVLQGPRGAPAVHPGPLPMMDQFLFGKFGWFLFNVVKATLVYSPRGGWAIHILFLEFVI

SEQ ID NO: 122029 - protein, 156 aa, Oryza sativa
  Clone ID: PAT_MRT4530_24997C.1.pep
MAEESATLDAPPPLERSPQRESAVDEETRALVVPDAGDLPPFPPSAVEANFARYFVAASAHIALKEEGGITAVDFNVGKSDRSEMKVTGKRKRNAQHLQENSALCKVCTSSNSFVVRCCVKGSLLEINDRLIKQPDLLNTSWSDMYGHIVYSFLYQ

SEQ ID NO: 122030 - protein, 53 aa, Oryza sativa
  Clone ID: PAT_MRT4530_24998C.1.pep
QLRTLLVYYMALVTLILRRMIAWVRQRRPCLVSGHTNRLPAILRADSMDSSHK

SEQ ID NO: 122031 - protein, 56 aa, Oryza sativa
  Clone ID: PAT_MRT4530_24999C.1.pep
STVLTLMQYTVPRIIGHGRLHLRLLHTRPTIILLYCLLLLAHDLAKMNKHTHVLLI

SEQ ID NO: 122032 - protein, 34 aa, Oryza sativa
  Clone ID: PAT_MRT4530_2499C.1.pep
QPRFQGTNYQSRNYLCSSFGWFDNFLIDNSAQIT

SEQ ID NO: 122033 - protein, 246 aa, Oryza sativa
  unsure (1)..(246): unsure at all Xaa locations
  Clone ID: PAT_MRT4530_249C.1.pep
MATSFSPPAAYVAVDGCPRLYGWLVTPPFIGVHVFTDRLAFAAADRCLCLHDWPIMLPLLGIYRFHRPAASSTANWIQIQICTIGIHGFKLISYALGMDQSEHHRRLAFAVADWCLRQHGWPIMPLLLGVHAFTDRLPRPSPAGVFAYTVGWSHHRCWASTSSPTGLPLPPSTGVSACMAGLSCRCCWASTPSPTGXPRPPPTGVXRYTVGWSHHRCXGVYVFTAGLPSPPPTGVSAYTVGLLCRR

SEQ ID NO: 122034 - protein, 734 aa, Oryza sativa
  Clone ID: PAT_MRT4530_24C.1.pep
MMAAEVNQTFFAWSQGEPTERDGSQGVSVSQKIDHGSISFGRFELESLSWEKWSVFSDDKRHEEFGKFNGLVAQKKAYFEEYYRKIRELKAQQQNQQTELILEYSGDGSDSSQTGEYTQGAELETPTGSGTIVDDYVEQGAHETTSEQGLTCYDDHENENFNAEFSSSNISSSAVGLQQTGRDARENVHGDDSAGKMDLEQQNAISGHSLGTAYEVVRAPKRIIEKDSRLRYAPKIVPKSVKTSSDSPLDRTSVSKRPDSLKLGMSINQKAKTDNDRLLRGPNVAPHKMSGSTERNKLTTKQTGVRRPSSASSQRPSVGERHRIARESIKKPADVSTPRRPSTAERHPVTTERARKQADVDTPRRPSTSERRAVNKGSADMTTTHRPSTGERRSVTRESVLKMDVRTPSKTRPTMTQLKGATTTVLNLKNMMASDFLEFSSSCRQYQRTGRTFESGQTLCWVKNYGPANCWQTEIKLCPPSSTETIEFQYWRTSTANLYKAKKERCCSAISSIYIEESNDFAHWKRKGEEFKSTPTTTSTASAFTDDEQTKWQFFPRGLLYNGIPFLNGMIPVRCQVRYQMIHIRYQTILPRFYDTCEVSDDTYQVSCDSTTYQVILVRYQVLIPNRYQMILISRRRHPRVVSSSGRGQSISVLTTGDETETAAWFSNTLDDALEKDLYTQLWHSVTSDAFPAAAGPSSHHPPTPDLPPSDEATDEERHRVELDRQHLFDLLRQ

SEQ ID NO: 122035 - protein, 242 aa, Oryza sativa
  Clone ID: PAT_MRT4530_25000C.1.pep
MRRVAASVHVATGEEARKRVALHRCVDPHSLAIKLDIVDTIHVLLSTLPSLLRALLPFLFLLSLCPCTPSRMPSSATPSPSPPLTLSRHSLPRNPLSTVTPRPSKRSPEWMSSTVVPPPSSTTLPSRFIAAAAQLLSSNLLPFFPSRHSALSTAAVPPPLSSDLTVPSASPLVAASKPKTPRDPNIPSPRAAAPPPRPDVFSVQKSIRRSSSAIDRSLNERTMNFSGDIPCSFSNSSDVPRH

SEQ ID NO: 122036 - protein, 453 aa, Oryza sativa
  Clone ID: PAT_MRT4530_25001C.1.pep
MDGLIKGLINVAIDAVEGAGRGERGGEDDAPRRHRPAREEEEGRGDERSRSTWAEVVSDHKGGEAEERPDHRNSRRDGRQERREDGDWERVDGRKQHQHNQYEEEYRRDSSSRRPQQHQQAPAYRRQQQDGDERNDGGWQTVGEKKHHGRPQQSEAWNAYRRPPSEQQYCEDAGQIHHGLNVEPTREELNSLSRACSRLWELDMNRLTPGKDYRIECGEGKKVYQKGDMASETLFSWLGDDVLRKPTYSRFCALLDNYNPHQGYKEVVTQQDKHEEVAFIEEIARTAPIKYLHRYLVLKGVASQDYEDFKRMLTSLWFDLYGRGGSSSSSSAFEHVFVGEIKGRRGQGENEFYLEEANGNVDYQGYIFPRRRGESPDSETQLLTIQFEWHGVLKSVSSTLIGVSPEFEVALYTLCFFMGGEDNRVEIGPYGVNIKCYRMGNSKIGSAFPIADN

SEQ ID NO: 122037 - protein, 191 aa, Oryza sativa
  unsure (1)..(191): unsure at all Xaa locations
  Clone ID: PAT_MRT4530_25002C.1.pep
RVKHEEVAFIEEIARTAPIKYLHRYLVLKGVASQDYEDFKRMLTSLWFDLYGRGGSSSSSSAFEHVFVGEIKGRRGQGENEVSGFHNWIQFYLEEANGNVDYQGYIFPRRRGESPDSETQLLTIQFEWHGVLKSVSSTLIGVSPEFEVALYTLCFLXGRERYRVEIGPYGVNIKCYRMGNSKIGSAFPIAD

SEQ ID NO: 122038 - protein, 92 aa, Oryza sativa
  unsure (1)..(92): unsure at all Xaa locations
  Clone ID: PAT_MRT4530_25003C.1.pep
PAGNTIAQGMAFGTGSVMAXRMYDDWNAVPATLHHENAASEAAASATPLTNATPSDSWSIHYKGFQDRIHHYGSDISKCQIXVDMLNDSRRG

SEQ ID NO: 122039 - protein, 1721 aa, Oryza sativa
  unsure (1)..(1721): unsure at all Xaa locations
  Clone ID: PAT_MRT4530_25004C.1.pep
MTTPRASQRRGGAAAGGASPAAEPYNIIPIHDLLAEHPSLRFPEVRAAAAALRAVGGLRPPPYSAWREGQDLMDWLGAFFGFQRDNVRNQREHLVLLLANAQMRLSSADFSDTLEPRIARTLRRKLLRNYTTWCGFLGRRPNVYVPDGDPRADLLFAGLHLLVWGEAANLRFVPECLCYIYHHMALELHRILEGYIDTSTGRPANPAVHGENAFLTRVVTPIYGVIRAEVESSRNGTAPHSAWRNYDDINEYFWRRDVFDRLGWPMEQSRQFFRTPPDRSRVRKTGFVEVRSFWNIYRSFDRLWVMLVLYMQAAAIVAWESEGLPWRSLGNRNTQVRVLTIFITWAALRFLQALLDIGTQLRRAFRDGRMLAVRMVLKAIVAAGWVVAFAILYKEAWNNRNSNSQIMRFLYAAAVFMIPEVLAIVLFIVPWVRNALEKTNWKICYALTWWFQSRSFVGRGLREGTFDNVKYSVFWVLLLAVKFAFSYFLQIRPLVKPTQEIYKLKKIDYAWHEFFGKSNRFAVFVLWLPVVLIYLMDIQIWYAIFSSLTGAFVGLFAHLGEIRDMKQLRLRFQFFASAMSFNIMPEEQQVNERSFLPNRLRNFWQRLQLRYGFSRSFRKIESNQVEARRFALVWNEIITKFREEDIVGDREVELLELPPELWNVRVIRWPCFLLCNELSLALGQAKEVKGPDRKLWRKICKNDYRRCAVIEVYDSAKYLLLKIIKDDTEDHGIVTQLFHEFDESMSMEKFTVEYKMSVLPNVHAKLVAILSLLLKPEKDITKIVNALQTLYDVLIRDFQAEKRSMEQLRNEGLAQSRPTRLLFVDTIVLPDEEKNPTFYKQVRRMHTILTSRDSMINVPKNLEARRRIAFFSNSLFMNIPRATQVEKMMAFSVLTPYYNEEVLYSKDQLYKENEDGISILYYLQQIYPDEWEFFVERMKREGMSNIKELYSEKQRLRDLRHWVSYRGQTLSRTVRGMMYYYEALKMLTFLDSASEHDLRTGSRELATMGSSRIGSSRREVGSDGSGYYSRTSSSRALSRASSSVSTLFKGSEYGTVLMKYTYVVACQIYGQQKAKNDPHAFEILELMKNYEALRVAYVDEKNSNGGETEYFSVLVKYDQQLQREVEIYRVKLPGPLKLGEGKPENQNHALIFTRGDAVQTIDMNQDNYFEEALKMRNLLEEFNRHYGIRKPKILGVREHVFTGSVSSLAWFMSAQETSFVTLGQRVLADPLKVRMHYGHPDVFDRLWFLGRGGISKASRVINISEDIFAGFNCTLRGGNVTHHEYIQVGKGRDVGLNQVSMFEAKVASGNGEQTLSRDVYRLGHRLDFFRMLSFFYTTIGFYFNTMMVVLTVYAFVWGRFYLALSGLEAFISSNTNSTNNAALGAVLNQQFVIQLGIFTALPMIIENSLEHGFLTAVWDFIKMQLQFASVFYTFSMGTKTHYYGRTILHGGAKYRATGRGFVVEHKKFAENYRLYARSHFIKAIELGVILTLYASYGSSSGNTLVYILLTISSWFLVLSWILAPFIFNPSGLDWLKNFNDFEDFLNWIWFRGGISVKSDQSWEKWWEEETDHLRTTGLFGSILEIILDLRFFFFQYAIVYRLHIAGTSKSILVYLLSWACVLLAFVALVTVAYFRDKYSAKKHIRYRLVQAIIVGATVAAIVLLLEFTKFQFIDTFTSLLAFLPTGWGIISIALVFKPYLRXAVLSWLPGLQEMQTRILFN

SEQ ID NO: 122040 - protein, 150 aa, Oryza sativa
  Clone ID: PAT_MRT4530_25005C.1.pep
AVGLIDQPLRLLNSELAIIIGLVYILLPFMILPLYSSIEKIDNRLLEAAKDLGANALQRFIRITIPLTMPGIVAGCLLVLLPAMGMFYVADLLGGGKTPLIGNIIKSLFLNTNQLPLGSAVSIALTLLMALMLYVYYRANKFLNKKVELE

SEQ ID NO: 122041 - protein, 144 aa, Oryza sativa
  Clone ID: PAT_MRT4530_25006C.1.pep
LGCRIFSLPHASAVRRRRPPATFTLRPSSSAAADRRRPRAVTETAAPCCRSTARELHNSPPGPPPRRPLHRAAAAGPSTTAGPSTAPSAAPPPPPATTSLSISLAAERLHRPIVVHERRRPRPNDVFGRSSSTAEPRRRPFLRH

SEQ ID NO: 122042 - protein, 58 aa, Oryza sativa
  Clone ID: PAT_MRT4530_25007C.1.pep
MSFKYVNIVCDTIISMIVLTTKFGNFDIGGEGQTEAGSKTKIIVETEQESTAFKSATG

SEQ ID NO: 122043 - protein, 35 aa, Oryza sativa
  Clone ID: PAT_MRT4530_25008C.1.pep
MAWSGVETSGFEKEGSGPHRKPGHADADMWARAHA

SEQ ID NO: 122044 - protein, 143 aa, Oryza sativa
  unsure (1)..(143): unsure at all Xaa locations
  Clone ID: PAT_MRT4530_25009C.1.pep
KRSSQANGPPPHASAVLRHRPPATFTLQPSSSTAADRRRPRAVTETAAPCRHSTARELHNSAAAAADPSTALELXAARSTAAGPSTATGPSTPPAATFLSISLAAERLHRPIVVHERRRPRPNDVFGRSSSTAEPRRRPFIVH

SEQ ID NO: 122045 - protein, 84 aa, Oryza sativa
  Clone ID: PAT_MRT4530_2500C.1.pep
MIKAPIAVTVLGRSRCLEGLAAGGKDLAFSARATDSSPARTRADSDNEAAGQPGSWRCRLGAEGVLSCSWRKAGLAWRPAAGGG

SEQ ID NO: 122046 - protein, 55 aa, Oryza sativa
  unsure (1)..(55): unsure at all Xaa locations
  Clone ID: PAT_MRT4530_25010C.1.pep
MPFKRRNGGRNKQGRGHVKFIRCSNCGKSCPKDKALXFLVRNIVEQAAVRDVQEA

SEQ ID NO: 122047 - protein, 83 aa, Oryza sativa
  Clone ID: PAT_MRT4530_25011C.1.pep
ILWNKMFLTMEPNSSYWWIGQKYPAYCQCVWYLLFCKSNLIAAKSNGNSSLALCMAKHKYTFIHLVRIRVKVKKKPKKKNLST

SEQ ID NO: 122048 - protein, 115 aa, Oryza sativa
  Clone ID: PAT_MRT4530_25012C.1.pep
MLASVSWEPPVFAALTFAAEGLSKLDDWTDLAHSWHTAFFRDHCRRLKKTGNRKPSMAPSRSTLDMDRRLTDQILFLGTRKIHAWIEVEHPFCDCWCLLIHSEGFLTLLRRSGMS

SEQ ID NO: 122049 - protein, 152 aa, Oryza sativa
  Clone ID: PAT_MRT4530_25013C.1.pep
MAKECGSSSVIVGVVKVKVVRGTNLAVRDVFSSDPYVVLKLGNQEVYDRDPFVDDPMGAAFFELRPLVEAAAASSRRRTPSGVDSKEDGTAVVPRSGSSVVWSASEGKAAQGLVLRLAGVESGEVELQLELEWHGGAAGDTSMIDRLIDRNS

SEQ ID NO: 122050 - protein, 90 aa, Oryza sativa
  unsure (1)..(90): unsure at all Xaa locations
  Clone ID: PAT_MRT4530_25014C.1.pep
FFFLVPSCSCYMGDYVQVIYSAKLACISTSTNSELGKRHNARIQRIDLCRPKXWVCLCSRDLSVNISRTFGPGWIRATWXRKRPXPERES

SEQ ID NO: 122051 - protein, 108 aa, Oryza sativa
  Clone ID: PAT_MRT4530_25015C.1.pep
MTSGVGRRGGGGPGDDDRLQTAATMMMSCWALATVMKSSGDAGGVGGAWCPARPSWRAAAWPHGGPAIRGCALRVVGKHGGRAANGVATRRAAPRAAVAGVTVVEQKR

SEQ ID NO: 122052 - protein, 70 aa, Oryza sativa
  Clone ID: PAT_MRT4530_25016C.1.pep
MALLDLAMRMKSTDLCSPSIEIRVVGARVSEGNNDATEFHMLHGPNPKNFTPFLWDAAKADEQRTSSYGH

SEQ ID NO: 122053 - protein, 40 aa, Oryza sativa
  Clone ID: PAT_MRT4530_25017C.1.pep
MGIRRMTIQNRQQPATYGTIPEKSRNTKKPSATTRSDNVP

SEQ ID NO: 122054 - protein, 84 aa, Oryza sativa
  Clone ID: PAT_MRT4530_25018C.1.pep
PSPQTIKQGAPPLHHGPPQIPKQRGKPRDYQNTAKHTRDTGGITDPSGKPGDRGRTGGDRSSGRGRPLGAAPDQPARRPSRPPP

SEQ ID NO: 122055 - protein, 57 aa, Oryza sativa
  Clone ID: PAT_MRT4530_25019C.1.pep
LRLVLLFIIFLAWSPIPDDCSYSPSRTWCPSKPNWGHRLPVAFHAPLLVLVVQVEKT

SEQ ID NO: 122056 - protein, 434 aa, Oryza sativa
  Clone ID: PAT_MRT4530_2501C.1.pep
MAVNELPDELLESVFLRLASPICLVRAASTCRRWCRVVADAGFLRLYRSRNALTIGNYIATDTGIFANWSRPSPSCRVSSLAFVPAAAAVTSSKRFSLDFVPEPGNTSWVLADSHGGLVLLVPERYYWGNASSVSIVVCEPWTRRYRTVIPPLENKHVACLDASLLGAGTGSEKKNNNNNHVAGVSNFTVLLILYTFGSGAKTACIFSTFTGADEELRLRLTRSMDLGDLIRPKGVPRRQRHFDADAMHFAGRAGGSLYWGTIYGVVFALDESTGELSPLTLPKCCASEQPRFYYRQWNLRAVGDDAGGGRLVRVVQHSDLEVLTPLHAGGGREWTVEKTLRLPELITRGLPELEDYSRLVERLTGVKILEVMGRSVVLTPPEGSGMWPFSVDLETMELEHVYDWGDELVQKWVFPVKPPWPPALPLHATTDVH

SEQ ID NO: 122057 - protein, 795 aa, Oryza sativa
  Clone ID: PAT_MRT4530_25020C.1.pep
MAGGDGDRARAPKRHKSSAPSRSIDETAELDYTDDVDDDVRDADREVKKRDFTKLELKPDHANRPLWACADGRIFLETFSPLYKQAYDFLIAIAEPVCRPESMHEYNLTPHSLYAAVSVGLETSTIISVMSKLSKTKLPREIIDFIHASTANYGKVKLVLKKNRYFVESPFPEVLKTLLKDDIICRARISPEDSVGAPSFTISKTAGEMASGHEDLLDGMELAAATEDKETHSFEIDPSQVENVKQRCLPNALNFPMLEEYDFRNDTVNPDLEMELKPQARPRPYQEKSLSKMFGNGRARSGIIVLPCGAGKSLVGVSAACRIKKSCLCLATNAVSVDQWAFQFKLWSTIKDEHISRFTSDNKEKFRGMAGVVVTTYNMVAFGGKRSEDSEKIIEEIRNREWGLLLMDEVGYPLVIFEVHVVPAHMFRKVISITKSHCKLGLTATLVREDERITDLNFLIGPKLYEANWLDLVKGGFIANVQCAEVWCPMTKEFFAEYLKKENSKKKQVLYAMNPNKFRACEFLIRFHEQQRGDKIIVFADNLFALTSYAMKLRKPMIYGSTSHVERTRILHQFKNSSDVNTIFLSKVGDNSIDIPEANVIIQISSHAGSRRQEAQRLGRILRAKGKHQDRMAGGKEEYNAFFYSLVSTDTQEMYYSTKRQQFLIDQGYSFKVITSLPPPEELPNLKYYTLNDQLELLAQVGVFCTCCFLLVNSLRHLNQLLSARDDMIGIEHLEEDSDGKALMKARRSAGSMSAFSGSGGMVYMEYSTGKGKAGASKKPKDPSKRHYLFKKRYQ

SEQ ID NO: 122058 - protein, 101 aa, Oryza sativa
  Clone ID: PAT_MRT4530_25021C.1.pep
MAICQKSKLYMTMTFFLFMQEMYYSTKRQQFLIDQGYSFKVITSLPPPEELPNLKYYTLNDQLELLAQLLSARDDMIGIEHLEEDSDGKALMKARRSAGSM

SEQ ID NO: 122059 - protein, 90 aa, Oryza sativa
  Clone ID: PAT_MRT4530_25022C.1.pep
LIGDVIVGGGVRGKKISEPKRGIWAVVVGQIRWPFSCSSAYSVFFLAKELCPISELIWQAKAPARIRFFMWLAVKGRCLTADNLEKSGRV

SEQ ID NO: 122060 - protein, 193 aa, Oryza sativa
  Clone ID: PAT_MRT4530_25023C.1.pep
SGSPSASCSYDVYCFGKVLLELVTGRLGISASNDAATNEWLDHTLRYINIYEKELMSKIIDPSLIIDEDHLEEVWAMAIVAKSCLNPRSSKRPPMKYILKALENPLKVVREDNGGSSSARLRATSSRGSWNAAFFGSWRHSSSDIGPSRDDNLLKRSETIKSSGGSNGDHSSSRRRQSKEIFPEPSGSRDTED

SEQ ID NO: 122061 - protein, 118 aa, Oryza sativa
  Clone ID: PAT_MRT4530_25024C.1.pep
MVPNHKSKSHPLTGCKIFLEIAGSKIRAPCCLMHHHRDQPRDICVDDSKMGTPDRLVGFIDIDPREPSVLHSLDDQESSGSNSPHEVNVIEGIVEEVHEEGEIRPREEPRAPIPPHPR

SEQ ID NO: 122062 - protein, 67 aa, Oryza sativa
  Clone ID: PAT_MRT4530_25025C.1.pep
MGQIKENAVEDTGGHGMGIAPAGSGKRRRKAGGNSTYKHIVRQLCSARSAPAKANISTLSDLAAHNH

SEQ ID NO: 122063 - protein, 233 aa, Oryza sativa
  unsure (1)..(233): unsure at all Xaa locations
  Clone ID: PAT_MRT4530_25026C.1.pep
VTKLIHDCKRDSEALYXQFGIKLHXNVMDTQIAYSLFEEQEGKKRGYDEYISFVSLLADPRYCGMAYPEKEEVRTLLRQDPNFWTHRPLSEMMIRAATDDVRFLLSIHEKMMEKLSKVSLWRLSVRSELYCRCFCINDNKYADWPPLPTVPDEIEPDVYVPEVDILSVLDVPPGKMGRVIGRKGSSIMEVKASCNVEIHIGGAKGPPDRVFIIGPVQEVRKAEAILRGRMLEF

SEQ ID NO: 122064 - protein, 81 aa, Oryza sativa
  Clone ID: PAT_MRT4530_25027C.1.pep
KFRKFCPPPKYSHLVRNFRFFITFYEFWSKFILIYLKSVKISKKNRMKKIRNFGNFSSFAHLRQKSYFRNFKPWLDLISHP

SEQ ID NO: 122065 - protein, 57 aa, Oryza sativa
  Clone ID: PAT_MRT4530_25028C.1.pep
KFFNGKKSNRNVNRFFFEAEGPTKAPELIPSQSPDHQGLFKGKTEATAAYKSACYGS

SEQ ID NO: 122066 - protein, 730 aa, Oryza sativa
  Clone ID: PAT_MRT4530_25029C.1.pep
MAKRGSKKKTTASTRALPLLRRSAGETGTAESKEETGAASPIKNAIKNAAAGEMAEEEKLAGAASPLLRLRSARGETGTAIKNAAAAGEMGEEETAAMGITRTRGDQETPRKKKGRSWKESKAMDDGAAALRRKAREITKEEEDDERLRGEMVSRVRARIRKQQPDETNDEEIQAHETYLLHDAGRGAGDTSDHPAAIARPQDVTTFHIVGVVDTDGARVRLLFRDSDLYFVAFKTGSCWFRFNDEHIPTFLTPTVPIAYTSGYMNIAQVRVGYHCLYDIFNVISRYTPESAQEKTNERQRILQCAALMLSESQRFGHVQLLVKRQIHKMMSKKITAKQNKKIHSWGSIARYCISHECKEDVLHHLSTLIVLFNPDQNKYENYKIVGRRKLLSRAAAAAAEAAARAAEAAARPSQAAAAEAEEEEEDDDDDEDEYPWQCQTRAGQELLILLYDKRLPPPVTPMVVTQQKNHKKTQAEEVDEKKNQENPNTDATIGAPSGGENHQNRSLISCDGINLYESDLDSLRGPHWVTDAILGYALAKFSRAYSDDGLLLVQPTNAALLNNKHYVAAEADHLLLASRRLVLIPVNDNLDFNQAGDGKHWSLLVIHKTSNDGVIQFIHHDSVRSGDNSYNLHAAQKLANVLRGVLPTAGDVINAETPQQTNGNDCAIHVLAAVQVICRWWRANANKSGPADWIRKLDKRISEGNITQMRASLLQDIERDCQKKKSKDQ

SEQ ID NO: 122067 - protein, 451 aa, Oryza sativa
  Clone ID: PAT_MRT4530_2502C.1.pep
MAMAACSCCCHAMVGMPCYLWRTLRSTRRVRRVHCHDDDNVEEGGGGWDSSLSDFAWSSSKDEEEEGSTSTEGGEYGGHGGGRRERRNQDQMRRSLRLRLMSFRSNYHSTRRGGMAAAARLLPVAAKRLTTTARARRLSTSTSTSPPATAVLYDQHGPPDKVLRVAELPAAKIGERDVCVRMLAAPINPSDLNRVEGVYPVRPPLPAAVAGYEGVGQTYIVNPATAWHRVRSDVPPQYVATVTVNPLTALRMLCDFVNLAPGDTLVQNGATSIVGQCVIQLAKLHGLHTINIIRDRPGSQEAKDKLKQLGADHVFTESQLDIKNIKSLLGALPEPALGLNCVGGNAASVILKFLRQGGTMVTYGGMSKKPVTVSTSSFIFKDLSLRGFWLQKWMSSDKAEESRTMIDYLLDLVHEGKLKYEMELTPFSDFHLALDKALGKHGSQPKQVLKF

SEQ ID NO: 122068 - protein, 197 aa, Oryza sativa
  Clone ID: PAT_MRT4530_25030C.1.pep
MADAHGHRRRVALPCAVRLRLCLLEAAIDATQRRDGAINRPLFSLYDRRAPADPRPDAAGVSSTDVTVDASRGLWARVFTPTAPEHEHSSSSSTTTPRPVIVYFHGGGFAMFSAASRPFDTHCRTLCAGVGAVVVSVDYRLAPEHRFPAAYDDGEAVLRYLATTGLRDEHGVPVDLSACFLAGDSAGGHIAHHVAQR

SEQ ID NO: 122069 - protein, 87 aa, Oryza sativa
  Clone ID: PAT_MRT4530_25031C.1.pep
LAKCHDWGGWQWPTLQKDLSWMGAKKNARPNTGHGLQVGCRHSRMGANQGTWKAQRSRGDKRAQEEEGHPDSVRRIQLEEHRVRKKK

SEQ ID NO: 122070 - protein, 45 aa, Oryza sativa
  Clone ID: PAT_MRT4530_25032C.1.pep
AWAISSYMSQGEQRRSTNEHILSQDSFLLVSLWAIHRFTVFLSPT

SEQ ID NO: 122071 - protein, 122 aa, Oryza sativa
  unsure (1)..(122): unsure at all Xaa locations
  Clone ID: PAT_MRT4530_25033C.1.pep
TVRNVMDMNAGFGGFAASLIHKPLWVMNVVPCDHPEALPIXFNRGLIGVYHDWCESFNTYXRTYDLVHMSYLLQGLTXRCDIIEVAAEIDRILRPGKLVVLQDTEQVIRKMDPVLRSLHYRT

SEQ ID NO: 122072 - protein, 257 aa, Oryza sativa
  unsure (1)..(257): unsure at all Xaa locations
  Clone ID: PAT_MRT4530_25034C.1.pep
DSGRIGKSDSNYVKGAKAARVQRGKMLREQKRAAVLKEKRASGGINSAPRVIVLFPLSASVELNSLGEDVLKLLSSDGSGIASSTVASSEYKLRATVLKAPHGDLLTCMEMAKVADLMAFVASASAPWEENSSNFIDSFGSQCLSVFRSIGLPSTTVLIRDLPSDVKKKNEMKKMCASQLASEFPEDCKFYPADTRDELHKFMWLFKAQRLTVPHWRSQRSYIVARKAGMLVDDESSXKCTLLLSXYLRARKLSVNQ

SEQ ID NO: 122073 - protein, 124 aa, Oryza sativa
  unsure (1)..(124): unsure at all Xaa locations
  Clone ID: PAT_MRT4530_25035C.1.pep
DLCIFRAYYGGGGGYGVTQFTQPYGSGGGYGXSTSSQPYGAPYGAPPPSSEHYGAPGGYCRPIRSLVPTRSHPGKDCNAVRCLQDYDRDSKGXIDDQELQSALSGXHQSCKHRNMHIIMYLLTN

SEQ ID NO: 122074 - protein, 63 aa, Oryza sativa
  Clone ID: PAT_MRT4530_25036C.1.pep
MARKQTTTQIMQRVNGAHGWLVAMGRSPAGLTEKEKRPYDNGLCGPARWARHGWPIVAWSKCQ

SEQ ID NO: 122075 - protein, 86 aa, Oryza sativa
  Clone ID: PAT_MRT4530_25037C.1.pep
KSLLVSRGERLPGLIALAGGDHPAQINVTGRWSSAGAHSRTGPCRRRPWPINQDSSSNLQELDGAVLDPADAPHQLHPSVHLLLLQ

SEQ ID NO: 122076 - protein, 407 aa, Oryza sativa
  Clone ID: PAT_MRT4530_25038C.1.pep
MDGRIKTGKRRRMRVVEFATAGSVAFLLCLALSVWCLLRRRQWRRNNAKLTVKMARKHLPKDARFFRGKPIEDELELEAAGPRRFHYGELAAATANFSDDRRLGSGGFGSVYRGFLNGGDVAVKRVAETSRQGWKEFVAEVRIISRLRHRNLVPLVGWCHDGGDELLLVYELMPNGSLDAHIHSSGNVLPWPARYEVVLGVGAALMYLHHEAEQRVVHRDIKPSNVMLDASFSARLGDFGLARLIDDGRRSRTTGIAGTMGYIDAECFLLAGRASVESDVYSFGVVLLEVACGRRPAVVINGGEDAIHLTQWVWDTHGGAAGGGILDAADTRLNGEFDVAEMERVLAVGLWCAHPDRGLRPSIRQAVSVLRFEAPLPSLPVRMPVATYGPPVSTASAPTSNDTSAGR

SEQ ID NO: 122077 - protein, 65 aa, Oryza sativa
  Clone ID: PAT_MRT4530_25039C.1.pep
AIKNKSITFIFMIIMGGITGVLTLPLDNRVLVLRLKHGCQHIFIYDGCHPSIMKKEVLNSSFWQF

SEQ ID NO: 122078 - protein, 153 aa, Oryza sativa
  Clone ID: PAT_MRT4530_2503C.1.pep
GVYPVRPPLPAAVAGYEGVGQVHALGAPCDSRLLSPGDWVIPSPPSLGTWQTYIVNPATAWHRVRSDVPPQYVATVTVNPLTALRMLCDFVNLAPGDTLVQNGATSIVGQCVIQLAKLHGLHTINIIRDRPGSQEAKDKLKQVWADHVFTGSQ

SEQ ID NO: 122079 - protein, 345 aa, Oryza sativa
  Clone ID: PAT_MRT4530_25040C.1.pep
MGLHGNQRRHDFLSPYDAAATATDYSPLPRHPDSKPSAPAPPPAQDFFLKTHDFLPQVEKRADQTPPPPPPPPPHAAVTAEKQLLHQHALAAAGAFTINHAVAAAATAVKQEPPFAPWCQPVAAVDPRGHQWSLPFAARAVAVASSRPQQQQQQPPPPERKGGGGFMDAGSRSSGGAGFDDDDGHAARREVSSSLKELTVRVEGKGGSCSGSAGTDQMPNTPRSKHSATEQRRRSKINDRFQLLRDLLPHNDQKRDKASFLLEVIEYIRFLQEKVQKYEVSYPEWNQENAKVVPWTNIYFRSSWKNAQNKGQVPADHSPDPPSPFKELSDPASNSQAMGRQLRVG

SEQ ID NO: 122080 - protein, 113 aa, Oryza sativa
  Clone ID: PAT_MRT4530_25041C.1.pep
AISRDGGSGSGSGSGSRRAISRDGASGSRCRHGERRDDDEQSKSREQSCGSTPQKPDHPPTRCRSQAKVWFRRPCSFRSLVRASDQNQGSRKEAAQARGGGRTPARESKREVL

SEQ ID NO: 122081 - protein, 184 aa, Oryza sativa
  unsure (1)..(184): unsure at all Xaa locations
  Clone ID: PAT_MRT4530_25042C.1.pep
SVLVNSVWFHTRTRKEKKNYAEFGKVFRDGRSTSPSGRKKKLRELAHLERAAAPAPRAWSPGGAGAASSPWRWRRRRTARGSRASPYSLRIHQPNRSQEEKTSAKTPTPASERTNEQGRGERERAYLAVPWPRITPRSKEGGGGGDVWGDGEADLRGAARASSPGFLLFXRSLRXXRTAWXRXR

SEQ ID NO: 122082 - protein, 158 aa, Oryza sativa
  Clone ID: PAT_MRT4530_25043C.1.pep
QKYEVSYPEWNQENAKVVPWTNIYFRSSWKNAQNKGQVPADHSPDPPELLKNGSPYMFPFTGNSDNNNAVETAAASGAQDQAETDPMSRVSYRSVDTPSPNNVADKVTSQPHAQLVRPSPAENHTVNCDKLNNSDLAIDEGTISLSSQYSQELLNKLN

SEQ ID NO: 122083 - protein, 92 aa, Oryza sativa
  Clone ID: PAT_MRT4530_25044C.1.pep
GKRIFIVFNPVLLYRKIQRTAITFGFGFFTHPCFFPYLPAHPFFKAVYENQILNAGAGGGSTSLPPYVVVVDPPKSFWGFPTQPRLRGGFSP

SEQ ID NO: 122084 - protein, 67 aa, Oryza sativa
  Clone ID: PAT_MRT4530_25045C.1.pep
RADPFGILFWIPRYTAFTVGGTFSVEYIHSDQVGKQNQKDFEQASAFNNTKDLLDVLYHILKAKENV

SEQ ID NO: 122085 - protein, 238 aa, Oryza sativa
  Clone ID: PAT_MRT4530_25046C.1.pep
MKFIASPTAKRTEVTPASTFVSAREATMVAALGRDTAIYGSGHRGVYGFHRHYRDGWRGDHHGGHGQEHIISHIGFLPPLPPPHYPLSEFLPPPYFGAYHEPTIGYAPHSEYYGSMVSHAHPALLVVAIVAVVVTAFHRELSLDQNSGDWQIYYGFNGDAKLAGSSRPMSWAHGDIRMECRRNLLPALRKEAGATVAVVRLNLEKQFPPSASTPGGCRHHRLGCREATITIHLNFVRP

SEQ ID NO: 122086 - protein, 54 aa, Oryza sativa
  Clone ID: PAT_MRT4530_25047C.1.pep
IVDMIIVFFSFHFVSEIQAETSNAMQSLYNNFKSFHLPGFQQADTTSVLYNIGI

SEQ ID NO: 122087 - protein, 61 aa, Oryza sativa
  Clone ID: PAT_MRT4530_25048C.1.pep
MWGEPLQVWIHRRPAGSPGLLVSDSSASVRPIKASALGTVGGWRGTSDGITELDWRRKEMG

SEQ ID NO: 122088 - protein, 122 aa, Oryza sativa
  unsure (1)..(122): unsure at all Xaa locations
  Clone ID: PAT_MRT4530_25049C.1.pep
VRLGCRSAIFGSSPTCADSWGHPLTLLWGGSLLLLGRHHTSAHRGWVLVPFLMNHFFXVTEIFNANRDLIVDYVWMTGSGNISYYNCKYDFTLARFAYNMCNTYFYCGSLVYLLMTLITCLY

SEQ ID NO: 122089 - protein, 393 aa, Oryza sativa
  Clone ID: PAT_MRT4530_2504C.1.pep
MAAAARLLPVAAKRLTTTARARRLSTSTSTSPPATAVLYDQHGPPDKVLRVAELPAAEIGERDVCVRMLAAPINPSDLNRVEGVYPVRPPLPAAVAGYEGVGQVHALGGAVDSRLLSPGDWVIPSPPSLGTWQTYIVNPATAWHRVRSDVPPQYVATVTVNPLTALRMLCDFVNLAPGLLSLLSSLFFPCNQVSPLALDTFVSGDTLVQNGATSIVGQCVIQLAKLHGLHTINIIRDRPGSQEAKDKLKQLGADHVFTESQLDIKNIKSLLGALPEPALGLNCVGGNAASVILKFLRQGGTMVTYGGMSKKPVTVSTSSFIFKDLSLRGFWLQKWMSSDKAEESRTMIDYLLDLVHEGKLKYEMELTPFSDFHLALDKALGKHGSQPKQVLKF

SEQ ID NO: 122090 - protein, 67 aa, Oryza sativa
  unsure (1)..(67): unsure at all Xaa locations
  Clone ID: PAT_MRT4530_25050C.1.pep
KSPEFLNGRYXTMWKLPMSGNTETTQEPKKLXRXNNAYPHAFVRITGYNSVRQVQLISFIAYKPPDC

SEQ ID NO: 122091 - protein, 127 aa, Oryza sativa
  unsure (1)..(127): unsure at all Xaa locations
  Clone ID: PAT_MRT4530_25051C.1.pep
IYYXFICSMQNLISTFVQHQHWCMALIITIGVQFMVTISLHAATPGHHLPIQPTAHTMHQGWVPNTVAQSHTVGNPLASTRRNRTGHHHPGQPHAHIFLQMLALLPGFIAPHWHTFSFWSANASIAR

SEQ ID NO: 122092 - protein, 82 aa, Oryza sativa
  unsure (1)..(82): unsure at all Xaa locations
  Clone ID: PAT_MRT4530_25052C.1.pep
MAESIVSGLLITASAVARPHSSHSLPHGSCATRVPQLQRDRLCVRPTVDEDEAMSIDNLRXFFDVNVDKWNGAFYVRSPSCS

SEQ ID NO: 122093 - protein, 891 aa, Oryza sativa
  Clone ID: PAT_MRT4530_25053C.1.pep
MVSKRCSASTGNRIGRYRIKRRYILVLSSCQARVKNSKLLPYKDGVQNTAIVSINWADLVRSHQLGRYDTSSAYRSIGYRVLTSFYYLSLLVAESNQLSHEHTRTHERRLVLKYKSARRQGLTCRARVYSSSTHQPLGDNTSIIVPRDATYISKSTRDTLHPCARNDRSSCCAAGALRVCRTRSYYVVKHGSSARRDAWELAPRHACTAMENDDDVEHPFYYFVHDDAAAGVDDHEELLASLGFLLPPPPPPPPPPQPDQGRSAFAAYQSTAAMASSSSSSESLSRRYHSSASNVHRRMHRFLRSIYDDAGDDAGATAEMQPAEGEQQQAAPSGGSARFRHIMRERLRRERLSQGYADLQAILPTGASSSKVLVKSLIRNYMSGGKNTIVAAAANYIRELEGRKGWLCAQNELLERTTPKPGAGMVVKVRAESELGSTVDVFEAVLRRLKAMDELQVTAIQSWFGAGGMWMDVAVESKRRAACTYAPPRWKLLRETRRVKRGRSSRIVKLIFLQLSVASTSANDSPIASRHAICTTEYSAFQLDRPPTSRPRHGHAPCSHRPSHARGHGRKIKGSQRFGAFLRGVRACSRLAGGARHVDAHVRTYVYARRYTVGSSNGPTDTCHVRADGAAVDRVRPIAAVSSSCPMHTARGVTPAGESGEGGGQGRDAARRRTHARTPGEQWTAGRHVISHMSPDIRAVVDRETQLLVCFRRRAVRYVLYRNEHDCSIVAGRQDDDGKRQRRDDNVCRGVVGRAGMQSGGGEYVRSSGGPSSPHRRGDAMDELDCGEHQLNGTTSVEIHLEDGPRVCACTALASALRLPALHPLPLHPAQVPIEVGGVEGGDGGKVEAGAVEDVTKEVKGEEEHEEVANGDKESVVDPFLDVEVGGDYRY

SEQ ID NO: 122094 - protein, 108 aa, Oryza sativa
  Clone ID: PAT_MRT4530_25054C.1.pep
RNQKGKKKTLFLIDPELNYAYPYILPLPSLLLTPGLNYRQTKQKQPVTTSTTKFTGGTHRLRLNFPRVFDFFFPFLFFWVASKKKKMRPNGDHHDPGEAWRGPVRGRC

SEQ ID NO: 122095 - protein, 409 aa, Oryza sativa
  unsure (1)..(409): unsure at all Xaa locations
  Clone ID: PAT_MRT4530_25055C.1.pep
MTTGAAAGAAAAAGAAPASPVAAAAAAAPEVAARDAVIGWFRGEFAAANAVIDALCGHLAQIGGDAEYEAVFAALHRRRINWFPVLHMQKFYSVADVAADKREIIQLGVPLFQPTTEESNCHIEAIPLVLQADIDHLVLWRLIPESRKPNSVDHEADGEDSSGDSSERKAPSTEDVTKDLKGNTAYQXSYPICSDHEECIVGTPYVLTEERVTAGDAGKGHMVNVVKGLKIDEAVCTTQERVKEAVDAGGPQPSLVVPQRDGAVAGAAAAAAADDPGARHAAEGRSTEAPSSATAPAPLGRVGACVGHARARGARHDGRRARAGEADGDGPRRRQQADEPQRHRRLPAVDGRAQEVQQAPPAAHPEAPVLGDDVADRGPGLTSTTSPHRTSPRLAGVVVVTIRPHFLLL

SEQ ID NO: 122096 - protein, 532 aa, Oryza sativa
  Clone ID: PAT_MRT4530_25056C.1.pep
MRISELGECDGVRSEGEEEQQVVVEEASVRGGVVVARLSAKRALVGAGARVLFYPTLLYNVLRNRFEAEFRWWDRVDQYILLGAVPFPSDVPRLKQLGVQGVVTLNEAYETLVPTSLYQAHGIDHLIIPTRDYLFAPALQDICQAIDFIHRNASEGGITYVHCKAGRGRSTTIVLCYLIKYRSMSPEAALDHVRSIRPRVLLAPSQWQAVNVFSTLTTGRLPIQSKNLGHFLEAGDDCITNSEIDDYYSMELDYEDSGLPLCQVMLPRPTSPTVCTDAVLITEADLEGYDTYADTRKDVVSLEVIVSRKPIMRRLSCLFGSLKLTNNCEPTPSRFAEGGNVPCYLAHHSLGTCQSLAPVLPRTTALRGLKYRHLVDNRVVFLLESVPDEIKDSARSLQLASVGFGLGLGRCPGDWVTASFLPPWRWSLMETFSDVLMESAGFTPAFGKILAGWDYGGSSSPTIGFRCCRVSQMKFPRPEVVGIRPRAHAPCGKFHSVPDILWMGSHRLPFWLTANIAVAFIPATHPSVNSCI

SEQ ID NO: 122097 - protein, 73 aa, Oryza sativa
  Clone ID: PAT_MRT4530_25057C.1.pep
GCLFHFLNPALHQTADFDDYITRGLQCAFGEYCEKYAKPEDAGVTPEDKSSDEELSEDEDDSGDDAILGNPDP

SEQ ID NO: 122098 - protein, 107 aa, Oryza sativa
  unsure (1)..(107): unsure at all Xaa locations
  Clone ID: PAT_MRT4530_25058C.1.pep
MKLRYETVTIELKNGTVVHGTITGVDISXNTHLKTVKLTLKGKNPVTLDHLSVRGNNIRYYILPDSLNLETLLVEDTPRVKAKKPTAGKPLGRGRGLCGVRARGRAR

SEQ ID NO: 122099 - protein, 224 aa, Oryza sativa
  unsure (1)..(224): unsure at all Xaa locations
  Clone ID: PAT_MRT4530_25059C.1.pep
MGASASSSGERRRRCGSAAIVADTVSEHFDLTIDGYSHIKAMLPTGKCATSPPFTAGGHEWCVDFYPNGKLAAAGDADMIQFFLRLRRAAKAKAAAAAVVAQVRFDLLGDGGSPQAGVCSGTGRVLSFAVDGRGQSMVIRRDAFEQAGCAKDDRFTVRFAVTVFRGCRTAEAXAGEQAPPPGAVAGVAPPPDVQLHVYGRLSNKERAVCADATFELDRWRLSSV

SEQ ID NO: 122100 - protein, 190 aa, Oryza sativa
  Clone ID: PAT_MRT4530_2505C.1.pep
MFKNTFQSGFLSILYSLGTKPLQIWDKEVVDGHIKRPQDEDIQSNVLEIIGTNVQSTYITCPADPAATLGIKLPFLALIVKNLKKYFTFEIQVLDDKNVRRRFRASNFQSVTRVKPYICTMPLKLEDGWNNIQLNLSDLTKRAYGTNYVETLRVQVHANCRLRRIYFADRLYSEEELPPEFKLYLPIQKA

SEQ ID NO: 122101 - protein, 71 aa, Oryza sativa
  Clone ID: PAT_MRT4530_25060C.1.pep
MAHRLRKTADGIAYRGEEHDGWNAELELVTSLVTAPFPCLPPLILCREPPSSLAASSLTLLQLQMGRREGV

SEQ ID NO: 122102 - protein, 388 aa, Oryza sativa
  Clone ID: PAT_MRT4530_25061C.1.pep
MARVLPLSIEAGEMAMPRREEVVTDMPSSSAVASGNGIEQPEQNTKDDEYERLVRPAHSVIADDNTVVLPEEPTSRSIWWMKVLLGCFLLILVSYVFVKWGVPFAFEKVLLPIMQWEASAFGRPVLAVVLVASLALFPVTLVPSGPSMWLAGMIFGYGWGFLIIMVGTTIGMVVPYWIGSLFRERLHAWLKRWPQQIALIKLAGEGNWFQQFRVVALFRISPFPYTIFNYAVTVTEIKFNPYLCGSIAGMIPEAFIYIYSGRLIRTLADMKYGNYKMTPVEITYNAISFVIAVVLTVAFTVYAKRALNDIKESEGWAAHVGLPFASGPHWLSQGEQLDSRVLSARLVPPRLTKSEALGSSAIYRGLVPTLELTQLRGEHRANYSFAFY

SEQ ID NO: 122103 - protein, 680 aa, Oryza sativa
  Clone ID: PAT_MRT4530_25062C.1.pep
MHTVKETKLLATKLNLLMKRLDDHEKRPRGTVKALDSHVTCEVCGGTGHSGNDCPETREEAMYMGNNNNGYRPQGGQGWNQPCPYYQGGNINGNFSNQPSLKDLVFAQAKTTDSLSKKLAANDKILDNINVKLDGFASTFQNQLSFNKMIETQLAQLASLVPANESGRIPGQPDSSIENVKAITRRGVIQKIHINVPLLDAMQVPTYARYLKDILNNKRLLPTTEVVKLTEQCSNQILHKFPEKKKDPGCPTITCSIGAQQFNGKEEKFEFQPRTEQCSMVREDLQKMRELVAGNERQRQGLEHRMSKLENHLSEICGSLWVTYTGLHQLAGECGVKATIPANPDEFSLTSLLAELATAMEHYDLEYFVVVCRDVDVKDVQQSGQPELPVIVPALASEPHVPRTKFEVAELERIMLEVKKDQAVETLGGREVWFNSYLKSCCTSMSRVCRELRVPRGDPEESAAGYISWLNGACAQLDSIGQRIDEAFKQECGRSSRYAEGHVLACIRDHRPQLHLEFLREGFSRSRRTPTEINGLAKSMAPLAEKEFANLRPSPSAILNAPGRRTCVIVSVGSMASEPYTRKKGVSLLDVVGVYYAVCPLDLSIALRVRNRGEADLDSQPDAVILEIGTDELGAVVRYDTVGQSESAEYPFDEFDGVVGLDFPRGCRFNPLSEFVGRHE

SEQ ID NO: 122104 - protein, 362 aa, Oryza sativa
  Clone ID: PAT_MRT4530_25063C.1.pep
MVDEVTGRALFYYLAKANGGSATSSKGPLLLWLNGGLGCSSLGYGTIEELGLFRVKSDGEMLSARMRWPPVSSHHVALTSPHCSSEPHKLALSIIATFIFLHATLSAPGSGLHDADGLELLPNLSSPRPSRARCPVTSPPHRRLRCQELPAHGTGEGVSSPSRASSLFVYSCAKPPLPPAGEAVTFERRQPLLVAHQLAGLLRHQHPGLVEKENLESFNLPLYGPSVGEVDEIVKNVDEIKATASRTNPTFAALALRFAVRVELAGHHAEPERHNAGEPSLLSASSRLASDRAALSRSAAMAHPAKHAPPARLLLDALRTTTAAIRVRAPAALSRAASEKIAVPRIAPSHAVPPPPPPPQAQ

SEQ ID NO: 122105 - protein, 224 aa, Oryza sativa
  Clone ID: PAT_MRT4530_25064C.1.pep
MKGSADHMQPVAHWSKKLSDKTIPLTWPFSCWGLDMLGPFPRGQGGYRFLFVAIDKFTKWIEATPTGEIKADNAIKFIKGIFCRYGLPHRIITDNGSQFISADFQDYCIGLRVKICFASVSHPQSNGQVERANGIVLQGIKTRVYDRLMSHDKKWVEELPSVLWAVRTTPTTYNKETPFFLVYGSEAVLSTELRHQRNRDYQEGQRQSIDWNTFSASGAIDFAR

SEQ ID NO: 122106 - protein, 435 aa, Oryza sativa
  Clone ID: PAT_MRT4530_25065C.1.pep
MRQDKTSDIDFRDNFVDNSVNTNLNQGVPASTMLVWTQVGAAAQALQTIPLTWPFSCWGLDILGPFPRGQGGYRFLFVAIDKFTKWIEVTPTGEIKADNAIKFIKGIFCRFGLPHRIITDNGSQFISADFQDYCIRLGVKICFTSVSHPQSNGQVERANGIVLQGIKTRVYDRLMSHDKKWVEELPSVLWAVRTTPTTSKKEKPFFLVYGSETMLPTELRHQRYGDYQEGQRQSMDWKTFFASGAIDFAKASSIRLPMSSSWAQAPFSHEMYPAADSSGSPRGTRSSLQTLVMDVQQLFRRILIYIALRHMWLERKCRNDHWQLRLPALLDILDINISTNDNKVLEIKMLKKTKVMTAHTKAVGTNIADFFHHILARVASRPLIQDLLEIEFRVRQPHTRKDMARTGIDPIRRLLSDHGRVLEGDRLHRHSQFRK

SEQ ID NO: 122107 - protein, 53 aa, Oryza sativa
  Clone ID: PAT_MRT4530_25066C.1.pep
LMMVLLFVIFLAWSPVLVVGHNVQVVNGVHIMRSVAIHATRRSIIPYWFTWCK

SEQ ID NO: 122108 - protein, 237 aa, Oryza sativa
  Clone ID: PAT_MRT4530_25067C.1.pep
MADWGPVFIGLVLFILLSPGLLFQIPGKGRIVEFGNFQTSGLSILVHSIIYFALIAIFLLAVNVHMRFYNTMSGRSTIINLSLTNRTAKSQPLLYTCQENGIAWEGSSYVTAGTKTWSPATDPPSDANAVVTACDEAAILLKEEGANCGGAVALEMPAAGEGCSDDDRRERAHSGSSPWGTPLHALRVVVMLAPSSGEEKGRRRSWRAAPRPLPPSCIKGNCFGSRKVPENEMEKGG

SEQ ID NO: 122109 - protein, 169 aa, Oryza sativa
  Clone ID: PAT_MRT4530_25068C.1.pep
MDLAAWFGPVNSGLVLLILTMLLRNLQNFQLMQTFVARQLNRRARRLAALIDPYLSITIHEYDAGRMTRSDVFAETKAYLDGAVGTRDDVRHLNAEDARGGGGGGGAGEGGGGGAGSSSSKGLVLSMADGEEVEDHFRGATLWWSAHCEQDDYKGRRGGRGRALQRRSY

SEQ ID NO: 122110 - protein, 94 aa, Oryza sativa
  Clone ID: PAT_MRT4530_25069C.1.pep
KEQILLGGIAGLLNPLLGTRKRLFCLFLVSILLVSKYESFFFLFGKDYYFFFIWVCLLNLFCLGSGDVVDKKRERKYGVGQIFCDQIELLDLFN

SEQ ID NO: 122111 - protein, 95 aa, Oryza sativa
  Clone ID: PAT_MRT4530_2506C.1.pep
FHDLPINTSTISKSMTITPSTSLLLIMMPLQLQADNSMRLLPRTALMLLQAHATGACASIRLVCFSHCPNNFVCVTIFSLYLFGKIFSWLVHLFT

SEQ ID NO: 122112 - protein, 44 aa, Oryza sativa
  Clone ID: PAT_MRT4530_25070C.1.pep
MASTGDGAPGAGGNGGAPGDNTNGGNSVTQSSGGTFTGYNLSTL

SEQ ID NO: 122113 - protein, 83 aa, Oryza sativa
  Clone ID: PAT_MRT4530_25071C.1.pep
EASCERRASAKLSVSLYLSLSVENHVAENTAFIQSYSQDRNNPLKLVIQEKKSNVSVQPFPLSLLISLAWPFLLTLFIYNISR

SEQ ID NO: 122114 - protein, 72 aa, Oryza sativa
  Clone ID: PAT_MRT4530_25072C.1.pep
MGRDLCSPAVPAVFSTTVTFAAWGRMEKYGEGGIGAAAAQHSRRLVPGLHSPASGRRRCGLHVELQSLLLQL

SEQ ID NO: 122115 - protein, 65 aa, Oryza sativa
  Clone ID: PAT_MRT4530_25073C.1.pep
LVFIRARISHAIPYTIPDVTHQNFTPLKSPSTGLPKTKQKLVKTITFKSTSKWAHLTCKKRGHFC

SEQ ID NO: 122116 - protein, 176 aa, Oryza sativa
  unsure (1)..(176): unsure at all Xaa locations
  Clone ID: PAT_MRT4530_25074C.1.pep
MAKSSYAIVYQCGEDHEQHAGEVAQPELVVIEGVGGDGVGAAEVXAAGMASRRRRWRRTHECRLHDEHHYEVYHLPKVNSPLGESEEYAHIRHSHWEIINTSNNDISTKIVECVGATVVGIXAQRMQHDEPLHDSHMSTREKRQCATSMVINPWVINQHNQGVVINYESAIKRNSA

SEQ ID NO: 122117 - protein, 58 aa, Oryza sativa
  Clone ID: PAT_MRT4530_25075C.1.pep
LILQYAINKCCVLQNTIDEHEFRNIISDNGFSFLLYRHLSVTCSFLYLVPQKYSSPLL

SEQ ID NO: 122118 - protein, 721 aa, Oryza sativa
  unsure (1)..(721): unsure at all Xaa locations
  Clone ID: PAT_MRT4530_25076C.1.pep
MGFNFHPVNDSDWLIRAAMLLSFTLQVILVFVAPTRKRSCHPLPHLAVWSSYLVAGWVAVVGLGLLLNSLSISGSNNGSSSIFAFWTPFLLLHLGGPDTITAYSLDDNELWLRHLAGMLFVVFAALVVFFSSVTSNPMVTATVLVFVAGVIKYGERIYSLYSGSVRGFRDKMLGEPNPGPNYAKLMTEFESKKNAGLMVEIIVVDGEHKEALEQAEVMKNGRKSVETMAYELFAMFRVLFVNLVLSYKERRISQAYFLDLGDVMTAAAAFEVVEVELGFLYDMAYTKAAVSSTRRGCLLRFVATACLVVAVVLFVLMDKAGVRHVDRGVTYVLLLGGVAIDVAGYLMLLSSDRTLAFLDGKPKLAWLARVARAVRLPTRRWSERITKMNLIRYSLSKPEEDAGRRCWCCRWTTIPRVVRCLAWVADMVGVREILDDFFFIRHEPVSCRKIKDSNKGKKSIDVLNYVFDGLRKTANEVRYSGGNEMEEVCDYRGGEGIINELVGDIQLMELNVNDVVRESVRREFDECLLLWHVATDLCSHRRREMEVPRNGDIQSLMSISETLSEYMLYLLARRXPEMLPAATATAAVIGLLRYRDTRAEARRLFRSAAAWDPTHHDAQRMLLEVNTSKKPAVVKGDESKSVLFDACILAKALLQLGDDTMWRVVAGVWREMLVHAAGRCHGSTHVRQLSRGGELISMVWFLMAHMGIGDMYRTQVGDANA

SEQ ID NO: 122119 - protein, 228 aa, Oryza sativa
  unsure (1)..(228): unsure at all Xaa locations
  Clone ID: PAT_MRT4530_25077C.1.pep
MQHDEPLHRLHMSTSEKRQCATSMVINPWMINQHNXGVVIDYESAIKRNNNRFQIILRRYVHTRGNHMNSVVPPHGKHFTSFTGPKRNTQTDDLHSEFGKSMDLVQQVYVTPSCRHIDITIYDGGNDITPVWQFGAVAARWHTTEFRVDPRILMTAARRIQRRQLRPQQRQPNCIRPYRLGGGXSGSRQRQRQHGFRAFSETAVSRDGIDARXDGIPNSDDERWPTCL

SEQ ID NO: 122120 - protein, 143 aa, Oryza sativa
  unsure (1)..(143): unsure at all Xaa locations
  Clone ID: PAT_MRT4530_25078C.1.pep
MHYNEVDMAAAFMSIVGAALSSKANLMVIKQRSIIIRKSXTMPRAPTEQPMVMANELLYLRQIYDETSNYLTYDISDDYGYNTRGICVDHYIFDNNTDLEAIHSMXAISSALGCVLQDLISSTRIKASNRRCSNRRPRSSHMA

SEQ ID NO: 122121 - protein, 161 aa, Oryza sativa
  Clone ID: PAT_MRT4530_25079C.1.pep
VMGQSVLFRQPSSASVVLPNRATSLTVRAASSYADELVKTAKTIASPGRGILAMDESNATCGKRLDSIGLENTEANRQAYRTLLVSAPGLGQYISGAILFEQTLYQSTTEGKKMVDVLVEQNIVPGIKVDKGLVPLVGSNNESWCQGLDGLSSRTAAYYQQ

SEQ ID NO: 122122 - protein, 214 aa, Oryza sativa
  Clone ID: PAT_MRT4530_2507C.1.pep
MWPCGFLSEISSKFHGCWKFEYSMTSTNGLQELRGSQSGQGPPELMLCIAVHGTYSTIIALKTSIYSEWRKKDLVATALWLNSKRRGVERAGSELLATIDKAYRFINGDWEQQEQRQHRPEKHCEERTARAPEHREWVTSARGGAARPTGTPPSKSAVRSSSAFCPTLVAGDRQPARPPPGIAASVNVVLSRANPLPRAVDGCGGSDRCGGRRM

SEQ ID NO: 122123 - protein, 445 aa, Oryza sativa
  Clone ID: PAT_MRT4530_25080C.1.pep
MESQQEKAVSAPAANGSGGAGGGELIGYVDVHVQSARDIQNICIYHKQDVYARLSLPGEGAPAASTQVINGGGRNPVFDQSLRLGVRAGDVDGALRCEVWMLSRVKNYLQDQLLGFALVPLPDVVAAEGGTLAREFPLSTNDIFHSHAGFLQLELSYIGVVPEVVPISPTPKPALADAEEHRAGGAANGKEYEKIEFPDLNLVEENQIMLSEYIGLPCSAVEPQSSESLLTSEEDGDGATAETHVAGVRVVQSFSTDNSTADSAGTFRSDTPVSSVSTTESPAAAAVPATPQSNSSGNAVSSAEQKEKAASDAADAEVESSRTVQSSASPAANSPGAMSESAVDKPPVIRVNLEQEVKVDQKEIMDMYMKSMQQFTESLAKMKLPLDLDNGSDKSAAVSGAGAAASDADSSGADSGAAAAAAAKKPMAGGPEKSPKVFYGSRAFF

SEQ ID NO: 122124 - protein, 175 aa, Oryza sativa
  unsure (1)..(175): unsure at all Xaa locations
  Clone ID: PAT_MRT4530_25081C.1.pep
MASKVVFFAEALMVDMVGISGAQLIXLEMRFRDRQCQCXAHDSPLYACPQVLYRHLTGRERFQPMFPRPGALGLQMQCCQQLHDXVSRECRCAVIRRMVRSYKESMPMPLEQGWSTSTSECYCREGSXDDHGXFGEVSQDEDFYREQHQQADMTHVRLTSSRHYANHLTSFRPSE

SEQ ID NO: 122125 - protein, 429 aa, Oryza sativa
  Clone ID: PAT_MRT4530_25082C.1.pep
MAYSGLRHGGVGSSSRPGHGFKGPASSVECLGREMLEMQLRDSKPDVGDEKNTERDVVDGSSAEAGHIIATTIRGRNGLPKQSVTYIAEHVVGTGSFGVVYQAKCRETGEIVAIKKVLQDKRYKNRELQIMHMLDHPNIVGLKHYFFSTTERDELYLNLVLEYVPETVNRIARQYSRMNQRVPLIYVKLYTYQICRALAYIHNCVGICHRDIKPQNVLVNPHTHQLKICDFGSAKVLVKGEPNISYICSRYYRAPELIFGATEYTTAIDLWSTGCVMAELLLGQPLFPGESGVDQLVEIIKVLGTPTREEIKCMNPNYTEFKFPQIKAHPWHKVFQKRLPPEAVDLVSRFLQYSPNLRCTAMEACMHPFFDELRDPNTRLPNGRPLPPLFNFRTQGCDVSEVGEEEACALVCLCSWFEVGIYASGFQAV

SEQ ID NO: 122126 - protein, 115 aa, Oryza sativa
  Clone ID: PAT_MRT4530_25083C.1.pep
KDSNALNVCTEFKFPQIKAHPWHKVFQKRLPPEAVDLVSRFLQYSPNLRCTAMEACMHPFFDELRDPNTRLPNGRPLPPLFNFRTQELNGIPPEAIERLVPEHARRQSLFMALRT

SEQ ID NO: 122127 - protein, 218 aa, Oryza sativa
  unsure (1)..(218): unsure at all Xaa locations
  Clone ID: PAT_MRT4530_25084C.1.pep
MLVVFLGGGAGGVAVAGAGAGALRQRGAPAPAGSVYRSHLVLDRLLPELRASSASRPHPLMTPQNKKSGKRWAPCITKKLRRSELPPSNGFLIIEANGGLNQQRISICDAVAVASLLNATLVTPAFHLNSVWRDSSKFGDIFDEDHFIGSLRKYIRVVKKLPEDAFVNFDHNISMIPNMRTKAFSSESYYLQKXVRIAPFSNRLAHSVPPNIQALRLE

SEQ ID NO: 122128 - protein, 135 aa, Oryza sativa
  Clone ID: PAT_MRT4530_25085C.1.pep
GRTQAPVAPPATVAPRYCAAARPVKSNAVTRLSFSTALPHAPRTSVWTSMPMQAPSMPTPLGPSLRRQLVDRNTYNGYASSVPPNAVEDGRSIVGENLAGVEGGRPRTKRGSLPVAFASQRDYPKRKGEEEEYMD

SEQ ID NO: 122129 - protein, 168 aa, Oryza sativa
  Clone ID: PAT_MRT4530_25086C.1.pep
MAAAPSATSVHDFTVKDASGKDVNLSTYKGKVLLIVNVASQCGLTNSNYTELSQLYEKYKVQGFEILAFPCNQFGGQEPGSNEEIVQFACTRFKAEYPIFDKVDVNGNNAAPLYKYLKSNKGGLFGDSIKWNFSKFLVDKEGRVVDRYAPTTSPLSIEKDIKKLLGSS

SEQ ID NO: 122130 - protein, 1090 aa, Oryza sativa
  Clone ID: PAT_MRT4530_25087C.1.pep
MDMSSYLAVGGWFIQVIFDKYLSYQLQSWAADCGISHEMNRLRVALLRTQSVLHGAEVTPSLSYGSLPWMRELRDVMYHAEDLLDKLEYNRLHHQMQESSSTESNSSPISAFMHSRFRNQGAQASGLEPHWDRSTRVKNQMVNLLERLEQVASGVSEALSLPRKPRHSRYSIMTSSVAHGEIFGRESEIQQLVSTLLSSQVDGDNPVSVASIVGVGGVGKTALAQHVYNNTRVAQYFDMRMWICVTDAFDESRITREMLESVSSSRFRHDSITNFNRLQVALRARLVSKRFLLVLDDVWSNDKITLAIEHENWQKLLSPLKAAANGSKILLTTRSSMVAEMLQSAHITNLECLSDKDCWSLIKMIVFDDTNHLINSQLANIGSEIAKTLNGLPLAAKVVARQLKCKHTTDEWKQVLQRNAVWDEIMPIFQHSYENLPVHLQQCLAYCSIFPKDWEFEAEQLILMWMAQGYVYPDGCRRMEDIGKQYVDELCSRSFFAIQKKQFVSYYVMPPVIHKLAKSVSAEECFRIGGDEQRRIPSSVRHLSIHLDSLSMLDETIPYMNLRTLIFFTSRMVAPINISIPQVVLDNLQSLRVLDLSPCKIDRLPDSIRQCVHLRYLNISSTAINMLPEYLGKLYHLQVLNLSGCRLEKLPSSINNLVSLRHLTAANQILSTITDIGSLRYLQRLPIFKVTSEETNSIIQLGYLQELRGSLHIRNLENIDAPDEAKEAMLCKKVNLTMLQLMWAPARDLVNSDKEAEVLEYLQPHPNLKRLDIIGWMGVKAPSWLESKWLINLELIFLSGCNAWEQLPPLGQLPSVRTIWLQRLKTVRQIGLEVYGNRSSHVAFQSLEELVLDDMQELNEWSWTGQEMMNLRNIVIKDCQKLKELPPLPPSLTELTIAKKGFWVPYHHDVKMTQLTTVTTVSSLCIFNCPKLLARFSSPVTNGVVASFQSLRSLIVDHMRILTCPLLRERLEHIENLDIQDCSEITTFTADNEDVFLHLRSLQSLCISGCNNLQSLPSSLSSLESLDKLILWNCPELELLPDEQLPLSLRKLEVALCNPVLKDRLRKECGIDWPKIAHIPWVEIDGEILQ

SEQ ID NO: 122131 - protein, 108 aa, Oryza sativa
  Clone ID: PAT_MRT4530_25088C.1.pep
ASVSKDLNGGYTTDDDEKPNMHPSLLELLGYSMLSLLFASLRKPVPLPDVGSTDNLCHAKLLSANPNLSSSTQESCTVLFAEKVCSSTCEVTLFLYINIQGHKKKNKE

SEQ ID NO: 122132 - protein, 183 aa, Oryza sativa
  unsure (1)..(183): unsure at all Xaa locations
  Clone ID: PAT_MRT4530_25089C.1.pep
FFFFFFWQEYQILVFKKFRWLSSGPVIASSAHSSTTVCPSQATGCVCLFQSTGQPLAAIAAHTIYXLXATNNFSAKSHPLHTIKLHHSPSHCSIVCSCFSTSRSHSSAHLLGPHSTRTLQTSSIQHIHAALSFNTCALVCLHHPSGISCNQQTQPGLSXDLDTKCGRSRTXXHYAFSLFQRLC

SEQ ID NO: 122133 - protein, 188 aa, Oryza sativa
  Clone ID: PAT_MRT4530_2508C.1.pep
MATRFLPLVRRGLAGVLNQSPAPASTRGFLFPAPVTAGIRSLQTIMEASNNASDDRNQDIEDSKTDTVPATVPSSDSGFKVRDTSNLKISPRHDLAMIFTCKVCETRSMKMASKESYEKGVVVARCGGCNNFHLIADRLGWFGEPGSIEDFLAEQGEEVKKGSTDTLNFTLEDLVGSQANDKGPSDKK

SEQ ID NO: 122134 - protein, 104 aa, Oryza sativa
  Clone ID: PAT_MRT4530_25090C.1.pep
FFGFKASTNMQGPGWNKKKQWWKPETCAVNPRLQKQFGHSGLTGGFKIGAQGSKFWPPKVQTFGDPTLGGGKGGFFPRVQKPKRGIGGASIWATVKHPRGKKNF

SEQ ID NO: 122135 - protein, 68 aa, Oryza sativa
  Clone ID: PAT_MRT4530_25091C.1.pep
MGTQDPRPSWAPGPFLLVILRWEPPVPSQLELSGFLHEAGASGPVSKNRLRTEGFTAKSHVARDRGDP

SEQ ID NO: 122136 - protein, 651 aa, Oryza sativa
  Clone ID: PAT_MRT4530_25092C.1.pep
MATATATAALALLSPPLPASPTPPPPPPLRAILLKQPFLRPIRQRRRLSPRPLLRRRDPVAACAPTADAETASTSRSYDALEAERAVAELLREHGASPADAASIAARAPGYAAMLADGVRELDELGLWESWSSGAGAGREVEMAGLGFGRKVYYMGKAKSRRDRGVVPLLESVGVRLSSAKLIAPYVSAAGLPVLIDRIKFLKEILFSSNVYETLISRNAKRMMMHLSIPADESLQSTLSFFEKMEARYGGLNMLGHGDVSFPYLIESFPMLLLCSENNHLKPLIDFLQYIGIPKPRIASVLLSFPPIILSDVENDIKPRINAWEKVGIEQEYIGRMLLKYPWILSTCVLENYGQMLMFFQRRKISSTVLGVAMRSWPHILGCSTKRMNSIVELFDDLGISKKMLVPVVTSSPQLLLRKPNEVMQIILFFKDMGLDKKTVAKILCRSPEIFASSVENTLKKKINFLIDFGVPKHYLPRIIRKYPELLLLDINRTMLPSSCEHVTDFNSSMYSNVYRINYLLDMGLSKKNVCSMIYRFSPLLGYSIELVMKPKLEFLLRTMKKPLKAVVEYPRYFSYSLEGRIKPRFCVLQSRKIDCSLTDMLAKNDELFAEEYLGVGRSLETDIQSSEAACFHMRKSTSAVLKHCEGLEYR

SEQ ID NO: 122137 - protein, 203 aa, Oryza sativa
  unsure (1)..(203): unsure at all Xaa locations
  Clone ID: PAT_MRT4530_25093C.1.pep
MSPTATRITIGDGAIARFWESTXKCGRQPKDVLPQVYAISKRKNRTLREAIADDTXSQDLYLLILGAMITELLDXLVTLXTTVDSVXLTLDVVDEITWKLTSPGEYMVGSAXESXFLEAINTNYNANIXKPWGPNKCKIFAWLAIQNRVXTSNRPTTWGXHTALVQRRTLETAVHLLMEYRYTWIIWGILTNWMAQEYSKPTS

SEQ ID NO: 122138 - protein, 65 aa, Oryza sativa
  Clone ID: PAT_MRT4530_25094C.1.pep
MPPHCAILTAAPLAVPVARSSPPLYAVNITTSHSRSVTSRFVHPRCKLINDNYSPITLSQPGRSS

SEQ ID NO: 122139 - protein, 101 aa, Oryza sativa
  Clone ID: PAT_MRT4530_25095C.1.pep
MDISRENEGYTSCGPVVEIRAHSYDVTTGNNPTGVPYVRALILVPGGKRRPSTQRQTGNNGRLGRRPQALDGRHELDTKAFISKELLFWTWEKLSKTEYNH

SEQ ID NO: 122140 - protein, 59 aa, Oryza sativa
  unsure (1)..(59): unsure at all Xaa locations
  Clone ID: PAT_MRT4530_25096C.1.pep
NEETDQFEYXIPEKSSLQHHLQCPDSEFPRVRSYLLQINPRRRPTASEALQHQWLSFAY

SEQ ID NO: 122141 - protein, 82 aa, Oryza sativa
  Clone ID: PAT_MRT4530_25097C.1.pep
MPPRRCLEAAAPRRVPRRASLPCAAAEPEGVADLSEGEDPQDYEQGKSSLFFEHVDPNCEIILFTNKIACNDEHPTCDYVMP

SEQ ID NO: 122142 - protein, 1110 aa, Oryza sativa
  Clone ID: PAT_MRT4530_25098C.1.pep
MANPAISLKDISVGQQNCKVFGRLIRLWDAINMRSKSADPLISIDVILLDELGSIAQITVPKREQTQDVLLWGQYGESFNEDATLHKSKDGIVVAIFAGLTAGKFSAITKASSSSATEIYIDLDTPQVREFRTSYKWERPTLEQQLPKVIRLTPIQAAGKMYTLSEISAMPISAFQMYLTNVQCFRYKLPVTITDESGSLDAVAFSFVAEDLVELDAAQASQNMKIDPADHPTTLNNAIGKTKIFAIGMNTDTSSKFPISYVLKKSFTIEPTMSVPMLTDGEPLKNKEVLQLPPPAPHTDNPSTTIHNTGASSKSTPPEISLADKTPTEKTSSTTKRAIDFTKDSIEETRSRHVRDDSKFQAMWYGNPNFCWDLLPNFVGHAILEAELILDRDGNGGHLCSLYYLALSIILCFLILFRLSLYAGFYWYTKVKVEDDVEGSGINASVGDLRDAAVNPQPALLRATVKEEVEGQPSSSSSHVRSQFIGMGFSPMLVDRVLQKHGDRDSDTILEALLSQSALQKSGSESGSLGDLFDSDNEENSSHFAPRKEVIQDIKVEADSSSEKRSYLLSTMNFSQREVDLALNQLGEEASLEQLVDFIVTGQVSGCSGGNENGDASNEVKDESLFGVMDKTLHLLQMGFTEEEVSSVIDKAGPEATVLELADTIFARRIASSIEQKEVKVEPDFLDETETSYSAYHPSNSGLRYYDDDHDNIRIKRAKHMFIDDSAGSSSRAGNQPNLDPWLKDHRATTSDGSVKEEFDAMTPGIRRNVRSDVANPPYFLYGNVVEIPKATWRQLSEFLYNVEPEFVNSQFFSALSRKEGYIHNLPTEGRRNLVPRSPMTIEEAFPFTRQCWPSWDTRKQLNSVATEVAGIEQLCERLGKMVRDSGGYLSQEKKTHIMHQCKLANLIWVGPDRLSPLDPQQVERILGYPRKHTNLFGLNPQDRIEAMRYSFQTDTLGYLLSVLKDLYPDGLRVLSIYSGIGGAAIALHRLGIPLQCVVSVDQSDTNRKILRRWWSNTEQKGQLRQINTIWKLKINVLEDLVKEFGGFDIIIGGNFSSCKGGTTVNSSMGMDSNQFFEYVRVVQRVKHIMGRLQVRAHESARHRHRSPSN

SEQ ID NO: 122143 - protein, 181 aa, Oryza sativa
  Clone ID: PAT_MRT4530_25099C.1.pep
MESETGEREVRYDPFLPRAPGWFQTPLRRRAASSVLRLPRLWFLEGFRTNQTCPDKDEGRAALNGEIDRSKRPSESSLERLNVNNCCEGPAACSGLVWFSRGLLKVARDSTCSYTIVNDQRKAATKVQQAARGPASNRKQKKNPKPSEMRQVAGRTCKAAVETNFQTHMAPIGRNRQIRMK

SEQ ID NO: 122144 - protein, 313 aa, Oryza sativa
  Clone ID: PAT_MRT4530_2509C.1.pep
MSHQSENDPPSESPLHDDSLDEVSSIDPMDLYPLDEVSSILGDIADQVIVEVKSEVAALQDMRPTRRSGTRSYIDRPYAESEQGLLNDYFVENPVFNGTNFRRRFRMRRPLFLRIVEALGEWNEYFTLRMDALNRPGISPIKKCTSAIRQLGNGSPAVECLKIFVKGVIEVYGEEYLRRPTVQDVECLVHTREHRGFPGMLGSIDCMHWHWDKCPVAWKGMYTRGDQGVPTVILEAVASHDRWIWHAFFGVVGSNNDINVLNQSPLFIQQLRGEGPQVQHHVNGRQYNNGYGLADGIYPEWAAFIKSIRQPQS

SEQ ID NO: 122145 - protein, 56 aa, Oryza sativa
  Clone ID: PAT_MRT4530_250C.1.pep
TCKENCGAIYAPYFFAERPLSKAKGHGERKINSCIVVCHKFKHGGDSILNKNVMQV

SEQ ID NO: 122146 - protein, 135 aa, Oryza sativa
  Clone ID: PAT_MRT4530_25100C.1.pep
LAWPPPPPDAAGVGAAGGDDTGYCLSSQNSSTAPEAAMERAQVAALTQRLIIPPAPPPPPPCTATPASSCSTTPPFSSNSSMSTPHPSDDGGAAYMAAAHDRCSCGNTTASSAMRAFSYLPTKLPLTRSASYHSS

SEQ ID NO: 122147 - protein, 241 aa, Oryza sativa
  Clone ID: PAT_MRT4530_25101C.1.pep
MATSGLRSCSAVGVPSLLAPSSNRSRLPVCAYATTSGRVTMSAEWMPGQPRPAHLDGSSPGDFGFDPLGLATVPENFERFKESEVYHCRWAMLAVPGVLVPEALGLGNWVQAQEWAAEPGGQATYLGNPVPWGTLPTILVIEFVAIAFAEHQRTMEKDPEKKKYPGGAFDPLGFSKDPVKFEEYKLKEIKNGRLAMLAFVGFCVQQSAYPGTGPLENLASHLSDPWHNNIGDIIIPRTIYP

SEQ ID NO: 122148 - protein, 184 aa, Oryza sativa
  Clone ID: PAT_MRT4530_25102C.1.pep
MAGQVFVHHLGGGSGGDDPTHPWLSLKSSHEMDDAVASWREKLADMAAADERAGRYPCPLCDRHFPTEKAVHGHMRSHPGRGWRGMEPPREPSPGDLALAADGKRYRYVCDRCKAPFETRQALGGHRASHSTKKGCSWHAKQLAMAKPPKNDFDLNHLSLEAIQAAAQEEQAAQEGNKDEEPKN

SEQ ID NO: 122149 - protein, 262 aa, Oryza sativa
  unsure (1)..(262): unsure at all Xaa locations
  Clone ID: PAT_MRT4530_25103C.1.pep
SCSAVGLPSLLAPSSNRSRLPVCAYATTSGRVTMSAEWMPGQPRPAHLDGSSPGDFGFDPLGLATVPENFERFKESEVYHCRRAMLAVVWFLILISAWHGLRRHGRTELNXNHACAAWGVVPEALGLGNWVQAQEWAAEPGGQATYLGNPVPWGTLPTILVIEFVAIAFGEHQRTMEKDPEKKKYPGGAFDPLGFSKDPVKFEEYKLKEIKNGRLAMLAFVGLCVQQSAYPGTGPLENLARHLSDPWHNNIGDIIIPNTIYP

SEQ ID NO: 122150 - protein, 38 aa, Oryza sativa
  Clone ID: PAT_MRT4530_25104C.1.pep
IFKGGFLMLTRLDLFIQQQVPFFFFPISFPGGRGKGKQ

SEQ ID NO: 122151 - protein, 184 aa, Oryza sativa
  unsure (1)..(184): unsure at all Xaa locations
  Clone ID: PAT_MRT4530_25105C.1.pep
LLKCKFYWRVWALILKFYYALIWRVWALEKCKFHTWLVIXNRVWTSDQLTTRVWQNNGLCALCHREVETALHLVVSCRYMKKNMKPDSCLGVXQQLDTRQWETTQTVKAWWEALTNMVEVPKRRIRTLILLVVWEIXKERNQXIFKHNDAMLSVLFAKIKEEGRTWAMAGARRLHDICPTLYSV

SEQ ID NO: 122152 - protein, 88 aa, Oryza sativa
  unsure (1)..(88): unsure at all Xaa locations
  Clone ID: PAT_MRT4530_25106C.1.pep
DQSDTGHVVSRQPXSHVAPASGGSGDPPKHRSRVLRFSAARTCIHRPCLMLFRRSRTFHIQRXLEFHPESPAEPAKGGLRGLPVRSPT

SEQ ID NO: 122153 - protein, 199 aa, Oryza sativa
  Clone ID: PAT_MRT4530_25107C.1.pep
MALAAAAAAAFCCCCSAATGFEFNEATVDAIQLGFSNGSLTSTTLVRFYLDRIARLNPLLHAVIEVNPDALAQAARADAERATGRRCGPMHGVPVLLKDNMATRDRLNTTAGSLALLGSIVRRDAGVAARLRAAGAVILGKASLSEWSNFRPVKSGWSARGGQTVVFVKLPMENPYVLSADPCGSSSGPAVAAAANMAA

SEQ ID NO: 122154 - protein, 141 aa, Oryza sativa
  Clone ID: PAT_MRT4530_25108C.1.pep
MVAAAATEHNQSKQEELTGEEMKRQELRGSHGWRWRPPLYQIQPGGRRRRLRRREAPSPPPDLAGRGVGNSRRCCDGPTAASPPSGGGGPTAEAAKVALEEVIHVVFPLKERPQRCWFWNPAPMTEVICKAFMVSVGKTGT

SEQ ID NO: 122155 - protein, 133 aa, Oryza sativa
  Clone ID: PAT_MRT4530_25109C.1.pep
MGCFGRRPPSSSPPHMERREILVKAEIGEDVLTCRTHVDSTLMTWVKLRCGTKSPRCTAMGPILHRFLIIERPVVFDDEYAGRFEHLEGNGRNRRGLQNEVGRDAQQRPKQKDDHADCHQEPTTIEHQDGDSL

SEQ ID NO: 122156 - protein, 594 aa, Oryza sativa
  Clone ID: PAT_MRT4530_2510C.1.pep
MSGNPSFSQLGAVDAAMNGGYFMAASGNGADVPLFHPAMAPPHDHGGSFGYGDAAAAAMDVGAHFAAANNLVLASLATQLFGAAPAAAAHGHGDYLGATTPPEEEMGGGYDVAVGDSSGGAVSLACLGHGQPGDMAAGWCSTSARKPSCNWSSSNAGVHGGSYYLAGVPEAAGFVSAAAAASELSLSLCSKSSSDSMLNAGGDQCSSAASRSGLTQMSRVVVVEPEPPLVPYYPAANFAVVVARSRYAAVAQQVLNDAVGCVLGGVADAAADSASGVDSGSSRPSSCSVAGGAPSSAVSSNNQLIASSGEHTHGGGDASAQRLRSELLTMLQLVSSPFSTRLPRHQFKQISYYHFESNLKPSFDDDTNSNAQMDQKYNQCLDEIQSTTARFNTLTHATARAAGMSSSSICAPFAHRAVSAMYHGLRRRIAGEIMSAAAAAGRPCRGGESSSAVTGGERERSWESAFIQKHWAVQQLRRGEQQCWRPQRGLPEKSVAVLKAWMFENFLRPYPKDSEKEMLAARSGLSRNQVSNWFINARVRLWKPMIEEMCEELKRSSGGGAGNQALAMEHMNSQDVVQKCGAGLSAFAALNPAT

SEQ ID NO: 122157 - protein, 305 aa, Oryza sativa
  Clone ID: PAT_MRT4530_25110C.1.pep
MECEFSSFHATPSPSVSHAVVLSVLPAPPPSVRHRSRPRQPCRRPSVAARVSPAVDRSSLPASAALSTVRRRHQRMRWRAGARCGDGSGRHGEGRARRRSQRKARWCGGGQARWQEGRAGVGGARWCGEDELAGMGKDELVGGQMCAGKRCERGELTTRLRWTEWYGTKKIRTPMEKDKVQEEAGIETREEDDDESGTKRERESGEIEGGGGEPSRKKRDPEAVSRFKQRSAAWFAKLKEEFERKVAEHPDVDWSDSLAIDASSYRKDWDYVWSQAYGSFDKISQSLVDLDPLFICLIVSKIYLS

SEQ ID NO: 122158 - protein, 258 aa, Oryza sativa
  Clone ID: PAT_MRT4530_25111C.1.pep
MEEAQEKGGEEIAHFCLMGRLRWTFLGLVLCVIADSAFVRIRNCGGFCDMMQFGDYRYVALVIIDRSYMGAWDYGHGIVESKDGTISVASAFAGHQEAVQDRDHKFLSKAVEEAYQGVDCGHGGPFGAVVVRNDEIVVSCHNMVLDYTDPTAHAEVTAIREACKKLGKIELSDCEMYASCEPCPMCFGAVHLSRIKRLVYGAKAEAAIAIGFDDFIADALRGTAYYQKANLEIRRADGNGALIAEQVFENTKEKFRMY

SEQ ID NO: 122159 - protein, 57 aa, Oryza sativa
  Clone ID: PAT_MRT4530_25112C.1.pep
QPLLSTRSICLSMPFVVLYSCALEMFSFTDVQWFQFSFPFSEVERHNFIEKYCYVQG

SEQ ID NO: 122160 - protein, 58 aa, Oryza sativa
  unsure (1)..(58): unsure at all Xaa locations
  Clone ID: PAT_MRT4530_25113C.1.pep
MKLXVSAMENNFAAHXAGAXDDGGXFXAGADLPXMEXXTCPDXFDGFQKETKEMLEAQ

SEQ ID NO: 122161 - protein, 215 aa, Oryza sativa
  unsure (1)..(215): unsure at all Xaa locations
  Clone ID: PAT_MRT4530_25114C.1.pep
IRALRLRWLWFEWRPPXKTWIGNETPCDELDKDLFAASTKVQIGDGQKAKVXKSQAPNLCRHSKRKNRXSRMPCYNEDGSTIFATASLSPSSMNSSMFEKFXPVTPPQLTEGVQDSIIWRWTTNGEYNAKSAYQFQFNGMVLSPSTKLSWEAWALAKCNIFHWLVLQNRVWTTDRLQIRGWPKNYFYQLCFRNLETLDHLLFECPVSKQIWFRVL

SEQ ID NO: 122162 - protein, 42 aa, Oryza sativa
  Clone ID: PAT_MRT4530_25115C.1.pep
TPCKDRSSYQLNQVQADIVACRGPSTSPLCCIPPLPKMTLKI

SEQ ID NO: 122163 - protein, 216 aa, Oryza sativa
  unsure (1)..(216): unsure at all Xaa locations
  Clone ID: PAT_MRT4530_25116C.1.pep
LLREDCLPQLHLATASLRGLGPAKPCASSSCLLPQPPPYKGRATVTASASPPPPXPPPRRRPDEPPFDPTPSSRAELMSISPSESTRGSQPLAPRPSNPSPGPRHGNSSAPPRRRGRRSPTAPVSPPSAAGGSGGPSSVSVVPAIREYVDTSQKVVGFRISREENDDSYTQEVGNFSECHSSEHGNSGFSANNGTSGQATPQRPELMGSLKIDLST

SEQ ID NO: 122164 - protein, 84 aa, Oryza sativa
  Clone ID: PAT_MRT4530_25117C.1.pep
VVKKAQKKRRGSLAFKTHPNFLGNPPAGKRSLFRAFPKKVLTKANPLPKKKGQRAQPKKRKKVGAFPPNQNKRYPNVYKSAKTP

SEQ ID NO: 122165 - protein, 413 aa, Oryza sativa
  Clone ID: PAT_MRT4530_25118C.1.pep
MTRSMVLAGSLPDPGVASESATASQSCASNQLKGHMFTPPSSSLVSCEPVTTEAGRAGDENEADMDDENDNNTYFEYLRHISLGKCKKNSTSGSKSPKKKRQKGDYAGSPIITIAFLQHRVGSKCSPGDFNANIKDLNPDQKEKTTVLPHCVCVRRSGDYVDAPGCNVPWGEPRVAFWTHQALKPLKQADKGSGLYAVYGLCKSYSISVHRPFHVKHPNASKKYMVACIGKSLTMWELRSWRPYGTTINLMRHKWARPCDVGARRFGFMTSNMAESFNNMLKGIHRLPVTSIVAYTFNNCNKWFADRYKATMAAIQKCERWPKRIKEFEIQKFCRLRCMDEEVPPRMCFEATKEAVQCSYSPRFEPSQDPTQWPSDDGEEFIPDLSKMIDTPGGRTKRFINDMDKNWSVIEVE

SEQ ID NO: 122166 - protein, 125 aa, Oryza sativa
  Clone ID: PAT_MRT4530_2511C.1.pep
MTERGAPHRETAQAPLCRAVTRLHSAGSRCNVGARLSADDVTGVRPVTNRSFLSTTRQFSMPHVCPSSYNDFLAMVAMKPGMDLTGTDMPTPGVTTPAPARDESQEALIIPTGRGEACDRPPVAT

SEQ ID NO: 122167 - protein, 39 aa, Oryza sativa
  unsure (1)..(39): unsure at all Xaa locations
  Clone ID: PAT_MRT4530_25120C.1.pep
MAPKAAVKKRGGKTQPALKVAXAGKSGSIKTNSKKIRTP

SEQ ID NO: 122168 - protein, 2621 aa, Oryza sativa
  Clone ID: PAT_MRT4530_25121C.1.pep
MGVQLQQFRKKKEKRGPGKKAEAKADAAEAEEGSSKSGADAEEAMPEPKSPVGLKLLAGEGGASHRTPFEVKLVLLLGGCGWGFGSVLVVFNTDVSMQEAARSQVEQCNGQGPDTAESCDVDNADVLPVQEGGDGGGNAQDVGVSEHGSLEHVNPGPGDGEGATIPVTGADGSGLLIEGAQPVEMDVDEKLPDNSLKENTELCTSSQGDIADDNGDSQAEEHQQVEMYPVERPTSSDSKEITDIIGHSQDIGAGNTNKGEGRARETEIDVSGMPSGAVVECEGELNVRASHEASESTSREDTDKEADALGEEAAVQEDPGVANATEGVVTVDDLSLHAKSIGAVSLPPHKEIDQALLARDISQDMAPYHLEDIQRHLYLATMSRDFLQLQMDESADLNTDDTPQSSNEVINLQVLLEETEKSKLAVCEELQQCRHELSDMNTVKEELELTVASLTDRINTSNNKCEHLEFELQSSKENTQQILNELAGCRAMLEALQKENLELTATLTFEKEARKEVEEQREHLCSENKRVLSNLSDLELSLASLKEEMNDGSNRCADLECELRSTKENMERTLVELASCRNSLETLQNDNLELSANSSFEKEAIKKLEEDNLCLSNEKQGLLLDLSETKEELHLSYAKHEHLESHARDMETYFGQLTEQLIEENIYTSTSVDIYQTITKELYAKCNVVLGEARNAHQDNEACLDSSEIIVENVERETTSPELIGHDDNQRPLLVAENDSCNSTALQSLKGHLKVAKGDLRDLQKLVERISSRSDGRVLVSKLIQSFESKGNQEDLGMSEGEHDNLRKLTQEMICRLVEKLKAMTSDIAKTEEYVAELCNRIELSVKFMSQHEAEIEHTAVLVAKMDGFAGKLSNYKDTIDQLVSQVANVHQDADNHAGRLIDQAELLQNDVTERISTLEKERTSLTDVLMEVTDKLSALSKNALPSDLGGSEGLGSLALSSVECAAKLVQNLQEKLEHAQTDNAKLNASLVELKTAHSDVQERSKHAHGIVKKMYISLQELLFNSLGNPDESGVEYNAEEPIEALFSQYGDIVEHLKSLLHERQYLLSKNTDLESRLLSKCEETEALSSSLTKSMNDFSLLNEELKSVSTSRIEAQDELHGRCLAIAEKMVHRSTSHSSTVLSSMEMSSKANHILTTLLPCIEEGVASYIEEFENMAEEIRLSKICLQESNIIGQSSSEKWSVSLPVLIKEEIVPIFFDLQGRIDQLSTLNIQLETEVPVLRDGLTKLDSALETSRAELQKKVFELEQSEQKLSSVKEKLSIAVAKGKGLIVQRDSLKQTLLEKSGELEKLAHELQSKDSLLIELEAKIKSYADADRIEALESELSYIRNSATALRDSFLQKDSVLQRIEEVLEDLDLPENFHFRDIVEKIELLSKMAVGASFTVPDGNKQSSVDGNSESGAAIDSINDEQNSNSNSGAEEIKIKYDELHRRFYELAEHNNMLEQSLVERNNLIQKWEEVLGQISIPQQFRMLEPEDRIAWLGNRLLEVEHERDALHLKIEHLEDSSEMLISDLEESHKRISELSAEIVAVKAEKEFFSQSLEKLRFDFLGLSEKAVQDEFVRDNLRKDLAELQEKLAEKTEESKLYHDMEMEIKKLMDLVRDALQDDSNTEIPSGAGVGAAVLCLGSLLSRLIDGYKTHLSESTVRSSAEMETLSETKISKDASTSERGMEEKEMALNTLSGELEHTRNSLALVEQQRDEAVEKTQLLTIELETLRAQIDQLQGDGAEQMNRYQSLMLELESMTKQRDDLQEKLGQEEQKCTSLREKLNVAVRKGKGLVQHRDSLKQTMEEMNTMIEKLKVERKQHIESLESERSSLMGRLAENEKSLHDATQYLSRLLNSLSTVDIGREFDTDPITKVENFSKFCLDLQNEVKKSKQATELLLAELNEVHERADNLQDELVKAEAALSESFKQNSVVESARADAVRHLERIMHMQSQTKRKQIDHLMELNSTSSQLREIFSELLHHLLNTFSKDVDIINYMESFVKSSDKWMDSTSMVEIPITSNHHLSNSISSKTCSSQMAHIPNVPLKITLDNADETQILHHLATACHAVADCVNDCNDLKSRIHEHGFSVDRKAADLFNVMSNLQNKFTSQNTELESLRENIIELQSEIKQRDEEILSMRRNLSLLYEACTSSVSEIEGMTGIESGDHSCSVVQNHLSADDHIKSVVNQLVAAIKTTQNSNEGNTKELKATVLELQQELQEKHIQISTISAELASQVKEAESSAKQLSVELENARMEIHNLEKHSEMLLNQKKNLETQVSELKDMEAVAHDQHGRIKDLSDELSKKDQEIEGLMQALDEEERELEVLENKSNDLEKMLQEKEFALKSLEVSRTKALTKLATTVDKFDELHSLSESLLAEVENLQSQLQERDSEISFLRQEITRSTNELLTTEESNKKYSSQINDFTKWLETALLQFSVHCDSTNDYECTQVPVYMDMLEKKIGSLISESDELRVTLQSKDSLLQAERTRMEELLRKSEALESSLSQKDSQIGLLRRDRTSGQPSRFINLPGTSEIEQVNEKVSPAAVVTQIRGARKVNTDQVAIDVEVKDKPLDDEDDDKAHGFKSLTMSHIVPKFTRPISDRIDGMWPCCSEEI

SEQ ID NO: 122169 - protein, 1627 aa, Oryza sativa
  unsure (1)..(1627): unsure at all Xaa locations
  Clone ID: PAT_MRT4530_25122C.1.pep
MGASNWRRRRRRGRYRSRSHRRRQPCLAGTTCCGRLAAHRRRRHRHYRRHQGRRTLVLVGRPTKPAHQRRQLVGQPDILGPPFMCPALSVTASPPTLQILLGFALSVSGELFLLLARGCKKIKNPIATPAMDGRAGCCVRFIGCCLAADGDAALSQSAAALHRMASAFLDAHGEPLVLLDHRVLCSHGVATVGHSQAFAAAMRQRREEIPPAPFRILLQEEYVGWAEVAACANGNKIVDKKSWRASVRNMLDAVYRMICQVLASAVRSVWAIGTYLQSFSEGDYPHQLCQKKLAGGVSLALSDFKSSLVCYLLIVDSHEMNEYSQYIFCVWLLTHMMMHIHADTCAIVACSVCIEAQHRLEFERLHGQGTFILELPDSTRKLRRFCLERKAWFKGKGAHIDSLLSLIQETGGVPAISTTNTRSSLLLPLHSYDYFSLRGCWTNLTPQQAAQLIFTGGPCIGSLWVDGSYTSKHHYSDDNDDDEEDMLVYRGCDPKKKIHRDKETGLHAVVCYAYLFIGKELHIRVQDNMPICSPHNWILFQAFDMFYTLRVMPLDASRLYDPLKMTVPPKISQKIGKDRAWLHANLRRLHEAMMIQKGKEKIRSNLFPFPILLCQAQRNPPINPTPDPRVLVDHQEFESPVAIDRPLMGSALSSAAAALDSAITAAAAVPGETVFRRRLSRTESDARLQESGTKRSAKIGRTNPSHFDGENGVSSRSLPLGSVVVPPQPPIPPPPAPSPGATPSSSACFLHIRDRRRHIRDRRLLVRVQPLPPRPASSAIASATDRRRSMRRRDARGRVPIAAVKGLVGAALRHYNANNKAGAGFIPLEPSMAACRACCCGPKGFTRLVGFWARRRRSGTPPPGTSSSAAGRCRRRRNTAPPPGATPDCCCFYAELHFDRLGSLVVDTCIIVGKPPSRQEQLTDKQPRPNKISNRILFGCYPEGSAYRLILAVHLPDRMVGTDLQSPARSHHQWRFRSESLTRWALRWRFFSMALIAAKSGGGVLAQRGGGGGNLFGLAAXASALSASTSTAAATTPQRISHYLAHHPRATWEALSAAFPAADHVDAVLLSLAKHLHSSSSSYSPELVARNALTFFYWAASSSSSSTPHTLRAYCLLVHLLSRAALIRDASVLLESAIAKHSSSSPASAFLDAFFAAYEDSGTAATTRGLHLLVHAYARARLPEEALEACRYLAQRGVVPSLPAFNAVLHAAQRTGRFGVAWEVFELMTLKRVYANQSTVELVIGVLSREGALARMAALVERIHGKKCAPGVVAHVALTLKIFEEGRTEQGILLLRRMLQRNMVFDNIAYSLIVHAHCQAGDLKSACEQRDDMVRRGCRLNSFVYTCLIRVHCRAGDVDEAMQLFEEMISIVLKPYDATYSHLTAGCFRQGRMKEGSEYMDKMLHQGSVPDIGTCNDMLEALCDSGHVSKANELLTALMDKGFVPDQNTYLRMTNGYGKVGDAQGIIKIYHEMEHRGLNIGVDVFSSLIRALCKCGDLKEAEKFLAILERKLLAPTSEIYDLLISGNCEKVLMPPGSPSKRAKEGTPMLERCLPHFAVAIGSVSSDVHSATSQLRGSNSNSICSARLMCRSKQPRTGVPEHVSYVVVDSGSVAPGKIAGAAVASRSR

SEQ ID NO: 122170 - protein, 501 aa, Oryza sativa
  Clone ID: PAT_MRT4530_25123C.1.pep
MRTWRLAVLACLCAAAAAAPAEAKTHHHTWNITYQYKSPDCFRKLAVTINGESPGPTIRAAQGDTLVVTVHNMLDTENTAIHWHGIRQIGSPWADGTAGVTQCPILPGETFTYRFVVDRPGTYMYHAHYGMQRVAGLDGMLVVSVPDGVAEPFAYDGEHTVLLMDWWHQSVYEQAVGLASVPMVFVGEPQSLLINGRGVFNCSPPAASNGGGAACNAFGGECGWPTLFTASPGKTYRLRIGSLTSLASLSFEIEGHTMTVVEADGYYVTPVVVKNLFIYSGETYSVLVTADQDPSRSYWAASHVVSRDPTKTAPGRAVVSFPATPYLVAMKHGLRGEFDQRPPPDSYDHGSLNLSSPPASLAVRHAAYRLALGSVVDVVLQNTAIPPPNGRSETHPWHLHGHDFWVLGYGEGKFVPEVDGPGLNAASARGGAVMKNTVALHPMGWTAVRFRASNPGVWLFHCHLEAHVYMGMGVVFEEGVDVLPRLPASIMGCGRTKGHHY

SEQ ID NO: 122171 - protein, 158 aa, Oryza sativa
  Clone ID: PAT_MRT4530_25124C.1.pep
MKQRSDRNGKKTNEPRRCRHANDVACVRDAAAAEAHVGIFTTARTPAQDPRSDAATLVRSHMDNATEEADKAATVGDTDGDGGGGQGGEAGGGIARGSNGGGEARCGAGHTARGSDDDTGGGGGGSHPRSGRREARGGRQRRRRGEARGGPQRGVATT

SEQ ID NO: 122172 - protein, 51 aa, Oryza sativa
  Clone ID: PAT_MRT4530_25125C.1.pep
REENCTKFHGGVNGGGNKLQTLSTTSTALQPRRKLSPTEAVKTYSQSVVVI

SEQ ID NO: 122173 - protein, 114 aa, Oryza sativa
  Clone ID: PAT_MRT4530_25126C.1.pep
AGPADLPGRPNRSYQPRTTNKGAGKKKKAPKPTTNKDQGHNRRGDSQQQPRGRPTHKDRTETRKPQRPRKTERPQEAHRTPAAPRPPRTQMEGKGKTATKPRHPKRQQPAESDP

SEQ ID NO: 122174 - protein, 65 aa, Oryza sativa
  Clone ID: PAT_MRT4530_25127C.1.pep
MPTTAGCGRVLAVEVVVATIVTEPQPALADAASLLALPSSLRRRAVVSRRRWRWPHRRWRCRLLH

SEQ ID NO: 122175 - protein, 123 aa, Oryza sativa
  unsure (1)..(123): unsure at all Xaa locations
  Clone ID: PAT_MRT4530_25128C.1.pep
SEGRSEELLCAAVAEHGKGXCLATVHEIQDRHDAAREVERSLLELHQVFLDMAVVVESQGEQLDDIERHVNSATTYVQGGNKELRKAREHQRSSRKWLCIGIIILLLLVLLVIVPIATSFKRS

SEQ ID NO: 122176 - protein, 487 aa, Oryza sativa
  Clone ID: PAT_MRT4530_25129C.1.pep
MDASRNSDLAADELLRAQAELWNHIFAYTKSMSLRCAVELGIPDAVHRRGGAVTVPELVAELALPRSREPFLRRLMRLLAHGGIFDAAAGAEDAYGLTAVSRLLVSAPGGAGQGLSPFARAMLHPIIVSPSISLASWFRAAAADDDDEGADAPRVPFAAVHGGRELWAVAKDDPGFGAAFNDAMACDGRFVMDVLLHGHHHGGAQLFRGITSLVDVGGGSGGAARASAAAFPHVRCTVLELPQVVATVPPGDGGVEFVAGDMFDHVPKADAVLLKWILHGWGDEECVRILRRCREAVPAREDGRRVIVMDLVVGSSSSLGDGARDTETQLLWDVMMMGVVGSPERDEREFCKIFHDAGFSGYKILHMPAIRRPRTCVWDVEETGNHWIQEVGEPIWRGSCMICGIGVPFRTAAVSSTAGAAGSAAWRAPRQLHPTSSSAFLEGACSEALLSLRKAEKGIGAGFLEDAATSIPLRHGRAALLVLWHSI

SEQ ID NO: 122177 - protein, 61 aa, Oryza sativa
  Clone ID: PAT_MRT4530_2512C.1.pep
VVLRAAVFGVRASIRIAAVRALVRIHRRSLAARLLNGSLASICAHSWSFLQHWSVRQRSAP

SEQ ID NO: 122178 - protein, 101 aa, Oryza sativa
  Clone ID: PAT_MRT4530_25130C.1.pep
MDYSMIKSRMHIPVYLINPTSILATRQLTTPVIPSSGSSFPIEVAWASTRQRPFGLTLATRPDDETCSTLAPVDEPPSREPSLEPGDEDCRPLVNAPTCVG

SEQ ID NO: 122179 - protein, 128 aa, Oryza sativa
  Clone ID: PAT_MRT4530_25131C.1.pep
LLTQSIEALNLCVKCELDNENTDTYNELNSNVVFRRFDAICSGSECVIHAELCCHTALFIRAVSRSLGSDPAMIQGCELQRIPLVYPTFVNVMQPFPLVFMYQIGREKVKTRLDSGVENQCPVTCVNW

SEQ ID NO: 122180 - protein, 53 aa, Oryza sativa
  unsure (1)..(53): unsure at all Xaa locations
  Clone ID: PAT_MRT4530_25132C.1.pep
MAXATMALSSSFAVAAXXAGGAPWRGVVSAGRAAPRRGXSLVVRGXSXPXVDF

SEQ ID NO: 122181 - protein, 159 aa, Oryza sativa
  Clone ID: PAT_MRT4530_25133C.1.pep
MDLMRTKQLAKFAVPILSAFLLIYEVGNVYCATVHENSVDLHSLLDFKQGVNDPNGALRTWNISTHFCRWKGVNCSDARPWRVTGLNLTRKGLAGKISPSLGNLTSLDMLDLSYNNFDGPLPLLNRLQRLKFLNLKSNHLQGVIPDGLTNCTDLLFLDL

SEQ ID NO: 122182 - protein, 101 aa, Oryza sativa
  Clone ID: PAT_MRT4530_25134C.1.pep
RVCLYESDEITGVGGRGDEHLQRRPRRARGGALPTCPHGGRGDVHLRRRLTPVAVATAPAAAAEGGVGDVPLLRRRQRPPAVAPAPAAAALPVERSVTLDA

SEQ ID NO: 122183 - protein, 58 aa, Oryza sativa
  Clone ID: PAT_MRT4530_25135C.1.pep
LEAVILSLESHSSNRTILLFLLKGPEIVSHIFTHKEFASTTAMKSQESAAGATSTCNG

SEQ ID NO: 122184 - protein, 95 aa, Oryza sativa
  unsure (1)..(95): unsure at all Xaa locations
  Clone ID: PAT_MRT4530_25136C.1.pep
AIDRPQLCEPGIVYPKYPLPRCLSFLKRQRIPPSTVDEQVRRGXCRQLAAIDSSWCRCDALNHMLRIIYRESGAADAGHPMAEVFRGCRRGDIER

SEQ ID NO: 122185 - protein, 59 aa, Oryza sativa
  Clone ID: PAT_MRT4530_25137C.1.pep
MVRRRGIGDEDGDAEDGSGDEARITIYSFTHNSCIPCSMLNAERTVYGINQEYVLIKNS

SEQ ID NO: 122186 - protein, 385 aa, Oryza sativa
  unsure (1)..(385): unsure at all Xaa locations
  Clone ID: PAT_MRT4530_25138C.1.pep
HSPFRLRNCWEGRSVRKLQGVELSLSLYDTAWVSMVSERGSPQAPCYPRCIEWILQNQQDNGSWGINPSSSSVDKDILLCTLACVVALKRWNVGPYHIKRGLNFIGRNFSVAMDVKTIAPAGFNITFSGLISLAAGMGLRLPVMQTYIDEIFHLRKIELERLAXSEKLIKKAFMAYVSEGLGSLQDWDEVMAYQRKNGSLFNSPSTTAAAAIYSFNDSALNYLDSFTNKFGGPVPAMYPQNIYSQLCTVDALERTGISRIFVCEIRDILDRTYRCWLHNEEDVMLDIPTCAMAFRLLRTHGYDITSDEMAHFCKQSSFDDSIHGYLDDTKTLLELYRTSQLXFSREDLILENIGNWSAKQLKQQLSSNKLSTTFCLRKVLQWERL

SEQ ID NO: 122187 - protein, 67 aa, Oryza sativa
  Clone ID: PAT_MRT4530_25139C.1.pep
MVSEVINYGGEMIYGQFKLLNSVPRQISYTSLMQQIIHSPRVTYQPNTTSILTYIIYLKTKEQIINE

SEQ ID NO: 122188 - protein, 79 aa, Oryza sativa
  unsure (1)..(79): unsure at all Xaa locations
  Clone ID: PAT_MRT4530_2513C.1.pep
MGHTNLHSAGSRCNVEARLFADDATGVRPVTDXPGMYLAGADVPTPGVPTPAPARDECLEALIIPTGRGEACVRPPVAT

SEQ ID NO: 122189 - protein, 479 aa, Oryza sativa
  Clone ID: PAT_MRT4530_25140C.1.pep
MADKNGLLLLSTIAAVTLSSLSLAAVASPATRRSQESREAVRAGYYLAADAHLRPLAALDASMYTHLYYYAVAVHPARRTLLLPPDPAAASLLGDFSRAVKAKNAAVKTVLSIGRGGGAGGAAAVAGSGSDPAFAAMAADPASRAAFIGAAVKVARENGFDGLDVAWRFPASAVEMAEFGFLVAEWRAAVPRGFLLTATVYFSNHVFDAPFAGVDYPSETVARSLDWVNVMAFGLRPPGAANANATAFDAPLYDRASHYSASYGVVSWLDAGVPASKVVMGIPLYGRSWFLRNKANSGVGAPVVAAGPKQRGSNATGAMSYAEVQWLAATATRGSRAVITAYDNASVASYVSVGDVWVAFDGVAVVAEKLAFAARCGLLGYFLWPVNYDDANLTVSRRASQVWTQTKISPEFKNVTGGARQTQAPVQRPPALQSPAPTTAPMSSSSTTSSFSRLSWRMLDVRLHLGALLLLLLLVCYQI

SEQ ID NO: 122190 - protein, 734 aa, Oryza sativa
  Clone ID: PAT_MRT4530_25141C.1.pep
MVCSVAATASLLPSPPPKPTALAADDHHARLRAAAARSDLPAALAAFVAMSSAGAPPVLRTFTSLLKLCAARGDLATGRAVHAQLAARGIDSEALAATALANMYAKCRRPADARRVFDRMPVRDRVAWNALVAGYARNGLARMAMEMVVRMQEEEGERPDSITLVSVLPACANARALAACREAHAFAIRSGLEELVNVATAILDAYCKCGDIRAARVVFDWMPTKNSVSWNAMIDGYAQNGDSREALALFNRMVEEGVDVTDVSVLAALQACGELGCLDEGMRVHELLVRIGLDSNVSVMNALITMYSKCKRVDLASHVFDELDRRTQVSWNAMILGCAQNGCSEDAVRLFTRMQLENVKPDSFTLVSVIPALADISDPLQARWIHGYSIRLHLDQDVYVLTALIDMYAKCGRVNIARILFNSARERHVITWNAMIHGYGSHGFGKAAVELFEEMKSIGIVPNETTFLSVLSACSHAGLVDEGREYFTSMKEDYGLEPGMEHYGTMVDLLGRAGKLDEAWAFIQKMPMDPGLSVYGAMLGACKLHKNVELAEESAQKIFELGPQEGVYHVLLANIYANASMWKDVARVRTAMEKNGLQKTPGWSIIQLKNEIHTFYSGSTNHQQAKEIYSRLAKLIEEIKAVGYVPDTDSIHDVEDDVKAQLLNTHSEKLAIAFGLIRTAPGTTIQIKKNLRVCNDCHNATKLISLVTGREIIMRDIQRFHHFKDGKCSCGDYW

SEQ ID NO: 122191 - protein, 52 aa, Oryza sativa
  Clone ID: PAT_MRT4530_25142C.1.pep
WGYLIMDTKLFPACARFGLALGEENPNWRRGQSITIHDNLGCNGHHDMIENG

SEQ ID NO: 122192 - protein, 65 aa, Oryza sativa
  Clone ID: PAT_MRT4530_25143C.1.pep
SSLCPNNSMLPQNRQHPRQVGLKTNPFLDLGRIQYIYLGINPGRPSTIFSATTPSQQPHMTIKMD

SEQ ID NO: 122193 - protein, 225 aa, Oryza sativa
  unsure (1)..(225): unsure at all Xaa locations
  Clone ID: PAT_MRT4530_25144C.1.pep
YPAVRLSLLSLFPLFPFFSRAVAAGPLRVWRWCSERWAWQRGGWWPGDHCCALIRVLCCRPPSPKPSPPIASAILPVPRWRAGQPPDPLHLAAMDQSPPPPHCSLRRHSRPPPPPFAXAPSRPDCPFFPSFSPSLSXLFSFPLTSPGTAWWPRRHGGATLAATSSSHSTPPPPAPTMTTLAATSSSHSTPPPPAPTMTTLAATSSSHSTPPPAAPTTTRRVAAAQ

SEQ ID NO: 122194 - protein, 331 aa, Oryza sativa
  Clone ID: PAT_MRT4530_25145C.1.pep
MEEKKPYVIAMLIQVIYAGMFVVTKAAFDEGMNTFVFIFYRQAAATLLLLPLALLLERKNARSMSLMLLIKLFFCAFIGNTFSLNLYNVSMKFTSATVASAASNSLPVITFFLALITRMECVKVRSSSGIAKLAGVALCFAGVMVLALYKGPALNPAAVLREFPNKMLVTAAQCVFSTVQTAVVAAAAEREMARWKLRLDISLLAVLYTGLVVTGVSYYLQAWCVELKGPVFLAMSNRDRPPRQLIEFMDSIIGGILLVGGLYSVLWGKSAEMTMNGNGDDQQQQQQQQQSHHKISTEMVVVEKTMISGSQEKDQNNNEQSTPTKSPLQQV

SEQ ID NO: 122195 - protein, 198 aa, Oryza sativa
  Clone ID: PAT_MRT4530_25146C.1.pep
MKDLLEEYSQQLARLDVQHQQRLSAYTAYRRRRLRVPPHGTLPILPRRMPHTAMVAPCRMQCRAVSCLAIRLSPCGGMKLKRRAEQAGPSRRRAATTSSGSSPASGKRRSGRAARGWRAPGDQIRGGVASELRAAGSAGGVADAASDSPWRGLVSSRRAEEEEGSGEETEHSDEEMARRRPRWLSLTTRSFLAIAAPL

SEQ ID NO: 122196 - protein, 606 aa, Oryza sativa
  unsure (1)..(606): unsure at all Xaa locations
  Clone ID: PAT_MRT4530_25147C.1.pep
WASSLSPSTTLXRHRLVFSPIRLADIATVDGRLHFHRLPILVAADWCLRQHGWLVTPPLXGVHVFSNRPPCPPPTGVSDYTVGWWASSLSPPACPCRRRLVSPPTRLVGHTTVVGVHVFSNRPPCPPPTGVSDYTVGWSHHRCWASMSSPXGLPSPLPTSDLAYMAGCHITVDVRHHLHRPAALSAADWYLCLYGWMVTPPLLGIYIFTXRPAFIAADWCPRLYGLMVTSPLLGINVFTXRLSXITDDWCFHLYGWRIPPPLMGVFTFPDXAFIAVDWILRLYGWMVTPPLMGVFIFTAXASAAFTAGVYIAIDGRICFHIVHLCRHXAKTKKLKHHRPAXASVAADWXARLHGWMVTPPLLGIYIFTAGLPLSPPTXCLRLHGWFVTPPLMGVYVFTSGCSRLLPTDYLAAMDAQLRHNYWAHSSSLLAALFGVDWFLRLHGCTSSSPLNGIIVITSLPSPLLIGVSALMAGLLYCCSWMSLFSPSASFVADWSSPPVCFCCHRLVSTSSRQCNSIIIMGQLHLHCLQHRQILLPLLRKIFYFTNHDVYKSLNISACVTKYDSVLLYYXKWCSNFQDFYSDIFNTYLHSSNGYSTTRSYSSRLYV

SEQ ID NO: 122197 - protein, 76 aa, Oryza sativa
  Clone ID: PAT_MRT4530_25148C.1.pep
FFFFLISMFLYISPIWRIKNTHFPPHTGFQNSSHNLLSIIIIRQHPQALRGVSFSTQQHSRSKSPCNHHIQLCSPK

SEQ ID NO: 122198 - protein, 161 aa, Oryza sativa
  unsure (1)..(161): unsure at all Xaa locations
  Clone ID: PAT_MRT4530_25149C.1.pep
FIWPFRXPPDPATANGLPGGFKERVNGRGVVSRGWVPQVKFLAHASVGGFLTHAGWNSIAEGLANGVRLVLLPLMFEQGLNARQLAEKKVAVEVARDEDDGSFAANDIVDALRRVMVGEEGDEFGVKVKELAKVFGDDEVNDRYVRDFLKCLSEYKMQRQG

SEQ ID NO: 122199 - protein, 53 aa, Oryza sativa
  Clone ID: PAT_MRT4530_2514C.1.pep
MEITIYSYLVRCNMNFSWYAVKRELKAKCILDCSYLEDVVHQVSVTISHQFSC

SEQ ID NO: 122200 - protein, 122 aa, Oryza sativa
  unsure (1)..(122): unsure at all Xaa locations
  Clone ID: PAT_MRT4530_25150C.1.pep
KWLNELLVYHKGEIKGMLYEIRGDPPVTVLYGDFCKGALGITHHLAVNGLKKQTVLVVCYGDVGPYNSNTLFSCGGRSRNHCVNPWKYXSXDGVLINKAAYKCVAHYMLHGLYAHQPSLSPK

SEQ ID NO: 122201 - protein, 174 aa, Oryza sativa
  unsure (1)..(174): unsure at all Xaa locations
  Clone ID: PAT_MRT4530_25151C.1.pep
LHPNREQFEVRSPKRCNCNLGLLSQGTGDQLIRFAECAELLNVYWLAVIGEIATEDLTPGTRYAVYLVYKLTGTXRRLRGGQTQRSSLRLYGEITVSTGKVSVDVVPAAARGMAAGVAYPVARGDGWMELKLAEFAADEKLLGEKKVIVDFREENDHVKKSGLVIEGMEFRPNK

SEQ ID NO: 122202 - protein, 202 aa, Oryza sativa
  Clone ID: PAT_MRT4530_25152C.1.pep
MESIKRMAVTSPEPRTIRGEESKALQLQPGPSQPGDRRPADKVTWGESPEHWKWITLPDSRFAECAELLNVYWLAVIGEIATEDLTPGTRYAVYLVYKLTGTSVGLRGGQTQRSSLRLYGEITVSTGKVSVDVVPAAARGMAAGVAYPVARGDGWMELKLAEFAADEKLLGEKKVIVDFREENDHVKKSGLVIEGMEFRPNK

SEQ ID NO: 122203 - protein, 95 aa, Oryza sativa
  Clone ID: PAT_MRT4530_25153C.1.pep
FHCFLNRRGYKIVMTPSLSSDVAVGYFSWAEYDIMAPVPPKTEEALAGAFISSCGARNFRLQALVMLDHLNVYIDSYGSGHGSRDVKGTLRLQYG

SEQ ID NO: 122204 - protein, 59 aa, Oryza sativa
  unsure (1)..(59): unsure at all Xaa locations
  Clone ID: PAT_MRT4530_25154C.1.pep
MADEKLAKLREAVAXLSQIRDNEKXGLIXLXXRYLXGEEDDVEWXKXXTXTDEXXXPYD

SEQ ID NO: 122205 - protein, 44 aa, Oryza sativa
  unsure (1)..(44): unsure at all Xaa locations
  Clone ID: PAT_MRT4530_25155C.1.pep
CCTPFLAFCSHCMTLRPHIVRESKFCTFTFXXLLGSVRXXLQLT

SEQ ID NO: 122206 - protein, 95 aa, Oryza sativa
  Clone ID: PAT_MRT4530_25156C.1.pep
MGVMIYGNDNIVASIFDEISYGSSASVVLCGDDGMVPTPAHWPSSFLPGQPRPWQRKKYTEAAVIAAVAAALGEKKKRSPKATGSADSSSSQRSS

SEQ ID NO: 122207 - protein, 337 aa, Oryza sativa
  Clone ID: PAT_MRT4530_25157C.1.pep
MSRKTFDYLCSLISGDFTRKTQSFRNFRFGDKAILGVEDQVGVALLRLTTGESLLSIGNRFGMNHSAISNITWKFIEALEERAANHLKWPTPEEMATVKSKFEKIQGLPNCCGAIDTTHILMCSSAQPNSNVWLDGENRNSMVLQAIVDADMRFRDVVSGWPGSLNDSCILRTSGFYRLCEKGARLDGQTELPGEPAGSVVRDYILGDASYPLLPWLMTPYREKDLSPAKADFNKRHAATIMVVQGALAKLKERWQVLKGELWRPDKHRLPRIIYVCCLLTNIMIDLEDAARGGMPPSHNHDDGYRQQFSDVADVGAAALRDQLCQYVSRIGSSLPA

SEQ ID NO: 122208 - protein, 109 aa, Oryza sativa
  unsure (1)..(109): unsure at all Xaa locations
  Clone ID: PAT_MRT4530_25158C.1.pep
ITNDVIHKFLSXHAYACLPFCYSFSLLDIRSLLEKFDVAKRLFGFSGRCLMLMSSASFQIGKLHKKKSVPVDSQDVPWNLEKISRLLGHFRGSTSTVGVCIVYNXTSLD

SEQ ID NO: 122209 - protein, 40 aa, Oryza sativa
  unsure (1)..(40): unsure at all Xaa locations
  Clone ID: PAT_MRT4530_25159C.1.pep
MASQNKSLRGSKHNRGDEFGAFTPIQYXSYQDVYNSAVSS

SEQ ID NO: 122210 - protein, 368 aa, Oryza sativa
  unsure (1)..(368): unsure at all Xaa locations
  Clone ID: PAT_MRT4530_2515C.1.pep
MSTTDFDEMSLRDGFSANELLDDFGXGEIQPDQSTSPDEIGTIIIIDNLVYRDHPSLKIRGVPKYVRSYYVQRVHNKKQLSTRVGCSRVHRIIENDLDKCRVVAPNLPTKTDDLSHSSGHRWTTREKFVNGXFLANAHAGHIICTYNKPTLTPLXVIKRLLLLVLEPVKCNDLSRLTXKWSSYDYXWSSTSGVAFLPLLLLSVVELRLXLVPDQRCSVSPATSTLSGRVMTTAWSSTSDVAFLPLFPLQVVELRLLPSPRPAXCSDSPITPTSTKLMSGTQDRQGFYPEIPYPDXHLALKPILLSLYAVLTRPPRNLRDLRLGTPRADKALSDPVETKDHILRLLNHSRTVGESRXGIRNEEMVYPPR

SEQ ID NO: 122211 - protein, 88 aa, Oryza sativa
  Clone ID: PAT_MRT4530_25160C.1.pep
MCESHRRHWIHLRETSPDPLMGAHACRHLNQWIRPREPSSLQLTNPSAGATAAAAYGSAQSPPSPPTDLPMGAIVVPASRAARRSHHR

SEQ ID NO: 122212 - protein, 235 aa, Oryza sativa
  unsure (1)..(235): unsure at all Xaa locations
  Clone ID: PAT_MRT4530_25161C.1.pep
MVRAHGGGDGREGPTGSVDSVVPRWRRRGGSHAGRRKEEDEAGRDGRRMAAAFAGARRDLNGKRKHTGGREETRRSEPTARIRRRMAGIRRIVAAAIAGEQRGESRRDDEGSXKGGGASPGFKESVSGSSRTVVARYGENLGEELTGVRERYRRRFGDGKGWKADGGTRPSGDARRMTPRRRGFEXVRRGRREGEVAPGAPRHAFTLAPAPPVLGDGRRRRERDKRQQGGDGGSV

SEQ ID NO: 122213 - protein, 326 aa, Oryza sativa
  Clone ID: PAT_MRT4530_25162C.1.pep
STGRPAPCRVLFQSKIRFAAGLPQTCRILFQYDEEYAADLPQTCCRPAADLLQTCRILFQYDEESAAGLPQTCRILFQYDEESAASLPQTCCRLAAYSFSMMKSLRQACRGLAAAEPPQTVRVAYWYAASLEQSFILPQICRRLFLWHTSMRQVCSKISSCRRSAADCSCGILICRRLFLWHTSMRQVWSKVSSCRRSAADCSCGILVCGKSAAKFHPAADLPQTVPVAYWYAASLQQNFFLPHTSAYSLPQTKSLRQVCGRSAAGLRQKQLSGTKDAPENHRFSSHNRNHVANMIISNQPTTGGAKQVSDLQTRKTLNKNCQSNL

SEQ ID NO: 122214 - protein, 64 aa, Oryza sativa
  unsure (1)..(64): unsure at all Xaa locations
  Clone ID: PAT_MRT4530_25163C.1.pep
ERHMTLFIPXITFVSDLKAQCLRKKNEIVHHHSSFESTHKNQKPCGFLVAENKLAHLVNRCGLF

SEQ ID NO: 122215 - protein, 619 aa, Oryza sativa
  Clone ID: PAT_MRT4530_25164C.1.pep
MSYYVDPGTNGPQYPLYPIYGYPLSIVARQVGRLGAQGSTTMTSSLLDDNVNTGIDQGVSTSTMLMWTQVGEIVFPVNTTMPISTGAAIIGSENSMITTPVDSMSKDLPAEAENGTSTISKPEKDPNAAKSCPTHKKHEPTRTTSGATKAWCPLHRTSKHTLQACSVFLSVQAEICACKERGIQRISPTRDVYCPIYKAKTHDLSSCKVLLSAMKVSSPKVQQSQISPRDTDKEQGAATTLDRFVGVIDIDPHEPSVLHLLEDLASSSTSTPRDVYAIDGTSTSRGGNTGMEDQSVTPTLAQHIRTLNAILSESPFDPVLNADLDQWAERLRESVANLSNAFAEAAKRDSLKIMKTIPDIASLRDIARTANKEDIRARTETVMIATTAANILIASSGCRAIPVEVDAVTMTTTKIDAGTTTMGDSKAHILERRPRNRAPEPSDSSSSSSSSSSSSDRHPRRAYDRRQPTAPGSGCRAFTRTLRDVRWPEKFRPGAIEKYDGSTDPEEFLHVYSTVLYAAGVDNNALANYLPAALKGSARSWLVHLLPYSISSWAELWQQFVTNFQETYKRHAIEDNLHALTQNPGESLRDYIRRFNECKNTIPEITDASVIRAFKSGVN

SEQ ID NO: 122216 - protein, 612 aa, Oryza sativa
  unsure (1)..(612): unsure at all Xaa locations
  Clone ID: PAT_MRT4530_25165C.1.pep
MSYYVDPGTNGPQYPLYPIYGYPLSIVARQVGRLGAQGSTTMTSSLLDDNVNTGIDQGVSTSTMLMWTQVGEIVFPVNTTMPISTGAAIIGSENSMITTPVDSMSKDLPAEAENGTSTISKPEKDPNAAKSCPTHKKHEPTRTTSGATKAWCPLHRTSKHTLQACSVFLSVQAEICACKERGIQRISPTRDVYCPIYKAKTHDLSSCKVLLSAMKVSSPKVQQSQISPRDTDKEQGAATTLDRFVGVIDIDPHEPSVLHLLEDLASSSTSTPRDVYAIDGTSTSRGGNTGMEDQSVTPTLAQHIRTLNAILSESPFDPVLNADLDQWAERLRESVANLSNAFAEAAVRAPPEQTSTGDANGEQPDXRTPLRQATPPPCGTSDLRNHLNGRREARLTQDNENHSRHRVSSXHRKNGKQGGHPSENRDRDDRHNRREHTNREQRVPGDTSRGRRRDNDDDEDRRRDNNDGRQQGSHTXRRPRNRAPEPSDSSSSSSSSSSSSDRHPRRAYDRRQPTAPGSGCRAFTRTLRDVRWPEKFRPGAIEKYDGSTDPEEFLHVYSTNPGESLRDYIRRFNECKNTIPEITDASVIRAFKSGVNFCKHTTLVIMRNSVTL

SEQ ID NO: 122217 - protein, 148 aa, Oryza sativa
  unsure (1)..(148): unsure at all Xaa locations
  Clone ID: PAT_MRT4530_25166C.1.pep
MNDADVSKQIQQMVRFIRQEAEEKANEISVSAEEEFNIEKLQLVXAEKKKIRQEYEKKXKQVEIRKKIEYSMQLNASRIKVLQAQDDVVNDMKEAASKELLSIGQNEHVYKNLLKDLIVQSLLRLKEPAVLLRCRKSDVYLVESVLGS

SEQ ID NO: 122218 - protein, 705 aa, Oryza sativa
  Clone ID: PAT_MRT4530_25167C.1.pep
MRRPSPSPPAARGPALAAAAAVVVLLPSIFPAIFTPLGRAFPSLFSEWNAPKPMHESLLNEALRRTISNEQKRELWSPLPYQGWKPCLKSSSVHGVPLEPTGYIQVFLDGGLNQQRMGICDAVAVAKILNASLVIPHLEVNPVWKDTSSFEEIFDVDHFINTLKAEVSIVKVLPKKFSWSTREYYGTGIRATRIKTAPVHASASWYLENVSPILQSYGIAAIAPFSHRLAFDDLPVDIQHLRCKVNFQALVFLPHIISLGETLVKRLRSPVQGQSGELIQEVGEDTNQAGKYAVLHLRFDKDMAAHSACDFGGGRAERLALAKYRQVIWQGRVLNSQLTDEELRNLGRCPLTPEEIGLLLAALGFDSRTRIYLASHKDKRSLASEEELTNVEGKASVLAALDYYISMHSDIFISASPGNMHNALMAHRTFENMKTIRPNMALLGRIFVNKSMEWLEFQEAVQAGHKGRYGQIRLRKPKQSIYTYPAPDFRGKNHTSPVYRKLTSKQIVEHHRRFNEFVRDQQQFTRVFYEKTKPKSPMAEAAAKEVAGAAAAAGDMILLISSDGQRFEVAQAVASMSRLVRNMVEDECTDNGVPLPNVPSAVLAKVLEYCSEHAAAAAAAGEEVEELKSFDAAFIEVDNATLFDLILAANYLNVPCLLALACQRAADLIRGKTVEEIRAEFNIANDFTPEEEAEIRKENAWAFQD

SEQ ID NO: 122219 - protein, 199 aa, Oryza sativa
  Clone ID: PAT_MRT4530_25168C.1.pep
GRAERLALAKYRQVIWQGRVLNSQLTDVRLRNLGRCPLTPEEIGLLLAALGFDSRTRIYLASHKVYGGEARISSLRKLFPLMEDKRSLASEEELTNVEGKASVLAALDYYISMHSDIFISASPGNMHNALMAHRTFENMKTIRPNMALLGRIFVNKSMEWLEFQEAVQAGHKGRYGQIRLRKPKQSIYTYPAPDCMCQG

SEQ ID NO: 122220 - protein, 52 aa, Oryza sativa
  unsure (1)..(52): unsure at all Xaa locations
  Clone ID: PAT_MRT4530_25169C.1.pep
GCGTGVIQKQLCCGQSNLXFLKITDIHTLLEYYYYFFYYYYYYYYFFYFYFY

SEQ ID NO: 122221 - protein, 114 aa, Oryza sativa
  unsure (1)..(114): unsure at all Xaa locations
  Clone ID: PAT_MRT4530_2516C.1.pep
MAYEDRCVIAVVVPRPSEVAVREIATYWFENQRASRTISRTPMEVAVREIATYWFENQRASRTISRTPMEVAVREIATYWFENQRASRIISRTPMEVXAVREIAMYWFENQRAS

SEQ ID NO: 122222 - protein, 425 aa, Oryza sativa
  Clone ID: PAT_MRT4530_25170C.1.pep
MGSRSGGRHRLFLRFIALSSLLLIAAGEVIFEERFEDGWESRWVKSDWKRSEGKAGTFKHTAGRYSGDPDDKGIQTTLDARHFAISAKIPEFSNKGRTLVLQYSIKFEQDIECGGGYIKLMSGYVNQKKFSGDTPYSLMFGPDICGTQTKKLHLILSYQGQNYPIKKDLQCETDKLTHVYTFILRPDASYSILVDNRERESGSMYTDWDILPPRKIKDVHAKKPKDWDDREYIEDPDAVKPEGYDSIPKEIPDPKDKKPDTWDDDDDGIWKPRMIPNPAYKGPWKRKKIKNPNYKGKWKIPWIDNPEFEDDPDLYVLKPLKYIGIEVWQVKAGSVFDNILICDDPEYARKAAEETWGANREAEKEAFEEAEKERKAREDKEAERAREEGERRRRERGDRHRGRDYKDRYKRRHRDHWDDDYHDEL

SEQ ID NO: 122223 - protein, 99 aa, Oryza sativa
  Clone ID: PAT_MRT4530_25171C.1.pep
TDTDRDKARQNQTQIMRLLSPSLSNQQRETDIKTDDFRTEIPAFLDPFPPTNTPTNEGKRRSCLRLGLHSSYLPTTKNFKTQETQEKGRDSSTKGTNNN

SEQ ID NO: 122224 - protein, 96 aa, Oryza sativa
  Clone ID: PAT_MRT4530_25172C.1.pep
MELRRPFEVSSVAVSDVPEESVFIEEGSEVFEEAQGNGKKFVGVAGESIASGFEGEIMIQERCNVWYIYGQSKTIRIAVPAVKEEEYFSEGDFQED

SEQ ID NO: 122225 - protein, 79 aa, Oryza sativa
  Clone ID: PAT_MRT4530_25173C.1.pep
MGIDGSVPPDTPRRQTGCKARSAQRGRGRDGRRRPRCDVQRRGWEEAMRLLRCADEGNSEELTAGLIPAGPWFTLPRES

SEQ ID NO: 122226 - protein, 107 aa, Oryza sativa
  Clone ID: PAT_MRT4530_25174C.1.pep
MNLRPVVLIFLLLVLIITSQFEWKQQVGEAEANPAATRRRQQVILREDAVKEKIILAQEKNIQQLNGLIQSLQLQLLHCRLSNSTAHTTSNKSTNNSAVEGHKMIDD

SEQ ID NO: 122227 - protein, 83 aa, Oryza sativa
  unsure (1)..(83): unsure at all Xaa locations
  Clone ID: PAT_MRT4530_25175C.1.pep
LPCRRRLEPAPPSRRPSRRRAPVSSPQPEGVVDPSEGQDPQDFEQGKSSLSLEHVDPNCEIIXLFTNKIACNDEHPICKYAIP

SEQ ID NO: 122228 - protein, 477 aa, Oryza sativa
  Clone ID: PAT_MRT4530_25176C.1.pep
MAMETTSQDSQVIMGRYKLGRLLGRGTFAKVYKAYKLATGEAVAIKVFDKEAVQRSGTVEQVKREVDVMRRVHHRHVIRLHEVMATRSRIYFVMEYASGGELFTRLSRSPRFPEPVARRYFQQLITAVEFCHSRGVYHRDLKPENLLLDARGDLKVTDFGLSALDGGLRGDGLLHTTCGTPAYVAPEVLLKRGYDGAKADIWSCGVILFVLLAGYLPFNETNLVILYRNITESNYRCPPWFSVEARKLLARLLDPNPKTRITISKIMDRPWFQQATCPLGDMSLVASAPSVLLARKEASQQHDDEEDDGFAREKKKRSNVIMSSPVIDVRPSSMNAFDIISRSRGLDLSKMFDAEERRSEARFSTRETTTAIVSKLEEIAEAGRFSFKLKEKGRVELEGSQDGRKGALAIEAEIFKVAPEVHVVEVRKTGGDSPDFRDFYKQELKPSLGDMVWAWQGGDSPPPLVPAAGRRPITKRS

SEQ ID NO: 122229 - protein, 180 aa, Oryza sativa
  unsure (1)..(180): unsure at all Xaa locations
  Clone ID: PAT_MRT4530_25177C.1.pep
TSRSPPPTPPPPPPTTTTTMTSDASPQPIQSAKSAVESLAAVLGAALPGTLASADDPANALLHDAGVARAVXGXLRREGSGAGNDGLCRWLYDAFQSNLPEIQLAVLRFVPALAGVYMSRAVSRKPLAGFEAVLLALYAHAAAQRGSGEAETVSLPNLANPSVYHDAKVPAQDQGRRARR

SEQ ID NO: 122230 - protein, 469 aa, Oryza sativa
  Clone ID: PAT_MRT4530_25178C.1.pep
MHTSTKLRIPTSQQQQLDAAIMDGAHRSPAARPPAPPRSKMKLLLLVIATNLVSVYLFSGASLSLRLPAGAAAPSIHLWDSSALLRDLGATRAALAAARAEVAALRAQCNASSLLLESVLAGLGAAHGDKPAAADRGFDGWPEEPTGELRLATEPHRLPLGFSAKLGTDELHPGVGFACRNFQDELARYMAYDAGGECPDDADALELQLILKGCEPLPRRRCRPRSPARYVEPAPLPGSLWSIPPDTTVNWSPYACKNYTCLVGRARARGGGGGSYECKDCFDLAAGGKERRRWMSDNGGPGFSIDGVLASRAPGTVRVGLDIGGGAGTFAARMRERGVTVVTTTLDVGAPFSAFVASRGLVPLQLSLAQRLPLADGVMDIVHAMQLGGWVPGAVLELALFDVYRVLRPGGVFWLDHFACVGPRLNDTYAPILDRVGFRRLRWKASRKLDLGAERNEWYLSALLEKPLT

SEQ ID NO: 122231 - protein, 301 aa, Oryza sativa
  Clone ID: PAT_MRT4530_25179C.1.pep
MVNAGNQRERGVLLRAAAPRRWELYMSLLMIEKFAVRFPQPCDAESFLNCVKVYTSGVLQDGKENTMFCLFVLSLLNSIHDLSRMFDTVVAAKEMTADKVEGAGKEIDITIKRGIMPSIKAGDHLPAKMHSLVLMEEAAVTLANLEIKGQMSWTSSIAVEQTGRLFGSQTTLIPSCCRRSAMVMAEPSAVGSLGVSAICWHTDIVVATRIAAGMKPWSAMPTGSPSEGASTHRLPVSDEQECYPASRRRRVLASPIRPCILLRAGELPDDSDVVLAQSAMDGKLRWNLSFVRYGTDIALAY

SEQ ID NO: 122232 - protein, 853 aa, Oryza sativa
  unsure (1)..(853): unsure at all Xaa locations
  Clone ID: PAT_MRT4530_2517C.1.pep
LSIEEWNKIYELEENLEHMYEMEEXFWHKRCGDQELLKAEKDTEFFHSMGNGRKRKCTITTLEDDGRELTTKEELTKNILDYYKSLFRADENPIIQLFQRVWQNEXCLNEEQRIQIIXPFCIQKLDKVLKEAKLNTAQGPDEFSILFYRAFWTEIRNDLYEIXHNVDGWYREYGVIILMSDFPEINTQNIYRTCLVXSRCRTVETWSRGTRIAALLVKXSRSRTSSIRSRGARIAMVLVKESLRSIGRGLSVGVSRSPEDDFLGGERSLGSTGQPGVGVSRSPVGXLIGIRKQTVFAKTSLVIHDYPYQYLPYSLGRSQYKTVETWSLRHQYMESNGLQVNXIDRQRDMLIFTGGSHIXYADDTVIFIPFDXTSQVITTKFLLYCFEEMAGMKINYHKSEVFTVGLEMKETKKVAQMLNCLIGKFSMKYLGLSIGPFRILNHELSFLAQKMEKGFGSWNGCNLSHAGRAVHINAYLSSFPSXAIGFYQLPKGVHHQRFDLVRERYYWAGDKQHRKYHMVRWIDLAFPKEFGGIGLTKTRILNTALLDKWLIKLXCIEMLRKKYXVVRRGVPSGAVGVSKFWRGILNVRKCMKLGSKWQVGDGSHIWFWHDIWYESCPLKITFHEIYEVCNQQDILLSELKQIERCWXLTFRRSFGMIEMEQWEEIRPIVEKLELGTTPDILFWGLTXADKKYTANSMYRAISFRGVLNEKMQIIWKCPCPMKMKHFIWLAIRDRIQSAEQLKTKGWEXSYRCQLCNEIETTRHILFSCTMASLVWCVCRDDLGWGTIPNNFDDLFLLISHKSXGKLKVYAALLAAVCWVLWVSKNDMIFRWKLVYSPLIYCLSSFAVEDLKLR

SEQ ID NO: 122233 - protein, 62 aa, Oryza sativa
  unsure (1)..(62): unsure at all Xaa locations
  Clone ID: PAT_MRT4530_25180C.1.pep
PVCLAEEESGMAGGGVXENGVDLPVEDLAYFDPPAGTECIPKACVETGFFYVVNHAEEEGWL

SEQ ID NO: 122234 - protein, 41 aa, Oryza sativa
  Clone ID: PAT_MRT4530_25181C.1.pep
ESKLSRSLSSLNYTGTVKHRDGIRRDKPYNFSNKAPPPSLS

SEQ ID NO: 122235 - protein, 104 aa, Oryza sativa
  unsure (1)..(104): unsure at all Xaa locations
  Clone ID: PAT_MRT4530_25182C.1.pep
LFRTMHDQARVMLSMNSIQALMLNTSFTHPLQQDGDTQTFTCPFXMQLPYDVLDQGXSLTGQPRTPGAFSLPEGLQRSLGTGLTGAXYEVTPLGQGTPACAAQP

SEQ ID NO: 122236 - protein, 213 aa, Oryza sativa
  Clone ID: PAT_MRT4530_25183C.1.pep
PESRSRKQKAQNVSPRAVSAGRTRHPRNHPINREISIFFTTSLQPTPKLIYHIRRSYCNYHYTNNYSMSNAPVATGGQFVTHLGSRPCDRIRTHRWQILLPPLLHNVLIQFPSARTIKIEMDQVAMAIDRPIDRHLHHQLRTCAHGRDETTRSGTEESKAFAWPLTRSIKPSCNHALLQHTEHSSSRRPYTQTIYYKKHYDGFLRFRLTAKIR

SEQ ID NO: 122237 - protein, 42 aa, Oryza sativa
  Clone ID: PAT_MRT4530_25184C.1.pep
HENHLDLPLQDRSRGAFSVKGFHGRFVLVVFLDASLVSSYAW

SEQ ID NO: 122238 - protein, 197 aa, Oryza sativa
  Clone ID: PAT_MRT4530_25185C.1.pep
MTAMEDEGGVHEGERQTAASRLRLSGGYYGGSCGRGARGGRRTPASRRWPSGGVAATLGHNGTRRHGDGRWTAARGGALAGGGVVETGRSTNNGDEVVEQGSSSHTGTRSPLNRSWQSSKQRTAQPEHSVRSAPAAAAAVDAVVNSSAAVFRYATHVSPSELKMPSPSRSRKTVCQKGGGRRRSPSTEATQPRPPST

SEQ ID NO: 122239 - protein, 280 aa, Oryza sativa
  Clone ID: PAT_MRT4530_25186C.1.pep
MWTPHVILTHLFFLLFSLPIPPLFISMQGRQLTGGGERGAGVARGSRRERSPSVSVPPPLRHRLFPFFLLIIIILVVVASLEGGGQRAARNVNGEDGVGGEDKVELMGVELDELAAWLVEDALDEAPVLVEHLDHKATAWKSQKMCAWRWDTFIPPPRMPRSTVAVDVVHCHGHGGGAADAGMVPQPEPAMASPSATEAVAWGAAPWLRRRWEEGEGEGPCSGWPAAPQCSTCSLTSFTSTARVPPTTCASSMPSRRSKLLVFVRVLGCYTADSNVYDLQ

SEQ ID NO: 122240 - protein, 69 aa, Oryza sativa
  Clone ID: PAT_MRT4530_25187C.1.pep
MTDRLWYWTIPIVLEFTRHWGLVDVHVQLSCFLTMFFSLYAYMNDNLINIRVAYAFKRQEERGCCISNR

SEQ ID NO: 122241 - protein, 175 aa, Oryza sativa
  Clone ID: PAT_MRT4530_25188C.1.pep
MNVSHRHAHIFCDFHAVALWSRCSTRTGASSRASSTSHAASSSSSTPILHEPCGELVKLDSQDLLQMGDTQFYFVLPTHSVFAIDVARRALPTSLQRGDNDEDDDDEEEEREEAVAKWRRNGDTGAPLPTAAARHPCSPLATARQLSPLHRDEERGDGEGEKEEEEEEFRLRKDE

SEQ ID NO: 122242 - protein, 129 aa, Oryza sativa
  Clone ID: PAT_MRT4530_25189C.1.pep
MSDLTGLLSVRVLPGVNPVSRDASGGDPYVVLHLDTQKLKTGVVTNTTDPDWNEELTVADRNPNAPIQVEVFDMDTFVYDDQLGDAEFNIDALMQIVRMDPHDILSDAAVHTVRAGRQCCLADQSHIVR

SEQ ID NO: 122243 - protein, 367 aa, Oryza sativa
  unsure (1)..(367): unsure at all Xaa locations
  Clone ID: PAT_MRT4530_2518C.1.pep
MSLKDGFSDNKLLDDFGYGEIXPDRSMPPDKIGISAVNLSIRRDRPSYKISSPGITMXDVSHREASARYIRHVSKREQLSTRVGCGRVYRIIENDLEKYRVVAPNLPTKTDDLPHSTGHGWTTREKIVAISCTXNFHWCSRDNSTRSLVLKPVNRSNLSHRNFHWCSRDNSTRSLVLKPWSRDTYSMVLNQSIVAIXVHLLLVVELRLXLVLNQRCSDSPTISTLSGRVTTTTWFSTSGVAILPLFXFKWSSYDYYLVLDQRCSNSPTSSTPTKLISGTQYCQVFYPEIPYHXRHLELKPILLSLYAVLTRPLRNLRELRLGTPRADKALSDHVETNDHILRLLDRSRTVGGSRQGIRNEKMVYPPR

SEQ ID NO: 122244 - protein, 93 aa, Oryza sativa
  Clone ID: PAT_MRT4530_25190C.1.pep
KGPLENLIDRLRDPVKQQSLGLGHLFRPRQVSTTSARAAMGTHRLQLSQLGLPQWASLQESVGVCTQCSRCTYVYRIYGRIGVARVDECPSIG

SEQ ID NO: 122245 - protein, 98 aa, Oryza sativa
  unsure (1)..(98): unsure at all Xaa locations
  Clone ID: PAT_MRT4530_25191C.1.pep
NGVLCTRALIVDGLTSIRNAAMNQKCTDCSVCTDSTGNMVKILLREGVDGSEKKHAVCYMSPLTVTVLHQESRARLGIXWTPTLLKRMGRPGLRVYPN

SEQ ID NO: 122246 - protein, 62 aa, Oryza sativa
  unsure (1)..(62): unsure at all Xaa locations
  Clone ID: PAT_MRT4530_25192C.1.pep
KITGMLLVCFVDLVKYNLRGWFQKLXQMLYMFAGLCLLARGCQICHGPYLPVQTXYSFACIN

SEQ ID NO: 122247 - protein, 364 aa, Oryza sativa
  Clone ID: PAT_MRT4530_25193C.1.pep
MADLGISTSDLATLAKLSIEGALPPEQDMAREEGALRADVVTQRVKDVLISPASTAEEVLPLMDIIGPLVDHQASASLKEKVTEEVVVASTAPIVAGGSGTKRKIWAKTSGDAGSRQKSSSSEDTSGLPPPPKWRSVKKIIGNLLTPFSDVGRKTSAISAQSGDESEMMAEYRRLFENTSREVGAQMDRLTARAMSSDGRVAQLETEFEFTRYDLQKMKEIVAGNEMQRLGVEKKMNDLQDHIFSIRDQLQKSAACTSLHQLALECSVKSSIPAHPDETSLTSALGELATKMEAIPSKHAARVSEEISIGIHTGVCHVLACVKLALPNVDLKEILSTGVADATREDVMAVVADLGETVLPLFEE

SEQ ID NO: 122248 - protein, 344 aa, Oryza sativa
  unsure (1)..(344): unsure at all Xaa locations
  Clone ID: PAT_MRT4530_25194C.1.pep
MAARPGKVGFVPLVHGRKILIARSIGICSNEMADCPLTHQGQTMGGFVTELSRMAFVIGYPREPKYTSIDLFSGEFPHQVRLELHGIHSYLPNMEVIACGGTFEHACEEAALRMMANLRELHDGTLNTTAYRFHPCRGSTSNTITFKSAWGENDVTFGHMSEKLVRIAELQDENARLKKEVARLQGRPPPGGIRIRTMPRKSTTAPVRIQLAPRNPPPPPPAAPPAALAPAPAPAPVXALSFVPASAYKGPAGLFACXQSTMVNTRNGGRAAGDRSNSEERTDGGHPNSASGNGPPPLPENLTLAQVMAHQTQMMAAMMQQMQQQHHQMHQRMKQLSRPKNRLN

SEQ ID NO: 122249 - protein, 471 aa, Oryza sativa
  Clone ID: PAT_MRT4530_25195C.1.pep
MAAAMHRASAAPRGIPHALALTARRRPTNRPARPRGEKSRVRPCPQDHKAHNELWRRLRYGPEHRVLISCVPEKVYFDSLNYRPSMIHVIQPQNQDDEQIVAIWIDRKAIEAQIRFRTLHNKIHLPIKDVTEGNYKATDVEVIGSIHTVDEDVWHPYVYIYSSHRDDTIYKNERYWDSVFCIDVTNREETRDVVDSMLNFVFNRSRDDPIVVQQCPNIRCDRDLKLSKQGLETYLTQLCQCKGANGSIIEMTGPKRGIGMVADVIFEFDMRIKNGEKEEDDLQLIDEIIEIDDNVVTMIGTPRTFRLSGDCGPVDMSMAIFDNAVEATVEVAISELHYGFDLSISYVLSELEENREFQLFRGAIGESCGLRSCWAISLLGRDAKAVELRVDSKSALALAKNLIFHERSKHIHIKYHFIRSCLDEGSIKASYINTKDRLTDLLTKSLGRVKFQELCARIGMVQIPQKAPHKT

SEQ ID NO: 122250 - protein, 396 aa, Oryza sativa
  unsure (1)..(396): unsure at all Xaa locations
  Clone ID: PAT_MRT4530_25196C.1.pep
HYRILKLACLQVDSRGSPEIRRFHGLAGYYRRFIEGFSKIARXLLKKDKSFEWSDKCEKSFQELKTRLTSAPVLVLPGCQKDFQVYCDASRRGFGCVLMQHGKVVSYASRQLRPHEENYPTHDLELAAVIHALKIWRHYLLGNKCEVYTDHKSLKYIFTQPDLNLRQCRWLELIKEYDVDIQYHSGKANVVADALSRKGHCNNAMIQQCPAELQKEVQQLRLEFVKPGLLLALEVKPTXLDQVREAQKEDKYLEQIRQDIQKGVTTYSTKDEQGTIKFKGRLCIPDKKEIRDMILEEAHDSVFSIHLGSTKMYHDLKDTFWWKNMRMEIAEYVNLCDVCQKVKADHRRPAGLLQTLPLPEWKWDEIGMDFITGFPKVRSGYDGGSSRVDLQACKLE

SEQ ID NO: 122251 - protein, 38 aa, Oryza sativa
  Clone ID: PAT_MRT4530_25197C.1.pep
MGQFRLETDKSQRERVTAPAGRHELLFASSSRLEPANG

SEQ ID NO: 122252 - protein, 88 aa, Oryza sativa
  Clone ID: PAT_MRT4530_25198C.1.pep
MPFWEEEREGNASTVSQVWTHAAWSSRAGVGKRERGRRRERALSPERGARATHVRGEEKERLRERGGLRERSGPRGGNPAHKDPREAK

SEQ ID NO: 122253 - protein, 74 aa, Oryza sativa
  Clone ID: PAT_MRT4530_25199C.1.pep
MEDRYQSTWAQGHQLARVRDKDGPATPRENHEQRSGGRRPSVVYQFASRPYTVWRVVVFGICGSAQYSFLTVRP

SEQ ID NO: 122254 - protein, 772 aa, Oryza sativa
  Clone ID: PAT_MRT4530_2519C.1.pep
MAERAVAHSLSPSASGDDGEQNPRRRARTPPSPSRRSLRRGKALEEVEGSVTSPRAGDGGGRRDGAHRRLVYGGGNTPQGTLQAAGALLRHPPVVPDPETPARRWLDDVADLVMTAQQRLGAGRRSSATGTSGAAAAGSTTSRRRARRAAAATRRSSAIPSSTPPTQEDVRGGPDARLDIERRRDDRRAAHATEGASSSGAPLRSGHGGRPPVSPVGGAGCRAFVASLRNVRWPPRFRPTITEKYDGSVNPAEFLQIYTTGIEAAGGDDRVMANFFPMALKGQARGWLMNLPPASVHSWEDLCQQFTTNFRGTYPRPGEEADLHAGGVRHNRMLEKIASKEPQTTAQLFELADRVARKEEAWTWNSSGSGVAAPAAPGSAARSGRRDRRRKKELARSDDEGHVLAVEGASRAPRKGRPASDKKKEAGAPSRERPTGKWCTVHNTSLHDLADCRAVKSLAERTRKWEEEKRQERREGKTPAAPTGNWRGEAKQKATAEDIDDGDDDLGFQEPEATVATVDGGACAHASRRSLKAMKRELLAAAPTHEATRRARWSEVALTFDQTDHPPCVARGGQIAMVVSPTVCNVKLGRVLKDGGAALNILSPAAFDAIKAPGMVLRPSQPIIGVTPGHTWPLGHIDLPVTFGGSANFRTERVDFDVADLSLPYNAVLGRPALVKFMAAVHYAYLQMKMPGPGGPITVHGDLKVALACMEQHADHLAAASKPAGGDERLSTSVPAAPRQRMVTCDEVPVKEVALGDGPSKTTRIGGLLDDK

SEQ ID NO: 122255 - protein, 510 aa, Oryza sativa
  unsure (1)..(510): unsure at all Xaa locations
  Clone ID: PAT_MRT4530_251C.1.pep
IKIAKQKCLCRRRLVSPLTRLAYYPAVVGRLRLHRXSCLQRRRLVSSPSRLAGHTPVDGHLHLHRRHAFAAADXSRQHGWPITPPLSGVYAFIITAACDWCTRLYGWLVTPLLLGVYFFTDXVAFVAADWCLCLHDWLISSPLTDDFVPTSSEHHHRLAVVAADWCSCLNGWLVTSPLLGVYVFTDRPPRLPPTGALAYTVGWSHHRCWASTSSPTGXPRPPPTGVSACTVGWSHHRCWASTSSPTGLPSPPPTGVSACTAGLLCRRCLASTSSPTGLPSPPLTGFSACTTGLLCRRCRASTSSPTGXLRRRRLVSPPARLAYYSAVVGRLHLHRPAASYDANWCCHLHGWPCXPPLIGLTILNASCCRLLXAYSSSLTSIIVIASLPPLLFMVTSISQLAYFAAVQGRLCFCHHSTXFQRLHFYYLRHQQTLLLLLRKFCYFTSHDVYKSFDILACTSRFDAVLFYYYKWCSNLQYFYLDIFNMYLHSSNDYSTTRSYNSRLYVQLFPN

SEQ ID NO: 122256 - protein, 406 aa, Oryza sativa
  unsure (1)..(406): unsure at all Xaa locations
  Clone ID: PAT_MRT4530_25200C.1.pep
GKTNTRRSPLFSSYYHPYITTYKTSILYRLHPYVIQVGRKFYGYPALPDPLPEPLPDPLPPGPLCPPPPPPPXPEPDPDPDPPFCPPPLPPPPPPPWAYPPPXPVTPGXPYPDPEPDPXPDPPFAPPPLPPPPPPPLAYAPPDPPACPYPEPEPDPQPEPPPDEPPPPPPPPPPLPDPDPLPLPLPXPPFSPPPPPPPLPPPIPDAXPPPEEPSLPASPAPEPAPAPTPXLGDAAGPPPCPPPPPPPPPALSPAPWPTPAPAPYPLPPLEPPPPPPPPPSPEPEPPLEPLPMPXPEPEPEPYPPLVPPPPPPPPPAPPPLPXPRXPESPPLSPYPAPAPAPEPEPHPPFVPPPPPPPPPPPPPPEYEFVYLATLAAPANPMLRRTARPRATSLVVAAMAIERERWW

SEQ ID NO: 122257 - protein, 497 aa, Oryza sativa
  unsure (1)..(497): unsure at all Xaa locations
  Clone ID: PAT_MRT4530_25201C.1.pep
PDPPLYPPPPPPPCPPPPFAPPPPPPPXRLLERTHHHGTHIHQPDHXPEPDPEPYPDPPFCPPPPPPPPPPPLAYAPPEPPAWPYPEPEPDPHPEPFPDPPPPPPPPPPPPPPPPPPPWPPAXAYPPPYGPYPPAXPYPEPEPYPDPDPPFCPPPPPCPPPPPXAYPPPYGPYPPACPXPDPEPEPYPDPPFCPPPPPPPPPPPLAYAPPPLAWPYPEPEPDPHPDPPFDPPPPPPPPPPPPPPPPPWPPPPPXAYPPPYGPDPPACPYPDPEPEPYPEPPFSPPPPPPPSPPPLAYDPSPPAWPYPEPEPDPQPEPPSDPPPPPSPLPPPPPPPPPWPPPPPXAYPPPXGPYPPACPYPDPEPEPYPDPPFCPPPPPPPPPSPLAYDPSPLAWPYPEPEPDPQPEPPFDPPPPPPPPPPPPPDPPFAPPPLPPPPPPPLAYAPPDPPACPYPEPEPDPQPEPPPDEPPPPPPPPPPPPPFSPPPPPPPLPPPIPDA

SEQ ID NO: 122258 - protein, 230 aa, Oryza sativa
  Clone ID: PAT_MRT4530_25202C.1.pep
MARSKFVALSFVVLLGIGLTNATRVARYVSAGGGGGGGGGGGGSGNGSGWGSGSGSGYGQAGGSGGAYASGGGGGGGGGGGQNGGSGYGSGSGSGYGQAGGYGSHGGAYAQGGGQGGGGGGGANGGSGYGSGSGSGYGQAGGYGPHGGAYAQGGGQGGGGGGGYNGGSGYGSGSGSGYGQAGSYGPYGGGYAHAGGQGGGGGGGQSGPGGHGYGSGSGSGSGSAYSGGHP

SEQ ID NO: 122259 - protein, 78 aa, Oryza sativa
  Clone ID: PAT_MRT4530_25203C.1.pep
EIIIPWLGRIFLSTCFVPKYKGFCLDITHSMSRSVVLECVPSKKKYVIFWDGACQNLDGEKIFCSITYAVLLTNMWVP

SEQ ID NO: 122260 - protein, 185 aa, Oryza sativa
  Clone ID: PAT_MRT4530_25204C.1.pep
MAGSKVVLLTFLVLLVIGVAYARPKKYASAGGGGGGGGGGGSSGGGSGWGSGSGSGYGQAGGSGGAYASGGGGGGGSGGGANGGSGYGSGSGSGYGQAGSYGPYGGGYAQGGGGGGGSGGGQNGGSGSGSGSGSGSGQAGGYGPYGGGYAQAGGQGGGGGGGQSGPGGSGSGSGSGSGSGSAGYP

SEQ ID NO: 122261 - protein, 510 aa, Oryza sativa
  Clone ID: PAT_MRT4530_25205C.1.pep
MRHFELLLFLLLCSPCLFSVSDGRTVRPAKRGAPSPPIRAVNLGGWLVTEGWILPSLFDDIPNKDLLDGTQLQFKSVTQNMYLCAEQGGGTILVANRTSASGWETFKLWRIDEDTFDLRVFDNLFVTVAGDGVTVVATVASPGPGEAFQIVRNGDKTRARIRAPNGMFLQAKTSDSVTADYDGETNWGDDDPSVFVVTRVGGLQGEYQICNGYGKAKATQVLREHWRTYIVESDFKFISTSGLNAVRIPVGWWIASDPNPPAPFVGGSLQALDNAFKWAEKYNLGVIVDLHAAPGSQNPFEHSASRDGSQDWGTTDANIAQTVQVIDFLTHRYASSPSLLAVELLNEPLAPGVTLPALMRYYKDGYNAVRKYTSTAYVVMSNRLSASNTELLGFAAGFPGAVLDVHYYNLFTSSFNGLTVDQNIDYVRTNRSDELSTVTRPNGPLTFVGEWVAEWNVQGASNQDYQRFAQAQLDVYGRATFGWAYWTYKNVNNHWSMQWNIQNGIISLKS

SEQ ID NO: 122262 - protein, 63 aa, Oryza sativa
  Clone ID: PAT_MRT4530_25206C.1.pep
PGLVVHIRVDEVTPHVSRAPSLFSVFSVCRPCSAFVFGAPDLSLTSCNTGIRYVIYVVGSGIC

SEQ ID NO: 122263 - protein, 270 aa, Oryza sativa
  Clone ID: PAT_MRT4530_25207C.1.pep
MAATTKLVALGLAVLLSIGFAGAARVARYTNSYSGGGGGGGGGGGGGGTNGGWGSGSGAGAGAGYGESGGDSGNTWNYGRGGGAGGGGGGGGGTNGGYGSGSGSGYGMGSGSSGGSGSSASAPVALSSGGNYATGDGEGGGGGGGGGSNGGSGYGAGAGVGQGAGESGSSIAMAPSPSSGGDYNGGYADAAGGGGGGGGGHGGGPAASPSYGVGAGAGSGAGDAGSDGSSGGGYASGMGGGKGGGGGGGENGGYGSGSGKGSGSGSGGYH

SEQ ID NO: 122264 - protein, 271 aa, Oryza sativa
  Clone ID: PAT_MRT4530_25208C.1.pep
MVYSEVTGLKHMRLFWLGVYRLLQTKAIGDTALPLPCGGDSGDFVPSGGDSGVFVPRGGDSGVFVPRGGDSGVFVIPASSSGCLPSLLASPVVTRRSHTRARRPKSDGTNSPLPDGDDTLADDAISTLPDTEATSSAPATPQIPDSNAAASTLFERFVYISTGGSSMSGTGTSTLFLFLHVVSALLITAVKNPSIRKKVADQVGHRVRLSPSVLSVFVFSSAAIAFTYDAIKSGKELEGLGSYLLKITKTGKYSGCHQNIDKKQELNKETP

SEQ ID NO: 122265 - protein, 59 aa, Oryza sativa
  Clone ID: PAT_MRT4530_25209C.1.pep
YMQGFHYPAVLHIRPSGASQVTLRMTPGSAICCSSAGIIIKRSPLVVIGVKKKGSLNCS

SEQ ID NO: 122266 - protein, 483 aa, Oryza sativa
  Clone ID: PAT_MRT4530_2520C.1.pep
MARCSAWVVWWLGRRHATCRLWLVTRLMAFNRKSEWVDPTGCFGGVNDKVLHGGLLLSSVHAMDGRTEKRLIWNQDVARGHITNSLEVRITADSTRRGCGRKGVEHRFGFNTHDKEEIEKDTASDMKRSRRIPRRTRKGDEEDSIWTQNRMINLPKLQQRDSTGLQHAIEQITRQGRNQFRGQRGLLATNLGGGVWLRRAAVHVMEELDAGRLQEEAADTGVRGGEGPEQQRVKTLRASTGCLAVQGHGFDQVKFKTVDGGEHALREAYDMTARKESNFAWQDDCGDMREGGALLQVESSGRSCRDSGVSCLRCRRLMSRFRYLHSMGIVGTRVYARLRGNGRIATPLVKNQSWCEDRCVIAVVVPRPSEVAVREIATYWFEDQRTSRIISRTPMEVAVREIATYWFENQRASRIISRTPMEVAVREIATYWFENQRASRIISRTPMGVVVWEIATYWFENQRASRIISRTPMEVMVWEIATY

SEQ ID NO: 122267 - protein, 108 aa, Oryza sativa
  unsure (1)..(108): unsure at all Xaa locations
  Clone ID: PAT_MRT4530_25210C.1.pep
KGDYYRYLAEFSTGTEKKAATDQSLXPIRLGLALNFSVFXEIMNSPERASQVAKQALDEATAEINSAGVEGYKDSMLMMQLLKENLALWTSELTGGETSKDDDVVMEG

SEQ ID NO: 122268 - protein, 82 aa, Oryza sativa
  Clone ID: PAT_MRT4530_25211C.1.pep
PQKQGAHPPLKCPPPSGKGPPLGPSLFLPPPNKTFALQDDYFCAPPLFPPPLELVPPPAQFILGPTQKKIRAPLFSTKTWSP

SEQ ID NO: 122269 - protein, 156 aa, Oryza sativa
  Clone ID: PAT_MRT4530_25212C.1.pep
RPGPRRHSESELQNLLETAISQSPIPVAVAEAAASRPASRRRGGAPSSSRPTPLSMPPTTSSLPATRHLPFNLSRLPCALTPPRSPHPSPRSPRLPPPLLSGAAPRRVRVPPRRRLHLFPPPVHAVIRRARPHVCALSSSLLYPLCPVLSLVPYHP

SEQ ID NO: 122270 - protein, 417 aa, Oryza sativa
  unsure (1)..(417): unsure at all Xaa locations
  Clone ID: PAT_MRT4530_25213C.1.pep
MVRTAGAAAAGVAAAGAAEDGEDVAAGALACDGGGEVSPLLEGDAAHTAGAHPIGTKVSSDGVPRMAVVDMHGGSWGGGDGEGGVEVEGEGRKWRWKGRSVHTAAAGGSHMNGTMLVLGRPPPPPPAARASSSSAAQRAPPLPPXRRLGLQLMSSVPADRDTKHLLSATPFLHHHQHQQYVPHHHHQPHHPRDCGTNANANGNGNGVGYGMIPGTHTLRMLQHQPEPQPQLQHPPSPPHPKEECISPPLIEENVPVIDEPPPPKKRQQGRQPKVPRAKKPKKSAAPREDGAPPNAPAPRRRGPRKNIGMVINGIDLDLSRIPTPICSCTGAPQQCYRWGAGGWQSACCTTTISTYPLPMSTKRRGARIAGRKMSHGAFKKVLEKLAGEGYNLNNPIDLKTFWAKHGTNKFVTISCLV

SEQ ID NO: 122271 - protein, 77 aa, Oryza sativa
  unsure (1)..(77): unsure at all Xaa locations
  Clone ID: PAT_MRT4530_25214C.1.pep
VVLXSGFCCVXTPFTITPGCCYFGGFFSRFVCVVFFLFFFFCFFFFFFFFFFFFFLSSSFIHHTCSQIPGNTNYLVT

SEQ ID NO: 122272 - protein, 60 aa, Oryza sativa
  Clone ID: PAT_MRT4530_25215C.1.pep
RTNSTATRERSGQEGAASLRRAATVENPGVSCQSGLAAAALQGDVHTVAASCSGGRRRNP

SEQ ID NO: 122273 - protein, 52 aa, Oryza sativa
  Clone ID: PAT_MRT4530_25216C.1.pep
FKYCTTHNSVLYFLEKKSLSQQFKNQDIQISENLYYSPSLHKNVTAFQRIYT

SEQ ID NO: 122274 - protein, 295 aa, Oryza sativa
  Clone ID: PAT_MRT4530_25217C.1.pep
MSSPMHVRKAIHFVSMKAKLQSFGGLRLLLVGCLAALLLLFAVRTLSFTTSSATATAAREAAEAGCGKLPAAVAQAMVHYATANVTPQQTAAEIGVSLRVLQLRAPCNFLVFGLGLDSAMWAALNHGGRTVSLEEDASWIASVKAGHPGLESYHVAYDTRVTDADELIALRHEPACTSQPDLAAAAAASCRLALRGLPPVFHEVEWDLIMVDAPTGWTPESPGRMGAIYTAGMAARARTPGAGATEVFVHDVDRHVEDTFSKAFLCDGYLVEQVGRIRRFVIPSHRDKDGTPFCP

SEQ ID NO: 122275 - protein, 358 aa, Oryza sativa
  Clone ID: PAT_MRT4530_25218C.1.pep
MTYTTPTSFPSTGLYLNTPKKKPLPGKIEEVRAAGWLDLMLASSPPRKRQTKDFANDVQADELDLLYRNWVVNHPSALTSFEDIVNLARGKRLALFLDYDGTLSPIVDNPENAVMSDEMRSAVKHVASLFPTAIISGRSRDKVFDFVKLTELYYAGSHGMDIMGPVRKSDSSGQHVECIRSTDSEGKEVNLFQPASEFLPMISEVYKKLSESIKDIDGARMEDNKFCVSVHYRNVAPHDYGEVHQRVTAVLKNYPCLRLTHGRKVLEVRPVIDWNKGKAVEFLLESLGLCGKEDVLPIYVGDDKTDEDAFKVLKANSIGFGILVSSVPKDTDAFYSVRDPAEVMEFLKKLASWKEEST

SEQ ID NO: 122276 - protein, 134 aa, Oryza sativa
  unsure (1)..(134): unsure at all Xaa locations
  Clone ID: PAT_MRT4530_25219C.1.pep
KSREWKKPGVTQIKCLGKKPPFPRWGKNKKAPTNRPFQKLPNLKGKRKPPFNGTKKPGGGGVTPKGTRKIAKALSPGPLGFFPFFFTKFAGFPRKXLKRGXPLRFQIKGLRDLDXKKLNRGKVKLRGPSPKKRV

SEQ ID NO: 122277 - protein, 171 aa, Oryza sativa
  Clone ID: PAT_MRT4530_2521C.1.pep
MEGIGQSFRSTLGIFSTFKQCVICNYASYTTPIELGIEQILEARMLGIEHCLSWMGSHFPSPQEIGIGLTGFGVFFSFLGIIFFFDKGLLAMGNILFLSGLGLTIGLKSTLQFFTKPKNYKGTISFGAGLLLVLIGWPFFGMLLEAYGFIVLFSTLEAIEEKEFQCRSYPK

SEQ ID NO: 122278 - protein, 110 aa, Oryza sativa
  Clone ID: PAT_MRT4530_25220C.1.pep
LQSHILLHKQILYPFTHSENQHHIILSTTYLLPTTFQYINNQFINYHTTQQFILLTQQSHYYTYINLHTTTHNILNLKLKLFYPSHTHPHAQSTLTSNFLSISFILPNYY

SEQ ID NO: 122279 - protein, 102 aa, Oryza sativa
  Clone ID: PAT_MRT4530_25221C.1.pep
CRVVHGEADQETAPAYANREAYVEHSGGDAGTFSIFPSYLDDGEGAIKQKRRRPKRGEDFRFREALLKADFWLLFAVYFIGVGTWITVLNNLSQVGIASCDC

SEQ ID NO: 122280 - protein, 233 aa, Oryza sativa
  Clone ID: PAT_MRT4530_25222C.1.pep
MEDDDDDFTFPAPAATATATAVAAAATSSLAPSSQGGLLWPFSSTMATADDDDAASGGQAVAATAPVAAARRVDEEEEEERMDQLWERDRDARAGDEERMDLLWEDFNDELLLQLRRRQQQRAAAGTPPSPSPSPAAAADDDDDEETPSSSPPGGGGGLYGCAPTMLRASSRAGAVGQFYGGRRGGGGGSRATTGWELLLRLFRKLFAVDKSSPSPAPPCRHHHRRHGSIYVP

SEQ ID NO: 122281 - protein, 65 aa, Oryza sativa
  unsure (1)..(65): unsure at all Xaa locations
  Clone ID: PAT_MRT4530_25223C.1.pep
HTSPPSPPPPPPLPPRARDPGRGRGREHGXDCDGAVCFXLFFYDFPSRAKYSFPDNFMIEHTDSM

SEQ ID NO: 122282 - protein, 869 aa, Oryza sativa
  Clone ID: PAT_MRT4530_25224C.1.pep
MATTRPRRPPGEGLLSVDASRSCEDSLLQLIREIGSSGSLEKVMLLPFSQNVHKFIGIKRPTLPETSFGLLGEVDPEITPVVLPSPVEQNGHDQHDNVSHDLENTEKTGFNTDGAQLQQDDLANLVNESNTGNLQKDAMATPDFHQPCTSENRCFDQPQEDSINAVGVNIRSPKDSPTNVDRHIQVAAEPSLATSADLLGSNTGTISEQDMIDDTTMVQSQSQGVKNPNTLHYNNGDEPLVASIQSPKDSIHEGLTIQATVSPAFDRSNDALPASTSEISQLPEFITARDTVMNSEPRINKSHPNSPKHDTVDKANQDVDYGSVGIQKAAAFLSEDRNGATQGEKSEIKDPPENTAEHTKMFEQENSVEAQLEVGCSDKVNQDIQDDGNIMTKNMVCDGLNVQTAPEPHSCRMALHNKNLVANHLSEQNIGRNTTAVEKDCCSIPTSPQVVNDTRVKQPSNKRTMGNTVVETSHVHSSDDSLSGFAATGLLSMADKIPFCTQDQDANGPVEGLSEQDLCIKCGKDGQLLKCSSCLLAAHDTCFGSLATLDDSGQLYCPVCFYTKATEAYQKAKKTYSEARKNLSAFLGRKQLAEQHQQAAVGQRAANNEDHLNGCNDASKRKDNHQSEGNNLSHRDEDPTRKRKKQKTNATSDACAQEVVTEKNNRKQAQVAEHEQPEENAEASGESGNANSSHKTAHSSQTKCSPAASQNVDADKEDGLASSQQSEDSDEIEATSSSDPTKQPSPPWRKLRHRKARYQDKDTAMPSNSKKTLGHHDQHMASPSRKRNYAYPPKRYSNPVGPAGRRTKLCWTEQEEATLREAMAKFTPSDNGPIPWVQILDYGRDVFHRTRLASDLRVKWRNMKKKAGS

SEQ ID NO: 122283 - protein, 386 aa, Oryza sativa
  Clone ID: PAT_MRT4530_25225C.1.pep
MRCWERVALRCLQEVVSLASSDGERGATASAIAAPGEGMLGVEDASRTCEDLLLQLIRELRKVYPEITPVVPPSPVEQNGNDQHDNISHDLVNTEKTGFTTDGAQLQQDDLANLVDERNTENLQKDAMATSDFQQPCTSDNRCFDQRQEDSINTVGVNIRSPEDSPTNVNRHMSVAAEPSLASSADLLGSNTGRMSEQDTIDHTTIVQSQSCGVRYPNKHHSNNGDMPLVASIQSPKDSIHEGSTMQTTVSPAVDRSNDALPASNMTHLPEFIAVEDKIMTSEPHFSKTHPNSGQHDTGDKANQDVGCGSTGIQTAAALPSEGFNGDVQGDKSEIKDPAGNTTQHTETFEQENSDKAHLEVGCSDKVNQALYDDGNIIKIKWSVVG

SEQ ID NO: 122284 - protein, 42 aa, Oryza sativa
  Clone ID: PAT_MRT4530_25226C.1.pep
MAGGVGVGADGEDLEAAVAGRDRAGAGMAGGVGVGADGEGGR

SEQ ID NO: 122285 - protein, 887 aa, Oryza sativa
  Clone ID: PAT_MRT4530_25227C.1.pep
MPRPSTSASATASRFAAFWAADALAGDDALDFAVTKAMVGVSPDSVRAAPEAVRERVALRCLQEVVSLASSDGERGATASAIAAPGEGMLGVEDASRTCEDLLLQLIREVGSSGSLEKDMLPPFRQDIQKFICIKRPTLPETSFELLRKVYPEITPVVPPSPVEQNGNDQHDNISHDLVNTEKTGFTTDGAQLQQDDLANLVDERNTENLQKDAMATSDFQQPCTSDNRCFDQRQEDSINTVGVNIRSPEDSPTNVNRHMSVAAEPSLASSADLLGSNTGRMSEQDTIDHTTIVQSQSCGVRYPNKHHSNNGDMPLVASIQSPKDSIHEGSTMQTTVSPAVDRSNDALPASNMTHLPEFIAVEDKIMTSEPHFSKTHPNSGQHDTGDKANQDVGCGSTGIQTAAALPSEGFNGDVQGDKSEIKDPAGNTTQHTETFEQENSDKAHLEVGCSDKVNQALYDDGNIIKNNMVFGGLNKQTALESHGCSMTLHNRNSEANHFSEQNIGRNRTEVQNDCCSIPTSPNDVNDKRAKQASNKETMANTVAETLHVHSSDGSFSGFAAGGLLSMAEKLPFCTQDQYANGTVEGLSEQELCIKCGKDGQLLKCSGCFLAVHDTCFGSSVTFDDSGQFYCPVCFYTKATEAYQKAKKTYSEARKNLSAFLGRKQLAEQYQQAAVRQRAANSEDHFNGCNNAIKRQGNHQSEGNNLSHRDEEPARQRKKQKTNARDACTQEVVTKKAPTVHNSDVVSMKKNSVLQNNRKQAQVAEQEQPEENAEASGESGNTNSSHKTAHSSQNKCSPAASQNIDADKEDVLASSQQSEDSDEIEATSSSDPSKQPSPHWRKLRHRKARYQDNNTAIPINSKKTLGHHDQHMASPSRKRNYAYPPKR

SEQ ID NO: 122286 - protein, 174 aa, Oryza sativa
  Clone ID: PAT_MRT4530_25228C.1.pep
MADGEGGGMEDYAAWVAATIFCRNNSDYAPENPDGPPPPTRTLRCTYRRGGGEDRDSLCVLHQLDDCDDVGALGDEGWVWPRKAMGSVVEVVVPSMREHGVGAYLGNSLKSHMASTFEPHQNLEILEGHLGIVNPGGRAKPAGVRSRSVSRVCEVVAYAIMMYMRFFVEQYYGE

SEQ ID NO: 122287 - protein, 29 aa, Oryza sativa
  Clone ID: PAT_MRT4530_25229C.1.pep
EVLRRFCFPKTISGALGVLFPLVVNPPFH

SEQ ID NO: 122288 - protein, 235 aa, Oryza sativa
  Clone ID: PAT_MRT4530_2522C.1.pep
MDHNLHSAGSRRNVGARLSADDVTGVRPVTNRSFLSGMNLAGTDVLTPGVSTPAPARDECLEALIIPTGRGEAGSGRPSPRGRNGSGPTPWGDRGRGGHITLGPDPPEGVRPRRSDDVFCADSTTKPHHDQPKGHRRAPRVAELCHRRGALVCIDSTLASPINHTSLSPSAPRHHPPHRHPPPSTSPANLDVIVGCVSGLRGLGHSAGAHYQQVVLAGMETRREEKKRWKVEDGG

SEQ ID NO: 122289 - protein, 88 aa, Oryza sativa
  Clone ID: PAT_MRT4530_25230C.1.pep
SSGRRRRAGTRAPSTSTPSTRARPTPPPRTSPRRPPRAAGAGSCCRRRRPARSRRPPPPASAPPPLPRTPASAPPARTSPPAGTTRRP

SEQ ID NO: 122290 - protein, 225 aa, Oryza sativa
  Clone ID: PAT_MRT4530_25231C.1.pep
MLHMHNLAHDLARSVAGEDILVILDAENERNARYCDYRYAQVSASSLESIDRKAWPSKARSLIFKNSGADFEHVSEVLSVNKYLRVLDLSGCCVQDIPSPIFQLKQLRYLDVSSLSITALPLQISSFHKLQMLDLSETELTELPPFISNLKGLNYLNLQGCQKLQRLNSLHLLHDLHYLNLSCCPEVTSFPESLENLTKLRFLNLSGCSKLSALPIRFLESFASL

SEQ ID NO: 122291 - protein, 500 aa, Oryza sativa
  Clone ID: PAT_MRT4530_25232C.1.pep
MVANEVVAAAAVVEEPAPASAGAVDPMRLASRWRSPAEWGAAAAEMEAEPAPSELNTTNSSGLFAVVSTDRMSVRYLGVNQHGHDVGVVQANRPAPTRRAVYYFEMGVKNAGQKGQTSIGFTTENFKMRRQPGWESNSCGYHGDDGYLYRGPGKSESFGPKFTSGDTIGAGINYFSQEFFFTKNGSLVGSFQKEIKGPLYPTIAVHSQDEEVTVNFGKEPFCFDIEGYIFEEKMKQQSVSDKLDLQPDISHWIVRSYLLHYGYQDTLNSFDMASETDPPSNHQNGYGEPPEMYGLSHRKLLRQLIMSGDIDSAFKKLGEWYPQVIKDETSIICFLLHSQRFIEFIGAGQLEDAVKYARSNLANFLTHKAFDGLLKESVALLAYEKPAESCIGYLLDSPQREFVADAVNAAVLSTNPNMKDPESCLYSCLEKLLRQLTVFLGIKAFKLHLHLSSELRDETLCPSWKERDSPRSGDVDHDPCAITDTLILEVSQYTLHKVNA

SEQ ID NO: 122292 - protein, 84 aa, Oryza sativa
  Clone ID: PAT_MRT4530_25233C.1.pep
MEMRGTVGPELGVDGGVLRVVVMVANQLSDKLGAKPSAIGSTKGGGRVSLVEIMVCGKDGVVVAILREISYGGLAEAVLCNDDG

SEQ ID NO: 122293 - protein, 163 aa, Oryza sativa
  unsure (1)..(163): unsure at all Xaa locations
  Clone ID: PAT_MRT4530_25234C.1.pep
AQHTSRRCVRCTWLGRAPTTRLNVGSEATVEXTPCLASXTVRNGCXPGDKLSDPLGLAEDQQNLGRLAQAELLNGRRTMLRVAXMLLTDVLTKIGLIDATYXMTTPEAVTYXGLSDDAGRIDXILDHYVEILRRKDIKNPGCVHQNPMXNSYRLPPHECGYTG

SEQ ID NO: 122294 - protein, 563 aa, Oryza sativa
  Clone ID: PAT_MRT4530_25235C.1.pep
MDLGKSTSTSATLKKLQEEGALPGRDKAEREAGGTNPQPLLGRMVVIEDYIVCGFLPPSSEFLLLVLNFYGLSLLHLKPNSIAFLSVFVHLCEAYIGVEPFLDLFRFYYELRWMESNKVSGCVGFRLRDGMKPRYVPFQCPSSRSKWRNRWFYLEIKDSNPVLVVPEEQPDKIPVWTAKPPLTPSLQSFTDIIDDLRERGLSGYEVVADFVGLSSEVVERRTGQVIISGPSAMSNIPKPLCDKDAAERDEAINALPLTDVATGSGGKAPTKPRKFSSVLGHRRKAETSSVSDASPPPARRQRIVTICEKEARSKTARAKSGGTSSASPVTASTDVVPVIGSREATPSGPTSDPAGGRGAPESILTWEELQAEMGRLVEAGARGIGREVSEARAETAAANTRADRLVRELAEAREDLTKMRELVAGNEHQRKGLEDRMSELGDNLSEIRGSLRVTYTGLHQLAAECGVKSTIQENPDEFSLTSFLAELATAMGEIPTKQAARIAEETSNGIYTGACHVLACMRLLRPELDLREILDQGAASDTRKEVMEEVGDLGESVLPLFEE

SEQ ID NO: 122295 - protein, 36 aa, Oryza sativa
  Clone ID: PAT_MRT4530_25236C.1.pep
RVRFGGSEELVLLGPSAGPNPSQMVLSKAAIYGAYH

SEQ ID NO: 122296 - protein, 448 aa, Oryza sativa
  Clone ID: PAT_MRT4530_25237C.1.pep
MWRGGGREGEGIDRYLIPIAIDRPSAFPACYAREAQSCALVVFTPRQRDRRERRRGTGNAGEERGRGSRSGREGAALPVGRGKGEEVLAMFTHCNAQAVMLPDYYCCMVEKLIEKLTRNGRNAVAINEHIFSTVDGIIGTFALGETYAAEEFKDISETMDLLSSSSAEDFFPGSVAGRLVDRLTGLAARREAIFRKLDRFFERIVDQHAAADDDGPAAARRKADDKGSAGSDLVHELIDLWKMEGNTKQGFTKDHVKAMLLDTFVGGITTTSVTLHWAMSELIRNPRVMKKAQDEIRAVVGEKERVQHHDMPKLKYLKMVVKETFRLHPPATLLVPRETTRHFKVGGDPNIWKDPEEFIPERFEEMDIDFNGAHFELVPFGSGRRICPGLAMGVANIEFILASMLFCFDWELPHGVRKEDIDMEEAGKLTFHKKIPLLLVPTPNKAPN

SEQ ID NO: 122297 - protein, 178 aa, Oryza sativa
  Clone ID: PAT_MRT4530_25238C.1.pep
MTGDLADRTIGVEVRDGRIWEGSNLPCDETDKQLFRASTIIILGNGGKVKFLHDRWLEGKAPKDTAPSLFQIASRKNRMVAKELADNRWLRQMRRMNTTVQDSRSNFFWKAKTENKCKFFGWLMIHMKILTADKLQLRGWDNSEICPLCGIEPETAFMLAPACCCSHFVKIGCSSFGL

SEQ ID NO: 122298 - protein, 170 aa, Oryza sativa
  Clone ID: PAT_MRT4530_25239C.1.pep
AAEEEEKRREEARRYRRGRGDGREVVVPVPDLQLPVVQVEEVRGRRRRRRAERRVAGEVREQGEVERRGLRRVVGRRARRRPQGLRLHQQLPPEEAGRRRLASSIYTSRSPTTPTAQRYQSFIGSRGTSVRATATADDGRRRGHIYVLHLLSQPAICVPHRMYVRRSPFT

SEQ ID NO: 122299 - protein, 104 aa, Oryza sativa
  Clone ID: PAT_MRT4530_2523C.1.pep
MVPAITLAPSLHRYTGRRSQPPPLPPDPAEGRALLPPVASSCAATYRLPPTVPPDLAGGEGAAATRSPACSLIRSLLLLHEKERIREREERERREEEQMRRRRG

SEQ ID NO: 122300 - protein, 293 aa, Oryza sativa
  Clone ID: PAT_MRT4530_25240C.1.pep
KLWSDRPSSASPVTASTDIIPAIGSREATPSGPASDPAGGRGLPEAILTWEELQAEMGRLLEAGARGIGREVSDADDEDVQQRGQPESLAIIPVLEFEPHASHNVEDQTLDAEVEVTATGPNLEDSLATQDRRIQYWKTKFEVVELERAMLAVKKDQAVETLRGREVWFSSYLKSCCTSMERVCRDLRVARGDPEKSAAGYISWLNEACAQLDGIGKRIDEALKQECCRASRYAGGHVLACIRDHCPRMDLEFLREGFGRSRRDPAEIDHLARSMSPLAEKIFQSMDWRWPSW

SEQ ID NO: 122301 - protein, 698 aa, Oryza sativa
  Clone ID: PAT_MRT4530_25241C.1.pep
MDLGKSTSTTATLKRLQEEGALPGRDKAEWEAGGTTPQPLLGRMVAIEDYIVCGFLPPPSEFLLLVLNFYGLYSVFVHLCEAYIGVEPFLDLFRFYYELRWMESNKVSGCVGFRLRDGMKSRYVPFQCPSSRSKWRNRWFYLEIKDLNPALVVPEEQPDKIPVAASLKEKVVKEASDIATGSGGKAPTKLRKFSSALGNRRKAETSSVSDASPPPARRQRLVIIGEKEARSKAGRAKSGGTSSTSPVTASTDVVPVSREATPSGPASDLAGGRGPPEAILTWEELQAEMGRLLEAGARGIGREVSEARAEMAAANARAERLVRELAEAREDLTKMRELVAGNERQRKGLEDRMSELGDNLSEIRGSLRVTYTGLHQLAEECGVKSTIPANPDEFSLTSSLAELATAMGEIPSKHAARIAEEMSNGIYTGAYHVLACVKLSRPELDLREVLDQGAARDARKEVMEEVGDLGESVLPLFEEDADDEDVQQRGQPESLAVIPVLEFEPQAVHNVEDQAVDAEVEVTTTDQNLKNALATQDRRIQYWKMKFEVAELERAMLAVKKDQAVETLRGREVWFSSYLKSCCTSMARVCRDLRVARGPEESAAGYISWLNGACAQLDGIGKRIDEALKQECCRSSRYAGGHVLACIRDHCPRLDLEFLREGFGRSRRNPAEIDHLARSMSPLAEKIFQSMDWRWPSW

SEQ ID NO: 122302 - protein, 120 aa, Oryza sativa
  Clone ID: PAT_MRT4530_25242C.1.pep
TARGRRRRPRKRGGRRRMRVAGGGSSLPRAGARMALRFNQMISVPCLRLRRQGQWCTRDTGKVMLQSCNSLLPNGEWERRAIYGDRALSERAATCCSVQGLGTSSVCHGTEEISMVRIRR

SEQ ID NO: 122303 - protein, 148 aa, Oryza sativa
  Clone ID: PAT_MRT4530_25243C.1.pep
MAVSIELTKEYGYVVLALVAYAFLNFWMSFQVGKARRKYKVFYPTMYAVESENKDAKLFNCVQRGHQNSLEMMPLFFVTLLVGGLQHPLVAAGLGVFYAVARFFYFKGYATGIPDNRLKIGGLNFLAIFGLIICTASFGINLVLRESI

SEQ ID NO: 122304 - protein, 321 aa, Oryza sativa
  Clone ID: PAT_MRT4530_25244C.1.pep
MDLGKSTSTTATLKKLQEEGALPGRDKAEREAGGTNPQPLLGRMVAIEDYIVCGFLPPPSEFLVLVLNFYGLSLLHLNPNSIAFLSVFVHLCEAYIGVEPFLDLFRFYYELRWMKSNKVSGCVGFRLRDGMKLRYVPFQCPSSRSKWRNRWFYLEIKDLNPVLVVPEEQPDKIPVWTAKPPLTPSLQSFIDIIDDLRERGLSGYEVVADFVGLSSEVMERCAGQVMISDPSATSNIPKPLCDKDAAERDEAINPLPLTDVVGPLADHQVAASLKEKVVEEASDIATGSGGKAPTKPRKFSSVLGHRRKAETSSVTFTLSLC

SEQ ID NO: 122305 - protein, 530 aa, Oryza sativa
  Clone ID: PAT_MRT4530_25245C.1.pep
MELTWLLLLATLLLSTTLLVFLFHGGSSATGGEKRRRLPPGPATVPVLGNLLWATNSGMDIMRAVRRLHARHGPMLGLRMGSRLEVIVADRRLAHAALVESGAAMADRPEFASRALLGLDTATISNSSYGPLWRLFRRNFVAEVAHPARLRQFAPARAAVLEELTDKLRRRQEDAGAGTILETFQYAMFFLLVAMCFGELLDERAVRDIAAAQRDLLLHSSKKLRVFAFLPAITTRLFAGRMKAMIAMRQRLKGMFMPLIDARRARKNLVDDHGDATAPPPPAASATTLPHSYVDTLLNLRINDNGGERALTDDEMVALCSEFLNGGTDTTSTALEWIMAELVKNPTIQDKLHGEIKGAITSNSGKVSEEDVQKMPYLKAVVMEGLRRHPPGHFVLPHAPAEDMELGGYTIPKGTLVNFTVADMGMDGAAWDRPREFLPERFMAGGDGEGVDITGTREIRMMPFGAGRRICPGLGVATLHLEYFVANMVAAFEWRAAEGEAVDVDGEKLEFTVVMEKPLRARLLPRAVTV

SEQ ID NO: 122306 - protein, 153 aa, Oryza sativa
  Clone ID: PAT_MRT4530_25246C.1.pep
MAVSIELTKEYGYVVLALVAYAFLNFWMSFQVGKARRKYKVFYPTMYAVESENKDAKLFNCVQRGHQNSLEMMPLFFVTLLVGGLQHPLVAAGLGVFYAVARFFYFKGYATGIPDNRLKIGSQLLRGLNFLAIFGLIICTASFGINLVLRESI

SEQ ID NO: 122307 - protein, 91 aa, Oryza sativa
  Clone ID: PAT_MRT4530_25247C.1.pep
MARGLRQTQSPTWPGTFGDVGPEGGTTGARAYHEVAERRSSTASGAVRSKQGQTAVGDGRKCSMLDGDATVTRATATDRDNDLDRGRRAMP

SEQ ID NO: 122308 - protein, 87 aa, Oryza sativa
  Clone ID: PAT_MRT4530_25248C.1.pep
MALGAAALAARRSRRAGFLHASSLCETADVPPAATCHEEQRLRRELVPGEGAGAKSSTAENLAPKISSSSRSWRKEDGERKEGLRGS

SEQ ID NO: 122309 - protein, 116 aa, Oryza sativa
  Clone ID: PAT_MRT4530_25249C.1.pep
CRIHHVILNCRQHHQASQGPERLHQEQKRQGRQQEGHGFCQHLTCPDEHQPLVSMDMQRDRKVQVGKPTSTLVADKLLRSSCYTPTCRVVIATHAKIGDFGRHTAGDIVGMTMICE

SEQ ID NO: 122310 - protein, 129 aa, Oryza sativa
  Clone ID: PAT_MRT4530_2524C.1.pep
MEEEDDDTVAVAGERWPATLEAKALLQASLPQHPFQIDAEETSGPWRMRRNVGARRAKGRLLPPNPRSDRSVTGGSGRPTPRGRNGSGPTPRGDRGRGGHITLGPDPPEGVRPRGSAVDQNVVERVKRG

SEQ ID NO: 122311 - protein, 60 aa, Oryza sativa
  Clone ID: PAT_MRT4530_25250C.1.pep
VGGVHKLLVRVVISTVLGKLRSDAMLVVSPPCNQQPCFTTEHYLYLQQTADVRLNDMRGD

SEQ ID NO: 122312 - protein, 127 aa, Oryza sativa
  Clone ID: PAT_MRT4530_25251C.1.pep
MAAAAADEEREVRRAVEEKPVVVVGRRGCCMAHVARRLLLGQGANPAVLEVGDDADPAALVDAALQARRRKDGGDKAAAGDGGGGAAVAFPAVFIGGRLVGGLDRLMAMHMAGELVPVLKQAGALWL

SEQ ID NO: 122313 - protein, 899 aa, Oryza sativa
  Clone ID: PAT_MRT4530_25252C.1.pep
MKRARSSEVFLGGRGRARRRVAPLLAAVAFVYLLFVSFKLSGLAGIADPAAVTRPASGGAGEVVMPRRLEDPAPRARGDGDGVAVAGYGRITGEILRRRWEAGGRGRRRWGRGGNFSELERMADEAWELGGKAWEEACAFTGDVDSILSRDGGGETKCPASINIGGGDGETVAFLPCGLAVGSAVTVVGTARAARAEYVEALERRGKGNGTVMVAQFAVELRGLRAVEGEEPPRILHLNPRLRGDWSHRPVLEMNTCFRMQWGKAHRCDGNPSKDDDQVDGLIKCEKWDRRDSVDSKETKTGSWLNRFIGRAKKPEMRWPYPFSEGKMFVLTIQAGIEGYHVSVGGRHVASFPHRMGFSLEDATGLAVTGGVDVHSIYATSLPKVHPSFSLQQVLEMSDRWKARPVPEEPIQVFIGIISATNHFAERMAIRKSWMQFPAIQLGNVVARFFVALSHRKEINAALKTEADYFGDVVILPFIDRYELVVLKTVAICEFGVQNVTAEYIMKCDDDTFVRLDVVLKQISVYNRTMPLYMGNLNLLHRPLRHGKWAVTYEEWPEFVYPPYANGPGYVISIDIARDIVSRHANHSLRVRLILKLHCTHFSLHIPLMLSDCHLTGTAVVQDGRSDTISQELFYAKISIISVGYLLLHLPELMCMCWFFECANSIAVQRLRFNLMDSDDKKFGKGPRELTGAVDLISHYKLLAHHDFFCKKPLPLAISDTHYLDNVVGDTEIRKGEGMELDQLVQNAYLRDKPAYIQPFDMETLGQAFQLRETAPVDLPSAEKGIPTISGKLKSESKDKEKKHKKHKDKDRDKDKEHKKHKHRHKDRSKDKDKDKDKDKKKDKSGHHDSGGDHSKKHHEKKRKHEGMEDSADVHKHKKSKVAHTAIMILAGIANFLIE

SEQ ID NO: 122314 - protein, 337 aa, Oryza sativa
  Clone ID: PAT_MRT4530_25253C.1.pep
PIIFCLDERSKSVQNHLDVPAAPSLLFFHHLKLRSESNLTSKSLPEFMPITLEEDQQSLPQHTSDLVHLAASASEVCSVYVSPSNTGSLDMGTAGCINHSGSASSKLNTAKRTVSLDCNSRGIGGANITSRSFPDQIMDGSLSAVCPPQKYQKRCSSISIPGDNISDPPDDKLLNKEEKAMQPTSDLVQELNEYPIGRVTPTAPRTPYHRNRFTSLSRTFGDGSKLWQEDIMVTGFAGGSKKPRTQVLYSVSPRSDEPGSKHKGHFRKIQSHSSAKRLSDNSRSEQSSPESLACVANVLVTVGDRGWREYDTQITIDSYGQNEPRICVKLAEGTKYA

SEQ ID NO: 122315 - protein, 240 aa, Oryza sativa
  Clone ID: PAT_MRT4530_25254C.1.pep
MAAARPTLDGVPSLCVEDGPARGGESDDAGWRRWIQPPHGWIWRLHAGSGRSKLLLCGVNGRRRWQRLATRRLAAAGTGGRRARKTQWRPAAEVAVAKADSGGRGGGGCDGRGCGARQRASSPPPPPAAGGGGFGLDGLCTVAGSGWRCADPRLVVGSVAPAAGCGLNGCGLRCSINVTLPSNIFPPLSSLLFEALYNCDVSLATEPVLLLALTSLALIHHLGVARASPLSGSLLGLLLA

SEQ ID NO: 122316 - protein, 192 aa, Oryza sativa
  Clone ID: PAT_MRT4530_25255C.1.pep
IATPIAQVVGSSSSSGVGGRKVLSAGGLHQIYHHGGTVPGSSDPLGPPSDEIYHHGGTVPGPSDPLGPPSDEIYRHGGGHHTGPSDPIDPPPSDEIYNRGGHHTAPGPSDPIDPIGPPPSDEIYNHGGHHTAPGPSNPIDPIGPPPSDEIYNRGGHHTAPGPSNPIDPIGPPPSDEIYNRGGHHMLQAQVTP

SEQ ID NO: 122317 - protein, 134 aa, Oryza sativa
  unsure (1)..(134): unsure at all Xaa locations
  Clone ID: PAT_MRT4530_25256C.1.pep
GDWXXREATHXAXWTXWXPXPXSRCRXXXXPXLFXSLTAAPNXXLSPRCIXRGNRXXXKVXPXTXGXPXFPXCVXKLLGPSCXXPXIXFXEXXQTXCLEKPSXXSXFEETSKKFKASFFXTXXPXXXTKKNHRK

SEQ ID NO: 122318 - protein, 276 aa, Oryza sativa
  Clone ID: PAT_MRT4530_25257C.1.pep
MASMSYFIVAMLISNCLGFIATPIAQVVGSSSSSGVGGRKVLSAGGLHQIYHHGGTVPGSSDPLGPPSDEIYHHGGTVPGPSDPLGPPSDEIYRHGGGHHTTPGPSDPIGHPPSDEIYGHGGGHHTAPGPSDPIDPPPSDEIYNRGGHHTAPGPSDPIDPIGPPPSDEIYNHGGHHTAPGPSNPIDPIGPPPSDEIYNRGGHHTAPGPSNPIDPIGPPPSDEIYNRGGHHTTPGPSDPIDPIGPPPNDEIYNRGGHHTAPGPSNPIDPIGPPPSDI

SEQ ID NO: 122319 - protein, 237 aa, Oryza sativa
  Clone ID: PAT_MRT4530_25258C.1.pep
MRLLRTQTQHTQTPTSTFRTSSEVARRTPQNESTRKWSAPKMKWSEQKIELFSEADHPKTAVTLRRYPIVVEPTIRNIKVARVLIDSGNSINLLFASTIDAMGIPRSELTPTDQPFHGITPQSSSKPLGKIMLPVTFGRTALVKFMAASHYAYQVLKMPGWKGTITIQGNAKLAIQCDKRSLNMVKHTPNPPATAEPPKKVSKTNKMPKPDGATKIVPLSSANPDKTVKIRASLDEK

SEQ ID NO: 122320 - protein, 43 aa, Oryza sativa
  Clone ID: PAT_MRT4530_25259C.1.pep
GSGRPSPRGRNGSGPTPRGDRGRGGHVTLGPSGHVGDRGYPSL

SEQ ID NO: 122321 - protein, 107 aa, Oryza sativa
  Clone ID: PAT_MRT4530_2525C.1.pep
MGLLLPKKGNMLFTMRASLQPEVTSDKQSTRLLLRSFALPVDARFNLHLMASDFLAILALKPGMDLTGTDIPTPGVSTLAPARDKSQEALIIPTRRGEACDRPPVAT

SEQ ID NO: 122322 - protein, 71 aa, Oryza sativa
  Clone ID: PAT_MRT4530_25260C.1.pep
MHREFGLDQDLDTVDPSPIGTDEHEGSRLLIELTGFSQAVTSKCLLKSRFLYAGTGTAYENKTLACYEKPV

SEQ ID NO: 122323 - protein, 110 aa, Oryza sativa
  unsure (1)..(110): unsure at all Xaa locations
  Clone ID: PAT_MRT4530_25261C.1.pep
MSVSFPGRGRRGWAAEQASSDSGGGHGRRRPPTGAPPVRVKXRAARRRPGRRHRRRHPCRRRRPPGRPPRAPGRHHRAPLHRARRPPAAAPQAADASARRGGGGGERGQR

SEQ ID NO: 122324 - protein, 50 aa, Oryza sativa
  Clone ID: PAT_MRT4530_25262C.1.pep
SNGNIHHLHVGAGAPTSSNASLPQFLASQGPHSPHSTVCHSHSVNPCPSA

SEQ ID NO: 122325 - protein, 173 aa, Oryza sativa
  Clone ID: PAT_MRT4530_25263C.1.pep
FEVQNHEAKLGCPGCFFRFGEICVCWSFLRGGPLPPIKGDVVPFLPGALQCGGPLFQGWAPCPGGWALAHCGSRVPGNCKSPPWDRKAPPGDLAAFFGVTLPFGRVPLFGGPPRSLMVLNRSLPEGAPVLGYFHPLGWGVKSQIKGARSRSVKFWSLLINKRSLSFLSKKKPL

SEQ ID NO: 122326 - protein, 144 aa, Oryza sativa
  unsure (1)..(144): unsure at all Xaa locations
  Clone ID: PAT_MRT4530_25264C.1.pep
ATRTVYYGYLKGWDHMLAQLHTGHPEFGDKDGGILAMHIDDLRALLPLWLXRPXQVRQDKSHWSTNITGDIYGMGCIREMYGYSYWRCISXLPHKINDDILIYPGYTSRIGIDPLILHYGLPLKGGNWSFTNLXHHEDGLAYDC

SEQ ID NO: 122327 - protein, 782 aa, Oryza sativa
  unsure (1)..(782): unsure at all Xaa locations
  Clone ID: PAT_MRT4530_25265C.1.pep
MAALSGKIIQNAFLAQHRPQARHSTRYPSDFCALDTRSVHSFQECRLRLAGTSAKWLNTISTAWISSSKQAYISCNAAQGSSVVPSSAKVDFLKLQNGSDIRGVAVGGVEGEPVNLTEPVTEAIASAFAAWLLNKKKADGWRRLRISVGHDSRISAHKLQDAVTLGITTAGHDVLQFGLASTPAMFNSTLTEDEINHCPVDGAIMITASHLPYNRNGLKFFTSAGGLNKADIKDILERASRIYEDSSHGSTQELEQASKGEVSNVDYMSIYASDLVKAVRKXKPLEGLHIVVDAGNGAGGFFVDKVLKPLGAITTGSQFLEPDGMFPNHIPNPEDKTAMKAITQAVADNKADLGIIFDTDVDRSAAVDSSGRELNRNRLIALMSAIVLEENTIGEESHLAMETSGHGALKENHWLDDGAYLMVKLLNKLAAARILNPNVGSKVLTDLVEGLEEASVTVEIRLKIDQNHADLKGGSFRDYGEAVLKHLENAISKDEYLCKAPKNYEGVRVSGYGGWFLLRLSLHDPVLPLNIEAPSKDDAIKLGLAVLTALHSVGRSARDAQPDGAAPPRSVAVRAASLLARPPPPTSSMVTSGSELPFVARPPSAASLLAGPPRVASPSQATERRLPPRQAAARRLSSPGRLAPPLLAGPPSAASPCQAAARRLPPPRAAKHRLPPRRATDRRLPPRPAAGPPTAASLLARPPGRRALPPSSPGRRASPLLAWPPRAASLLARPPRAAIPHPDTARHLGDGRSASLSTASAPPLLELEFSQTVSAPSKLGVE

SEQ ID NO: 122328 - protein, 401 aa, Oryza sativa
  Clone ID: PAT_MRT4530_25266C.1.pep
MYGAPVSKDLSLQPAGVRTPPQMSSPGLLRYRSAPSTLLGEVCGDFVLPGGGGGGGQLQLQLQQQRPGSPDHAADTVLARFLAGHGGHDNKPPRPAAHFAPPEDSMASHQQQLMYQSHQQQQQMASAMEGLYRTVSSGGTESTAAAAGNSLLRQSSSPAGFLNHLTMDNGYGNMLRAGMGGGGGGGDPRLKGQLSFSSRQGSVMSQISEMGSEDEELAGGGGSPEAGSNGGGAARGGYGGGYAMGSSAWEEPSPPATSLLPDSSLPSKRPRDDLPRQLSLPAASKNSSKPPSSASAAASPEMAAIEKFLQFQDAVPCKIRAKRGCATHPRSIAERVRRTRISERIRKLQELVPNMEKQTNTADMLDLAVDYIKELQKQVKVLNDSRSSCTCSASKQKHFAG

SEQ ID NO: 122329 - protein, 234 aa, Oryza sativa
  Clone ID: PAT_MRT4530_25267C.1.pep
LHLHRLACLRRRVYIFTIGLPSSSPTGVSAAFGEVRRQRPVGRGRRGRLAAARAGAGGAVVRLPEQSRTTRGGSAAEADADGARLLSGRSRRGRRSGPGHGAAVRRRRDGTACELPGVGTARRLGRRPRRDSRGAAADSGAAMRRRRDGRRRVGGQAVQHAVLVQERDARWRLEKPGLTHRRHSRRRGAAAHGAARPPAVGERPCCWYGGEAAGTASTAAWLPVLPFLVLSFLP

SEQ ID NO: 122330 - protein, 585 aa, Oryza sativa
  Clone ID: PAT_MRT4530_25268C.1.pep
MGVLFSCPVDDETAAVEDAAPVAEQAVLKASLGSGGRLRIEGSLSFKTREQQSLQVETKIPAVTSPRAAPAPMPRELLRTRFADAAAAAAPESPKHEAAAVTLQKVYKSFRTRRRLADCAVLVEQSWWKLLDFALLKRSSVSFFDIEKQESAVSKWARARTRAAKVGKGLSKDDKAQKLALQHWLEAIDPRHRYGHNLHYYYDCWLQCESKEPFFYWLDVGEGKEINLEDRCPRWKLLSQCIKYLGPQEREDYEVVIEDGKFMYKNSREILDTSGGPRDDKWIFVLSTSKNLYVGQKKKGKFQHSSFLAGGATSAAGRLVVEDGTLKAIWPHSGHYRPTEENFQEFQGFLKDNNVDLTDVKMSPTEEDEEFWSRLRSIPSDRCADAADNTEEEMNSSEQTVNCQTPEATETPTEEISSQHIQETINNPSTTLPRVASSEGPATSNAGDNGSSEEGGEDHHRQEEGDEPSSPSSSSSVPREKILERINSKKEAKSYQLGKQLSFKWTTGAGPRIVCVRDYPSELQLRALEQVHLSPRSAAAAAGGRPSSRFASPQRSSSPMARGCSEPLTPREAFRSHLQQGVLIR

SEQ ID NO: 122331 - protein, 993 aa, Oryza sativa
  Clone ID: PAT_MRT4530_25269C.1.pep
MRTRDSTDAAGWTGGPKSLLSLVWLWAGGPADWHRASLHGLDLDVQLSLLLEVGKPHKRSKLTVVDATDARPPYGPLPQVLSTLRLTVRQRQFILGELQQSHHLLSLEKEKIARLERSLQCLNEQISFAQAECVEKDAILAKQAKVAEEAILGWEKAEGEAIAIKTQLDDTLDQKAAIEQRICHLDEALNVAMVERELLIKDTAKLISHEQVKVERLEGDVVEKINIIASLDAENRKLSEMLSMKEKMISELTEAKGVIESNFKNLEVKLESADKLNSSLRYEVCMLQKQLDIRSEERKFNLKSADAAHKQHLENVKKITKLEAECQRLRSMVRKRLPGPAAIAKMRNEVETLGNNAVITRTRRFNSTTSFNSGNLVQNSYDASHESSSLLARLHAMEDENKTMKESLSSKDGELQYSRTMLARTTSKLSQVEAQLEELSRGRVATDLVKCSPTVVENPLSSISEDGCNEDNVSCSSSWASALISELEHFKKGKLTTPSCKSTGVSDLSFMDDFEEIEKLALACDAKPTESYDSRRESRESSGKELVTVDGPIETSDQLRQHKIEKAVLKLIELIEGVVQRSSKDYSSTVVLSGGSEGDRSNTLTGYVARAFLWKTSELTSVLQNFVLGCNELLYGSTDVERFVLEINITLDWIISHCFSLQDVSDMRETIIKNLEINSSSGLEVVPVIKHTGIQTTDGMCEPRTPNKMQMAIVSVSSLMDIGYKADDDSEIFRNKIPVSKCEESEGKASSLRAELNALKETGKMMAHGVDGESTINELGKPSNSDINKGNQHGVSSLESKLQLERFPAKEGPKCVSRNEDQHVQMRLEISTASEKLIECQETILNLGKQLKALASPKDAILFDKVVHTKIQSERKPRSQSLNEMLAMDDGGFDYLSSPKTKEIICAELRSRHERSCSVDNGGDDSVTCSSHPMPVAPPMRPYDVNGTCKDEAALKVVALMPSKQKGNTNLLKRILAGRRKEAMTRPNVVATA

SEQ ID NO: 122332 - protein, 106 aa, Oryza sativa
  Clone ID: PAT_MRT4530_2526C.1.pep
MATFELYRRSTIGMCLTETLDEMVSSGTLSPELAIQVLVQFDKSMTEALENQVKSKVSIKGHLHTYRFCDNVWTFILTEASFKNEETTEQVGKVKIVACDSKLLSQ

SEQ ID NO: 122333 - protein, 36 aa, Oryza sativa
  Clone ID: PAT_MRT4530_25270C.1.pep
IKMMPFGAGRRICPCLALALLRLDVFRRRPPLVVLV

SEQ ID NO: 122334 - protein, 502 aa, Oryza sativa
  unsure (1)..(502): unsure at all Xaa locations
  Clone ID: PAT_MRT4530_25271C.1.pep
GNNIAEFEGVLLVMRKAKALGAQLLIIKTDSKLVASHFSKTIEAKEETMAKYLQEARLNEKHFLGITVKAIAREENGEDNELAKAAAAGQPLEYSFFDVVTXPSYERKEFTCIQKVANWREPILKYLVSEQLPEKEEEARXLQLMSRKYKVIEGQLYKSGVTTPLLKCVTREEGMRIVVEIHEGLCGAHQAPWSVASKVIRQXIYWLTIMKDTEKYIKTCKACHKFGPTSKALPKELQQIPPVWPFYRWXLLLVIMAIEYISRXIEAEAVARITSAEVQKFVWKNIICRFGVPREIACDNGKXFESGKFKDMCKSLXFASVGHPQTNGTEERANGKIMEAIKKRVEGSAMGKWVEDLLSVLWALRTMVVRSTGMTTFILVYGDKAMRPSEVGANSPRVIFHQQDEXREITLEMLDEIRVEALYKMTMYTEGTKNYYNKRVKTRKIQVGDLVLKXVVGKLESKWEGPFIVKKRIETSAFNLPYLDGEELKHTWNAISLKKLYV

SEQ ID NO: 122335 - protein, 106 aa, Oryza sativa
  Clone ID: PAT_MRT4530_25272C.1.pep
MAGDLARGVGDDDTGAVLPAGSETRRSIFSWDDKFVKAQALGMTGAAAIRGTTEEKIVKCSIVSGVPGPLFILDKVKVFEDTSGVDNKYTIVQFTGGLCGLNVKIL

SEQ ID NO: 122336 - protein, 60 aa, Oryza sativa
  Clone ID: PAT_MRT4530_25273C.1.pep
MEMCVDEGGFELSTGYTHRQTERLEIMTCYPLQTDLNRIRDLTGNWTRIFMTISFNVYIV

SEQ ID NO: 122337 - protein, 80 aa, Oryza sativa
  Clone ID: PAT_MRT4530_25274C.1.pep
NFNLEGPPNFFFFRKGFWVGPPNFFWEPCLNYLKRWLFFPFSPPPSFFWPPPPKKRFFPFSPIKKGLWVVLDWEGAVIFP

SEQ ID NO: 122338 - protein, 288 aa, Oryza sativa
  Clone ID: PAT_MRT4530_25275C.1.pep
MARARRGRQNAAASPPSLALQLQVASLVIVFVFAFSSAITPTRADHVEGHMSHEMFGYENDATGPAKWGSLHKEWAVCGDGKKQSPIDITTVEPQKVKEPLMQAYKAGATTIQNRGHDYMLKWKDGNSKLTVQGKEYTLKQVHWHEPSEHTINGTRFDAEMHMVHEDPSMARAVVSVLLSTKAGQPNAVLTEMAPHFKNLAGKEKAEEEVKEPVDPSTWVDKTSGYYRYDGSLTTPPCTEGVIWTIMSKIGDASKEQIDLLKTVATTVEPNARPAQKLNDRIVRYFEV

SEQ ID NO: 122339 - protein, 56 aa, Oryza sativa
  Clone ID: PAT_MRT4530_25276C.1.pep
PRGFQTGIFKFLHDQPHVDQQTNKAPKIEGIELKKKNWGGGGKLFRRACLSLNKEN

SEQ ID NO: 122340 - protein, 88 aa, Oryza sativa
  Clone ID: PAT_MRT4530_25277C.1.pep
QRSTKYVPSWYHQSVFLFSRSFRNSIASGRSYIFSKCLYVHQFYGFFLFKFLILFFSCSMQKCSLHLFTCEAFFSGQLVVEIPNMNII

SEQ ID NO: 122341 - protein, 90 aa, Oryza sativa
  Clone ID: PAT_MRT4530_25278C.1.pep
GKCELLTARSTCHLFCFGVDHLHRSGGMGPTLSNPRGTSGLFLSGISLCTPPGLNQEQMSPRYKDKKCRCSKKWHWTISVVLDSATDSLT

SEQ ID NO: 122342 - protein, 400 aa, Oryza sativa
  Clone ID: PAT_MRT4530_25279C.1.pep
SWPPRPARSGPAGLFTHSTPSLSRSLRSQGEEAAAAAAAAVRDEIVESGTPPPSFASHEKEGRKMSSESEAAPGTGKLVCVTGASGYIASWLVRLLLARGYTVRATIRDTSDPKKTLHLRALDGANERLHLFEANLLEEGSFDAAVNGCDCVFHTASPFYHNVKDPKAELLDPAVKGTLNVLGSCKKASIRRVIVTSSMAAVAYNGKPRTPDVVVDETWFSVPEICEKHQQWYVLSKTLAEEAAWKFSKDNGFEIVTVNPAMVIGPLLQPSLNTSAEAILKLINGSSSTYPNFSFGWINVKDVALAHILAYEVPSANGRYCMVERVAHYSELVQIIREMYPNIPLPDKCADDKPSVPIYQVSKEKIKSLGLELTPLHTSIKETIESLKEKGFVTFDSSNL

SEQ ID NO: 122343 - protein, 106 aa, Oryza sativa; identical to SEQ ID NO: 122332
  Clone ID: PAT_MRT4530_2527C.1.pep

SEQ ID NO: 122344 - protein, 71 aa, Oryza sativa
  unsure (1)..(71): unsure at all Xaa locations
  Clone ID: PAT_MRT4530_25280C.1.pep
LAWLIISSETAPACVSDQHPVVVSAEMLRDVVMDAVSVSMAXSGWFVKAAGGAHANAGSIYTMKLNPSAGV

SEQ ID NO: 122345 - protein, 250 aa, Oryza sativa
  Clone ID: PAT_MRT4530_25281C.1.pep
MAATTTIPARPLLAAVLAALLLSAASAADSKNNPADQLVALINSNRTASKASTLDDNQGLGCIALQYIKAYEGQCNQVGESKKPPETSFAETFAPNCGVQAATLTKITGRLLACQSNYATPDQAFNFLVNDAKSIQVLHSKNHTEVGAAVSGTSGRGPYFWCVLFSSGKPTTSFKVDGGVPKSVRPGCFSGNNDDCMGANAAVSIGAGTWETGGCTTFLRGLFFRFVSLSRNVLLHHSFARLGPGLEFCF

SEQ ID NO: 122346 - protein, 96 aa, Oryza sativa
  unsure (1)..(96): unsure at all Xaa locations
  Clone ID: PAT_MRT4530_25282C.1.pep
RPGIPAVMCHPTPPPVVEAAPRSCSAALQRHAPXPPTPPHPHPTLSPPPLPPSPSSDPERRRANEMRELAGNPWTWSGFSLQVDQRSPSSPLRPCA

SEQ ID NO: 122347 - protein, 70 aa, Oryza sativa
  unsure (1)..(70): unsure at all Xaa locations
  Clone ID: PAT_MRT4530_25283C.1.pep
ATRRRREGTATRPRASQRRXAXXRNXKXKTXTXKRXXKERRPHAKEDRKEAGKATDRKEKGADPHXPKQQ

SEQ ID NO: 122348 - protein, 93 aa, Oryza sativa
  unsure (1)..(93): unsure at all Xaa locations
  Clone ID: PAT_MRT4530_25284C.1.pep
HMQAGAPPCRPVLSLGAVLRAGVSGEGGVRALYRGLPAMALGAGPAHAVYFSVYEFAKSRFFERLGPNNFAVHALSGVXFATIVSDSVFTLMD

SEQ ID NO: 122349 - protein, 190 aa, Oryza sativa
  Clone ID: PAT_MRT4530_25285C.1.pep
GLYSAASAYDMFFVSRTRSSSAELIWQTRAPSRVKFFMWLAMKGRCLTADNLQKRGWPHGDSCALCNNEEESCQHLLVDCQFTNRVWRMLRSWLGVSFSLPGDEGEHLTEWWRQVRQLFQPSYRPAFDTLCMLVCWMLWKERNLRIFEHKDCTAAQVYRAIRDEVLIWREAGEQPLVQLKIRSTGGITLK

SEQ ID NO: 122350 - protein, 167 aa, Oryza sativa
  Clone ID: PAT_MRT4530_25286C.1.pep
MQRRRRRQGGMRTHSLRRSHLFQAAAAHGRAPPPPADGAAWWPGGEALEGDLKWPNGLSFFTALTARTEDVKLLFGDGGGGADDGSKMAAAAAAAQDVGHGGVENVEEYLSLESTKFKRSFTLPARMSSSTTSTPRRCVNGTGATAAAAAAKGWSTGAHTRAASTRT

SEQ ID NO: 122351 - protein, 215 aa, Oryza sativa
  Clone ID: PAT_MRT4530_25287C.1.pep
MEGSSSSSKHFILVHGLCHGAWCWYKVVTMLRSEGHRVTALDLAASGVHPARVDEVHSFEEYSQPLLDAVAEAPAGERLILVGHSFGGLSIALAMERFPEKIAVAVFVAAAVPCVGKRIIPEDLTLAKLLVRPTSQFVDDPTMKDDRLLTSANYGSVKRVCLMAMEDDLKEVHRYMITLSPGVEVEEIAGADHAVMCSRPRELSDLLAKIGSKYD

SEQ ID NO: 122352 - protein, 83 aa, Oryza sativa
  Clone ID: PAT_MRT4530_25288C.1.pep
LGDWVVLRGSRLLCRHGGRLPCPAIGKPPTVEGKPPALEGRPPWPLCATMGRPPTVRYTERCCTLAGDGQRMRKEEKRRMGET

SEQ ID NO: 122353 - protein, 63 aa, Oryza sativa
  Clone ID: PAT_MRT4530_25289C.1.pep
RSSPATEPTTTTIPCSYRAATPTPRPSPCPTTTNSASTALAPPPPPKGPSSSPRRRSHRSSDD

SEQ ID NO: 122354 - protein, 64 aa, Oryza sativa
  Clone ID: PAT_MRT4530_2528C.1.pep
MACDHELWWRPAGKPRRQYNVWWRPAQSPDLAGLPSPGGPPPPSVQRMGKVAASGSIGAIVNRH

SEQ ID NO: 122355 - protein, 99 aa, Oryza sativa
  Clone ID: PAT_MRT4530_25290C.1.pep
MAITEKCVIQMMEKELMSEIKVMDMVWNCKFFGTPLLFMDIMVIDDCSRFRIGCLPGNLILTCFSQGAFVDPRKHREIQKVKFERTESYGAYEHQTLVS

SEQ ID NO: 122356 - protein, 132 aa, Oryza sativa
  Clone ID: PAT_MRT4530_25291C.1.pep
DLCLHILINHSDSNTNQLADNPSYMNYNHRIPHGVSLDQQMHLEKSMSKSNSLASTQCGILTRRGNKNQGLDQLLEQSSMTIMSMNNNGVPKNLQFHTISMTLISLISSFSIICITHFSFQEKTRADVNKHC

SEQ ID NO: 122357 - protein, 61 aa, Oryza sativa
  Clone ID: PAT_MRT4530_25292C.1.pep
IPGLQAGTYRWMAPEVQLCCWSKVIQFQGCLILLLFLKSRKQNLDAYHNIIYCTAKVNSSE

SEQ ID NO: 122358 - protein, 406 aa, Oryza sativa
  unsure (1)..(406): unsure at all Xaa locations
  Clone ID: PAT_MRT4530_25293C.1.pep
MSLHLLLAVSLCVALASSLPWAAASANGNGNGKPLVAAITKDAATSLYTVPIKDGRPLVLDLAGALVWMSCAAAHXTLECHHHFCMHAHSYHPPGCPHNGYGRADVEDPFRXATADLTRTALAADATNGSNPLYPVTFPAVASCAPGSLLASLPAGAVGVAGLGRSDLALHAQVAATQNVAKKFALCLPSVAVFGGGPFVLIFPYSRPDIMQKLSYTALRRSPELAGGNGGGYYITAKSIEVNHHQVPLPNHGAPLVVQLSSMVPYTELRPDVYGPFVKAWDEILQWPKKVAPPVAPFELCYESRTIGSNRLGYAVPDININLEDGAAWYIFGGNSLVQVDDATACFAFVEMRPEKVGYGPAVVIGGHQMEHNLVVFDEEKQQLGFSGLLFGLQTTCSNFNFTVAA

SEQ ID NO: 122359 - protein, 44 aa, Oryza sativa
  Clone ID: PAT_MRT4530_25294C.1.pep
LIHADGIGVHLLGVLKVRIVHQLEHAVLGMVVLHDAVQLNGDNL

SEQ ID NO: 122360 - protein, 42 aa, Oryza sativa
  Clone ID: PAT_MRT4530_25295C.1.pep
MMVFYRRKASCMMSHSNTALRSPLLTYRGPDLLENHLHFHNS

SEQ ID NO: 122361 - protein, 143 aa, Oryza sativa
  Clone ID: PAT_MRT4530_25296C.1.pep
MSRRCYRSIEIENGEGIAEGATVQSPHRSTRRQSRGRGGGFNVGALQNGGLERVRPDLAAAGVVRGQRKGGSVDGAASGDWGKKRKTKERGATEKCVPDRRRVTASAWWTGRRVAAARRNEAARLRRGGGGGGCSCCVPVNRR

SEQ ID NO: 122362 - protein, 464 aa, Oryza sativa
  Clone ID: PAT_MRT4530_25297C.1.pep
MSPSPDLARILPRVLIVSRRTVRKNKFVDFVGEYHLDLIVGYGAVPVIVPRVAGVHTLLDSFEPIHGVLLCEGEDVDPSLYGGGGAGSGGLSAEQLDAVRSLHPSDAAIDHEKDSIELRLARRCLERNIPFLGICRGSQVLNVACGGTLYQDVDHELPAAAAAVRHINYDNYDGHRHPVRVLPGTPLHEWFAESLDGEDSRLTVNSYHHQGVRRLAERFVPMAFAPDGLVEGFYDPDAYNPGEGKFIMGLQFHPERMRKAGSDEFDYPGCPMAYQAFVRAVVAYQEKLAAAAAAMPASPKLNQEMEKQRKVLVRSFSLAKNLYVSGAEAGTPRPAEQRDLDAGAEFLEVKTQPNHRTSTGAHGCQPPDFKANRRGVVCVVQQSNTAALSVQQEKRLKQMGATVRNASGYINRLKLNEEREAAARALMAKMSIDQLSDLASFYHIMGTICSEVLDRKLHSAAPAP

SEQ ID NO: 122363 - protein, 578 aa, Oryza sativa
  Clone ID: PAT_MRT4530_25298C.1.pep
MTEQLYTVASDSETTGEDKSQMSFPDVAIGIDIGTSNCSVAVWTGHQVELLKNTRNQKGMRSYVMFKDDSLSAGVTGGATREHGHEERDILSGSAIFNMKRLIGRMDTDEVVQASKSLPFLVQTLGIGVRPFIAALVNNMWRSTTPEEVLAIFLLELKALVEMHLKHPVRNAVLTIPVAFSRFQQTRIERACAMAGLHVLRLMPEPTAIALLYAQQQQQLLHDNMGSGIEKIALIFNMGAGYCDAAVAATAGGVSQIRALSGSTVGGEDILQNVMRHLMPDFDSLYAGQTMDRIKSIGLLRMATQDAIHKLATQEHVEINVDLGAGHKVSKILDRGEFEKVNQSIFEKCEGIIKQCLADAKLTPEDINDVILVGGCSRIPKIRSVVLGLCKKDDSYSGIDPLEAAVSGAALEGAIASGVSDPSGSLDLLTIQATPMNLGIRADGGNFAAIIPRNTAVPARRDMLFTTTHDNQTEALIAVYEGEGNQAEDNHLLGYFKITGIPAAAKGTVEINVCMDIDAGNVLRVFAGVVKPQGQAVPPFIEVRMPTLDDGHGWCGQALAKMYGSTLDLATIPKKLHP

SEQ ID NO: 122364 - protein, 914 aa, Oryza sativa
  Clone ID: PAT_MRT4530_25299C.1.pep
METGKGMSPQYAVAPESGCGDTAPPDEVSSPEQKAAAASTSNTEGRVCPHFDPFQDGVLKFISELRSYSYDCAPRCDHYLCENKVEKSSILVCIDCDLHFCIGDGTMNKPQGHARWHADLEEHCVGALLGEPETLYFFICERLLDLDVSNMQRGDFSCGKEEIDRIESDVSSSKNAVVCHHHSFDTENIVIIKDFVESEKGDPMCDNETCLTTGEHHMMVCSECKGYFCIEPATKAKPQGHIREHALLQEHWVAVWHNDLYVGYCFECEDSLVIGGEEGKEGLAVNAEAGSHASGSSDGHGCVIRGISNQGNTCLNALLRCLLVLGKLRARMFGPNAPLGILGTILRGLFVDANSVRHAPGPLNRALLLACVRRFDSWLIGTSIHDSHELLCCLRNRLNEEDKIIRPPNKQQGAPSSVAPTVIDSIFGSELSVTTSCKRCSFKSYSCDVFYDLSVPLPPKGAPSNSVASPPQNERPISQCKICVLSEGGDSQIPASELEDTVMVKTSDPLEVDSNKLEQIVQSKDAVHCPLQSPTMKENTWIASVSDVEKTDTAVLDNAFSGLKVSTEAKMVISSAEINSENKGKARSLDIIYDEAEDINSLVSIEECLKLHIESEMIEWTCENCSKVAQKASTISGKDGEQMMASTNVNRTVYGDQAEQSDRKTCQRELSSDLIRLSVECSSSSSQPHGSGVQNHDMPAVDIKTCGETSGMSSVEKDSSSCSIANKKPECLGGAQEDASSCRLTEKQANLLSVQCQNISIEDQERGNQVNLGHNAHQLEENQYDQQDRNEGAILTCLISKLPPVLVIQLNRSLGPLKVSGHVSFKEILDVEPFMDPSSEDKFSSRYRLVGVIENRGLSIHIGQCVAYVRANNQQQGSGSSSWYCATDDDIKEISLEEVLKCEAYLLFYERMGC

SEQ ID NO: 122365 - protein, 64 aa, Oryza sativa
  Clone ID: PAT_MRT4530_2529C.1.pep
AVVQDCTQGKFNWGAHTRPLIGEPRSIHRKLSASMITKKSWTFELHIHASANSQRECYYTPVHT

SEQ ID NO: 122366 - protein, 755 aa, Oryza sativa
  unsure (1)..(755): unsure at all Xaa locations
  Clone ID: PAT_MRT4530_252C.1.pep
TAFVFHRCCRWRHHFHHRPPTSPSTGVLAYTVGWRPCLHRPACXAAADRCLCLHDWPIMLPLLGIYRFXTTGRLVHRQLVFSPARLAYYTAVVGRLRLYRPAVSSAADXCLCLHGXAIMWSLMGVYIFTDRPPHLPPTGVSAYTASLLCHRCWASMTSPPACLRRRRLVSPPTRLADYATIVGRLRLHCRLASVAADWCLRLHGWPPXLLGVYDFTAGLPPSPPTGDLAYTVGWSHHRCWASTPSXPACLRRRRLVSPPTRLVYYAAIVGHLFTYTVEHHRRLAFAVADWCLRQHGWPIMPLLLGVHAFTDRLPRPSPAGVFAYTVGWSHHRCWASTSSPXLACLCHHRLVSPPAWLAYHAAVVGRLHLHRPAASSAADWCFRXYGWLVTPPLLGVYVFTAGLPSXADWCLRLHSWPIMPPLMGIYIFTAGSPLSSPTRVSTNTVGWSHHRCWASTSSPTGLPSPPLIGVSACTAGLLCRRXDVYIFLDQPSRMTPTGAIVFTAGHVAATANRRHHLQRKLSTSAADCCMSSSSLTGVNVITGLPLSPLMVSSLSRLAYFAAVQGRLRFRHHSTSSSDFIFIVFGTGKLYCPYFANFATSPTTTLTRASTSRHSLPNLTSCXSTTSGSSIFKTSTRTSSTHIFTQAMATRRQEATVLDSMFSCFPTNQRVGGYTNTILSKFNKQKQSIXSANESTPRVIIFVFTSEQKFYFSNFNYFTGNFGFSMPPQSTPNFSSXSSLRFNLHVQEFRVINQSA

SEQ ID NO: 122367 - protein, 316 aa, Oryza sativa
  Clone ID: PAT_MRT4530_25300C.1.pep
MAMKAPASSNSYLLLAPLALLLLAAVVFLLPSLNGARVGSDGGLGVLCARRSAGAEDYTVAAPAAPKEEEKPELSLLVGVLTMPKRYERRDIVRLAYALQPAAARARVDVRFVFCRVADPVDAQLVALEAARHGDVVVLGGCEENMNHGKTHAYLSSVPRLFASSPYDYVMKTDDDTYLRVAALVDELRHKPRDDVYLGYGYAMGGQPMPFMHGMGYVVSWDVATWVSTNEDILGYNDTHGPEDLLVGKWLNIGRRGKNRYSLRPRMYDLNWDMDNFRPDTVLVHMLKDNRRWAAAFRYFNVTAGLQPSNLYHLSP

SEQ ID NO: 122368 - protein, 334 aa, Oryza sativa
  Clone ID: PAT_MRT4530_25301C.1.pep
MKTASSSSSSSHGFPATASLCTPYLLLVPLGLLAVVLVVPSLGSSHVRSDGLGVLCHAGPSTADGYLVTPGGDAASAAAAAAETKAVVRPELRLLVGVLTTPKRYERRNIVRLAYALQPAVPPGVAQVDVRFVFCRVADPVDAQLVVLEAARHGDILVLNCTENMNDGKTHEYLSSVPRMFASSPYDYVMKTDDDTYLRVAALVDELRHKPRDDVYLGYGFAVGDDPMQFMHGMGYVVSWDVATWVSTNEDILRYNDTHGPEDLLVGKWLNIGRRGKNRYSLRPRMYDLNWDMDNFRPDTVLVHMLKDNRRWAAAFRYFNVTAGLQPSNLYHFP

SEQ ID NO: 122369 - protein, 134 aa, Oryza sativa
  Clone ID: PAT_MRT4530_25302C.1.pep
YCAKRHYSRYLLSKWHQQLLPSRLLPHMLTELRLVLAMMCQPCRLGYNRGCSEALRITFVTARPLIANIANYSSSPLLSRRPPPDDSGGDAAAVLLLLTSPPPPERAPAKPCVRKDDGGRASFHLHALDGWGMP

SEQ ID NO: 122370 - protein, 165 aa, Oryza sativa
  unsure (1)..(165): unsure at all Xaa locations
  Clone ID: PAT_MRT4530_25303C.1.pep
MELGRPGCPVDRLPDSPWHERGLPTTLRGVGVKPEVWCDWLEGVMRRILSRPLSGMTCSGGWLGLLQCGVALDSGWLILINYYNCFTAFNYCFXMPALLQXTSSLLWLYLASYLLFRYDLLSTVGSTQSCSLSPPPHTRVEILLSWSCLEEVGFVASVHLRNSGS

SEQ ID NO: 122371 - protein, 211 aa, Oryza sativa
  Clone ID: PAT_MRT4530_25304C.1.pep
MSSRDAAATFHVYQPVQIPTATVAPAAAVSAAPAEAVAQLVPAPSKKAAGAAGGKDRHSKVNGRGRRVRMPIVCAARVFQLTRELGLKSDGQTIEWLLRQAEPSILAATGTGTTPAAFVSSSAPSTSSSHQHTLLGKRQRQESAAADAVSVAGAASAFWAALPAPGRPDAWGFSPLDAQPTYVPMAQAHHHHLNLLAALSGAARRAEEESR

SEQ ID NO: 122372 - protein, 60 aa, Oryza sativa
  unsure (1)..(60): unsure at all Xaa locations
  Clone ID: PAT_MRT4530_25305C.1.pep
SRSVTSHGSDPXITPSPFPLLLYFVHFHYSSYILSHFSSFLSILLIKQVPTIFMVFFPYL

SEQ ID NO: 122373 - protein, 92 aa, Oryza sativa
  unsure (1)..(92): unsure at all Xaa locations
  Clone ID: PAT_MRT4530_25306C.1.pep
MLTNLYSFSFGLRRLRERRRRPRPPRRRDSPPPPPPPPXQPPXWPPSWPPTSSSASPSAAARGRDGYSVIRFGVGGENLAWGSALPPSIPTY

SEQ ID NO: 122374 - protein, 175 aa, Oryza sativa
  unsure (1)..(175): unsure at all Xaa locations
  Clone ID: PAT_MRT4530_25307C.1.pep
MAHLRLLAAIAPTSTTCRRKELRLLQPSSSNDHCPYVNPEPXFLLVPTIQAINAVPPKTTRILHILLVYTILLGVLLLANKXPINMLGKLMSYVAYKNINLNSVTELLYXRYSILLNMHRIAVXDFICIEVGLYTYDVFCIDDVVHQIMTVVPHCMDAMXFLWPFKLXAPLGGLK

SEQ ID NO: 122375 - protein, 104 aa, Oryza sativa
  Clone ID: PAT_MRT4530_25308C.1.pep
MAILSQGSAGSRCPNPSRARRAWKAKEDHHPRGGIAGIDDRIQYLRTINNNNQVCIEVIVDNLQTKVMRLPGFPPMRVFTKYGSELRVSLEATADHVPIKPHDR

SEQ ID NO: 122376 - protein, 66 aa, Oryza sativa
  Clone ID: PAT_MRT4530_25309C.1.pep
WKISIPWLEAQYSFQGEKMIQCASVLFNAQHSNRAGSSSHATLATLSDNSRFQIAAGNVIINRRGF

SEQ ID NO: 122377 - protein, 87 aa, Oryza sativa
  Clone ID: PAT_MRT4530_2530C.1.pep
MKEAATTATTKEAVTTATTTILCVLSFTDSLSYLGFHVRSVDKRQISRNYLYWGAAPSHPILSPLPDLSVGRRMGNGRTDPPRRWRG

SEQ ID NO: 122378 - protein, 88 aa, Oryza sativa
  unsure (1)..(88): unsure at all Xaa locations
  Clone ID: PAT_MRT4530_25310C.1.pep
MESGKHHACSSCDTKTTTTNAGAPVWNDNQALTAGPRGHRLLEDYQLIQKVMHLVRXAFGERVVHTSGAFAKGYXESTHNVTDNTCTG

SEQ ID NO: 122379 - protein, 80 aa, Oryza sativa
  Clone ID: PAT_MRT4530_25311C.1.pep
MMRKQSSSSTSRATAAVVSLCKVLLMVIGLICALHTATVEGGRALAAAAVGGTGVDLPPTAPSYSSKCRYPYKCPPAGSP

SEQ ID NO: 122380 - protein, 1440 aa, Oryza sativa
  Clone ID: PAT_MRT4530_25312C.1.pep
MAYGGDGIGCCSLLHYAESPMTMARRWLRCWIGDSLLAFSLGGGKDLPPSSTARKDEPSSSCACAERPMFIGGSSFSIEAIPYSPSVRFSYSILKDYMEILKATYPERSYYGGPDYQCNHCGALFWYQERVVSQSSHRAKRIAYNLCCRGGKISLPVHRPFPPILQSLIRFDGGACSSSFMRLIRQYNSLFAFTSLGANIDRSINTGHGPYVFRINGVVHHRIGSLLPSPGRRPEYAQLYIYDTTNKLQNRLNIFDHADSAVDVPDPAIVQELISMLNQCNPLVQQFRLARDKLLSPSAPEIAIKLIGSGHSQGDRYCLPTASELAALIVPGTSSEISKFDVVVQKHSSELSQLSPIHPALMSLQYPLLFPYGDVGFRTGIKLREVDDHPPGSRDEVSILEYYRLSDQLAVNAFSCIETSRLNFHTLSQKKLRSETHQGISDAVARGDTNGKDVGIKAIRFELGQKPNDRSDMVTRVYHMKLDEYITYIKIGQAFGPIQADPSPAFIDSLISAEIPDIGIDKFGFGLVDEFMIHGPCGEHNPHSPCMKDGRCSKGYPKQFCDVTSIDDDGYPIYRRRNNGRYVVKNGVKLDNRWVVPYNLALLKKFQGHINVEWCNKTYLIKYLFKYVNKGSDCTAFAFKQKDSEEANTSSANNGGIDEVMQYIKSRYLSTCESYWRLYGFEIHGRTPSVERLVVHLPNMQFVTYHEEADLEEVIEDPDSSRTMLTEWFVANQRHIFARDLTYCEFPSKFNWDSDKKVWTKRKRGTKIGRLRHIHPSAGEPFYLRMLLMVARGCMTFEDVRTYQGVTYSTYREACQARGLIGDDAEWDHLFEEAVIWATAYQLRNLFMTVLAHCDVGDVRVLFDKYWKYMADDFAYKLTKALGVQRRAIPDVMLQNTLLKELDGIFSNNGLSISSFDLPTPAECSDTSAGNMLILEELSFNQGSLHEESMSMYASLNDDQKKIYDKVFDRLAHKEKCIFFISGHGGTGKTFLWNAIMARLRSRGEVVLAVASSGVAALLMPGGRTTHSRFRIPIDIHDQSMCGVRRGTILEDLIKKASLIIWDEAPMTNKLCFEALDRTLRDIQSADDASNVHKPFGGKAILLGGDFRQVLPVIQQGTRADVVAASLVALWNHVEVLHLTINMRLHNPSLSQQAKDELAEFAKWVLDIGEGRVPMDRRQGEVEKTWIQIPEELLLTPHGDKITAIIDAVYPYFQTNYDCIPYLAQRAIVCPVNAVVDEVNDMMLAKVPGEAKDYLSSDTIANTLEKAADFDLLYPIEFLNSISINNFPEHHISLKIGSAVVLLRNINQSLGLCNGTRLLVTRLGDFIFEGKIMTGTNIGQLVCIPRIVLSGNSPKWPFTLQRRQFPIRLCYAMTINKCQGQTLGNVGVYLKNPVFTHGQLYVAVSRATSKEGLKLLIEDDDGNPCSTTKNIVYNEILSLL

SEQ ID NO: 122381 - protein, 749 aa, Oryza sativa
  Clone ID: PAT_MRT4530_25313C.1.pep
MAYSGDGIGCCSLLHYAESPMTMARRWLHCWIGDSLLAFSLGGGSCLPRLLLAKDVFCSLMLPRGSLVLRPWSSSSVRPYAMVYLCLNLPPGFVLHGFPPCVHGIYRALCHCRMEWSRSLCICPRKRAYDEPSSSCACDERPMFTGGSSFSIEAIMYSPSVRFSYSIPKDYMEILKANIDMSINTGHGPYVFRINGVVHHRIGSLLPAPGRRPEYAQLYIYDTTNELQNRLNIFDHADSAADVPDPAIVQELISMLDQCNPLVQQFRIARDKLLSPSAPEIAIKLIGSGHSQGDRYCLPTASKLAALIVPGTSSEISKFDVVVQKHSGELSQLSPIHPALMSLQYPLLFPYGDVGFRAGIKLREVDDQPPASRDEASMLEYYRGDTNGKDVGIKVILPSSFIGGRRYMVQNYHDSMALCGAYGPPHIFSTFTCNPKWPEIAQAIRFELGQKPNDRSDMVTRVYHMKLDEYITYIKNGQAFGPIQAVVYTVEFQKRGLPHSHTLTWLMGQSGDPSPAFIDSLISAEIPDIGTDKFGFGLVDEFMIHGPCGEHNPHSPCMKDALLKKFQGHINVEWCNKTYLIKYLFKYVNKGSDCTAFAFKQKDLEEADTSSANNGGIDEVMQYIKSRYLSTCESYWRLYGFEIHGRTPSVERLVVHMPNMQFVIYHEEVDLEEVIEDPDSSRTMLTEWFVANQRHIFARDLTYCEFPSKFNWDSDKKVWTKRKRGTKIGRLRHIHPSAGEPFYLRMLLM

SEQ ID NO: 122382 - protein, 581 aa, Oryza sativa
  Clone ID: PAT_MRT4530_25314C.1.pep
MGFRWDSGDAKRRPGKIPEELLLTPHGDKITAIIDAVYPDFQTNYDCIPYLAQRAIVCLVNAVVDEVNDMMLAKVPGEAKDYLSSDTIANTLEKAADFDLLYPIEFLNSISINNFPEHHISLKIGSAVVLLRNINQSLGLCNGTRLLVTRLGDFIFEGKIMTGTNIGQLGDMMDAQIPGRRVVQFKPLLKEGAVYYIKYFEVAEARPQYRPVDRLLMAKFTAHTTVTEDTGPPSTFPSYACKILSFDELRARAYKKDIISDAIGIMTAIGPVQTVSYAGVMKAVLNDHITNGRETVVVALWGPHATQFHAENLQQQADNGHVVMLFVGLTVKFRDRQLALQGSTVCRWYPNAPIQETISLISRYRVVIMGIDPSDLANDQAKAAEFTFFGEIGEQLIGRPVLNLVASVHGARDIVPPEIKAIFGRQYVIRTSVSRGSLQRNRVSYQVDSLMLPHPDPSHAICLPSHDTCMGSSGHGSTSANAVEPHAIVLSSTQSMPPSTPFVLPDTKVIAIAHLDKKRKSSMADENLGHGGSSPDEHDRRKPSVVHTLFVDKLPPELPKCDQLYSSNYVFLASSFVIAKM

SEQ ID NO: 122383 - protein, 48 aa, Oryza sativa
  Clone ID: PAT_MRT4530_25315C.1.pep
EALESPNLMPTSFSFDGPLNIHLCKSYDINSLIEVGYLTWWVAVMRAL

SEQ ID NO: 122384 - protein, 1327 aa, Oryza sativa
  unsure (1)..(1327): unsure at all Xaa locations
  Clone ID: PAT_MRT4530_25316C.1.pep
HGPYVFRINGVVHHRIGSLLPAPGRRPEYAQLYIYDTTNELQNRLNIFDHADSAADVPDPAIVQELISMLDQCNPLVQQFRIARDKLLSPSAPEIAIKLXGSGHSQGDRYCLPTASKLAALIVPGTSSEISKFDVVVQKHSGEXSQLSPIHPALMSLQYPLLFPYGDVGFRAGIKLREVDDQPPASRDEASMLEYYRYECHYRKDEPNLFTCCGRLSDQLAVNAFSCIETSRLNFHTLSQKNLRSETHXGISDAVGRGDTNGKDVGIKVILPSSFIGGRRYMVQNYHDSMALCGAYGPPHIFSTFTCNPKWPEIAQAIRFELGQKPNDRSDMVTRVYHMKLDEYITYIKNGQAFGPIQAVVYTVEFQKRGLPHSHTLTWLMGQSGDPSPAFIDSLISAEIPDIGTDKFGFGLVDEFMIHGPCGEHNPHSPCMKDGRCSKGYPKQFCDVTSIDDDGYPIYRXRNNGRYVVKNGVKLDNRWVVPYNLALLKKFQGHINVEWCNKTYLIKYLFKYVNKGSDCTAFAFKQKDLEEADTSSANNGGIDEVMQYIKSRYLSTCESYWRLYGFEIHGRTPSVERLVVHMPNMQFVIYHEEVDLEEVIEDPDSSRTMLTEWFVANQRHIFARDLTYCEFPSKFNWDSDKKVWTKRKRGTKIGRLRHIHPSAGEPFYLRMLLMVARGCMTFEDVRTYQGVTYSTYREACQARGLIGDDAEWVHLFEEAVIWATAYQLRNLFMTVLAHCDVGDVRVLFDKYWKYMADDFAYKLTKALGVQRRAIPDVMLQNTLLKELDGIFSNNGLLISSFDLPTPAECSDTSAGNRLILEELSFNQDSLHEESMSMYASLNDDQKKIYDKVFDRLAHKEKCIFFISRHGGTEKTFLWNAIMARLRSRGEIVLAVASSGVAALLMPGGRTAHSRFRIPIDIHDQSMCGVRRGTILGDLIKKASLIIWDEVPMTNKLCFEVLDRTLRDIQSTDDASNAHKPFGGKAILLGGDFRQVLPVIQQGTRADVVPASLVKSALWNHVEVLHLTINMRLHNPSLSQQAKDELAEFAKWVLDIGEGRVPMDRRQGEVEKTLIQIPEELLLTPHGDKITAIIDAVYPDFQTNYDCIPYLAQRAIVCLVNAVVDEVNDMMLAKVPGEAKDYLSSDTIANTLEKAADFDLLYPIEFLNSISINNFPEHHISLKIGSAVVLLRNINQSLGLCNGTRLLVTRLGDFIFEGKIMTGTNIGQLVCIPRIVLSGNSPKWPFTLQRRQFPIRLCYAMIINKCQGQTLGNVGVYLKNPIFTHGXLYVAVSRATSKEGLKLLIEDDDGNPCSTTKNIVYNEILSLL

SEQ ID NO: 122385 - protein, 337 aa, Oryza sativa
  Clone ID: PAT_MRT4530_25317C.1.pep
MDPKFPPPPPLNKTEPTTTTTNQQHHHDEQQQQHRLQIQVHPQQQEQQDGGGGGGKDQQQQQQMQVVVAAAAGERRMQGLGPKRSSNKDRHTKVDGRGRRIRMPALCAARIFQLTRELGHKSDGETVQWLLQQAEPAIVAATGTGTIPASALASVAPSLPSPNSALSRSHHHHHHMWAAAPPTASAGFAGAGFSGADSGVIGGIMQRMGIPAGIELQGGGAGGLGGGGGGGGGHIGFAPMFASHAAAAAAMPGLELGLSQDGHIGVLAAQSLSQFYHQVYNSRELDGLDHRCRVSALFVIAGRCVDIQVSSHYWYINRSCEEMPVKCSVRENLYHLI

SEQ ID NO: 122386 - protein, 56 aa, Oryza sativa
  Clone ID: PAT_MRT4530_25318C.1.pep
PHTRHHHPLLILSQSHLTTKEAYGALQQLSLSLLSSLSLSLPICLFYPSFYSNPFT

SEQ ID NO: 122387 - protein, 137 aa, Oryza sativa
  Clone ID: PAT_MRT4530_25319C.1.pep
MAVGVGLDSSPSSAFSCCSCSPGCGTSGSKRGAGNKGAMAGLGLGVREGARGGAGSEAPSCRGGGASQELRGDAGAATPGRCSLPAKRYRYAVWEAPRRRGRGYRDRVSLWAIGPPIEIAPTVTFDGWPAVSGDIHL

SEQ ID NO: 122388 - protein, 1028 aa, Oryza sativa
  Clone ID: PAT_MRT4530_2531C.1.pep
MAADGALASAPYSPPLPDLAGGEELGSGGYPTPSPCLPLSDLPGGEVAGGGATTIDGRAAAVPPLLYQIWPKGRRRTMVAAVEGAVAVVATGRDMDRLEWMYHWPMFLSPYMEQVSKFIDIAKEYVEKENRRGIYCPCAKCKNEKVWENLTKVNEHLVTRGFMENYVIWTHHGENDEVRLVEEEYEPVVEDMDCTDGCAEDNIDLEELLCHVEPELLVGSARGLDNFEALKKTTKDILYDESKGCHSDFSILRKEYASLVKCPTCGASRYKSNSNTCLEEDDTIGETKRKIPQLVMWYLPVKDRIKRLYSNPRDAELMRWHQEGRKKDGMLRHPADAHQWLNFDAKYKEFAKDPRNIRFALSTDGLNPFGDMSSSHSTWPVLLTMYNLPTWLGQKRKYILLCILIQGPRQPGIDIDVFLEPLLEDMADLWHEGLKVWDEYLRQHFTVKAIIFVTIYDYPAMFSVSRQIKGSNKLVYLRHRQFLPKGHKFRKMKAEFDGTEENDSAPKVTPGDKVCEATEKIECVFGKGTKKKSKGTKRKKTSKGAKQKKEDRKPPSPFKKHSIFFKYLPYWKDLEIRHAKDVMHQEKNIFDNDGLQSRSDLVEMGIREELHPQEGEKTGKVYLPPAYFTLTPDEKKAFFKSLCDVKVPIGFSSNIRRLVSMKDLSVSGYNSHDCHVLLTVFLAVAIRAIQREHLKIAITKMCYFFNAISQKVIDPEELALLRTFPHEIQCQLEMYFPPSFFNMMEHLMVHIVPQIVALGPLYLHQMWSYERYMAVLKGYVWNRAHPEGSMVEGYNTEEVVECCIDYLKDGKTIGIPVPRHEGRLTGRGTVGKKRFVDLEYKFVSEAHFSVLHQLAIVEPYIDQHLELLRSENKGRTDDWMIKEHKRRFVDWLQELNLPDGDTTEEITMKRFSCGQSTRDTKTVTQNSGVRVEAIDSLGEKQTYFRFIEEIWEIDYGLTIQFPIFKCQWVKHLNGVIIDKFGLTVVDLGNVRHKDDSWVLADRVAQVFYVTDPANLKKEIVLSGKQKIL

SEQ ID NO: 122389 - protein, 197 aa, Oryza sativa
  Clone ID: PAT_MRT4530_25320C.1.pep
VARAQLRLWSFFRSCEPRNHNVAPWISARHCREAPEARKMWGPPEDASARREGEDPLSAAADAGGGGGPKRSSNKDRHTKLTRELDHKSNSETVQWLLQQVEPAIVTAWGRVAPPPPPHVGCRRGTARRVRGVRRCHIGFATMFAGYVAAAMPGLELGLSQDGHIGVLSARSLSQFYHQEDGEDDRDDGESDEESGQ

SEQ ID NO: 122390 - protein, 85 aa, Oryza sativa
  Clone ID: PAT_MRT4530_25321C.1.pep
WRGEWNAFVTVGLFFMGVFMSDFFSSCGVEARKRLLLCSGDLLGWIMIIFSCYSCCSMDGCRFIPLQVFRCIIAESWMDWIIAVE

SEQ ID NO: 122391 - protein, 70 aa, Oryza sativa
  Clone ID: PAT_MRT4530_25322C.1.pep
MVPMAAMVKGHHPADGASAAPPVKTLLRFRTSGGGDPRRILLGGTALEKPLRARILSLVYALASNFSPRP

SEQ ID NO: 122392 - protein, 227 aa, Oryza sativa
  Clone ID: PAT_MRT4530_25323C.1.pep
VARAQLRLWSFFRSCEPRNHNVAPWISARHCREAPEARKMWGPPEDASARREGEDPLSAAADAGGGGAAGGPQLTRELGHKSDGETVQWLLQQAEPAIVTAMGTGVGADIRRTLPPFPKLRPLQVAPPPPPHVGCRRGVRRCHIGFATMFAAHVAAAMPGLELGHSQDGHIGVLFARSLSQFYHQVGGASATGQLPHPHHHHQHHQQQQEDGEDDRDDGESDEESGQ

SEQ ID NO: 122393 - protein, 188 aa, Oryza sativa
  Clone ID: PAT_MRT4530_25324C.1.pep
SARRHRLLDDPVVQLSTINDDDHLAVYRLPKMEKKPNYIQFVHRRDDWDNGNNISVTAWKPYGVPLLAQVSRNEAVTGMHIHEMVRKMLAPMQKNQESQHSVQSSVSTRTQTYHTDSTKFQLQLIDDSNTTIEQSNDTIRVPQSSLAAVIFVNWSKADLTKLNTHHLENLPEVFTYAPPAKRTRGEPL

SEQ ID NO: 122394 - protein, 53 aa, Oryza sativa
  Clone ID: PAT_MRT4530_25325C.1.pep
RTRGSDSGYYPWDEFSRTAISYDFNFSFGAKPALDKLYAITRSKGARPLAGAN

SEQ ID NO: 122395 - protein, 115 aa, Oryza sativa
  unsure (1)..(115): unsure at all Xaa locations
  Clone ID: PAT_MRT4530_25326C.1.pep
DSILFHFCSSHPLKFFTIHGPWPQYSYGXWSSCCRPTTFYVNKISRLKTILEXYWPSLYCGSFSTCFGGKRSVELHEEKIYQLRDCLEALSAEAPWPRFAAATAAAEANRKHAVP

SEQ ID NO: 122396 - protein, 336 aa, Oryza sativa
  unsure (1)..(336): unsure at all Xaa locations
  Clone ID: PAT_MRT4530_25327C.1.pep
PLKGLLLHMCCCAHILNLIVKDGMTIVDKIIEKFRESISFLTATPKRHEKFEKKAQQMNLKYEKKIAFHCKIRWNFTYLMLSTANLYQDVFAKLGIPENLCTPFVHQMMIESLLGCFXDRFKIFYDATEAFSGGKYVTAPKVCAIYLGMKKWSTSDDPNITKMTTFISAKYEKYWKDVYGIXLLRVLDHRYKLYMLFAMLIQIYEEELAQGIVNEVXKIXDLSKLVLQYQNHVEEGVGTPDRVNVSSSSVVFNIFDPYMSGEPIASSSLLRTELDLYLDEKLLPRTQDFDIIIWWRFVGXRYPTFQQMARDIMAIPITTVASXSTFSTSGRVISQI

SEQ ID NO: 122397 - protein, 99 aa, Oryza sativa
  Clone ID: PAT_MRT4530_25328C.1.pep
MDRLNAKLYLQNCYIMKENERLRKKALLLNQENQALLTELKQRLAKTKAAAAAAAATKANGNGNMPAGGGRASLPDLNSAPPAHGHDKAVPKSKKTAAK

SEQ ID NO: 122398 - protein, 39 aa, Oryza sativa
  Clone ID: PAT_MRT4530_25329C.1.pep
ETDFEDNTVNNFACFLIPTLENSNRVRLCRSNSYSKAWI

SEQ ID NO: 122399 - protein, 71 aa, Oryza sativa
  unsure (1)..(71): unsure at all Xaa locations
  Clone ID: PAT_MRT4530_2532C.1.pep
RPRSVRPASGRRLSRASLSLPPRGTARSTRGTALYSPTDLPLSPWSSXXTAPRGSSRPGGGTDAQPRPSLA

SEQ ID NO: 122400 - protein, 105 aa, Oryza sativa
  Clone ID: PAT_MRT4530_25330C.1.pep
MADAKFGPRETKCSQRAHTPYPYEHLRKTGSACLEIDEVTTGASLSTGGAFYFQCPVGGAGMIVDNCLLAHCTLSADAVDDMTCHAWPEFGDETVDDTYQAHFSL

SEQ ID NO: 122401 - protein, 164 aa, Oryza sativa
  unsure (1)..(164): unsure at all Xaa locations
  Clone ID: PAT_MRT4530_25331C.1.pep
NACFAYTRALYLYVLRQWGSRNTLKWRRGRSDVTMATTDTTIVHIMDEQQDIKFKSSKCXDPIRPPATLLTSNSHRICIRPPFLTREYLMESSRSPLSNGSSHITKFHPSHLQIKKQGAVTPVMGLWACNFVWNPGPCGTHVGXRPNQVEHDPRHPRSSSHIHK

SEQ ID NO: 122402 - protein, 155 aa, Oryza sativa
  unsure (1)..(155): unsure at all Xaa locations
  Clone ID: PAT_MRT4530_25332C.1.pep
DSRPGSKAPQRARPTTGPSSPSPPSPPRSSPSXPRSGPAKTLAIPPPPPPTTTWTTTPSRRXWTSTTPPAAAAPAPSSSTTRRTRRSSPATARPAPTRPAGPSPSPASTTPSTAPTSTTPTSPEALTVTCGGRCSCGGLSWKFERLICLYGDGFF

SEQ ID NO: 122403 - protein, 319 aa, Oryza sativa
  Clone ID: PAT_MRT4530_25333C.1.pep
MAAAEVYSPTAAAAAQQQQRGKVAAQAWQAVVGWIGFLLQVLLQILRGTPSCAQLLSFVGFRYPLLSGPADSEQSPSVAFMPLRSEIPADTAPAPTPPPESLQRLTSLAELWMVVLDLDETLVSAYESSSLPAIVRTQAVEAGLHCFDMECISTEKDVEGRNKVNHVTVFERPGLHEFLQKTSEFADLILFTAGLEGYARPLVDRIDVHNRFKLRLYRPSTVTTEYREHVKDLSCVSKDFCRVVIVDNNPFSFILQPLNGIPCVPFSAGQHNDNQLMEVIFPLLKHLSIQRDVRPALYERFHMPEWFQKHGIPQTDQAV

SEQ ID NO: 122404 - protein, 63 aa, Oryza sativa
  Clone ID: PAT_MRT4530_25334C.1.pep
MKPWMHKPKWGLHEVEVEATKGINEAFSCTALMPMSTKTTETIHTNTKLETHVGEDVIEVLHG

SEQ ID NO: 122405 - protein, 371 aa, Oryza sativa
  Clone ID: PAT_MRT4530_25335C.1.pep
MANHCNNTSSVTVAEVARGSHVIKIDGYLRTKELMENGKYVSSIPFSVGGHSWFITYFPNGVNTESKDYLSVFLTIDFACAGGVKATFSFALLDKNGRSVQLYSKLYPLHTFTEKGSDWGHSKFMKKTDLERSVHLSNDSFSIMCDLTVMKDICSKETTQKQFVVVPPSDLHQHLGDLLLKNMDSTDVTFNVGQDIFSAHKCILAARSSVFRAEFFGAMSAKARRTIKIEDIEAGVFRALLHFIYTDSLPETAQNIVMAQHLVVAADRYNVGRLKLICEEKLSKHIDSNMVATTLALAEQHSCYGLKEACFEFLASRSNLERMMASDDYEHLKISCPSVLMELVASRPPPPLWSSSSLGKAAVGFAKSSPS

SEQ ID NO: 122406 - protein, 418 aa, Oryza sativa
  Clone ID: PAT_MRT4530_25336C.1.pep
MAGVGFVEDMLREQSLLEATCGDLFDHIDDLLDFPKEESAADVLLLDAPAPGSPLSSRIIGGHATMAAAPPPPPQMMALPPPPAPAKDDASALFDAAGALGAEVFDRKDAHIGPCDELDMDMAQLEWLSGLFDDGTIPHEPSFPGVNCAAPIKASALTANAGVVLPDKAEEALFRSSSPISVLEHSGFNVATNGGSSSSSSSSASSSSESFSGSGRAWSAPVSPRPEPPVLVIPARARSKRSRPSAFPAVRGAPAATETTILVPTPMYSSTSSHSDPESIAESNPHPPPMKKKKKAKKPAAPAAASDAEADADAADADYEEGGALALPPGTVRRCTHCQIEKTPQWRAGPLGPKTLCNACGVRYKSGRLFPEYRPAASPTFMPSIHSNSHKKVVEMRQKATRTADPSCDLLQYIRRRD

SEQ ID NO: 122407 - protein, 159 aa, Oryza sativa
  Clone ID: PAT_MRT4530_25337C.1.pep
MAIKDRFTGNPGRLTVLTTSGSGLEILVREFLGVTVDLVTAQRLREEVAAARGKKEQQRGRSDEGLVRATRRRSNGGGSVTRSSSGEVDQMEACCAGDEKEEWQGGSGDEEARAVDSIESRRASSGTSSGGSARMLAAAAQPPIHKLYASAATALSGIQ

SEQ ID NO: 122408 - protein, 171 aa, Oryza sativa
  Clone ID: PAT_MRT4530_25338C.1.pep
MAAAEGEQGKTVVVVGVDDSEHSNYALEWTMQHLASGMAGSGGAELVIVHAKPSPSSVVGFGAGPGSGEVVRYVEADLRKTAEDVVEKARRLCIANAMHALIEVIEGEPRYVLCNAVEKHSAGLLVVGSHGYGAIKRAFLGSVSDYCAHHAHCSVMIVKQPKAKRSRAETA

SEQ ID NO: 122409 - protein, 711 aa, Oryza sativa
  Clone ID: PAT_MRT4530_25339C.1.pep
MEADGAAAAAAAGEASTEAGARPLAPEEEALRRNTDCVYFLASPLTCKKGNECDFRHSDNARMNPRDCWYWLNSNCLNPKCPFRHPPIDGMFGAPTTGMPAVSSHYAPFNSGKQLVPCYYFKKGNCLKGDRCAFYHGPQSVGNNPSEQVVKVSSLPLEQLQTQKNDLLGIKDSVQSTNSIQHGAPITNERGKTAVDRSTVNSARTATVAIPVASNAMSCPKSEKVKSSTPAALKESFTTSSGGDHPECYQNHFPMDSDPVRDWNQSYEMPPADDLPQNSREADELLGESSPGFDVLVDNDADGAAYLHDEDFGGDMYPVEDYEYAPADFDVRAHHERERFNGMDEQDQMGHMYDGYERKRRRSSERSMERPFHSERRFLQRDRDRVEMDGSDLRHRLRRRRINESSLAISPERNGEQRRRDERYRERAHGHRSHRDHHQSSRGSTLSSRLQGRIKLPGRSPDRVDTRSEKERDRRRLRDRLSPVRRTEFQGTRHREAGQHEEQTQRRSSELALGSRNADGQHLTKDVPDSHNFPHRKNSRDSSKANGSVEPEASLDFEGPKPLSVILQRKREAAWANGTSACSPKQDKSAEVSHRQASLAEAEKEGDNIISSDEYKSGSGDEEFRDEGHIPVEGHGQSSSHGDKLEAEDIIEVDPVENQDADNYDQREGESYYEPIEGQDYKSDDENAYEDDDEEYDDDDDFARKVGVVFS

SEQ ID NO: 122410 - protein, 211 aa, Oryza sativa
  unsure (1)..(211): unsure at all Xaa locations
  Clone ID: PAT_MRT4530_2533C.1.pep
RNNSWKKKRQKKKKNANIKNKHKNKHPATAGTKKKKKXLNKKKNTPANPNFVITIVKKKKQKKAWKNKKTHTNGNPEKKKFKKKAGVGRTKKXKNKDKKKKRKKMGRKENIKINSKKKRKKKKKQNNKRREKEKKIYYKKCKKKRKTEKEKKCGEKGKKERGLSAKRDMARFRATTSEKRKKKRRPTQDSTLRSARPERNGLPLQCHGTCD

SEQ ID NO: 122411 - protein, 133 aa, Oryza sativa
  Clone ID: PAT_MRT4530_25340C.1.pep
WDPHGARDWIGETRGAFGLVRSSPSTRHRFHARARDPREIWSARGSGFGLGGSLACGPDMEERARSRVRGISARQRVALRFVKTGSTQIDLHVKLWINAVASIQEVSFGCKEERTARIASEIGFALRAFVTMS

SEQ ID NO: 122412 - protein, 40 aa, Oryza sativa
  Clone ID: PAT_MRT4530_25341C.1.pep
LKGDENNWETVNLGRKYSLATKPNTWPFLSDDQTDRVLKF

SEQ ID NO: 122413 - protein, 206 aa, Oryza sativa
  Clone ID: PAT_MRT4530_25342C.1.pep
MSDTEEERRLGRGSAGAEAGADGQEDPDGDEEEEEEEEEEYEFCDAEEAMQCVEMAERSAPDAGVHDYEALAARKRKALAEERTERDASSKKPRQDGLSEVEAATVFDQLMEGFGLRRKRRSKDARKRGRKKGTRNKYSPEVTKKLGDATLLFTESRFKEAIPILHEVVRIAPNLSNSYHLLGSIYKECGELDKAINFLMLAAYVS

SEQ ID NO: 122414 - protein, 945 aa, Oryza sativa
  Clone ID: PAT_MRT4530_25343C.1.pep
MSDTEEERRLGRGSAGAEAGADGQEDPDGDEEEEEEEEEEYEFCDAEEAMQCVEMAERSAPDAGVHDYEALAARKRKALAEERTERDASSKKPRQDGLSEVEAATVFDQLMEGFGLRRKRRSKDARKRGRKKGTRNKYSPEVTKKLGDATLLFTESRFKEDDSNLYLVYSTKLQAIPILHEVVRIAPNLSNSYHLLGSIYKECGELDKAINFLMLAAYVSPKDVFLWKKLIDMALKKEDAALARHCVLKAMRADPEDVGLKFDCANIYRALHDYQKAGEIYEQIVRIYPSNIVARKAAAQMYRDCGQIDKAINLLEDYVNAQTTNIDSNHLDLLISLYLRNNAYNEALRLIERAHIVFGSQHNLPVQLQAKAVICHAYLGDMKHAEVFLQNVHLERSKDNTDVIKEVASTLENLGQYEYAIKFYLMIEDVAVHNDGSSYVKVGQCYMVIGEKRKAIPYFQKVTSQAYCSCWGVTCISKVLLRNANTDESDLTFIPVSDPYPIHESMSITYKIVNLEALQRMEDNIDVRITLSSLFVDVDKSDEAIVLLSPPNNSGSKSATDQPKPWWLDGKVKMHLANIYYNKGMFEDFVGTILIPILETLNIEYANRKVRKAKKLPTNVLYERAKVLAEQRPESVFQGLRPIASPAELQKASRAKKLLEKRAASNEDTIKDDLLCQTLALLHRYWEALQVINRTLKLGNDTLADENKEELRSLGAQIAYRAPDPRHGFNYVRYVVQQHPYSLAAWNSYYKVTSRIEDRFSRHHKFLLRTREEKTDCVPPIIISGHRFTAISQHQSAARDYLEAYKLNPENPFINLCVGSALINLALGFRLQNKNQCIVQALAFLFRYLRLCDNSQEALYNIARAYHHVGLNTLAAIYYEKALAVEVKDYPIPRLPYEENSCAQQDLKPGYCDVRREAAFNLHLIYKKSGADDLARRILRTYCTI

SEQ ID NO: 122415 - protein, 68 aa, Oryza sativa
  Clone ID: PAT_MRT4530_25344C.1.pep
KPVSNIPLSHIQTQKKKQEEMSNLLLVLHTALLLRTCNLASWPWQGQGRCNSLAKKVKGGEKRLRGRS

SEQ ID NO: 122416 - protein, 415 aa, Oryza sativa
  Clone ID: PAT_MRT4530_25345C.1.pep
MSKRSCGGGGARLQCAAADWGGCFLALPPAAAAAVPSGGDTDGGFNLAWTLHQSFHPASGLFASVGVGFPATSSSSPSPPDAPGDPYAKYVSPEIEHHALPGQSVEVELMEKGKKNKKKTNKAFKLKIKVGNPHLKRLISGGIAGAVSRTAVAPLETIRTHLMVGSNGNSTAEVFQSIMKHEGWTGLFRGNFVNVIRVAPSKAIELFAFDTANKFLTPKSGEQKKVPLPPSLVAGAFAGVSSTLCTYPLELIKTRLTIQRGVYDNFLHALVKIVREEGPTELYRGLTPSLIGVVPYAATNYFAYDTLKKAYKKMFKTNEIGNVPTLLIGSAAGAISSTATFPLEVARKHMQVGAVGGRKVYKNMLHALLSILEDEGVGGLYRGLGPSCMKLVPAAGISFMCYEACKKVLTEEEDD

SEQ ID NO: 122417 - protein, 61 aa, Oryza sativa
  Clone ID: PAT_MRT4530_25346C.1.pep
ELNPQLHYDGDKVTTLQPVLENTMHGYTTNQHAVNKEGETSFVCQELTSGHYGTDVLHTFP

SEQ ID NO: 122418 - protein, 50 aa, Oryza sativa
  Clone ID: PAT_MRT4530_25347C.1.pep
APFPAYTLVFEKRILTWNEFMDLREKKFIGACPDLPLNWLTLQEPVAGFF

SEQ ID NO: 122419 - protein, 108 aa, Oryza sativa
  Clone ID: PAT_MRT4530_25348C.1.pep
MGGSGAASHSPGGGRERWRAAEAQPRVQAATGTGSSAASHTLPGGSAPRSPGSRGGAPLLPGSGCGRRRRRSRERRWAREPAAAADRGGSVATLTTTMTDDGDDDDGG

SEQ ID NO: 122420 - protein, 85 aa, Oryza sativa
  unsure (1)..(85): unsure at all Xaa locations
  Clone ID: PAT_MRT4530_25349C.1.pep
QLKNNQVCGNSRCXQDSRVVALQYYYQAISIVYMIEQQLQXRQAFAGYSDQTSSSSSRFRWTYNLTYICGLYPNYYIDQRKHSHR

SEQ ID NO: 122421 - protein, 261 aa, Oryza sativa
  unsure (1)..(261): unsure at all Xaa locations
  Clone ID: PAT_MRT4530_2534C.1.pep
TRRRRALFFGDSLASSHVTSLVCVLSQVEAPARSGDAAAGGPLVRRLRASRGAASRRGNDVQNQKYATAKPCAGASARTPPPRRPTSPAPPPPSRPXPPPHQNSPTIPPPATTTTKPPPPPNHRAPPPSATTPPRPPRXQPPAPQTQXHPPSPSSPPLPPPPPRPTKPQXPPRSPPPSSPXRRPAYGRRRPPPAPASSPPRRRASSSSPXPSKKKPSNTPIAPFVFPRIPPIFPIFAPPPXPPPFSPPSPFFPPPFSPPPL

SEQ ID NO: 122422 - protein, 143 aa, Oryza sativa
  unsure (1)..(143): unsure at all Xaa locations
  Clone ID: PAT_MRT4530_25350C.1.pep
STSTSTTLESSASTTETATTAAESAPAPPTPAPPVGFYACKRCGHQLGVPAQVAPHDPGPGQQPFAWSKREQVAAPVADCTSLFMHDKFEWMGDLADVEGKLVCPRCAYRVGSYHWSGAQCSCGHWSTPAIQLXKKRVDERRL

SEQ ID NO: 122423 - protein, 109 aa, Oryza sativa
  unsure (1)..(109): unsure at all Xaa locations
  Clone ID: PAT_MRT4530_25351C.1.pep
HSSAPLLWPSRYAGLPPPPRSXPPSSTPRPAAAQPAPLLRSAPPPPLHPRPTAAATLLCSAGGSGGEKPRACGIVSSAQADCKMPAGPEVEYVVPRLRRSTYAAMPASR

SEQ ID NO: 122424 - protein, 82 aa, Oryza sativa
  Clone ID: PAT_MRT4530_25352C.1.pep
GKTGNSLYTLQHPSIVFFSFFLKTPFISKLGFPAVGCFKYFFYLLAQWFCKTYVSWAFSVKLEFPAVGCFKSRRTGGRSSRR

SEQ ID NO: 122425 - protein, 897 aa, Oryza sativa
  Clone ID: PAT_MRT4530_25353C.1.pep
KFVIRSGNLTFLAMRQATFVRSIPDMLPEKLPNLMYLNLSFNAFSGQIPASIGRLTKLLDLRIDSNNLTGGVPVFLGSMSQLKVLDLGFNPLGGTIPPVLGQLQMLQQLSIMNAELVSTLPPELGNLKNLTVMELSMNQLSGGLPPEFAGMQAMRVFSISTNNLTGEIPPALFTSWPELISFQVQNNLFTGKIPPELGKAGKLIVLFMFGNRLSGSIPAALGSLTSLEDLDLSDNDLTGGIPPELGHLSHLTFLKLSHNSISGPIPGNMGNNFKMQGVDHSSGNSSNSRSGSDFCQLLSLKILYLSNNKLTGKLPDCWWNLQNLQFIDLSNNAFSGEIPTVQTNYNCSLESVHLADNGFTGVFPSSLEMCKALITLDIGNNRFFGGLESTDTEVPQWWSDKGSGPSVRRGPKEIGPLGLGWGEGGGLVDRIHRVGVPGRGPLGGGLGGGLRRRRPAASKSENRGGAMKGRFKVARVSPGCKEFISGAGWDGGAPREAGDERRLPGTGGNGDKAMPGGGGNWGFVYARSGRLPSYVRAKRGRGRVRRENGERHYRVETGAVMGDRRRGSELSGLGPGKGKMTARGVLFLRPSHASVFLELRRRTARATAGQGRQWRGSVESEAGGVERRGSAAEVVTGGRAEREKAKGEGKGARLLADLGEQREEGESGGMGGCVAQAARTNAATTGREFLTSHEKWSVTVEEVEHASPVEPEQEAASKVGERKRLDGRRITCSASTSGGASTSGRCADVNLVPGTLVSNWYLGIKSWYLSTKRGTPRERANESISVSLEAERCHRRPPRPLLARGKTTALQHVAVAPLVDALRRPLSRSRPKFYPSLDILNLREGVPMRVPGGPCIEAQQLTKEGRRERLTGVGLTRSWPSWRRRGAYMAATQAGGR

SEQ ID NO: 122426 - protein, 455 aa, Oryza sativa
  Clone ID: PAT_MRT4530_25354C.1.pep
MAASSSSSPLPLALPLLLLLLVLFASHPSPHAAAAAADAAPAGGGGGGSGGELLSAARAPGFAAWLRGLRRSIHRHPELAFEEVRTSELVRAELDAIGVPYEWPVARTGVVATIAGGDGAGAGTVFALRADMDALPLQELVDWEHKSEESGKMHACGHDAHTTMLLGAAKLLQSQKDDLKGTVKLVFQPAEEGYAGARYVLQEGVLDDVSAIFGLHVDPRIQVGTVTSRPGPFLAASGRFLATITGKGGHAAGPHNAVDPILTASSAIVSLQQIVARETDPLEAAVISVTFMKGGDAYNVIPESVSFGGTFRSLTSEGLSYLKKRIKEIVEAHATVHRCTATVDFMEEERIPYPATVNDEGMYRHARAVAVDVLGEDGVKVGTPFMGSEDFAFYAQRFPAAFFMIGVGNETTMRKVYPLHSPHFVVDEDVLPVGAALHAAVAMEYLNKHAFTATF

SEQ ID NO: 122427 - protein, 61 aa, Oryza sativa
  Clone ID: PAT_MRT4530_25355C.1.pep
RCVGGDEAAHPATDLRPTRVDLAMVGRIRHDDGSGDNHGGDLCGGEFEHRRTWRSSGGHLH

SEQ ID NO: 122428 - protein, 122 aa, Oryza sativa
  unsure (1)..(122): unsure at all Xaa locations
  Clone ID: PAT_MRT4530_25356C.1.pep
EGSDVTMATMDTTVAHIIDEQQDIKFKSSKCWNPIXATLLTSNGHQICIRPPFSAREYLMESSRSRLSNGSSIIPEFHLVLTQSQKQGAASPVMGLWACNFVWDPGPSGAQWGAPQSGRARP

SEQ ID NO: 122429 - protein, 201 aa, Oryza sativa
  Clone ID: PAT_MRT4530_25357C.1.pep
IGLICTGKIHNPWRVLTTHRKIGPTTALSVERTSGFIKGIADRLEASSLDSLVVDCGSIRTRLHKIQALIPEELADILTLAVYLEQHQFKLEKAKLRLAEWRERKDNEATIQANRQLVHEEKSKLDQQSEGPIKSNIDRLEARKIELLAQLEECNAELDIEHKKLADLPKSIKEQKARLKSAIKHVADLTKSLKIIPRTDA

SEQ ID NO: 122430 - protein, 71 aa, Oryza sativa
  Clone ID: PAT_MRT4530_25358C.1.pep
PWSSTPWRRSKLVDPPGCRIRHELVPNSHEPKHVFRCAKLGLNESGPCLPPPWAVHPPGGKVPPKGNYSGF

SEQ ID NO: 122431 - protein, 148 aa, Oryza sativa
  Clone ID: PAT_MRT4530_25359C.1.pep
MRRRRWPARCAAALCIAVVVLQLAAAAAARSLSSSRRRAHDHGHRVALPASAAAVASSLQQPVHRAVAKAKGGGRSTAFDAGGGVPCKEKSGGHGGAPSPCSDDDDKRVVPTGPNPLHNRNKNCPHQLFLHGVFVSIPQVEDSAVHHV

SEQ ID NO: 122432 - protein, 354 aa, Oryza sativa
  Clone ID: PAT_MRT4530_2535C.1.pep
MGKKKKRDGAAARRQARVVVGGVRTRAAVTARRVVASAEEGCGLVGRGGGGGSGGDDGEGGCYLRLRSRRLPFVAAAVVSSRREEALGDSVAEAASSSSSRAVELLGCSGEEEAMAEKVCTQAGEDHDEESSVGDSGCGRERSATTPSSRRPPGDADSSDAESNQEAKQQMCRRSSTTSAAAFHAGATTRSFRMMAPPAAAAEIEEFLAAAERSEAERFAAKYNFDVVRGVPLDAGGAGRFEWTARFDSDSNWAALGQRVTRVLLNNPSCKPRLRLAASAENPVDFSGVDVRLPMLVYISREKPCAGKRQCSNPAAASPDLAGASTCDSTHTRDVTWLLASESPKNSARRLRVH

SEQ ID NO: 122433 - protein, 114 aa, Oryza sativa
  unsure (1)..(114): unsure at all Xaa locations
  Clone ID: PAT_MRT4530_25360C.1.pep
LVAAAGGADRLPDGGQRRHGRGEEPAAAAAGPPSPEGRRRGEAGRAALXPRLLRLPDGRARRLCGALGASXPPDNRDDDDDDAGGSGYWRRRFXRRKAVKXFLLASPXTRRPQE

SEQ ID NO: 122434 - protein, 261 aa, Oryza sativa
  unsure (1)..(261): unsure at all Xaa locations
  Clone ID: PAT_MRT4530_25361C.1.pep
GPMSISEFIAKMRSFDYEMTGQGKLLXDEELIAYIINGFDSDFDSSVIGLMPATRIAPLLISHVYSQLLSYENRISIRQTYLRISANAANRGGRGGRGGNRGXAPPAGRSAGRGGAVGANTGRGRGKDTHPVCRACHKGGHIASDCWHRYDEKYVSDEKLGDAATYAYGVDTNWYVDTGATDHITGQLDKRDYMEKYKGTDQIHTASGEGMNIXHIGHTIVPTPSSPLPLKNIIHXVPKQSKNLVSVHTLIGCRNDRSHFP

SEQ ID NO: 122435 - protein, 33 aa, Oryza sativa
  Clone ID: PAT_MRT4530_25362C.1.pep
SKEPSDELKCLCDPGPRVDLKLEWLLLPSLGLS

SEQ ID NO: 122436 - protein, 145 aa, Oryza sativa
  unsure (1)..(145): unsure at all Xaa locations
  Clone ID: PAT_MRT4530_25363C.1.pep
KVFFLSNKNTYLSMGINMYTRVHCKLSPQSIQQLSMHCHPLYXTFYLSSDETWHPTRNRIGFRSPAKGXVLRSTGPDNCIGYIGSIKGXSVHSTSWIALVWLIYLPTDLSYILVNLXLVALFTCIGXIRFXGLCQYRLNRFTRLD

SEQ ID NO: 122437 - protein, 173 aa, Oryza sativa
  Clone ID: PAT_MRT4530_25364C.1.pep
MMHTCHCGAHPFHHQLACMKVVSLSSNPCATAAKETSIAEGGSFPLSHRMMQSASKLAPTSLHPPPSQAHRPPLPFSLRFLVLEIRDVKQTRMKVEGHKVDLFPKDKHRPNGFDRTKALAHEGSTDEREAQTKNHLCGATQHSVPTTQRSVGYGPTAENGSRSTKLFDADDVI

SEQ ID NO: 122438 - protein, 117 aa, Oryza sativa
  Clone ID: PAT_MRT4530_25365C.1.pep
YKAQTLCNVPPLPGRARLHLIAFIGYRLPSQTNTSLFCILCPHSCALGKNFPISHPSQIAPGQARLTLEFFGNRLPEKKLQLVDMSILLILLSPGLGCYTLLSFTFYKGGGSKKTFK

SEQ ID NO: 122439 - protein, 404 aa, Oryza sativa
  Clone ID: PAT_MRT4530_25366C.1.pep
MNLTESKMRRSKSNQAAGESTALDPDAASVVGADGAPDSTVVACGALRASALGAGFPTMYPPGGFLNYLQSNKISPFTQTHPFVNYHNASQLPENFHFVGAPMSYSTMSPTTPCSKAIPSPTGRCAAAQIGSQDKETIDIEDDDTIEPARSDARSEKRLNWSNEEDIRLASAWLHNSIDPINGNDKKSYQYWLDVTATYNSTTKSNRMRNRNQLKQRWERIKKPVSEFNGCYARITKIHQSGMSEDQKMDQAFQLYASEHNDKPFTMVHVWRILRHEKKWSTYLKKINKEKYKSITSNPTHVVNVEDAPKLRPIRHKKAKDERSGKRLASEAISVIDQKLDKFIEASSKAEKIGEVQQSLANKKLEVANLNHKAAQEQTKSKMIDLYKDLLLAPTSDLRESSIL

SEQ ID NO: 122440 - protein, 305 aa, Oryza sativa
  Clone ID: PAT_MRT4530_25367C.1.pep
MPPHKIETGHQDVVHDIAMDYYGKRIATASSDNTIKIIGVSGNSHQQLATLSGHQGPVWQVAWAHPKYGSLLASCSYDGRVIIWKEGSKPDEWAQAHTFIEHKSSVNSIAWAPHELGLCLACGSSDGNISVFTARSDGGWDTTRIDQAHPVGVTSVSWAPAMAPGALINTGPSGQFEYVQKLASGGCDNTVKVWKLYNGSWRMDCFPALQMHRDWVRDVAWAPNLGLPKSTIASASQDGTVVIWTAPKEGEQWEGRVLYDFQTPVWRLSWSLTGNILAVSDGNDNVTLWKEAVDGEWQQVTTVEA

SEQ ID NO: 122441 - protein, 261 aa, Oryza sativa
  Clone ID: PAT_MRT4530_25368C.1.pep
MNPTESKKRRSKSNQAAGEPTALDPDAASVVGADGAPDATAVACGALRASAPGAGFPTAGAHAASPWWQESSPDSSEWMYPPGGFLNYLQNNKISPFSQTHPFVNYHNARRILRHEKKWSTYLKKIKKEKDKSVTPNPTHVVNVKDAPKQRPIGHKKAKDECSGKRLTSDAISVIDHKLDKFIEASSNAEKMGEVQQSLANKKLEVANLNHKAAQEQTKGKMIDLYKDLLLAPTSDLSQEALAERSKALECMRLALFAKDN

SEQ ID NO: 122442 - protein, 160 aa, Oryza sativa
  Clone ID: PAT_MRT4530_25369C.1.pep
GDGRAVRHGAWRGAARGSARRRRRCDDDAARQQPGARGGARGARRRRDGRAARGRGARGGDATGERHAGAGREAARGRHAATGRRRDSDRTTARRRDGRQRRRQRAARGDGTHARRRNGDGDGAVQRWRRHAAARGAMRREGGRQRRRDGGQARAAEEGL

SEQ ID NO: 122443 - protein, 423 aa, Oryza sativa
  Clone ID: PAT_MRT4530_2536C.1.pep
MGKKKKRDGAAARRQARVVVGGVRTRAAVTARRVVASAEEGCGLVGRGGGGGSGGDDGEGGCYLRLRSRRLPFVAAAVVSSRREEALGDSVAEAASSSSSRAVELLGCSGEEEAMAEKVIDEAAWDVVVLQVCTQAGEDHDEESSVGDSGCGRERSATTPSSRRPPGDADSSDAESNQEAKQQMCRRSSTTSAAAFHAGATTRSFRMMAPPAAAAEIEEFLAAAERSEAERFAAKYNFDVVRGVPLDAGGAGRFEWTARFDSDSNWAALGQRVTRCDAESSRGPIKRVPDLAVLADRHSGELPGVDVFVTTVDPVDEPILYTVNTFLSILTTDYPVDSCKPRLRLAASAENPVDFSGVDVRLPMLVYISREKPCAGKRQCSNPAAASPDLAGASTCDSTHTRDVTWLLASESPKNSARRLRVH

SEQ ID NO: 122444 - protein, 71 aa, Oryza sativa
  Clone ID: PAT_MRT4530_25370C.1.pep
MAGSEEKKEMQDPRTQAIASTIRVVPNFPKPGIMFQDITTLLLNPPVFKDTIDLFVERYTGKGISVVAGNI

SEQ ID NO: 122445 - protein, 199 aa, Oryza sativa
  Clone ID: PAT_MRT4530_25371C.1.pep
MAMAGYVLQRPSSPPRASSPDAEALRPTSPTAERPCCRWTPRFSGQNAAVHRDVYDLQKLLKQEPLDNRMIVDAIGVITLSWKEHYVEPRPEDLVKLMSDLEDLVGFLSGNSGPPSFEELMRYESMCIDASRDLKIFAEDKVKMLTFGKHLDACHADWQTKAEYYENKAKEARAASAEYHQLMKCNEEMIINHPAAVDS

SEQ ID NO: 122446 - protein, 59 aa, Oryza sativa
  Clone ID: PAT_MRT4530_25372C.1.pep
MADEQCSRRGSMPPNLKGMGIFFGGSDFFFPFLFFLLLPAQKQFTKSPAQWGNRGDTGR

SEQ ID NO: 122447 - protein, 40 aa, Oryza sativa
  Clone ID: PAT_MRT4530_25373C.1.pep
MVNKSNDRLRPIGAFTGRYGVAMRSSPLCELKAYRAFHPE

SEQ ID NO: 122448 - protein, 340 aa, Oryza sativa
  Clone ID: PAT_MRT4530_25374C.1.pep
SRGGGSSTARRGAEGRDERRHDEGPSMPSWDRTPSVAMVQRWLAKESAVPVKLVRRFEATTSGRCSCYVSGGGGGGGDPDDDDDDDVDPDDDHDDDDEWVATTMTMTPTTTTSGRRRGQRRHQHPRLTVANDDHEELGQIRRWRASSCLDPEAGAASGSRSSSGRRRLERERGRAAAEAGARAGGRRRNRGGWRARAAALGEAHGPLMGHQAIAGPMASKLGGPRRLLRPSRGRTGPGEAVLLWAGCRGEPVLAKSSFFGMAKSSFFGVHSCDPSPRIILGSCQRPLPAPPPTPFPSAGSGRGGVEGRGNDAAGGSHRRHRRSADHLRGIFAGRPLKWSA

SEQ ID NO: 122449 - protein, 95 aa, Oryza sativa
  Clone ID: PAT_MRT4530_25376C.1.pep
HVQSGKSGSHGVMGARLLDYHCINSCSPVNLHTDWYVSFKRQLPESYKLDLEVNISAMGFCAAVKDPTETSSWQLSLERNQTMNQNRPRHLRVRN

SEQ ID NO: 122450 - protein, 338 aa, Oryza sativa
  Clone ID: PAT_MRT4530_25377C.1.pep
MSQQQQAPAPPYRPYRQVRAATPHSRAVSCVRFSPCGRLLATASLDGTVALLSPSSLAAIATLRGHADGVSDISWSTDSFYLCSASDDRTLRIWDVRPVLAGLNPGSGGGGGGAQPADPNADRCIRVLKGHTNFVFSANFNPQTNSTVASGGFDCTVRIWDVKSGRCVRAIDAHSEPVTSVHFIRDGSIIVSGSHDGTCKIWDAGTGSCLKTVIDEKKPAVSFSMFSPNGKFILVAALDDTLKLCNFASGKFLKMYSGHVNRKYCLQSAFSVTNGKYIVSGSEDNCVYIWDLQGKNILQKLEGHTDTVISVSCHPTENKIASGGLDNDRTVRLWLQDG

SEQ ID NO: 122451 - protein, 44 aa, Oryza sativa
  Clone ID: PAT_MRT4530_25378C.1.pep
MPERVPAYQGVLEAEGITGFVNRMDTVGLECGCGGLDASTCVEV

SEQ ID NO: 122452 - protein, 35 aa, Oryza sativa
  Clone ID: PAT_MRT4530_25379C.1.pep
AQIRPGPAHNDVRHLRVASVTMTQSPVSEKTRNRG

SEQ ID NO: 122453 - protein, 123 aa, Oryza sativa
  Clone ID: PAT_MRT4530_2537C.1.pep
LAYAGQAAFLVKNPSKLSTTFYSSTPEPLFWPMFIIATLAAIVASQALISASFSIIRQSIALGCFPRVTMKHTSGKHEGQVYSPEINYFLMVACILITVGFKGGPEIGQAFGKQSNHIYSCHF

SEQ ID NO: 122454 - protein, 84 aa, Oryza sativa
  Clone ID: PAT_MRT4530_25380C.1.pep
IIMGFYYFIMFNLYIMFNIRKKKRGYITKLYIKKTTTEFKRSTKRLKTTNDHIFSHKNITLLPQVKIREAQKEKKKLGQKNNLF

SEQ ID NO: 122455 - protein, 59 aa, Oryza sativa
  unsure (1)..(59): unsure at all Xaa locations
  Clone ID: PAT_MRT4530_25381C.1.pep
MAATWPSSCLASSLSRVTGSAFXSYNAIYNFGDCITDTGNLCTRCCPXWLNTGQARYGN

SEQ ID NO: 122456 - protein, 262 aa, Oryza sativa
  Clone ID: PAT_MRT4530_25383C.1.pep
MAMADLLRREEEFYASLFDSPKGGDAVKSRGQMIERKIEVLEDMATKVSNRRSRRWLNDRLLIELVPRLHVEEIKGLFAPPPWGLTVWPLNVQICVGSSEELPVSAFCRTSDGEWDAFRSIDMDVEARLMQQMKQSSTKQKNHVDSDELIALNAWHRIDRQTREAIKRNFLPDLLDIYEDRIRAFIEDASGKDVLVLNVQDPFQRLLLHGVCEFYNVSSTTTTTMRDGKLWKTTTIKRRPGTGAPSRLTLVSFLRMKKNGSQ

SEQ ID NO: 122457 - protein, 170 aa, Oryza sativa
  unsure (1)..(170): unsure at all Xaa locations
  Clone ID: PAT_MRT4530_25384C.1.pep
KGKPGEKSKKVGKGPPGKKTPKKGEKKPRGPPTEKQKKPRPGENPAPRGPKKGPLTGPPKKKGGAPKNPNSRGGPRGPRGTGKTPGPWAGXPEPGEITPPRGPREKPGGGGPIGKLGPRGPLGRKMASLLITRARGVPPPRGGSRGGGAPRKTGPKNPGGPGGGKNPEPP

SEQ ID NO: 122458 - protein, 78 aa, Oryza sativa
  Clone ID: PAT_MRT4530_25385C.1.pep
MGAICKFLRGFLESIALGKNLGNVGYGFELLEYLALAYVQRILSLSCILVLARSLALRHLPWGVLMGDRSPYRSGSDR

SEQ ID NO: 122459 - protein, 49 aa, Oryza sativa
  Clone ID: PAT_MRT4530_25386C.1.pep
IWTIGHWPGRAQIAEGSSCMLPSTAADVIMEHVTLSVRPDLSDACSHAW

SEQ ID NO: 122460 - protein, 195 aa, Oryza sativa
  Clone ID: PAT_MRT4530_25387C.1.pep
MVDFLIGLLRVPAGLAARVLTRHGVAKLYAGARALDGAFFLVSPGPDRRLPPTPSLRLLRPRVAARCRSPSAATLSRRFPPPRPLAWVEAHTAAPPEAKRSPRMPRQQNRTKILPRDLRAAAVVVADDVDVDLCILGGGMNVSRRPADMHAHPPRRPSTWAEADLASRKLFVHGLGWGTRADYLCSAFMCLIIQR

SEQ ID NO: 122461 - protein, 196 aa, Oryza sativa
  Clone ID: PAT_MRT4530_25388C.1.pep
MIGGPKGGMASGALARLLLGRRAAATPLLARPFAAKARASRRPQEPAFPSEDEDDFAGGEVAAPAPTEGISKPLAEVLRELGKRVPEALVKTRVEDGFSLKYIPWHIVNKILNIHAPEWSGEVRSIVYSSDGKSVSVIYRVTLHGTDAEIYREATGTSSADDTGYGDPVQKAEAMAFRRACTRLGLGLHLYHEDMS

SEQ ID NO: 122462 - protein, 48 aa, Oryza sativa
  Clone ID: PAT_MRT4530_25389C.1.pep
IQHSIPRLILLEFWEEHLISCNSLLPSSILRVFLYVNFYEPAMLPVNL

SEQ ID NO: 122463 - protein, 439 aa, Oryza sativa
  unsure (1)..(439): unsure at all Xaa locations
  Clone ID: PAT_MRT4530_2538C.1.pep
MYMPNILNSQYDTCSMTRLAEKPVGYEGHYLHMPAFMILGLIYNVHLXVVSCPCALGLATPTAILIGTSLGAKRGLLIRGGDVLERLAGIDAIVLDKTGTLTKGRPVVTSIASLAYEEAEILRLAAAVEKTALHPIANAIMEEAELLKLDIPATSGQLTEPGFGCLAEVDGCLVAVGTLDWVHNRFETKASSTELTDLGNHLEFVSSSEASSNHSKSIAYVGREGEGIIGAIAVSDVLRDDAKATVDRLQQEEILTFLLSGDRKEAVESIGRTVGIRSENIKSSLTPHEKAGIITALQGEGRRVAMVGDGINDAPSLAAADVGVAMRTNSKESAASDAASVVLLGNRLSQVMDALSLSKATMAKVHQNLAWAVAYNIVAIPIAAGVLLPQFDFAMTPSLSGGLMALSSIFVVSNSLLLQLHGSFQSTEKQREDLNSRLN

SEQ ID NO: 122464 - protein, 53 aa, Oryza sativa
  unsure (1)..(53): unsure at all Xaa locations
  Clone ID: PAT_MRT4530_25390C.1.pep
QSSHKAISIFRVRAQQLXLQQFNDLXFDRNLAQAPAQALLALNTPSPYGVCHR

SEQ ID NO: 122465 - protein, 84 aa, Oryza sativa
  Clone ID: PAT_MRT4530_25391C.1.pep
TFPMYILYILDCKAYYKKCLQKGEECPLQSAYRKGKDAHSILFQQTNGTTIWRVADSLEKNCHSLQDVALRGKSPKNAIYIVFL

SEQ ID NO: 122466 - protein, 95 aa, Oryza sativa
  Clone ID: PAT_MRT4530_25392C.1.pep
YKMANEAILGVLFLRLQNLDRGLPQNPRRVVGLRRRPHRELLAGYCFGHEGLGSGPGRRLAVHTPSSSDTTTPSTFTYSYAPAPNSGPPTRIHSP

SEQ ID NO: 122467 - protein, 731 aa, Oryza sativa
  Clone ID: PAT_MRT4530_25393C.1.pep
MYLSAFSSSASSHGGGDSEARDSSTVVAVDRDKNSQQAVKWAVDRLLARGSVLQLVHVKPQQNAEAGADAEMQQMFISYRGYCARKGMQLKEVILDGSDISKAIVEYATSNAITDIVVGASTRNTFIRKFRNPDVPTCLMKMVPDYCTVHVIHKGKAIQVKAAKAPAPFTTLPPKQYSQSSIESDGYPRSRGDWKKISNQSSPKANRPSVDRLSGFAKAPTRERPLSGARSAPPKDFDDYIDFIAPPRPSVTRSSFSDDVDFPLSLELPSMDFGDSLELSLSASMSIESLSSAGKDVETEMRRLRLELKQTMEMYNSACKEAIDAKQKQAAQMHQMKMEESKKYQELRNAEEEALALVQMEKAKCRAALEAAEAAQRIAELEAQKRLRAEWKAKREAEERKRATEAMNNTDLRYRRYSIDDIEAATHKFDKALKIGEGGYGPVYKAVMDHTNVAIKILRPDASQGRKQFQQEIEVLSCMRHPNMVLLLGACPEYGCLVYEYMDYGSLEDRLCRRGKTLPIPWNIRFRIAADIATGLLFLHQAKPEPLVHRDLKPANILLDHNFVSKISDVGLARLVPQSAAAAEATQYRMTSTAGTFCYIDPEYQQTGMLTTMSDIYSLGILLLQIITARSPMGLTHHVESAIERGTFQEVLDPMVTDWPVEEALVFAKLALRCAELRKKDRPDLGKEILPELNRLRCLSQEYDASKVSSTSTTCSSSAPYSFGGDDVSTP

SEQ ID NO: 122468 - protein, 145 aa, Oryza sativa
  Clone ID: PAT_MRT4530_25394C.1.pep
MSLPSSLTHVAGTASVTLLLLHATASLCNRAACFSSMPPRSRAVDAAYCYSAPVHLRLPVRHTIIVVRPPHPSTVPTPARRCSASSSSSHCITPHRLFLGRCHADAGAAGPRSGDRAPEVSGAEVVLRPFFTLGPGPGEPEGQRG

SEQ ID NO: 122469 - protein, 195 aa, Oryza sativa
  unsure (1)..(195): unsure at all Xaa locations
  Clone ID: PAT_MRT4530_25395C.1.pep
WLADDRMVTVRSGVCTGWCDTFEWGVTXLSLWWCQANMWGEGCHLLKTLRRLHILXLREIKPQLFDSAKEAVAYNCHDLPELDLNISFRVSDRSLHALAHGCPHLTRLNITGXCNFNDADLAYLSSHCKSLSCLNLCDCARAFFLIALYAIDCNXGQLHWVNLGWGDRATGKGVTRLXSGGPELRALDLCGCVLI

SEQ ID NO: 122470 - protein, 44 aa, Oryza sativa
  Clone ID: PAT_MRT4530_25396C.1.pep
VFSLFLSTLFVFPVNTLFFYNIYRGCLPHCLLIIKKKHESSVRT

SEQ ID NO: 122471 - protein, 86 aa, Oryza sativa
  unsure (1)..(86): unsure at all Xaa locations
  Clone ID: PAT_MRT4530_25397C.1.pep
EGXWRPCRGARGRRQAAPAPAVTGXVRAEAAPQXXEXXVEEXRRDHPRRPLTYNXAVXSSSSSAAEDXDDDPFLLAGFFSAFSALS

SEQ ID NO: 122472 - protein, 404 aa, Oryza sativa
  Clone ID: PAT_MRT4530_25398C.1.pep
MASGRGGIPGPSRALLVLLLPALLMLLAFSTSSSAAASSPGAMHNNNWAVLVCTSRFWFNYRHMANTLSLYRTVKRLGIPDERIILMLADDMACNPRNNYPAQVFNNENHQLNLYGDNVEVDYRGYEVTVENFLRVLTGRHESAVPRSKRLLSDEGSHILLYMTGHGGDEFLKFQDSEELQSHDLADAVKQMKEKHRFKELLIMVDTCQAATLFSQLQSPGVLTIGSSMKGENSYSHHLDSDIGVSVVDRFTFYTLAFFEKLNMYSNASLNSLFNSYNPSMLLSTAYYRMDLYERPLNEVPVTNFFGSVMNTIHTDSAYSGFLAADDIGTIPSTGDNLLNHAVLQNKASQRRSNIEEVKEAQVRSHGWTDVLLEQLDVKNADTIVMYGLGTMGILLAISTWLSM

SEQ ID NO: 122473 - protein, 496 aa, Oryza sativa
  Clone ID: PAT_MRT4530_25399C.1.pep
MPEKAVDDVMDSAVGAHFSGLRLEALRLSSPSAPSSPSSAKAAAAAAAHSNGAVYANGVAADAAELVSPSALRQPFVIGVSGGTASGKTTVCDMIIQQLHDHRVVLVNQDSFYRGLTAEESAHAQDYNFDHPDAFDTEQLLECMGQLKRAQPVNVPIYDFKNHRRSSESFRKVNASDVIILEGILVFHDQRVRNLMDMKIFVDTDADIRLARRIRRDTVERGRDVSSVLEQYGRFVKPAFDDFVLPSKKYADVIIPRGGDNHVAIDLIVQHIRTKLGQHDLCKIYPHVYVVQTTFQIRGMHTLIRDRDITTPDFVFYSDRLIRLVVEHGLGHLPFTEKQIITPTGSIYMGVEFCKKLCGVSIVRSGESMENALRACCKGIKIGKILIHRVGDNGQQLIYHKLPMDIAERHVLLLDPVLGTGNSANQAIELLIRKGVPEERIIFLNLISAPEGIQCVCKRFPRLKIVTSEIDTGLSEEYRVIPGLGEYGDRYFGTDN

SEQ ID NO: 122474 - protein, 45 aa, Oryza sativa
  unsure (1)..(45): unsure at all Xaa locations
  Clone ID: PAT_MRT4530_2539C.1.pep
ALFCRVWALVAAVAXMRGVWVIIHGLNEHSXRYSHFADLLTSCGF

SEQ ID NO: 122475 - protein, 103 aa, Oryza sativa
  Clone ID: PAT_MRT4530_253C.1.pep
MAKRPEARRPGPWHGILARPKHGAARRRSSPCWPGQTTGPCLGPSTGTLGRAGQCAVTTCHLTIVHQCHLTSTMGGSKPGSGSIGVRVAQPLKSGGEWPPCHH

SEQ ID NO: 122476 - protein, 49 aa, Oryza sativa
  Clone ID: PAT_MRT4530_25400C.1.pep
RARSASPPVGDELPPKDAGAWALLINFRVWVCYLKSIGVILELSYKLAQ

SEQ ID NO: 122477 - protein, 104 aa, Oryza sativa
  Clone ID: PAT_MRT4530_25401C.1.pep
MAKMHIRVPNLATFFLILAAGDGCGDACDGHAMLEKTPLGKKVVMTTSWAINTDFSGYGTTVAVVSLVVTGAGAGAATAEAAGMYDTGKIKEFGSSDGAGADTK

SEQ ID NO: 122478 - protein, 270 aa, Oryza sativa
  unsure (1)..(270): unsure at all Xaa locations
  Clone ID: PAT_MRT4530_25402C.1.pep
MAFNLPSLFQRITNLDSLVXLFFTQEIDDLVKRMPVCKAPGPDGFNSFFMKRCWPIVAEDFYRLMAHFYEGCVDIQSIDSSFITLVPKKNNPEVVNDFRLISLMNISLKLLTKALANRLQGVITKLVHENQYGFIKGRTIQDYLAWAFEYIHQCQQSKRKIVIIKIDFEKAFNSIEHGAILDIMRHMGFPAKWLNWVEMIFSSASSVVLLNGVPSNGFKCKLGVRQGDPLSPLIFVLGAELLQAILNEACRLGTLPFTYLGLLMGTTRPK

SEQ ID NO: 122479 - protein, 48 aa, Oryza sativa
  Clone ID: PAT_MRT4530_25403C.1.pep
MGLVGQLTSRPAFQAAGPFHHCLTGQRAADLGSGRPKTGIAVRRTPSP

SEQ ID NO: 122480 - protein, 118 aa, Oryza sativa
  Clone ID: PAT_MRT4530_25404C.1.pep
GPKKFPSKRGAPGKRKNPPFPGGFFTHWGGTTPFWARGPQSFAGPKLWGKTRVLQKSWGGPPKPLGGGGETYANFIGGGKKRGGACPNNWKSGCLEWLIPSLKRGNRGGGGNPVNTKT

SEQ ID NO: 122481 - protein, 305 aa, Oryza sativa
  Clone ID: PAT_MRT4530_25405C.1.pep
MVLGKIVIVIGSGIVGTLLTSGEAKIALPDFRDVLSGAFKVNHLREDLQLLSRSNQVAIVTVDGRPGPGAYGITAVVAGAIGYLYIRWKGWKLSDLMFVTKRGLSDACDVVGKQLEHVSENVNAAKRHLAGRIDHVDCTLDECQEITESTRKEVTVIHEDISAFQEEMQSVHLVVRTLETKLGRLSYTQVLSSTPLPAIELPERITRAASLPPSSEPEFSGPRSPVTEASKVVHSPTTMSASGLSMLVETSMPPKRGVLSRASSMKEGSQELSNGSSSSGEPTTGRNVPNSRLFGGFGFLKSSAS

SEQ ID NO: 122482 - protein, 74 aa, Oryza sativa
  Clone ID: PAT_MRT4530_25406C.1.pep
MEGWRGVGTSARAMGIKESLETGKTARQGNLSVTGLENEERRRRPVRKGLADQAIDTFQISSQPTRPTGGEGRQ

SEQ ID NO: 122483 - protein, 131 aa, Oryza sativa
  Clone ID: PAT_MRT4530_25407C.1.pep
MSWQTYVDEHLMCEIEGHHLTSAAIVGHDGTVWAQSAAFPQFKPEEMTNIMKDFDEPGFLAPTGLFLGPTKYMVIQGEPGAVIRGKKGSGGITVKKTGQALVVGIYDEPMTPGQCNMVVERLGDYLVEQGL

SEQ ID NO: 122484 - protein, 215 aa, Oryza sativa
  Clone ID: PAT_MRT4530_25408C.1.pep
MALIHHHLAVPVAPAPPPRGLGPATAARRLTLHRRRRRSGAAAGRMTVTASSMVEPASGEETAARSAADVVRAFYDGVNRRDLAAVEPLIAEGCVYEDLVFPNPFVGRAEILGFFAGFMGSVSSDLRFVIDDISAGDDSRAVGVTWHLDWKGRPFPFSRGCSFYRLQLDEKQQQLQIVYGRDCVEPAVKPGESALLIIRAVTWIFERFPRLANML

SEQ ID NO: 122485 - protein, 75 aa, Oryza sativa
  Clone ID: PAT_MRT4530_25409C.1.pep
MARSDSCLARVGAGVAIGGAVGGAVGAVYGTYEAIRYKVPGLLKIRYIGQTTVGSAAIFGLFLGAGSLIHCGKSY

SEQ ID NO: 122486 - protein, 101 aa, Oryza sativa
  Clone ID: PAT_MRT4530_2540C.1.pep
LLAPTPPRERGEIKSAGVEDAGDSDEHRGPSLGLGTQMYSNALRKLPYMRHTWEHAVGMDLGARFVNQLVQCDEKLKEESRMMLARTKQASERRYSDDDDD

SEQ ID NO: 122487 - protein, 94 aa, Oryza sativa
  unsure (1)..(94): unsure at all Xaa locations
  Clone ID: PAT_MRT4530_25410C.1.pep
MTVVAVGMVGIALQPSLGSDPCRPAKTWIQRYQGRFGQTRGRPILAQNRQVASXTSPLRRLMNFGPIHRVNSEFLAYSYISLVLDIVQLIYRLS

SEQ ID NO: 122488 - protein, 165 aa, Oryza sativa
  unsure (1)..(165): unsure at all Xaa locations
  Clone ID: PAT_MRT4530_25411C.1.pep
LCGVRCAALPGASDPXKHARSLGRDPEKKPSCRFIANCNTDSKALCVYERWDQTVNLVRTEEEFTGVGEEELAGALSIKLQWERVELEVEKKEMEKVIQSAEEVPRTYDFIVQTDLELERYIYRGVAGSLEIGLLNINNAVTCVLASLVSSGLRSHQSEVSTADK

SEQ ID NO: 122489 - protein, 47 aa, Oryza sativa
  Clone ID: PAT_MRT4530_25412C.1.pep
RHNHKSQEIYTILFDLIFCLYIMIQVCGFSAFSEFVKVEILYIFIRC

SEQ ID NO: 122490 - protein, 224 aa, Oryza sativa
  Clone ID: PAT_MRT4530_25413C.1.pep
MAVTFTDLHTADGLKALEQHLSGKTYVSGNAISKDDIKVFAAVPSKPGAEFPNAARWYDTVAAALASRFPGKAVGVNLPGGGAASSAAAAAPAAKDADEDDDDLDLFGDETEEDKKAADERAASKASSKKKESGKSSVLLDVKPWDDETDMKKLEEAVRSVQMEGLTWGASKLVPVGYGIKKLQIMLTIVDDLVSVDSLIEEHLTEEPINEFVQSCDIVAFNKI

SEQ ID NO: 122491 - protein, 113 aa, Oryza sativa
  Clone ID: PAT_MRT4530_25414C.1.pep
MAAAAGWLRRAAAAAAAPRLPSGLPILPTPPPAPLTEAQSFVLPGIGTAVAGGMDLMAVPKKKVSKYKKGLRNGPKALKPVPVIVRCRCCGRVKLPHFYCCSGEKGNPGDSSS

SEQ ID NO: 122492 - protein, 151 aa, Oryza sativa
  Clone ID: PAT_MRT4530_25415C.1.pep
KMGVPFCIVKGKAPLGSIVPKKTAFVLGLPPVKNGAKLGFPKFLGALKGNFPPNFSGVRKKWGGGVLGSNFPGKPKAREKFFLKGAPPRMPLIFFAPPRWARPVVSFFRVMILAGDSVSPMRPGWGFLKSSFKYFLFPGPCWGTLPDFRAF

SEQ ID NO: 122493 - protein, 67 aa, Oryza sativa
  Clone ID: PAT_MRT4530_25416C.1.pep
FFFFFFLDTNLIHSIRISPGATWIPQAPHIGGVSYLCRRGFHNTRGGQAHTHTQSSYRHRGADTQHT

SEQ ID NO: 122494 - protein, 261 aa, Oryza sativa
  Clone ID: PAT_MRT4530_25417C.1.pep
MAMVAAASPFPFESTPPMAATATSSSSSSSSSSSSSSSSSTTSSWQAFSRVIRSWAWKKFMTGCVILLPIAITFYTTWWFIRVVDGFFSPIYIHLGINVFGLGFATSITFIFLAGVFMSSWLGASLLGLGELFIKKTPLVRHIYSSSKQISAAISPDQSSRAFKEVVIIRHPRIGEYALGFITSTLTLRGAGGGRELACVYVPTNNLYLGDIFLMSRADVIVPDLSVREAIEIVLSGGMSVPQIISAVEGVVGLGGHGRPV

SEQ ID NO: 122495 - protein, 133 aa, Oryza sativa
  unsure (1)..(133): unsure at all Xaa locations
  Clone ID: PAT_MRT4530_25418C.1.pep
MSRTRLMYEWAKNSKMTRHTGPSLXRGTPKEATSQLVGWLGQPRVRPNLCQRRWMXGFEGTVEIXTPYGHWRDIREVSGSLGVVSRLRDIIIWGYILRMRGGPLMVTTQYGISAPLLGIIFLVMSLRNTNKHF

SEQ ID NO: 122496 - protein, 55 aa, Oryza sativa
  Clone ID: PAT_MRT4530_25419C.1.pep
MMLAAAAAAVDVRPFDPSRRVANRSDGASCGLDFSRVMGSLPGGPHSSGVGGGPT

SEQ ID NO: 122497 - protein, 24 aa, Oryza sativa
  unsure (1)..(24): unsure at all Xaa locations
  Clone ID: PAT_MRT4530_2541C.1.pep
PSICGAXASYGSPCKNQPISGIYK

SEQ ID NO: 122498 - protein, 818 aa, Oryza sativa
  Clone ID: PAT_MRT4530_25420C.1.pep
MAASSSPRRLGFLAALVFAVSVSASVSSVSGGSGPITTNGGNYTRVCDPARFAAAGLDMAGFPYCDASLPYADRVRDLVGRMTLEEKVANLGDRAGGAPRVGLPRYLWWGEALHGVSDVGPGGTWFGDAVPGATSFPLVINSAASFNETLWRAIGGVVSTEIRAMYNLGHAELTYWSPNINVVRDPRWGRASETPGEDPFVVGRYAVNFVRGMQDIDGATTAASAAAATDAFSRPIKVSSCCKHYAAYDVDAWNGTDRLTFDARVQERDMVETFERPFEMCIRDGDASCVMCSYNRINGVPACADARLLTETVRRDWQLHGYIVSDCDSVRVMVRDAKWLGYTGVEATAAAMKAGLDLDCGMFWEGVHDFFTTYGVDAVRQGKLKESAVDNALTNLYLTLMRLGFFDGIPELESLGAADVCTEEHKELAADAARQGMVLLKNDAALLPLSPEKVNSVALFGQLQHINATDVMLGDYRGKPCRVVTPYDGVRKVVSSTSVHACDKGSCDTAAAAAKTVDATIVVAGLNMSVERESNDREDLLLPWSQASWINAVAEASPSPIVLVIMSAGGVDVSFAQDNPKIGAVVWAGYPGEEGGTAIADVLFGKYNPGGRLPLTWYKNEYVSKIPMTSMALRPDAEHGYPGRTYKFYGGADVLYPFGHGLSYTNFTYASATAAAPVTVKVGAWEYCKQLTYKAGVSSPPACPAVNVASHACQEEVSFAVTVANTGGRDGTHVVPMYTAPPAEVDGAPRKQLVAFRRVRVAAGAAVEVAFALNVCKAFAIVEETAYTVVPSGVSRVLVGDDALSLSFPVQIDLQAAA

SEQ ID NO: 122499 - protein, 98 aa, Oryza sativa
  unsure (1)..(98): unsure at all Xaa locations
  Clone ID: PAT_MRT4530_25421C.1.pep
FFFFFFFFSSSCHYFCLEVPNPAIPIMAIMSSSSCSPSILTSSPYSVLTWLAASFSARXRSASSGLFLLFSSLSFSSSSFRSSSLSSSLNTVCFFPGA

SEQ ID NO: 122500 - protein, 282 aa, Oryza sativa
  Clone ID: PAT_MRT4530_25422C.1.pep
MAARRLGGSSAAARLGRHVAAATRMTTRLSTTHGNKTLKTRGRFSPGNKIGKGTRRQRRQSGGKHKIDDDGGAREDTAARITLSDDKYQVIKSPSDINLNNNPCIYLGRTKNGVYCASIDLKQHQRLQVWQLHELHGGGYHLEWMLIHDVSLDQIMADFRWNPEAVRPWIEHDMYCDDAKNDREISQEESTGWDSEDDSILYTEDMITSVVVLCIWCVAANPGDPGIFKSAEHPKLNKDGRRSQKNSDHGLSQGGKMSSDGFNAVYNSEKLSNMLELKDSHS

SEQ ID NO: 122501 - protein, 199 aa, Oryza sativa
  unsure (1)..(199): unsure at all Xaa locations
  Clone ID: PAT_MRT4530_25423C.1.pep
EDLADASVVPRKDDVKPLSAVAGCPPNNSNGTXTNPHQXTETTKIRAPNSTGKVLSSSIISKEASSRRENKNSQAAPNQQNQSAGDIKHDKRKWALEVLARKNAISITSKDKSEVADDLKGNYPLLAQLPVDMRPQLTTGRHNNVPLSVRQAQLYRIAEHYLQKXQICLVIRRCADTELXAIAGCWSMVEKGISERSSS

SEQ ID NO: 122502 - protein, 58 aa, Oryza sativa
  Clone ID: PAT_MRT4530_25424C.1.pep
MSRDYRRRRQRRKGEKEMQDRDTSDCWRVETRGGSTVFLPVSADTDALLQILHDAICF

SEQ ID NO: 122503 - protein, 80 aa, Oryza sativa
  unsure (1)..(80): unsure at all Xaa locations
  Clone ID: PAT_MRT4530_25425C.1.pep
TLLIIPQHYAVLKKAEEGXQYIAIKTNANAFVSHLAGKNSVFRALPVDVVANGYXSREQAESQTQGEEHVLLTLDFTHSS

SEQ ID NO: 122504 - protein, 436 aa, Oryza sativa
  Clone ID: PAT_MRT4530_25426C.1.pep
MAQSTGQAVHHSNLYARDNKDQRTSMITFAPPPSRTSLQPSGVRPGSDRPDRILLKLSKVFAFVDLGNSIPVNYYRDPDGRIKRRRGPIKLANVENLPEGVKIIVKLDRFNIPCSQSAIVLGSYLGTLVRKPHLAPLNILQWNHKLYKRVYHPKMISEVERKFAIDGRANNWNLHQLDGKWRQYKSKLKKGYYKPNLSMERVLQTMPKTVAESQWATLVSYWYSEDSKKISDKNKENAQNIKHPHTLGRKSFARKRKELEVNGVEVDRATFFDECHKTKDGRYVNDATEEKMKRVDGQELSEADFEQNILEVFGKDHSGRVRGMGPTITPTNYYGGRFSNISGSSEGSSSSNVNGFISFIVSYLAEKYPEDNLISRLPPSLARVIPRQEVDQNQGSQPPNTATSSLPFDQNHGNQLPNTTPSSSARASSQSCSEEE

SEQ ID NO: 122505 - protein, 371 aa, Oryza sativa
  Clone ID: PAT_MRT4530_25427C.1.pep
MAAGACLAVPGPGYAGRALWPSIASLSGRPDHICSTLVVWTSLQLAVRQCVPAAIVQISYPAEAVQDVNGIDASCKWQHFFKYSANGNKVPKITRLGAFGEWSTKSRTDPDSRIKRRRGPTKLANVENLPEGVKIIDKLDRFNVPCSQSAIVLGSYLGTLVRKPYLTPLNILQWNHKLYKRVYYSKMISEVERKFAIDGRANNWILHQLDGKLRQYKSKLKKGYYKPNLPMERALQTVPKTVAESQWATLVSYWYSEDSKNEVYMKLAEKRVDGQEVSVADFEQTMLEVFGQDRSGRVRGMGPTIIPTNYYGGRFSNILGSSEGSSSSNVNGFISFIVSYLTEKYPEDNLISRLPPSVARVIPRQEVDQNQ

SEQ ID NO: 122506 - protein, 411 aa, Oryza sativa
  Clone ID: PAT_MRT4530_25428C.1.pep
MEHAALQRQRSRCPARPSVVVQITFAPPRSRGRPYSRQAVRPGSDRPDRILLKLSKCAHQLFDDCSTQASPERVQMITRSQRLQGLELLENGVQNQELVPNDHYVEKQNITNADWRTNCYEYYPDGRIKRCRGPTKLANIENLPEGVKIIVKLDRFNIPCSQSAIVLGSYLGTLVRKPHLAPLNILQWNHKLYKRAYHPKMISEVELDGKWRQYKSKLKRGYYKPNLPMERVLQTVPKIVAKSQWATLVSYWYLEDSKNEVYMKLAEKRVDCQELSEADFEQAMLEVLGKDHRGRVRGMGPTITPTNYYGRRFLNISGSNEGNGSSNVNGFISFIVSYLTEKYPEDNLISRLPPSVARVIPRQEVDQNEGSQPPNTATSSLPFDQNHENQLPNTTPSSSARASSQSCSEEE

SEQ ID NO: 122507 - protein, 37 aa, Oryza sativa
  Clone ID: PAT_MRT4530_25429C.1.pep
LPLFPAYDASLWLALFVEDAASSQISNIFPLIKLITF

SEQ ID NO: 122508 - protein, 412 aa, Oryza sativa
  unsure (1)..(412): unsure at all Xaa locations
  Clone ID: PAT_MRT4530_2542C.1.pep
MAARTPKRNATPCRDDADKAGSNPQEQESNSAPELSLSEMKDLQNENVEVSLCFGSADELGLDDELAGHVSDVDAERRGAPCAVRHDRLRTVAASQGDEALAAPARRDGMLLDRPLQRRRRNGEETRAPRHAKLCHADAVSSRLRLLLPSPAWMRWRRRRRAPQDKNGPHITGGLGPDNPTRFRHLPQLLAGLEISMPQEVFSKFGRWKPPPPPPTAEATNATRGRIHKMESRTRRGRGLRGRGGDNDCGGAARTMTAVAQIAAGRGGSPPSLPRRSGQRREYRPGGLSQPQYLPQYNQLDQIQKQIQGAPQQRSWANMIADVMREQFGLKPKDSGNLYRHPYPEHFERVPLPNRYKVPDFSTFLGQDNVSTYEHVSRFLAQCGEASATDALRVXYPLSLSGSAFTWVYWHL

SEQ ID NO: 122509 - protein, 103 aa, Oryza sativa
  Clone ID: PAT_MRT4530_25430C.1.pep
MEQASTSSGCWRRCQIGTAHTSITRRSTPLPVCLALPAGCRRASEWMVRRARQRVGEGVRLDNGLADRDWYLPSTIHAVGTISSGVVDVGLEPTLREPLHLSA

SEQ ID NO: 122510 - protein, 1430 aa, Oryza sativa
  unsure (1)..(1430): unsure at all Xaa locations
  Clone ID: PAT_MRT4530_25431C.1.pep
MSEDSTTMADLAKTLVLLMKKLDNLEARQDSWEKGSSGANLDDDKRGVPRYHKLTFPIFDGEEDHLTWLNRCEQFFQGQRTPEDEKVWLASYHMTGEAQQWYIQFSKDNGLVNWSVFEHFVNMRFGPPIRNNILGELSALRRTGTVAEYQKQFLALLCRVTPSLNPMHQVNLFTAGLGKPLSIDVELQNTANLQAAMSLARSYEQRLEDDAVAAPRIVENKQRSALSFRSAPAPSRVGSSTSSSAAIVASKSPTRPGTTGTRFRRLLAAEMAERREKGLCFNCPEKFSKDHHRQCSMKGIYLLEMDEGEDDDSINDDTVTISLHALTGIRTSKTMRLAVIIGGVTMSALVDSGSTHTFVATEAAHRLGLSPTTKSGLNVMVANGDQVTSSSICSGIPIKIDSEDFITDCYVIPLVGYNVVLGVQWLRTLGPILWDFDKLTMSFWRDDHQVAWHGHGGDSFPPQAHALTGRDLLPELLQEFDDLFNEPSGLPPERSHDHRIPLISDTAAVAVRPYRYPQLLKDEIEXQCAAMLTQGIIQKSDSEFSSPVLLVKKQDKTWRFCVDYRALNSKTIKNKYPIPVVDDLLDELKGARFFTKLDLRSGYHQVRMHPDDVKKTAFRTHHGHYEFLVMAFGLTNAPATFQALMNDILAPFLRRFVLVFFDDILIYSSSWAEHLQHVRAVLLVLQEHQMVLKXSKCLFGEEKVTYLGHIVSASGVAMDPSKVEAVAEWPQPRTVRALRGFLGLTGYYRKFIDGYGAIASPLTKLLKKEGFTWSSEAHGAFLALKKALVSASLLQLLDFTKRFIIDCDASGVGFGAVLHQGAGPIAFFSRAVAPHHAKLAAYERELIGLVKAVRHWRPYVWGRSFTIRTDHYSLKFLLDQRLSTIPQHTWVSKLFGYDFEVEFRPGKHNGAADALSRREESAELHAISGPSFEIFDLLRQETNTLLELITKRDQIQAGLLTTGWSLVDGLVTFEGKIYVPTASACWPLLLADAHGMGHEGIQKTLHRLRASFYNPHASSLVKDYVKSYSVCQQNKTEHRHPAGLLQPLVVPSAVWEDISMDFIEGLPRVRGKSVILTVVDCFSKYAHFIALGHPYTALSVAKAFYDDIVRLHGISCSIVSDRDLVFTSTFWKELFRFTNTKLNMSTAFHPQTDGQSEVVNRIITMYLRCLSGDHPKNWLQWLPWAEFCYNSSYQTSLRETPFKVVYGRDPPTISAYQPGSSCVVAVDKXMRSRNGFLVEIRERLLQAQDYMKSWYDKSHRDIEFEVGEXAWLRLHHRMAAGITDQAHSKLAPRFYGPCLIEERIGHAAYRLKLPPRALIHNVFHVALLKKIEGVAPTDIVQVPDIVHGQVIPAPAAAIKARWNQGIQEVIIQWVGSSPEEASWETLDHFREAYPSFQLEDELFHEEEGNVIDRRYGIKYHRYRNRNRNNQ

SEQ ID NO: 122511 - protein, 83 aa, Oryza sativa
  Clone ID: PAT_MRT4530_25432C.1.pep
VPALLGQVYKVESGHKTVDQSEEEFRRAGLHVHVDVAVEGLVAAILLVMPGQQRLQVPRHLLHVHGTALPAQGSPPHGWISPI

SEQ ID NO: 122512 - protein, 229 aa, Oryza sativa
  unsure (1)..(229): unsure at all Xaa locations
  Clone ID: PAT_MRT4530_25433C.1.pep
LVFHSQNKEQYFGICMALVTLISQACCDIFFAMSKLSWFTSNPGDDHWRALERVMHHLKGTMDLELHYTGYPAVLEGYSSSNWFSDVDEIKAISGYVFTLGGAAITWRSCKQTILTRSTIEAELTALDTAAVEVEWLRDLLMDMLVVEIPGPAILMNCDNQMVIFKVNSSKDNMKSFRHVKXRLKSFRNLRNFGVITLNYIXNLADPFTKGLXRNMIDNASKEMGLRPM

SEQ ID NO: 122513 - protein, 153 aa, Oryza sativa
  Clone ID: PAT_MRT4530_25434C.1.pep
SDINHQYDTKIANLIRRNMALEEQLSAAMASKDEAEKNLSLVIDSKEELEKRLSEKDREVETLKEKVTGLELAQEESNSLSNTVHADNVRLEREVAFLKAVMDETQKELHSTRGVLAGERTRAFQLQVEVFHLKQRLQTMEGRSPTPRKPQNL

SEQ ID NO: 122514 - protein, 61 aa, Oryza sativa
  Clone ID: PAT_MRT4530_25435C.1.pep
DLFSLQPFLFFDLVTNVYATAIQIRAHLSSSDRGKLPTVETNYTSINIHTVLVTPIGENYV

SEQ ID NO: 122515 - protein, 57 aa, Oryza sativa
  Clone ID: PAT_MRT4530_25436C.1.pep
MGTPSAIFLGPPLGGVDVDHGGGRHGSDGGRRRPVSTPVAMTVMALMLAKVVGGNVG

SEQ ID NO: 122516 - protein, 602 aa, Oryza sativa
  Clone ID: PAT_MRT4530_25437C.1.pep
MVVIVPINGDGDGEGGSGTFVADNPPDPAPAPMDIDDDGDGRDRGGQGDSPATQDLLSKLNGSGGEGDSPATQDLLSKLNGSGGEGDSAAAARVPGGEGDSAPLSLALGLHLHVHGDGGGRDGVDRISNLPNDTLAFILGQLGDTRNAAVTSVLSRRWINLWTQVDILILRYDKPPDSRFVQEALAAHAHATEGSETTAIRLLEVISLNRATPEATAAWLRVAAPRLTGELYFRNRSSAPFEALDLEVFSILYEAVVEQEMIWSSSWFQLPCLTEVTKITLSLGFLGLSLPQSGSFGKLRELHLEHVRFNGDYTLDDAMLPLLEYLGIRRSNGLASLTLRLESLGWMGLYDVVGIRRLDAVVPGLKALCSVGCFCYHDVDSVSIVAEELEEIEWEDFYSPQSFNFNDLPLLTMIHTHCVFCSESNEAFIEGYYQLLLNRYPRISHLDLRFVIELIRDEKSVTDSMIDNIQLPYIRMLNLALKTEGHVYGASVLHILTKRTTIAELRLVNQEKFKSDDACKLECICDGPPDWRETDISMRYLRKVEILNFRGEEHELDLLRVLVRVAPALRMIRIICHRSCAAWETLSAHIRGFAREATSVES

SEQ ID NO: 122517 - protein, 110 aa, Oryza sativa
  Clone ID: PAT_MRT4530_25438C.1.pep
METALAANTCFSEDRVRIEELESHMTCGPYKFLSRARQNAMRSGLVVLGAAAFGYLSFRVGFKPYLDRAQEAMDDTTHHGSASGAAAQPDHAGEEDDVATSKDPAVVLRD

SEQ ID NO: 122518 - protein, 131 aa, Oryza sativa
  unsure (1)..(131): unsure at all Xaa locations
  Clone ID: PAT_MRT4530_25439C.1.pep
MAKEPMHQLHTGAARQNGYALAPMIARGXTSGRLPKPVLLHMLDIPHTXHEALNGLKMELGDAACPLLKGIVATTDAVEASTGGNVAGIVGRETRKEGKQRKDHMTKNGSIYISQADXLDAHAVSNRKVLA

SEQ ID NO: 122519 - protein, 92 aa, Oryza sativa
  Clone ID: PAT_MRT4530_2543C.1.pep
CTFFPQLIQIYTTKSFTTLPPTPFRSVIYANRKNLNINTNIKLTTNNLKTVLSPFSSRHTIKHSHSLNALYFSNLRCYTLSNFSIFINISFP

SEQ ID NO: 122520 - protein, 247 aa, Oryza sativa
  Clone ID: PAT_MRT4530_25440C.1.pep
DEKSSFLQIILGEISDIVTLRIRDEIGFGNGECKNYYYRPTLSLSAGSFWYSKHTTTTATTCQICASNFLRQRPSSNCTTYSLARSVGLLMVLPLEDLILVLTAVLPITKCSVLTLKQVVRVGEPDQTEGALRGVFPAALTGADERAAIEGRLEAVGAEVPVVELVVHLLVHLPQPALHLLHGVAGSASRLGLGDHPRLVASLELQEPGAPKSISRRVLHRRVGEGGTGLAGLVRGNPSFSPRRARD

SEQ ID NO: 122521 - protein, 109 aa, Oryza sativa
  unsure (1)..(109): unsure at all Xaa locations
  Clone ID: PAT_MRT4530_25441C.1.pep
MKHLAAYLLLGLGGNTSPSAADVKAVLTSVGIDADEDRLNKLISELEGKDIQQLIAEGSEKLASVPSGGAGGASGGAAAAGGAAEEAKXEEKEEEKEESDGDMGFGLFD

SEQ ID NO: 122522 - protein, 529 aa, Oryza sativa
  Clone ID: PAT_MRT4530_25442C.1.pep
MSGAKVPPCNDNPKLMAYVEYYSPTGAIIALPVTITTTASCIYWSFKKRERNRKRAELFKKNGGLLLQQRFAAFTSQGMMDLSARLFGAEELKVATDNYSENRILGPRWAEVYKGILRNKNSTVFTVFNESQVEQFVNEISILSQIDHPNVVKLLGCCLETQVPLFDSYDNCSRNNWIPYSQLTEKSDVYSIGVVLAELLTTEKPVSFARPEDLRKLAMYYLVMLVNKGCILQAVKPIILAEAREEQLYDVAHLSIMCLSLKGEQSTMKEVASVLNGLRRSLAKDKAIKGKEVYPQNKNEEEEYLLPGSGDAVSRVSTAQILHSSGYTAAEPAALRALSDIAGRYVASLGRAASAIAEARGRTEPNLADLTLALEDHALGGFPGASDPARPVLRSGALSELAGFVRVVREVPFPKPVPRRGGAPRGKAWESFAAAGKEPPPKHVPRWLPRFPDKPEPEPEPKAAYDEATARWEARVRHEEEANAEEAVVLKPSVDGGGERRGVVPEKRGKVSFRVRAERKKRRVGLDQQ

SEQ ID NO: 122523 - protein, 40 aa, Oryza sativa
  Clone ID: PAT_MRT4530_25443C.1.pep
NLNLFGFSSSLCLPTSSYSLSFLCDSLISFKICMIQSEVY

SEQ ID NO: 122524 - protein, 132 aa, Oryza sativa
  unsure (1)..(132): unsure at all Xaa locations
  Clone ID: PAT_MRT4530_25444C.1.pep
STAGMPVSRRSGGSSLCNVSNGRRIRCMQVCPIEGIXKVEDLXYMSRITVEDLVNHIXCLLRSKWVPWLTINTVGFTYRENDTMXGYYXGRYWTMWKLSMFWCTDTTQALKELEXEAKNANTDAFCRIIGLY

SEQ ID NO: 122525 - protein, 217 aa, Oryza sativa
  Clone ID: PAT_MRT4530_25445C.1.pep
MAALGHTTLGLFRRRETKARVATGSGGLGDPFIGVGGRRRRPTATGDAKETLGFGGKRPIRFDLESTNFQSDLDDDSKREKVEEIPKIISPLLISPDRERSGRIWKETTAAPVVVVKAADIVEAADIVVVSAANVPAASCLLTAIHHHPLHPSPLPLATLLLGHLLLCRRACEATSIVRWLCRPDSPWRPNSATFTFTITAGGLDGDDGDRRGGDPK

SEQ ID NO: 122526 - protein, 126 aa, Oryza sativa
  Clone ID: PAT_MRT4530_25446C.1.pep
PAGRSLAPAAAASSPPPATAAAIVASSAMDVSRRRHRPLLLSLFSPLDAGSCTGAARSGRRWWSEQWGVGMAEVGEKNEGEGARRHNHGWVFLFAPSSLAQFESPLRSLLRNGQFVIVYFLDVPVS

SEQ ID NO: 122527 - protein, 113 aa, Oryza sativa
  Clone ID: PAT_MRT4530_25447C.1.pep
MGKGRSGGVVDETSGDAMSPPLSSPSARLIRSGGASEGWSGDGRTGKGRSGGVVDETGGDVMMGEDRSVVGERGHDRRPPAPGFAVPRCRQPPPLPSSSRHRCQRRKTKKERI

SEQ ID NO: 122528 - protein, 761 aa, Oryza sativa
  Clone ID: PAT_MRT4530_25448C.1.pep
MATSHLTSRSLLVQAQYPISRLPSNLRLSLSHHKQPAAVAKRRRAPAPSHPAFSSVIRGRPKKVPIPENGEPAAGVRVTERGLAYHLDGAPFEFQYSYTETPRARPVALREAPFLPFGPEVTPRPWTGRKPLPKSRKELPEFDSFMLPPPGKKGVKPVQSPGPFLAGTEPRYQAASREEVLGEPLTKEEVDELVKATLKTKRQLNIGRDGLTHNMLENIHSHWKRKRVCKIKCKGVCTVDMDNVCQQLEEKVGGKVIHHQGGVIFLFRGRNYNYRTRPIYPLMLWKPAAPVYPRLVKKIPDGLTPDEAEDMRKRGRQLPPICKLAKSNVQNRKYLREVDVEHETTTFICQKHLKCGITVEPMLLLLLSVFVVIVYIPFFLKIFKGKNGVYLNLVKQVREAFEACDLVRVDCSGLNKSDCRKIGAKLKDLVPCTLLSFEFEHILMWRGNDWKSSLPPLEENDFKVASDQILNSKEAGSGSALTPIELVNNATSLKKCNLIEGAEKLEDSMKSSFENGMILGSACGNPGVCNSEGIDGTESSADAPIEFSPSNSARDLDPSQTSTLYCQSSLLDKSENGELIEMYPDRCGNSEQSPDVPEALTCLMGSSDEIHELETMRRNCKHLNGSDGVNSDSIVPSYMEGILLLFKQAIDSGMALVLNENEFADANYVYQKSVAFTKTAPRYLVLRHTPRKSHGTQKTEPAKNVRINKHLEEHKVSDHVKKKEIVMGGSRMQRNDHAREFLSDVVPQGTLRVDELAKLLA

SEQ ID NO: 122529 - protein, 78 aa, Oryza sativa
  Clone ID: PAT_MRT4530_25449C.1.pep
STIIAEHSTNFSGSTPARCGRCPALKPIRLFHNSLTGVLPPELRQKSPDLLHLEVHFTKFVGPNPPSLCDSGRLNIKS

SEQ ID NO: 122530 - protein, 108 aa, Oryza sativa
  Clone ID: PAT_MRT4530_2544C.1.pep
MGHTYLHSAGSRCNVGARLSADDVTGVRLVTDRSLLSTTRQFSMPHVCPSSYNDFLAMVAMKPGMNLAGTDIPTLGVSTPAPARDECLEALIIPTGRGEACDRPPVAT

SEQ ID NO: 122531 - protein, 100 aa, Oryza sativa
  Clone ID: PAT_MRT4530_25450C.1.pep
MSLCRWMPSCLASDLEPPPRYQRRHRSWMLLLLFMRPKAEPPLEAHAADAMDTNFLLRVAAALAATRKRSRGRTRNSSSPGSQPSRKMAEGWPLAQQRDR

SEQ ID NO: 122532 - protein, 89 aa, Oryza sativa
  Clone ID: PAT_MRT4530_25451C.1.pep
MRRPNGRRTAVTRSRQQVCKAMLFVYARNKSETKGSSSGATVKLAAQTHFIEHIFSVLDFLSVLYCGQTNKLFSASKRWVFHEEITIRS

SEQ ID NO: 122533 - protein, 224 aa, Oryza sativa
  Clone ID: PAT_MRT4530_25452C.1.pep
VSSAVQELYADCIMRLQVETMTMSTGGGKSFVQIEDSYVQVALVTLQVPTAPWCHIVSGYVPALLVAVLLTAGPGRIWGRRRRQRHSVGLARRDVSLGCTLSPQQPHPNEVNSSRLSSFPSPQPPQLNQDELHILLDLIDHIGSGERKKGRGWEGVASGATGRHGTARRDEDGRERGGDREGTAWLGRRRTGEKAEGIETRSAECGPWRWKRRRDRTRGSTRES

SEQ ID NO: 122534 - protein, 82 aa, Oryza sativa
  Clone ID: PAT_MRT4530_25453C.1.pep
VINWRVHARVRALVALQSRGPDVHAVQAIALRRLLPQSGDLLPDRFLARALVLVAFCVPSRYGIYPRSYGAPSSVPTRVGVM

SEQ ID NO: 122535 - protein, 171 aa, Oryza sativa
  Clone ID: PAT_MRT4530_25454C.1.pep
MASSNGQDELDHRDTGLPSQHCHPCSHFLLPQRRLTWSIGGWSCKGGGGRSGLTPSPSSSQDVSFEMVVFNVPASHRDYIRAGMVSLANHNNFVAGSYDHNIKLMLAIVGLVRILAHRIDTRELNYTTFNNLEVKISSITVERYLGSLYERVKVDLLQKIVKIHKNQTRDH

SEQ ID NO: 122536 - protein, 55 aa, Oryza sativa
  Clone ID: PAT_MRT4530_25455C.1.pep
SPTKSRVFNIACKLGIDCLQACCLKPTPFRYEYLISFIHCEHQISGCLFIVSAIL

SEQ ID NO: 122537 - protein, 49 aa, Oryza sativa
  unsure (1)..(49): unsure at all Xaa locations
  Clone ID: PAT_MRT4530_25456C.1.pep
NSGRFVCNYVXYHSIRFAENPGLKYLYVHVSLFLTIDEXVNMQFVESLL

SEQ ID NO: 122538 - protein, 312 aa, Oryza sativa
  Clone ID: PAT_MRT4530_25457C.1.pep
MCGGAILADFTPARVPRRLTAAELLPVTPTPPAAERRTTRKRKSDVDFEAEFELFEDDDDDDEFELSDDGDESLAVSFSSDVSSSSRPRRRVAAAAAGRRKASKKSKYRGVRRRPSGRFAAEIRDPKKGRRVWLGTYGSAEEAAMAYDREARRIRGKGARLNFPRDGDGSPRRSNDRPCWTIDLNLPAAAVSGDDDDAMAVDAADADAGSAGRAAAYADQEALSAAKCKIKQCPRDEQMASATPELMEEDASSSRNMVPLSMALQLQYAAMIAECDREMEEIAAVERDLERRRRQVFERRGHLVRQASLLLD

SEQ ID NO: 122539 - protein, 71 aa, Oryza sativa
  Clone ID: PAT_MRT4530_25458C.1.pep
NGPLDEVAISRGREVPHDWPFHGAKFLECKIFTLMARTRHDNKCVAQSTSPAFQGELFLYLTNLKQQGGGV

SEQ ID NO: 122540 - protein, 326 aa, Oryza sativa
  Clone ID: PAT_MRT4530_25459C.1.pep
MCGGAILADFTPARVPRRLTAAELLPVTPTPPAAERRTTRKRKSDVDFEAEFELFEDDDDDDEFELSDDGDESLAVSCVSSPKSKAVPSFSFSSDVSSSSRPRRRVAAAAAGRRKASKKSKYRGVRRRPSGRFAAEIRDPKKGRRVWLGTYGSAEEAAMAYDREARRIRGKGARLNFPRDGDGSPRRSNDRPCWTIDLNLPAAAVSGDDDDAMAVDAADADAGSAGRAAAYADQEALSAAKCKIKQCPRDEQMASATPELMEEDASSSRNMVPLSMALQLQYAAMIAECDREMEEIAAVERDLERRRRQVFERRGHLVRQASLLLD

SEQ ID NO: 122541 - protein, 356 aa, Oryza sativa
  unsure (1)..(356): unsure at all Xaa locations
  Clone ID: PAT_MRT4530_2545C.1.pep
MGSRDGFSDNKLLDDFGYGEIXPDQSMSPDEIETIIVNGFXSTEIIQSPKMSLPPRRTSIQFQEQSSTRVGCGRVHPTIENILDKCGVVAPNLPTKTDDLSHSTGHGWTTQEKYVAISRIANFHWCSRDNSTRSLVLEPXHVAISRIANFHWCSRDNSTRSLVLEPARSLLACWFSNQYVAISRTAISNGRGTTTSITQRSSHHDFRWLRNSYDWFSIGSVVVLVPRLQMIERHLLTGSQPVWSSYDYYQRCSDPPTTSTPTKLVSGRQYCQVFYPEIPYHXRLLALKPILMSLYAVLSRPARNLRELQLRMPRADKALSDPVETKDHSLRLLDHSRTVGGSRQGIQNEEMVYPPR

SEQ ID NO: 122542 - protein, 326 aa, Oryza sativa
  unsure (1)..(326): unsure at all Xaa locations
  Clone ID: PAT_MRT4530_25460C.1.pep
MCGGAILADFTPARVPRRLTAAELLPVTPTPPAAERRTTRKRKSDVDFEAEFELFEDDDDDDEFELSDDGDESLAVSCVSSPKSKAVPSFSFSSDVSSSSRPRRRVAAAAAGRRKASKKSKYRGXRRRPSGRFAAEIRDPKKGRRVWLGTYGSAEEAAMAYDREARRIRGKGARLNFPRDGDGSPRRSNDRPCWTIDLNLPAAAVSGDDDDAMAVDAADADAGSAGRAAAYADQEALSAAKCKIKQCPRDEQMASATPELMEEDASSSRNMVPLSMALQLQYAAMIAECDREMEEIAAVERDLERRRRQVFERRGHLVRQASLLLD

SEQ ID NO: 122543 - protein, 92 aa, Oryza sativa
  unsure (1)..(92): unsure at all Xaa locations
  Clone ID: PAT_MRT4530_25461C.1.pep
FFFFFFXTKLKLAKSQXYKIHTHNPTNFTQALCRXAAQRPVAXQKQARQTDVWPTCQPHSEGETPXGIVQXSDFRQXQTFXVQFSKXVSRAE

SEQ ID NO: 122544 - protein, 67 aa, Oryza sativa
  unsure (1)..(67): unsure at all Xaa locations
  Clone ID: PAT_MRT4530_25462C.1.pep
GFTRTCWFRPPFFPIPHVGFFKXXLKKXKEKNXKNXIPXKXKKKKXKKKKKKKKKKKKKKKKKKKKK

SEQ ID NO: 122545 - protein, 116 aa, Oryza sativa
  Clone ID: PAT_MRT4530_25463C.1.pep
FSRLAYLGTMVNYPKTRIHYCRARGCKRHRLHKVVQYKVGKPRLMAQGKRRYDAKQKGFGGQTKPVFHKKAKTTKKIVLKLQCTKCKKISQTILKRCKHFELAERKAKGGRSEPSW

SEQ ID NO: 122546 - protein, 423 aa, Oryza sativa
  Clone ID: PAT_MRT4530_25464C.1.pep
MSSSLIPPPLADSDGASPPPHWVLIDIWCYIGDLPNATTAESTTSTGLPIKVTFRTARPPLLSHLCVHCPGLDFLRATPKVIASHADLLLLVVPFDPLTALSSGTWDYFVYRAADPPLLHLIPPPPRSMRFNDSEVAIVSHGDGEYAVAALAFAGTFLSVNKDFHLHLYHGGKQQQGEWVSKLLTLEDQLRDKLVPLPKAAAEYRFYQETRKTIVIGGERGTVGWVDLWRGIIFCDVLDDHPVLRDMPLPLPASGNWDRLLKQTDPNYIRDVTVSLCRDSIKYIELEIVGTGETHTTVQPTESYQEWVRRKPSKAALRSVAMVFPTISMDDDHVYFFSIAGSTDKLEAVVTVDVRNKKIQGVAELDVRKYYFGMPTYIASEMSTYLKKVTTETVSVQNSMVLLLDRVAQERWHMDKLKVQQLK

SEQ ID NO: 122547 - protein, 243 aa, Oryza sativa
  unsure (1)..(243): unsure at all Xaa locations
  Clone ID: PAT_MRT4530_25465C.1.pep
TTNAPLLHRHLNLRRCVGTTAPVPPAGQSSRAPPYWAQPPPASPPAAQPPHTNRPRRPPRTPQLLATLPCXLPSSCHPQSPHLPPARHAPPSRLLSWPPKPPPPSRPLXRPRCCACHRRPQPIVPLHLTPPPAXSPPRPNPTTTGHPPSGRIRLPAAATTRRRRRRQWTPSPAPTPPDPGLDLAXPPPPPHLQPPPPAPPVTAAPPFGLAXPPPALPPVAQPPRADRPRRPPRTTQLLATPPC

SEQ ID NO: 122548 - protein, 102 aa, Oryza sativa
  unsure (1)..(102): unsure at all Xaa locations
  Clone ID: PAT_MRT4530_25466C.1.pep
LLKCRXPNISRIAFVCTYILFWAGRNLFICALLGSKDKVDTCRLNDDAGLSKKRKTTMLLHRSEICCSRHVNLALAALPVVFSLSTSFNVLLINILAVKFTV

SEQ ID NO: 122549 - protein, 280 aa, Oryza sativa
  Clone ID: PAT_MRT4530_25467C.1.pep
MAVGDDAAPAATKISISGAALAALLQRCGMADGDCDGLLSGRASTTPAPPPSLSDYDDHAPAQSAPAISLSISGHSSLSRPSSLSDPLGRFHPSASAAAAGPASIGFFSSRRRTALRPSMRELSLAHSLSKSLALAHPLLFLLVSPSSPNLSTHSYDHRAFLLIGSRLVPTSLHVVNVGPVFRDQYHSFAPDSPMPWLPLAQHSSSSSAAAGDAHTIGEQNAVDGVVDGFGLGKLQGILGSVAGQAAEMDGMYAGMLRRLEKLAREVEKSNLLVLKQVIY

SEQ ID NO: 122550 - protein, 143 aa, Oryza sativa
  Clone ID: PAT_MRT4530_25468C.1.pep
GLRWTGCTTTVHGNGRPRSTLSKTDGRDRSGPRRLTGDSDDDVSDDVTTGGGGSGGSAARTAHARRRTTARRRERKAPGRSGRHDELTGDQRSGGRPTDGDGDEVKAAEKIGSTAATVLQRSPAAAKGRTRTATTWRSRRRPR

SEQ ID NO: 122551 - protein, 74 aa, Oryza sativa
  Clone ID: PAT_MRT4530_25469C.1.pep
MGLDRACLCVAERSTQTHEEKTENTVGMRSHALHATRRTRCHQLLEENCEHMVGPWEAGSIALHTNQTGTSTGQ

SEQ ID NO: 122552 - protein, 74 aa, Oryza sativa
  Clone ID: PAT_MRT4530_2546C.1.pep
MQRVIVAQLRHPTKQLRLHLANTSKERRLPAAKQKVGLDSEGLIKTNGASKEDTTWISVTARPEAGARFSLGER

SEQ ID NO: 122553 - protein, 69 aa, Oryza sativa
  Clone ID: PAT_MRT4530_25470C.1.pep
MAPTERAPLAAFEHEKLVVVGIVIRFGSLVMKSSCSPGHLGCLCDQRRVASPVAHDVFGVRRQSDRENM

SEQ ID NO: 122554 - protein, 58 aa, Oryza sativa
  Clone ID: PAT_MRT4530_25471C.1.pep
LRTRLGINPIKSLFAHFFLNQSMLYSLKIQASFGYAFHSWLTCKYWHLMINVIQLEIL

SEQ ID NO: 122555 - protein, 2396 aa, Oryza sativa
  unsure (1)..(2396): unsure at all Xaa locations
  Clone ID: PAT_MRT4530_25472C.1.pep
MIPFNSAVAKDVRSLVQGDDDSTLETIPRELCQLADSSPDGCSLLLQVGFDEVLLNADVAKRSRLKHELLSTVVKYCLDKPYFSTSFCEAVNSVHVSDMFHVKLCIELNLYTEEMVRVGVAPSDFRNQGLLTKEQNFSIAKIEDRXSHPALVVANDPIHDTVMILHQTDRLSKHMDSFTNITSMLNVKEMPFYVPTRSLTSTXIGLIRSELINLGDYNVHLAKIIDGGRNKAATEFAISLVQTLITQESISIAEVYNVVDALSKLAIRPSSPESLQQLIEIARSFASVKDENIRQSRDKKVLSGRPLVNKEENNANDVAFTDAVGFQEKVAVSFSEWCNICDHPTMGDSAYTHYIVKLQQDGLLKGDDLTDRFYHILTELAVAHSVVSEQVVAPGGISQQPTQQLQISYFSRDSYSKLVALVVKYSSVDIGPKMLIGVSHINTPYNLLQYEVLSCVFPMILKDTTYSSLMNSLWHVPPYLMCFGFVDSHSDANCLLRTVEICQDLTILSAVLDSTPFAFSIKLATVAFRQSHSNLEKWLVEKLTAQGEKGTLRVLLELLHDFPEFLCDYHFSFCDVIPPSCIQMRNVILSAFPRNMRLPDPSTPNLKIDLLAEISIPPRIMSDVDGALKSKQMKTQVDEYLKRPDGSFLTDLKQKLLLPQNEANIAGTRYNVPLVNSLVLYVGMQAVQQLQLXKLKLAAVLMGSLIKHQLVAHLGLGIALRSVLDALRKSIDSKMFMFXTPAVEQXLARIIEWPQYSNHIFQIXHLVVLQVPINRVLLERLIVNRPHPWGLLITFIELIKNPRYSFWARSFTRCAPEIEKLFESVXQGLVEEKGETMELVSPMVAIKSGRLCVLFLSFCVLSVGETYRVVLHSSLVXVMYHSSPLXLRVAVYKPNGTKKPVAVFWAVKRFLPTSHILCAEMSRGGLSIKKKKKKKYMVMKRASIEPNFHDLYLKFFDKVNSKSLNKEMVKATYENCKVLLQSDLIKSSSEERSLLKNLGSWLGKFTIGRNQTLRAKEIDPKILIIEAYERGLMIAIIPFTSKVLFKNLSVDMKDVKPSSLLKDRIRQIEGNPDFSNKDVSASQAPVVAEVSSGVMPTINHVEPQPEINSTSRATSLPNMLSQYAAPLRLPTNNMVEDDKSALIMPEQVSSLGLSQVSPSQTPSLSSSSFSLSQLIAAIPRADIYFRINEKLSSFGSLQYSKIMDMALDKAIKEIIGPVIQRSVTIASRTTKELILKDYAMEADDSAVSRSAHLMVGTLAGSLAHVTSKEPLRVALSSHLRSLIQGITNNTESTEQIMLILVNDNLDLGCALIETVATRKAVEMIDGEIKQPFSQLRRQKELLGSAYYDAFPYTQGLKRVPDALRPKPTGHLSAAQRRVYEDFITVWHSQSSQNAGGSATATAMAVAPSNSSVPRVYSPNSALTDSSSFSSHFASASQTTELVHEESDRNAHLSSLSSKIGASDTSTQVIGTTNVASVFPPMVPNDLPVGEPTTTNKDLVTSAPLSPTTAVDRMGSVFVEPLNTSDALEMYQQVSQKLDTLIAKDGKDAEIQSVIAEVPDILLRCVSRDEAALAIAQKVFRSLYDNASNSNYVTWLLAALVAIRDVCKLVVKELTSWVIYSDEDKKFNIDIIIGLIRSELINLGDYNVHLAKIIDGGRNKAATEFAISLVQTLITQESISIAEVYNVVDALSKLAIRPSSPESLQQLIEIARSFASVKDENIRQSRDKKVLSGRPLVNKEENNANDVAFTDAVGFQEKVAVSFSEWCNICDHPTMGDSAYTHYIVKLQQDGLLKGDDLTDRFYHILTELAVAHSVVSEQVVAPGGISQQPTQQLQISYFSIDSYSKLVALVVKYSSVDIGPSKGSLFNKILSVIVRIIQRDAEEKKVSFNPRPYFRLFINLLSELTTSDLHHDSANFQVLTAFANAFHVLQPLRVPAWSFAWLELVSHRSFMPKLLLCNAQKGWPFFQRLLVDLFKFMEPYLRNAELGQPIHLLYKGTLRVLLVLLHDFPEFLCDYHFSFCDVIPPSCIQMRNVILSAFPRNMRLPDPSTPNLKIDLLAEISIPPRIMSDVDGALKSKQMKTQVDEYLKRPDGSFLTDLKQKLLLPQNEANIAGTRYNVPLVNSLVLYVGMQAVQQLQLNKMNASASAQQMNQSQLDVQIETATELFRNLVMNSDTEGRYLLLNAIANQLRYPNNHTHYFSFIILYLFSEANQEIVQEQITRVLLERLIVNRPHPWGLLITFIELIKNPRYSFWARSFTRCAPEIEKLFESVARGGDGGRASGGGSGLPTAVAATAATATVATSAQGAARRGGFVAVARRLYATARRRGGGGVEAAAATSAQGAARRGGFVAAARRLYATARWRGGGGAAAWRRRRGGVGRGEEVRMKGKSGSRGLI

SEQ ID NO: 122556 - protein, 82 aa, Oryza sativa
  Clone ID: PAT_MRT4530_25473C.1.pep
MGYAWFIAKINPKFDNAKFFRRVCAPQSTAGKACKKLVRHHGEYAGIQSVNPRSPLWLSLLFPSFGGVNGLLSATVRRYLTH

SEQ ID NO: 122557 - protein, 78 aa, Oryza sativa
  Clone ID: PAT_MRT4530_25474C.1.pep
RCIEWHRLSRISHRWDRRYIHVKNQNLSIYMNIKIALNCSYSTKNKNSTGQYNALDYAINLIMEYQSISVQLNRNIPT

SEQ ID NO: 122558 - protein, 176 aa, Oryza sativa
  unsure (1)..(176): unsure at all Xaa locations
  Clone ID: PAT_MRT4530_25475C.1.pep
MGPAVEARPAIGTTSAPLRRAKTPVGAAGGHHFLRAQGPPATAGGRTRPPPPLQHQAPASVTCPPPGSVLRRRPPAAFPALARAYRPPPLLGSSPXQPARRATDLVKGPPPSPDPAAAITGPRATTASLLHRRSRPASSIAAARCPSLPPSCRPPRWPAGGGPDPATGAPDPPPQA

SEQ ID NO: 122559 - protein, 48 aa, Oryza sativa
  Clone ID: PAT_MRT4530_25476C.1.pep
MARVGASAWGDPRVETGQAGNVVTEASQYMVARGDLRVSSDGRTASAP

SEQ ID NO: 122560 - protein, 97 aa, Oryza sativa
  unsure (1)..(97): unsure at all Xaa locations
  Clone ID: PAT_MRT4530_25477C.1.pep
PFFAVDVSPFKAVPHRAPXTRRRWTASPAAGAVAAASXRRRRGRRRRDSKNEEQDRQEPCSGSHGAGGEVPERXAAAAAARGEMWRGRRKRVGSESL

SEQ ID NO: 122561 - protein, 292 aa, Oryza sativa
  Clone ID: PAT_MRT4530_25478C.1.pep
MSSSGAAAAAAATAEEAAAGGEHGPFPIEQLQASGIAALDVKKLKDAGLCTVESVVYSPRKDLLQIKGITSKLVPLGFTSASQLHAQRLEIIQVTTGSRELDKILDGGIETGSITEIYGEFRSGKTQLCHTLCVTCQLPLDQGGGEGKALYIDAEGTFRPQRLLQIADRFAIMIVDSATALYRTDFSGRGELSARQMHLAKFLRSLQKLADEFGVAVVITNQVVAQVDGAAMFGPQIKPIGGNIMAHASTTRLFLRKGRAEERICKVVSSPCLAEAEARFQISPEGVTDVKD

SEQ ID NO: 122562 - protein, 341 aa, Oryza sativa
  Clone ID: PAT_MRT4530_25479C.1.pep
MSSSGAAAAAAATAEEAAAGGEHGPFPIEQLQASGIAALDVKKLKDAGLCTVESVVYSPRKDLLQIKGISEAKVDKIIEGASKLVPLGFTSASQLHAQRLEIIQVTTGSRELDKILDGGIETGSITEIYGEFRSGKTQLCHTLCVTCQLPLDQGGGEGKALYIDAEGTFRPQRLLQIADRFGLNGADVLENVAYARAYNTDHQSRLLLEAASMMVETRFAIMIVDSATALYRTDFSGRGELSARQMHLAKFLRSLQKLADEFGVAVVITNQVVAQVDGAAMFGPQIKPIGGNIMAHASTTRLFLRKGRAEERICKVVSSPCLAEAEARFQISPEGVTDVKD

SEQ ID NO: 122563 - protein, 108 aa, Oryza sativa
  Clone ID: PAT_MRT4530_2547C.1.pep
MGHTYLHSAGSRCNVGARLSADDVTGVRPVTDRSFLSTTRQFSMLHVCPSSYNDFLVMVAMKPGMNLAGTDVLTPGVSTPAPARDECLEALIIPTGRGEACDRPPVAT

SEQ ID NO: 122564 - protein, 389 aa, Oryza sativa
  Clone ID: PAT_MRT4530_25480C.1.pep
MVKNKGFLPATPSEIPIQRKEIKEIIFSLLPACKDPDTDTGAPFNVNAIIANPAAYGHVHVAEALKVPIHIIFTMPWTPTCEFPHPFSRVKQPAGYRLSYQIVDSFVWLGIRDIINDLRKRKLKLRPVTYLSSAHAYSNDIPHAYIWSPYLVPKPKDWGPKIDVVGFCFLDLASNYKPPEPLLKWLESGEKPIYIGFGSLPIPEPDKLTRIIVEALEITGQRGIINKGWGGLGNLEEPKEFVYVIDNIPHDWLFLQCKAVVHHGGAGTTAASLKAACPTTIVPFFGDQFFWGNMVHARGLGAPPVPVEQLQLHLLVDAIKFMMDPKVKERAVELAKAIESEDGVDGAVKAFLKHLPQPRSLEKPQPAPPSSTFMQPFLLPVKRCFGIAT

SEQ ID NO: 122565 - protein, 49 aa, Oryza sativa
  Clone ID: PAT_MRT4530_25481C.1.pep
FTYYICLHQSTVVTCRGNAIRNAIFILGERKNQVWLMDNDDEVTPEFYS

SEQ ID NO: 122566 - protein, 74 aa, Oryza sativa
  Clone ID: PAT_MRT4530_25482C.1.pep
MIIPVRCFTCGKVIGNKWDLYLDLLQADYTEGDALDALGLVRYCCRRMLMTHVDLIEKLLNYNTLEKTETTAGN

SEQ ID NO: 122567 - protein, 421 aa, Oryza sativa
  unsure (1)..(421): unsure at all Xaa locations
  Clone ID: PAT_MRT4530_25483C.1.pep
RCVHKSAPLPPCKDVSKEWCTIIDTNRLLLPHVLPHTQCXGIFSNYLDHDMTHFFSRPSYSAGCGIDGCFKFLPIDAIGFNKVLDHCNGLILYHGKISEQYKLFVCNPATHRWVQLPPFTEYDSLCISAEYLVFDPAESLHYEVFLIPDLPEIPTKKKCHKGPLVGKDATAEWPPSVHTLWVFSSRTGRWEDKAFLHEGHATNMAGTSLEVLLDSPDMMSWGPRFIRAEYWNGALYVHFQGSFVMLSILGAKYRVIKTPRFDGPGGYTXDVLGRSETGIYYAKRQNFQLRVWALDESHELTKWVVKYESDDDDDEEEDQDSAEWNSDDDNINIIGDLSKNKEEEMSMWTFGSVDLLGFHPYKEVIYLMDLDEVVAYHLRSSKVQYLGCNRLNEYNRGMEKSFFYTPCFVDLIPEGAHQKSS

SEQ ID NO: 122568 - protein, 393 aa, Oryza sativa
  Clone ID: PAT_MRT4530_25484C.1.pep
MQDDGDGDDNGWDMPSDTLGEILRHLPPLDRRRSRLVCRQWRDAVDSRAPARPGPAKTLVVAHGAGYVFDDVPGGSSREIPSPCPLANIVGTCNGLLCVVGTGAGFTTGGFVLSNPVTGEALHVPLPTRIGAPWRRWEHNEYYSFAHHPTTGLYKIVPFPVDDRWTGSFDAVQVYTLGEAASWRDVPAPAGSSRRKSCGLVSVDGFTYWVAMDTEKVMSLDLKDERITVVITLPAPASEPGRQCRLTEAHGRLAVAAIVTQPTNTKTESLQVWVLEGGAGGRRWIRRYSVQLHGPDRQMVWPHFAHGDHAMTASTWQYSRSHELLYVHRLSGGKGLQCREARINGKSPGKAVGKYDRRTYRDLRTFAFVETTEPLNVYSGHGCRHIGKEISAG

SEQ ID NO: 122569 - protein, 89 aa, Oryza sativa
  Clone ID: PAT_MRT4530_25485C.1.pep
TVLLCCRFVCSIFHVWYNDIRWYRKLKDINTRFGGNLGAYVPCSIFLFSVLVLLSSYQSESIKPRQMNIDLENQPMPFSCFQFSFYFRA

SEQ ID NO: 122570 - protein, 45 aa, Oryza sativa
  unsure (1)..(45): unsure at all Xaa locations
  Clone ID: PAT_MRT4530_25486C.1.pep
XYXICLWMLXGEDITMLISFTEKIXWVXNSYNCFFXEKKKKKGGC

SEQ ID NO: 122571 - protein, 36 aa, Oryza sativa
  Clone ID: PAT_MRT4530_25487C.1.pep
FIKSKNNYWLLYREPTAFEYEESSWDPKSHRITLHA

SEQ ID NO: 122572 - protein, 81 aa, Oryza sativa
  unsure (1)..(81): unsure at all Xaa locations
  Clone ID: PAT_MRT4530_25488C.1.pep
PNGLWVFSEIKLICIPKRKDLIRGFNFKGQKTGKSSKHVLLNGLLSPHFSIQICGKKKGHFQNNFFFPLXKKLLKIINPTP

SEQ ID NO: 122573 - protein, 64 aa, Oryza sativa
  Clone ID: PAT_MRT4530_25489C.1.pep
MNASSFEVSHYFQLIFKLILLAYAVLCLSQLLHRWSNGSSLLSLWSGRGPCLQSLQLQDLHTAI

SEQ ID NO: 122574 - protein, 249 aa, Oryza sativa
  unsure (1)..(249): unsure at all Xaa locations
  Clone ID: PAT_MRT4530_2548C.1.pep
APFAIQQSVLGHHPQLWQXRQTSRSTRPPAADTHASCCPLTAALVASSTAEEPPEGIRPPSPERPNPDWGSRCRNRGSHSRRRSPPPPSRRHRRRRRPGAGLLRGPAAGVGSGLGXARSSGAQARCLVPAGSDVASARAATAPSSGLLRRRHDCPSQRLVXDAARPAPLRPDLAARGPDPLTATLALLPLAVGVAGAASTRRRPSACFPSGPQPQGVGGGRRPRRRRPCRRPALPAAAQAAARKGKGKV

SEQ ID NO: 122575 - protein, 368 aa, Oryza sativa
  Clone ID: PAT_MRT4530_25490C.1.pep
MSTDFRDFQQLVDKAIRQEDKYNRMEQKKRRAAQFKAQQGSNQRPRLVTGPQAPSYPQGGSSSVVRPQRQFYNNNTGNRGNDNRNMVARPAATPAQNQPVRKEQGSKPGVCFNCGDPGHYADKCPKPRRVKNAPAPNNSNAPAPKARVNHVAAAEAQNAPDVVLGYYRRFIENFSKIARPMTRLLQKEVKYKQLRPHENNYPTHDLELAAVVHALKIWLSKKEIMYTFGLRRYEAGDQVFEECFRMTAPRLLFVVVVCYTMSGASAAAAPRDGGALGAGAAANENINGGSSASQSSGGTFTGLIKGAPCCDEPRVASALKSGGGSGGGGHDLPSTKSGHRGGGEMGGSDGACVLPSARSGGVFPIGAH

SEQ ID NO: 122576 - protein, 1304 aa, Oryza sativa
  Clone ID: PAT_MRT4530_25491C.1.pep
MIQERCTVMPPHSPRNLIKVLGFVRELRLMAFEYHPHKPHGQDYGTYTYPDGEESATLMQAVHMLSSMYAVSVERDKAAHDRENWNRGKICKLESKVYRLQKELAELKGETPPPTPKLHLTARKRTCPPPRLQLASKLRVMGDAVPDRAEPVIHVLSDEEEEEYPEERMVNTRTGSGSGAANNGGDSTLAQILAQQTQLINLLVQQAQNQQANNQNQNQPPPPQNKLADFLRLHGPAAEWWDHFRQARAEGEPITWQEFTAAFKNTHIMTGVVALKKREFRALNQGSRSVTEYLHDFNRLARYAPKYVRTDEERQEKFLEGLNDELSYALMSTDFRDFQQLVDKAIRQEDKYNRIEQKKRRAAQFKAQQGSNQRSRLVTGPQATSYPQGGSSSVARPQRQFYNNNTGNRGNDNRNVVARPAATPAKNQPVRKEQGSKPGVCFNCGDPGHYADKCPKPRRVKNAPAPNNSNTPAPKARVNHVVAAEAQNAPDVVLGMPPKRDIEFRIDLVPGTNPIHKRPYRMAANELAEIKRQVDDLLQKGYIRPSTSPWGAPVIFVEKKDHTQRVFMEYLDKFVVVFIDDILIYSKTKEEHEEHLRLALEKLREHQLYAKFSKCEFWLSEVKFLGHVISSGGVAVDPSNVESVLNWKQPKTVSEIRSFLGLAGYYRRFIENFSKIARPMTRLLQKDVKYKWTEDCEQSFQELKKRLVTAPVLILPDSRKGFHVYCDASRLGLGCVLMQEGMVVAYASKQLRPHENNYPTHDLELAAVVHALKIWRHYLFGNRTEMYTDHKSLKWLELIKDYDMEIHYHPGKANVVADALSRKSYCNMSEGRHLPWELCQEFEKLNLGIVSKGFVAALEAQPTLFDQVREAQGNDPDIQEIKKNMRRGKAIGYVEDEQGTVWLGERIWVPDNKELKDTIVKEAHETLYSIHPRSTKMYQDLKQQFWWASMRREIAEYVALCDVCQRVKAEHQKPAGLLQPLKIPEWKWEEIELYMARVVCLHGVPKKIVSDRGSQFTSKFWQKLQVEMGTRLNFSTAYHPQTDGQTERVNQILEDMLRPCVLDFGRSWDKNLPYAEFSYNNSYQASLQMAPYEALYGRKCRTPLLWDQTGERQVFGTDILREAEEKVKIIQERLRVAQSRQKSYADNRRRDLTFEGDYVYLRVTPLRGVHRFQTKGKLAPRFVGPFKIVSRRGEVAYQLELPPSMAGIHDVFHVSQLKKCLRVPTEEADPEHIELQEDLTYVEKPVRILEVSERNTRNRVIRFCKVQWSNHSEEEATWEREDELKSAHPHLFAGSSESRGRDSV

SEQ ID NO: 122577 - protein, 84 aa, Oryza sativa
  unsure (1)..(84): unsure at all Xaa locations
  Clone ID: PAT_MRT4530_25492C.1.pep
WEVKVPXKIKVFMWFLKKIILTKDNLIKRKWRGNKQCCFXNTQETIQHXFFDCHEQQNTMRNGAARLELVTKELLFQFGFHVSV

SEQ ID NO: 122578 - protein, 56 aa, Oryza sativa
  unsure (1)..(56): unsure at all Xaa locations
  Clone ID: PAT_MRT4530_25493C.1.pep
IPAHVDPXIAEIIRRCWRPDPRMNPSFSEIMPSFEPLLKNTLANQPQRQRVQRADG

SEQ ID NO: 122579 - protein, 1319 aa, Oryza sativa
  Clone ID: PAT_MRT4530_25495C.1.pep
MAFEVGNEVAPEYRRISHDPNEEKCRVRVTLASDREDLPSIKFEAGGRTYSHACQEAALVAIGDLRQRFEEELDSSAFQYHPHKPHVHMLSAMDAVSVERDKAAHDRENWNRGKICKLESKVYRLQKELAELKGETPPPTPKLRLTARKRTCPPPCLQLASKIRVMGDAVPDCAEPIIHILSDEEEEEDPEERKAQNQEANNQNQNQPPTFSSTTNPVEAGDWLHAVEKKLDLIQCTKQEKVSFASHQLHGPAAEWWDHFRQGRAEGEPITWQEFTAAFNKTHIPTGVVALRKREFRALNQGSRSVIEYLHDFNRLARYAPEDVRTDEERQEKFLEGLNDELSYALMSMDFRDFQQLVDKAIRQEDKYNRMEQKKRRAAQFKAQQGSNQRPRLVTGPQAPSYPQGGSSLVVRPQRQFYHNNTGNRTNDNRNMVARPAATPAQNQPVRKEQGSKPGVCFNCGDPGHYADKCPKPRRVKNAPALKNCNTPAPKARVNHVAAAEAQNAPDAVLDVILGMDWLSRHRGVIDCANRKVTLTSSDGETVSFFASSPKSHGVTLNQVVLQEIPVVQDYPDVFPEDLPGATVFSKIDLRSGYHQLRIREEDIPKTAFTTRYGLFECTVMSFGLTNAPALFMNLMNKVFMEYLDKFVVVFIDDILIYSKTKEEHEEHIRLALEKLREHQLYAKFSKCEFWLSEVKFLGHVISSGGVAVDPSNVESVLNWKQPKTVSEIRSFLGLAGYYRRFIENFSKIARPMTRLLQKEVKYKWTEDCEQSFQELKKRLVTAPVLILPDSRKEGKVVAYASRQLRPHENNYPTHDLELAAVVHALKIWRHYLFGNRTGMYTDHKSLKYIFTQPDLNMRQRRLLELIKDYDMEIHYHPGKANVVADALSRKSYCNMSEGRHLPWELCQEFEKLNLGIVSKGFVAALEAQPTLFDQVREVQVNDPDIQEIKKNMRRGKAIGYVEDEQGTIPEWKWEEIGMDFITGLPRTSAGHDSIWVVVDRLTKVAHFIPVKTTYTANKLAELYMARVVCLHGVPKKIVSDRGSQFTSKFWQKLQVEMGTRLNFSTAYHPQTDGQTERVNQILEDMLRACVLDFGGSWDKNLPYAEFPYNNSYQASLQMAPYEALYGRKCRTPLLWDQTGEHQVFGTDILREPEEKVKIIQERLRVAQSRQKSYANNRRRDLAFEEGDYVYLRVTPLRGVHRFQTKGKLASHFVGPFKIVSRRGEVAYQLELPPSMAGIHDVFHVSQLKKCLRVPTEEADPEHIELQEDLTYVEKPVRILEFPTFRRRAFLLRKVPKRLWKPKASHTDPKQPFEHVEPV

SEQ ID NO: 122580 - protein, 1141 aa, Oryza sativa
  Clone ID: PAT_MRT4530_25497C.1.pep
MVNTRTGSGSGSGSGAANNGGDPTLAQILAQQTQLINLLVQQAQNQQANNQNQNPSPPPQNKLADFLRVRPPTFSSTTNPVEAGDWLHAVEKKLDLIQCTEQEKVSFASHQLHGPAAEWWDHFRQGRAEGEPITWQEFTAAFKKTHIPTGVVALKKREFRALNQGSRSVTEYLHDFNRLARYAPEDVRTDEERQEKFLEGLNDELSYALMSTDFRDFQQLVDKAIRQENKYNRMEQKKRRAAQFKAQQGSNQRPRLVTGPQAPSYPQGGSSSVVRPQRQFYNNNTGNRGNDNRDMVARPAATPAQNQPVRKEQGSKPGVCFNCGDPGHYADKCPKPRRVKNAPAPNNSNAPVPKARVNHVAAAEAQNAPDVVLDVFPEDLPANELAEVKRQVDDLLQKGYIRPSTSPWGAPVIFVEKKNHTQRMCVDYRALNEVTTKNKYPLPRIDDLFDQLEGATVFSKIDLRSGYHQLRIREEDIPKTAFTTRYGLFECTVMSFGLTNAPAFFMNLMNKVFMEYLDKFVVVFIDDILIYSKTKEEHEEHLRLALEKLREHQLYAKFSKCEFWLSEVKFLGHVISSGGVAVDPSNVESVLSWKQPKTVSEIRSFLGLAGYYRRFIKNFSKIARPMTRLLQKEVKYNKGFVATLEAQPTLFDQVREAQVNDPDIQEIKKNMRRGKAIGYVEDEQGTVWLGERICVPDNKELKDTIMKEAHETLYSIHPGSTKMYQDLKQQFWWASMRREIAEYVALCDVYQRVKAKHQKPAVKKCLRAPTEEADPDRIELQEDLTYVEKPVRILELILISSPVLLNLEDEIPFKGASPPSPPSPRRRRPSSIRRRAAASTITVACRRRHCFRQGVGKPGRTSALAAGRRSPVAAADHPISGEVANPGRPLMILRSGEKSVWVAGESMPLVVEGVIMIQIEILGVTASEPYTRKKGLSLLDVVGVHYAVCPFDLSIALRVRNRGEANLDSQSNTVILEVSADELRAVVCYDAVRQSISAEYPFDKLDGIIGLDFSCGRCLNPLGEFVDGHKQELVAALSSWEWSEYVEPQHENGQEEMFAVVGRDAFEKYSVWSLFVQIFADHTVDFGLSGYLLSFSVVFGQLITTQQLNERGPPVFRGLDIGNDVFRLCSPRNTSSKLCRE

SEQ ID NO: 122581 - protein, 946 aa, Oryza sativa
  Clone ID: PAT_MRT4530_25498C.1.pep
MCVDYRALNKVTIKNKYPLPRIDDLFDQLEGATVFSKIDLRSGYHQLRIREEDIPKTAFTTRYGLFECTVMSFGLTNAPAFFMNLMNKVFMEYLDKFVVVFIDDILIYSKTKEEHEEHLRLALEKLRKHQLYAKFSKCEFWLSEVKFLGHVISSGGVAVDPSNVESVLSWKQPKTVSEIRSFLGLAGYYRRFIENFSKIARPMTRLLQKEVKYKWTESCEQSFQELKKRLVTAPVLILPDSRKGFQVYCDASRHGLGCVLMQEGKVVAYASRQLRPHENNYPTHDLELAAVVHALKIWRHYLFGNRTEIYTDHKSLKYIFTQPDLNMRQRRWLELIKDYDMEIHYHPGKANVVADALSRKRAKPTLLDQVREAQVNDPDIQEIKKNMRRGKSHRFVEDEQGTVWLGERICVPDNKELKDTIMKEAHETLYSIHPGSTKMYQDLKQQFWWASMRREIAEYMALCDVCQRVKAEHQKPAGLLQPLKIPEWKWEEIGMDFITGLPRTSAGHDSIWVVVDRLTKVAHFIPVKTTYTGNKLAELYMVRVVCLHGVPKKIVSDRGSQFTSKFWQKLQSELGTRLNFSTAYHPQTDGQTERVNQILEDMLRACVLDFGGSWDKNLPYEEFSYNNSYQASLQMSPNEALYGRKCRTPLLWDQTGERQVFGTDILREAEEKVKIIQERLRVAQSRQKSYADNRRRDLVFEEGDYVYLRVTPLRGVHRFQTKGKLAPRFVGPFKIVSRRGEVAYQLELPPSMAGIHDVFHVSQLKKCLRVPTEEADPDRIELQEDVTYVEKPVRILEFPTFWRRAFPLRKVPKRLWKPKAIASEFEGIVEHEKMVALDALTQTRTVAKYKHQFDSLVYRIRVFDPSGMMLVTRFLGGLKDEIRFAVVVQLDTLQQAVAIALKQETVLAEKATKTKGKFVKYTCPKPDFGAETTPARSDKGDLWKSR

SEQ ID NO: 122582 - protein, 165 aa, Oryza sativa
  Clone ID: PAT_MRT4530_25499C.1.pep
ILLGAGTSPTRHPLPSHRVIYELRVYSLEEATFGKVLTSRAIRAAHCLTSIQFSPTSEHILLAYGRRHNSMLRSIVMDGETGIPVYTILEVYRVSDMELVRVLPSAEDEVNVACFHPSPGGGLVYGTKEGKLRILQHNGADITSTGLNCFIEENMLEIQRYALEG

SEQ ID NO: 122583 - protein, 148 aa, Oryza sativa
  Clone ID: PAT_MRT4530_2549C.1.pep
MADQHRGVIGGGGYGDRGGQEQQEKQPFMMTALKTVTAATAGGSMLVLSGLILAGTVIALTVATPVLVIFSPVLVPAAIALALMAAGFVTSGGLGVAALSVFSWMYKYLTGKHPPGADQLDHAKARLASKARDIKEAAQHRIDQAQAS

SEQ ID NO: 122584 - protein, 48 aa, Oryza sativa
  Clone ID: PAT_MRT4530_254C.1.pep
YIVIKIQTSRKVYISSQRLNFHWLQQTKKNSRKNRQNDQFLPIKINRF

SEQ ID NO: 122585 - protein, 1150 aa, Oryza sativa
  Clone ID: PAT_MRT4530_25500C.1.pep
MMPPRSPRNLIEVLGLVRELRLMAFEVGYEVAPEYRQIPHDPDEEKCRVRVTLASDSEDLPSFKFEAGGRSYCHACQEVALVAIGELRQHFEEELDSSAFQYHPHKPHGQDYGSYTCPDGEESATLMHVVHMLSAMDTVSVERDKAAHDRENWNRGKICKLKSKVHRLQKELAELKGEMPPPTSKLRLTARKRTCPPPRLQLASKIRVMGEAVPDRAEPVIDIISDEEEEEDPEEREPATPEEEDSSLRSDARVMVNTRTGSGSGSGANNNEGEPTLAQILAQQTQLINLLVQQAQNQQGNNQNQNPPPPPQNKLADFLRVRPPTFSSTTNPVEAGDWLHAVEKKLDLIQCTEQEKVSFASHQLHGPAAEWWDHFRQGRAGGEPITWQEFTAAFKKTHIPSGVVALKKREFRALNQGSRSVTEYLHDFNRLARYAPEDVRTDEERQEKFLEGLNDELSYTLMSTEFRDFQQLVDKAIRQEDKYNRMEQKKRRAAQFKAQQGSNQRPRLVTGPQVPSYPQGGSSSVVRPQRQFYNNNTGNRGNDNRNVVARPAATSVQNQPVRKEQGSKPVICFNCGDPGHYADKCPKPRQSKDLDVILGMDWLSRHRGVIDCANRKVTVTNSNGEIVSFFASSPKSHGVVLNQVTLQEIPIVQDYPDVFPEDLPGMPPKRDIEFRIDLVPGTNPIHKRPYRMAANELAEVKKQVDDLLQKGYIRPSTSPWGAPVIFVEKKDHTQRMCVDYRALNEVTIKNKYPLPRIDDLFDQLKGATVFSKIDLRSGYHQLRIREEDIPKTAFTTRYGLFECTVMSFGLTNAPAFFMNLMNKVFMEYLDKFVVVFIDDILIYSKTKEEHEEHLRLALEKLREHHFYAKFSKCEFWLSEVKFLGHVISSGGVAVDPSNVESVLSWKQPKTVSEVRSFLGLAGYYRRFIENFSKIARPMTRLLQKEVKYKWTEDCERSFQELKKRLVSAPVLILPDSRKGFQVYCDASRLGLGCVLMQEGKVVAYASRQLRPHENNYPTHDLELAAVVHALKIWRHYLYGNRTEIYTDHKSLKYIFTQPDLNMRQRRWLELIKDYDMEIHYHPGKANVVADALSRKSYCNMSEGRCLPWELCQEFEKLNLGIVSKGFVAALEAKPTLFDQIREAQVNDPDI

SEQ ID NO: 122586 - protein, 418 aa, Oryza sativa
  Clone ID: PAT_MRT4530_25501C.1.pep
MDVCPGEPSTSHASASGLSGVEMQIDRGQPSSRLLGSSSTSNHESSTARDDVQMPSLSNSVPIPATSQPSEHDGRHGMPMNSFTTSSGLDVHMILRNSEGGNHHHDLFSDSRSWELPFLQGWFMAQNHTGASPSIPIDVGSSRGSNRHHASRRHVVGSLRGVGSSLLGPQIDEAEVHAASLGVGSELTTSLLAAGAAELPCTVKLRIWRHDIKDPCVTLEPEACRLTISHAVLCRFGKVLTSRAIRAAHCLTSIQFSPTSEHILLAYGRRHNSMLRSIVMDGETGIPVYTILEVYRVSDMELVRVLPSAEDEVNVACFHPSPGGGLVYGTKEGKLRILQHNGADITSTGLNCFIEENMLEIPASQQILNGYQLVTVGIPIYDGRFRDMFPGRLNDWLPCVMCTSPGIFLCKVYHCTTR

SEQ ID NO: 122587 - protein, 91 aa, Oryza sativa
  Clone ID: PAT_MRT4530_25502C.1.pep
NLMLKFSELYITLKDYLMIQDGKYMSMEGASSYKSRGGRESGISRTAGTIRVRGWGRWSTDGVAGGPGSRAPHGAAGTPEPGNPPGACANN

SEQ ID NO: 122588 - protein, 330 aa, Oryza sativa
  unsure (1)..(330): unsure at all Xaa locations
  Clone ID: PAT_MRT4530_25503C.1.pep
MLYAHSCNIHSSEEEYFSEEILGVTSWYQSHLDFRISXMMPRHSPRNLIEVLGFVRELRLMAFEVGYEVAPEYRQISHDPDEEKCRVRVTLASDSEDLPSFKFEAGGRSYCHACQEAALVAIGELRQHFEEELDSSAFQYHPHKPHGQDYGTYTCPDGEESATLMHAVHMLSAMDAVSVERDKAAHDRENWNRGKICKLKSKVYRLQKELAELKGETPPPTSXLRLTARKRTCPPPRLQLASKIRVMGEAVPDRVEPVIDIIRSGSGSGANNNEENPTLAQILAQQTQLINLLVQQAQNQQANNQNQNPPPPPQNKLAXDFLRVSPPTFS

SEQ ID NO: 122589 - protein, 1630 aa, Oryza sativa
  unsure (1)..(1630): unsure at all Xaa locations
  Clone ID: PAT_MRT4530_25504C.1.pep
KVGCEHMVLMVVLMTIKDRFASYCCETFIVPTTSQRGQRLYLLYSMIHYSAPDXEVARSPWGSLGSPCLVLKGVIMIQVRCTVVNCVMRGVLSLLLSEMPRHSPRNLIEVLGFVRELRLMAFEVGYEVAPEYRQIPHDPDEEKCRVRVTLASDSEDLPSFKFEAGGRSYCHACQEVALVAIGELRQHFEEELDSSAFQYHPHKPHGQDYGTYICPDGEESATLMHAVHMLSAMDAVSVERDKAAHDRENWNRGKICKLESKVYRLQKELAELKGEMPPPTPKLRLVARKRTCPPPRLQLASKIRVMGEAVPDRAEPVIDIISDEEEEEDPEEREPATPEEEDSSLRSDARWKAGGEPITWQEFTAAFKKTHIPSGVVALKKREFRALNQGSRSVTEYLHDFNRLARYAPEDVRTDEERQEKFLEGLNDKLSYALMSTDFQDFQQLVDKAIRQEDKYNRMEQKKRRAAQFKAQQGSNQRPRLVTGPQVPSYPQGGSSSVVRPQRQFYNNNTGNRGNDNRNVVARPAATPVQNQPVRREQGSKPVICFNCGDPGHYADKCPKPRRVKNAPAPNNFNVPAPKARVNHVAAAEAQNAPDVVLGTFPVNSIPATVLFDSGATHSFLCKSFAIKHGMEVVSLGRPLLVNTPGNQAFSTRYCPSVTIEIEEVPFPSSLILLESKDLDVILGMDWLSRHRGVIDCANRKVTLTSSNGETVSFFASSPKSHGEVLNQVALQEIPIVQDYPDVFPEDLPGMPPKRDIEFRIDLVPGTNPIHKRPYRMAANELAEVKKQVDDLIQKGYIRPSTSPWGAPVIFVEKKDHTQRMCVDYRALNEVTIKNKYPLPRIDDLFDQLEGATVFSKIDLRSGYHQLRIREEDIPKTAFTTRYGLFECTVMSFGLTNAPAFFMNLMNKVFMEYLDKFVVVFIDDILIYSKTKEEHEEHLRLALEKLREHQLYAKFSKCEFWLSEVKFLGHVISSGGVAVDPSNVESVLSWKQPKTVSEIRSFLGLAGYYRRFVENFSKIARPMTRLLQKDVKQLRPHENNYPTHDLELAAVVHALKIWRHYLFGNRTEIYTDHKSLKYIFTQPDLNMRQRRWLELIKDYDMEIHYHPGKANVVADALSRKSYCNMSEARCLPWELCQEFERLNLGIVSKGFVATLEAKPTLFDQIREAQMNDPDIQEIKKNMRRGKAIGFVEDEQGTVWLGERICVPENKELKNTIMKEAHETLYSIHPGSTKMYQDLKLQFWWASMRREIAEYVALCDVCQRVKAEHQKPAGLLQPLKIPEWKWEEIGMDFITGLPRTSAGHDSIWVVVDRLTKVAHFIPIKTTYTGHKLAELYMARVVCLQGVPKKIVSDRGSQFTSMFWQKLQSELGTRLNFSTAYHPQTDGQTERVNQILEDMLRACVLDFGGSWDKNLPYAEFSYNNSYQASLQMSPNEALYGRKCCTPLLWDQTGERQVFGTDILREAEEKVKIIQERLRVAQSRQKSYADNRRRDLAFEEGDYVYLRVTPLRGVHRFXTKGKLAPRFVGPFKIVSRRGEVAYQLELPPSMAGIHDVFHVSQLKKCLRVPTEEADPGRIELQEDLTYVEKPVRILEFPTFRRRAFPLRKVPKHLWKPKASHTDPKQPFEHVDPV

SEQ ID NO: 122590 - protein, 1633 aa, Oryza sativa
  unsure (1)..(1633): unsure at all Xaa locations
  Clone ID: PAT_MRT4530_25505C.1.pep
MTSWYQSHLDLRISQMMPPHSLRNLIKVLGFVRELRLMAFEVGYEVAPEYRQISHDPDEEKCRVRVTLASDSEDLPSFKFEAGGRSYCHACQEAALVAIGELREHFEEELDSSAFQYHPHKPHGQDYGIYTCPDGEESATLMHAVHMLSAMDAVSVERDKAAHDRENWNRGKICKLESKVYRLQKELAELKGETPPPTPKLRLTPRKRICPPPRLQLASKIHVMGEAVPDRAEPVIDIISDEEEEEDPEEREPATPEEEDSSLRSDARRTTNPVEAGDWLHAVEKNLDLIQCTEQEKVSFASHQLHRPAAEWWDHFRQGRAEGEPITWQEFMAAFKKTHIPTGVVALKKREFRALNQGSRSVTEYLHDFNRLARYAPEDVRTDEERQEKFLEGLNDELSYALMSTDFRDFQQLVDKAIRQEDKYNRMEQKKHRAAQFKAQQGSNQRPRLVTGPQAPPYPQGGSSSVVCPQRQFYNNNTGNRGNDNRNTVARPAATPAQNQPVRKEQGSKPVICFNCGDPGHYADKCPKPRRVKNAPTPNNSNVPAPKARVNHVAAAEAQNAPDVVLGTFPVNSIPATVLFDSGATHSFLSKSFASNHGMEVISLGRPLLVNTPGNQVFSTQYCPSATIEIEEVPFPSSLILLESKDLDVILGMDWLSRHRGVIDCANRKVTLTSSNGETVSFFVSSPKYHGVILNQVALQEIPIVQDYPDVFPEDLPGMPPKRDIEFRIDLVPGTNPIHKRPYRMAANELAEVKRQVDDLLQKGYIRPSTSPWGAPVIFVEKKDHTQRMCVDYRALNEVTIKNKYPLPRIDDLFDQLEGATVFSKIDLRSGYHQLRIREEDIPKTAFTTRYGLFECTVMSFGLTNAPAFFMNLMNKVFMEYLDKFVVVFIDDILIYSKTKEEHEEHLRLALEKLREHXLYAKFSKCEFWLSEVKFLGHVISCGGVAVDPSNVESVLSWKQPKTVSEIRSFLGLAGYYCRFIENFSKIARPMTRLLQKEVKYKWTEDCERSFQELKKRLVTAPVLILPDSRKGFQVYCDASRLGLGCVLMQEGKVVAYASRQLRPHENNYPTHDLELAAVVHALKIWRHYLFGNRTEMYTDHKSLKYIFTQPDLNMRQRRWLELIKDYDMEIHYHPGKANVVADALSRKSYCNMSEGRHLPWELCQEFERLNLGIVSKGFVAALEAQPTLFDQVREAQVNDPDIQEIKKNMRRGKAIGFVEDEQGTVWLGERICVPENKELKDTIMKEAHETLYSIHPRSTKMYQDLKQQFWWASMRREIAEYVALCDVCQRVKAEHQKPAGLLQPLKIPEWKWEEIGMDFITGLPRTSAGHDSIWVVVDRLTKVAHFIPVKTTYTGNKLAELYMARVVCLHGVPKKIVSDRGSQFTSKFWQKLQLELGTRLNFSTAYHPQTDGQTERVNQILEDMLRACVLDFGGSWDKNLPYAEFSYNNSYQASLQMAPYEALYGRKCRTPLLWDQTGERQVFGTDILRQAEEKVKIIQXRLHVAQSRQKSYADNRRRDLAFEEGDYVYLRVTPLRGVHRFQTKGKLAPRFVGPFKIVSRRGEVAYQLELSPSMAGIHDVFHVSQLKKCLCVPTEEADPDRIELQEDLTYVEKPVRILEFPTFRRRAFPLRK

SEQ ID NO: 122591 - protein, 206 aa, Oryza sativa
  unsure (1)..(206): unsure at all Xaa locations
  Clone ID: PAT_MRT4530_25506C.1.pep
DPVKSIHFSNSNPMCHAFDPDAKDGHDLLIGLNSGDVYTVSLRQQLQDVSKKLVGALHYNKDGSVNNSRCTSISWVPGGDGAFVVAHADGNLYVYEKNKDGATESTFPAIRDPTQFSVDKAKYSKSNPVARWHICQGSINSIAFSNDGAHLATVGRDGYLRIFDFLTQKLVCGGKSYYGALLCCSWSMDGKYIXTGGEDDLXQVWS

SEQ ID NO: 122592 - protein, 42 aa, Oryza sativa
  Clone ID: PAT_MRT4530_25507C.1.pep
IHTLDKHNRCFFKGGIPLFFSTFHTLFNQIHLLTLSFHSFST

SEQ ID NO: 122593 - protein, 1244 aa, Oryza sativa
  Clone ID: PAT_MRT4530_25508C.1.pep
MEIPGVTSWYQSHLDLRISQMMPPHSPRNLIEVLGFVRELRLMAFEVGYEVAPEYRQISHDPDEEKCRVRVTLASDSEDLPSFKFEVGGRSYCHACQEVALVAIGELRQHFEEELDSSAFQYHPHKAHGQDYGTYTCPDGEESATLMHVVHMLSAMDAVSVERDKAAHDRENWNQGKICKLKSKVHRLQKELAELKGETPPPISKLRLTARKRTCPPPRLQLASKIRVMGEAMPNRAEPVIDIISDEEEEEDHKEREPATPEEEDSSFRSDARRNCCLHHWWDMVNTRTGSGSGSGSGATNNGGEPTLAQILAQQTQLINLLVQQAQNQQANNQNQNPPPPPQNKLADFLRVRPPTFSSTTNPVEAGDWLHAVEKKLDLIQCTEQEKVSFASHQLHGPAAEWWDHFRQGRAGGEPITWQEFTAAFKKTHIPSGVVALKKREFRALNQGSRSVTEYLHDFNRLARYAPEDVRTDEERQEKFLEGLNDELSYALMATDFRDFQQLVDKAIRQEDKYNRIEQKKRRAAQFKAQQGSNQRPRLITGPQAPSYPQGGSSSVARPQRQFYNNNTSNRGNDNRNMVACPAATPVQNQPVRKEQGSKPVICFNCGDPGHYADKCPKPRRVKNAPVPNNPNVPAPKARVNHVAAAEAQNAPDVVLGTFPVNSIPATVLFDSGATHSFLSKSFASKHGMEVVSLGRPLLVNTPGNQVFSTQYCPSVTIEIEEVPFPSSLILLESKDLDVILGMDWLSRHRGVIDCANRKVTLTNSNGETVSFFASSPKSHGVVLNQVALQEIPIVQDYPDVFPEDLPGMPPKRDIEFRIDLVPGTNPIHKRPYRMAANELAEVKKQVDDLLQKGYIRPSTSPWGAPVIFVEKKDHTQRMCVDYRALNEVTIKNKYPLPRIDDLFDQLEGATVFSKIDLHSGYHQLRIREEDIPKTAFTTRYGLFECTVMSFGLTNAPAFFMNLMNKVFMEYLDKFVVVFIDDILIYSKTKEEHEEHLRLALEKLREHQLYAKFSKCEFWLSEVKFLGHVISSGGVAVDPSNVESVLSWKQPKTVSEIRSFLGLAGYYRRFIENFSKIARPMTRLLQKEVKYKWTEDCERSFQELKKRLVTAPVLILPDTRKGFQVYCDASRLGLGCVLMQEGKVVAYASRQLRPHENNYPTHDLELAAVVHALKIWRHYLFGNRTEIYTDHKSLKYIFTQPDLNMRQRRWLELIKDYDMEIHYHPGKANVVADALSRMSRPAIH

SEQ ID NO: 122594 - protein, 81 aa, Oryza sativa
  Clone ID: PAT_MRT4530_25509C.1.pep
VSLLSQLLSSSRQVSGSWARPASLSDKSFLHHQFLGDACLLSSSEASCSSWLARQHGVWIQLVVRRFVARQAFSPAVWGLG

SEQ ID NO: 122595 - protein, 246 aa, Oryza sativa
  Clone ID: PAT_MRT4530_2550C.1.pep
LGGSRRPVTRLAPSRRNDESLQALVPSRSRRGNSWSWHVSPGQIHSRLHRNHYKERDRPREGRGGGERHRGGGGGRSARLPPFPPPRHRRRARHPRRHRPHPPSSAPPAAAARSRVTCYSRHPQPHHLPQPPPSSPFLSAALSRRVLPAPLGAARRRRVLPSPLGAARRRRVLPCHRVPLLSTAWRHPPPPRPPRAARRRPPPPCPPLPPRPPPQRRSAPPAAAASSLRSATARTPPSRPLLPPPL

SEQ ID NO: 122596 - protein, 480 aa, Oryza sativa
  Clone ID: PAT_MRT4530_25510C.1.pep
MASMAPPCPTPWLLQTSYHSGQQIYSQQVVDLMLHVLISLLNLHWPDTDSEQGGGGGGGAAYFGELEEALVHQVATLRRRAQQTATTTTSHHGHTTPFSTAAAAATATATARPPATLDIFPSWPMRRSSLPTPKDGCSNVTADTTDSESSSKNNGDQGAAAADMASQFDQIPQQQQKQHKKMAASSTHSDHRMTKTLDPKIMRRLAQNREAARKSRLRKKAYIQQLESSKLRLAQMEQDLERARSQGLLLGGSPGGNTSAGAAMFDAEYGRWLEDGGRRMAELHGGLHAHLPDGDLRAIVDDALAHYDELFRLRAAAAKADVFHLITGTWATPAERCFLWMGGFQPSDLLKTVAPQLDPLTEQQVVGICSLQQSSQQAEEALSQGLEQLHQSLAETVANGGSVVNEASLGSFMGYMALALGKLSNLEGFVIQADNLRQQTLHQMHRILTIRQAARCFLAIGEYHNRLRALSSLWASRPRE

SEQ ID NO: 122597 - protein, 138 aa, Oryza sativa
  Clone ID: PAT_MRT4530_25511C.1.pep
MCCKAIKLGAHTIGRAQCANFRDRIYNDTDIDASFAASLRAGCPQSGDGSGLAPLDESSPDAFDNGYFGGLLSQRGLLHSDQALFAGGGGSTDGLVRSYASSNDQFASDFSTAMVKMGNISPLTGSAGEIRVNCRAVN

SEQ ID NO: 122598 - protein, 172 aa, Oryza sativa
  Clone ID: PAT_MRT4530_25512C.1.pep
MHHRLKPLSTGRGTLGFLLHMTGQGIPSPSPPDTSQRVGAIPPVPSIHRLVIDRSQGGRRRTSVGLRRMPRHVALDVTGVVSAPLISAPGGWCSRPLKAPTWTPCGGRARASGTVQPLGPERYDEAHAEPESYCDGGLNHLSTCFSELAMALSSEIPEHPQRVNFTLPRESR

SEQ ID NO: 122599 - protein, 47 aa, Oryza sativa
  Clone ID: PAT_MRT4530_25513C.1.pep
MSGDQADGVYEELSVGCDNSAFVENVLDNGVYLTITYPKENGASPQR

SEQ ID NO: 122600 - protein, 79 aa, Oryza sativa
  unsure (1)..(79): unsure at all Xaa locations
  Clone ID: PAT_MRT4530_25514C.1.pep
PRVRHASATRPGRSELRLRDKXSNGVHDRAAARRAAAGRAQARRRQVQARRRQGRRRRLRRTHRTSGTARRGVAYSFVI

SEQ ID NO: 122601 - protein, 167 aa, Oryza sativa
  unsure (1)..(167): unsure at all Xaa locations
  Clone ID: PAT_MRT4530_25515C.1.pep
RECRGSGARAPRRWPELEXAPAAPSSPASGRRRSPTASTLSAQALLFQPPGQEQASGGPESSSCSASPTAARRASPPLSRAPPLPAAGTPAAPALLPRARLPLATSSLFPRTADDPLHPRAAVAGDLVPTPAPRPVTAAAAGDLVPASVPRPATHSPERVVAGELLT

SEQ ID NO: 122602 - protein, 45 aa, Oryza sativa
  unsure (1)..(45): unsure at all Xaa locations
  Clone ID: PAT_MRT4530_25516C.1.pep
ALSXSGLLKSKPFVKTHINIKSCPLGVVFTLRIFHIINGTDHLVQ

SEQ ID NO: 122603 - protein, 421 aa, Oryza sativa
  Clone ID: PAT_MRT4530_25517C.1.pep
MDQEIQLNQRPSPQRQQQAQEHGGATAPAPAPATPQDDEQQGHQAAVARHGCGGATAERHHQTKLTLLPLVFFIYFEVAGGPYGAEQAVSAAGPLFALLGFLAFPFAWGVPVSLVTAELAAALPGNGGFVVWADRAFGPLAGSLLGTWKYLSCVINLAAFPALVADYLGRVAPAVAVPGSRARTGTVLGMTVFLSFLNLGGLSIVGWGAVALGFVSLAPFVLMTAMAAPRTRPRRWAARVQVKGKRDWRLFFNTLFWNLNYWDSASTMAGEVERPERTFPRALAVAVVLIAVSYLLPLMAAIGATDAPPETWENGYLADAAGTCEGQTAEIFFFFFTAGPHWPGKPMDPSGGMISHGACMKRPYNSYNSFRNRLFSSGQHNKYLSGSKWQQRATIYKSDTCSKCIAEQNIEATTQLHRDRH

SEQ ID NO: 122604 - protein, 170 aa, Oryza sativa
  unsure (1)..(170): unsure at all Xaa locations
  Clone ID: PAT_MRT4530_25518C.1.pep
GLGIPDLRLAGFAMRVRWLWLQCSGHPYWXDEASIKTRGDGLKAPVEQSVSDMFAASTFIMLGNASPRFEHGCFWPGEQLHSPGVEDCLVWRWMSDQRFFLWFTFQQCRWTADLLQKHGIDRWLSSRACLREHLRAGFDSLVLLLALLPLLGSVGSVAWLGPFSLLGVCV

SEQ ID NO: 122605 - protein, 156 aa, Oryza sativa
  unsure (1)..(156): unsure at all Xaa locations
  Clone ID: PAT_MRT4530_25519C.1.pep
MVVLDTFLFTLEYVNEGHPDKLXRPSVNAALDACLTKDPDSKERXETCTKTNMDMVFGETTTKGNVDXDKIGRETCRNIGFVSGDEKLNADHWKVLVNIEQQPSDIAQGVHGHLTKCPEESGAGDQGHMVEYATDETRALMPLRHVLATKIGARLT

SEQ ID NO: 122606 - protein, 273 aa, Oryza sativa
  unsure (1)..(273): unsure at all Xaa locations
  Clone ID: PAT_MRT4530_2551C.1.pep
QSVLGHHPQLWQXRQTSRSTRPPAAATHASCCPLTAALVASSTAEEPPEGIRPPSPERPNPDWGSRCRNRGSHSRRRSPPPPSRRHRRRRRPGAGLLRGPAAGVGSGLGXARSSGAQARCLVPAASDVASARAATAPSSGLLRRRHDCPSQRLXDAARPAPLRPDLAARGPDPLTATLALLPLAVGVAGAASTRRRPSACFPSGPQPQGVGGGRRPRRRRPCRRPALPAAAQAAARWGRRGREGRRRGGFGSPPVLPWSGATRHEENLAVPLI

SEQ ID NO: 122607 - protein, 167 aa, Oryza sativa
  Clone ID: PAT_MRT4530_25520C.1.pep
MAYYARRGGDRVSGGRVNLLCHPTVDRWSGEYEVSIWEKEMRHWPLGLGVNSRPSARTIAKSFSRTKDMTWRPDLFSDSMAASGIETGTKLYISNLDYGVSNEDIKELFSEVGHLKRFAVHFDGYGRPNGTAEVVFTRRSDAIAALKRYNNVLLDGKAMKIEVIGSD

SEQ ID NO: 122608 - protein, 281 aa, Oryza sativa
  Clone ID: PAT_MRT4530_25521C.1.pep
MATPQLLLRRAFSSSFLSSPFRRPPLHPARSFVPPRAAMASSAAPFHMVQIQRDDTTFDAYVVGKENAPGIVVLQEWWGVDYEIKNHAVHISQIGEGYRALIPDLYRGKVALDVAEAQHLMEGLDWPGAVKDIQASVKWLKANGSPKVGVTGYCMGGALSIASGVSVPEVDAVVAFYGTPPSELADASKAQAPIQAHFGELDSFVGFADVTAAKSLEEKLKSSGVPHEVHIYPGCSHAFMNTSPEAVKRRKEMGLTDENQAAIDLAWSRFSTWMGRFLGSA

SEQ ID NO: 122609 - protein, 45 aa, Oryza sativa
  Clone ID: PAT_MRT4530_25522C.1.pep
SVMDSGIQGKATRRLRAVNNDMHQQYFRIMRQQFCSSVIYCCILL

SEQ ID NO: 122610 - protein, 185 aa, Oryza sativa
  unsure (1)..(185): unsure at all Xaa locations
  Clone ID: PAT_MRT4530_25523C.1.pep
HGYRYRHAHSIRLPSETSPKRRAKPRKPRSPPAQPRRAEPWTTVPTRAASRRTGSTAATTASTPPRRSAARRSPPRSSXGGARRGGAATAGASPRAAPPRVAQCGAGSGGGCCGQLSPRRWLVRLRDAYVSAMLRLASSPAVGFGAGAPYCTAGQESFARRSRGSKLTYACMRRHSSSIVSPNSS

SEQ ID NO: 122611 - protein, 54 aa, Oryza sativa
  Clone ID: PAT_MRT4530_25524C.1.pep
MVDRFGCNRLDAALIDCIAHLTSRLPHRFLRRGIFFAHRAARGSDAKKYEPNAL

SEQ ID NO: 122612 - protein, 66 aa, Oryza sativa
  Clone ID: PAT_MRT4530_25525C.1.pep
DWTWSVGCNPLSITSKGWQLSEFQRDVIARNYIITAVEESIQIINSAIQQLITERTSILIILLFLI

SEQ ID NO: 122613 - protein, 71 aa, Oryza sativa
  Clone ID: PAT_MRT4530_25526C.1.pep
CEELERVFKPRMHHLHFVMHVIFLFSPDFLVSVSAYCILLVLLLSRNLNLYLYMPILYLNLLNKKKKKKKK

SEQ ID NO: 122614 - protein, 68 aa, Oryza sativa
  unsure (1)..(68): unsure at all Xaa locations
  Clone ID: PAT_MRT4530_25527C.1.pep
SLIMRYCDIIADSGITHLSDLTDVKELLLAXCRNTDLAVNDLRGLSKLTQMNAEGCPKTAACKEAISG

SEQ ID NO: 122615 - protein, 816 aa, Oryza sativa
  unsure (1)..(816): unsure at all Xaa locations
  Clone ID: PAT_MRT4530_25528C.1.pep
MEDQSQLADINMAASSKQACDLAYQYQPQLVQAVSAAHLPGVSIQYIYACVGTHRNSLFHVELWEHCSIRQAPWPTNGQRSTGATRIRIIGIAAPALPLELVTAQHWLCGSVARIQLAPLTSASQVTAIAAEEIVGSPYDIHGLHRKVTPPPAPSPGFFRGKAMNPSFSDPTVTLLTGSTMLAVVSCARERKNYVVHLDPREDGGVADSVELWHRSFLPEATPEAAGDDGPRIIYSYSHVLSGFAAQLTDDEAEAMRKKEGCIRLYPEEFLPLATTHSPGFLGLHLGNDGFWSRSGHPSFGDAGMPPPPKKWKGTCEFKAISGGGCNNKIIGARAFGSAAVNATAPPVDDAGHGTHTASTAAGNFVENADVRGNAHGTASGMAPHAHLAIYKVCTRSRCSIMDIIAGLDAAVKDGVDVLSFSIGASPGAPFNYDLVAIATFKAMEHGIFVSSAAGNDGPVAATVGNGAPWMLTVAAGTMDRAIRTTVTLGNGQVFDGESLYQPRNNTAGRQLPLVFPGLNGDSDSRDCSTLVEEEVSGKVVLCESRSIVEHVEQGQTVSAYGGAGMILMNKPVEGYTTFADAHVLPASHVSYAAGSKILSYIKSTPKPTASVTFKGTVMGSSPAPSVAFFSSRGPNKASPGVLKPDITGPGMNILAAWAPGEMHTEFADGVSLSCFPPPGTXLIPPXLCRTAPEVKGRRAAYHPAGLKAATGAASDLPCLVGDLLTHPVHCHPSVDNVGKGDSLWPRVVDMPKNVAVTVHPPLLRFSRAYEKQSFTVTVRWAGQPAVAGVEGNLKWVSDEHVVRSPIVIPPAKAVV

SEQ ID NO: 122616 - protein, 169 aa, Oryza sativa
  Clone ID: PAT_MRT4530_25529C.1.pep
GSAAVNATAPPVDDAGHGTHTASTAAGNFVENADVRGNAHGTASGMAPHAHLAIYKVCTRSRCSIMDIIAGLDAAVKDGVDVLSFSIGASPGAPFNYDGVKEITHRRVSCAKLKAITEAELNYPSLVVKLLSQPITVHRIVTNVGKANSVYTAVVDMPKNSRGHRAPAI

SEQ ID NO: 122617 - protein, 377 aa, Oryza sativa
  Clone ID: PAT_MRT4530_2552C.1.pep
MEAMKNFVKGLQDVFGERYLRRPTMEDTERLLQLGEKRGFPGMFGSIDCMHWHWERCPVAWKAGSNNDINVLNQSTVFIKELKGQAPRVQYMGIFYPASTSNQIYTVAVVTKGPVYISAVHCPIVSGGALPSPRMVAAASSLPSRSGEALPWLPAVGSCGDEGVGGFPGGGGAIPAVTTVSAASHGDLVGAVDSTTTNESSRRTTWLGAWRLRPDLVGATCSAADKSTTHGCRGCRQCDGRRWEVAYLPCQGSSIWRTGKAIGLAVNATKEAIGLAVNFNKCSITLLHYSKAQVAEVTELLGCPVKQLPIVYLRLPLSGDENAAGGCSLIACNKLCLPFGNGGLGIKDLQLMVRDMCSRQLEDSLLPLSPEAYADLQ

SEQ ID NO: 122618 - protein, 180 aa, Oryza sativa
  unsure (1)..(180): unsure at all Xaa locations
  Clone ID: PAT_MRT4530_25530C.1.pep
MRTQRILLAVVVSMVVSSAMLAVVSCARERKNYVVHLDPREDGGVADSVELWHRSFLPEATPEAAGDDGPRIIYSYSHVLSGFAAQLTDDEAEAMRKKEGCIRLYPEEFLPLATTHSPGFLGLHLGNDGFWSRSGFGRGVVIGLXDTGILPSHPSFGDAGMPPPPKKWKGTCEFKDLCGG

SEQ ID NO: 122619 - protein, 1236 aa, Oryza sativa
  unsure (1)..(1236): unsure at all Xaa locations
  Clone ID: PAT_MRT4530_25531C.1.pep
VTSWYQSHLDLRISQMMPPHSPRNLIEVLGFVRELRLMAFEVGYEVAPEYRQISHDPDEEKCRVRVTLASDREDLLSIKFEAGGRSYSHACQEVALVAIGELRQRFEEELDSSAFQYHPHKPHGQDYGTYICPDGEESATLMHAVHMLSAMDAVSVERDKAAHDRENWNRGKICKLESKVYRLQNELAELKGETPPPTPKLRVTLRKRTCPPPRLQLASKIRVMGEAVPDRAEPVIDIISDEEEEEDPEEREPATPEEEDPSLRSDARRTTNPVEAGDWLHAVEKKLDLIQCTEQEKVSFASHQLHGPAAEWWDHFRQGRAEGEPITWQEFTAAFKKTHIPAGVVALKKREFRALNQRSRSVTEYLHDFNRLARYAPEDVRTDEERQEKFLEGLNDELSYALMSTDFRDFQQLVDKAIRQEDKYNRMEQKKRRAAQFKAQQGSNQRPRLVTGPQAPSYPQVGSSSVVRPQRQFYNNNTGNRGNDNRNMVARPAATSAQNQPVRKEQGSKPVICFNCGDPGHYADKCPKPRRVKNAPAPNNSNVPVPKARVNHVAAVEAQNAPDVVLGTFPVNSIPATVLFDSGATHSFLSKSFASNHGMEVISLGRPLLVNTPGNQVFSTQYCPSVTIEIEEVPFPSSLILLESKDLDVILGMDWLSRHRGVIDCANRKVTLTSSNGETVSFFASSPKSHGVTLNQVVLQEIPIVQDYPDVFPEDLPGMPPKRDIEFRIDLVPGTNPIHKRPYRMAANELADVKRQVDDLLQKGYIRPSTSPWGAPVIFVEKKDHTXRMCVDYRALNEVTIKNKDPLPRIDDLFDQLKGATVFSKIDLRSGYHQLRIREEDIPKTAFTTRYGLFECTVMSFGLTNAPAFFMNLMNKVFMEYLDKFVVVFIDDILIYSKTKEEHEEHLRLALEKLREHQLYAKFSKCEFWLSEVKFLCHVISSGGVAVDPSNVESVLSWKQPKTVSEFRSFLGLAGYYRSFIENFSKIARPMTRLLQKEVKYKWTDDCEQSFXELKKRLVTAPVLILPDSRKGFQVYCDASRLGLGCVLMQEGKVVAYASRQLRPHENNYPTHDLELAAVVHALKIWRHYLFGNRTEMYTDHKSLKYIFTQPDLNMRQRRWLELIKDYDMEIHYHPGKANVVADALSRKSYCNMSEGRRLPWELCQEFENLNLGIVNKGFVAALQAKPTLFDQVRXTPGNSLVISELKESNREEIELGFFRDKTKRVRFGSKPPRFV

SEQ ID NO: 122620 - protein, 1777 aa, Oryza sativa
  Clone ID: PAT_MRT4530_25532C.1.pep
MVPGLEWLVPGLEVIFVQLGLVVQMWLGLCNMEIPGVTSWYQSHLDLRISQMMPRHSPRNLIEVLGFVRELRLMAFEVGYEVAPEYRQIPHDPDEEKCRVRVTLASDSEDLPSFKFEAGGRSYCHACQEVALVAIGELRQHFEEELDSSAFQYHPHKPHGQDYGTYICPDGEESATLMHAVHMLSAMDAVSVERDKAAHDRENWNRGKICKLESKVYRLQKELAELKGEMPPPTPKLRLVARKRTCPPPRLQLASKIRVMGEAVPDRAEPVIDIISDEEEEEDPEEREPATPEEEDSSLRSDASCCLHHGWDMVNTRTGTGSGSGSGANNNEGEPTLAQILAQQTQLINLLVQQAQNQQGNNQNQNPPPPPQNKLADFLRVRPPTFSSTTNPVEAGDWLHAVEKKLDLIQCTEQEKVSFASHQLHGPAAEWWDHFRQGRAGGEPITWQEFTAAFKKTHIPSGVVALKKREFRALNQGSRSVTEYLHDFNRLARYAPEDVRTDEERQEKFLEGLNDKLSYALMSTDFQDFQQLVDKAIRQEDKYNRMEQKKRRAAQFKAQQGSNQRPRLVTGPQVPSYPQGGSSSVVRPQRQFYNNNTGNRGNDNRNVVARPAATPVQNQPVRREQGSKPVICFNCGDPGHYADKCPKPRRVKNAPAPNNFNVPAPKARVNHVAAAEAQNAPDVVLGTFPVNSIPATVLFDSGATHSFLCKSFAIKHGMEVVSLGRPLLVNTPGNQAFSTRYCPSVTIEIEEVPFPSSLILLESKDLDVILGMDWLSRHRGVIDCANRKVTLTSSNGETVSFFASSPKSHGEVLNQVALQEIPIVQDYPDVFPEDLPGMPPKRDIEFRIDLVPGTNPIHKRPYRMAANELAEVKKQVDDLLQKGYIRPSTSPWGAPVIFVEKKDHTQRMCVDYRALNEVTIKNKYPLPRIDDLFDQLKGATVFSKIDLRSGYHQLRIREEDIPKTAFTTRYGLFECTVMSFGLTNAPAFFMNLMNKVFMEYLDKFVVVFIDDILIYSKTKEEHKEHLRLALEKLREHQLYAKFSKCEFWLSEVKFLGHVISSGGVAVDPSNVESVLSWKQPKTVSEVRSFLGLAGYYRRFIENFSKIARPMTRLLQKEVKYKWTEDCEQSFQELKKRLVTAPVLILPDSRKGFQVYCDASRLGLGCVLMQEGKVVAYASRQLRPHENNYPTHDLELAAVVHALKIWRHYLYGNRTEVYTDHKSLKYIFTQPDLNMRQRRWLELIKDYDMEIHYHPGKANVVADALSRKSYCNMSEGRCLPWELCQEFEKLNLGIVSKGFVAALEAKPTLFDQIREAQVNDPYIQEIKKNMRRGKAIGFVEDEQGTVWLGERICVPENKELKDTIMKEAHETLYSIHPGSTKMYQDLKQQFWWASMRREIAEYVALCDVCQRVKAEHQKPAGLLQPLKIPEWKWEEIGMDFITGLPRTSAGHDSIWVVVDRLTKVAHFIPVKTTYTGHKLAELYMARVVCLHGVPKKIVSDRGSQFTSKFWQKLQSELGTRLNFSTAYHPQTDGQTERVNQILEDMLRACVLDFGGSWDKNLPYAEFSYNNSYQASLQMSPNEALYGRKCRTPLLWDQTGERQVFGTDILREAEEKVKIIQERLRVAQSCQKSYADNRRRDLVFEEGDYVYLRVTPLRGVHRFQTKGKLAPRFVGPFKIVSRRGEVAYQLELPPSMAGIHDVFHVSQLKKCLRVPTEEADPDCIELQEDLTYVEKPVRILEFPTFRRRAFPLRKVPKRLWKLKASHTDPKQPFEHVDPV

SEQ ID NO: 122621 - protein, 163 aa, Oryza sativa
  Clone ID: PAT_MRT4530_25533C.1.pep
MEKEHIKMAILKQEQTFRQQQEQTFRQQVNELHRVYRVQKQLMIEMQSISTQAQAKADNRTIPRLEMDHQQWYRNSGEKKAPEFVEDFDLELTLATGAGRKQEKPSNSDSGATVSSSTSAESESEQRFPESNVALRFQNESKRHDDQLMQSPWLYQCLSLKMA

SEQ ID NO: 122622 - protein, 325 aa, Oryza sativa
  unsure (1)..(325): unsure at all Xaa locations
  Clone ID: PAT_MRT4530_25534C.1.pep
GRGKGKYHREDCTREVYGRASLRVSSAQDAWPEGNNHCSGKHETSAASSSPAPPPIRGEIAEDAPPPASSGFASTVPSPAGCCSSPVHRSTPPSPPSTPRHRLLPRHHLLLARSSPEWPPRRLPVPPGLRSAPVRRRSCRRRPVGRPARRLAAPPPSSSSQRRVSRRPRLRAATAGCPRRLLAGPGRRRRRPLVILVVVAFVPPSSRPRPSSRPRRPRPRLRFARRPSERRRPRRPEPRRRLPPLRPPFPSLPSTRGEPWTAPFVSLSSPLSRAPLRRAGGRRRXPSGRGCAVSRRLCRRGRLRARPAAARXGPAVSRPRPRVRL

SEQ ID NO: 122623 - protein, 144 aa, Oryza sativa
  Clone ID: PAT_MRT4530_25535C.1.pep
VRDMNGLKLAGFSTTKLGLGSSRKRTTRRRGIRQRPWGKWAAAITDPSKGMRGWLGTFGTGEDGVMAYDMKARRIRRKKAKVNLRDTVADGPKRPRRSSAKHSPHKQKARSSAPSTASLNASDAKSKTNNNRVSSGGSRTDTTD

SEQ ID NO: 122624 - protein, 566 aa, Oryza sativa
  unsure (1)..(566): unsure at all Xaa locations
  Clone ID: PAT_MRT4530_25536C.1.pep
MAFEVGYEVAPEYRQISHDPDEEKCRVRVTLASDSEDLPSYKFEAGGRSYCHACQEVALVAIGELRQHFEEELDSSAFQYHPHKPHGQDYGTYTCPDGEESATLMHVVHMLSAMDAVSVERDKAAHDRENWNRGKICKLKSKVHRLQKELAELKGETPPPTSKLRLTARKRTCPPPRLQLASKIRVMGEAVPDCAQPVIDIISDEEEEEDPKEREPATPEEEDSSLRSDARXMQQEQNQQGNNQNQNPPXPPQNKLADFLRVRPPTFSSTTNPVEAGDWLHAVEKKLDLIQCTEQEKVSFASHQLHGPAAEWWDHFRQGRAGGEPITWQEFTAAFKKTHIPSGVVALKKREFRALNQGSRSVTEYLHDFNRLARYAPEDVRTDEERQEKFLEGLNDELSYALMSTDFRDFQQLVDKAIRQEDKYNRMEQKKRRAAQFKAQQGSNQRPRLVTGPQAPSYPQGGSSSVVRPQRQFYNNNTGNRGNDNRNVIARPAATPVQNQSVRKEQGSKPVICFNCGDPGHYADKCPKPRRVKNVPAPNNSNVPAPKARVNHVVAAEAQNAPDVVL

SEQ ID NO: 122625 - protein, 102 aa, Oryza sativa
  Clone ID: PAT_MRT4530_25537C.1.pep
MAVAGRDTAARRQWRQCDGGARHGGSVQQWCDKAAHSTAAKRRGGVARQGETASTARRQPARQCSGTAVAVAAQRAAVQWRSSKHSTWQRQQRHRHGSAAAR

SEQ ID NO: 122626 - protein, 64 aa, Oryza sativa
  unsure (1)..(64): unsure at all Xaa locations
  Clone ID: PAT_MRT4530_25538C.1.pep
QNHRHALGPAPPPQSLYTLAHRDPPRPTPRRXPRRHQTMADAEXYLDPGTQTLINTXPNRAPQA

SEQ ID NO: 122627 - protein, 597 aa, Oryza sativa
  unsure (1)..(597): unsure at all Xaa locations
  Clone ID: PAT_MRT4530_25539C.1.pep
RYAPEDVRTDEERQEKFLEGLNDELSYTLMSTEFRDFQQLMDKAIRQEDKYNRMEQKKRRAAQFKAQQGSNQRPRLVTGPQVPSYPQGGSSSVVRPQRQFYNNNTGNRSNDNRNVVARPAATSVQNQPVRKEQGSKPVICFNCGDPGHYADKCPKPRRVKNVPAPNNSNVPAPKARVNHVAAAEAQNAPDVVLGTFPVNSIPATVLFDSGATHSFLSKSFASKHGMEVVSLGRPLLVNTPGNQVFSTRYCPSVTIEIEEVSFPSSLILLESKDLDVILGMDWLSRHRGIIDCANRKVILTNSNGKTVSFFASSPKFHGVILNQVALQEILIVQXSSRVFPEDLSGMPLKRDIEFRIDLVLATNPIHKRPCTGNFRASVIHVSVRVKKQVDDWAQKGYIRPSTSPWGAPVIFVEKKDHTQRMCVDYRALNEVTIKNKYPLPRIDDLFDQLKGATVFSKIDVRSGYHQLRIREEDIPKTAFTTRYGLFECTVMSFGLTNAPAFFMNLMNKVFMEYLDKFVVVFIDDILIYSKTKEEHEEHLRLALDKLREHQLYAKFSKCEFWLSEVKFLGHVISSGGVAVDPSNVESVLSWKQPKTVS

SEQ ID NO: 122628 - protein, 358 aa, Oryza sativa
  unsure (1)..(358): unsure at all Xaa locations
  Clone ID: PAT_MRT4530_2553C.1.pep
MDSKDGFSNNKLLDDFGCGEIXHDRSTSSDEIGIIIINYSIRRDRPSFKMSLPRRIMXNVVDREALAEQLSTRVGCGRVHHIIENDLNKCRVVAPNLPTKTDNLSHSTGHGWTTXEKRVAISRTXNFHWCSRDDSTRSLVLQPVLSNLSHHNLHWCSRDDSTRSLVLEPWSSNQYVALSRTATSIGVREIILLVRYTYSLVLNQSIVAISRTFTSSGXVTTTTWFSTRGVAILPLFSLQXWSGYDYYLVLDQRCSDSPITSTPTELISGAQYRQVFCPEIPYHKRHLALKPILMSLYVVLTKPLRNLRELRLGTPRADKALSDPSETKDHTLRLLDHSRTVGGYRQGIRNEEMVYRPR

SEQ ID NO: 122629 - protein, 78 aa, Oryza sativa
  unsure (1)..(78): unsure at all Xaa locations
  Clone ID: PAT_MRT4530_25540C.1.pep
PPGQPSTPPTSPEVKEGEKXKKRSSTPTAPRRDSQKKNPYRRTHFNVASIKTKMFLLHESPSLKNYGTADLILKKKKQ

SEQ ID NO: 122630 - protein, 227 aa, Oryza sativa
  unsure (1)..(227): unsure at all Xaa locations
  Clone ID: PAT_MRT4530_25541C.1.pep
MCNVRLITKNIAQLTHNRGHGYSNSFTLIRGVPLYPQDTIPXMSPCALAPPRYLGXNCDNTPRTTQLTTVHRSWIIISPSKPEAMDSPATPTDFSPLHNLAHYNESCYTKDKAGTTTGATDLGRAIRGHLCVEGDDTISTVLTNATNDDGWWPAARLCGGGGSVDGGGGFTATDDSGEGAAELALPHAHLTAVRKGGGDNASGGAARLSGGRRWRRLGRHGGDSTGH

SEQ ID NO: 122631 - protein, 1576 aa, Oryza sativa
  Clone ID: PAT_MRT4530_25542C.1.pep
MAFEVGYEVAPEYRRISHDPNEEKCHVRVTLASDREDLPSIKFEAGGRSYSHACQEAALVAIGELRQRFEEELDSSAFQYHPHKPHGQDYGTYTCPDGEESAALMHAVHMLSAMDAVSVERDKAAHDRENWNRGKICKLESKVYRLQKELAELKGETPPPTPKLRLIARKRTCPPPRLQLASKIRVMGEAVPNRAEPVIDIISDEEEEEDPEEREPATPEEEDPSLRSDARRDYTTNPVEAGDWLHPVEKKLDLIQCTEQEKVSFASHQLHGPAAEWWDHFRQGRAEGEPITWQEFTAAFKKTHIPTGVVALKKREFRALNQGSRSVTEYLHDFNRLARYAPEDVLTDEERQEKFLEGLNDELSYALMSTDFRDFQQLVDKAIRQEDKYNRMEQKKRRAAQFKAQQGSNQRPRLVTGPQAPSYPQGGSSSVVRPQRQFYNNNTATPAQNQSVRKEQGSKPGVCFNCGDPGHYADKCPKPRCVKNVPAPNNSNAPAPKARVNHVAAAEAQNAPDVVLGTFPVNSIPASVLFDSGATHSFLSKSFASNNGMEVISLGRPLLVNTPGNQVFSTQYCPSVTIEIEEVPFPSSLILLESKDLDVILGMDWLSRHRGVIDCANRKVTLSSSNGETVSFFVSSPKYHGVILNQVALQEIPIVQDYPDVFPEDLPGMPPKRDIEFRIDLVPGTNPIHKRPYRMAANELAEVKRQVDDLLQKGYIRPSTSPWGAPVIFVEKKDHTQRMCVDYRALNEVTIKNKYPLPRIDDLFDQLEGATVFSKIDLRSGYHQLRIREEDIPKTAFTTRYGLFECTVMSFGLTNAPAFFMNLMNKVFMEYLDKFVVVFIDDILIYSKTKEEHEEHLRLALEKLREHQLYAKFSKCEFWLSEVKFLGHVISSRGVAVDPSNVESVLSWKQPKTVSEIRSFLGLAGYYRRFIENFSKIARPMTRLLQKEVKYKWTEDCEQSFQELKKRLVTAPVLILPDSRKGFQVYCDASRLGLGCVLMQEGKVVAYASRQLRPHENNYPTHDLELAAVVHALKIWRHYLFGNRREMYTDHKSLKYIFTQPDLNMRQRRWLELIKDYDMEIHYHPGKANVVADALSRKSYCNMSEGRHLPWELCQEFEKLNLDIVSKGFVATLQAQPTLFDQVREAQVNDLDIQEIKKNMRRGKAIGYVEDEQGTVWLGERICVPENKELKDTIMKEAHETLYSIHPGSTKMYQDLKQQFWWASMRREIAEYVALCDVCQRVKAEHQKPASLLQPLKIPEWKWEEIGMDFITGLPRTSAGHDSIWVVVDRLTKVAHFIPVKTTYTGNKLAELYMARVVCLHGVPKKIVSDRGSQFTSKFWQKLQVEMGTRLNFSTAYHPQTDGQTERVNQILEDMLRACVLDFGGSWDKNLPYAEFSYNNSYQASLQMAPYEALYGRKCRTPLLWDQTGERQVFGTDILREAEEKVKIIQERLRVAQSRQKSYADNRRRDLAFEEGDYVYLRVTPLRGVHRFQTKGKLAPRFVGPFKIVSRRGEVAYQLELPPSMAGIHDVFHVSQLKKCLRVPTEEADPDRIELQEDLTYVEKPVRILENFLGII

SEQ ID NO: 122632 - protein, 1695 aa, Oryza sativa
  Clone ID: PAT_MRT4530_25543C.1.pep
MGVAGESMPCFKGGDYDPGKVHCGELCYARDIVTIPFRDTVVVLRHMMPHRSPRNLIKVLGFVRELRLMAFEVGYEVAPEYRQIPHDPDEEKCRVRATLASDSEDLPSFKFEAGGRSYSHACQEVALVAIGELRQHFEEELDSSAFQYHPHKPHGQDYGSYTCPDGEESATLMHVVHMLNAMDTVGVEREKAAHDRENWNRDKICKLKSKVNRLQKELAELKGETPPPTSKLRLTARKRTCLPPRLQLASKIRVMGEAVPDRAEPVIDIISDEEEEEDPEEREPATPEEEDSSLHFLRVRPPTFSSTTNPVEAGDWLHAVEKKLDLIQCTEQEKVSFASHQLHGPAAEWWDHFRQGRAGGEPITWQEFTAAFKKTHIPTGVVALKKREFRALNQGSRSVTEYLHDFNRLARYAPEDVHTDEERQEKFLEGLNDELSYTLMSTEFRDFQQLVDKAIRQEDKYNRMEQKKRRAAQFKAQQGSNQRPRLIPGPQVPSYPQGGSSSVVRPQRQFYNNNTGNRGNENRNVVARPAATPVQNQPVRKEQGSKPVICFNCGDPGHYADKCPKPRHVKNVPVPNNSNVPAPKARVNHVAAAEAQNAPDVVLGTFPVNSIPATVLFDSGATHSFLSKSFATKHGMEVVSLGRPLLVNTPGNQVFSTRYCPSVTIEIEGVPFPSSLILLESKDLDVILGMDWLSRHRGVIDCANRKVTLTNSNGETVSFFASSPKSHGVVLNQVALQEIPIVQDYPDVFPEDLPGMPPKRDIEFRIDLVPGTNPIHKRPYRMAANELAEVKKQVDDLIQKGYIRPSTSPWGAPVIFVEKKDHTQRMCVDYRALNEVTIKNKYPLPRIDDLFDQLEGATVFSKIDLRSGYHQLRIREEDIPKTAFTTRYGLFECTVMSFGLTNAPAFFMNLMNKVFMEYLDKFVVVFIDDILIYSKTKEEHEEHLRLALEKLREHQLYAKFSKCEFWLSEVKFLGHVISSGGVAVDPSNVESVLSWKQPKTVSEIRSFLGLAGYYRRFVENFSKIARPMTRLLQKDVKYKWTEDCEQSFQELKKMLVTAPVLILPDSRKGFQVYCDASRHGLGCVLMQEGKVVAYASRQLRPHENNYPTHDLELAAVVHALKIWRHYLFGNRTEIYTDHKSLKYIFTQPDLNMRQRRWLELIKDYDMEIHYHPGKANVVADALSRKSYCNMSEARCLPWELCQEFERLNLGIVSKGFVATLEAKPTLFDQIREAQMNDPDIQEIKKNMRRGKAIGFVEDEQGTVWLGERICVPENKELKNTIMKEAHETLYSIHPGSTKMYQDLKLQFWWASMRREIAEYVALCDVCQRVKAEHQKPAGLLQPLKIPEWKWEEIGMDFITGLPRTSAGHDSIWVVVDRLTKVAHFIPIKTTYTGHKLAELYMARVVCLQGVPKKIVSDRGSQFTSMFWQKLQSELGTRLNFSTAYHPQTDGQTERVNQILEDMLRACVLDFGGSWDKNLPYAEFSYNNSYQASLQMSPNEALYGRKCCTPLLWDQTGERQVFGTDILREAEEKVKIIQERLRVAQSRQKSYADNRRRDLAFEEGDYVYLRVTPLRGVHRFQTKGKLAPRFVGPFKIVSRRGEVAYQLELPPSMAGIHDVFHVSQLKKCLRVPTEEADPDCIELQEDLTYVEKPVRILEFPTFRRRAFPLRKVPKRLWKLKASHTDPKQPFEHVDPV

SEQ ID NO: 122633 - protein, 956 aa, Oryza sativa
  Clone ID: PAT_MRT4530_25544C.1.pep
MVNTRTGSGSGSGSGATNNGGEPTLAQILAQQTQLINLLVQQAQNQQANNQNQNPPPPPQNKLADFLRVRPPTFSSTTNPVEAGDWLHAVEKKLDLIQCTEQEKVSFASHQLHGPAAEWWDHFRQGRAGGEPITWQEFTAAFKKTHIPSGVVALKKREFRALNQGSRSVTEYLHDFNRLARYAPEDVRTDEERQEKFLEGLNDELSYALMATDFRDFQQLVDKAIRQEDNNQRPRLITGPQAPSYPQGGSSSVARPQRQFYNNNTSNRGNDNRNMVACPAATPVQNQPVRKEQGSKPVICFNCGDPGHYADKCPKPRRVKNAPVPNNPNVPAPKARVNHVAAAEAQNAPDVVLGTFPVNSIPATVLFDSGATHSFLSKSFASKHGMEVVSLGRPLLVNTPGNQVFSTQYCPSVTIEIEEVPFPSSLILLESKDLDVILGMDWLSRHRGVIDCANRKVTLTNSNGETVSFFASSPKSHGVVLNQVALQEIPIVQDYPDVFPEDLPGMPPKRDIEFRIDLVPGTNPIHKRPYRMAANELAEVKKQVDDLLQKGYIRPSTSPWGAPVIFVEKKDHTQRMCVDYRALNEVTIKNKYPLPRIDDLFDQLEGATVFSKIDLHSGYHQLRIREEDIPKTAFTTRYGLFECTVMSFGLTNAPAFFMNLMNKVFMEYLDKFVVVFIDDILIYSKTKEEHEEHLRLALEKLREHQLYAKFSKCEFWLSEVKFLGHVISSGGVAVDPSNVESVLSWKQPKTVSEIRSFLGLAGYYRRFIENFSKIARPMTRLLQKEVKYKWTEDCERSFQELKKRLVTAPVLILPDTRKGFQVYCDASRLGLGCVLMQEGKVVAYASRQLRPHENNYPTHDLELAAVVHALKIWRHYLFGNRTEIYTDHKSLKYIFTQPDLNMRQRRWLELIKDYDMEIHYHPGKANVVADALSRKSYCNMSEGRRLPWELCQEFES

SEQ ID NO: 122634 - protein, 56 aa, Oryza sativa
  unsure (1)..(56): unsure at all Xaa locations
  Clone ID: PAT_MRT4530_25545C.1.pep
IKCTGFLKFICRNFYNTYYFILKTIEFESKLKSDIXFCGKNFRCINFSYIIKLSRK

SEQ ID NO: 122635 - protein, 155 aa, Oryza sativa
  unsure (1)..(155): unsure at all Xaa locations
  Clone ID: PAT_MRT4530_25546C.1.pep
LVLEERARALDQRETTLAAHEATAAEAESALRLREEVAAERTRTTTAAEAVVAHRAEEAAMAARASELEAREKELASRGQPGDXASQLATAQDTLADLGRLVQDQAGEIAALHLANDIGPGQLHDAIERLERAGRRVGISMRRDKKLPSTRPVLA

SEQ ID NO: 122636 - protein, 102 aa, Oryza sativa
  Clone ID: PAT_MRT4530_25547C.1.pep
NSSAYKIEPHRYNREESLFVLKGFMMRKLLAKANSIKGMYPNNPELARTDCSYDLYINSKLTSDAPLKKLIDIMIAENKAAAYINIDAVHVNTVLGPFIFDR

SEQ ID NO: 122637 - protein, 40 aa, Oryza sativa
  Clone ID: PAT_MRT4530_25548C.1.pep
CFPLESMAARNDYRSVLCGLLIQYVLVALSIRRVLVFLVL

SEQ ID NO: 122638 - protein, 56 aa, Oryza sativa
  Clone ID: PAT_MRT4530_25549C.1.pep
PSFVPAEGVPGRNRMDGVDDGGDSRMYIDCRHVRALLRRYYWADLVVWYLMTGERY

SEQ ID NO: 122639 - protein, 599 aa, Oryza sativa
  Clone ID: PAT_MRT4530_2554C.1.pep
MNMARSGDVSRCHRCGLWSNGSAPITVSASITMRSSRVTAHAVYLDYPTRTEQKNGGNLVVMRPDRRRPRDDFFKGEGGGGSLVVVQPDRDRRPQDDFGRAAADSEKDVSPIHAKPRKPLDQNPEGMDVAGFSKHGGKCYADNLRRYCNSGKLIQACCVIDEMVLHGQIPETKCCVRIIRGLVKTGKANKARHVLEVMVLSGGVPDTISCNMLIAQLCRGGQLSSALQVLEDMRFSGCSPSGITFNTLIRCMFNQRMYDRAISFWKEQLRLGWPPYEMTSTLLVDLVCKNCGPQKALEVLDELSLEGCQPDVVTYNALISASCKAGRLNDAKFILTRLAAEGLEPNGTTYCILLHALCNMRRWDEVCDLLEDMNQVNRDPDVTTYNIFINYFCKYGHLDQAIDVLERMVINNCSPDIVTCNTLLNAISKKGMVEEALGIARCIRENGYKLVLITYNTLIDALAKKAEVKKAMVLFDEMLSDGISPDDITYGSLVMGFCKKDMADEALDLLNQMLTLGFEVKTTTFVMVIQALCRDGKVEAAAEITKVMLSKNSIPGNSLCSSIVTKVAKSGWNKEAQMLHQKLVECEILKEDAEVILSS

SEQ ID NO: 122640 - protein, 126 aa, Oryza sativa
  unsure (1)..(126): unsure at all Xaa locations
  Clone ID: PAT_MRT4530_25550C.1.pep
LLQQKGLSLYNEFVRQQYSFVASTFLQXIAFXLRSNKVLYQLRLLAQQSHYQDISVVQAIAHXVHLQQFGNLYIDRNLAQAQALLAFNLPCAYGINPWSYSAPDSITTIGGVLNEFSKYCSLKVKI

SEQ ID NO: 122641 - protein, 132 aa, Oryza sativa
  Clone ID: PAT_MRT4530_25551C.1.pep
VQSVVSGENGCRSCCWARADEEPLLQGAVSLGLGLHVMLAKPERRAECTKDWESGIVAARHSSMILSCLCPTSTALVPFSIDFSSEPERRASRAQISKVRGRSSGSIRSGTATPPPHPPRREPRARRDEHET

SEQ ID NO: 122642 - protein, 484 aa, Oryza sativa
  unsure (1)..(484): unsure at all Xaa locations
  Clone ID: PAT_MRT4530_25552C.1.pep
MAAPSVAVDNLNPKVLNCEYAVRGEIVIHAQRLQQQLQTQPGSLPFDEILYCNIGNPQSLGQKPVTFFREVIALCDHPCLLEKEETKSLFSADAISRATTILASIPGRATGAYSHSQGIKGLRDAIAAGIASRDGYPANADDIFLTDGASPGVHMMMQLLIRNEKDGILCPIPQYPLYSASIALHGGALVPYYLNESTGWGXLEISDLKKQLEDSRLKGIDVRALVVINPGNPTGQVLAEENQRDIVKFCKNEGLVLLADEVYQENIYVDNKKFNSFKKIARSMGYNEDDLPLVSFQSVSKGYYGECGKRGGYMEITGFSAPVREQIYKVASVNLCSNITGQILASLVMNPPKAGDASYASYKAEKDGILQSLARRAKALENAFNSLEGITCNKTEGAMYLFPQLSLPQKAIDAAKAANKAPDAFYALRLLEATGIVVVPGSGFGQVPGTWHIRCTILPQEEKIPAIISRFKAFHEGFMAAYRD

SEQ ID NO: 122643 - protein, 116 aa, Oryza sativa
  unsure (1)..(116): unsure at all Xaa locations
  Clone ID: PAT_MRT4530_25553C.1.pep
YSTSIRSTNIFAENDNKVEENRHQHRRXINRTMLRVRLMHEWAKNSELTRHTGPNFTSLRRRTTEEATCRIWARLGRPLVRPNLPRCRWIQVLAGRRGSLPNEGWRAIPTIPTATT

SEQ ID NO: 122644 - protein, 101 aa, Oryza sativa
  Clone ID: PAT_MRT4530_25554C.1.pep
ALRRHAAVAHLASAKIRATQEPPPNQRSAASGRPRNGGVTHWGREEKEARGGRRRRRGLNWEAGWIRWGDGVSRGGGWGAVWESASGKANDEASCRFLQPG

SEQ ID NO: 122645 - protein, 33 aa, Oryza sativa
  Clone ID: PAT_MRT4530_25555C.1.pep
MELMRAPWAWATRICILVVAPYVASYMPHQPKE

SEQ ID NO: 122646 - protein, 134 aa, Oryza sativa
  unsure (1)..(134): unsure at all Xaa locations
  Clone ID: PAT_MRT4530_25556C.1.pep
FPPNPRPPLLFPLARRLFRSTPPPPPXPPPPPPPPLHPPPTPGFPHFTCSSARILPPSGAPAAPPPPLSRPSASDATAAPPPPPSIWSTIVXSPPSPSSPTALLSIPLTGPRSRRHRSSPTPSPSSSPQPSRSS

SEQ ID NO: 122647 - protein, 81 aa, Oryza sativa
  Clone ID: PAT_MRT4530_25557C.1.pep
GGWSTWYIFTVPCKFLVLNGLHSSCSSAGELFVGRVLKGSIPRLLVFGAPIPGWWLGEDNGWCRVLSPGLLINVHFAFRAF

SEQ ID NO: 122648 - protein, 687 aa, Oryza sativa
  Clone ID: PAT_MRT4530_25558C.1.pep
MEEVKESPVQPTTSTAQTITSSGTADFQGFHGAPKFAVGVPRNLPAVAALPATAPVTSASLVTLKPPGSSPVKSVNNPSVVTMPHMAPSHLKSDKGVNGPPNLVRTGATYGNLNKSFHDTCARSNLNAVQSSNPVAKNQDTKTASIDATAGNPLTGHHATPSVAPVPPKPTFANHSEIAKSVQRVLHQPANHPSWIPPSTEYMRSRLDCQICKVAIMDMESLLVCDACEKGAHLKCLQHYGNKGVPKAEWHCPTCLTKSKGKPLPPKYGKVTRTAVEPKATPPPAGTQVSSQGAAENIAVKENHQKVAVNGNLLNQNSTQAGSVAQSSTVLALGVTAAVAQSQPLSISRLPEGNLNNDAALSSEKTGNVGPCSSIAHRNEKPPDELQSSGLPANSKTGTQSGKSPNEEVSSVLVSGSADSTNDTLHEQKSHEISGEKCSDNSSIVASEANIKSKADSELISGRDVEMVDNDIPPKDQTNNIATEDKPSTQETSEAHKMEVVEVSANTGIQISQGDSAGTEENLHTEVTSVPHMINDVAMATNAGTPICPSNNVAIEEKPKSTVISEVCTTKDTEMTTDATLDQNTNVATEEIPLPESISATEDADMTTDTGIPTNQRQEVNGLAENGRKEHPLGETDKHKSDHSTMPDMSTAPQITSNGVMHSKDEAACGHEGEIVDISAAATEENN

SEQ ID NO: 122649 - protein, 52 aa, Oryza sativa
  Clone ID: PAT_MRT4530_25559C.1.pep
NINCNTKEMVQIWSSDNINQTYHYLIYNAKTLISYITLRSLQYIIHRHILTT

SEQ ID NO: 122650 - protein, 298 aa, Oryza sativa
  unsure (1)..(298): unsure at all Xaa locations
  Clone ID: PAT_MRT4530_2555C.1.pep
LENIFQEQLSTRVGCGRVHRIIEDDLDKCRVVAPNLHWCSGDNSTRXRWSLNQCVAISRTXNLHWCPRDNSTRSLVLEPVCSNLSHRNLHWCPRDNSTRPLMILLARWFSNQYVAISRTATSIGVREMILLARWFSNQYVAISRTATSIGRGTTXSNNAAVLAPRLQMIERHLLTGPQPVWLSYDYYLVLDQRCSDSPITSTSTKVISGAQYRQVFYPEIPYHKRHLALKPILMSFYAVLTRPLRNLRELRLGTSRADKTLSDPVETKDHTLRLLDYSRTVGGYRQGIRNEEMVYLAR

SEQ ID NO: 122651 - protein, 117 aa, Oryza sativa
  Clone ID: PAT_MRT4530_25560C.1.pep
MAATARSIDHASNPKTDAVARHTTDAVACRLLRGSSHSLEVARLWHHRSPPHILFAAPSSPSITRSEKTSIRSMYRCLQVFNGTNDYPTRRPVDYPLEEQQTDEHRLEDQEMKLCNP

SEQ ID NO: 122652 - protein, 237 aa, Oryza sativa
  Clone ID: PAT_MRT4530_25561C.1.pep
MGMGMEKGMTAYEAARERTVEENKRKMEALNLRHLSAAIAVAPKTPSPMKQKRRRIIEAAVVAPSPPRRSRRLANLPEVKYAEVAPDGAERMKRSPRKAIDSIYLATRGSISMEARLEAARKAEELESQLDPEFPSFVKPMLHSHVVRGFWLGLPRHFCETYLPKHDAIVTLLDEKDEQFDTNYLAYKNGLSGGWAGFALDHGLLDGDATVFQLVKPTTFKVHIIRATVDDGNEVTK

SEQ ID NO: 122653 - protein, 82 aa, Oryza sativa
  Clone ID: PAT_MRT4530_25562C.1.pep
MYASMRGPHSIGWHAEGACRWPPNTMAIIPTRQRQYALHYHQLNPLLLPFPPVKPQSCRLIKATTVVAAAFTVTLMQEEQGR

SEQ ID NO: 122654 - protein, 593 aa, Oryza sativa
  Clone ID: PAT_MRT4530_25563C.1.pep
MSMSKLLSPPPTSPPGPALSRLPCRRVAPPPVLPFPFPLRRLTSRRVFATSCSSSDSEHAPSASSTALAGAGDDLSAGVTQEREGALPFVQLSSGIVLRTEEQSLLGDHAPAPAPASAASSFALLDELNGGCREDDHLGETPAYPAAMNALYAACLAGNATEQLWNFTWPAAVAVLHPASILPVAVLGFFTKLVVFAAGPLVGELISSLPRIPAYRSLAAIQTAAHLVSVATITYAFAVHRAAAASLLLRPWFAVLVASTAVDRLACVALGIIAERDFVVQLAGAGRPVALAKANATLSRVDLLCETVGASIFALLLSKNNPLTCIKLSCVISLCALPLLIFLCGEMNRLADGIFDHSENTTSHAEKTSSFSIRKTVEEAVATVRNGWSEYMRQPVLPASLAYVFVCFNVALAPGALMTTFLIHQGVRPSVIGAFGGSSGAVGILATFATARLVKELGILKAGAAGLIAQSALLGAAVVVYLTGAVSRRAGALFAFLGLIVASRAGHMAYSAIGLQVVQTGNPASKAKLIGATEIAVASLAELAMMAVAVVASDASHFGALAALSATAVTAAAGMYCRWLANPSDELRRIFPS

SEQ ID NO: 122655 - protein, 837 aa, Oryza sativa
  Clone ID: PAT_MRT4530_25564C.1.pep
MVPYIIPLSLILFIIQANPSTGAQINETTIPQGSQINTVGTQSWVSPSGRFAFGFYPEGEGFSIGVWLVTGATRTIVWTAFRDDPPVSGGSILLTAGGSLQWIPANQGSQGKLISAAPNSATSAAILDNGNFVLYDAKKQVLWSTFGSPMDTILPGQNLLPGNQLFSSISNTNHATGKYRLSNQEDGNLVMYPIGTVDPGSAYWASGTFGQGLLLTLSLDLNGTLWLFDRNSSYTKMLFLTNQSLSTSPDSESYYRLTLDADGLLRLYAHVFFKKGREPLTKIEWLEPSSNDRCGVKGVCGPNSFCQVTASGETSCSCLPGFEFSSANQTTQGCWRVRTGGCTGNSSNGDIGPTATMVMVKNTSWSDLSYNVPPQTTTMEECKAICLSDCACEIAMFDTYCSKQMLPMRYGKIDHSSNTTLFVKVYSYEPKGPMRRTRSAISTAMLISGSALAIFSLVVLSVSVLLSKRHQFSRYTRAPQHQDAEFDKESVGIRSYSFHDLELSTDGFAEELGRGAYGTVFRGVIANSGNKVIAVKRLERMAEDGEREFQREVRAIALTHHRNLVRLFGFCNEGAYRLLVYEYMPNGSLANLLFKPDPPLPSWSKRVAIALDVARGLQYLHEDIEVPIIHCDIKPENILIDGTGMAKIADFGLAKLLIGNQTKTFTGVRGTRGYLAPEWSKNTAITVKVDVYSFGVMLLEIISCRKSMELKMAGEECNISEWAYEYVVSGGLKEVAAGEDVDEVELERMVKIGIWCTQNEPMRNLIVSTRVLVYDKYLNGWMVRVKTYGKGYFLAIVSAISNTNFRIIPNPAAITTILIQGELYPSTLNINNCSIKK

SEQ ID NO: 122656 - protein, 134 aa, Oryza sativa
  unsure (1)..(134): unsure at all Xaa locations
  Clone ID: PAT_MRT4530_25565C.1.pep
IIFEKEKRVYCISGLGFXVDRAHGDGSRERTAEIDLXKTDGRDRTVHDRLTGEGDDDVSDDVTTGGGGSAARTAHAGRRTAALRHERRTPTGRAXRDELTGDQRSGGRPTDGDGDDEGCRVPKLREEFWRSRGF

SEQ ID NO: 122657 - protein, 123 aa, Oryza sativa
  unsure (1)..(123): unsure at all Xaa locations
  Clone ID: PAT_MRT4530_25566C.1.pep
MDSPATPVGLSPPLLSLVPRNEPCYTKGKRDLLRQRARVSVDRAHGGGSRERTAEIDPSKTDXRDRSVHDRLTGDGDDDVSDDVTTGVRRLGGSTKQARRRTATLRHERRTPTGRARRDELTG

SEQ ID NO: 122658 - protein, 194 aa, Oryza sativa
  unsure (1)..(194): unsure at all Xaa locations
  Clone ID: PAT_MRT4530_25567C.1.pep
ACEKGIYCVSRLGFXVDRAHGGSSRERTAEIDPSKTDGRDRSVYDRLTGEGDDDVGDDITTGGGGSTARTAQAHRRTAALRHERRTPTGRARRGELTDDQRSGGRPTDGDGDEVETAELFSLTTATVLRRSTTTAKGRTRTAMTWRPQRRSSRATATTRTTAAHGGSDGGDGDARAHGARAFPTTRGEGEGGGG

SEQ ID NO: 122659 - protein, 782 aa, Oryza sativa
  Clone ID: PAT_MRT4530_25568C.1.pep
MAIQDKVENKDPTVTVGLAVSSSKSSKYAVQWAVKNFCTNGIVRFELIHVLQRITTDQTPMGNYIPIDKVRADLPSAYVKEVEYKARTMLLFYKNMCDEKAKAEVLVVKGEDVAETISNVVSMYEIHKLVVGDSSQGNFIRKSKGTRTSSQICRSVPSFCAVYVVSKGGLSAVYSPGFEGHKSSELFLSSDSSKTEIHSDDKPSLSDATPSRSFRSNLTWENLESLSSADHDRPRSLHEYLTESTSASVGDNNSNSPCASGQTPRPSNVLISDKAPMTSSPLQELMLSEDMDDVNSELEKLRLELRHIKGVCKLVQDESINASQHVTDLAAKRAEEEARLSEVYSRINRVNEQAHQEKEQLNALEAQCRHVRDLARKEALQKQILQLRTSKEADKMQRLEKLLELDGMSYSTFTWEDIESATSSFSEALKIGSGSNGTVYKGNLRQTSVAIKVLTSDDSHRIKHFKQELEVLGKIRHPHLLLLIGACLDRPCLVYEYMENGSLEDRLQLKGGTAPLPWYQRLRIAWEIALALVYLHSSKPKPIIHRDLKPANILLDSNFTSKIGDVGLSTLLPLGDALSTTRTIFKDTDLVGTLFYMDPEYQRTGQVSTKSDTYALGMVLLQLLTGKPPVGLADLVEQAVENGHLVDILDKSAGKWPAQEAHELAQLGLSCLEMRSKHRPDLKCKVLVELERLKKIASAVSDPVRPVISGPPSHFICPILKRIMQDPCIASDGYSYDRVAIEMWLCENDKSPITKSRLPNKDLVPNHALLCAITSWKAEARD

SEQ ID NO: 122660 - protein, 1630 aa, Oryza sativa
  unsure (1)..(1630): unsure at all Xaa locations
  Clone ID: PAT_MRT4530_25569C.1.pep
KVGCEHMVLMVVLMTIKDRFASYCCETFIVPTTSQRGQRLYLLYSVIHYSAPDXEVARSPWGSLGSPCLVLKGVIMIQERSTVMGYVVRGVLSRLLSEMPPHSPRNLIEVLGFVRELRLMAFEVGYEVAPEYRQISHDPDEEKCRVRVTLASDREDLPSIKFEAGGRSYCHACQEAALVAIGELRQRFEEELDSSAFQYHPHKPHGQDYGTYICPDGEESATLMHVVHMLSAMDAVSVERDKAAHDRENWNRGKICKLESKVYRLQKELAELKGETPPPTPKLRLVARKRTCPPPRLQLASKIRVMGEAVPDRAEPVIDIISDEEEEEDPEEREPATPEEEDPSLRSDARRRAEGELITWQEFTTAFKKTHIPSGVVALKKREFRALNQGSRSVTEYLHDVNRLARYAPEDVRTDEERQEKFLEGLNDELSYALMSTDFRDFQQLVDKAIRQEDKYNRMEQKKRRAAQFKAQQGSNQRPRLVTGPQAPSYPQGGSSSVVRPQRQFYNNNTGNRGNDNRNMVARPAATPAQNQPVRKEQGSKPVICFNCGDPGHYADKCPKPRHVKNAPAPNNSNVLAPKARVNHVAAAEAQNAPDVVLGTFPVNSIPXTVLFDSGATHSFLSKSFASKHGMEVVSLGRPLLVNTPGNQVFSTXYCPSVTIEIEEVLFPSSLILLESKDLDVILGMDWLSRHRGVIDCANRKVTLTSSNWETVSFFVSSPKYHGVNLNQVALQEIPIVQDYPDVFPEDLPGMPPKRDIEFRIDLVPGTNPIHKRPYRMAANELAEVKKQVDDLLQKGYIRPSTSPWGAPVIFVEKKDHTQRMCVDYRALIEVTIKNKYPLPRIDDLFDQLEGATVFSKIDLRSGYHQLRIREEDIPKTAFTIRYGLFECTVMSFGLTNAPAFFMNLMNKVFMEYLDKFVVVFIDDILIYSKTKEEHEEHLRLALEKLREHQLYAKFSKCEFWLSEVKFLGHVISSGGVAVDPSNVELVLSWKQPKTVSEIRSFLGLAGYYRRFIENFSKIARPMTRLLQKEVKQLRPHENNYPTHDLELAAVVHALKIWRHYLFGNRTEIYTDHKSLKYIFTQPDLNMRQRRWLELIKDYDMEIHYHPGKANVVADALSRKSYCNMSEGRRLPWELCQEFEKLNLGIVSKGFVAALEAKPTLFDQVREAQVNDPDIQEIKKNMRRGKAIGFVEDEQGTVWLGERICVPENKELKDTIMKEAHETLYSIHPGSTKMYQDLKQQFWWASMRHEIAEYVALCDVCQRVKAEHQKPAGLLQPLKIPEWKWEEIGMDFITGLPRTSAGHDSIWVVVDRLTKVAHFIPVKTTYTGNKLAELYMARVVCLHGVPKKIVSDRGSQFTSKFWQKLQLELGTRLNFSTAYHPQIDGQTERVNQILEDMLRACVLDFGGSWDNNLPYAEFSYNNSYQASLQMSPNEALYDRKCRTPLLWDQTGERQVFGTDILREAEEKVKIVQERLRIAQSRQKSYADNRCRDLAFEEGDCVYLRVTPLRGVHRFQTKGKLAPRFVGPFKIVSRRGEVAYQLELPPSMAGIHDVFHVSQLKKCLRVPTEETDPDRIELQEDLTYVEKPVRILEFPTFRRRAFPLRKVPKRLRKPKASHTDPKQPFEHVEPV

SEQ ID NO: 122661 - protein, 117 aa, Oryza sativa
  Clone ID: PAT_MRT4530_2556C.1.pep
MDKPQSWYTAPKDVGRIEYNDSPSQIVEEFPEQTTWNTILWSYSRKKHRVSFRIVNRPLPHPMNKPHPNIPGSPSRFSGVLALSWFRGYGSEEACGPSRYVDADNYGSRQQDLHYVY

SEQ ID NO: 122662 - protein, 242 aa, Oryza sativa
  unsure (1)..(242): unsure at all Xaa locations
  Clone ID: PAT_MRT4530_25570C.1.pep
GKGGLLRQRLGFAVDRAHGGSSRERTAEINPXSKTDGRDPTVHDRLTGEGDDDVSDDVTTGGGGSAARACMLAGERRRGDANGGHQRVEGDAANSPVTKEAAEEQRTAPATRKKRRRSSGRRXRRCSGGLRRRRRGGRGRRRLGDHDDDLPERRRRLERRRRTAGAAATAAAQGLTALGRFRRRETKARVAAGRGDTGDPFKGARRRRRRPTAAETAKERSGFGXERDRSDSTSNPRVSKPK

SEQ ID NO: 122663 - protein, 63 aa, Oryza sativa
  Clone ID: PAT_MRT4530_25571C.1.pep
MVLVVKQYRCTHSASCLCLKGHISEDALFLVFRHMNWNPRMIALFSCVSKWFDDIAKRVLWKE

SEQ ID NO: 122664 - protein, 232 aa, Oryza sativa
  unsure (1)..(232): unsure at all Xaa locations
  Clone ID: PAT_MRT4530_25572C.1.pep
GGSMCIRPLEDSFMLPLSYQVYCEYLNLQDELAHFNLHQGSGDSWSFIWNNSCYTPKRFYKLNFATIQTPRPLIWIWKTKCVMKIKVFAWLFFWDRLNTRDMLDKRHCDKEDDDLSCVLCNTNQRETRDHLFFNCPFSTACWQFLGISWNTDLEFYQRIAFTRWQFNQSGFLEIFFLAAWHIWKQRNGLIFGNLQPTFLSWKSLFINEVLLXHLCRMKDPLKQSVLNWLQTL

SEQ ID NO: 122665 - protein, 1636 aa, Oryza sativa
  unsure (1)..(1636): unsure at all Xaa locations
  Clone ID: PAT_MRT4530_25573C.1.pep
VTSWYQSHLDLRISQMMPPHSPRNLIEVLGFVRELRLMAFEVGYEVAPEYRQISHDPDEEKCRVRVTLASDREDLPSIKFEAGGRSYCHACQEAALVAIGELRQRFEEELDSSAFQYHPHKPHGQDYGTYICPDGEESATLMHVVHMLSAMDAVSVERDKAAHDRENWNRGKICKLESKVYRLQKELAELKGETPPPTPKLRLVARKRTCPPPRLQLASKIRVMGEAVPDRAEPVIDIISDEEEEEDPEEREPATPEEEDPSLRSDARRTTNPVEAGDWLHAVEKKLDLIQCTEQEKVSFASHQLHGPAAEWWDHFRQGRAEGELITWQEFTTAFKKTHIPSGVVALKKREFRALNQGSRSVTEYLHDVNRLARYAPEDVRTDEERQEKFLEGLNDELSYALMSTDFRDFQQLVDKAIRQEDKYNRMEQKKRRAAQFKAQQGSNQRPRLVTGPQAPSYPQGGSSSVVRPQRQFYNNNTGNRGNDNRNMVARPAATPAQNQPVRKEQGSKPVICFNCGDPGHYADKCPKPRHVKNAPAPNNSNVLAPKARVNHVAAAEAQNAPDVVLGTFPVNSIPXTVLFDSGATHSFLSKSFASKHGMEVVSLGRPLLVNTPGNQVFSTXYCPSVTIEIEEVLFPSSLILLESKDLDVILGMDWLSRHRGVIDCANRKVTLTSSNWETVSFFVSSPKYHGVNLNQVALQEIPIVQDYPDVFPEDLPGMPPKRDIEFRIDLVPGTNPIHKRPYRMAANELAEVKKQVDDLLQKGYIRPSTSPWGAPVIFVEKKDHTQRMCVDYRALNEVTIKNKYPLPRIDDLFDQLEGATVFSKIDLRSGYHQLRIREEDIPKTAFTTRYGLFECTVMSFGLTNAPAFFMNLMNKVFMEYLDKFVVVFIDDILIYSKTKEEHEEHLRLALEKLREHQLYAKFSKCEFWLSEVKFLGHVISSGGVAVDPSNVESVLSWKQPKTVTEIRSFLGLAWYYRRFIENFSKIARPMTRLLQKEVKYKWTEDCERSFQELKKRLVTAPVLILPDSRKGFQVYCDASRHGLGCVLMQEGKVVAYASRQLRPHENNYPTHDLELAAVVHALKIWRHYLFGNRTEVYTDHKSLKYIFTQPDLNMRQRRWLELIKDYDMEIHYHPGKANVVADALSRKSYCNMSEGRRLPWELCQEFEKLNLGIISKGFVAALEAKPTLFDQVREAQVNDPDIQEIKKNMRRGKAIGFVEDEQGTVWLGETICVPENKELKNTIMKEAHETLYSVHPGSTKMYQDLKQQFWWASMRREIAEYVALCDVCQRVKAEHQKPAGLLQPLKIPEWKWEEIGMDFITGLPRTSAGHDSIWVVVDRLTKVAHFIPVKTTYTGHKLAELYMARVVCLHGVPKKIVSDRGSQFTSKFWQKLQLELGTRLNFSTAYHPQTDGQTERVNQILEDMLRACVLDFGGSWDKNLPYAEFSYNNSYQASLQMAPYDALNGRKCRTPLLWDQTGERQVFGTDILRQAEEKVKIIQERLRVAQSRQKSYADNRRRDLAFEEGDYVYLRVTPLRGVHRFQTKGKLAPRFVGPFKIVSRRGEVAYQLELPPSMAGIHDVFHVSQLKKCLRVPTEEADPDRIELQEDLTYVEKPVRILEFPTFRRRVFPLRKFLT

SEQ ID NO: 122666 - protein, 324 aa, Oryza sativa
  Clone ID: PAT_MRT4530_25574C.1.pep
MNVLSRKVDSKSSALVSSSSSLDVDASSSKIARAMNNARNRKRCGPNRCFECGSIDHLRLHCPKLGRGKREDKDGEKTNDNKPKGTFKGRKIKENLKKAFDQVYVAFEPLSDVDGDSGDEAKGKNISGVCFMARGESDSECENNEDQTDWHARISSRFGPAQELSRSPRPGEDGRIFEEKSEDNDDEVGSAGQTGCQAGQTERQAGQTNTGGAVRPARLVGFRDDVTTGGGGSAARTRTLAGERRRFGTNGGHQRVEGDATNSPVTKEAAEEQRTAPATRKSGGGLRVDGDGGAPAVFGGGEGADEDGGDLATTMATFPSDGDS

SEQ ID NO: 122667 - protein, 514 aa, Oryza sativa
  unsure (1)..(514): unsure at all Xaa locations
  Clone ID: PAT_MRT4530_25575C.1.pep
GSRPEVEGAPDRWGPPVGLHRREERAASAGXLGREAQVNDPDIQEIKKNMRRGKAIGFVEDEQGTVWLGERICVPDNKELKDTIMKEAHETLYSIHPGSTKMYQDLKQQFWWASMRREIAEYVALCDVCQRVKAEHQKPAGLLQPLKIPEWKWEEIGMDFITGLPRTSAGHDSIWVVVDRLTKVAHFIPVKTTYTGNKLAELYMARVVCLHGVPRKIVSDRGSQFTSKFWQKLQSELGTRLNFSTAYHPQTDGQTERVNQILEDMLRACVLDFGGSWDKNLPYAEFSYNNSYQASLQMSPNEALYGRKCRTPLLWDQTDERQVFGTDILXEAEEKVKIIQERLRVAQSRQKSYADNRRRDLAFEEGDYVYLRVTPLRGVHRFQTKGKLAPRFVGPFKIVSRRGEVAYQLELPPSMAGIHDVFXVSQLKKCLRVPTEEADPDRIELQEDLTYVEKPVRILEVSERKTRNRVIRFCKVQWSNHSEEEATWEREDELKSAHPHLFASSSESRGRDSV

SEQ ID NO: 122668 - protein, 280 aa, Oryza sativa
  unsure (1)..(280): unsure at all Xaa locations
  Clone ID: PAT_MRT4530_25576C.1.pep
MTSAVTSPAAAARRLGRRTLGDERRRFGTNGGHQRVERDAANSPVTKGAAEDQRTATATRLKRQRRSGRRRRRCSGDLRRRRRGGRGRRRLGDPDGGLPERRRXPERRRRTAGATAATAALGYTALGRFRRREAKARVAAGRGDTGEPFKGDRRRRRRPTAAGDEKETSGFGGKKPIRIELDSTNFQNELADASKREKGRGDPEDHFPSINSAGNGKERPDLEGNDGGGALGFRAAAARGXRRPCQRADARARLRSGPTWAEEREKRFGPTFGPKPKETF

SEQ ID NO: 122669 - protein, 103 aa, Oryza sativa
  Clone ID: PAT_MRT4530_25577C.1.pep
MAVNGSNQHSKEKGKGKGQLPPSNGTIALAQAPHLLLPPFTGTTTPTLARASHSLPSPPLSSSAIVSIHASHPGFMDRVGKRGEGGKRRKKRLLTCGAHVVPR

SEQ ID NO: 122670 - protein, 1716 aa, Oryza sativa
  unsure (1)..(1716): unsure at all Xaa locations
  Clone ID: PAT_MRT4530_25578C.1.pep
VTSWYQSHLDLRISQMMPPHSPRNLIKVLGFVRELRLMAFEVGYEVAPEYRRISHDPDEEKCRVRVTLASDREDLPSIKFEAGGRSYSQACQEAALVAIGELRQRFEEELDSSAFQYHPHKPHGQDYGTYTCPDGEESATLMHAVHMLSAMDAVSVERDKAAHDRENWNRGKICKLESKVYRLQKELAELKGETPPPTPKLHLIARKRTCPPPRLQLASKIRVMGEAVPDRAEPVIDIISDEEEEEDPEEREPATPEEEDPSLRSDARRTTNPVEAGDWLHAVEKKLDLIQCTEQEKVSFASHQLHGPAAEWWDHFRQGRAEGEPITWQEFTAAFKKTHIPAGVVALKKREFRALNQGSRSVTEYLHDFNRLARYAPEDVRSDEERQEKFLEGLNDELSYALMSTDFRDFQQLVDKAIRQEDKYNRMEQKKRRAAQFKAQQGSNQRPRLVTGPQAPSYPQGGSSSVVRSQRQFYNNNTGNRGNDNRNMVVRPAATPVQNQPVRKEQGSKPGVCFNCGDPGHYADKCPKPRRVKNVPAPNNSNAPAPKARVNHVAAVEAQNAPDVVLGTFPVNSIPATVLFDSGATHSFLSKSFASNHGMEVISLGRPLLVNTPGNQVFSTQYCPSVIIGIEEVLFPSSLILLESKDLDVILGMDWLSRHRGVIDCANRKVTLTSSNGETVSFFVSSPKSHGVILNQVALQEIPIVQDYPDVFPEDLPGMPPKRDIEFRIDLVPGTNPIHKRPYRMAANELAEVKRQVDDLLQKGYIRPSTSPWGAPVIFVEKKDHTQRMCVDYRALNEVTIKNKYPLPRIDDLFDQLEGATVFSKIDLRSGYHQLRIHEEDIPKTAFTTRYDLFECTVMSFGLTNAPAFFMNLMNKVFMEYLDKFVVVFIDDILIYSKTKEEHEEHLRLALEKLREHQVYAKFSKCEFWLSEVKFLGHVISSGGVAVDPSNVESVLSWKQPKTVSEIRSFLGLAGYYRRFIENFSKIARPMTRLLQKEVKYKWTEGCEQSFQELKKRLVTAPVLVLPDSRKGFQVYCDASRHGLGCVLMQEGKVVAYASRQLRPHENNYPTHDLELAAVVHALKIWRHYLFGNRTEIYTDHKSLKYIFTQPDLNMRQRRWLELIKDYDMEIHYHPGKANVVADALSRKSYCNMSEGRRLPWELCQEFEKMNLGIVSKGFVATLEAQPTLFDQVREAQVNDPDIQEXKEHQKPAGLLQPLKIPEWKWEEIGMDFITGLPRTSAETTYTGNKLAELYMARVVCLHGVPKKIVSDRGSQFTSKFWQKLQSELGTRLNFSTAYHPQTDGQTERVNQILEDMLRACVLDFGGSWDKNLPYAEFSYNHSYQASLQMSPNEALYGRKCRTPLLWDQTGERQVFGTDILREAEEKVKIIQERLRVAQSRQKSYADNRRRDLVFEEGDYVYLRVTPLRGVHRFQTKGKLAPRFVGPFKIVSRRGEVAYQLELPPSMAGIHDVFHVSQLKKCLRVPTEEADPDRIELQEDLTYVEKPVRILERRRDALQVRRRRRPSSATPPRMPRHSPRNLIEVLGFVRELRLMAFEVGYEVAPEYRQISHDPDEEKCRVRVTLASDSEDLPSFKFEAGGRSYCHACQEAALVAIGELRQHFEEELDSSAFQYHPHKPHGQDYGTYTCPDGEESATLMHAVHMLSAMDAVSVERDKAAHDRENWNRGKICKLKSKVYRLQKELAELKGETPPPTS

SEQ ID NO: 122671 - protein, 170 aa, Oryza sativa
  Clone ID: PAT_MRT4530_25579C.1.pep
MGEADVDVEDNDGADDLGQMLRDIPEDCESEKEAKNGMSDKAFSELLELVKNILPEGNELPETTYEAMKAICPLGLEVQKIHMSERLYPLSRNLSGQSNKGYKVCTHCMDETENTYLKHCWKVVYMGHRRFLVANHRVRKKGRHFEQKANHRTKPKHHNMKAVFDMVKDL

SEQ ID NO: 122672 - protein, 283 aa, Oryza sativa
  unsure (1)..(283): unsure at all Xaa locations
  Clone ID: PAT_MRT4530_2557C.1.pep
VGCHRVHSIIENILDKCGVIAPNLPTKTNDLSHSTGHGWNSREKYVAISRTANFHWCSKDNSTRSLVLEPXVAISRTANFHWCSRDNSTRSLVLEPWLRNSYDXSSTDSIVVLVPRVEMIERHLXLVLNQLIVAISRTSTSNGRVTTTTWFSTNGVAILPLFPLXWSSYDYYLVLDQRCSDSPTTSTPTKLISGTXYRQVFYPEIPYHXRHLALKPILLFLYAVLTRPSSNLRELRLGTPRADKALSEPVETKDHTLRLLDHSRTIGGSRQGIRNEERVYPPR

SEQ ID NO: 122673 - protein, 1778 aa, Oryza sativa
  Clone ID: PAT_MRT4530_25580C.1.pep
MGVAGESMPCFKGGDYDPGTVHCSELCYARGIVTTPFRGIVVVLRHMMPRHSPRNLIEVLGFVRELRLMAFEVGYEVAPEYRQIPHDPDEEKCRVRVTLASDSEDLPSFKFEAGGRSYCHACQEVALVAIGELRQHFEEELDSSAFQYHPHKPHGQDYGTYTCPDGEESATLVHVVHMLSAMDAVSVERDKAAHDRENWNRGKICKLKSKVHRLQKELAELKGEMPPPTSKLRLTARKRTCPPPRLQLASKIRAMGDAVPVRAEPVIDIISDEEEEEDPEEREPATPEEEDSSLRSDASCCLHHGWDMVNTRTGTGSGSGSGANNNEGEPTLAQILAQQTQLINLLVQQAQNQQGNNQNQNPPPPPQNKLADFLRVRPPTFSSTTNPVEAGDWLHAVEKKLDLIQCTEQEKVSFASHQLHGPAAEWWDHFRQGRAGGEPITWQEFTAAFKKTHIPSGVVALKKREFRALNQGSRSVTKYLHDFNRLACYAPEDVCTDEERQEKFLEGLNDELSYALMSTDFRDFQQLVDKAIRQEDKAAQFKAQQGSNQRPRLVTGPQVPSYPQGGSSSVVRPQRQFYNNNTGNRGNDNRNVVARPAATPVQNQPVRREQGSKPVICFNCGDPGHYADKCPKPRRVKNAPAPNNFNVPAPKARVNHVAAAEAQNAPDVVLGTFPVNSIPATVLFDSGATHSFLSKSFAIKHGMEVVSLGRPLLVNTPGNQAFSTRYCPSVTIEIEEVPFPSSLILLESKDLDVILGMDWLSRHRGVIDCANRKVTLTSSNGETVSFFASSPKSHGEVLNQVALQEIPIVQDYPDVFPEDLPGMPPKRDIEFRIDLVPGTNPIHKRPYRMAANELAEVKKQVDDLLQKGYIRPSTSPWGAPVIFVEKKDHTQRMCVDYRALNEVTIKNKYPLPRIDDLFDQLEGATVFSKIDLRSGYHQLRIREEDIPKTAFTTRYGLFECTVMSFGLTNAPAFFMNLMNKVFMEYLDKFVVVFIDDILIYSKTKEEHEEHLRLALEKLREHQLYAKFSKCEFWLSEVKFLGHVISSGGVAVDPSNVESVLSWKQPKTVSEIRSFLGLAGYYRRFIENFSKIARPMTRLLQKDVKYKWTEDCEQSFQELKKRLVTAPVLILPDSRKGFQVYCDASRHGLGCVLMQEGKVVAYASRQLCPHENNYPTHDLELAAVVHALKIWRHYLFGNRTEIYTDHKSLKYIFTQPDLNMRQRRWLELIKDYDMEIHYHPGKANVVADALSRKSYCNMSEGRCLPWELCQEFERLNLGIVSKGFVATLEAKPTLFDQIREAQMNDPDIQEIKKNMRRGKAIGFVEDEQGTVWLGERICVPENKELKNTIMKEAHETLYSIHPGSTKMYQDLKLQFWWASMRREIAEYVALCDVCQRVKAEHQKPAGLLQPLKIPEWKWEEIGMDFITGLPRTSAGHDSIWVVVDRLTKVAQFIPIKTTYTGHKLAELYMARVVCLHGVPKKIVSDRGSQFTSKFWQKLQSELGTRLNFSTAYHPQTDGQTERVNQILEDMLRACVLDFGGSWDKNLPYAEFSYNNSYQASLQMSPNEALYGRKCRTPLLWDQTGERQVFGTDILREAEEKVKIIQERLRVAQSRQKSYADNRRRDLAFEEGDYVYLRVTPLRGVHRFQTKGKLAPRFVGPFKIVSRRGEVAYQLELPPSMTGIHDVFHVSQLKKCLRVPTEEADPDRIELQEDLTYVEKPVRILEVSERKTRNRVIRFCKVQWSNHSEEESTWEREDELKSAHPHLFASSSESRGRDSV

SEQ ID NO: 122674 - protein, 895 aa, Oryza sativa
  Clone ID: PAT_MRT4530_25581C.1.pep
MAGVVVGSKSNRDWSDCDAAFREEAGRAIVALTEEGEQGHAHGLSLATALVGRYPWSPLARAILARCYLQRNSRQQERVQLELAAVLAPRCPHIASLLIDALISMDLFDEAAEVRDRALRVAEPTDPALHYTFVSNRYSSADHHDNPFDLEYRKAHGRETIRGQRARIEKGKGQAAASPEPASTPEWPPETVDLGIAGDRWSRMSEEERQALLKVSFGEMKSYCRSRGLMDMTSMLSDAEVFVKKGWSCPFCSGMIYVEFAAFKSHIDEEHIVGKEFLSLVPERISDSERELLRSWRWEPTDGDDLAGRTKILREVKEIVFELIDLEVVSLNLLYIMHKFIMNRVRPVAPLVVSMCGSCGIGQLSSTHLQELCELLKPLKLVVQTQRGWEHQKHHNDEQESQQDSLVVHTHRGCNHHKRRNGEQESQQDSLVGITWSQETGTLSFDCEKIASRETDGSSQADRLFACLLSEPLLEDPMELCFSMWRECFVDGPDILNNISRALGKAKLKFSSWEELKGIQGGVYFLPKAIFERDIDIKTYFDSWIGSARVEMLLIDAEVDYWKESLLKTCQVDCLAVISPIAKACLWAKLVNDPLEDALLAHPQNCHKPQVPLDAILRSLWHIRRFCGDLWEIPCISPDVKARVYRAILLRIFRSWDQCKTCDLPSSAIFMVDSLRSFVIDEKAGNISAYRVVESILERLHVAQTPLHFEFKGESLVPQTAIVPSLLGCICLAHNLFGLHIIEKKCNCVNEVPMKTKSTFFHSINLGSVEGTTLESFSELLKAVDKQSVCDFRNGGCGHRITRYLWYPPHFFMIVLRWPDNKGNHINMHKVLISLAAELDISHIYEGLQSESMYTLVSAQAESWKGLIDRYSQANLRPEILFFEHGRKRDHRLLL

SEQ ID NO: 122675 - protein, 1674 aa, Oryza sativa
  Clone ID: PAT_MRT4530_25582C.1.pep
VTSWYQSHLDLRISQMMPPHSPRNLFKVLGFVRELRLMAFEVGYEVAPEYRQISHDPDEEKCRVRVTLASDREDLPSIKFEAGGRSYSHACQEAALVAIGELRQRFEEELDSSAFQYHPHKPHGQDYGTYTCPDGEESATLMHAVHMLSAMDAVSVERDKAAHDRENWNRGKICKLESKVYRLQKELAELKGETPPPTPKLRLTARKRTCPPPRLQLASKIRVRGEVVPDRAEPVIDIISDEEEEEDPEEREPATPEEEDPSLRSDARRTTNPVEAGDWLHAVEKKLDLIQCTEQEKVSFASHQLHGPAAEWWDHFRQGRAEGEPITWQEFTAVFKKTHIPAGVVALKKREFRALNQGSRSVTEYLHDFNRLARYAPEDVRTDEERQEKFLEGLNDELSYALMSTDFRDFQQLVDKAIRQEDKYNRMEQKKRRATQFKAQQGSNQRPRLVTGPQAPSYPQGGSSSVVRPQRQFYNNNTGNRGNDNRNVVARPAATPVQNQPVRKEQGSKPGVCFNCGDPGHYADKCPKPRRVKNAPAPNNSNAPAPKARVNHVAAAEAQNAPDVVLGTFPVNSIPATVLFDSGATHSFLSKSFASNHGMEVISLGRPLLVNTPGNQVFSTQYCPSVTIEIEEVHFPSSLILLESKDLDVILGMDWLSRHRGVIDCANRKVTLTNSNGETVSFFVSSPKSHGAVLNQVALQEIPIVQDYPDVFPEDLPGMPPKRDIEFRIDLVPGTNPIHKRPYRMAANELAEVKRQVDDLLQKGYIRPSTSPWGAPVIFVEKKDHTQRMCVDYRALNEVTIKNKYPLPRIDDLFDQLEGATVFSKIDLRSGYHQLRIREEDIPNTAFTTRYGLFECTVMSFGLTNAPAFFMNLMNKVFMEYLDKFVVVFIDDILIYSKTKEEHEEHLRLALEKLREHQLYAKFSKCEFWLSEVKFLGHVISSGGVAVDPSNVESVLSWKQPKTVSEIRSFLGLAGYYRRFIENFSKIARPMTRLLQKEVKYKWTEDCERSFQELKKRLVTAPVLILPDSRKGFQVYCDASRLGLGCVLMQEGKVVAYASRQLRPHENNYPTHDLELAAVVHALKIWRHYLFGNRTEIYTDHKSLKYIFTQPDLNMRQRRWLELIKDYDMEIHYHPGKANVVADALSRKSYCNMSEGRRLPWELCQEFEKLNLGIVSKGFVAALEAKPTLFDQVREAQVNDPDIQEIKKNMRRGKAIGYVEDEHGTVWLGERICVPENKKLKDTIMREAHETLYSIHPGSTKMYQDLKQQFWWASMRREIAEYVALCDVCQRVKAEHQKPAGLLQPLKIPQWKWEEIGMDFITGLPRPSAGHDSIWVVVDRLTKVAHFIPVKTTYTGNKLAELYMARVVCLHGVPKKIVSDRGSQFTSKFWQKLQLEMGTRLNFSTAYHPQTDGQTERVNQILEDMLRACVLDFGGSWDKNLPYAEFSYNNSYQASLQMAPYEALYGRKCRTPLLWDQTGERQVFGTDILREAEEKVKIIQERLRVAQSRQKSYADNRRRDLAFEEGDYVYLRVTSLRGVHRFQTKGKLAPRFVGPFKILSRRGEVAYQLELPPSMAGIHDVFHVSQLKKCLRVPTEEADPDRIELQEDLTYVEKPVRILEVSERNTRNRIIRFCKVQWSNHSEEEATWEREDELKSAHPHLFASSSESRGRDSV

SEQ ID NO: 122676 - protein, 298 aa, Oryza sativa
  Clone ID: PAT_MRT4530_25583C.1.pep
MLSKMHMKWFSFLEWPSATFASSFIKTQSSLAQYYLLMFVKIIELCKLKGKETRAEPEVSSVSKASGGSSEHINKLPPPVPVQEEEEAPEWLDVLLRTKFWGQCKQHWDASRAEVCIFCLRCRQVLCPRCSHDEPGHRLLKVRRYMYRSVVLARDLQGLNVDVSRVQTYIVNGQKGVHLRPMRRSPQFKPHVGVDISQDDFSGPEAERRHKQTLGIVVESSPQQSIPQPFDASPVRNEDATMVEAECGQVQTNATESESSAVGDADEVIPKVTKFNVDIHSLRRRVRKQAAPQRAPFF

SEQ ID NO: 122677 - protein, 102 aa, Oryza sativa
  unsure (1)..(102): unsure at all Xaa locations
  Clone ID: PAT_MRT4530_25584C.1.pep
SPLISASPPAIQRRCRRRPPPAPDATGGLELVSSKCRRSCVEFIPSTIELLHVHVVAGXSIELVSSSVKLLPSSLCSPTTSLAPKLDLLHTQQRRPHESVSP

SEQ ID NO: 122678 - protein, 109 aa, Oryza sativa
  Clone ID: PAT_MRT4530_25585C.1.pep
VDHASSSENLSEGGILGPGTKKERIVSAEDAVCCICLTKYGDDDELRELPCTHFFHVQCVDKWLKINAVCPLCKTEIGGVVRSFFGLPFGRRRVDRMAGRGIASSRFTV

SEQ ID NO: 122679 - protein, 153 aa, Oryza sativa
  unsure (1)..(153): unsure at all Xaa locations
  Clone ID: PAT_MRT4530_25586C.1.pep
LPTTTEGNQQTNLASAYSTFVDRVLLWKRKWQTDISSERDDELVSQTVQRALQLLSGTFRSPLHHRRILNRNAMKATELLMSPMQRPDKKLGTSAFSILDDIQVPTLSRAFRSDPPDVEVRDGTNNSAEIPMISVLGSAPAXVTSAKDTPTHA

SEQ ID NO: 122680 - protein, 155 aa, Oryza sativa
  Clone ID: PAT_MRT4530_25587C.1.pep
MAQGPFLPSIASPNAGLPPFPVPSWRHAASLPTAAHMSSPASPSLASARSLSPAPPSLAPAPVVRPLSSTPSSHLTGDGAPVGGLMVVLPSQTKGHDAPAGELLLVVGAAAIVSAAIACKRTRWPWPCWRAASVISAILNRSSTVIGKSKLRPLL

SEQ ID NO: 122681 - protein, 157 aa, Oryza sativa
  unsure (1)..(157): unsure at all Xaa locations
  Clone ID: PAT_MRT4530_25588C.1.pep
GSRGKRGVAPGWLSSASKPSGDHGDRRWRARLPTATTGGGRRRRTAEAAARPKAAAHAGRGEKGGRGSPHQRXRRRPVRXNKGGDDDRRCRGADERRRHLGGSGEGVRRGDDDHGGYHCQPEMXAVIRLTGXSSSRRSGGIPATRGGGRESSCGGEA

SEQ ID NO: 122682 - protein, 99 aa, Oryza sativa
  Clone ID: PAT_MRT4530_25589C.1.pep
SKNHRIPRVRVSSANSAATSNQKRVSRAVKHLGRTVTCMFLAIGGLGIGTWGYGSDISSFFPSCMIASLYLNHVSMFTLQNKMSPPRLVVDTDANHTSL

SEQ ID NO: 122683 - protein, 164 aa, Oryza sativa
  Clone ID: PAT_MRT4530_2558C.1.pep
VHTLHSHERERERERESSELLPPKSFFQQQWRRSLLLPAKPPPASRPDVLVACICDKARRERGPKPTPRRIASVLWIVAMDMETEKQQQQTRCPPWLQAAIADIEQRVRALAVSVPEDAAATATDHSFAERAENYYHKRRSRGSKLTYACMRRHSSSIGHLSSA

SEQ ID NO: 122684 - protein, 101 aa, Oryza sativa
  Clone ID: PAT_MRT4530_25590C.1.pep
FPIVIIDGLHCSIDSTVRTEPSIGEAAVGRVAQGTKVLAEGGHDRIFRYVFSAPPDEQLRRSYACYLSTSAGPRLFLIRRAAAVLPHCGGRGRRPPSRRRH

SEQ ID NO: 122685 - protein, 72 aa, Oryza sativa
  Clone ID: PAT_MRT4530_25591C.1.pep
MVVAMFISAIFICLVRYRLKAAGELSTLNLRLRLKLRILMFAAVAMSLVSVVLAAFTYYYLIEVKFTQIRGY

SEQ ID NO: 122686 - protein, 120 aa, Oryza sativa
  Clone ID: PAT_MRT4530_25592C.1.pep
MALVQMKVTAAAMAWNFAVEVVPGHVVEPRLSVILHMKNGLLYRVLIYVGVERGASSVPCAIKQEKYSEETENITEANSISQSSGQQVQNYSVLSYIFITAKIHKSDYAACIADSVNSYP

SEQ ID NO: 122687 - protein, 151 aa, Oryza sativa
  unsure (1)..(151): unsure at all Xaa locations
  Clone ID: PAT_MRT4530_25593C.1.pep
IKHQTSLNHRIKHQQWHSRQAKETVGGAHWWQERQGSPPLSPVGSPPPSLPLPTPXPDLAEGRAPPPPLPPLPPDLAEGRSSPPPPAPLPPLRPDLVEGRVSPPPPVRPPGSCSHGLPSSSLPPPPLPPDGPDLAEGRARSPLPPPPANRR

SEQ ID NO: 122688 - protein, 61 aa, Oryza sativa
  Clone ID: PAT_MRT4530_25594C.1.pep
KFQKIEKKLKKKKKKKKQKKKKKKKKKKGKKGKKEKSQKGKRKHAAAKQQGKVIRSQHVAK

SEQ ID NO: 122689 - protein, 213 aa, Oryza sativa
  Clone ID: PAT_MRT4530_25595C.1.pep
MAAMSDTGSSLAQWAELYHDASAAHGGVVANGAAAAATSPASPAGSTGGSPTRAPGVEGPRVGKPARRRSRASRRAPVTLLNTDTTNFRAMVQQFTGIPAPPAGAFAGPGGVPVINFGSDYGFTGAVLPFSDHLQPRRPTFQDHQQLLRPQQQYTGAPFGYGNLQQAGGAGTGAGDMFSHALSSAEDRLLLQSLQSAQMPTSAANHSANGYFA

SEQ ID NO: 122690 - protein, 92 aa, Oryza sativa
  unsure (1)..(92): unsure at all Xaa locations
  Clone ID: PAT_MRT4530_25596C.1.pep
QKLFRCWPVPQGVTPPSRGRVGRGFSQERXRGIWRCSAXCTYDNSPSTDICEMCSSAREDHAFSHRQHLQAGGNGEPSVEEIRRRRLERFSR

SEQ ID NO: 122691 - protein, 100 aa, Oryza sativa
  unsure (1)..(100): unsure at all Xaa locations
  Clone ID: PAT_MRT4530_25597C.1.pep
TEYRYSTSPSGDPKRILNLENVCNQPKAKAIQGQQLXRGFGYSSMMYPNVEDYXDGIQGCHHLPSISDKSLGYTTNKGNPGGSPYGFAPGAPLGLSGLRP

SEQ ID NO: 122692 - protein, 259 aa, Oryza sativa
  unsure (1)..(259): unsure at all Xaa locations
  Clone ID: PAT_MRT4530_25598C.1.pep
MKVPQPNKLIPPATLLLSLPYRHRLPQPVAHRLSSLSFASLLPIAIASLNQASRPQMHHFSKKRKSSSSSSSSAHGSALSPGRGRGSCRRCPARRWRSQGSTSRRRWQDESATLGLIVAPLRFLRCVDEEVVIVIQPTGDEVEDPPHGGGGXGRSATLGLVVAPLQLLRGVEEEVVVIIXPASGEVEDPPHIDGAPLASVRFSEGDGTIRLWAMCGLTKSEKTHLPAWSSYVLDVHAITRHVGIHLSWRHKETHHANTL

SEQ ID NO: 122693 - protein, 939 aa, Oryza sativa
  Clone ID: PAT_MRT4530_25599C.1.pep
MSVEAGDIGCNVETEMNEPKDDPDDDRIHEMLLSVQFPKCSIPASYAEAKKVIRALGLGYDSIHVCPNNCVLVRKELAKMDNCPVCGASRWKDEDTRKQIPNKVLRHFPVVPRLQRMFASKKLSEQAQWHKLKRKPVHNELSHPADGEAWKDFDRKYDWFAKDARNVQLDLATDGFNPFGKMSASFSMWPVFLIPYNFPPWECMEQSNFMMGLLIPGPTSPGKDMDLFLQPLIDELLDLWKGVPTYDALTKKSFDLHATVIWCIHDYPALSTLSGRVTTGYYACVRCDKNPCSRRLRNKICYIGHRRFLPRDHVWRTKFFFDGQTEEREQPEEFTMDELNEQLARVSHVKPGNHPDNKKRKRQEEGQCWKRRASLWDLPYWSNLKLRHNLDVMHIEKNICEALLGTFLDITGKSKDSINARLDLEDMGVRKNLHLKPDGNSYTLPHASYTMTKTQKLAFCAFIKNVKFPDGYASSLSRCISADECKVQALKTHDYHILLQRILPVSLRGILDKEIYEAIAELGNFFQQICAKTLKYGWMYPVERRLLTLKRFVRNMARPEGSIAEAYVANECLNACSRYFDDVDTRHNCEGRNRERVVLREGGLSIFQHGVTLLGASRMTYNEKDYDKMLWYILNNTPEVEPFIEICRTELESAGNVDVDRALAKEFAGWFNKHLATRKFVHGEEVNEDLYALASEPHLRVHLFSGCLVNGVRYHTLDRERSRKTQNSGVMVEGSHNGGDIDLYGQLKEIIQLQYNSDSNSQRTVVLFQCNWFDTCSKKSRIKDDGHFKSVSHGSCWYKDDPFIFATQATKVFYLEDNKHGEPWKVVQKFSHRHLWNVPEEENDDLPAQAEHELSYQDDEQENTSFQVADLERASINEQPSNYEDGICVQASLVDQIQRERELEVEENGFEDDADETVRQYDSENEGPIHDDGEYSDFE

SEQ ID NO: 122694 - protein, 688 aa, Oryza sativa
  Clone ID: PAT_MRT4530_2559C.1.pep
MATPLLAALLAAALLASPAAPAASASGGTIVFTTLGRSRYEFDIFSLPLAPSPHNPAAAAELRLTDGVSVNYNGNFAPASDSILFVSERNGSLNLYLSPVPSSRREALESASSSSSSAAATISPLLPWEPIALKDRPSLTPDGSRLVYVSTAVPAAEPRSSWAAVYSTELSTGRTRRLTPLGVADFSPAVSPSGEWTAAASPGAAGWSGEVEDLRTDIYVFRTADGSRRSLAIRDGGWPSWADETTVFFHRRDSDGWYGVYRAEISVTGDGVEAASVERITPPGFHAFTPAASPGAPGLVAVATRRAGSDYRHIEVIDVSSDGKNAYFEVTRPVAPRVHHFNPFISPDGARVGYHRCRGRGNGDSPLLLENIKSPGSPDTFSLFRIDGSFPSFSHDGKKIAFVGLPGMYVVNSDGSGGRRKIFSGNAFSTSWDWKRKGVVYTSIGPDFASETTEVDVVAISLGDDDDESTISMKKLTVGGENNAFPSPSPDGKWVVFRSGRSGNKNLYIIDAEDGEAGGIRRLTEGPWSDTMCNWSPDGEWIAFASDRHAPGSGSFAIYMVHPNGTGLRRVVHSGGSGRTNHPWFSPDSKSLVFTSDYAAVSAEPVSNPHHYQPYGEIFTVDIDGSNIRRLTHNSFEDGTPSWTPYFLEPRDVGETLQASGRCAFQDCHWLNIQDAAQPEELNYGKSC

SEQ ID NO: 122695 - protein, 608 aa, Oryza sativa
  unsure (1)..(608): unsure at all Xaa locations
  Clone ID: PAT_MRT4530_255C.1.pep
MAVVAFAVADWCLRLHGWPIIPPLLGVYDFTAVLPPTSPTGVLAVTVSWSHPRXWPSSSSPPACLRRRRXPPARLAYYAAVVGRLRLHXTAACDWCTRLYGWLVTPLLLGVYFFTDXVAFVAADWCLCLHDWLISSXNGSVRTSPSACRXAADWCSCLNGWLVTSPLLGVYVFTDRXASSAADWCPCLYGWLVTPPLLGVYIFTDRXASSAADWCFRLHGWLVTPPLLGVYVFTDRLAFAATDWCLRLHGWPIMPPLSGIYVFPDWLAFAAADWFLRLHDWPIMPPLSGIYVFADRLAFAAADWCLRLHGXPIIPPLLDVYIFTDRPPRMMPTGVVIFTAGHVAATANRPYHPQRKLXADWFLHFRGCMILPLLIGLIVFIAGRLAYCXWCPRLYGWFMPLPLLMDVIVFIVGHFIXRRLVCSPPRLRVFVIIFRHRLVKPSPTSVFIFTTTRLRYWFAFVAADSCLLYHGYATLSPWWSDFIFIIFGTSKLYCYYFASFATSLAMTSTRASTSWHALPDSTPCYSTTTSGVPIFNISTWTSSICIFTQAMTTRRQEATILDSMFSCFPTKERTFYFSNSNYFTLDEWTTTSTFLQYFAFTVDLLHKR

SEQ ID NO: 122696 - protein, 407 aa, Oryza sativa
  Clone ID: PAT_MRT4530_25600C.1.pep
MAYWQVGLYTSSHCTIGRFGHIPLQYHAYYYYYYYKRKRGMIRKVADLLCDLTVFSVGEWRYGVGRMRRSMDGTRHARDTSSLSASRLARSTSRLISPTRSTFVRAANANTVDFAWCTCGCGISHSSVRKQPRHGSIRSSDCGTRSKASSSPEDLNPETLMRRDHVPAAGPGRVCPSSGLKGTTVWQKTRSHTHKKKKKKAEYAFVDMSGRFLAEKLTSEEGHEQIFPGKQLGTHYEDNCIAPAISSPLASSKFNHAVSLFFLVGEKEASLSFSNCCKLGRKGKAAYPGPGTRDLVDSDQFNPIYEKQCRIYTHECDVPRPAATWMAALPSAVSPRTVGHRATRAPAHGAGTCKSTRIDGTRQSAAAVVVRLLPCVDTGTHAVGTASVDRAGHNQLKTWPKTAICIA

SEQ ID NO: 122697 - protein, 115 aa, Oryza sativa
  unsure (1)..(115): unsure at all Xaa locations
  Clone ID: PAT_MRT4530_25601C.1.pep
LVADLLCDLTVFSVGEWRYGVGRMRRSMDGTRHARDTSSLRXAFVTRSPASASRLARSTSRLISPTRSTFVRAANANTVDFAAFRDLDRADTPAAGRRTPPILVSAPCGACTTVD

SEQ ID NO: 122698 - protein, 182 aa, Oryza sativa
  Clone ID: PAT_MRT4530_25602C.1.pep
MQPPGRACWHASAPLICRLQLSQVFAIMYMAKIVVTGQELLSKLTVSSLGWKRIGGCSSLAFTGCCVLPNRPDSPALATSKAGRPAGISRHSTGHGQSSSLAYSGQVAPAIHRICRTGACRRSSSLVPVIDAADWPSSQLPPKLIFGSNLFTWVPALGQSWWQGSSILTNGNVQTLTVVPTQ

SEQ ID NO: 122699 - protein, 254 aa, Oryza sativa
  unsure (1)..(254): unsure at all Xaa locations
  Clone ID: PAT_MRT4530_25603C.1.pep
IIGTLMNXSKGKTKDNINTRSDLKLMNLRPDLHPVDDGGKVVLPPAPYTLSPDQKKALLSFFKELKVPDGFSSNISRCVNMKERKMSGLKSHDCHVILNHILPLALRGLLPENIYEPLVELSQFFKKLNSKALSVEQLEEMDAQIPVILCKLEKEFPPSFFDVMMHLPVHLAREALIGGPTMYRWMYLFERQIHYLKSLVRNMARPEGSIAEGYIADEFMTLSSSEYCNSTEGSSMVQFTSTWNKKFINWFKEK

SEQ ID NO: 122700 - protein, 277 aa, Oryza sativa
  Clone ID: PAT_MRT4530_25604C.1.pep
MRLAVATFLAIALSLSLLLAGALARPPPAPVRTDAGGGAAPAPQDKGGNLTDVLNVAGPFSTFLMYLRQTNLVAVFEHQAYRTHQGITIFVPVDMAFAAIEPSVLAGLSRNQLKHLLMYHSLAKHYTLAEFDGLSQSNPVKTLAGGRYAVNVTYDGGVVHVMSRWSSARVVGSVYESAAMAVYELDTVLLPDALFHAHPPVAATPPVPALPSPPPHADHPPPDDDDGDIDDYVPAPPPDPAAGKGGAKRSASGPAVVAHKAASYGAAAAMTLLVSCL

SEQ ID NO: 122701 - protein, 132 aa, Oryza sativa
  Clone ID: PAT_MRT4530_25605C.1.pep
MPMPMPSALARGAVGVVDDAVLAARRCALAGAPVERLAWTVAAGDIFVILPDAVDMSKTIQLSREETPRVQRLYAYECAMFLMVLWRNWFVRNELIHDKVAPPIEVSKRFIEAKSLVAGGDREIVIRKFFEP

SEQ ID NO: 122702 - protein, 1218 aa, Oryza sativa
  Clone ID: PAT_MRT4530_25606C.1.pep
MNPHGGGNQMREPALPAAVGAELERLEARLGQLACAEARRQLAELGEPAAARVLRAIGEARQVRTLSGFIRHMANQERMKRNARGIPTAHSAACISGPCREEESISTPLYYNEVQMDAQTPNDMVEVGSPNQQMPLRLHDNGGSVGHIARVVPDLANPAVGSPYGRISSVLLQNQNCVEGYTPSRGMVSPASNQVAVQINFPTQPMAHALPNDVMMQVGSPGHRMPSGLQRHMEIDSPIQPIVSTPERVSTPSPVRDLSRCVENMAGPSGSPPCPIWVMPQIPPAICPDTTNVLREVVSPQMLALGELEFRKIFMIFAYLSWNKKGVKPPLSTPKSNNIIHAYSSAHWLSASDAFQISPFLHYDSSVQNLDSGPGMSKVYHCNVEIRGGTVVKIFKGPYIENRRTHLQKVLGDDNVLVVKFMEISSDTETDLSTYLEHYHKVAEEGIVLGLRCYRFFLYKDGGKENKMKEENREEENKKCTSSVRCYFVRTESGWNMDEPYILSGRTIGQARDLFMHIRTVLTLAKYMLRFALIVSKTITLDVDLSEVLVKLIDDEPCLDEHGKEVFRDGERLIHTDGTGLISEDLAQKCTYSNSKGKLLEPQPLLIQLRLFYNGSAVKGTVLVDKRLPPRTIHIRPSMLKIKTYPELSGVQSVNSLDIVSARNAKKSLSGVQSVNSFEIVSTSNRSGRTFTSNNLIALLHYGGVPEEFFMELLQTAIEEADNARFDYAGALNIAFNYADMEDSMPARMILSGIPLEESYLQSRLDFLSLLERKGIKNGKIPIDDCYYLMGTADPTGKLGPNEVCVILDYGQVSGDVLVYKYPGLHPGDIHVLKATYSSDIEKVVGNSKHAILFPTTGQRSLADEMANSDFDGDIYWVSLNPKLLEHFKPSKPWVPAITPNGTKQKGPEDFNESELERVLFHEFLKTRFAPSYARATAATNWLVYMDRLLTVSLDESEKKLIEKKMLKLVDLYYLALDAPKMGNKVNFNLGLTQCLLQMLLHGTEILINLCFHLVNIPRDLMVKQYPHFMDRSPSYHSSSILGKIYDKAGDPKPLRSDNVQPTSISSLPCFAERDVPPAIKQLWQHRYNEYLADSSLLYAEEADEEEKKIKFQELYEKYKHLQSSDPIALANIQLLYGASEFEETPRDLDDVFSEACAIYQIAYEKARSANNVARCGFAWKVAGRALCHFYTVKNEGNAVVCSLQLLRNFRFTKKYRK

SEQ ID NO: 122703 - protein, 227 aa, Oryza sativa
  Clone ID: PAT_MRT4530_25607C.1.pep
FMLICASKIKGGKGNKHELEETSAGFPPDDSIGISGMESSSRDTANKKIKLSKDIGLDRLTATTVQEAPKRPRTTSLKKNQECSRQKKRKISKWDGSYSVIIEWLNYYSVDESDEDEVPLINKRTERRKRQKLLKLVLARESNSGSEGASSTSFVENGRNSSSAGSYPLSQGDNDKSENVQANRVDVSSLPDHPVSSHVAAEDQAGQAASSPLNSPTRGIVVDISDG

SEQ ID NO: 122704 - protein, 39 aa, Oryza sativa
  unsure (1)..(39): unsure at all Xaa locations
  Clone ID: PAT_MRT4530_25608C.1.pep
RXGERRXXWXSDTSLXRVELWVGAVEEASTARRGEXSYH

SEQ ID NO: 122705 - protein, 64 aa, Oryza sativa
  Clone ID: PAT_MRT4530_25609C.1.pep
WDEILSYVVIGTKFFRVFPQKKILPSSLGFGEPFPRFLSSCRLVLYVLDRPFTDSRCTYFVLAK

SEQ ID NO: 122706 - protein, 173 aa, Oryza sativa
  unsure (1)..(173): unsure at all Xaa locations
  Clone ID: PAT_MRT4530_2560C.1.pep
GSGRPCFGPEGWGAPTPRDFGATCMGGLDERATPHLMQRSARLSGPXPVAVCDRSQTAGAGVLTPGVGVSVPIHQNTGVGYYASQRPEPVYIARVLCICSLANIPQIEGEEPHLAPPAEPAKGGLRGLPVRSPTLRQLGNVTSLQNTLYYESEGLQMLYISISALTTQCLDRY

SEQ ID NO: 122707 - protein, 282 aa, Oryza sativa
  Clone ID: PAT_MRT4530_25610C.1.pep
MAAPFFSTPFQPYVYQSQEGSVTAFQISGGDVQVLQVMVKSQEKLTVKPGTMCYMSGNIQTDNNYLPENDGGVWQWIFGKSISSSVFFNPGSDDGYVGISAPFPGRILPMDLANFGGELLCQADAFLCSVNDVSVTSTVEQRPRNIEIGAEVILKQKLRGQGMAFLVGGGSVMQKILAPREVITVDAACIVAMTTTINFQLKTPNQPRRVVFSGGNQLTASLTGPGVVFIQSLPFHRLSQRIASRSVAAPSLRDNPKFFIQIVMFFFLAYVMIVSSIILTDV

SEQ ID NO: 122708 - protein, 561 aa, Oryza sativa
  Clone ID: PAT_MRT4530_25611C.1.pep
MASPLLLLLPLAVSSLLLPFAAAARVFSVADYGAAGDGARYDTGAIQAAVDACAAAGGGRVLLPAPGDYLTATVHLRSRVVLDVAPGARLLGGTRQADYPPESRRWYVVLAENTTGAGVTGGGEINGQGGAFVVTPNPQKNIMVSWNATGDCEGDECRPRLVGFIDSKDVTIHDITLNQPAYWWCDNTMIHNVSIYGDFDTPNNDGIDIEDSNNTAITHCHIDTGDDAICPKSTTGPVYNLTATNCWIRTKSCAIKFGSASFFDFKKLVFDNITIVDSHRGLGMQIRDGENGVFLAGSKHGLLRNLKFKNVDLTYKRWTNYSGGLYDYRPGCQKMVKHRTGGMMLEHISGLEIDNVRMRWSRGSLKGWDVDPLLFQPSTVDKLSFHDWQSLAVSSDVEFSESAALCILHAEQLFPFLPQIGGDLSPISTTTTTTRARAPTGGASMRAISSAAGGMLRARLRGGARVRGGGGHGEGGGRWTTPGHEEQPKGYLFNRPPPPAGESRKWEDWELPCYVTSFLTVVILGVGLNAKPDLTLETWAHQKALERLQQQELASGEAQAE

SEQ ID NO: 122709 - protein, 117 aa, Oryza sativa
  Clone ID: PAT_MRT4530_25612C.1.pep
MRAISSAAGGMLRARLRGGARVRGGGGHGEGGGRWTTPGHEEQPKGYLFNRPPPPAGESRKWEDWELPCYVTSFLTVVILGVGLNAKPDLTLETWAHQKALERLQQQELASGEAQAE

SEQ ID NO: 122710 - protein, 72 aa, Oryza sativa
  Clone ID: PAT_MRT4530_25613C.1.pep
MGRGAANKGGGVASDLKLDCCRGLYKRGWEELERGAGCVALEEAMQRRKWGGGDAVGKTAGAMESDSQARLA

SEQ ID NO: 122711 - protein, 452 aa, Oryza sativa
  Clone ID: PAT_MRT4530_25614C.1.pep
MASPLLLLLPLAVSSLLLPFAAAARVFSVADYGAAGDGARYDTGAIQAAVDACAAAGGGRVLLPAPGDYLTATVHLRSRVVLDVAPGARLLGGTRQADYPPESRRWYVVLAENTTGAGVTGGGEINGQGGAFVVTPNPQKNIMVSWNATGDCEGDECRPRLVGFIDSKDVTIHDITLNQPAYWWCDNTMIHNVSIYGDFDTPNNDGIDIEDSNNTAITHCHIDTGDDAICPKSTTGPVYNLTATNCWIRTKSCAIKFGSASFFDFKKLVFDNITIVDSHRGLGMQIRDGGNVSDVVFSNIKMSTRYYHPLWWGRAEPIYITTCPRHPDSKEGTISDIQFINISSVSENGVFLAGSKHGLLRNLKFKNVDLTYKRWTNYSGGLYDYRPGCQKMVKHRTGGMMLEHISGLEIDNVRMRWSRGSLKGWDVDPLLFQPSTVDKLSFHDWQSLAVSR

SEQ ID NO: 122712 - protein, 79 aa, Oryza sativa
  Clone ID: PAT_MRT4530_25615C.1.pep
NFRNIWPLLRDLKNPLVNHKKNNGCQKGTHRPKLEEGRKPKTALLRWNEPTNTGLYGAPNDQINSSRKSQTYPTTKGKE

SEQ ID NO: 122713 - protein, 87 aa, Oryza sativa
  Clone ID: PAT_MRT4530_25616C.1.pep
PGKAAGFHTVIVGSSAAVAGADVALESIPHLKEAVPELWEAPGEHVQGQLGQAAVDLRFAAVETPVVALAGQTPFSMLPGMVPFPWV

SEQ ID NO: 122714 - protein, 125 aa, Oryza sativa
  Clone ID: PAT_MRT4530_25617C.1.pep
RRSRRIRHQPSPQPPSAVVTAVLGRRNRRRRHHSRRREPPLPDPTAAAAAFAAGGRQTGVEEAAADPPAATINPPQPPPYPPRERRRGREWRDSVEGAAAGEGGETAWRERPPPPLAGRGGRAPQ

SEQ ID NO: 122715 - protein, 262 aa, Oryza sativa
  Clone ID: PAT_MRT4530_25618C.1.pep
MVVMMMQKSSLDLVLVPCGLVIMFGYHLILLYRILRRPAATVIGYENHNKLAWVRRMVQASPDETGLALSVISSNISASTNLASLCIALGSLIGAWVSSTSKVFMTELVYGDRTQATATVKYISLLVCFLVSFTCFIHSARYYVQASFLITTLDSDVPASYIQHAVIRGGNFWSMGLRALYFATTLLMWIFGPIPMFTCSVLMVFILHLLDSNSLPLHNHQFTIRKRHDQRALASTVVTRHPSPQNPILSNPVLSPVTFSIN

SEQ ID NO: 122716 - protein, 47 aa, Oryza sativa
  Clone ID: PAT_MRT4530_25619C.1.pep
MDYIDPNRMKEDWIKGKLEAEIEFGNRAGIGWSLDRLRLGSVGSESG

SEQ ID NO: 122717 - protein, 591 aa, Oryza sativa
  unsure (1)..(591): unsure at all Xaa locations
  Clone ID: PAT_MRT4530_2561C.1.pep
MAERAVAHNLSPSASGDDGEQNPRRRARTPPSPSRRGLGRGEALEEVERSATSPPAGDGEGRRDEERRLLVYGDGSTPQGALQAAGALLRHPPVVPDPETPARRWLDDVADLVMTAQQRLGAGGRSSATKTSGAATAGSASSRRRARRAAAITRRSSSIPSSTPPTQEGVRGGPDARLSIERRRNGRRAAHATEGASSSGAPLRSGHGGQPPVSPVGGAGCRAFVASLRNVRWPPRFRPTITEKYDGSVNPAEFLHIYTTGIEAAGGDDRVMANFFPMALKGQARGWLMNLPPASVHSWEDLCQQFTMNFQGTYPRPGEEADLHAVQRRDDESLRSYIQRFCQVRNTIPCIPAHAVIYAFRGGVRHNYMLEKIASKEPQTTAELFQLADRVARKEEAWTWNSSGSGVAASVAPGSAARSGRRDRRRKKRSAHSDDEGHVLAVEGASRATRKGRPASDKKKEAGAPSRERPTGKWCSVHNTSLHDLADCRAVKSLAERTRKWEEERRQERREGKAPAAPAGNRRSEAKQKAPAEDIDDGDDDLGFQEPEATIATVDGGACAHASRRSLKAMKRELLAAAPTHEAXRRARWSE

SEQ ID NO: 122718 - protein, 70 aa, Oryza sativa
  Clone ID: PAT_MRT4530_25620C.1.pep
MKWIAATAEREEIDSGEGIGGVRRCRWKGTTLRRRERGMGRNRFRRGGRGRRRRSAGGSSVGRRRGEEER

SEQ ID NO: 122719 - protein, 93 aa, Oryza sativa
  Clone ID: PAT_MRT4530_25621C.1.pep
PPGIQSSYIEQWKKNLRRTHSDQANLTLWGIDKFLTTKGVCLNNTHRIPQGKDEKNRSNIAYIFFLFKSCVKYATNTPMTYWEHKGAMQMQFL

SEQ ID NO: 122720 - protein, 119 aa, Oryza sativa
  Clone ID: PAT_MRT4530_25622C.1.pep
MAEQSHAGDGGGGGAGSGEPTNWRKEADDRLRRLHSLQFGADVALKGKDPAGAQVLALRLLGFLDSQALPGDGGAAGHEASFVAPIRAAASSSVAAAIRARAGRSDSSRNLWILENCRD

SEQ ID NO: 122721 - protein, 441 aa, Oryza sativa
  Clone ID: PAT_MRT4530_25623C.1.pep
MPSGPAGGLVPARGPPADVLTWGELQAEMERILQAGARSIGREIEEAKAAAAASANERADKLAHDLVEVREDFQKMRELVAENERQRQGLEHRMSELENNLLEIRGSLRVTYTGMHQLAGECGVTTTIPANPDEFSLTSSLAELATAMEEIPSKHAARIGDETSNGIYTWACHVLACVRLAHPDLDLLRILDQGAANDACKGMMEEVSDLGESVLPLFEGDVDVDVEDVQQRGQPESPVVVPALALKPYVPRDDVDQNLSVEAGMATTSLDLESALADRDHRIQYWRTKFEVAELERTMVQVKKDQAVEALRGREVWFDSYLRSCYTAMAGVCRDLRVPRGNPESAAEYISWLNGACSQLEGIGKCIDEALKQECRRSSRYAGGHVLACIRDHCPQLHLEFLHEGFSHSRRTPAERDDLAKSMAPLAEKVFQSLDWRWPSW

SEQ ID NO: 122722 - protein, 105 aa, Oryza sativa
  unsure (1)..(105): unsure at all Xaa locations
  Clone ID: PAT_MRT4530_25624C.1.pep
KKREGGKRRGRKEEEKEKRRGEKEEGGGNERGXEGEEKIKKGREXGREGGEREGESXEGEEREXKGEGEGEKEGEEGEERRKEGGRREEGRGDGEGSIEEEGTRW

SEQ ID NO: 122723 - protein, 614 aa, Oryza sativa
  Clone ID: PAT_MRT4530_25625C.1.pep
ETLAVPASSDTYSDCVGTNFTLVVNNQVAFTTDPRAGRSSQYCTDVAKALDAPIFHVNGDDLEAVVHVCELAAEWRQTFHSDVVVDIVCYRRFGHNEIDEPSFTQPKMYKIIRNHQSALEIYQNRLLESGKISKEDIDKMQKKVSTILNDEFQNSKEYIPNKRDWLSAYWTGFKSPEQISRIRNTGVKPEILKRVGEAMTTLPENFKPHRAVKKIFELRRQMIETGEGIDWAVGEALAFATLIIEGNHVRLSGQDVERGTFSHRHAVIHDQETGEQYCPLDNLVMNQDEELFTVSNSSLSEFAVLGFELGYSMENPNSLVLWEAQFGDFSNGAQVIFDQFLSSGEAKWLRQTGLVVCLPHGYDGQGPEHSSARLERFLQMSDDNPYVIPEMDPTLRKQIQQCNWQVVNVTTPANYFHVLRRQIHRDFRKPLIVMSPKNLLRHKDCKSNLSEFDDLAGHPGFDKQGTRFKRLIKDQNNHKDLEEGIKRLVLCSGKVYYELDEERRKKERDDVAICRVEQLCPFPYDLIQRELKRYPNAEIVWCQEEPMNMGAYSYINPRLLTAMRALGRGTIDDIKYVGRAPSAATATGFYSVHVQEQTELVQKALQRDPINSPF

SEQ ID NO: 122724 - protein, 601 aa, Oryza sativa
  Clone ID: PAT_MRT4530_25626C.1.pep
MEEQNARRGRGQGNDEEQRSMAKELRIKAKDQLRSLWWTFSMKVKYNGREELCYTEPRGRSHISLITACKAYLLHHTPSTTMASCSNNNNKRPAPPAACKTATSSKKNKKKKASLQQARVLRPQPRNEEGNALTTARARTLLSLLIDKKILAPRDQLIYTTKRGLITGDGMVKCMCGGCINNNNKRRVAEYTVAEFAVHGDGDVASSSSRQPWARMFVGDGRSLSQCLVQLMMADDEAGSGRKKKKKKYLPYVWRGARVKRKWEEDDDYVCSVCHDCGELLMCDRCPSMFHHACVGLESTPQGDWFCPACTCAICGSSDLDDPPATTTTQGFSSDRMVISCEQCRREYHVGCMRERDNGLWYPEADGEGPWLCSEACSKIYLRLEELAVVQAPCRSVASGLSLVVLRRGAARDGEEEEHAKLCMALDVLRECFVTLIEPRTQTDLTADIVFNTESELRRLDFRGFYVVGLEKAGELIAVATLRVYGEEVAEVPLVGTRFARRRQGMCRLLMDEIQKLLGEMGVERLVLPAVPEMVATWTGPSFGFREMGQADRQDVAHHAILRFQGTIMCHKQLPPQPQPQPQLGHTTTTPAGRIPSPIPL

SEQ ID NO: 122725 - protein, 102 aa, Oryza sativa
  Clone ID: PAT_MRT4530_25627C.1.pep
CSRNAVAVRYHAARWNQVGLGTVPPRCPPHRCWASSPSVMFRTPRPLPSAPSPSSRPSPPRRPRRTPAPSAPRVTISSSAMAEEIGMPCAGRINNLRRGDHR

SEQ ID NO: 122726 - protein, 101 aa, Oryza sativa
  Clone ID: PAT_MRT4530_25628C.1.pep
MELLPEWSNMELEPVSVGYYDGRDGTLAGVDKRGARMTKPSATSSGVAWTMEDLLTIATGDELCCGAWTVEDLLNVKDVAASDELRHEAWTLEDASTDEDL

SEQ ID NO: 122727 - protein, 81 aa, Oryza sativa
  Clone ID: PAT_MRT4530_25629C.1.pep
PWHAQFCGQRRKSTSKSHVQTSARGTTSDQVISDGCKPSPLMSLALVRDLWSLMIPLIFDGDSLSEVIVTCDGPVFSGHQR

SEQ ID NO: 122728 - protein, 113 aa, Oryza sativa
  Clone ID: PAT_MRT4530_2562C.1.pep
MTLNLWFVYGAYNQNTEHIACLPMVWDNQPMAAICRRCSWSRTEAENKQLIDKLLHWRSNLMAQWVECVHGMADVVDDIIYLSVKAHDGCFGLGSVSVRELKQLTNYFLRFTI

SEQ ID NO: 122729 - protein, 89 aa, Oryza sativa
  Clone ID: PAT_MRT4530_25630C.1.pep
MAERDVGIDNDYGLVAFLACLAVTTIGVGVLMVKYYRSHHGALAVFLLALAIFLFLMASGCGTKAMLYTLHGNPPAPDEQRLLVDDPLD

SEQ ID NO: 122730 - protein, 125 aa, Oryza sativa
  unsure (1)..(125): unsure at all Xaa locations
  Clone ID: PAT_MRT4530_25631C.1.pep
DPRNFNKRDKRQXXXRXSVAVXELLVVGSCATEVTLKVGEGSSGKSIEXVTNVVIYEVEMKEKGXFDWVXLKEXWINIWSXKSEAPLKGPLYVRLLVKNGGYRVVDDVMXERFTGXXEYKSGMNG

SEQ ID NO: 122731 - protein, 93 aa, Oryza sativa
  Clone ID: PAT_MRT4530_25632C.1.pep
MAPGEGDNKVLRVFVNVRYRGFFLLCSRTSRTLEMTHQGHFVVDGYEIVLISNGKPEGVLATKKHKEFEEFHDFRMADNRYVVEQAHEIQTIA

SEQ ID NO: 122732 - protein, 339 aa, Oryza sativa
  Clone ID: PAT_MRT4530_25633C.1.pep
MALLSNHTCARTLPPQATQNSLPSSSTTSTPTILLLILCRPAMAYRLLELTLVSASDLKKVTLFSRMHVYAVASISGSNVPMPMHGTHADRNGGSNPAWNTVLHFPVPARFDTRGLALHVQLRARRSFGGHRDVGDVFVPLDDLLAGAHDGGEPRPASYQVRRPMSARAHGTLYFCYRFTDVKHPALEAIEAATATATSSATKQGQYVPMYAQDSDEKATEKSVSSPVTAYPPPSNAVVAHPPVVPYGAPYGGGYPPHQQQYGYAGQPPYAYNAGPPPPATYSYAAAQQPAARKGGRMGMGLGLGLLGGAVGGMMLGEMVGDMEADAAYDAGFNDALEF

SEQ ID NO: 122733 - protein, 61 aa, Oryza sativa
  unsure (1)..(61): unsure at all Xaa locations
  Clone ID: PAT_MRT4530_25634C.1.pep
PNNXKKKRKMEXNQPQPTXTVKDVLMXMNNDXXSVRRRRPAEEAATVXISTXSSAADSXXT

SEQ ID NO: 122734 - protein, 72 aa, Oryza sativa
  Clone ID: PAT_MRT4530_25635C.1.pep
VFYAHTHLLMQDLACSKSWSTLKVIHHTTRFHQGTFSFTMQALMQSKGFESPDMLCPQFTSIGTFSELSGGR

SEQ ID NO: 122735 - protein, 446 aa, Oryza sativa
  Clone ID: PAT_MRT4530_25636C.1.pep
MAPTVGIKRSAAAVATQTISVPPPDARFAVREAVRATIASPPVEAPPAAAGKAAAPAPAVEGFLCLEEVDGRRWSYVVDGGQGKGKGRGRGRGGAAVPMGASVRAVPLQSPLPPAEEVMAFIRSYVVPEGFPDSVTPSYVPYMTWRALKHFFGGAMGVFTTRTLLSSVGVSQSKVTPGAIAINWILKDGAGRVGKMLFARQGKKFDYDLKQLRFSSDLLLEIGAGIELATAAFPQFFLPMACVANVVKNVAAVTSTSTRTPIYKAYARGENIGDVTAKGESVGNIADLVRSVVLNTLNRARFTVAVDSFIKTGHIPSLKEGNSQETIFNPPWRHEPVAIGSRFGEAFQEPASFVAIRPLFEDERYMVTYNPAKDKVYALLKDQAKSDDIIKAAFHAHVLLHFINASHARKQMNSRRSDPYGNPCNMDFMAHIAESCKTGCSVVCSS

SEQ ID NO: 122736 - protein, 130 aa, Oryza sativa
  Clone ID: PAT_MRT4530_25637C.1.pep
RPGQEPASFVAIRPLFEDERYMVTYNPAKDKVYALLKDQAKSDDIIKAAFHAHVLLHFINASHARKQMNSRRSDPYGNPCNMDFMAHIAESCKIVSSSYGTFKKKAREQGWIMSESLLNPGKARLCPARP

SEQ ID NO: 122737 - protein, 48 aa, Oryza sativa
  Clone ID: PAT_MRT4530_25638C.1.pep
FFLADNNKQVQHILIFSAFLYGGTIIKASEKQGPDGMDNTEQSIGWSG

SEQ ID NO: 122738 - protein, 184 aa, Oryza sativa
  Clone ID: PAT_MRT4530_25639C.1.pep
MGAMFIGVDKKLGLMSLARVWLELAKLGLARRLNEPSPSCLLSSFVNRAEPKLACKLLGTEAQKPFPSQFPHVHAAIMSQRWSRARGIWTGRQGVRNRGLEGLTGAAGRRPPPPSPALSAAISLPCATGHRRRRPPPPSPAPPAVASLPCATGHRRRRPPPPSPTPPAAAFLHCAVGRRLPPYS

SEQ ID NO: 122739 - protein, 302 aa, Oryza sativa
  unsure (1)..(302): unsure at all Xaa locations
  Clone ID: PAT_MRT4530_2563C.1.pep
CHCSGSGSGSALGGHELVVQQVKEVGLTLCYPMLEENNYGVWAVKMKIFMRAQGVWAAVEGNTADEKMDQMALTAIVQAMPEAVVMTIFEKETAKAAXDALKLMNMGEESIKKAXVQTLKSELDGMKMGNSEKINDFALKVTTIMNEIHSLGVKVEETTVVEKLLHSVPEKSXSLISTIEQWGDVSEMMVTKTIGHLRAFEDSSQGLRRDKEGEQQLFAAYAEPRLMRAEWEAKVAKERRSGGGSGSSSGGDKRKYHGKFDKAKVHCYNCQEYGHFADECPKPKKDMAFLATVDADDEPTLV

SEQ ID NO: 122740 - protein, 127 aa, Oryza sativa
  Clone ID: PAT_MRT4530_25640C.1.pep
SSKSLDKGNISDNVAEWVDSKSEPFVCLALKPSPQKCRLKEKKYTFDWSMCDHIFDDLLKNDYIKLPDHHVMPSLQDLEEQIYCKWHNSFDHCTSDCNIFRQKIQSAINEGRLHSIPGSSLICFQNT

SEQ ID NO: 122741 - protein, 134 aa, Oryza sativa
  Clone ID: PAT_MRT4530_25641C.1.pep
IDEDTTSSDITMTTLCINQQRHQLQTDPVTNLEGISGPMSTCWKAYGVYLQMVLVPRQTFYRATRNQQNKPRISFLGEVNRVSALLITRGYVVLRLRGSVACSFRSRIELCHDSVQIDCLSIPIRRSGPNIPYQ

SEQ ID NO: 122742 - protein, 46 aa, Oryza sativa
  Clone ID: PAT_MRT4530_25642C.1.pep
VDPRAEESARGEDITDATFTINDNIRHYKQSIDSSIIHKVTKRFDK

SEQ ID NO: 122743 - protein, 60 aa, Oryza sativa
  Clone ID: PAT_MRT4530_25643C.1.pep
YFFFAFVQKISKSIIFLFLLSRQYVCSPNFRPNSLCMTGDKWGYFWLQVINILLCPVLFM

SEQ ID NO: 122744 - protein, 35 aa, Oryza sativa
  Clone ID: PAT_MRT4530_25644C.1.pep
MYRFASNLASKARIAQNARQVSSGMSWSRNYAAKE

SEQ ID NO: 122745 - protein, 49 aa, Oryza sativa
  Clone ID: PAT_MRT4530_25645C.1.pep
AVRRAPSAFASTYALRSVMSRHVARVKSNMDISAPLVRRSVRTRGRTRG

SEQ ID NO: 122746 - protein, 77 aa, Oryza sativa
  unsure (1)..(77): unsure at all Xaa locations
  Clone ID: PAT_MRT4530_25646C.1.pep
PLPRAFRFIHVNEGAFAQDSSTNSHEYHIQTYTXLRIHGFNRKATSTCTCYLPLYXNTTQXXSISLIXFLIQTYSYR

SEQ ID NO: 122747 - protein, 255 aa, Oryza sativa
  Clone ID: PAT_MRT4530_25647C.1.pep
MARLELSRLADDCHDEAGMVFARGNGTACRVSRGYLYSCSLDGLLAGKPNMIAGAGGHKDEDGRKVKLPANVAVGKSVFRRRRAAGEMRNDVKRQRELPLRHPCREPGPSHQVFLGQVLGFLNSPAGESSQGSPAGDEQQQYLNAGGARLTLVPFLGSGGGILALGGDEAEVDGKMQAGARTQRRWRDGLERRCLLHRRVLSRLPRWGSSDPGRCWNLELEAPIEMGIRRMASRDHQHSLKETTAKRGRRRGSAS

SEQ ID NO: 122748 - protein, 328 aa, Oryza sativa
  unsure (1)..(328): unsure at all Xaa locations
  Clone ID: PAT_MRT4530_25648C.1.pep
MDRVHGKDGAEEAPAGASHHSSCYCSFSSSSPTSSDDRPGVRAIPCSSHHDEREIAEADCCAGAGAGVHLSGCSSSPENALAHGYISWKLDFPPVLILVASCPSDHVGFSGEQPIQGARIQVAPRDTASCAISSGEDHPSFIMTVISESAEFQSGHPRREVKAKQGTPQLKLGFNDCDENLAAPNLLHLLMDNILRDVLEFSISWVTLRRYQPKLPSEWSWWMAMGSLFIQIDGICSIAASVMCVEAQHRLAFEILHGIGRFPLKAKRLKGVKKKCIXKKVWSPADGAFVEDVLKVVAKGRGVETIQGIFLPINGYHMYKNVQKDVSH

SEQ ID NO: 122749 - protein, 257 aa, Oryza sativa
  Clone ID: PAT_MRT4530_25649C.1.pep
MGRAPCCEKMGLKKGPWTPEEDKVLVAHIQRHGHGNWRALPKQAGLLRCGKSCRLRWINYLRPDIKRGNFSKEEEDTIIHLHELLGNRWSAIAARLPGRTDNEIKNVWHTHLKKRLDAPAQGGHVAASGGKKHKKPKSAKKPAAAAAAPPASPERSASSSVTESSMASSVAEEHGNAGISSASASVCAKEESSFTSASEEFQIDDSFWSETLSMPLDGYDVSMEPGDAFVAPPSADDMDYWLGVFMESGEAQDLPQI

SEQ ID NO: 122750 - protein, 264 aa, Oryza sativa
  Clone ID: PAT_MRT4530_2564C.1.pep
MQPNGHFDISFDTKLLLFCEVTNLAKHFDEYALLMGDDVRYHTTRITPDISATLLEKYIRSYVLLELDKLLKHAGYTLAHFHLPPPDHHSTPNFDNRLVYDAIEHSVLNNYGRIFFIYGYGGTGKTFLWNSLLNGIRSQGKIALAVASSGIATLLLPGGRTPHSRFRIPIDTQEHFMCAIKKSTNLAELIQQAALIIWDEAPVNHKHCFEALDHTLRDIMSSNDQVLANNKFGGITIVLGGDFRQTLPVIPNAKKQQILAASII

SEQ ID NO: 122751 - protein, 121 aa, Oryza sativa
  unsure (1)..(121): unsure at all Xaa locations
  Clone ID: PAT_MRT4530_25650C.1.pep
QHGRVGKAPEHMRTRKWXHTSHMHASPITGNLEVSCFGGENESDTGDYWRLEIEGSGKSWRQNQKIRLRHVDTGGYLHSHDRKYTRXIAGGQQEVCGVGDKRPDNVWLAAEGVYLPVNQQK

SEQ ID NO: 122752 - protein, 45 aa, Oryza sativa
  Clone ID: PAT_MRT4530_25651C.1.pep
GPGVSPQRSPEWGARLGTTAGATCSTLVYLGAPCLGVACINFLSK

SEQ ID NO: 122753 - protein, 48 aa, Oryza sativa
  Clone ID: PAT_MRT4530_25652C.1.pep
HDQHMESIYIQTSCSRHQFSELVSNKVYPRSARVRNAANGGERVATRG

SEQ ID NO: 122754 - protein, 55 aa, Oryza sativa
  Clone ID: PAT_MRT4530_25653C.1.pep
PTRPPTRRPRVRPRVGPHVRLRVEGRSDGVYKSNPGTTWHRVHLGGRLSVPIGNH

SEQ ID NO: 122755 - protein, 728 aa, Oryza sativa
  unsure (1)..(728): unsure at all Xaa locations
  Clone ID: PAT_MRT4530_25654C.1.pep
MASDFRWKESPGPAARSIPLRRPAPRRPLPPGRCSPAPVPPPHPAPVLPPPPPAPAGNTAVEDSEAGPCIPRVQAATGDYTPWLGQEFASEHEAYEFYRYYAWKLGFSVRREYANKSRKTGEITSRKFVCSREGFKAPDKRTNHTRTPQPDTRTGCHANLVIRRKNDTSKYEVYAFEAQHNHPLFIPSCANPLQKKLSDVQSSDADNSASVTHASXMVIDFGQFGDVVSFDIVPRNNMNLRPFASFVGFNNYGETVLLGMALMYDDSLESFQWLFETFLHAMSGQAPRTVFSRQDAIVSKAISLVMPDTCHAICTWNLKQSAKSNLNHLIRGDCGFIKEFKACINDYEEEVEFFTAWEAMISKYNLHNNVWLQKVFEEKEKWARPYTKWIFSAGMKNTQLNERLHSDVRDYLKSDVDIISFLKHLKKLVNDRRYIELEVEFSSRLKLPDFKIRAPILRQASEAYTGMIFQLFQEEYEEFQSAYIVTRDESGPSREYIVAILEKERRYKVHGNPCEQTVTCSCRKFETLGFLCSHALKVLDTMDIKYMPDRYILKRWTKYGRCLTAPQVEGRKVQADTTLEFSSRYEYLCPVYVRLVARASECEESYRVLDQCSVELGKKIEEILQKQTSIDASAPQSDIEDVTISLSANGTDNESERALDYSSSTRPKRRKKKGRNAKSQRKSCIEKGLQKTKKVQPEQSPIQYTMLDAAQPGNVLFQVISALLFIIW

SEQ ID NO: 122756 - protein, 134 aa, Oryza sativa
  Clone ID: PAT_MRT4530_25655C.1.pep
HLIAFARERKINRGEHPPHKFKLPYIGPSQTLENRKKEHFCMDHVCKTGFKHHKLPACQIHPGPVRWETYHRRITERLMDLLLPLEINVEAGMGYSQFSLWQKNGTQKKGFYWDAGMSQKPGETYFPKSICSWG

SEQ ID NO: 122757 - protein, 214 aa, Oryza sativa
  Clone ID: PAT_MRT4530_25656C.1.pep
MAATRDERPAPTQKWKPKKKAWARVEARASEAATLPVASSLSVFSSSRWTGRPAGWGGSQRGEAGEEEVQWPVAGDRRCGSRTGLPEDRASGGRWAKRVTARAGAAGRRWASALRERKGLRRQGRGKSGRTGKRRSTSTIWRAERGEERGEGRAEADGADVERDGESEAAITVVVHGVGEAAADPPAHRSPNLLLSRFTLSASSPTRRPPCPPR

SEQ ID NO: 122758 - protein, 132 aa, Oryza sativa
  Clone ID: PAT_MRT4530_25657C.1.pep
DQRKGCSCFHHDKEKTATNNQTKQESKADISLMMPQHKAYEKRMCRLGYEKGGNKHLFCTEILGGKSRGKSEKYQPWVLGSKNLFLPILSPAMAIIYRWILHPSRRAHPNLMPLLLRRRLPAKINQKNSDAW

SEQ ID NO: 122759 - protein, 378 aa, Oryza sativa
  Clone ID: PAT_MRT4530_25658C.1.pep
MGEYCSNAPCKWLPDLGKGGAHGTNAHNMFDGMPSQPEMSKEDQRISDPIPINSTMNKEEKWLDDALDWILEKSKAFEEMIVAIRATTAIIKATWELGDRKDMDQAPYIVTKDLPKVTPTKCSTLCSSSDIKPDLIVDVGDSNQVVLAFQTMMGISKVVPSSVQPVENFSSRTVTDIKLDTPMLNTWRKNKVSFNNKVEMRGPPVALNGDEVLKQYESFEQMNILHADGKTDEDVYSLSRGPDHRVHVANRCSINGFLFRTTNVEKNLTTQNSGVVVQGEGMDWYGVIKKIIALDFPNDKEVLLFECDWFDVPGATTNKSRGYSKDQYGIIDIDTTRFRFKDEPYILASQAQQVGRAHHAAFNAAQRTLIRSVTSRGV

SEQ ID NO: 122760 - protein, 57 aa, Oryza sativa
  Clone ID: PAT_MRT4530_25659C.1.pep
VIGWTEYNCSSSIKIKDEQTGAASTVDAHNISSGWRFHWQKHLAVLLVTMVYSYLIF

SEQ ID NO: 122761 - protein, 102 aa, Oryza sativa
  Clone ID: PAT_MRT4530_2565C.1.pep
MGGKLQHLMERLHLAGKGGGGGAARDVPRGHFAVYVGEARARFVVPTAYLRQPAFVALLKSVEEEYGFDHCGGGGLTIPCSERDFSALLGRLASSPPPPSWR

SEQ ID NO: 122762 - protein, 509 aa, Oryza sativa
  Clone ID: PAT_MRT4530_25660C.1.pep
MMASDRLDAERIIEYFKGKSILITGATGFLGKILVEKILRVQPDVKKIYLLVRAIDQASANQRVQSEVTETELFSVVKEKHGKGFSRFIEEKVVALAGDIIYDDLGLDPPLLQHLADNLDVIVNGAATTNFYGRYDVSLDVNVLGVKHLCQLAKKCRGLKVFLHVSTAYAGGEQEGLIQERAFEEGWALREGMHLDVDAELRLVADVRREVEDDDDKARRKAMKELGLARARHFGWSNTYVFTKAMGEMVLSRMLLQSSSPAPAITGAGGVVVVRPSIITSIQRDPVPGWMQGTRTIDTLIIGYAKQNLSCFLGDLDLVMDVIPGDMVVNAMMAAAVAHSGEAGQERPAVYHVSSSLRNPAAYSVLYEAGRRHFTEKPRVGKRGEVIPTKEMHFFKTIASFQVYMLVKYRLPLEILHLVNLLLCGLFSRLYSNLARQYRYVMHLVDVYGPFAFFKGCFDDINLERLRQRMGKSRNPQDDEMFNFDPKTIDWEDYFYRIHIPGVLKYILK

SEQ ID NO: 122763 - protein, 89 aa, Oryza sativa
  Clone ID: PAT_MRT4530_25661C.1.pep
MATCAPSCEFWTPAPRTRIGAFRPSVSNKGRHVRPSLSRDLRQRSDEVTISWADFHREARAFPADPGTVTPGSVFAYVVWLGRSTTIAY

SEQ ID NO: 122764 - protein, 114 aa, Oryza sativa
  Clone ID: PAT_MRT4530_25662C.1.pep
MDRRNMAPANPTCGGGEGIPIESGEPAAVAGGGSEGDTAPARRGEARLGRHKLRRPRRRRQFAVEKSPIPMSSFIKRQLKRQKEVGGIKCNQKQNRFKGVIQAQETEFAEDHYY

SEQ ID NO: 122765 - protein, 99 aa, Oryza sativa
  Clone ID: PAT_MRT4530_25663C.1.pep
GLALVSFLRFSSLLAVRPLFGFVPVGVFPLVPPPPPVFFLAAPAFFWVGRPSPPLRVAFAPFALFGPPPPERGGDPEQCLALFFFFGFSILGGICCPVK

SEQ ID NO: 122766 - protein, 111 aa, Oryza sativa
  Clone ID: PAT_MRT4530_25664C.1.pep
SLTPPNLRAVRSNNDEFIHEVLEHDGVEKSMLTAYFEANRLHKETREILYRDFPEHYTWQSGKNGKFWQKRERTAIFQVGKIVTAHLAEGERYYLWVLLNHVKGWSLPEDI

SEQ ID NO: 122767 - protein, 74 aa, Oryza sativa
  unsure (1)..(74): unsure at all Xaa locations
  Clone ID: PAT_MRT4530_25665C.1.pep
AISRKGGEGAGCARARSLARLAGGLFVSGVKKLVPAVLXARWWPAAMLATAPSPVLFLASQRHHRLHRRRVRAA

SEQ ID NO: 122768 - protein, 77 aa, Oryza sativa
  Clone ID: PAT_MRT4530_25666C.1.pep
MSYNGSSVMISPVVQGKEQTDIMNNMQNHNIGNSTSVPVSGSCFNGTSFLSGNSVNAPTPPQMPTYSITGIRGNATF

SEQ ID NO: 122769 - protein, 89 aa, Oryza sativa
  unsure (1)..(89): unsure at all Xaa locations
  Clone ID: PAT_MRT4530_25667C.1.pep
GVGRGYTVKRAVLWGWHIAGASRGQQWLRIDNAGAEXIPGAAHTRPLPRGRHSDGGRLMVRDKRYNYAPLRKSPANIWRGTNNAPPSTP

SEQ ID NO: 122770 - protein, 144 aa, Oryza sativa
  Clone ID: PAT_MRT4530_25668C.1.pep
MASLLSVAVVLVVVSAQALAAVAVADAARVNAGAAAFSPAVPLGGRLDGGGGGLVECWSAVAELRSCTDEIVLFFLNGETTQLGAGCCRAAFVMNLRETNMSSLYVLHGRLSWMLYSSFTVNGILDLRFTFFLWKPKSFRSSVG

SEQ ID NO: 122771 - protein, 108 aa, Oryza sativa
  Clone ID: PAT_MRT4530_25669C.1.pep
LPPRLVVAAPLPASSPPHLTSARELRSHQPQRATKGIGLGWVGLERENGGAVLPRVLPPLPPRRPPPSRRRSRRPRASPTRSASGAPAAAPSASSSWTDPASSSLEAT

SEQ ID NO: 122772 - protein, 98 aa, Oryza sativa
  Clone ID: PAT_MRT4530_2566C.1.pep
PCQSSALLRGVPWRLVLVRGLSESLVRQTLPEFNLLLRLWRTLWSLRFFVGFSPHARCGILRELFYWLWTGDRLLVLELWVFAFSSPKKKKKRGGPEP

SEQ ID NO: 122773 - protein, 932 aa, Oryza sativa
  Clone ID: PAT_MRT4530_25670C.1.pep
MATSSLVAPSLHGQAVTEKLTKANHVLWKAQVLATLRGAQMAGFLDRSIQPPPAIIILATKDKDGKETTEKVANPVATFTNAADVWDAIEEIFNSQSRARIINTHMALSSTVKGNRSIAEYVGKMKGLADEMASAGKALDDDDLISHILAGGRGGGGRGGGRNGDANRGGHGGFGRGGGRGDDGSFNNNNRPTCQLCGKIGHTVHKCWKRFDASFTGEDKSANVAASSYEVDTNWYIDSGATDHITSELDKLTVKDKYAGNDQVHTASGSGVAQIGGSATGSSAAETRSPGSASREESVSPEETHDFMHGPVQSQFSIGAAGAGNDDGSPVLRDVSAELQSDSDAAPISSSPSTSAPSGGAVHSTHADQVTSPSPAASEQSEQEQQTTQASDQTRPVTRLQKGISKPKRYTDGTVRYGCLTTTGEPENLREAMANSNWRLAMEQEYSAFMSNKTWHLVPPTQGKNIIDCKWMYKIKRKADGSIDRYKARLVAKGFKQRYGIDYEDTFSLVVKAATIRLILSIAVSKGWSLRQLDVQNAFLHGYLEEEVYMRQPPGFENKGQPNYLCKLDKALYGLKQAPRAWYSRLSTKLQELGFISSKADTSLFFYNKGGCTIFILVYVDDIIVASSSAEVVAALLKDLEKDFALKDLGDLHYFLGIEVKKVSQGLVLSQAWYASDILKRAGMSICKPASTPLSTTEKLSIEDGDFLGQNDASHYRSIVGALQYLTLTRSDLSFLVNKVCQFLHSPTTVHWSAVKRILRYIKGTVEFGLRFGKSDSMLISAFSDADWAGCSDDRRSTGGFAVFLGPNLISWSARKQATVSRSSTEAEYKALANATTEVTWVRKILDELRIARPSVAQLWCDNLGATYLSANPVFHARTKHIEIDYHFVREQVAKKLLDIQFISTTDQLADGFTKSLPAPSLAQYRHNLNLG

SEQ ID NO: 122774 - protein, 1191 aa, Oryza sativa
  unsure (1)..(1191): unsure at all Xaa locations
  Clone ID: PAT_MRT4530_25671C.1.pep
MATSSLAAPSLHGQAVTEKLTKANHVLWKAQVLATLRGAQMAGFLDRSIQPPPAIIILAXEGQGGKETTEKVANPALLQWQAQEQQXDILAQVATFTNAADVWDAIEEIFNSQSRARIINTRMALSSTMKGNHSIAEYVGKMKGLADEMASAGKALDDDDLISHILADLDFDYNPVVSSITGRTESVSFGEVYAQLLSFEQRLGLLQGGSQSSANAVSRGGCGGGGRGGERNGDANRGGRGGFGRGGGGRGSGRGDGGSFNNNNRPTCQLCSKIGHTVHKSWKRFDASFTGEDKSANVAALSYGVDTNWYINSGATDHITSELYKLTVKDKYAGNDQVHTTSGSGMDINHVSRTIIHTPTRKLYLNNVLHVPNTKENLISAYRLMLDNHAFIELHPTFFLIKDQATKMSLLRGRCRAGLCPLPSSTLHNKQAQQVLGAFKGKSHQLPFPKSVSVSKAPLELVFLDVWGPAPSSVGNKNYYTLVEHSFNTKIKAMQTDWGGEYQRLNSFFSQIGIAHLVSCPHTHQQNGSAERKHRHIIEIGLTLLSHASMPLKFWDEAFVTAAYLINRVPSRSQFSIGAAGAGNDDGSPVLRDVSVELQSDSDAAPISSSPSTSAPSGGAVHGTHADQVTLLSSAASELSEPEQQTTQASDQTRPVTRLQKGISKPKRYTDGTVRYGCLTTTGEPENLREAMANSNWRLAMEQEYYALMSNKTWHLVPPTQGKNIIDCKWVYKIKRKADGSIDMYKARLVAKGFKQRYGIDYEDTFSPVVKAATVRLILSIAVSKGWSLRQLDVQNGFLHGYLEEEVYMRQPPGFENKGQPNYLCKLDKALYGLKQAPRAWYSRLSTKLQELGFISSKADTSLFFYNKGGCTIFILVYVDDIIVASSSSEAVAALLKDLEKDFALKDLGDLHYFLGIEVKKVSQGLVLSQARYASDILKRAGMSICKPASTPLSTTEKLSIEDGDFLGQNDASHYRSIVGALQYLTLTRPDLSFSVNKVCQFLHSPTTVHWSAVKRILRYIKGTVEFGLRFGKSDSMLISAFSDADWAGCSDDRRSTGGFAVFLGPNLISWSARKQATVSRSSTEAEYKALANATAEVMWLRKILDELRIARPSVAQLWCDNLGATYLSANPVFHARTKHIEIYYHFVREQVAKKLLDIRFISTTDKLADGFTKSLPAPSLAQFRHNLNLG

SEQ ID NO: 122775 - protein, 83 aa, Oryza sativa
  Clone ID: PAT_MRT4530_25672C.1.pep
PTLGPSSSELFKSSNACLIGKFALIGRVKNHGFVVKVTSISNPLFPVDEIESPTLTNFEVHTHWEPSGDIDDPLIFSDLVRQI

SEQ ID NO: 122776 - protein, 47 aa, Oryza sativa
  Clone ID: PAT_MRT4530_25673C.1.pep
HLCLSDLSMHASTTLIFLSLVSSTGEHHSTPINFLPCPLCRSQQKST

SEQ ID NO: 122777 - protein, 52 aa, Oryza sativa
  Clone ID: PAT_MRT4530_25674C.1.pep
AVLCCIVRVVLVPHHSFDVFSSFIRKKHHLPLILEVQDGYNKHLIEKIASFL

SEQ ID NO: 122778 - protein, 93 aa, Oryza sativa
  unsure (1)..(93): unsure at all Xaa locations
  Clone ID: PAT_MRT4530_25675C.1.pep
RSHAEPSSMNMPAFSIEEKPAVMSAGNKTXIQNVSFVPAMNAIEDTFVNLSSDQGSNSACVSHALLEKLIKNVSMLVCAVSSLTAVVSSTIWQ

SEQ ID NO: 122779 - protein, 1000 aa, Oryza sativa
  Clone ID: PAT_MRT4530_25676C.1.pep
MALAGASSSACLRRLNPLLFSAHRRPAWTPRRAARRFCAAAVASERDVFTSPEVAKSFDFTNEERIYKWWESQGFFKPNFDRGGDPFVIPMPPPNVTGSLHMGHAMFVTLEDIMVRYFRMKGRPALWLPGTDHAGIATQLVVEKMLAAEGIKRTDLTREEFTKRVWEWKEKYGSTITNQIKRLGASCDWSRERFTLDEQLSRAVIEAFVRLHEKGLIYQGSYLVNWSPNLQTAVSDLEVEYSEEPGNLYFIKYRVAGGSRDDFMTIATTRPETLFGDVAIAVNPEDERYAKYVGKLAIVPLTFGRHVPIIADRYVDPEFGTGVLKISPGHDHNDYHIARKLGLPILNVMNKDGTLNDVAGLYSGMDRFEAREKLWSDLVETNLAVKKEPYTLRVPRSQRGGEVIEPLISKQWFVTMDPLAEKALHAVEKGQLTILPERFEKIYNHWLTNIKDWCISRQLWWGHRIPVWYIVGKKCEEDYIVARSAEEALAKAQEKYGKSVEIYQDPDVLDTWFSRSINTFRHKSLQLSCSALWPFSTLGWPDLSSEDFKHFYPATVLETGHDILFFWVARMVMMGIEFTGTVPFSYVYLHGLIRDSEQVNFQGRKMSKTLGNVIDPLDTIKEYGTDALRFTLSMGTAGQDLNLSTERLTSNKAFTNKLWNAGKFLLQNLPDRSDATAWDVLLANKFDTEASLQKLPLPESWVVTGLHELIDRVSTSYDKFFFGDAAREIYDFFWGDFADWSSRTVRLLVVFVGTRANSLGARYIEASKTRLYHSGDDSASSMAQSVLLYVFENILKLLHPFMPFVTEELWQALPYRKQAIIVAHWPATDLPKNSLSIKRFQNLQSLIRGIRNVRAEYSVEPAKRISSSVVAAADVLDYISKEKQVLALLSKLDMQSIHFSELPPGDANQSVHIVADEGLEAYLPLADMVDVSEEVKRLSKRLSKMQSEYDSLLARLNSGSFVEKAPEEIVRGVREKASEAEEKISLTKNRLAFLQSTVSS

SEQ ID NO: 122780 - protein, 31 aa, Oryza sativa
  Clone ID: PAT_MRT4530_25677C.1.pep
KGNIIATCARTLVQVQFYFMGYLGSSVFSQI

SEQ ID NO: 122781 - protein, 99 aa, Oryza sativa
  Clone ID: PAT_MRT4530_25678C.1.pep
SARGTFTPKPPSPISPSLSLPCVHSSQLCSSQAKKPTQPIRTAETPAAALVKPQQSVVDAPARTPRLGAMTTTTTTRLLLAAILLAVAAADDDGQTLLE

SEQ ID NO: 122782 - protein, 362 aa, Oryza sativa
  Clone ID: PAT_MRT4530_25679C.1.pep
MCGGAILSDLIPPPRRVTAGDLWLEKTKKQQQQKKKNKGARRLPLRQEEEDDFEADFEEFEVDSGEWEVESDADEAKPLAAPRSGFAKGGLKNTTVAGADGPAARSAKRKRKNQFRGIRQRPWGKWAAEIRDPRKGVRVWLGTFNSPEEAARAYDAEARRIRGKKAKVNFPDGAPVASQRSHAEPSSMNMPAFSIEEKPAVMSAGNKTMYNTNAYAYPAVEYTLQEPFVQIQNVSFVPAMNAIEDTFVNLSSDQGSNSFGCSDFSQENDIKTPDITSMLAPTMTGVDDSAFLQNNASDAMVPPVMGNASIDLADLEPYMKFLIDGGSDESIDTLLSSDGSQDVASSMDLWSFDDMPVSAEFY

SEQ ID NO: 122783 - protein, 124 aa, Oryza sativa
  unsure (1)..(124): unsure at all Xaa locations
  Clone ID: PAT_MRT4530_2567C.1.pep
GLGFLGASGGRRRGPXSFXRRRATMTPCFSGVRRARRGHPLPGSGGGGRPSPGPAQIHXRLXEESPGVDSAXAGGQRSCTAWSPAAAGGVLQLLSAHXRHRGCPSPXRRXPPPSXHTAADGRRX

SEQ ID NO: 122784 - protein, 1018 aa, Oryza sativa
  Clone ID: PAT_MRT4530_25680C.1.pep
MKGRAVKLREAHKAGSPVFCSVAWGQGGQHVVTASAADVAILIHDAAAVAAAGGRSSGSAAAAALSTIRLHKDGVTALAVAPGSGASLASGSIDHSVKFCSFPEGVFQSNIARFTLPIRSLAFNKKGTLLAAAGDDDGIKLIATIDNTISKVLKGHKGSVTGLSFDPRNDYLASIDTFGTVIFWDLCTGTEARSLKRIAPTFGSDHSINNALCWSPDGQFLAVPGLRNNVVMYDRDTGEEVFTLKGEHEQPVCSLCWSPNGRYLVTAGLDKQVLIWDVKSKQDVERQKFDERICSLAWKPESNAVAVIDVTGRFGIWESVIPSTLKSPTEGAPDLNSTKVPLFDDEDDEERPSTSGGLDDDDDDESLGELGPFNHKRLRRKSTYHDHSNGDSEDEDLILQMESRKRMKDTHRDNKEVADKAIGDSATSVRLVTARMQTAFQPGSTPPQPGKRNFLAYNMLGSITTIENEGHSHVEVDFHDTGRGPRVPSMTDYFGFTMAALNESGSVFANPCKGDKNMSTLMYRPFSSWAGNSEWSMRFEGEEVKAVAVGVGWVAAVTTLNFLRIFTEGGLQMHILSVGGPVVTAAGHGDQLAIVSHASDCLSSGDQVLDVKVLKISECAQSLSSRLVLTPASKLSWFGFSENGELSSFDSKGILRVFSGQFGGSWIPIFSSIKARKSEDESHWVVGLDANNIFCILCKSPESYPQVMPKPVLTILELSFPLASSDLGANSLETEFMMRKLHLSQIQKKIEEMAALGLDTIALDDEAFNMEAALDRCILRLISSCCNGDKLVRATELAKLLTLEKSMKGALMLVTRLKLPILQERFSAILEEMMLNNAKIANTSGVFSNSNTNYSPSPALSTQAVPPAKVVQNGNSLKLPTLPKLNPAAQRSNPTESNKAEVEQADNLKEISTKVSPAQTPLVKIPKNSEMGVKTKKDNDGASHATTVDQNPKGGSGQVGLKNKSVDSCNGVQPQRPVNPFAKSSSSKEQPSSLFDSIKKMKVENEKVDKANSKKVKV

SEQ ID NO: 122785 - protein, 72 aa, Oryza sativa
  Clone ID: PAT_MRT4530_25681C.1.pep
MAAAQVGASRLWASSGEEAMRGPLHSTTSWAIRRPMTRLDLRGGPIFFQNRLSNIKNVEEDGNLWPTARYRE

SEQ ID NO: 122786 - protein, 273 aa, Oryza sativa
  Clone ID: PAT_MRT4530_25682C.1.pep
MSLVSSFMASLLVGGYAYIDKTDGAWMNLKTDRALRQRRAPIGGVAGGVAGGPGRVGGGAGVESGDGGGGDRGGRRGGGVLDGDGDDPCPRATSADASEPSEADPAATDASEPSEADPAATDASEPSEADPAPRATSADASEPSEADPAATDASEPSEADPAATDASEPSEADPAPRATSADASEPSEADPAATAASASSAGRFDAMRCREGRGSRSPPSSNLHPAAAQHQSPATPRHRLSATRRAAKRRLGCPPTPLSPLAVGAAWLPLSLW

SEQ ID NO: 122787 - protein, 208 aa, Oryza sativa
  unsure (1)..(208): unsure at all Xaa locations
  Clone ID: PAT_MRT4530_25683C.1.pep
AAGIRHEDTCEQEKLLLLTVGPLGCIPGVRALEFIPAGECSAFANQLTQGYNKKLKRMIYKLNQEMGPESRFVYADPVEPRAAGIHAVPSIRXAFFLAAATSCENHPGSAVLHAAAHEIVLDIFQQYRPSGFENALDPCCGGSYPPFLCIGIANSTSTLCNDRSKYVFWDAFHPTEAVNFIVAGKLLDGNSAVASPINVRELFQYQYK

SEQ ID NO: 122788 - protein, 104 aa, Oryza sativa
  Clone ID: PAT_MRT4530_25686C.1.pep
SRDLSLPCSPRRPRSLQSPPWRRSCCATPASRGPPRPPRAAAAAFASSPSRCGPGPPASPSRASLPRPRRRPSTCCCRRRPWPWAPPRCCSPRGCRPPTLCGPR

SEQ ID NO: 122789 - protein, 1033 aa, Oryza sativa
  Clone ID: PAT_MRT4530_25687C.1.pep
MATAYTRWIHHGEPLEVVPHEIDDHVDEDTSLNEDFDMNVDEEDDTDDGIHGMVEELYTAEEEGQGKKSMFAILLEEMKQELYPGGPCTRFSFVVKLLHIKSFYRISNVAFTVLLKLLSSSFPNCSIPASNEEAKRLICALGLGYNSIHVCPNNCVLFRKNLEKNDVCPVCGASRWKDNGGRKKIPEKVLRHFPLIPRLKRIFSSKRTAEEVQWHKLKRKPVENELRHPADGESWKNFDRKYGWFAEDARNIRLGLAIDGFNPFGKMSSSYSMWPVFLIPYNFPPWECVEQSNFIMGLLIPGRECPGKDIDVFLEPLIEELLELWKGVPTVDALTKKKFDLHAAIIWCIHDYPGLSTLSGRVTRGYYACVHCDKNPCSKRIRNMICYIGHRRFLARDHPWRRSKVFDGNVENREKPEKFTTDELMEQLERVKDVRPGKHPESKKRKWDEEGQCWKRRSCLWDLPYWSSLKLRHNLDVMHIEKNICEYILGTFLGMAGKSKYSTNSRLDLEDMGIRKHLHLIRDGDSYSSPHAPYTMTKTQKADFYDFLKSVTFPDGYASNLATCVTADGCNLQGLKTHDCHILLQRIIPAAVRGIMPKDINEALAELGNFFQQLCAKTLNLDVLERLKANIPIILCKLEKIFPPSFFDVMLHLAVHLPEEAIFRGPVQYGWMYPIERRLLTLKRFVRNMARPEGSIAEAYVAAECLTICSKYFGDDVETRHNREGRNRERVAIVKKDLSVFQHGVDLLGAPSLTYLEHDCEKMVWIYKKELENEGCPNVQKTLEKQFSRWFKKHITKLRYVDRQDINDELFALSYREKNRRTQNSGIMVEGTHDNQEIDFYGSLKEIIELRYNADSSGDRTVVLFRCDWFDTHGKKFRMKEDGFFKSINHGSLWYKDDPFILATQATKVFYLLDTKYHEKWRVVQKFSHRHLWSVAENDNEDIPNAVVLSYQDDDCEGVHVQLTEGCLENDQPVSEGGFRVDASVVDDLRIQREAEGQQDESGDSEDETGWQYVSDNEGPTFPLEDDDDSNYE

SEQ ID NO: 122790 - protein, 138 aa, Oryza sativa
  unsure (1)..(138): unsure at all Xaa locations
  Clone ID: PAT_MRT4530_25688C.1.pep
GFPPFLFGGVFSHVFARGSVFTPGGVAPPGDALMEKVAFGVFMGAPVSLAILCPTFFFAPPLFLHGAKNLLFFFLGPQFLFPPFFKIQGFFXAPPQFFFFAPVSPPRGGVVPSAPQGEKKKERPRGGSHGGLGLSLFF

SEQ ID NO: 122791 - protein, 72 aa, Oryza sativa
  unsure (1)..(72): unsure at all Xaa locations
  Clone ID: PAT_MRT4530_25689C.1.pep
QQVICAGTSGSSMMNEEWRCQMPFTCATCPLSTXHTLFXCGXCLIYNVGGGCDSXNXVCCITIKXXKHLXNX

SEQ ID NO: 122792 - protein, 84 aa, Oryza sativa
  unsure (1)..(84): unsure at all Xaa locations
  Clone ID: PAT_MRT4530_2568C.1.pep
LYGPHTGSDNSLNTRSREWVYPRAYGYFLRTLRKYFTESTDGKSPTRTRLGXPEEDLGHRISEPTXPSQPTKSEPARSQIAEDL

SEQ ID NO: 122793 - protein, 131 aa, Oryza sativa
  unsure (1)..(131): unsure at all Xaa locations
  Clone ID: PAT_MRT4530_25690C.1.pep
GGVFSHVFSRGAVFTPGGVAPPGDALLGKVAFGVFMGAPVSRAILVPTFFFAPPLFFLGVKNLFSFFLGPQFLFPPFXSSRGFFKPPXQFFFFAPVSPPRGVFVPSAPQGGEKKEEPRGGSLGVLGLTLFF

SEQ ID NO: 122794 - protein, 2135 aa, Oryza sativa
  Clone ID: PAT_MRT4530_25691C.1.pep
MAPPRELDLSDEVEGEEDGTTDFVFRLAGDPIPLLPTTSSPLPLFDLQSPPSRPLAVSNRRAAVFLAHPNGFMAATTKALIEASKEAREKGKSTTRCARDCCVADIPLPGVSLLELSRDESVLAACAGSVIHFFSASSLLTDKDVEPLSSCTLEGSSTVKDFKWLNHASKAFIVLSKDGLLSQGSLGEGLKDIMENVDAVDCCKEGTHIVLSKKNTLNILSSDFKEICCMPLLFQLWSDDSDSDDASIKVDSIGWVRDDSIVVGSVRLNEEGNEEGYLVQVIRSGGNTFFENSSKSVVFTYVDFFRGIMDDVLPSGVGPNLLLGYLHRWDLMVTSNKKSIDEHISLLKWSSATDDKKTVVYLEMLEDKYSPRIDLQENGDDNVILGFGVENVSLFQKITVTVGPEQKEVAPQHILLYLTGEGKLNIYYLARISDPSELPQTKLSAIEDSDVMKEISPVTVSGKEFTPSATSSLDKSIRPDGAELSSVQPDRDLHGSTDMKNSSPVSKAKEIVASSPAPASFLAPASNLKPGISFSFSTANSVSLSPAGSNTSSELGSSWQQSSSSNFVNNQLGKGSIPSTQPVGAFGGSQNSKKDGNLSFNKSSVFTSDGSTLVKPGERNEPGFGSHPLQSSYTTDKKVPSSVGLSSKSSPSISPIKPSSAGPSSTGFRTGNLEAFPTSRGSPLPQESIDKPHDRTHAVVDHSKNFKLGAMFDTEQDLSKKFYSINDMTKELDTLLSYIEKDGGFRDACITFQERPLSMFEGDLQNFLELLQIFKNKIAEQCSRVEDLRNKMFQGTSTTRVSARQAYMKGIVDQSSDTQYWDIWNRQKLSPEFEAKRQNILKANQNLTNQLVELERHFNNLEMNKFGETGRVASSRRAIYSSKARSSQTQISSVYNALNSQLAAAEQLSDCLSKQISALNISSPSTKRGSVAKELFESIGLDHTMDAAKFSGGTPSKSVKRYPSTREHITSISGPSKTAEPETARRRRESLDRSLASLEPQKTTVKRIAQQQRLKISSDLPFRSNKKIFDSQMAAMSQEKSSSSPTSSIVESYANKLHYPSEVLHEKTKPSGPQHNTLFKWVKESAGPSQGPQHKYPELPGQLKSSDQTPKLGSSSPLSFSYSHKDVWDNISSSNVPSSGTTHTMPKSSTLTFKTTVIPKTNTSTLPDLSPLMTGSKFSLSPLTVKTLSGDSGGASSIITKNKQGGQAMPYLGTTKGLDVSPQNMGGAFRDLNKPSLSPEPPKSALLQGKTVQLGKITETVQSPVKAKPEVAFQPPAFPPTPVAQSSPCSIKPTVPSSATSSSSTMQESAAKTSDVLSPTGPSILPSKESMTKPSSPLPDGTISSSLLSIPMPVKESSTGLNKIVSKPEVVTSEVTGTTVSASTSSSVPITEGKPSSIPATSGSLPSIPVSAPKVVPVSAESVVVTSTGKDVGPSNPSSDEDDMEEEVPSASSDLNLGALGGFGLGSVPSSSPPKSNPFGNSFTTSDNKSSGSSFTLTTSPGQLFRPASLSIPSSQPAQSSQSTSSSTFSSAFSSGLSGFGQSAQIGSAQQSGFGQPSQIGAGQQAGFGQPAQIQSGFGQPAQVGVAQQSGFGQPAQIGTAQQSGFGQPAQFGAQQALGSVLGSFGQSRQLGSFGAGGFGGFASASASGGFSSNSGFAGGATGGGFSAAAAPAGGGFAAAATGGGFAALASKGGGFAAAASSGGGFGGAAQGSGFSSVALMHAPKIVLRALAVAIVELPAPGIDTISQEHFAYLSTSDIRTWVSHQDSLTNLDEIVSNHPTTSRQTFQCWPRSGQMMYHQQQVQSDSQHLSSRPGLPPEKQFLLQGGADSSSGLVLSTDAKPRLKWTSELHERFVEAVNQLGGPDKATPKTIMRLMGIPGLTLYHLKSHLQKYRLSKNLQSQANASRAQGVLGCSTTEIDKPCEGNGSPASHLDLETQTNSSSMHINEALQMQIEVQRRLHEQLEVQRHLQLRIEAQGKYLQSVLEKAQEALGTIAVAETAATANASSSKRLQNEHTQLHHHQQQQQVGDGSVDSCLTACDCEGSHHSRSHGHRGEQDILSIGLPPFEPAAARSGKEHHYLLFPNEPSRRRSCSDERRREMSTLQASELDLSINGRSSSHSHRRENIDLNGAGWS

SEQ ID NO: 122795 - protein, 434 aa, Oryza sativa
  Clone ID: PAT_MRT4530_25692C.1.pep
MAVAVEITRSEVLRPSETLAAGGGGKRSQLTVFDRAAMDWYIPAVFAWDGAAAPSNDEVKGGLAAVLARYPHLAGRFDVDERGRRCFNLNNAGVRVLEATVAADLADALAHDVAAHVNELYPKADMENADEPVFQVQLTRYACGGLVIGTACNHQVSDGQSMSFFYVAWAAAVRSAGATLPTPFVDRAAIAVPRGPPAPAFDHRNIEFKGEHSWTHSYGSLPLERIRNLAVHFPDEFVAGLKSHVGARCSTFQCLLAHAWKKITAARDLSPEEYTQVRVAVNCRGRASPAVPMDYFGNMVLWAFPRMRVRDLLSSSYAAVVGVIRNAVARVDEQYIQSFVDFGEVAAGDELTPTAAPPGTVFCPDLEVDSWLGFRFHDLDFGRGPPCAFLPPDVPVEGLLIFVPSCAAKGGVEMFMALDDVHVEAFRQICYSMD

SEQ ID NO: 122796 - protein, 161 aa, Oryza sativa
  unsure (1)..(161): unsure at all Xaa locations
  Clone ID: PAT_MRT4530_25693C.1.pep
MRILFGFAPPANDASQASARFDPLRPSYRPNPLPLHFLKQQQVVSPXSEFVRPPYSIVATPFWPPATFPFINPPVLPPPCFPPLRLVAPPFPYPALSIVPTNVPQLPLQPISGVYFDPAPAPAPTFFAFHLPSLCGKYPNFYSAPRSISPFGGVWGLNGTI

SEQ ID NO: 122797 - protein, 575 aa, Oryza sativa
  Clone ID: PAT_MRT4530_25694C.1.pep
MASPAAPLALLILLVSLAIAAAQSGQPSSPPRNSTNISDAAALHTVFEKWGLEDGTMPQGYHPCGKLVWSNSSEMEASINCSCSSNECRITHLNVTGYRNITFIPAELFSLTELVSLDLSNNNLIGQIPPQVSNLSKLETWHFNNNRLNESFPNASALLSIQSLKRWMFDNDIEGMVPGFIANFANLTDLRMYGMKLQGPIPENFSKLINIENLMIGDLDTEGYPFNFTGDWVNLSTLDLRSNNLSGSIDLQQYDSSLKYLYVGENNFNGSLPDQMPQSLVALGLTHYFVNMSFMHRNYIGTSIGAGSSVGSENLRLLNCVDMKGCNTTGLTNPVSFAVNCGGKQYTPPSDPSNMFNDDSANLGAADFHVDTNNNWVVSHVGTDPFSNSSGIVTTGNGTNIPELYRTARTSTGSLWYYVVGLPSGKYTVQLFFAEIVIESGSGRRLFNIDIQDRNIMTDFDISKEAGGSNRPINRNYTADVTTSVLKIHLYWNGRGTCCIPRNGTYGPLVSAIRVFPSAETQASPPPVALTSRHDEKRRGVVAGIAALSIAATVISSSAVYLWWKWVSLVKHRKA

SEQ ID NO: 122798 - protein, 89 aa, Oryza sativa
  Clone ID: PAT_MRT4530_25695C.1.pep
HTEHEITIHQTGTNEDNSGYHLTEDTRRGPFNIILSLHYSYMMGEWQRQWRRDLGLVAGKGVARPLNEAEDPEVDELGLGDAEEHLGGL

SEQ ID NO: 122799 - protein, 147 aa, Oryza sativa
  Clone ID: PAT_MRT4530_25696C.1.pep
MVTGTGSVVAVELALEEEIHAGGRLIERKLCNFPALKAMEVPGTERSGCGRPLRCLDEPHAAGCGCPSSRPELRCPLGPKFRSLLSPPPPRAPLPHQEGCGGHDGSVARSGVVHSGQNGDEIMAAVLGACSRADNGMATFPSLQWMK

SEQ ID NO: 122800 - protein, 43 aa, Oryza sativa
  unsure (1)..(43): unsure at all Xaa locations
  Clone ID: PAT_MRT4530_25697C.1.pep
MWRPFXHPNHLIIVQNGDPNKTIQVPQGFDYXLYNRDDINLIL

SEQ ID NO: 122801 - protein, 115 aa, Oryza sativa
  Clone ID: PAT_MRT4530_25698C.1.pep
KNIKIVNNALVVIRQRLKSATSSLREHTTLIESPFLYLGCLALHAPRKKYIVSKDKLDTLGSLAFFKPFRSRFLKQSKRYIEKWRTPTWTYLHCAGGGDLTKQKRNLQVNKHTEV

SEQ ID NO: 122802 - protein, 376 aa, Oryza sativa
  Clone ID: PAT_MRT4530_25699C.1.pep
MASLVPVEVTPLDEVGGGEHSVPSRRAPLKSPRSTRSAHASGEERRWRDHRGRAKGELEGNGSGEVEEEDAAPTKLPSGAREERKTETATAGGKFLKEHEIPKAKDLALNGRAARLRTSLYADDAANFISPTTRDMTNLSKFLSMFGKVTRLKALRVRWLWYEWTAPDKPWIGTPVPCDNQDRDLFAVATTSTIGDRKKASFWHSHLSDGRTPKSLAPLIFQASRRKNRSVREAVDAGVWISVIRTEELSTSEHLRQYVDLWVRLLQPPAFNEHEDTIIWKLTANGVYTTKLAYRLQFIGATRSTFNETIWKCWAPPKCKFFAWLVIQICIWTVDRLQKRGWQNQQLCPLCRVTQESAVHLLTSCRVTCRIWEEIQ

SEQ ID NO: 122803 - protein, 139 aa, Oryza sativa
  unsure (1)..(139): unsure at all Xaa locations
  Clone ID: PAT_MRT4530_2569C.1.pep
THTHTHTHTHTHTHTHTHTHTHTHHTHTHTHTXRXHHIPTHIHHPPPSHPTTRPXTPTHHHHPPHHISPDHTHPPHPSIPPPKLPSSPLIRNSNVRSKRSPPRNPRPTMTRAILPNPSQPNILTTGSYTQIYPISPCTW

SEQ ID NO: 122804 - protein, 339 aa, Oryza sativa
  Clone ID: PAT_MRT4530_256C.1.pep
MSTSAAAAAAAEQQQEEGEHGPFPIEQLQASGIAALDVKKLKDSGLYTVESVAYTPRKDLLQIKGISEAKVDKIVEAASKLVPLGFTSASQLHAQRLEIIQVTTGSRELDKILDGGIETGSITEIYGEFRSGKTQLCHTLCVTCQLPLDQGGGEGKALYIDAEGTFRPQRLLQIADRFGLNGADVLENVAYARAYNTDHQSRLLLEAASMMIETRFALMIVDSATALYRTDFSGRGELSARQMHMAKFLRSLQKLADEFGVAVVITNQVVAQVDGSAMFAGPQIKPIGGNIMAHASTTRLALRKGRGEERICKVISSPCLAEAEARFQIASEGVADVKD

SEQ ID NO: 122805 - protein, 72 aa, Oryza sativa
  Clone ID: PAT_MRT4530_25700C.1.pep
IVRPIIVFSFLFVLTSKINCVIPSYIFCYIVYFSFLDKVELSLFVIDHTRPIFMWTQLSMFSPTLICPSIIV

SEQ ID NO: 122806 - protein, 769 aa, Oryza sativa
  Clone ID: PAT_MRT4530_25701C.1.pep
GLDGEATEPMIKELEDEREESQDPEVEFAIAGAVRECGGLEIILSMIQSLREDELRSNQEELGSVLNLLKYCCKIRENRCALLRLGALGLLLETARRAFSVDAMEPAEGILLIVESLTMEANESDISIAQSVFTTTTEETGAGEEAKKIVLMFLERLCPPDGAKKSNKQQRNEEMVARILPNLTYGEPAAMEALVLHFEPYLMNWSEFDQLQKQHEENPKDETLSKNASMQRSAVENFVRVSESLKTSSCGERLKEIILEKGITKAAVGHLRESFASAGQASFRTSAEWTVGLKLPSIPLILSMLKGLAKGDLPTQKCVDEEDILPLLHALEGVPGENEIGARAENLLDTLANKENNGDGFLAEKIQELRHATRDEMRRRALKKREMLLQGLGMRQEFASDGGRRIVVSQPIIEGLDDVEEEEDGLACMVCREGYTLRPTDMLGVYAFSKRVNLGATSSGSGRGDCVYTTVSHFNIIHYQCHQEAKRADAALKNPKKEWDGATLRNNETLCNCIFPLRGPSVPPGQYTRCLDQYWDQLNSLGRADGSRLRLLTYDIVLMLARFATGASFSTDCKGGGRESNSRFLPFMIQMASHLVDGSANQQRHVMAKAVTSYLSSSPSTPESPVRLSALSGARGGSVRSDEGSSADSNDSKRLFAIVQPMLVYTGLIEQLQQFFKKGKSSGTQKVGEKDGSSGGNLEAWEIMMKEKLGNMKEMLGFSKDVLSWLEDMTSSEDLQEAFDVMGALPDVFSGGHTTCEDFVRAIIHGAKS

SEQ ID NO: 122807 - protein, 5100 aa, Oryza sativa
  Clone ID: PAT_MRT4530_25702C.1.pep
MAAEISALLDLLLHPPAAAAGDRDPPARRLRGPAARAGLEALAGALAAGPPADPARARAVLAAARAVMRKNNQLPVSTSDPSIPFGFENNMKCEVSTVVELSVPPSFIEGRYTFVLVEQVESTVVEIVERSLEFCLLYLEKSSYACEDYGLLNEVAYFMECVLLRGTPSKVYSLEPSVVNDVIEQWSSVQVDSERISPQEKYFCYLKGLWNVGALFADCFLMAQPGFNCSNSGDDLQRFRLTLSPECLQQDYVIAENTESSHTASPNGMVSIAQHFAVVHLHCIPVLLTLVQKLCQSPALDVIEDTNFNMRLSFGQRILKLVHGLAMEFPCDASDAMMLCSVARCTDSLPVLFKLKFKFANHDRVFSGDGVGTVLLQILDEFLQLIHIIFCNSDICCTVQVCILASLLEIFSPEKWKYDRSAACLMPPLVYSPHIVQYVLKLLNDTKRWTSRVDRDRPGKDVLGYSCNSETDGLSCHARSKKVPLLKKYTSEEYLQLIFPSEEQWLDDLVHLIFFLHEEGVKSMPLLEKPQMSCTKQVTLSELESVASHEEEALFGNLFAEARSTGVADSVEQPISLGSGPSSSQHGPIQLAADLICFMKMSIFSPEWCTAIYVDACRKFHSNHLEQFLSILQCPAFCSDESIATTSLSEVNSLHINTACFELLQMFLISHECPASLREDLVDKVFNAENGMYTYNNYTLALVARAIISGASSIYNLGRKVFVQYVGYLLEKANDKSSSSLDLNNFCRILPCAFHLEILLVAFHSTTGPEKADLINIVLSSLEKMRQPPLGVNASGLTRWALLLSRLLLVLRHMLLYPVTHPSWLLMRLRSRMRDILLKEGQSRSMNDYLPSFTAEVVEGIFADTVKEYASTSSLFPQLIDVTPAHAEIYFDKSALEALGLNFANLGSNISEILGVWKGRKAEVAEDLIAERYLFLICWSTLSGIGYSGGYEGLLNPDFADVNFFISFALSVSDDASSLLDANLPSVIFGFLKLLQSEILCGPSVLESWDFLRKGAWLSLILSLINTGFWGHQTSGKPDVDLQGKQVVQDAEIFGKSLLTFISENSGHCLHVLSSLLETYLHAFKEAFISFVVEKGRVCEDHCYPSWLLKHSAFDKSKHPLLFEKVGSNIGMLEPICDLSSRIDRVATKLGDGRKEYFLLKCLLHGFPVNSASNNSAILSCVLVINEIIYMLNGCIKIMQPNDRDLVDVGVISKLLSMIMTIKSDGMFTSIHKLCDSIFMSLIDQKDDLAGYSDLFVLKQLEGYLADINSKEIMDNEVKEIIVFTIVDLVEDLRSKTNVFKFFLGEAEGAPERANSLFALEQADMSVFIDVLDKCQSEQVNLKILNLFTDILGDGLCPDLKQKLQHKFIGMDVSCFSSWLEFRTLGHSMKIESTNSTTSGPTALRELTMDFLMRLTCPSSETLAKELQHHLFDSMLLLLDKAFMSCDLQIVKAHFHFIAQLSTDESHFKELFEKTLKLMENMVGNEGLLHTLKFLFTCVESVFGDAGSNRSALKRLSSKSSGNSFGSGSLIPKQLKNSDSLVLRTNQESNSTVDCDASSGEEDEDDGTSDGELVSIDRDEEEDGNSERALATKVCTFTSSGSNFMEQHWYFCYTCDLTVSKGCCSVCAKVCHQGHRVVYSRSSRFFCDCGAGGVRGSSCQCLKPRKFTGTSSVSPPVTSSFQPILPYHEDVEPVADSGSDFEDDISTEAENCIKLSVPKGFSDELPVFLKNLDVEVRMLELCKKLLPMILSQRELNLLKDRKVFLGGEMPMSQASDIFQLKKAFKSGSLDLKIKADYPNSRELKSHLANGSLTKSLLSISIRGKLAVGEGDKVAIFDVGQIIGQPTAAPITADKTNVKPLSRNIVRFEIVHLIFNPLVEHYLSVAGYEDCQVLTLNSRGEVTDRLAIELALQGAYIRCVEWVPGSQVQLMVVTNKFVKIYDLSQDNISPLHYFTVADDIIVDATLVPSSMGKLVLLVLSEGGLLYRLNVALAGDVGAKTLTDTVLVKDAVSMHKGLSLYFSSTYRLLFVSHQDGTTYMGRLDGDSSSITELSYICENDQDGKSKPAGLYRWRELIAGSGALACLSKFKSNSPLAVSLGPHELFAHNMRHASGSNAPVVGIAAYKPLSKDKAHCLLLYDDGSLNIYSHTPNGSDSSTTLTAEQTKKLGSSILSSRAYAGTKPEFPLDFFEKTTCITCDVKFNSDTTKSSDSESIKQRLSSDDGYLESLTSAGFKVTISNPNPDIVMVGCRIHVGNTSASNIPSEITIFHRVIKLDEGMRSWYDIPFTTAESLLADEEFTIVVGRTFDGSSIPRIDSIEVYGRAKDEFGWKEKMDAALDMEAHVLGGSSASGKSGKKAQTMQAAPIQEQVLADALRILSRIYLLCQPGFCTDTIDADMELNNLKCRSLLETIFQSDREPLLHSAACRVLQAVFPKKEIYYHVKDTMRLLGVIKSLPSITSRIGVGGAASSWVTKEFIAQIHTVSKVAVHRKSNLASFLETHAVAILNVTRKLGYAECLALHSNEKSGVSVAPAVALLKKLLFAPYEAVQTSSSLAISSRFLQVPFPKQTMIANDDAPDNHAKASAASNSTTGNAQVMIEEDPATSSVQYCCDGCSTVPILRRRWHCNICPDFDLCETCYEILDADRLPAPHSRDHPMSAIPIELDTFGGEGNEIHFSVDELTDSSVLQAPADRTIQTSPSSIHVLDASESVDFHGSMTEQRTVSISASKRAINSLLLSRLIEELSGWMETTAGTRAIPIMQLFYRLSSAVGGPFMDSTKPENLDLEKFVKWLIDEINISKPFPAKTRCSFGEVSILVFMFFTLMFRNWHQPGTDGSHSKSGGSSDLTEKGPVHVQVSTTTLQSSNDDHDKNEFASQLIRACSALRQQSFLNYLMDILQQLVHVFKSSSINGEGGSSSSGCGSLLTVRRELPAGNFSPFFSDSYAKSHPTDLFMDYYKLLLENTFRLVYSMVRPEKEKSADKDKSCKVPNTKDLKLDGYQDVLCSYISNAHTTFVRRYARRLFLHLCGSKTHYYSVRDSWQYSHEVKKLHKIINKSGGFRNPVPYERSVKLIKCLSTLCDVAASRPRNWQKFCLKHTDLLPFLMDNFYYFSEECIVQTLKLLNLAFYSGKDANHNAQKTESGDIGSSTRTGSQSSDSKKKRKGDDSSEGSSEKSCMDMEQAVVVFTGKDGDVLKRFVDTFLLEWNSTSVRHEAKSVLFGLWYHAKSSFKENMLTTLLQKVKYLPMYGQNIIEYTDLMTCLLGKANDSTAKQSDTELLNKCLTSDVVSCIFDTLHSQNELLANHPNSRIYNTLSCLVEFDGYYLESEPCVTCSCPDVPYSRMKLESLKSETKFTDNRIIVKCTGSFTIQSVTMNVYDARKSKSVKVLNLYYNNRPVTDLSELKNNWSLWKRAKSCHLTFNQTELKVEFPIPITACNFMIELDSFYENLQASSLESLQCPRCSRSVTDKHGICSNCHENAYQCRQCRNINYENLDSFLCNECGYSKYGRFEFHFMAKPSFSFDNMENDDDMRKGLTAIESESENAHRRYQQLMGFKKPLIKLVSSIGEQEIDSQQKDAVQQMMVSLPGPTGKVNRKIALLGVLYGEKCKAAFDSVSKSVQTLQGLRRVLMTYLHQKNSNDTDALPACSIPRSPSSCYGCSTTFVTQCLELLQVLSKHATSRKQLVSAGILSELFENNIHQGPRTARTLARAVLSSFSEGDADAVQELNNLIQKKVMYCLEHHRSMDISQSTREELLLLSETCALVDEFWEARLRVAFQLLFSSIKVGAKHPAISEHIILPCLRIISQACTPPKSDSGEKEPGMGKSSLMQAKNDDTVGHSVTNLSTSKTQSELSGKIPDGSRRRQDISLLSYSEWESGASYLDFVRRQYKVSQAVKGLQKTRHDSQKSDYLVLKYGLRWKRRACRKSSKGDFSKFALGSWVSDLILSSCSQSIRSEICTLISLLCPSNSSRQFQLLNLLMSLLPRTLSAGESAAEYFELLGTMIDTEASRLFLTVRGCLTTLCSLITKEVSNVESQERSLSIDISQGFILHKLVELLNKFLEIPNIRARFMSDNLLSDVLEAFLVIRGLVVQKTKLINDCNRLLKDLLDSLLVESTANKRQFIRACISGLQKHVKEKKRRTSLFILEQLCNLICPVKPEPVYLLILNKAHTQEEFIRGSMTRNPYSSAEIGPLMRDVKNKICHQLDLIGLLEDDYGMELLVAGNIISLDLSISQVYEQVWRKHHGQTQHSLSNASQLSAAASSVRDCPPMTVTYRLQGLDGEATEPMIKELEDEREESQDPEVEFAIAGAVRECGGLEIILSMIQSLREDELRSNQEELGSVLNLLKYCCKIRENRCALLRLGALGLLLETARRAFSVDAMEPAEGILLIVESLTMEANESDISIAQSVFTTTTEETGAGEEAKKIVLMFLERLCPPDGAKKSNKQQRNEEMVARILPNLTYGEPAAMEALVLHFEPYLMNWSEFDQLQKQHEENPKDETLSKNASMQRSAVENFVRVSESLKTSSCGERLKEIILEKGITKAAVGHLRESFASAGQASFRTSAEWTVGLKLPSIPLILSMLKGLAKGDLPTQKCVDEEDILPLLHALEGVPGENEIGARAENLLDTLANKENNGDGFLAEKIQELRHATRDEMRRRALKKREMLLQGLGMRQEFASDGGRRIVVSQPIIEGLDDVEEEEDGLACMVCREGYTLRPTDMLGVYAFSKRVNLGATSSGSGRGDCVYTTVSHFNIIHYQCHQEAKRADAALKNPKKEWDGATLRNNETLCNCIFPLRGPSVPPGQYTRCLDQYWDQLNSLGRADGSRLRLLTYDIVLMLARFATGASFSTDCKGGGRESNSRFLPFMIQMASHLVDGSANQQRHVMAKAVTSYLSSSPSTPESPVRLSALSGARGGSGSSEETVQFMMVNSLLSESYESWLQHRPAFLQRGIYHAYMQHKHGRSTLKLSADTSSSAVRSDEGSSADSNDSKRLFAIVQPMLVYTGLIEQLQQFFKKGKSSGTQKVGEKDGSSGGNLEAWEIMMKEKLGNMKEMLGFSKDVLSWLEDMTSSEDLQEAFDVMGALPDVFSGGHTTCEDFVRAIIHGAKS

SEQ ID NO: 122808 - protein, 96 aa, Oryza sativa
  Clone ID: PAT_MRT4530_25703C.1.pep
MGRYIDRSFKSFIAPPPPPPAAVLGSPSIATQLPPSPPTAVLSATAGGRRFTKTQFKTQVAAASDAGNDDGSRQQQCTASISLDLKRKIVSDRTAA

SEQ ID NO: 122809 - protein, 323 aa, Oryza sativa
  Clone ID: PAT_MRT4530_25704C.1.pep
MAELDLKLAGGKRRLGWCRNKNKNSSSRNGLKAEDDVGFTVTARSGRWRAKRRVLVTIMAQWLSLRWPGSTGTATRTRGCALDTGSDDELDAGLRQALLGKASSWPCRSRTPLPIHHRHVAVALLEPTIMPPCALGGFDLDIFLFIHDVSNGCICGSHGHIILPFFTENRPRSFGIIVFFALEVRGFESSPSLQPCFAVAPVVAVAREGCHRGRHRVAVLVRPFAVAEDRWSTVAVVKPKSAAAFSSTPSPSVAPPPLLWSPADYVLGINVIKMSYLVRYGDLYPQLVHHRGASIPVDVDTGCNRHECSPLSSPPPFLAQSLS

SEQ ID NO: 122810 - protein, 148 aa, Oryza sativa
  Clone ID: PAT_MRT4530_25705C.1.pep
ALCGKTDHADLCESSIGQLPQQPPAQLDDIGVLRLSMNALRAKVQEAISVATNRMGAASGDEVSKDAMGDCLQMYDDMKSNLDSADAALKKGDKDTAHTMLDSARTDVDTCEDGFSEREGLKPIMGDLDKILAELSSNTIAIASAIIE

SEQ ID NO: 122811 - protein, 25 aa, Oryza sativa
  Clone ID: PAT_MRT4530_25706C.1.pep
PFTFHHLFYVITHKYTRSSSPFLYQ

SEQ ID NO: 122812 - protein, 319 aa, Oryza sativa
  Clone ID: PAT_MRT4530_25707C.1.pep
MSSTKLILCFLLLFLTLNLSASSTGGDHERFMYAGFTGANLTMDGSAKIIPTGLLALTKDTFRAQGHALHPAPLRFGQSNGMVTSFSVSFVFGILSSFGDIRGHGFAFFIAPTNNFSSAFPIQFLGLLNDKNNGSLSNHLFAIEFDTIRNNEFGDIDNNHVGIDINSLNSMQSYHAGFYDDKGGTFTNLSLIGGGPIQVWIEYDGFKIIKDIASGLLYLHEEWDKVVIHRDVKASNVLIDKEMNARLGDFGKATTLSDVFGFGIFLLEVSCGQKPIRQNSEGRQRQRFRRPALPIAGARRRAGWSSLRATAQYRVGGKP

SEQ ID NO: 122813 - protein, 77 aa, Oryza sativa
  unsure (1)..(77): unsure at all Xaa locations
  Clone ID: PAT_MRT4530_25708C.1.pep
MALSVMASSATTVCPLHGLKSTAGMPASRLSGGSSSCNVSTGRRFRCMQPCPTEDIXKWETLCYMSPFSVEERLKHI

SEQ ID NO: 122814 - protein, 43 aa, Oryza sativa
  unsure (1)..(43): unsure at all Xaa locations
  Clone ID: PAT_MRT4530_25709C.1.pep
SVVSLCPRRGQQATLEISXQQMNYVSFIYFEXTXKKKKKKKKK

SEQ ID NO: 122815 - protein, 85 aa, Oryza sativa
  unsure (1)..(85): unsure at all Xaa locations
  Clone ID: PAT_MRT4530_2570C.1.pep
RCCKPKEKTARPNGAPPSRKSRLSRPARRKNXGRCRKRASAGHRAKRRQARGEEVDDDAEEADGATARRTFKRHKSSEAARRRGI

SEQ ID NO: 122816 - protein, 636 aa, Oryza sativa
  Clone ID: PAT_MRT4530_25710C.1.pep
MSSTKLILCFLLLFLTLNLSASSTGGDHERFMYAGFTGANLTMDGSAKIIPTGLLALTKDTFRAQGHALHPAPLRFGQSNGMVTSFSVSFVFGILSSFGDIRGHGFAFFIAPTNNFSSAFPIQFLGLLNDKNNGSLSNHLFAIEFDTIRNNEFGDIDNNHVGIDINSLNSMQSYHAGFYDDKGGTFTNLSLIGGGPIQVWIEYDGYTTLTNVTIAPLGMARPIRPLLSVTRDLSTVFTNQSYLGFSSSTGLSTAHHYVLGWSFGMNSPAPTIDSTKLPKLPEPPNYSGPRTQSILLILPLIGSILLVLIIGIVVLLVRRQLVYKEVREDWEVEYGPRRFAYQDLFRATRGFKNNNLVGIGGFGKVYRGVLPISKLQVAVKRVSYGSKQGIKEFIAEVVSIGNLQHRNIVQLFGYCRRKNELLLVYDYMENESLDKHLYNFHGQPTLNWSQRFKIIKDIASGLLYLHEEWDKVVIHRDVKASNVLIDKEMNARLGDFGLSRLCDHGSNLHTTNVIGTIGYLAPELVHTGKATTLSDVFGFGIFLLEVSCGQKPIRQNSEGKHLILVDWVVENWHKGSLLDTMDRRLQGNYNIDEAYLALKLGLLCSHPFSNARPNMRQVLQYLDGDAQLPELNVSVM

SEQ ID NO: 122817 - protein, 51 aa, Oryza sativa
  Clone ID: PAT_MRT4530_25711C.1.pep
MVCSPKRVPWVFVCQCALSIFFHCHPSMCRCLFRVVKEVNKQSTVRVLVSV

SEQ ID NO: 122818 - protein, 75 aa, Oryza sativa
  Clone ID: PAT_MRT4530_25712C.1.pep
DHRIEERLTTNGHTQSHANTSTCQYEKQKCCYKYIHIHKRKKAYACPFYPLNCSVNTTDAPDLMLALQQHIDAAQ

SEQ ID NO: 122819 - protein, 271 aa, Oryza sativa
  Clone ID: PAT_MRT4530_25713C.1.pep
RSTRCRFSCPQPPSPGLPHASRRDLLVRALWELRRDPDAAALALRWGEEGCATSGERADLTIWSAGKARRFDLAWAVVRRMLRRGVLTSRAMVIVMERYAAANEVNKAIKTFDAMEKFKTEADQTVFYSLLRALCKNKNIEDAEELLLVRKKFFPLTAEGFNIILDGWCNVITDIAEAKRIWREMSNYCITPDGTSYTLMVSCFAKVGNLFDTLRVYDEMKKRGWTPSIACYNSLIYVLTKENCMKDVQNIFTRIIDEGLQPNVKTYNSMI

SEQ ID NO: 122820 - protein, 51 aa, Oryza sativa
  Clone ID: PAT_MRT4530_25714C.1.pep
TNKTNLRLHGKRRTTLVSPHFCMKAMDLTSFDHQKSTLTCRGPSWHRRPMH

SEQ ID NO: 122821 - protein, 528 aa, Oryza sativa
  Clone ID: PAT_MRT4530_25715C.1.pep
MAPPPLAAAALRRHVLRALLPQSRHLCLLAAHSPSPSDDSDFEPPDHPLPRAPDGDGELAAFLHRLSDASTAASSPKHALSLLLSSPPSPGLPPASRRDLLVRALWELRRDPDAAALALRWGEEGCAAAGERAGPPPPPPPPAEAWHLTIWAAGKARRFDLAWAVVRRMLRRGVLTSRAMVIVMERYAAANEVNKAIKTFDAMEKFKTEADQTVFYSLLRALCKNKNIEDAEELLLVRKKFFPLTAEGFNIILDGWCNVITDIAEAKRIWREMSNYCITPDGTSYTLMVSCFAKVGNLFDTLRVYDEMKKRGWTPSIAVYNSLIYVLTKENCMKDVQNIFTRIIDEGLQPNVKTYNSMIVPLCESRKLDEARMVLEDMMLKGIVPTILTYHTFLRQENIDETLKFLKKMKDDGCGPKSDTFLMLIDRFFQLNEPGHALKLWNEMKRYDIRPSYSHYMSVVQGLIKHGCMQRALEYYDEMKENGFASDPKLEKEFRTFLLANRDHWRGAGKYNIIPQRGKHFARRSRIQ

SEQ ID NO: 122822 - protein, 128 aa, Oryza sativa
  unsure (1)..(128): unsure at all Xaa locations
  Clone ID: PAT_MRT4530_25716C.1.pep
HQEQAHVTTTEDEPAATTTVGTCDAVVLGGAPRDVHRRAAAVARAADVIEFVEQKVIAALDDATDHDNKRXILDTDASNHMTGSXTNVTGNXRXGDGXKEXXGPPPTILFACKNGERRMLHNAYVGIS

SEQ ID NO: 122823 - protein, 931 aa, Oryza sativa
  unsure (1)..(931): unsure at all Xaa locations
  Clone ID: PAT_MRT4530_25717C.1.pep
MGSGGNDRGLLIHRVVKEAGGPANNPVLMKTNYNVWSLLMKIKLQARCLWGAIDPGEVELHEDRMTLDAICSVVPAEMISTLATKETAKAAWDCIKTMRVVNDRIRKASAQKLRSEYEALAFRDGESVEDFAMRLNTVVTQLSTLGDPEPDDKVVEKYLCVARPRFSQLVLSIETLLDISTLTLEEVTGRLKAVEDSGQSSSSSSPGAGAKLYLTEEEWLERHKKKQQEAKKRNGGGNGRGKRRGGQGHTSGGGGGVGNADSTGVGPARKTDKCRNCGKLGHCAKDCRSKPKQEQAHVVQDEDEPTLMLMTGSCIDEVEETGAQCATPSPLAPQPRPDVIELVEQKVFTALDDATDHDNKCWILDTGASNHMTGSRAAFSDIDTNVAGNVWLGDSLLVRIGGRGTVLFACKNSEHRMLHNTYYLPRLAANIISVGQLDETGFKVVVEDGVMRVWDERRRLLACIARSPGRLYLLDINLARPVCLMARAGEDAWRWHARFGHINFAALRKMGRESLVRGLPVLSQVERVCEACLAGKHRRAPFAQEALHNATELLALIHGDLCGPITPATPSGNRYFLLLVDDYSRYMWLTLLATKDGAPAAIKRVQAAAERKSGRKLWALRTDRGGEFTVGHFTEYCAELGVQRELTAPYSPQQNGVVERRNQSVVGTARSMLKAKGXPRSSSKSIGGKTPYELWNGVPLAVHHLRVXCVAHVKVTAPNMKKLDDRSRPMIFVGYEPGSKAYRVYDPATRRVHVSRDVVFDKEAQWNWDGEAAANVDSGFTIEYTTVYHLATAAPTQIGTEHGGAPASPRSPASGSTPPTPPLAEEPPVEFVSPPPDVEDDLDADHHAAPLRHPRIDDGLRPPKRPGQAVRELLDDLIAARAQAPASVGVLRRHASSIHSVTRIWRSLEDRNWSRVARPMAVQRRGGRKGP

SEQ ID NO: 122824 - protein, 127 aa, Oryza sativa
  unsure (1)..(127): unsure at all Xaa locations
  Clone ID: PAT_MRT4530_25718C.1.pep
MGSKVCCFLAWLMAGTVXAIYGAQLSESEXRRKDRHCQRXVQDNPQGACPTVLDRDLTVRLRXHPQCRRPSALGPTIQCWQXLLDISXSCRCTLIRLITSHFDESMTLPTKQRSAPLPPEYYCGNES

SEQ ID NO: 122825 - protein, 74 aa, Oryza sativa
  Clone ID: PAT_MRT4530_25719C.1.pep
MASRDGNGGGLGGFMWSYHGGDEGIMVLMCSALLRLEPRRPILVAWLRLIMRLSYIRPGEAVFEVTSRELILLA

SEQ ID NO: 122826 - protein, 124 aa, Oryza sativa
  unsure (1)..(124): unsure at all Xaa locations
  Clone ID: PAT_MRT4530_2571C.1.pep
IKWDPLTPVYRFNPIPSLPVVPRPFPRGLLYIPRRRAASDDLCRLNVRRAVAPSASSASSSTSSPRACLRFARRLFLLGGAPFGRAVFSLGLXTSYSSVSPRFAGSTGDASSPAKQWRLRHCST

SEQ ID NO: 122827 - protein, 311 aa, Oryza sativa
  unsure (1)..(311): unsure at all Xaa locations
  Clone ID: PAT_MRT4530_25720C.1.pep
MEMMVHGRRDEQYGGLRLGLGLGLSLGVAGGAADDEQPPPRRGAAPPPQQQLCGWNGGGLFSSSSSDHRGRSAMMACHDVIEMXFLRGIDVNRAPAAETTTTTARGPSCSEEDEEPGASSPNSTLSSLSGKRGAPSAATAAAAAASDDEDSGGGSRKKLRLSKDQAAVLEDTFKEHNTLNPKQKAALARQLNLKPRQVEVWFQNRRARTKLKQTEVDCELLKRCCETLTDENRRLHRELQELRALKLATAAAAPHHLYGARVPPPTTLTMCPSCERVASAATTTRNNSGAAPARPVPTRPWPPAAAQRSSA

SEQ ID NO: 122828 - protein, 61 aa, Oryza sativa
  Clone ID: PAT_MRT4530_25721C.1.pep
MKGKADVENNMRPKAGGEQRRLAGRSIRRQCRAARAVTAWGGPSDAGADSESMLVSTVTSQ

SEQ ID NO: 122829 - protein, 466 aa, Oryza sativa
  Clone ID: PAT_MRT4530_25722C.1.pep
MDMDMSSAYPHHWLSFSLANNYHHGLLEALSTTSAPPLGEEGPAEGAPKMEDFLGGLGGGGGAVAAAPAAAPEDQLSCGELGSIAAGFLRRYPAPENAGGVTIAMATDAAAELADPARRTAETFGQRTSIYRGVTRHRWTGRYEAHLWDNSCRREGQSRKGRQGGYDKEEKAARAYDLAALKYWGPTTTTNFPVANYETELEEMKSMTRQEFIASLRRKSSGFSRGASIYRGVTRHHQHGRWQARIGRVAGNKDLYLGTFSTQEEAAEAYDIAAIKFRGLNAVTNFDMSRYDVDSILNSDLPVGGGAATRASKFPSDPSLPLPSPAMPPSEKDYWSLLALHYHHHQQQQQQQQFPASAFDTYGCSSGVNVDFTMGTSSHSGSNSNSSSSSAIWGTAAGAAMGRQQNGGSSNKQSNSYSGNNIPYAAAAAMTSGSALYGGSTGSNGTWVASNTSTAPHFYNYLFGME

SEQ ID NO: 122830 - protein, 272 aa, Oryza sativa
  Clone ID: PAT_MRT4530_25723C.1.pep
MKVIVAAAEGGVRRRRRYALLLAARDSDYVRKVYGGYLEVFIRAFGDDGDVGDGGGEEWDMFRAVDGELPGADEVDGYDGFVISGSPHDAYADDLWILRLCLLVRDLVAMRKRLLGICFGHQVICRALGGRVGKARGGWDIGIREVAMAESLPPYRFLDDALQGITAAAAPYAKITEVHQDEVWELPAGAEVLASSSKTGVEMFCAGDRVLGIQGHPEYTADILLNLVDRLSSAGSITMAVAEGVRRQLEDTGPDREFWIKLCKSFLKTEEE

SEQ ID NO: 122831 - protein, 171 aa, Oryza sativa
  Clone ID: PAT_MRT4530_25724C.1.pep
MEDFLGGLGGGGGAVAAAPAAAPEDQLSCGELGSIAAGFLRRYPAPENAGGVTIAMATDAAAELADPARRTAETFGQRTSIYRGVTRDVGYWENASGTGGRGGTRRTCGTIAAAGKAKAAKAAKREYYICVNSLRKNSTTPAAHDPDSRDEVLGVVPEIQEWHGAPPPPDG

SEQ ID NO: 122832 - protein, 78 aa, Oryza sativa
  Clone ID: PAT_MRT4530_25725C.1.pep
MRRSSNAQLADAEDMKGASQLKDTNFLNDEKGYKLSAELESSHRNLIRSIWFWTHQGGPYKAELGALDSTIIVILVEN

SEQ ID NO: 122833 - protein, 527 aa, Oryza sativa
  Clone ID: PAT_MRT4530_25726C.1.pep
MARGGAMVAAADAGAGAGVAPGYSSEITFTVVMSCLMAASGGLIFGYDISITGGLTQMQSFLEAFFPDIWAKMNNAEQDAYCIFDSQVLTTFVSSLYLAGVFACLIAGHVTRRVGRRNSMLIGASLFFVGAILNCAAVNIAMLVIGRILLGFAVGFTNQSAPVYLAEIAPARWRGAFTSIFHFFLNVGMFVADLVNYRANTIPVWGWRLSLGVAVVPAAVILVGAAFIPDTPNSLVLRGKLDEARASLRRIRGAAANIDAELKDIARAAEEDRQHHTGAFRRIVRREYRPHLVMAIAIPVFFELTGMIVVTLFTPLLFYTVGFSSQKAILGSIITDVVSLASIAAAALTVDRYGRRTLFMVGGGVLLVCLTGMAWTYGARLGSDGGKAMPRGYAVAVVALVCLYDAGFGISWGPLKWIIPSEIFPLEVRSAGQSMSEAISLALTFAQTQSFLRMLCSFKFGAFAYNAAWVVVMTAFVALLLPETKGVPIESLGAVWAQHWYWKRFVKPPPPPPSTAAETKQADGAPA

SEQ ID NO: 122834 - protein, 649 aa, Oryza sativa
  Clone ID: PAT_MRT4530_25727C.1.pep
FGGVLNNLTRPFSHCIKIIGVIIITNDILTTDGQVYTCGSNTHGQLGHGDTIDRATPKIVELFEGLAPVVQVAAGASYTFAVTDDGTVYSFGSCTNFCLGHGDQHDELRPRAIQSFKRRNIHVVRVSAGDEHAVALDALGYKLRGYCGALGHGDENDKTSPELISSLKSQVAVQVCARKRKTFVLTDEGSVFAFGWMGFGSLGFPDRGSSDKVMRPRVLDSLRDHYVSQISTGLYHTVAVTNRGIVFGFGDNERAQLGQEYIRGCLKPTEIMFQKSMEEIVIAAPSGQLTVNSRNGYIRDKNENSRGIFKVMGSSKKAKVKSRRAAKSDRLSSLPLEIKADILSRLNVQDAVRTNILSSVWRSTWTTIPEMLLCDCTYTSCQGSVTSAPPKFITLVDMALSLHRGPLHGITILGSKNYHDVFGRWMHKLSMKSPNSVTIKLTSASRYRIPSCFFSISDLEHLDIKNCIISLPQMFKGFEWLTTLDLENFSSTDSDIDNLISCCPELSVLVLKSFEGISCLNIRAPELEILEVDGKYEDFHLDAPNLETANVTLHKAQEYQSVPVVHGGKSYLKQALGSLSDIEKLVINGYFLTYLSKGCIMTKIPAVFDHLEMMLLEICFWDQREILTGRVIVSECSYPQKACMPAGRL

SEQ ID NO: 122835 - protein, 38 aa, Oryza sativa
  Clone ID: PAT_MRT4530_25728C.1.pep
MATVWQCEGIGDDDGVGVGDGCSGLPLTSAPIPDRLMV

SEQ ID NO: 122836 - protein, 866 aa, Oryza sativa
  Clone ID: PAT_MRT4530_25729C.1.pep
MATGEKAPRAFSMEELPGHLIGEVLTSGRLAAGDLARLEATCRALRPLAEHAASRLCAARAAFAAMGPAARGELLERCGGSWKKVLRFLQSVEQSSGTVHTSSGNMQVATGRYHTLLVHDSSVYSCGSSLCGVLGHGPDTTQCAAFSRVPFPSLSRVVNISASHNHAAFVTELGEVFTCGDNSSLCCGHGEVATGLSFTVILTTDGQVYTCGSNTHGQLGHGDTIDRATPKIVELFEGLAPVVQVAAGASYTFAVTDDGTVYSFGSCTNFCLGHGDQHDELRPRAIQSFKRRNIHVVRVSAGDEHAVALDALGYVYTWGRGYCGALGHGDENDKTSPELISSLKSQVAVQVCARKRKTFVLTDEGSVFAFGWMGFGSLGFPDRGSSDKVMRPRVLDSLRDHYVSQISTGLYHTVAVTNRGIVFGFGDNERAQLGQEYIRGCLKPTEIMFQKSMEEIVIAAPSGQLTVNSRNGYIRDKNENSRGIFKVMGSSKKAKVKSRRAAKSDRLSSLPLEIKADILSRLNVQDAVRTNILSSVWRSTWTTIPEMLLCDCTYTSCQGSVTSAPPKFITLVDMALSLHRGPLHGITILGSKNYHDVFGRWMHKLSMKSPNSVTIKLTSASRYRIPSCFFSISDLEHLDIKNCIISLPQMFKGFEWLTTLDLENFSSTDSDIDNLISCCPELSVLVLKSFEGISCLNIRAPELEILEVDGKYEDFHLDAPNLETANVTLHKAQEYQSVPVVHGGKSYLKQALGSLSDIEKLVINGYFLTSFPWDNDFGPMSLWDQDQTSIADLTLQMDHLVTVSVNDFLGLDYEVDFVGKLLSWAPVLEEVKINVDCTRAFSLGSKVLKKLLALPRVSDKAKIIVT

SEQ ID NO: 122837 - protein, 90 aa, Oryza sativa
  Clone ID: PAT_MRT4530_2572C.1.pep
MAPQDLDQQQHKIKNYTSKMNSLSPVPLSLPICVTVGGAMWRVGSNPGRNLLPSGYSSVSVIIMLVWTTRHAENWAAGIAMVTVWFSHQA

SEQ ID NO: 122838 - protein, 267 aa, Oryza sativa
  Clone ID: PAT_MRT4530_25730C.1.pep
MGMARARARRLLPLLTFVTLGMILGSLLQLAFFRRIDDHSNVTHLENDQEAAFLRLGLVKPEVISWSPRIIVFHNFLSSEECDYLRSIARPRLQISTVVDVATGKGVKSNVRTSSGMFVSSEERKLPVIQSIEKRISVYSQIPEENGELIQVLRYEPSQYYRPHHDYFSDTFNIKRGGQRVATMLMYLTDGVEGGETHFPQAGDGECSCGGKMVKGLCVKPNKGDAVLFWSMGLDGETDSNSIHGGCPVLEGEKWSATKWMRQKEFV

SEQ ID NO: 122839 - protein, 120 aa, Oryza sativa
  Clone ID: PAT_MRT4530_25731C.1.pep
ADFRHDEGSGRFEAALGESCTAQFEVGLRYNATVAGVISYGRIASLSGVSAQDLFLWFPVRGIRVDVPSSGVIYFDVGVVFKHFPLAVFEAPPPCTPDPLLLLTQVCEDGSVAGGGAASQ

SEQ ID NO: 122840 - protein, 86 aa, Oryza sativa
  unsure (1)..(86): unsure at all Xaa locations
  Clone ID: PAT_MRT4530_25732C.1.pep
KGFLTEESSAKVMSLRVLKSLXDHYVSQISTGLYPTVQVTNKGIVFGFGDNERAQLGQEYIRGCLKPTEIMFQKSMEEIVIAAPSG

SEQ ID NO: 122841 - protein, 326 aa, Oryza sativa
  Clone ID: PAT_MRT4530_25733C.1.pep
MAFTTMKASPMSASSSSAPVLRRCVAQPARVAAARRLAAAAASVALEASPVPAAAAAAVERRMSVSQTMSKLKEKGKTAFIPYITAGDPDMGTTAEALRLLDACGADVIELGVPFSDPYADGPVIQASASRALAAGATPEAVLSMLKEVTPELSCPVVLLSYLGPILRRGAANFTAAAKEAGVQGLIVPDLPYVDTCTFRSEAIKSNLELVLLTTPATPGERMKIITEASGGFVYLVSVNGVTGPRPKVNTRVEHLLQDIKLVTDKAVCVGFGISTPDHVRQIAGWGADGVIIGSAMVRQLGEAASPKQGLKRLEEYARRMKDALP

SEQ ID NO: 122842 - protein, 1097 aa, Oryza sativa
  Clone ID: PAT_MRT4530_25734C.1.pep
MVAASHGVPLRRSGRHVSHPPRSSKSVSFTDAFRWKSSESSEEAVGLTVLTVRISGWRGWVNAGLVLGVKSWPWHCPAHQRGCEFVIMEILELVSQSYRFNVFVYHKTTGYNRIMGKKNSVNKDALLYFFHMSATSNNAGGVGTISNENSGTDLKNLRVKLVLLGDSGVGKSCIVLRFVRGQFDPTSKVTVGASFLSQTLALEDSTTVKFEIWDTAGQESICVAIRYQRSHENWLIFRYAALAPLYYRGAGAAIVVYDITSSESFNKAQYWVKMYVDHGLHLTSINHELQKHGSPDMIMALVGNKADLHDNRSVSSQDAQEYAERNTMFFIETSAKTADNINQLFEVCIRSISESVGLNRNWSMTVETMINFSCVQFLSCSLRAFISSAKLVLLHLKNSETYGLPLMIDDPSMHLKPHSIVSFLVLLLLFHAAAAGGDGDQFRYDGFAGAALDLDGMAVVEPDGKLMLTNVTSQMKGHAFHPAPLRFHHPPPANGTAAAARSFSTAFVFAIAADYVTVSGNGLAFFVAPSKNMSTASPSQFLGLFNSENNGNASNRVFAVELDTILNPEFRDINSNHVGVDVNGLVSVAAEPAGYYDDATGGAFKNLTLFSGAAMQVWVDYDGRAAVVNVTLAPVEVAKPRRPLISVAVDLSPVVNGTAYVGLSSSTGPFHTRHYVLGWSFAMDGPAPPLDYAKLPKMPVVSAKRRSKALDVVIPVAAPLLALAVVAGVSFLVWRRLRYAELREDWEVEFGPHRFAYKDLFVATAGFDGKRLLGVGGFGRVYRGVLPASGTEVAVKIVSHDAKQGMRQFVAEVVSIGRLRHRNVVPLLGYCRRRGELLLVYDYMPNGSLDRWLHDHGAPPLGWAQRLHAVRGVAAGLLYLHEDWEQVVVHRDVKASNVLLDGEMNARLGDFGLARLYDRGADPQTTRVVGTMGYLAPELAHTRRVTPATDVFAFGSFVLEVACGRRPIERGGAMTAAADEDGQLVLADWVLDRWHKGDIAAAADARLCGDYDAKEAALVLKLGLLCSHPVAAARPTMRQVVHFLDGDAPLPEPEPTYRSFTTLAMMQNADGFDSCAVSYPSTATSIDGASSVLSGGR

SEQ ID NO: 122843 - protein, 93 aa, Oryza sativa
  Clone ID: PAT_MRT4530_25735C.1.pep
PSYSWCVGLHRGGGRSTTGGSPGLHGFGTGGAPSAVRSGGPVALALSASAAAAAAAAARALAAGVAAAVGYAASAASSRWAGGGGGGRNGAAG

SEQ ID NO: 122844 - protein, 54 aa, Oryza sativa
  Clone ID: PAT_MRT4530_25736C.1.pep
MEVEVHVDGLQKFADQPPPRHAQCLNTSNSLEPQQEAKVARELVADGELRECRS

SEQ ID NO: 122845 - protein, 73 aa, Oryza sativa
  Clone ID: PAT_MRT4530_25737C.1.pep
PRSGPLHLEGAGGSLNPMVVYVVVGVCLFRPHDLLPIPSCSRSPPLVAPTPDGGHRAKSRRKSPGATVIGFFR

SEQ ID NO: 122846 - protein, 122 aa, Oryza sativa
  Clone ID: PAT_MRT4530_25738C.1.pep
MGGKTIKLPRTGRPEVSPRPATMVMPKEESPAGCLPPPTSPLLEAQSPSHLATPPAPPPSSARTTAPPTELPRRRRSPPRRPSQAHRRDRLGAASPLASRQIQGRRGASAVGGRERGAPAAQ

SEQ ID NO: 122847 - protein, 154 aa, Oryza sativa
  unsure (1)..(154): unsure at all Xaa locations
  Clone ID: PAT_MRT4530_25739C.1.pep
MTSAVTSPPATARAAHARRRTTVRGRERRAPKRCGRRGELTGDQNGGGRATDGAGDEEEAAAVFGSTVTAVLRRSSAAAKRXRGWRRNGDHDGARRRRRRPTATGGEKERFHRIEKGSTXIGKRRRRSGSARVSSGGRREENDDPDKWVPPVSG

SEQ ID NO: 122848 - protein, 576 aa, Oryza sativa
  Clone ID: PAT_MRT4530_2573C.1.pep
MAAIEEERPLLPLQSQDVGSEYTRDGSVDINKEPALKHSTGNWRACFLILGVEFCENMTYFVISRNLVTFLTTVLHESKVDAARNVSAWVGACFLTPVVGAFLADTYWGRYWTIVVFLPVYITGMLIVTVSASLPMFLTSSEHGNVHRSVVYLGLYLAALGSGAMKPCTSSFGADQFDSTDLEELPKKASFFSWSFYMTTVSTLLSSTVLVWLQDNVGWGVGCAIPTVFMIISFPVFIAGSRVYRFRNLGFSPLKSLCQVIVAAVRKCHLQLPENKSLLYEPSNSSSTTEASHKIQPTNQFRFLDKAAIVLPPSDETCIKPMSSWSLCTVTQVEELKMLLRMFPTWASFVIFFAVNGQMSSTFIEQGMAMDNHVGSFAIPPASLTIIAVLSVLVLVPVYEIISVPLVKHFTGQDKGFSHAQRIGIGLSLSMIMMVYAALLEMKRLAIVQSSGLADHNVAAPMSILWQTPAYFLQGVSEIFSCIGMSQFFYDQAPDSMKSVCAALGQLAIASGAYFNTFVLGAVAVITTSSGAPGWIPDNLNEGHLDYFFWMMATLSLLNLAMFVYSSTRHRENTAS

SEQ ID NO: 122849 - protein, 72 aa, Oryza sativa
  Clone ID: PAT_MRT4530_25740C.1.pep
GERPGKIPSHVCLGERIGNARRSLREASQLVCHDRIPELHCSRDGVVRAYIPYIVITRGLLELLRPQEDGLQ

SEQ ID NO: 122850 - protein, 156 aa, Oryza sativa
  Clone ID: PAT_MRT4530_25741C.1.pep
RFPPPGAPPPPFGGSPPPPSAPPPLGGPAQCPTRGGSRRAPPPSWRYRPRSPPTSPSPCLGGAPPWPPPWGGILPSRFPPGGGGSPPPPRAWSKYFIFNFTNPPRSVEPPGGGRGPPKKGSCFAPGFFFPPKEKQGGMTGRKIPPFPKGGHNKLKN

SEQ ID NO: 122851 - protein, 61 aa, Oryza sativa
  Clone ID: PAT_MRT4530_25742C.1.pep
PTSGGICTIGIPKWRPQGVPMNYANTEEDITLIWLTIQNYFFVQGTFGDRGRLFAVLVVLH

SEQ ID NO: 122852 - protein, 231 aa, Oryza sativa
  Clone ID: PAT_MRT4530_25743C.1.pep
MLIQQSLLLLVLLRFQALNWVQTRLHGTRKQDHTAVSSRRAHTSGDLHRNGDELDDGWAAAMLSIGTLGGPKGRHGSGTPWTTAAAGADELDRLQEELRLLVRAQAVVTGGEDDDGGGGGGRQRRSLSRTSSSTNGREVVAKLKQRSIRKIMAAALGGLLHRPSCRETMPEATVSEIIWSLLHKNTHPEKPALPHTVMKGDPTVPTPQKDKQEGTKWIRTDSEYIVLDLEI

SEQ ID NO: 122853 - protein, 142 aa, Oryza sativa
  Clone ID: PAT_MRT4530_25744C.1.pep
TSSLPPCQKSPNPPLLAAAAALSSSRHAAAPPSSRDARPAPSSSRGTRSAPRRPDGAAAPGRRRLRPAGPGRRRRAVFLTRRPAVAATPSPSATPDRRRRHRLLRIHSFGPSLPELARPCHSSLSFHTMSCSSGPSTTTSQH

SEQ ID NO: 122854 - protein, 213 aa, Oryza sativa
  unsure (1)..(213): unsure at all Xaa locations
  Clone ID: PAT_MRT4530_25745C.1.pep
HAAAPPSSRDARPAPSSSRGXPGRRRLRPAGPGRRRRAVFLTRRPAVAATPSPSATPDRRRRHRLLRIHSFGPSLPELGDCGGYEARRHHHYPDLPLCPLTQVLKLIREMITKNIALDSKIISTIATSLVASNEGKALLQVLPDFSAEISKSDINSPPELLKMLHNTRGLKSQQWQRLQLLYIGGTSSKALSLFIELSHDVMLFWAIDNYITA

SEQ ID NO: 122855 - protein, 162 aa, Oryza sativa
  unsure (1)..(162): unsure at all Xaa locations
  Clone ID: PAT_MRT4530_25746C.1.pep
MSVGESVPEIKKDSSDDGAAVNESKKPKSSGGLTTLSVDDSQAEPADSIAEPVEDGTDDGEDESEKKKKKKKKKSKSKSSDDDDDDAEKKSKKKSKNSDDDEDDKKKSKKKPKNPDDDXRXTXKKSKKKSSGEDNDGXQEKKKKNSQGKSSDEGDDEKPKKK

SEQ ID NO: 122856 - protein, 63 aa, Oryza sativa
  Clone ID: PAT_MRT4530_25747C.1.pep
MEPGFSTKFPNRIPNRMCIKIPVQDRPGYTSDKREHHSTGILDSTDEAYSSEKPSSDAYSNSG

SEQ ID NO: 122857 - protein, 120 aa, Oryza sativa
  Clone ID: PAT_MRT4530_25748C.1.pep
MFLHFPEPAAVRIEALVEHDGWQISPWWARCKAFRIVYFIVGTIARLPSSWTPALARDAGCPGGWPWESVPSDPSRRCSPIDGLHPMFVTAYTVHLDGRTIFMPEAGAAVDEERGGCRPR

SEQ ID NO: 122858 - protein, 170 aa, Oryza sativa
  Clone ID: PAT_MRT4530_25749C.1.pep
MAALPKAGKPLVENDAGSYLAWSGKNQPALAGEKLGCGLLVLKPLGFALPHYADSGKFGYVLGGSAVVGVLPVGLDARERVPRLGSLLVVPRYPVPLVGVHAAGHAAGVPDQKPQAGDEAVHREGIGDRRPDAGDCAGGAQRVAGVGRAAQDDQVSEANSGFDLSGDGVW

SEQ ID NO: 122859 - protein, 342 aa, Oryza sativa
  Clone ID: PAT_MRT4530_2574C.1.pep
MGVQEEAALAAAVVKGKRSKRQRAHAAVVPIAASATAEEEESMESSLSLSGGAAAEGSSTTSPLLTTTAARGDEAVSGCVTEEEEDMALCLMLLASGGHGERAPDAEAVAAKEAKFRSRRPADGAGAGEFVYECKTCSKCFPSFQALGGHRTSHKKPRLVAPPAAMEPAADDKIKPTIPETAAAAAEEKPPKPSPPRPPASRPIATDPTVLAIPVIPKQEVLDATNSAAIASVSKQPRVHECSICGAEFASGQALGGHMRRHRPLIPASASSAVVSVLDAVDAPRQKEKSLLELDLNMPAPCDDATAETTTTSSAATSPAFAFAVSDRSPLLVPAALVGCHY

SEQ ID NO: 122860 - protein, 88 aa, Oryza sativa
  unsure (1)..(88): unsure at all Xaa locations
  Clone ID: PAT_MRT4530_25750C.1.pep
QLLAMVELIGHVNTYAAEEKISVXTLRPAVCSTSNVPDDQYSAGCENCLQEDSREDTLGRLKCKTRFHCNSIKKRMHERNTCPCCRAA

SEQ ID NO: 122861 - protein, 55 aa, Oryza sativa
  Clone ID: PAT_MRT4530_25751C.1.pep
TIDILDINTDTNIHNVNNPLHIRFVHQMGSDCNTFQLDLFLYLTYIEIPSFIFPP

SEQ ID NO: 122862 - protein, 148 aa, Oryza sativa
  Clone ID: PAT_MRT4530_25752C.1.pep
MATATAPRLCFPKPGAAIAPATKSPSFIGYAKQTLNMSGLRISNKFRVSATAVHKVKLIGPDGVEHEFEAPEDTYILEAAETAGVELPFSCRAGSCSTCAGKMSSGEVDQSEGSFLDENQMGEGYVLTCISYPKADCVIHTHKEEELY

SEQ ID NO: 122863 - protein, 203 aa, Oryza sativa
  Clone ID: PAT_MRT4530_25753C.1.pep
MAGEALKEAGATPAAANAGEEKAVIPAASTSPVISKTDDDTEPPADDSKALVVFVEKVADKPHAEKATATATPTRTSNDRDIALAKVETDKRESLIKAWEENEKAKAENRASKKLLDIISWENTKKAVIKTQLKKKEEELERKKAEYAEKAKNKEAIVHKEAEEKRAMVMARRGEEVIKAEEIAAKYRATGVTPKKHIGCFGA

SEQ ID NO: 122864 - protein, 144 aa, Oryza sativa
  unsure (1)..(144): unsure at all Xaa locations
  Clone ID: PAT_MRT4530_25754C.1.pep
HASSKCTSLAAPGVDPAITGVGTAAAIHAAVKDADLQIHDENHDEIKEDFAXHYVYWCLKPALDPANGNANGGALALGHTLAATGAPPVNTLINQMKQRRKDWRFMVIGMCIGSGMGADPVYARDDATDDLTNATHIPTHNHVL

SEQ ID NO: 122865 - protein, 624 aa, Oryza sativa
  Clone ID: PAT_MRT4530_25755C.1.pep
MEPSSSITIASSSSYLSNGSSPCSVSLAPPGAGAVAAQAAPVAAGEGGGGGGGGGGGGSSSVEVVSLNRLSANLERLLLDSDLDCSDADVDVADGGPPVPVHRCILAARSTFFYNLFAARGRGGDGAAGGGGGGGGGGGERTGGRPRYKMEELVPGGRVGRDAFLSLLGYLYTGKLRPAPDDVVSCADPMCPHDSCPPAIRFNVEQMYAAWAFKITELISLFQRRLLNFVDKTLVEDVLPILQVAFHSELTPVLEKCIRRIARSNLDNVSLDKELPPEVAVQIKEIRQKSQPNEGDTVISDPVHEKRVRRIHRALDSDDVELVKLLLNESEITLDDANALHYAAAYCDSKVVSELLDLRLANLNLKNSRGYTALHLAAMRREPAIIMCLLNKGAAVSQLTADGQSAMSICRRLTRMKDYNTKMEQGQESNKDRLCIDILDREMIRKPMAVEDSVTSPLLADDLHMKLLYLENRVAFARLFFPAEAKVAMQIAQADTTPEFGIVPAASTSGKLKEVDLNETPVTQNKRLRSRVDALMKTVELGRRYFPNCSQVLDKFLEDDLPDSPDALDLQNGTSDEQNVKRMRFCELKEDVRKAFSKDRADNSMFSILSSSSSSSPPPKVAKK

SEQ ID NO: 122866 - protein, 48 aa, Oryza sativa
  Clone ID: PAT_MRT4530_25756C.1.pep
IILGSPFYSPNPSRARYPPSSADVPSLVWTLRLRSPHRRCISRLLIIT

SEQ ID NO: 122867 - protein, 48 aa, Oryza sativa
  Clone ID: PAT_MRT4530_25757C.1.pep
GERELVSSFFFFFFFFFFFFFFFFFFFGSPRTLFSKLHNSTYNNFRVH

SEQ ID NO: 122868 - protein, 318 aa, Oryza sativa
  Clone ID: PAT_MRT4530_25758C.1.pep
MGSLELLVTRPRMHRLLRCSAADGDGERGASSNNGAAVMEVRRQWRGAGDGGRASLAGGHGRRKSGRRRGCKGRQRRSIGRWKSNRGSERSSAGWRGGELALGVHGARCHAVETGRQSGKGRKEKGEEGKGALPMPFWEKGGGRERLCLRDLDARGLERPSMGGCGAQARRGRRGGDRWLMAYLNRVVQDDDGGFRSKKLRLASQLDRNITYHSAIAAYIADLWWSGAAERGRGEHSRKRGALVSVADGLPGADANRCVGGRRSLKARTEVKKKKEKGWMGIHHKETTSPTHFPKRAFAVLETGRVEVVTPRTSPDRN

SEQ ID NO: 122869 - protein, 110 aa, Oryza sativa
  Clone ID: PAT_MRT4530_25759C.1.pep
FFLFFWTLGRSIGSADGAGAGARGPTREPGPGTRHGACLQPGRGGNTGENRKRDTTAPRGQPPHQNKKAGHPKGGSKPTRLGGEQRPPPQLGNRGPPRPKKSGKPAGQEE

SEQ ID NO: 122870 - protein, 70 aa, Oryza sativa
  Clone ID: PAT_MRT4530_2575C.1.pep
METELDTSLSASGMTLLTAWVSYRANLASSRPLTPGIFSDRLLERPMTNGGENFGAFWSTRTWVGDLLRL

SEQ ID NO: 122871 - protein, 98 aa, Oryza sativa
  Clone ID: PAT_MRT4530_25760C.1.pep
MVMYMERTFIVTYRKVSVQELGVKLWRDGVVCSGDVMPRLVEAVRRERAAAAEPGELMAGVAEMLTKLRDKVLSQVMDASSVDDYSSASLEKSVSEYQ

SEQ ID NO: 122872 - protein, 175 aa, Oryza sativa
  unsure (1)..(175): unsure at all Xaa locations
  Clone ID: PAT_MRT4530_25761C.1.pep
MALAVFLSSFKYQQEASSLAWLHHRWTSRRFIDMELQHRRIFLDYTSLFFGNCVLLRQFSLYAVLVPRPSRRPTLLVSSDIGLFGTIFLXTTAAIVSLSSSPARPRAHWSTTXLPCVHDHSTTPHACSAALLPRHQLPDFGYIDHSYSTHDFIDHGSLAPFALATSTMAQRAIPC

SEQ ID NO: 122873 - protein, 630 aa, Oryza sativa
  Clone ID: PAT_MRT4530_25762C.1.pep
MDGSIPPKPPSCRQPQRETHNNSENTGATGNDQAQDEGFLLHVVAANGDGENYRKCATLLSGMDKTRLFARNSENKTALECAANAGYTNMVFHLLDMERKHNFCGLNTKPNEILKKTSGRSETPLHEAVRQRCERKIEELKGKDSGLARVPDINGMSPLYLAIPLGYRDIVDKLTLTFGDANLSYDGPNGQNVLHAAALQSAGRRGDLMNKADWSGSTPLHFAASVGVQGVTTALLDGIDQDRRTDYTQRPDNNGMFPIHIAASVGSMDTITSLVNADQDCATLRDNVKGRTLLHIAIENRKYKVVKLVCKDPRFKETLNLEDNDGNTALHLAVKKRDEYIFTYLLQNKAVELNHVNLEGYTPLDLAKVIRMEDYFASPQNPTEWMVRVLAHSGAVFSPRRRDELIRGGSSQEQEKHGKTLSESTESVLVASALIATLTFAAAFTMPGSYRTTGPKEGTPALGALYGFKVFLVADILAFFCSVAATFSLAEYGNRGTVDPLVRCRYSQRAVWLFHVALRSIIVAFAFGVSVVMWNISLSAISIGGVATIAVVFYGNVPLGQDFRLMLLMHRRFGFSRSWNLYPSTASHLNWTSWQLKSFSATLVWNLMNLFWTYVLIFALAGFAQLKQKH

SEQ ID NO: 122874 - protein, 115 aa, Oryza sativa
  Clone ID: PAT_MRT4530_25763C.1.pep
QPPTHHNIPLSSRKTLSMGTPHHPTLWMFIDSVMQRRGSPSPPPAAAADAGACAAEGAHRRRRRPPDARGRDPDPGRGLPGCPVRRSPSSRRRGRGDPARQLGMTRTAPSSGRST

SEQ ID NO: 122875 - protein, 255 aa, Oryza sativa
  Clone ID: PAT_MRT4530_25764C.1.pep
MEPEEAEAVLETIWDLHDKVSDAIHALSRAHFLRAVRRHSKPAEGLVRVKGGDGVDDEAAALDAVAEEARSLHAIRAALEDLEDQFECFLAVQSQQQAERDISLARLEQSRIMLAIRLNGHRGVNKKIIDEALDFVRNVCHGVWPSLSINKPAKLGSHSGADSKNANFLGQMVASSVALARNSFSIKTLGGLLGHTGVLAIGMITLLQLHWLSSGQQSPSTCRYSYKMISQESSSQFETAMDTRISDLDVFLARG

SEQ ID NO: 122876 - protein, 50 aa, Oryza sativa
  Clone ID: PAT_MRT4530_25765C.1.pep
AKNASPGSDQNNAGSVATQWDTFDNGMGGFYAPPPRVSSSQINADWDHFR

SEQ ID NO: 122877 - protein, 86 aa, Oryza sativa
  Clone ID: PAT_MRT4530_25766C.1.pep
MSNIGAFGGSNMGSPAHSAGSGKQRLRWTSDLHNRFVDALAQLGGPDRATPKGVLTVMGVPGITIYNVKSHVQKYRPAKYIPQSSG

SEQ ID NO: 122878 - protein, 106 aa, Oryza sativa
  Clone ID: PAT_MRT4530_25767C.1.pep
MWVTSMPQVWDEEGVAKGSVVTPAPATALLGSLAGWMSRAVEPPAPRPCGTEGGPPVTATRLRLRDGRHLAYCESGVPKEEARFKVVFSHGFTGSREDSVRASQLS

SEQ ID NO: 122879 - protein, 257 aa, Oryza sativa
  Clone ID: PAT_MRT4530_25768C.1.pep
MMYHAKKFSVPFGPQSTQSNDHMSNIGAFGGSNMGSPANPAGSGKQRLRWTSDLHNRFVDAIAQLGGPDRATPKGVLTVMGVPGITIYHVKSHLQKYRLAKYIPESPAEGSKDEKKDSSDSLSNTDSAPGMQINEALKMQMEVQKRLHEQLEVQRQLQLRIEAQGKYLQMIIEEQQKLGGSLKACEEQKLPHSPPSLDDYPDSMQPSPKKPKMDNLSPDSVRDVTQSDFESHLIGPWDQEAAFRVDEFKADPGLNKS

SEQ ID NO: 122880 - protein, 38 aa, Oryza sativa
  Clone ID: PAT_MRT4530_25769C.1.pep
PRRGKKYGAIIQYTSHKYSVECQKRQNSTGIIIRGREG

SEQ ID NO: 122881 - protein, 160 aa, Oryza sativa
  Clone ID: PAT_MRT4530_2576C.1.pep
MAERAVAHSLSPNASGDDGEQNPRRRARTPPSPSRRNLGRGEALGEVGGSATSPPAGDGGGRRDGARRRLVYGDGGTPQGALLRHPPVVPDPETPTRRWLDDVADLVMTAQQRLGAVGRSSATEASGAAAAGSISSRRRARRAAAVTRRSSAIPSSTPPT

SEQ ID NO: 122882 - protein, 836 aa, Oryza sativa
  Clone ID: PAT_MRT4530_25770C.1.pep
MNDETFGSSEFSNEDRAEEERKRRASFEMMRKEQHKALQEKKNGPEIEKENSGHDIISLLQTPSERTATTAKSEKPDGSAISSAYQEDTTKTSSVLSASTARPLVPPGFSNAFVEKKLQPQSSNISLEPKVIDATSEGNILATAQFGGLVEGNQSASEITASKNKEKGIPDNIASVGKQHTLPSGGVTYSAEFASSILKGSGDWEGDAMDKYSIENEGKSKNIGSVRKDHSISILEQFFGSALSKGGTDLPPYVENQQMKNDDDVIVSSLPESSKFAHWFHDEDSKPAEDLSSNGLLSMIVKNEKPGQESIAHGPPLSDGAVQNLLPISPTHKLDVASTHPLFTPAAPAVGMLEQHNHADIDPAPIMMTCEDLEQAMLAQVATSSNSNQKNVVQEHQLVVDEPIATQKVAVDNHASQHLLSLLTKSTDNKGSSSFGLHIGSSDRSHNSDVTSNGGVSGIAPVNKAETAPTSEKNLTLEALFGAAFMNELQSKDAPVSIRGSATSGPNYEFAETGKTSIASSHEGYYPGEQVLPFGTIKDGVAPKESGTGNRNLALSGPSQGSASLDKKSLEIQLPEEDNLFTVNDSLDGQKPDIFPSVRSSRVEGLLPEKAVDDLNYRLQSLVPGDSEHVQVLGPDALGSHSHERRYQAESQNLYHLLQGRPPALAPRPMMDHIGNRNQQTPFDMTQAIQHDPHRSFSSNMNPMQQSLHAPRAPHVDPAAHHLMMQHISTPGNFPPEGLQRGVPPSQPVHHMPGYRPEMSNVNNFHMHPRQPNYGEFGLMMAGPSGPELRGNHPDAFERFLQMELTARSKQMHPAMAGHVPGGMYGPELDMNLRYR

SEQ ID NO: 122883 - protein, 333 aa, Oryza sativa
  Clone ID: PAT_MRT4530_25771C.1.pep
MEAGRGLGVAGRRPAGWRPAGVMCGITDLAAHGSPLGAQLFLYKVASREDGNPRKSYVNFVSMVETLQATVDEIVHRTLFDQSGVLTDILQNSIKRIVDELIVQRRQLGWQIEEQQQYRLGGKTYQYQHDEAYQQYRPEGIQRHQVPFPHRYKVLDLSKFSRQDDISTMEHVSRFLAQCEEASAEETLKVRFFRLSLTRSAFTWFSSLPSNSIKGWADLEKQFHTYFFARIDEMKLSDLISVQQQEGESVMEYIHRFRNVRNRCYSLSLSDEQLADLAFQGLSTPIRERFFCHEFDSLAYLMQTVSAHESRLEEAKEDQFWRYQDRTEDNFEA

SEQ ID NO: 122884 - protein, 1034 aa, Oryza sativa
  unsure (1)..(1034): unsure at all Xaa locations
  Clone ID: PAT_MRT4530_25772C.1.pep
QQRLHRRPASVAADWCLRLHGWPIMPPLLGVYDFTAGLPPSPPTGVFACMVGWSHHRCWASTSSPPACLRRRRLVPPSTRLAYYAAAVGRLRLHRRPASAAADWXSSPIWLVGHTTVVGRLRLHRXRPASVATDWCLRLYGWLVTPPLLGVYVFTAGLPPSPPIGASVYTAGLLCRRCWASTTSPPACLRRRRLVSSPIWLVGHTTXLGRLRLHRRPASVAADWCLRLHGWPIMPPLLGVYDFTAGLPPSPPSGASAYTAGLLCRRCWASTTSPPACLRRRRLVSSPIWLVGHTTVVGRLRLHRRPASVAADWCLRLHGWPIMPPLLGVYDFTAGLPPLPPTGVLAYTAGLLCRRCWASTTSPPACLRRRRLVPPPTRLAYYAAAVGRLRLHRRPASVAAEWCFCLHGWPIMPPLLGVYDFTAGLPPSPPSGASXAYTAGLLCRRCWASTTSPPACLRRRRLVSSPIRLVGHTTVHGRPRLRRPXAFAAADWCFCLHGXPIMPPLLGVYDFTAGLPPSPPSGASAYTAGLLCRRCWMSTSSPLAHLRCRRLVFPLTRLTYYAAISGHLRFHRRPPSSPPTGVFIVIDGRLCSHIGHFCHHQGEYYKAKIQIQICIKGIHGFKLISYAPGMDQSEHHXRLASSAADWCFRLHGWPXMPLLLGIYVFTDRXASSATDWCFRLHGWPLXPPLLGVYVFTDRXPSPPPTGVSACTAGLYAAVVGRLRLHRPACXAAADWCFRLHGWPLCRRCWASTSSPTGRLVRRRLVFSPARLAFMPLLLGIYVFTDRPPRPPPTGASACTAGLYAAVXWASTSSPTGXLRRRRLVFPPARLAFMPPLLGVYVFTDRLAFAAADWCFRLHGWPLXPPLLGVYVFTDRPPRPPPTGASACTAGLXYATVXWASASSPTGXPHPPPTGVTAYTAGLXYAAVVGHLHLHRRSSRLLXLVPLPLRLVIQLPLLMDIIVFRRRLVMPPPTGAFIFTTARLHHRISTWTSSTHIFNQAMTIRRQEATVLDSMFSCFPTNQRVGGYTNTRLKI

SEQ ID NO: 122885 - protein, 99 aa, Oryza sativa
  Clone ID: PAT_MRT4530_25773C.1.pep
VYIIRTAQPQSNQYMQTQKHQEELISDQKYKCSLKLISVLLFEIDSIALVDEVLGAAPTWRANCRNMISAIIKRGSARDLEVDGCGDKGFRQVQALSMR

SEQ ID NO: 122886 - protein, 1419 aa, Oryza sativa
  unsure (1)..(1419): unsure at all Xaa locations
  Clone ID: PAT_MRT4530_25774C.1.pep
GVRRVSYQRARWNHHSAGLSSPPPLLIATTTSXRPASVAAEWCLRLHGWPIMPPLLGVYDFTAGLPPSPPXVPPPTRLAYYAAAVGRLRLHHRPASVAADWCPRLYGWLVTPPFMGVHVFTTGLPPSPPIGVSAYTAGLLCRRCWASTTSPPACLRRRRVVPPPTRLAYYAAAVGRLRLHRRPASVAAEWILRLHGWPIMPPLLGVYDFTAGLPPSPPSGASAYTAGLLCRCCWASTSSPPACLRRRRLVPPSTRLAYYAAAVGRLRLHRRLASVAAEWXPPPTRLAYYAAAVGRLRLHRRPASVAADWCLRLHGWPIMPPLLGVYVFTXGLPSPPPTGVSACTAGXLCRRCWASTSSPXPACLRRRRVVPPPTRLAYYAAAVGHLRLHRRPASVAAEWCLRLHGWPIMPPLLGVYDFTAGLPPSPPSGASACTAGLLCRRCWASTTSPPACFRRRRVVPPPTRLAYYAAAVGRLRLHRRRASVAAEWCLRLHGWPIMPPLLGVYDFTAGLPPSPPIGASVYTAGLLCRRCWASTTSPPACLRRRRLVSSPTRLAYYAAAVGRLRLHRRPASVAADWCLRLHGWPIMPPLLGVYDFTAGLPPSPPTGASAYTAGLLCRRCWASTTSPPACLRRRRLVPPPTRLAYYAAAVGRLRLHRRPASVAADWCLRLHGWPIMPPLLGVYDFTAGLPPSPPSGASAYTAGLLCRRCWMSTSSPLAHLRCRRLVFPLTRLTYYAAISGHLRFHRRPPSSPPTGVFIVIDGRLCSHIGHFRHHQGEYYKAKIQIQICIKGIHGFKLISYAPGMDQSEHHHRLASTAADWCFRLHGWPXMPPLLGLYVFTDRLAFAAADWCFRLHGWPLXPPLLGVYVFTDRXPSPPPTGVSACTAGLYAAVVGRLRLHRPAASSAADWCFRLHGWPLCRRCWASTSSPTGXLRRRRLVSSPARLAYYXPPLLGVYIFTDRPPRPPPTGISACTAGLLCHRCWASTSSPTGRLVRRRLVFPPARLAFMPPLLGVYVFTDRLAFAAADWCFRLHGWPLXPPLLGVYVFTDRXPSPPPTGVLACTAGLXYDRRCWASTSSPTGLPSPPPTGVSACTAGLXYATVVGRLRLHRPACLRRRRLVFPPARLAFMPPLLGIYVFTDRXPSPPPTGVSACTAGXLCRRCWASTSSPTGXLRRRRLVFPPARLAXYAAVVGRLRLHRPACXAAADWCFRLHGWPLCRRCWASTSSPIGRLDRRRLMFPPARLAYYAAVVGRLRLHRPAAASAAXLVSPPARLACYNAPLRLVYTATTTDGHHHLPSPTXMPPSTGVFIFTTARLHYQFTSSRQCNFVIMVERLHLYYLRHWQTLLLLLRKFCYITNHDVVVNLDISACDAVLFYYNKWLSNIQDFYLDIFNTYLQSSNDYSTTRSYNSRLYVQLFPN

SEQ ID NO: 122887 - protein, 57 aa, Oryza sativa
  Clone ID: PAT_MRT4530_25775C.1.pep
FHKAYCHNRNHHAPVHHSYNGLLMPHKHSHLCCCKMGSREIFLGRQVIYQGVFMGSN

SEQ ID NO: 122888 - protein, 630 aa, Oryza sativa
  Clone ID: PAT_MRT4530_25776C.1.pep
MAPAVLVPIDEGSDGEGGSATDVAAPSPAPMDIDGDDDGRDRRGEGDGGGVDRLSDLSNDTLAKILGHLRDIRNVATTAVLSRRWLDLWTHVDIIVLQYDEPPDSRIVQEVLAAHARKGSTATHIRLLEVTSLNSATAGATASWLRVAEPRLTGELLFRNASSVPFELLNDEMVVVEQLVEELGVVVDEMGAGFELPCFMRVTKITLSLGFLGLSLPPSGVFAKLRELHLVYVRFNGELTLDDAMLPSLEWLDIGKSRGLASLTLRLAPLTLMALHDMRWLRRLNAVLPGLKELSVSECFLEHLDGVSIVADEMEQLRWPGFYWPGLVYFSRMPRLRTLCVSVSDFAHGSREAFNQGSQMLLNRYPSIHHLELRVVIKTGVTPLMVGITGLPYTKILTLHLVTEGHSYGASVLHILTMCTRIAKLTLMIPKYFEVEDACAEICICDWLPNWRNENILLECLEEVTILYYRGEDDELDLLKLLVRGATGLRRIRIARYCSVADWEIEMLRADLRAYAEELTLVFTGNPAGMLCVYIAFLICYGVLQLHMPPLSWQRARLAAPRVTRDDGFRLRYAAGKSVALTSFFCLGFGTFRGNGFGFGGYCRAGARAAVRVIDREMSIHSTRVPRCTA

SEQ ID NO: 122889 - protein, 174 aa, Oryza sativa
  Clone ID: PAT_MRT4530_25777C.1.pep
FNAEDPFYLSSGTSPPPLMGIFIITAGLPSPSPTGTSAYTAGLLCRRCWASTTSPPACLRRRRVVPPPTRLAYYAAAVGRLRLHRRPASVAAEWCLRLHGWPIMPPLLGVYDFTAGLPPSPPSGASAYTAGLLCRRCWASTTSPPACLRRRRLVPPPTRLAYYAAAVGRLRLHR

SEQ ID NO: 122890 - protein, 396 aa, Oryza sativa
  Clone ID: PAT_MRT4530_25778C.1.pep
MGGNGESWMLYTFVLNGEFTDVFAMDEDLPPLWHQIQDLNMEIQDLQQGRWSRLYLLAWVLQGSLNPRRTLVWRQLENQNEKGLVLKPPFQLKNLRRSPQFLGHGYRTALNIGTPKKKSKAQPISASLKIAVEGIVKESFGKEIPPPLSVEHIQTVAVQRCDDKWRSIHDTISSINCDIVCLQETKRELFDHSYLRKFCPRRLDKFVYQPSVGASGGLIVIWNSSSYQGNVVFTMPYGIRVDFISQSSPDDSWKLINIYGPCQGELRTEFVNWLHDLDIGDDENWIVMGDFNFIRSTENRNLPGGDMNDILIFNEAISSAGLVELPLKGRAFTWSNMQNHPLLQQPDLVFISPSWILKYPHTELTALPKSISDHAPCVVSIATSTPKSPLFRFENF

SEQ ID NO: 122891 - protein, 794 aa, Oryza sativa
  unsure (1)..(794): unsure at all Xaa locations
  Clone ID: PAT_MRT4530_25779C.1.pep
RTRGLRILRLAHNTMSDTIPSALGNLTKLEILNLYGNHISGHIPAELQNLHSLRQMVLTSNYLSGPVPEYLFNATHLGXTEIHLGLNSLSGSIPDCVGSLPMLRVLALPDNQLSGPVPPAIFNMSSLEAILIWKNNLTGPIPTNRSFNLPMLQDIELDTNKFTGLIPSGLASCQNLETISLSENLFSGVVPPWLAKMSRLTLLFLDGNELVGTIPSLLGNLPMLSELDLSDSNLSGHIPVELGTLTKLTYLDLSFNQLNGAFPAFVGNFSELTFLGLGYNQLTGPGLDLTSNGISGPITEEIEIVRATESFNEDNMLGAGSFGKVYKGHLDDGMVVAVKVLNMQVEQAMRSFDVECQVLRMVQHRNLIRILNICSNTDFRALLLQYMPNGSLETYLHKQGHPPLGFLKRLDIMLDVSMAMEHLHYHHSEVVLHCDLKPSNVLFDEEITAHVADFGIAKLLLGDDNSAVSASMPGTIGYMAPEYAFMGKASRKSDVFSYGIMLLEVFTGKRPTDAMFVGDMSLRKWVSEAFPARLADIVDGLSQQFHRQRKEMILFKLDISKAFDTVSWCFLLDMLKFRGFGPLWRSWLAALFLTAETRILINGSESDPIKPARGLRQGDPLSPLLFVLVMDTLQAMMAKARARNLLSELNARKRLPNISVYADDAVLFFRPIQQEAQLPKWAIKDIERKCRGFLWKGQEDALRLKWHAIKLEQKNRPWTMVDYQLGKEVDTLFQSAAEFIVGQNMFSEVLQDKLRQRLYADLLADLEGKKCACFRPKIEKPYPTCPPPPAGPSH

SEQ ID NO: 122892 - protein, 204 aa, Oryza sativa
  Clone ID: PAT_MRT4530_2577C.1.pep
METGIFIQVRTPELSVDNRVVFLLEFVPDEIRDSAFISPDSIRRHRRGLAVLIPEVDIRSWRNCYRALMTILDEFRDNVRLPLSASCGHLKGLSESISDSWYEDRCVIAVVVPRPSEVAVREIATYCFEDQRTCRIISRTPMEVAVREIATYRFENQRASRIISRTPMEVAVREIATYWFENQRASRIISRTPMRVAVQEIATY

SEQ ID NO: 122893 - protein, 136 aa, Oryza sativa
  Clone ID: PAT_MRT4530_25780C.1.pep
LRLHRPAAASAADWCHRLHGWPVITPTDAIFFTAGYIAVTLNRLIFPLHCSTKLVRANRYKINAHDAPPPADARDAPPPADAADLPPHAATPPLAAAPPPAADDAGGQPPPAAARGLPPPASRASTHRCRRGSALL

SEQ ID NO: 122894 - protein, 120 aa, Oryza sativa
  Clone ID: PAT_MRT4530_25781C.1.pep
SGITASTTRPPLPRSPRAPARPLRASGPLPLYPREFLACDAAGGARAGGGRRRRRGKSGARAAAAAVAGLRQRFFFFFGYLFGLVRKIFLRATRPLRNSFFPGETLVTRKQIARGFITGA

SEQ ID NO: 122895 - protein, 193 aa, Oryza sativa
  unsure (1)..(193): unsure at all Xaa locations
  Clone ID: PAT_MRT4530_25782C.1.pep
MKMKKIVDDDKRNRHDEDDDVDDPVNSSVATNDNDKDAHQRLHSRSTVKXGREEDSISWCHNRPAVQAETPVGGXDEGKPVGEDIDAQQRRHNRPTVQAETPVGGGRGGRPRLTTQWKANWCSEAEEKEKYHIKNKINDDLALSYSLGDSRSSRCGNEAVHLNSDENTCRRRQKQAGGIDDEAHQRRRSPPTV

SEQ ID NO: 122896 - protein, 50 aa, Oryza sativa
  Clone ID: PAT_MRT4530_25783C.1.pep
MGGAYVWPPWEEAGADGGGREEEWREMEMVGGKVTGGDNESVSSADFFGL

SEQ ID NO: 122897 - protein, 80 aa, Oryza sativa
  Clone ID: PAT_MRT4530_25784C.1.pep
AVLAWSVRPSFRFLLLVFCWSPPVVLPLRLSVLGAPFLLARAVLAPWPSVSSLVPSPFPAVGFPSPLLGPLFCGAFGCVR

SEQ ID NO: 122898 - protein, 1232 aa, Oryza sativa
  Clone ID: PAT_MRT4530_25785C.1.pep
MTRVWAIYVADDFVKFLFNSDWNTTDNLQSRIQNGLDYHLAYYATVVGRLRLHPGPASVAADWCPRLYGWLVTPPFMGVHVFTDRPDFATADCCPRLSGWLVTPPFMGVHVFTDRLDSAAAYWIQIQICIKGIHGFELISYAPGMDQSEHHHRLAVVAADWCLRLYGWLVTTPLSGVYIFTAGLLSPPPTGVTAYTAGLLCRCCWASTSSPTGRLVRRRLVFPPARWPIMPPLMGVYVFTDRLAFAAADWCLRLHGWPIMPSLLGVYDSTIGLPPSPPTGVSACTLAYYATVDGRLRLHRPACLRRRRLVSPSARLAYYAVVVGRLRLHHRPASIAADWCFRLHGWPIMPPLLGVYVFTDRPPRPSPTATTTDGHHHLLSPTDYAAADWCFYLHNCASSLPVILLLLAGTRRRKVLVPKIILWIAYQLADSTAIYALGNLSFGSVAIEEHRLAAFWAPFLLLHLGGPDNITAYALEDNKLWLRHALNLIFQVIGACYVVYKHIIVRREATILRVATGLISAVGVVKYCERTWALYRSNFSSIGSSLEELQGNQLHWYQGYLHNEDHNNTNNEFLLQRAHSLFHICKRGIVDSVINEDTENAEAETTKEIINNLSEEPQRMYKVMEMELSLMYDILYTKAAVVHTWIGYCIRALSPFAIATSFLLFYFCGSEVKDGQNGVDTAVTYVLLGGALLMETTSLLSALGSSWTLSFLCARRWSWLQHVALCVGRWYQLRRAVLAVRKRVAALTGGLLGGSRNWSGTIGQFNLLYFRATQVNPTNKQFGRLIKKLGYGDEWDTGCYLWDITIPELVKQKALRMVSKYDLNTMGLLRHNWGELALKKHTEPSKKNKNCTELLEELEKLWGDDFHGSIIICHIATDLILAEIEKNKAGEDDAAQLQCVGSIRALSNYLMFLLVAHPDMLRGLPQKWLYQRTCENVDQNCKEHREELISSGGKANNVIFMVLMKLFGGHSNSSTSIGLRQTNALAKILYKSLPSQFDPAIPRLTYARLVAKEIINWKDEDGQLKKPDAILKVLLNLWTDFLLYAANRCNRESHAKKLNTGDPFLLQLRQKSGGAQARRRRGREGFSGEGGGKRRARAPRWRRGAVTDPAPPMEAGREQLNPRAGGRRRAEDTRVAGDGGGDVSGGEAEVGEEDDDGVWPRRRFERRLSMVWRKRSSLSLSISEVEPQQQRRLVRLSVELSMPDMRKVGGDEDGNRDGMREEMKKWFGVAWF

SEQ ID NO: 122899 - protein, 124 aa, Oryza sativa
  Clone ID: PAT_MRT4530_25786C.1.pep
SGGGTADRCIRFWNTVNGNMLNSVDTGSQACNLAWCKNVNELVSTHGYSQNQIMVWKYPSMSKVATLTGHTLRVLYLAMSPDGQTIVTGAGDETLRFWNIFPSMKTQAPVRDIGLWSFSRSHIR

SEQ ID NO: 122900 - protein, 74 aa, Oryza sativa
  Clone ID: PAT_MRT4530_25787C.1.pep
MGVTMWERWRARERSAKSGKRWRRVSHLKCGRKRGSVAAVTGECGPRTGGGRCARETQERREVAVASADSAGRR

SEQ ID NO: 122901 - protein, 235 aa, Oryza sativa
  unsure (1)..(235): unsure at all Xaa locations
  Clone ID: PAT_MRT4530_25788C.1.pep
PRVRPRVRKNKRRQNQEVPKQLPVSDNKKAKQELISKAREEVDAELRSVSFTLDPKERRRIQKEALSALFETYFRILKHSMSISNSRGKVINVSPDGSHPLLAPCLEGLGKFSHLIDLDFMGELVACLKKLSGYTDHHSGTVHDNTLSVSERLQCCIVAFKVWRSNLEALNVDLQDFFVQLFNLILEYRPDRDRGEVLADALKTLLXEGKQQDMIRAAAFIKRLATFALSFGSAE

SEQ ID NO: 122902 - protein, 43 aa, Oryza sativa
  Clone ID: PAT_MRT4530_25789C.1.pep
MESSRSSLSNGSSLIPEFRIRLIYTGKINNTRRGVSIAKAQHV

SEQ ID NO: 122903 - protein, 155 aa, Oryza sativa
  unsure (1)..(155): unsure at all Xaa locations
  Clone ID: PAT_MRT4530_2578C.1.pep
KHVPKYIQQHKTTVQWIVTERGAPHRETAQAPLCRPRPPFYLIRGHHMGLXLPKKGNMLFTMRASLQPEMTSDKQSARLLPRSPAXFPVDAHFNLHLMASDFLAMLALKSGMNLTGTDIPTSGVSTPAPARDESQEALVIPTGRGEACDRPPVAT

SEQ ID NO: 122904 - protein, 899 aa, Oryza sativa
  Clone ID: PAT_MRT4530_25790C.1.pep
MVNCKMCKLKLKLQMENYTQKCRAARPRQGPAAMGKSSSKKKKDKVILPPQLPPEVDDDDVVVSDEDVEFFRGNEGHARALATLDRKSIDSYVTRVAHHDEDEVERLYEERERRRKAVEALRPKNHDDDDFEVDRVDALPVKTLQGELVYNNAKKARFDDSSNNVESKSEDKVGNSKQTIQKGERKEKSKSKKGDEESKNVQAQTEASNGKLQSKVLEEVKEELSAEELFEKKKAQLAEIGMSMLEDPESHIRSLNDMLNICNDKDQKVVKLSLMSLLAVFRDIIPSYRIRQLTEKELTVEVSKDVKKMRYYEYTLLRSYKAYLQKLISLEKQPNFSALAVRCMCTLLDTAPHFNFRESILASVARNLSSPDDAVRKMCCETIRSLFVDEGKHRGEATVEAVRLIADHVKLNDCQLHPDSIEVFLSLRFDDDLGKDDTEEEKGKPKKNKRRQNQEVPKQLPVSDNKKAKQELISKAREEVDAELRSVSFTLDPKERRRIQKEALSALFETYFRILKHSMSISNSRGKVINVSPDGSHPLLAPCLEGLGKFSHLIDLDFMGELVACLKKLSGYTDHHSGTVHDNTLSVSERLQCCIVAFKVWRSNLEALNVDLQDFFVQLFNLILEYRPDSVSPLKCLLLLINNYSLRFTIDRGEVLADALKTLLWEGKQQDMIRAAAFIKRLATFALSFGSAEAMAALITLKHLLQKNSKCRNMLENDSGGGSLSCLVAKYDPEAKDPYLSGALASVLWELSLLQKHYDSSVSSMASNILSMANLNPTQNPVPISNASPLEAYRDLSMERKLSKPANKLLPLNCRKKRRGKEFVALSPAALEGSDCVAGGDELKEKLKNHFAVLRGISENERLRAELNHTLSSINLYKEYKKQKKSRKSKAVKKKVSRA

SEQ ID NO: 122905 - protein, 93 aa, Oryza sativa
  unsure (1)..(93): unsure at all Xaa locations
  Clone ID: PAT_MRT4530_25791C.1.pep
LEEGEAGKRHRQRRHQASTSASSPAPXPXPXTPPPXPPPXSAAGPIRLRHRPHPPPPPPLSXAPIHRCPSVSSSRPPLPPPLPQCVVRVWLHG

SEQ ID NO: 122906 - protein, 385 aa, Oryza sativa
  Clone ID: PAT_MRT4530_25792C.1.pep
MGMEEEGVARGGGGKKLALASIGFADVRVGAVAGGGGAGAGGGYKEDLLVVGLPKDDDFDVAKVVGDVAVGLPDVGAAVRNFLRNREVGEFVSGALAGAMTKAVLAPLETIRTRMVVGVGSKHIFGSFVEIVEQNGWQGLWAGNTINMLRIIPTQALELGTFECVKRSMTEAQEKWKEDGCPNIQIGNLKIELPLHLLSPIAVGGAAAGIVSTLVCHPLEVLKDRLTVNREAYPSIGLAFNKIYQTDGIGGLYAGLCPTLVGMLPYSTCYYFMYETIKTSYCRAHKKKSLSRPELLIIGALSGLTASTISFPLEVARKRLMVGTLQGKCPPHMIAALAEVFQEEGIKGLYRGWAASSLKVMPTSGITWMFYEAWKDILLAPELHT

SEQ ID NO: 122907 - protein, 172 aa, Oryza sativa
  unsure (1)..(172): unsure at all Xaa locations
  Clone ID: PAT_MRT4530_25793C.1.pep
RVRTGTLTLTSAASTATSLNGSLTAYDKDHVLLXVARTASTTENQHAIDAAMAGLLADPTEALAFFGXVHSLPFNPSDKRTALTYIDADGNCHRASKGAPDHILTLSICQEDVKRKEHAATDKYAERGLRSLAVARQEDPDKSKEAASXPCLHRGLLPLCDPPMHDSAQTIR

SEQ ID NO: 122908 - protein, 133 aa, Oryza sativa
  Clone ID: PAT_MRT4530_25794C.1.pep
MRRGNNAMLSRCVHKLELGSTKLASFVRGSGSARLMLEPSLNPAYDKSSSSSSWLGRRQTGSGRQHGKSLGLAASGGPVLVVTGKVRRVGREEVTCVWILLEEEQQKEFAGGSSPAIEAMTRAINEPSSSELI

SEQ ID NO: 122909 - protein, 81 aa, Oryza sativa
  Clone ID: PAT_MRT4530_25795C.1.pep
MVDCGTTHRAWSSSDPQAGRGNAVRERVPTLFGGGGTGKVQDSMNHRPVDPASRAPCQGYGDGGGRKHQGYGLSGSGNDLG

SEQ ID NO: 122910 - protein, 145 aa, Oryza sativa
  Clone ID: PAT_MRT4530_25796C.1.pep
YSTFPRNNRCFVAYEFSICIPPCRARQPNLTARLVDALDTDILWTLRFLTFHRNNRCFMAYEFSICIPQCRARQPNLTARLVDALDTDIVLAIHPNLWTFRYSTFRRNNRCFVAYDIRRFAETTAASWPMNSPSAFQSVAPASLT

SEQ ID NO: 122911 - protein, 103 aa, Oryza sativa
  Clone ID: PAT_MRT4530_25797C.1.pep
YLTFCRNNRCFVAYEFSICIPQCRARQPNITARLLDALDTTSYSTFRRNNRCMVAYEFSICIPKCRARQPNLTARLVDALDTDILRTLRYSTFRRNNRGFVAY

SEQ ID NO: 122912 - protein, 275 aa, Oryza sativa
  Clone ID: PAT_MRT4530_25798C.1.pep
STRLTPTSCGPSDIRRFAETTAASWPMLWTLRYSTFRRINRCFLAYVVDPQIFDVSPNKQLLPGLCCGPSDIQCFVVPTAASWPMIFDVSPNKSLLPGLCCGPSDIRRFAETTAASWPMCRARQPTLTARLVDALDTDIVYAIHPNVLCAIPILTTSLKTSCGPSDIRRFAETTAASWPMCRARQATLTTRLVDALDTDIVYAIHPNVLCAIPILTTSLKTSCGPSDIRRFAETTAASWPMCRARQPTLTARCGPSDIRCFAEPTATSWPMVSRF

SEQ ID NO: 122913 - protein, 111 aa, Oryza sativa
  unsure (1)..(111): unsure at all Xaa locations
  Clone ID: PAT_MRT4530_25799C.1.pep
RRALLLRRLLLWRRRPRDDEREGRTGGTLVQKRSPDGDPRPXPVHTIRVKVKFNGVYHEIYINSQASFGELKKHLPAPTGLHPEDHKNVHKDKERDSKAFLDMAGVKDRSK

SEQ ID NO: 122914 - protein, 62 aa, Oryza sativa
  Clone ID: PAT_MRT4530_2579C.1.pep
MALGERVRKIKRGAGKCFKVTGDSQVVRSEVQPQQQQMDNEGDRDELRKKPFDSWDHRFIDN

SEQ ID NO: 122915 - protein, 199 aa, Oryza sativa
  Clone ID: PAT_MRT4530_257C.1.pep
MRIEGREEEKKKSRKSMILSSRMVVVADGRRYAPCMLVVQKRGRILYGWWNGQNVSIAIAVAGDGELPKFRVSEPKWSTVHEIFLSTGEKREDKRTRPIGHRTQKTVSFAICRIGNLYVLHLPEVKARTGFIHSFMHALMHSDQNAKAEKRNWYMRIKISSSWYGKRLDRKCTICTLKFAFEAPTVVSPCTLLETAAMQ

SEQ ID NO: 122916 - protein, 1822 aa, Oryza sativa
  Clone ID: PAT_MRT4530_25800C.1.pep
MDISRTNEGYTSCGPVAEMSWHRAGVLLLEAQSCLPVPGVLAVGGVGSVLLSMARMGWKLCHVFRPYTVVLWTLRYSTFRRINSCFLAYVVDPQIFDVSPKQPLLRGLCCGPSDIRHFAKTTAASWPMIFDVSPNKPLLPGLCCGPSDIRRFAETTAASWPMLWTLRYSTFRRNYRCFVAYVVDPQIFDVSPKQPLLRGLCCGPSDIRRFAETTSASWPMCRARQPTLTARLVDALDTDIVLAIHLNVLCAIPILTTSLKTSCGPSDIRRFAETTAASWPMLWTLRYSTFRRNYRCFVAYVTTSLKTSCGPSDIRRFAETTAASWPMLWTLRYSTFRRINSCFLAYVVDPQIFDVSPKQPLLRGLCCGPSDIRCFAETTAASWPMLWTLRYSTFRRNNRCFVAYVVDLQIFDVSPKQPLLRGQCCGPSDIRRFAEATAASWPMCRARQLNLTARLVDALDTDIVDPIHPNVLCAIPILTTSLRTSCGPSDIRRFAETTAASWPMIFDVSPKQPLLRGQCCGPSDIRCFAETTAASWPMLWTLRYSTFRRNNRCFVAYVVDLQIFDVSPKQPLLRGQCCGPSDIRRFAEATAASWPMCRARQLNLTARLVDALDTDIVDPIHPNVLCAIPILTTSLRTSCGPSDIRRFAETTAASWPMIFDVSPKQPLLRGQCCGPSDIRRFAEATAASWPMCRARQLNLTARLVDALDTDIVDPIHPNVLCAIPILTTSLRTSCGPSDIRRFAETTAASWPMLWTFRYSTFRRNNRCFVANVVDPQIFDVSPKQPLLRGLCCGPSDIRRFAETTAASWPMLWTFRYSTFRRNNRCFVANVVEPQIFDVSPNKQLLPGLCCGPSDIRRFAETTAALWPMCRARQLNLTARLVDALDTDIVDPIHPNVLCAIPILTTSLRTSCGPSDIRRFAETTAASWPMLWTFRYSTFRRNNRCFVANDIRRFAETTAASWPMSHARQPTLTARLVDALDNDIVYAIHPNVLCAISILTTSLKTRCGPSDGEFSICIPQCRARQLNLTARLVDALDTDIVDPIHPNVLCAIPILTTSLRTSCGPSDIRRFAETTAASWPMIFDVSPKQPLLRGQCCGPSDIRRFAETTAASWPMLWTLRYSTFRPNNRCFVAYVVDRQIFNVSSYRPLLRGLCCGPSDIRRFVETTAASWPMSHARQPTLTARLVDALDNDIVYAIHPNVLCAISILTTSLKTRCGPSDGEFSICIPQCRARQLNLTARLVDALDTDIVDPIHPNVLCAIPILTTSLRTSCGPSDIRRFAETTAASWPMLWTFRYSTFRRNNRCFVANVVDPQIFDVSPKQPLLRGLCCGPSDIQCFVVPTAASWPMIFDVSPNKSLLPGLCCGPSDIRRFVETTAASWPMIFDVSPNKSLLPGLCCGPSDIRRFAETTAASWPMSWTLRYSTFRRINNCFLAYVVDRQIFNVSSYRPLLRGLCCGPSDIRRFVETTAASWPMIFDVSPNKSLLPGLCCGPSDIRRFAETTAASWPMIFDVSPKQPLLRGLCCGPSDIRRFVETTAASWPMIFDVSPNKSLLPGLCCGPSDIRRFAETTAASWPMIFDVSPNKRLLPGLRYSTFRRINRCFLAYVVDPQIFDVSPNKQLLPGLCCGPSDIQRFAEPTAAAWPMLWTLRYSTFHRNNRCFVAYVVDPQIFDVSPKQPLLRGLCCGPSDIRRFVETTAASWPMIFDVSPNKSLLPGLCCGPSDIRRFAETTAASWPMIFDVSPKQPLLRGLCCGPSDIRRFVETTAASWPMCRARQPTLTARLVDALDTDIVYAIHPNVLCAISILTTSLKTRCGPSDIRRFAE

SEQ ID NO: 122917 - protein, 133 aa, Oryza sativa
  unsure (1)..(133): unsure at all Xaa locations
  Clone ID: PAT_MRT4530_25801C.1.pep
MGTEKTHINIGGIVHAHSGKYTTTDHVIYKLGGIDKRVIXRLTKDADQMNKTSFTYAWEQDKLKAXRDIGMTIDIALWKLATTKYYCTAIDAPGNRDFVMIMITGTXQADXDVLNIDYTTGGNEAGMSNEGQT

SEQ ID NO: 122918 - protein, 261 aa, Oryza sativa
  Clone ID: PAT_MRT4530_25802C.1.pep
MAVGKNKRISKGRKGSKKKTVDPFSKKDWYDIKAPTVFSVRNIGKTLVSRTQGTKIASEGLKHRVFEVSLADLQNDEDQAYRKVRLRAEDVQGRNVLTNFWGMSFTTDKLRSLVKKWQTLIEAHVDVKTTDNYMLRLFCIGFTKRRPNQVKRTCYAQASQIRQIRRKMVEIMANQASTCDLKELVSKFIPEVIGKEIEKSTSSIFPLQNVFIRKVKILKAPKFDLGKLMEVHGDYKEDVGMKLDRPAETDEAVAGEVAAAE

SEQ ID NO: 122919 - protein, 124 aa, Oryza sativa
  Clone ID: PAT_MRT4530_25803C.1.pep
LCLFCRPLAKYTLELCVSTPPPVAAAAMKECVLDEYATKHRISINRFLQLKIFVKVHDRGCLHVKSGSQFPVLESNSVHGNEISLSCESEVHPWYLRYIMFQPLKESCLHSGDSNFLDLEWLST

SEQ ID NO: 122920 - protein, 174 aa, Oryza sativa
  Clone ID: PAT_MRT4530_25804C.1.pep
HVDVKTTDNYMLRLFCIGFTKRRPNQVKRTCYAQASQIRQVKVLSYFFACSVLGKFLFFEMRYVLVVYFIFVHCLKIRRKMVEIMANQASTCDLKELVSKFIPEVIGKEIEKSTSSIFPLQNVFIRKVKILKAPKFDLGKLMEVHGDYKEDVGMKLDRPAETDEAVAGEVAAAE

SEQ ID NO: 122921 - protein, 49 aa, Oryza sativa
  Clone ID: PAT_MRT4530_25805C.1.pep
YKKFIFTLGTYLQRDLTHKKNTKIISLLSFHQPLNPNTINHDLFNASPF

SEQ ID NO: 122922 - protein, 49 aa, Oryza sativa
  Clone ID: PAT_MRT4530_25806C.1.pep
SRAAGSVFVANFLNTFLRLLASIVFVFWMEVYLSKVCAFFFLHPDKSRL

SEQ ID NO: 122923 - protein, 167 aa, Oryza sativa
  Clone ID: PAT_MRT4530_25807C.1.pep
MMASRVSSLLRAAAAAVSVPGRSRSLSAAAATAAKKPAGDYVPVYVAMGMIAVSVSLGLATARQQLAHAPNVRLDKKKRETVPEVAAPDMALDEAERFVGGSLFRKVAHVQDDASLRAGVAADPVAEYPARKAVTLKDAGVEPPGIEQGREGILEVLGKKTKPAAAA

SEQ ID NO: 122924 - protein, 81 aa, Oryza sativa
  Clone ID: PAT_MRT4530_25808C.1.pep
KKPDFYKLRDQTTKLQYIKTLRSPPRTIYFFRQKDHPTKLPIKTVLIETLIRQATMALLYLWGQEFIFLYAKPHFLPSSIT

SEQ ID NO: 122925 - protein, 81 aa, Oryza sativa
  Clone ID: PAT_MRT4530_25809C.1.pep
MGILSGFARGPQLDLALALALSPDLRAKLVAYLRRAVRRRRCQPSGGPASAPATTGRSIFWPWCTPWRERFSSITGGGGFL

SEQ ID NO: 122926 - protein, 108 aa, Oryza sativa
  Clone ID: PAT_MRT4530_2580C.1.pep
MGHTYLHSAGSRCNVGARLSADDVTGVRPVTNRSFLSTTCQFSMPHVCPSSYNYFLVMVAMKPGMNLAGTDIPTPGASTPAPARDECLEALIISTGRGEACDRPPVAT

SEQ ID NO: 122927 - protein, 242 aa, Oryza sativa
  Clone ID: PAT_MRT4530_25810C.1.pep
MAGVVQTVQCDQPSKQQLTEAAEAAAAAAAAASLRIFGYEVGGGGGGGGVAAAAGARREAADVVVGAGRRFECQYCCREFANSQALGGHQNAHKKERQQLKRARLQLAVAAAGTPAGMGFAAAQAPAPPPGHVIAVGHHAGSVASYALPRWVYLAAHHLQPPAVGLPFHATVQAAAGACHGGGDVETRLLSVAAAGRGSSTAGSSAHSYEVCAPAAPADDSDEEASAMGLDLHLSLAPASSA

SEQ ID NO: 122928 - protein, 74 aa, Oryza sativa
  Clone ID: PAT_MRT4530_25811C.1.pep
QRHRREGEGAAGKRDPPGSVTRGGGKRRGARSVRLGFKPADRLWRGRCRARTVAGDGNRRRGNRRRMTAAQRRR

SEQ ID NO: 122929 - protein, 166 aa, Oryza sativa
  unsure (1)..(166): unsure at all Xaa locations
  Clone ID: PAT_MRT4530_25812C.1.pep
VGIGHESTPRAAASLAKKAAVVALAVLAAALATAARAEQCGAQAGGARCPNCLCCIRWGWCGTTFAFCGDCFQXSSASAVSPTPTPLSSHFPLLSCLFFLSYVPRFTATSPSHSLLFLLFALLLILFLPTSPFSYSSPLFLLLFFLFLTCPSLYFFSPFSILSLFL

SEQ ID NO: 122930 - protein, 152 aa, Oryza sativa
  Clone ID: PAT_MRT4530_25813C.1.pep
LEDMLRACTLDFGGAWDKSLPYAEFSYNNSYQASQLELPSNMLGIHNVFHVSQLKKCLRVPPAVGAGAPTAAAAETATPPPFPAFSAPRRASTPRPHLALTSPALPRFSRPHARPRVGRVQFESPSLSSSPLPHVAGQIGHLPGPVRPLPHL

SEQ ID NO: 122931 - protein, 219 aa, Oryza sativa
  Clone ID: PAT_MRT4530_25814C.1.pep
CLRLRRSSATSSACRRTRCSRCSHASRSTTSPPAARSPPAGAASPTSPPSRRSTAAAPTPSPATSSRPSRATATTPPSSPPCTPRRRRPTSCPSTSSPPRTSASRPSRRTGGSSAASTPTPTPPRRASRRRPTTSASRRLGSGARCLTRGCATARPPPRCWRAPAAAAVARRTSRSSASPSPRSGTASAARCSTRGGWRGGGRRTSRCGRSRSWRPPRR

SEQ ID NO: 122932 - protein, 125 aa, Oryza sativa
  unsure (1)..(125): unsure at all Xaa locations
  Clone ID: PAT_MRT4530_25815C.1.pep
TRGDLYIAPYDCAVQRAGYLLCTGSVAQLILGQSTSQXQTSRRGSSXECRFDRLQAFEPIWSVRSNAGTTEFFDDYNEQINDRRSAVRRVIEPRGLLLRHYTNGASVVYIIQGRGITGPTLPGCA

SEQ ID NO: 122933 - protein, 39 aa, Oryza sativa
  Clone ID: PAT_MRT4530_25816C.1.pep
GSTDAPGCAVPAHGRHTRPRHGPILLGPCRAGPKWAERL

SEQ ID NO: 122934 - protein, 84 aa, Oryza sativa
  Clone ID: PAT_MRT4530_25817C.1.pep
AIGVPEPLSVFVSTYGSGQISLQEFFQIVAEHFAFRPGVVPFVLVLKRGGLGFLETAAFGPFGRDAPVFPWEVVVPLVFGKPRV

SEQ ID NO: 122935 - protein, 500 aa, Oryza sativa
  Clone ID: PAT_MRT4530_25818C.1.pep
MVLTHVEAVEEGSEAAAAVFASRYVQDPVPRYELGERSISKDAAYQIVHDELLLDSSPRLNLASFVTTWMEPECDRLILEAINKNYADMDEYPVTTELQNRCVNIIARLFNAPVGDGEKAVGVGTVGSSEAIMLAGLAFKRRWQNRRKAAGKPHDKPNIVTGANVQVCWEKFARYFEVELKEVKLTEGCYVMDPVKAVDMVDENTICVAAILGSTLTGEFEDVRRLNDLLAAKNKRTGWDTPIHVDAASGGFIAPFIYPELEWDFRLPLVKSINVSGHKYGLVYAGVGWVIWRNKEDLPEELIFHINYLGADQPTFTLNFSKGSSQIIAQYYQFLRLGFEGYKSVMKNCMESARTLREGLEKTGRFTIISKEEGVPLVAFTFKDGAGAQAFRLSSGLRRYGWIVPAYTMPAALEHMTVVRVVVREDFGRPLAERFLSHVRMALDEMDLAARAPVPRVQLTIELGPARTAGEEASIRVVKSEAVPVRKSVPLVAGKTKGVC

SEQ ID NO: 122936 - protein, 38 aa, Oryza sativa
  unsure (1)..(38): unsure at all Xaa locations
  Clone ID: PAT_MRT4530_25819C.1.pep
FFFFFFFFFFFFFFFFFFFFFFXKXKSKGLININGSKV

SEQ ID NO: 122937 - protein, 408 aa, Oryza sativa
  unsure (1)..(408): unsure at all Xaa locations
  Clone ID: PAT_MRT4530_2581C.1.pep
MGSKDGFSNNKLLDDFGPGSSNPARIGIIVINNSISRDRPSFETLGRPHPRRPRQLETSRQKEQLSTRVGCGRVHRIIENDLDKCRVVTPNLPTKTDDLSHSTGHGWTTREKYVAISRTANFHWCSRDNSTRSLVLEPXVAISHTANFHWCSRDNSTRSLVLEPWSRYDYSNIAVVLAPXLXIIEEQLLLVFDRQHSGPHTMTSDGXRNSYDWSSTGSVVVLVPRLQMVEXHLLTGSLLVWSSYDYYLVLDQRCSDSPIISTPTKLVSGTQYYXVFYPEIPYHXRHVALKPILLSLYAVLTRPPRNLRELRLXTPRADKALSDPVETKDHENSIRHYGRLHTLRLLDRSRTIAGSRQGIQNEEMEERGHDQHGHHDQDPPQSTTTTIYGTTEANTSLHTPRQDAGYRL

SEQ ID NO: 122938 - protein, 472 aa, Oryza sativa
  Clone ID: PAT_MRT4530_25820C.1.pep
MVLTHVEAVEEGSEAAAAVFASRYVQDPVPRYELGERSISKDAAYQIVHDELLLDSSPRLNLASFVTTWMEPECDRLILEAINKNYADMDEYPVTTELQASNQTNQTIYPRLLHILSLHCVVNRCVNIIARLFNAPVGDGEKAVGVGTVGSSEAIMLAGLAFKRRWQNRRKAAGKPHDKPNIVTGANVQVCWEKFARYFEVELKEVKLTEGCYVMDPVKAVDMVDENTICVAAILGSTLTGEFEDVRRLNDLLAAKNKRTGWDTPIHVDAASGGFIAPFIYPELEWDFRLPLVKSINVSGHKYGLVYAGVGWGYKSVMKNCMESARTLREGLEKTGRFTIISKEEGVPLVAFTFKDGAGAQAFRLSSGLRRYGWIVPAYTMPAALEHMTVLRVVVREDFGRPLAERFLSHVRMALDEMDLAARAPVPRVQLTIELGPARTAGEEASIRVVKSEAVPVRKSVPLVAGKTKGVC

SEQ ID NO: 122939 - protein, 82 aa, Oryza sativa
  Clone ID: PAT_MRT4530_25821C.1.pep
IRVFCNNNVLKHDVHASHKFFMYIHISGSAHVYLNPYGFQNFIRSAESWLMSLACSSPHYNMLWQTLIRLHTMINFRHACTT

SEQ ID NO: 122940 - protein, 93 aa, Oryza sativa
  unsure (1)..(93): unsure at all Xaa locations
  Clone ID: PAT_MRT4530_25822C.1.pep
PPGGPFDPLGLANNPDQGGLLKVKKIKNGRRAMFSHLGFFIQAXVPGKGPVENPPKPPKDPFGNNLLPVISGAPKRTPTLLTSSPRRPWLAPS

SEQ ID NO: 122941 - protein, 132 aa, Oryza sativa
  Clone ID: PAT_MRT4530_25823C.1.pep
MFREEQMSSVVGIPCEKVTKVRILEGQLRSTVGIGTRLREELRSRRLRIPGDEVGYEMVHDGWTSCGRDLRSGLHEVCVQASVFAEENCGVGSGLWQAESAQENRRTCRCCDGEESPTCLWPVWLQSMELIV

SEQ ID NO: 122942 - protein, 89 aa, Oryza sativa
  Clone ID: PAT_MRT4530_25824C.1.pep
MTTTQGTEADQIIQESYAYADGAYPLRDAAAATRWRPRGCVAFACARPPGKPRIRGGAVVKQARATVPAMVAVRWLGSCRPAVLHARGL

SEQ ID NO: 122943 - protein, 55 aa, Oryza sativa
  Clone ID: PAT_MRT4530_25825C.1.pep
NYVETKKETSNCAVCSYTSNIINFQMKVLTYTSLVREIPPSDGTMGALCMEPSCR

SEQ ID NO: 122944 - protein, 459 aa, Oryza sativa
  Clone ID: PAT_MRT4530_25826C.1.pep
MAGAGKGKGEVEGMEQKLEKLMSAFHDHQEGNKAVRHQKELEELFSFLREHEAAFSQLPGDKKDDLDALLRNIEGVLELCKNQEEKKKKTTNKMGDCIPFKSSSRPPADHTSSTSVVAPLLMQARDILGDSSSSAPAAAGPNKKEVLYEWTTSYVDEKRLYGWDDEATEVADALAGPEEDDDELFRAAGIFGIHGSGKTALAQKVFVHDRIKDTFLLRLWVCVGPTPPDDDKQQQYEVKFSLLYRMLDNLGLDTYKVEEVVNGSEAVKKHSGDSDAAKESKIGVLLFILHVALAKTSYLIVLDDIRAYDPWYTNLALPPPPHGEWSDRLAYGLPKLNKSAVLVTCRKEEHARAMVRTGRVFHPPLLAVADAWKLFEREYLQEAEKKQVGYNVKDDVLYNDLKVVQEEMVGKCLGLPVAILEAAKGFAQYCTYVDDDDAKTTQPTTAKGADAGDPAHAAA

SEQ ID NO: 122945 - protein, 92 aa, Oryza sativa
  Clone ID: PAT_MRT4530_25827C.1.pep
SETYMIITHAKRGQTFLGWEYVQGGALLALLKPQGALGKGRGGKRGACPGQNLLHFLSPKKGVVLFKHFSTPKGKGGKNLGGLYRGGVYKFQ

SEQ ID NO: 122946 - protein, 905 aa, Oryza sativa
  Clone ID: PAT_MRT4530_25828C.1.pep
MAEPRFPPPETLKIALLCLLLPLFSPATASIPSAASTSSDRSCIADERAALLAIKATFFDPNSRLASWQGEDCCSWWGVRCSNRTGHVIKLRLRGNTDDCLSFYGDKLRGEMSYSLVSLQKLRYLDLSCNNFNWSQIPVFLGSLPSLRYLNLSYGFFYGSVPPQLGNLSKLAYLDLTSYSYNQLYSVALSWLSHLSSLKHLVMNHVNLTTAVDWVDEINMLPALKVLYLKQCGLRKTVPFLRRSNITGLEVLDISGNRFHTKIAPNWFWNITSLSALDIRSCGFFGSIPDEIGRMASLEEVYFQGNNLMSTMIPSSFKNLCNLKVLDLRSTNTTGDIRELIEKLPNCHWNKLQQLGLSYNNIGGTLPNWSEPLANLTVLLLSNTNISGAMPSSIWALTKLNILDLCSNKLNGTVREDQLGNLTNLVYLGLGNTHLQIKASSDWIPPFKLQVVLFYSLQLGSEVPPWLRSQTSIQHLQIANTSITTIPDWFWIVFSRADFLDVAYNQITGTLPATLEFMAAKTMDLSNNRFTGMVPKFPINVTYMYLQRNSLSGPLPSDFGAPLLQSLTLYGNLISGTIPSSLFSLEHLEILDLSGNKLSGEVPTYQEDSNPRTRQLIVVNLNSNNLSGEFPLIFRSCPRLVFLDLSYNQFSGNLPLWMGKKFLPILSLLRLRSNMFSGHIPTELTRIDQLQFLDLAENYFSGSIPDSLVNLSAMARTSGYSVLLDEVIATGQGAILNFSWNLINGEIPETIGQLKQLESLDLSHNELSGEIPSSMQDLNALGTMNLSYNNLSGRIPRGNTMGSYDASSYIGNIGLCGPPLTRNCSGNATSKDLPRNHVDLEHISLYLGMAIGFVLSLWVVLCLLLFKTSWRKSYFMFVDRQQKKIYVSVKIRSAVLKRKLGANNH

SEQ ID NO: 122947 - protein, 27 aa, Oryza sativa
  Clone ID: PAT_MRT4530_25829C.1.pep
PIQQQVVQPAQQTPSRQQPLQPIQQTP

SEQ ID NO: 122948 - protein, 148 aa, Oryza sativa
  Clone ID: PAT_MRT4530_2582C.1.pep
ILPAPAAPYSGGHSPPPFLVPAAGHADGSSAGHTPHSYAGHASHSYAGHAGGSSPGHAPHSPPGHAGGSSPGHAPHSSPGHAGGSSPGHAGGSSAGHAQPSYASPPSPRTSAAHGHPPSPSDRSQPSCASPPSGAAHRHSHSYPSQKY

SEQ ID NO: 122949 - protein, 475 aa, Oryza sativa
  Clone ID: PAT_MRT4530_25830C.1.pep
MAGLRKGIREHRLLHRLQDMTTSPRDAYEVHDYNFVRVESKLPFYDGKHDSVAYIDWELAVDNEFDNYDFSDAQMIKATSNKFTSSTLFWWTYVSNKPETWDEYKNMMRKHFVSSYYKSTTREKFEHLNQGDRTVREYIHEFKVCVICSDLKECNENTMRKFFKGLNFYIQIVLANVTYNHIGHLFMLARSIESEIISNVRKHEQCDLSHVFESPISLCNDDMQTLEEQCLVPPITNILQEVQNIKQKEENDEFVKKEEKHEAPVKSEESLQGKFNEAEIIEGEHTQEPPVDVDKTYKLERPIIANHIISSLSCFDWKKHVLNGPCDEHHMEKPRTVFREEGEDDVTMATMDTTVAHIMDEQDASKIKSSKCWNPIRPFATLLTSNGRQIFIRHPFLKHEYLMEISRSPLSNRSSLIAKFLHSHAQLMKQCAASPVIGLWACNFVWDPGPSGAHVGNKVDLHRQDQQPTERCIDS

SEQ ID NO: 122950 - protein, 504 aa, Oryza sativa
  Clone ID: PAT_MRT4530_25831C.1.pep
MPPQQGECCRHGWLGVGEAAVGGGGEDRSTCRAKRLSVDGKASTAPRICIWECDGEAGDITCDIVAAPLRRSCSAKAMPPPAPLFRMMTPPPPRPQRGDGEEARRPGEAIRKGHRSYSLMLNLQLGISYSVGKSSALPFQKLAASDFDPREKVWTRFPPEGSKFTPPHHSVDFRWKDYCPAVFRHLRKLFGVDPAEYMLAICGNDTLRELASPGKSGSCFFITQDDRFMIKTVKKSEVKVLIRMLRSYYEHVRQYKSTLLTRFYGTHCIKQAGCPKIHRRFDLKGSSHGRTIDKTERKIDETTTLKDLDLQYAFRLQRFWYEELMKQIQMDCTFLETQGIMDYSLLLGVHFRNDYSVSKIGISQHIAFPKSTGKRKSFEGGSSFCELCFVESGCKDRDLIDSRKPFIQLGINMPAQAERSSKKILDNFLLNERHLFITPPSGGSCDVYLFFGIIDILQDYDITKKLEHAYKSFQVNPDYISAVDPKLYSRRFQDFIRRVFIKEQ

SEQ ID NO: 122951 - protein, 150 aa, Oryza sativa
  Clone ID: PAT_MRT4530_25832C.1.pep
MGSNTEVEKKKAPTALAPIAKPLAGKKLCKRTLKLVRRASEAKCLKRGVKEVVKSIRRGNKGLCVIAGNISPIDVITHVPILCEEANIPYIYVPSKEDLATAGTTKRPTCCVLVMTKPAKGEINEEVKEKLKSDYDHVVAEVAEVTSSMF

SEQ ID NO: 122952 - protein, 98 aa, Oryza sativa
  Clone ID: PAT_MRT4530_25833C.1.pep
MTGLTLVASATGSHDPTLRPSPPGVEWRQLPQQMVTMTVDGNCSPTRRRNGWRRCNDFSRRWARAEMGTTTASSAQIQRDGAAEGRRHVPAASDKEGG

SEQ ID NO: 122953 - protein, 250 aa, Oryza sativa
  Clone ID: PAT_MRT4530_25834C.1.pep
MPLDIDPVAYARRGVVAVRRALARLATRPRLWPPRATARTLAGINAIITAAPRRTSARTTSYPPFVAVCGRPRGYGNHRLPRAGGGLALREHASRMCDATENARRSCGRLRRERLVTGGRASARTTQAASATGGTASVAAPTVAAASASPSLGVALLTSPLRWPPRLHTAADSLTSLGPHLPTTTMSSVAGSDRHRVFGEPSPTKHTGGYALTCGRTKVRRGYQEYPLTVADGYIRHKDQPQQLTLLEQF

SEQ ID NO: 122954 - protein, 744 aa, Oryza sativa
  Clone ID: PAT_MRT4530_25835C.1.pep
MRRFFPFRSFTSNAGNGKASAGHDKKNENKLDGGTSCASHSPDTRAFRSRSRHGKPSSEESSTPQLRRCMSLTSSAIDRSLNERTMNFSGDIPCSFSNSSDVPRHIGDAEPSKLTNLSSKNEVLDLYIDGEQESNSLNEKHKLKLPVRSSSSYLGRGRPPRPHSTAPSSPKSCKEIVESYSYSNIDMIDACQLAQEETKGIWKVASVCAEPGDDAQMLEASSEKFSHIEECKSQSIATLEDIYDRLEDAQPPCFCDTSMDYISGTTSRCFDADVCCRDDSHGFHGNNLEQDTDEKLLRRAKELDECFMVPLEENNELNMLRDNSLSSTDMLQLIQTLIEDRRQLALQLSSQIKARLTERFAAKEQHKRSKVELNTRTRRLEKEKSDVQSTLEMELDRRSNDWSVKLAEFQSEEQRLRERVRELAEQNVSFQREVTLLESNRIDVSNKITSLELQNKQLNDELQKVKKEHDTLLKSSVELNDNLTKTAEERNQILECLKEKGGDNKALHKVIARLQRISNEQEKTITGLRQGFNAELENKSLGTSESISRMQMELIRLTGVEQKLRREIQSCNREVESLREENIAVLNRLQSSDNKLSISSVRLEQELNTRVDNLQLQGLSLLDDTSQLCAKLLDSMKSKRSESFGSVDALASIEYTLSYQSIQERIKNLKQCLRAIRSMLTEKHNEEEKIGERTESCILKQDHLSKDDIEFKLKEESMLCRVLKEKLLSRERDIEQLQSDLASS

SEQ ID NO: 122955 - protein, 110 aa, Oryza sativa
  Clone ID: PAT_MRT4530_25836C.1.pep
EDGESYWVDAKPVPGALVINVGDLLQIMSNDKYKSVEHRVVMKSHEEARVSSAIFYNPGKRGDSVFYGPLPDLISSGNPPKYRNFTMSEFLGAFFKRDLASKALIEHFKI

SEQ ID NO: 122956 - protein, 116 aa, Oryza sativa
  Clone ID: PAT_MRT4530_25837C.1.pep
YAATKEKFKRRKKTKNLRKKRKNSLGSNGSAMDIRIAELASLHARRRQISPERWCVFLAVLSSPSSNPPARHQGIIITSEKAEETNSAFFLDGKLIATENKKEKESKKKTKSRPNQ

SEQ ID NO: 122957 - protein, 56 aa, Oryza sativa
  unsure (1)..(56): unsure at all Xaa locations
  Clone ID: PAT_MRT4530_25838C.1.pep
MAAPTAAAXSTLSTXSXTSGKRFITXXFSLSFSYXPLATXXRXAXXARAARXSXAS

SEQ ID NO: 122958 - protein, 97 aa, Oryza sativa
  unsure (1)..(97): unsure at all Xaa locations
  Clone ID: PAT_MRT4530_25839C.1.pep
XXRGHLVSLSLXPSFGXPSLLRPSVPXRGSTGILTXCPSTSPXGLIXGPDSPYVDEPCGGHLGXXGHWIXXXXFVTQADIXDYXXXDHDFXVDFXIR

SEQ ID NO: 122959 - protein, 297 aa, Oryza sativa
  unsure (1)..(297): unsure at all Xaa locations
  Clone ID: PAT_MRT4530_2583C.1.pep
LSTRVGCGRLHRIIENDLDKYRVVASNLPTKIDDLSHSTGHGWTTREKYVAISRTADFHWCSRDNSTRSLVPEPXVAISRTANFHWCSRDNSARSLVLEPWLRNSYDWSSTGSVAVLVPRLKMIERHLXLVLNQLIVVISRTFTSSGRVTTTTWSSTSGVAILPLFPLQVVELRLLPGPRPVWSSWDYYLVLDQKCSDSPTTSTSTKLISGTQYRQVFYPEIPYHXRHLALKPILLSLYAVLTRPXEELRLVTPRADKALSDPVETKDHILRLLDRSRTVGGSRQGIRNEEMVYPPR

SEQ ID NO: 122960 - protein, 266 aa, Oryza sativa
  Clone ID: PAT_MRT4530_25840C.1.pep
MALSSSISMSRRLFKGLTINPALASGMTCQHHQLQQHAPVSGTAKGKAKLKSGQQLKRNTIGAKKGGAPPTGGGGGGGRGRREAIERITQIAESCLNASTPLRHLSPKERLREAKREELGLISKERQRELDLAKAKAKSKGTREGDGGRVLMGPPGLDYISLGLVDEDAIPKYELTVEDGRRLAKQYSQVLMRRHRARQTAESSLLSLKKEAIAALPEKLRAAAMIPDMTPFPANRYMATLTPPIEGYIEKVRDAAKKYSVKEKLR

SEQ ID NO: 122961 - protein, 44 aa, Oryza sativa
  unsure (1)..(44): unsure at all Xaa locations
  Clone ID: PAT_MRT4530_25841C.1.pep
FFFFFFFFFFFFDERXLXLQNXSXVSXXTXLHXYKSKVXTGLKF

SEQ ID NO: 122962 - protein, 109 aa, Oryza sativa
  Clone ID: PAT_MRT4530_25842C.1.pep
WFFFFFFFFFFFFFFGFFFFFFFFLTRGTKKDCLGCLAPPKERGVPPIHQRGGDQLFSHYRRKAGTTMGWNSARACIFNDNQGQSLLENYRGPRGGYKETIFPSRFASY

SEQ ID NO: 122963 - protein, 70 aa, Oryza sativa
  unsure (1)..(70): unsure at all Xaa locations
  Clone ID: PAT_MRT4530_25843C.1.pep
IGLSAGGSTDLSTMPELPPTLTMHTTDPXGQDVTQTPDEASFTAMTLAKTEELLQDAXCMLLPGEVAECP

SEQ ID NO: 122964 - protein, 75 aa, Oryza sativa
  Clone ID: PAT_MRT4530_25844C.1.pep
MGQLMRDCRAPCKPSYGRGRCGNRGGARGGRCYVGSGNRGRGYEYRGDHKTNVVTHKEGSSEATNVDVANLVNFT

SEQ ID NO: 122965 - protein, 219 aa, Oryza sativa
  unsure (1)..(219): unsure at all Xaa locations
  Clone ID: PAT_MRT4530_25845C.1.pep
WHVMENLPWEMRLIHDWYLKASKKGLDMITMKVPDNASISGPNGMLVIYFNDLHTFLKLGKMDINLVAAFCLMQFLDGXRASRPVGYVNPTRVCWTEHMVELRKDCLELKDKTEGKKAFIKQLHKKKRINVAMYLGKVMHMHQDXKMSTLPYIFLDHYILFLVYPWDYLVVVRDLAHYTXKTFTEFLVLLNLAHRYYVDHIGLVENANRTKLLVKTQWL

SEQ ID NO: 122966 - protein, 66 aa, Oryza sativa
  unsure (1)..(66): unsure at all Xaa locations
  Clone ID: PAT_MRT4530_25846C.1.pep
PSARFNHGGRRRPRILLHCWITHXLPTHHQVXHGSPIGIHIXFVSXCTWLVXCHPGTELVTSNERR

SEQ ID NO: 122967 - protein, 97 aa, Oryza sativa
  Clone ID: PAT_MRT4530_25847C.1.pep
WGQRPSQVSHPWVSAGGGGYIHLRVTQRGPGLLARDDATTLRLSFSFESCGAQSTVGSSTGSGVAQVIHPVANVYTMVANVINCKALHTSQQIPRAF

SEQ ID NO: 122968 - protein, 310 aa, Oryza sativa
  Clone ID: PAT_MRT4530_25848C.1.pep
MRMLAYGTPADALDEYLKIGKCTSLECLDRFTRGVIEVFGGEYLRRPTSSDVERLLQVNESRGFSGMLGSIDCMHWRWEKCPLAWRGQFTRGDYGVPTIVLEAVASQDLHIWHAFFGVAGSNNDLNVLNQSPLFFDALKGEAPQVQFSVNGNEYGTGYYLADGIYPEWAAFMKTIPLPQTEKHKLFAKHQEGARKDVERAFGVLQSRFTIVRRPARLWRRKSVGRIMLACVILHNMIVEDEREEATIHIDLNENPGASFALPPEVNIGGNLCFADVMRKKATVRSRPQHTQLKNDLVEHIWHKFGDNHHN

SEQ ID NO: 122969 - protein, 1063 aa, Oryza sativa
  Clone ID: PAT_MRT4530_25849C.1.pep
MTHNIIKHNGRLISHAVKKLVEDYESDPKSVMFQILAMLFEACGARHNFYADYLYEADVDGVVFSLVELAKKGMVEDNYNTKQKDLKNFKENLVSFWDTLVHECQNGPLFDGSLFQKIKDYVVALSCTPPRVYRQVASLVGLQLVTSLISVAKTLSGQRETTQRQLNAEKKKQTDGPIVESLNKKLAHTHKSITYLEELMRKIFSGLFMHRYRDVDPEIRMSCIKSLGIWVVSYPSLFLQDIYLKYLGWTLNDKNAGVRRTSILALQSLYEVDENIPSLGLFTERFYSRMIQLADDVDISVAVSAIGLIKQLLRHQLLSDDDLGPLYDLLIDEPPLIRRAIGELVYDHLIAQNIKTSQSGARDGNNDSSEVHIGRMLQILREFSDDPVLSSYVIDDIWDDMKAMKDWKCIISMLLDENPLTELTDMDGTNLVRMLRASAKKAVGERIVPATDNRKMYYNKGQKCCCLSGYLGLEILENSKHEITTALLKKYPQLLRKYISDKAKISPLIDMMMLMKLELYSLKRQDQHFKAAIDLIADAFFKHGDKETLRSCIKAITFCCTNCQADLQNYAENKLKDLEDELVLKVKTAIKEVEVCMSYSQSLCFKAMKRFYELQLSKPVKNDGLFEDMYRILSHLKDMDNEVKSFLLLNMYLQLAWCLNAIDGENPSEASIDELLSRQSSLFEKLYYYLVVLPTYQKEGRSTTILSCRVCVITAEMWCLFKKPKYSSTRLESLGYLPQLDVVQNFWKLCEQQLNIPDEIEDEDANEEYIEDTNKDVVMIAAAKLVLADTVSKDYLGPELVSHYASHGTSTTEIIKHLITSLRKNADNNMGALFFEALKRGYERYMAHVSDGENQTLIGKSYSECQDLAGRLAGSYVGASRNKNKSEILKIIQDGVSFAFVDLPKQLSFLEAALLPFVSKLPSSDIPDILIDVQKRTQDTNTNEDPSAWRPYFTFVEHLRDKHAKNEVLQEEKEEKPVKRRGRPRKVRDVPARNLFDGHKSSDEESVSDSDQQGHGEDNDDDDADQPLINTFRSSASKLRSLKVSQQGTSGQKGPSRASGSNS

SEQ ID NO: 122970 - protein, 200 aa, Oryza sativa
  Clone ID: PAT_MRT4530_2584C.1.pep
MGHTYPHSAGSRCNVGAQLSADDVTGVRLVTDRSLLSTTRQFSIPHVCPSSCNDFPAMVAMKPVMYLAGTDVLTPGVNTPAPARDECLEALIIPTGRVEAGSGRPSPRGRNGSGPTPRGDGERGGHVTFGPDPPEGVRPPAAAASSRRRSAPPAAAASSPAAASSSSTPLGAARRRRVLPALRHRPQAAAASSLLPPLSR

SEQ ID NO: 122971 - protein, 59 aa, Oryza sativa
  Clone ID: PAT_MRT4530_25850C.1.pep
TQMRKALKCKLIWANGPSQTFYITDKLAPLFFVIPRRILLLVIKFPPSPPTKFRLCFVS

SEQ ID NO: 122972 - protein, 70 aa, Oryza sativa
  Clone ID: PAT_MRT4530_25851C.1.pep
QNGPSKTKVSHGPPHNLFWEGFLPKTPRSFLDKSKKQNFPKGDVKPKLGSNGFPPREKVVQIPNQMGPLV

SEQ ID NO: 122973 - protein, 53 aa, Oryza sativa
  Clone ID: PAT_MRT4530_25852C.1.pep
MAMVTAKSGAPPRAITEPTLQRRGNTNDAASTSKLEFHHWLTSALDVKLQPWI

SEQ ID NO: 122974 - protein, 135 aa, Oryza sativa
  unsure (1)..(135): unsure at all Xaa locations
  Clone ID: PAT_MRT4530_25853C.1.pep
EGAEGQPTVAVVSFFVGTPLYRHQRXGGSPLTRIARMLVVSARKWGVEVPVDRSRLHESGIEGSHKLEHTEQFACLDRAAVETPENSQLGGRACPFVAALPCPRRRRCRRRHAFARHLLHFGHADHLAALVLFLP

SEQ ID NO: 122975 - protein, 175 aa, Oryza sativa
  Clone ID: PAT_MRT4530_25854C.1.pep
QSLKPSVAFFAARAPPAPACFAPSFTPAPAPSAAPASSVFTGLFSYYKTELRRRVHQEHLPRECVYVGSGDDTERKHEPSQARPGQRRPANKRCGVSHDMSQRACLPAGSAGGGRRVPSAASADADVTDSPDVRIHDATDAYAAEIDHRRPRHNEYNFVNHHLRWRLSSPSSSAA

SEQ ID NO: 122976 - protein, 196 aa, Oryza sativa
  unsure (1)..(196): unsure at all Xaa locations
  Clone ID: PAT_MRT4530_25855C.1.pep
SAPARLVVLEQMEPWVEQHVLLLLKPAEEAWQPEDMVPNAAALGADGFHAACLELRERXRGVPDAHLVCQVGNMVMEEALPTYQSMANRFESARDVTGADRMAWARWICRWSAKENRHGDVLNRYMYLSGRLDMRQVERTVHRLISSGMAMHAPVSPRVVEMLLAAVLAISAATDAASSSSAGLSNGSKCCSTHGS

SEQ ID NO: 122977 - protein, 242 aa, Oryza sativa
  unsure (1)..(242): unsure at all Xaa locations
  Clone ID: PAT_MRT4530_25856C.1.pep
KDVLTYNISPARLVVLEQMEPGVEQHVLLLLKPAEEAWQPEDMVPNAGALGADRFHAACLELRERAAXVPDAHLVCXVGNMVMEEALPTYQSMANRFESARDVTGADRMAWARWICRWSAKENRHGDVLNRYMYLSGRLDMRQVERTVHRLISSGMAMHAPVSPYHGFSYVVFQERATXGNTARNIRAHGDDTLAHICGSIAADKXRHEAAYTRVVEMLLAAQPSDSVKPLSDLLRAAVAVP

SEQ ID NO: 122978 - protein, 55 aa, Oryza sativa
  unsure (1)..(55): unsure at all Xaa locations
  Clone ID: PAT_MRT4530_25857C.1.pep
CQHQHLHHCTRHTSIIANQPPNTVTQPXTAHPCHCHCXTLPXCFNFCXAVAXWSV

SEQ ID NO: 122979 - protein, 263 aa, Oryza sativa
  unsure (1)..(263): unsure at all Xaa locations
  Clone ID: PAT_MRT4530_25858C.1.pep
PWVEQHVLLLLKPAKEAWQPEDMVPDAAALGADGFHAACLELRECAARRALSSGSALRGVPDAHLVCLVGNMVTEEALPTYQSMANRFESARDVTGADGTAWARWICRWSAEENRHGDVLNRYMYLSGRLDMRQVERTVHRLISSGMAMHAPVSPDHGFSYVAFQERATXGNTARNVRAHGDDALARICGAIAADKXRHEAAYTRVVEMLLAAAVLAISAATDAASSSSAGLSNGSKCCSTHGSICSSTSSLAGADAAPCASG

SEQ ID NO: 122980 - protein, 36 aa, Oryza sativa
  Clone ID: PAT_MRT4530_25859C.1.pep
MAVARAHVVSAMGTTTTFCMHDFQGQVSGLDEEFSG

SEQ ID NO: 122981 - protein, 58 aa, Oryza sativa
  Clone ID: PAT_MRT4530_2585C.1.pep
MATEAGPLREPAVEFNRCLWPRRRSAPVAEEEIHAWGRGEAAKVGDKTSVQLPGMRPT

SEQ ID NO: 122982 - protein, 1165 aa, Oryza sativa
  unsure (1)..(1165): unsure at all Xaa locations
  Clone ID: PAT_MRT4530_25860C.1.pep
MMMPDKKRKKIAAAAPAPAPAPVARLVRVRSGNKKRKGKGKEAPAEGSAAKEPAVYMVLAHGVEEEPTHSVIEVAAGATVRLLLHSTSGRGMSFAAVGTRIVGIGLDQTTVYDPKTSTVRAGCRLVFPKVNPVLVSHGGKLYAVSCCPSVVNGRDFEPWFLVLDSLGYFGWRELPPPPIFPCRLNPLEYRDPPAVRVAAYAIVGSHILLSVSVQQQGQDKGTCAFDMDAEQWEMVLDTNLPFTGQAVPLGDHRFVSCSMAKGGAASVYYMEVMVFPPGIAGSGTGKKELSIVELQVESKRIVPGHLLCTMGKGSFSSFDFRSTASPAKQDIVARIVHRTYSQAEAEVEADDSADTDLVITEDEVEKRPVTGILTIESGLTSISKIVMEMKYLYEKHKQWDWKVKQVEQKKYLVEFPSKDARRELTRLKGFDFELSNARANVRETERTIEAFAELQEVWVRATGVPPLARSEKVIEKIAHLIGDPMEVDSISLNREAVRVKVLCRDPLKIGGTSEIFLNRVGYRITWNPEGVRQHHQDDPDDPKPAYRSRGRRGDDEEDSQDSHEADKGESKKEEEEKKDTQKREGDHGHKRHKNNEMVEEEEDSLGEGEKVDIPEYIPDISDEAEEVVLCSQGKEVQGINEVLEMITGEVKGQELTSDGFISSGKKKKRKQKEKVVATRQSSRIARDGVPVALKAQQRTSVRNDISARDEGVDLGTSEGLQNQNIETIKARELAQSMIHTAKERLINEDPIERLPLTTEIEGCVFPTTEAAGIEPAKGEKKDDFLREILGKSNSMQIPFMMGGDFNMIRFPDEKSNGNIHKRWADKFNSFIALAELRELHRSGGKYTWTNKQADPVMEVLDRVLVSSSWEEMYPLTMVKSLLRVGSDHNPLLVELEKQLVWSRDAFRFDPSWLTQEGFKEWLIAKWPERRKKHILDHWNCQGTVLRRLMRGIKKIDEEAERGVLSTAEWAERYQVEEDLVQIYPAEEIYWQIRSGTKWTLEGDANTLFFHGVVNGRKRKTMITSLEDGGREINDQTKLKEHVYGYYKKLFGVEQAPKVFLSQDIWNNRGKLNQEDNDKLTRPFTMEEIEEALRGMKSNTAPGPDGFSATFIKEFWPQLKDQIKEMLDMMFEGDLDLWRLDYGVITLILKVKDANTIKXFRPICLL

SEQ ID NO: 122983 - protein, 360 aa, Oryza sativa
  Clone ID: PAT_MRT4530_25861C.1.pep
GGSFTPEAEEADEVRRCLAPARLEVLEQMEPWVEAHVLPLLKPAEEAWQPADLVPDAAALGADGFHAACVELRGRAAGVPDAHLVCLVGNMVTEEALPTYQSMANRFESARDVTGADATAWARWIRGWSAEENRHGDVLNRYMYLSGRLDMRQVERTVHRLIGSGMAMHAPASPYHGFIYVAFQERATAISHGNTARNVRAHGDDALARICGAIASDEKRHEAAYTRVVERLLEADPDTTVRALAYMMRRRITMPAALMDDGRDADLFAHYAAAAQQAGTYTASDYRGILEHLIRRWRVAELEAGLSGEGRRARDYVCALPQKIRRMEEKAHDRAAQMRKRPTAIPFSWIFDKPVDLMLP

SEQ ID NO: 122984 - protein, 437 aa, Oryza sativa
  Clone ID: PAT_MRT4530_25862C.1.pep
MANPRGGGGGGARHHLPLRPRRLLRSPISRCAVLLAASAALLLVLSLRQEPNEQLWGSDGYGSHACVTPTSRYMAPKGSERYMTVRSNGGLNQMRTGICDMVAVARLVNATLVIPQLDKRSFWQDTSTFKDIFNEPRFIKALEGDVSIVNDLPQSLQSVPRARKHFTSWSGASYYEEVKQLWKDHKKLLERLRSRGKFIALHLRYEKDMLAFTGCTYGLSESEADELRIMREKTSHWKLKDINSTEQRSGGNCPLTPEEVGIFLRAMGYPESTWIYLAAGEIYGGDKYISKLRSYFPNLVSKEVLATKEELGKFNDHASQVAALDYIVSVESDVFIPSHSGNMARAVEGHRRFLGHRKTVTPDRRGLVELFDLLQKGELMEGPKFSSLVTEMHKNRQGAPRKRYGSLPGSKGRARLRTEESFYENPFPECICLNGKH

SEQ ID NO: 122985 - protein, 327 aa, Oryza sativa
  Clone ID: PAT_MRT4530_25863C.1.pep
MEGKSSSRHADPLEEVEMNSASATEDDDGCRYVFQSRRDSDNDNDDEEGVLPATACKRRRRLDDILALLPSPPTPSTSSGSEGTISDRDHGGDVIGAGDDDAAPVAARREASFPCHLCNKEFGSRKAVHGHMRVHHAENEKEPMSLPPQVAAPVHPQARLPTRGASRSGGPYKCKYEGCIMEYESHQGLGGHVAGHINRDKMATASGSGGAGKPKGKHPCNVCGKEYPTGVALGGHKRKHYRKDLDLTLSLAPPGQLAAPPTPTPAPAPAAIAAVEAEAEVAEDGDGGELVPTTPPTGARRNVVVRIWGVDLEKPVDDVEEQDSGSN

SEQ ID NO: 122986 - protein, 251 aa, Oryza sativa
  Clone ID: PAT_MRT4530_25864C.1.pep
MAKLALGHHREATDPGCLRAVVAELLLTFLFVFSGVGSAMAAAKLGGGGDTIMGLTAVAAAHALVVAVMVSAGLHVSGGHINPAVTLGLAAGGHITLFRSALYAAAQLLGSSLACLLLAALTGGEEAVPVHAPAPGVGAARAVAMEAVLTFSLLFAVYATVVDRRRAVGALGPLLVGLVVGANILAGGPYSGASMNPARSFGPALAAGEWADHWIYWVGPLIGGPLAGLVYEGLFMGPPGHEPLPRNDGDF

SEQ ID NO: 122987 - protein, 125 aa, Oryza sativa
  Clone ID: PAT_MRT4530_25865C.1.pep
TFKDIFNEPRFIKALEGDVSIVNDLPQSLQSVPRARKHFTSWSGASYYEEVKQLWKDHKVVHIPKSDSRLANNGLPIDIQRLRCRCLYQALRFSDPIENLGKKLLERLRSRGKFIALHLRYEKDM

SEQ ID NO: 122988 - protein, 215 aa, Oryza sativa
  Clone ID: PAT_MRT4530_25866C.1.pep
MAMVALECGDDRAKGGVMSRLAESSRSRGHVAGRPVRRHLGARLSALPPLAAAASTATLGFEGGALQQGRRHCATMVMMALVPGGQEGREETSLRDPDAAAAAAGSCTIVGSRQCRPLTSSVPRHPSPFTTVTLFPYLCPRFIWVLFMVYLINREEIDMVPNEIRQTSSWTVNGVDPLVNHFHHHPLDQAVVILKIAPQLLRLSSHVATTLEFPR

SEQ ID NO: 122989 - protein, 95 aa, Oryza sativa
  unsure (1)..(95): unsure at all Xaa locations
  Clone ID: PAT_MRT4530_25867C.1.pep
VGGXFRGLKGPRGAIVGLLGQPAKQKMEKRVREFNLWGWGWKGPYLPFQKATPKGFQPFQRAIKGLESGLAKPNSQIPKKLTECQLNSPVSPWTC

SEQ ID NO: 122990 - protein, 213 aa, Oryza sativa
  Clone ID: PAT_MRT4530_25868C.1.pep
MATTRSGVGGAISDPFATPGFRFYPTEEELLGFYLRHRLAGTRPDVERVIPVVDVYGYHPSQLAALAGEASARDTEQWFFFCPRAERELHGGRPARTTPSGYWKATGSPSCVISSATNRVIGVKRTMVFYQGRAPTGTKTRWKMNEYKAVADDADAAAAAMLHQLRNELGVCRVYISTGTLRSFDRRPLDNQRWDTNKAKNQIISSGRLTPAS

SEQ ID NO: 122991 - protein, 50 aa, Oryza sativa
  Clone ID: PAT_MRT4530_25869C.1.pep
GGHGDQDLPYFFLRLGVPPSRPTRRTRRWRRRRRHRSPTARRPAASYSLI

SEQ ID NO: 122992 - protein, 163 aa, Oryza sativa
  Clone ID: PAT_MRT4530_2586C.1.pep
IWPGQTGSGRPSPRGRNGSGPTPRGDRGRGGHVTLGPDPPEGVRPHAGKSFGRPHGVVINGKSGKAAADPPMFTVEAGKTYRLRVCNVGIKASLNFRIQGHDMKLVEMEGSHTVQDMYDSLDVHVGHCLSVLVDAAVPEPPAGWAWSINQWRSFRWNLTNLAK

SEQ ID NO: 122993 - protein, 79 aa, Oryza sativa
  Clone ID: PAT_MRT4530_25870C.1.pep
FILVFVSTFFKLINFTFYEKIFIWKLFLEISNKYVFQVCNNYNPINQCRTTFWFYIPALFIFVEQTQTHNCEQETRVRE

SEQ ID NO: 122994 - protein, 74 aa, Oryza sativa
  Clone ID: PAT_MRT4530_25871C.1.pep
QVHGHLLSSPNGRRKKYVLGLVLHLYIYFCCPINLPRFLNNEIWEINLPRRISTFNHKRLSAYMLCMSELMNTV

SEQ ID NO: 122995 - protein, 121 aa, Oryza sativa
  Clone ID: PAT_MRT4530_25872C.1.pep
PCTRPPLRPTPWRPRPRRRGWRRARAPVAGRRVVADAALLSLSPSPLAALRPPLLAASFAPLLRAAATVAMHAAAAASNSPAAVAPKKTASTGQGALDAFLRAAAAAFFMPPPPSSRLLHR

SEQ ID NO: 122996 - protein, 143 aa, Oryza sativa
  Clone ID: PAT_MRT4530_25873C.1.pep
MAEIKDVSSSCAADHACTYPPLAGRALYAQLIALRPRHACMQASNGRAHAAASPMYTYAKISNATRVRSRARDRARSQSQAANRLDRCLAPCGPCVSAARSRARRDDLTRPRDAAHAHLVAFVRVGWGIGFGCVRLGFGTGTS

SEQ ID NO: 122997 - protein, 115 aa, Oryza sativa
  Clone ID: PAT_MRT4530_25874C.1.pep
SIKHPIQHKIYDLVNSQIQSCSKYNHRFTELLSTCNYPSKINKLQSHSLTKQVACLNHTNQKILPSHHESASRHEKGRQTLSRTPCSMSSLPLHLNQDRAHHHLQSSASTYHLAP

SEQ ID NO: 122998 - protein, 101 aa, Oryza sativa
  Clone ID: PAT_MRT4530_25875C.1.pep
YHCLRNKSCHRDGSLLLKKKKKKKKKKKKKKKKKKKKKKKKKKKKKKKKLKKKKKGGPFKRTKVYLPVLQTEKLFYGAPKIKYIGRCLKTWERENPGGNQI

SEQ ID NO: 122999 - protein, 92 aa, Oryza sativa
  Clone ID: PAT_MRT4530_25876C.1.pep
AKARRRKEKAGRSYEKKLEEERKKAEEAQMKEAMEQQQKELERYQELERLQKEREEAMKRKQMEEEQQKQSQMKLLGKNKSRPKLSFALGMK

SEQ ID NO: 123000 - protein, 58 aa, Oryza sativa
  Clone ID: PAT_MRT4530_25877C.1.pep
VSIFANKKKIVFCEDNGVFFIIVLLWGGEIRQGFICRLRNHTQNRSSLPWFTLKSILN

SEQ ID NO: 123001 - protein, 115 aa, Oryza sativa
  Clone ID: PAT_MRT4530_25878C.1.pep
GGGVVFFFFFFWGFFFFFFFFFFFFFFFFLGGKPRVLLRAPLKKVLKRAPFGGRRVSFFFYPLWGGPPEKSFPFSKKNPFLFSRGTPPLAPTPGEKKKREYRLIQNATHLLPKKK

SEQ ID NO: 123002 - protein, 60 aa, Oryza sativa
  Clone ID: PAT_MRT4530_25879C.1.pep
RERVGAWGGEERGGVRGSHGDGSGVCVRDAEIIARSLAAGDEWEIVGVTGKQAMWRRARR

SEQ ID NO: 123003 - protein, 136 aa, Oryza sativa
  unsure (1)..(136): unsure at all Xaa locations
  Clone ID: PAT_MRT4530_2587C.1.pep
PLVAFACSRDLPVGLVEGGHSLSDDLSNTVFTDPHLATWXXAYXGDEXLXGXVQLLXXSXDXGGGRQGNRRVPXGDGGXGGARXXARXPXDVYXGHRAXPPAXQQPAGVDPAPGVRPHLVXLHHLHLQPPRGARYP

SEQ ID NO: 123004 - protein, 51 aa, Oryza sativa
  Clone ID: PAT_MRT4530_25880C.1.pep
QKKVKQQGSSKEEEGKTTTKAKEKEKKKMSNLDGAGLVTPHFPFHFRPGLL

SEQ ID NO: 123005 - protein, 171 aa, Oryza sativa
  unsure (1)..(171): unsure at all Xaa locations
  Clone ID: PAT_MRT4530_25881C.1.pep
KNNKRVRKDRKVHKKKKKSRIKKRKTTTTNVDPNGKEKSDSYKRKKKWWKKKLDPIPLKREKKKKKKKAKQKKVRKKRKKKHANKKKHARKKLSEKPRHFXKNGLKKPCKKKKQEKSKKEHSKKSKKYARENNCQKKQAKKHTRKEKQKREKNMVFIVSEKRKKNMLEKNC

SEQ ID NO: 123006 - protein, 179 aa, Oryza sativa
  Clone ID: PAT_MRT4530_25882C.1.pep
METPKISGVALAAAIAVVLAMATTPAVAQNSPQDFVDLHNAARRVEGVGEVVWDDAVAAYAENYAAERAGDCALIHSGSWEKAGYGENLFGGSGSEWTAADAVNSWVGEKDLYDYDSNSCLGSWDSCLHYTQVMWSRTTAIGCARVDCDNGGVFITCNYNPAGNFQGERPFERGLTLSA

SEQ ID NO: 123007 - protein, 54 aa, Oryza sativa
  Clone ID: PAT_MRT4530_25883C.1.pep
CHGVIGKDLGARIGQIIIGLLPPSQKKDKPWISVSNFDCPSYMNFFYNSYFHCC

SEQ ID NO: 123008 - protein, 194 aa, Oryza sativa
  unsure (1)..(194): unsure at all Xaa locations
  Clone ID: PAT_MRT4530_25884C.1.pep
MAMAMRREDIRSSTPASRLPTPAGREAAAVIPREGGCLTSPVIQVDSSGHGSWFPSKLLITFLHTPSLQDKNLQENEHCFHWWNHLHEQQMLCTEHDLAATAVTYNARGQDENTGDEAAAAYGEVAASXITEEIVKERAGDVEERQLRSDGVEIGREIAAAAGRGKRSCGRRKGEPSSSLTPLRSGCWSRYERA

SEQ ID NO: 123009 - protein, 33 aa, Oryza sativa
  Clone ID: PAT_MRT4530_25885C.1.pep
MVHAYTFSTSGGCGGLIRYTNDDHADDLGGNRG

SEQ ID NO: 123010 - protein, 211 aa, Oryza sativa
  unsure (1)..(211): unsure at all Xaa locations
  Clone ID: PAT_MRT4530_25886C.1.pep
KFLKLKPYHSCHFFRPPLTPSSSSSVPSSIHPYPPQSSSTAAKLPRYRRAPHRQAPSRPPSSFAAAKLPPSPSPSPLPPSYRRRRRGLSCSTSATSPLISARTTSPRSSPLATAAPPSTFASPRHGEARRRAPTPPPSSLPLSSFTAAKLPPSPPPSSPPTSSLTTAELPPSPPPSSPPTXPSPPPSSFAAAELPAVELVVVEQQMVSGGG

SEQ ID NO: 123011 - protein, 272 aa, Oryza sativa
  Clone ID: PAT_MRT4530_25887C.1.pep
MEVEKEAPPSLLVALLSVHLLPSPPPDLATTVAVEKAGSEGKVEAVGWVGGGGFGRADPPPAGSRAMDPPSRVVERRRKGGPAPGAATKITVATCGLESGGSTTGGLRNGGSIASNLGSGGYVLASGGEEAEGQRRTGSGDQDHSGCVWAQERRIHPHTWRRGGGRVVWHQERQPRTCGYVRAKSRADNPPSTSLGMVDSLPECSRVVDPPLHMWRGGGRVAQHQEWRPRPRRRCECLEEGGSVLACCTEEAEGRHDIASGNHNRRQRGQGL

SEQ ID NO: 123012 - protein, 70 aa, Oryza sativa
  unsure (1)..(70): unsure at all Xaa locations
  Clone ID: PAT_MRT4530_25888C.1.pep
QSPPRMMLLLQHGRLHDTTTRRPARGEGSSRCRSQPSYLSPWASAKSARHGVGKQHQRWRRWRLKXXKSG

SEQ ID NO: 123013 - protein, 63 aa, Oryza sativa
  unsure (1)..(63): unsure at all Xaa locations
  Clone ID: PAT_MRT4530_25889C.1.pep
NHRQNNFTLGSPKKETWFSKKGPQTYVPLNRGPRTSLIMCHFICFKSIPLVFXXXXXXXXFFQ

SEQ ID NO: 123014 - protein, 167 aa, Oryza sativa
  unsure (1)..(167): unsure at all Xaa locations
  Clone ID: PAT_MRT4530_2588C.1.pep
HGHPFLCLPEGSGRSRFGPEGWGAPTPCGFGATCMGGLDERATPHLMQRSALVYPVRXPVAVCDRSQTAGDGVLTPGVSTPVPIHQNTGVGYYASQRPEPVYIARVSCICSLANIPQIEGEEPHLAPPAEPAKGGLRGLPVRSPKLRQLRRRKLPEGSGRPRRRGFR

SEQ ID NO: 123015 - protein, 62 aa, Oryza sativa
  Clone ID: PAT_MRT4530_25890C.1.pep
IWPQLSFERPTTYFPLGGPLKGRMYHAPCALEPSYMKRKIRGVFWSEIVFLHYLLKPCVFGP

SEQ ID NO: 123016 - protein, 146 aa, Oryza sativa
  Clone ID: PAT_MRT4530_25891C.1.pep
WWRSDNNPVQVELAEAWPLLRLSQRVIVEDVLITETKRCKWEREEVAWRGCADKLTPFYAGEVGAVARWSGGEAGVAGGGMERTYLLPEGGGGDGVRRGSLEGGGAGVGGGGNVECGAREGGGGRGGIPNALGVGEGRCGSSIVGS

SEQ ID NO: 123017 - protein, 692 aa, Oryza sativa
  Clone ID: PAT_MRT4530_25892C.1.pep
MKRQLPIKGASGASGSGHGKKAPQELENVLKQHFGYSGFRGKQLEAIEAVLSALMENQVASLKSKGIPAEFLSSTQTSHNKQKIHEDLDSGNPSLKLLYVTPELVATSGFKAKLTKLYNRGLLGLVAIDEAHCISTWGHDFRPSYRKLSSLRNQFPDIPILALTATAVPKVQKDVISSLCLRNPLILRASFNRPNIFYEVRYKDLLDDVYSDISNLLKSSGNVCSIVYCLERAVCDDLTMHLSQQGISSAAYHAGLNSKGIDRQDVRIVCHYNLPKSMEAFYQESGRAGRDQQPSKSVLYYGLDDRKKMEFILRNTKNKKSELSSSSTELSEKALADFSQIIDYCENSTCRRKMIIESFGEKVQPTLCQRSCDACKHPNLVSSRLEELRRVPTCRYNKISPVFKSSLANPKHMETEFWNREDDASISVEDISDSDDGKEVVSNTAISKLPSKAGLDAKFEALERAENAYYQAKGQTKQQGGKLVDKKSISQTLRDASQKRLLNGLGQAKLRLGNLPFDEEPSAAHLEVECFKKYEKVGKTFYNSQIAATVRWLSSSSLDQIQDRLHALADQITDHGAAASSPSIVPESPPASPDVICKIPGEATSNEAKDIPLKNNTEEFVTTEHSDEIAKVAVLSENMELPKIPSFREFMSQKGRDRATSSSKVESLPSGVRRKVGIEKQGTTGPSKKMKS

SEQ ID NO: 123018 - protein, 163 aa, Oryza sativa
  unsure (1)..(163): unsure at all Xaa locations
  Clone ID: PAT_MRT4530_25893C.1.pep
PPPPRAPCPRRCLSVPSRASLLTMKFGKXQSYHRLRVNIGFKVLESADKSXSRHDVIFLVESDQSNKAYLQESEDFMTLDLQPMYALTFGSIFVLLYHIVNRLVFTGLYCYIILSSADCLYIIIYIGHIADCLNPIAIGWYRHRLLSAIDWNYSIGLSADRLF

SEQ ID NO: 123019 - protein, 280 aa, Oryza sativa
  unsure (1)..(280): unsure at all Xaa locations
  Clone ID: PAT_MRT4530_25894C.1.pep
MPSYNVWTSHGEQGVQMEEDEVEDENIPHXAQYGGFEGNTMCEVEGADVEDDLGQMLQDIKEDCESEKEAXKLERMLADHKTPLYPGCEQGHKKLGTTLELLQCKAKNGVSDKAFGELLKLVKNILPEENKLPETTYEAKKIVYPLGLEVQKIHACPNNCILYRGEEYENLEACPVYNALXYKIRRDDPGDVDGLPSRKRIPAKVMWYFPIIPRLRRLFRNKEHARLMRWHAEERQQDGMLRHPADGSQCTTESGAFRTNARKRPRPLETRIQGGQPHVQ

SEQ ID NO: 123020 - protein, 68 aa, Oryza sativa
  Clone ID: PAT_MRT4530_25895C.1.pep
KRMFTCTGQARMKSLPNEHYNAVQCHPLTALSVSKDHRSISKNAQRLGSHAELKLLVLEMCARSLLVP

SEQ ID NO: 123021 - protein, 837 aa, Oryza sativa
  Clone ID: PAT_MRT4530_25896C.1.pep
MPSYNVWTSHGEQGVRMEEDEVEDENIPDWAQYVGFEGNTTCEVEGADVEDDLGQMLQDIKEDCESEKEAQKLERMLADHKTPLYPGYEQGHKKLGTTLELLQWKAKNGVSDKAFGELLKLVKNILSEENKLPKTTYEAKNIVCPLGLEDTKRLYPLSRRDDPGDVDGQPSRKRIPAKDKQVEFNLRALLLVTINDWPALSNLSGQSNKGYKACIHCLDETESTYLKHCKKVVYMGHRRFLVTNHTVRKKGKHRKKPIFRNGKTLFEMVKDLKVVFGKGPGSQPIASEDGHAAMWKKKSIFWELPYWEVLDVRHAIDVMHLTKNLCVNLLGFLGVYGKSKDTLEARNDLKDTNQREDLHPEPKEKGSQCLSPSSYTLSKVKKESMFECLESIKVPSGYSFNIKRIIRTKDKKFTNLKSHDCHVLMTQLLPVIISGILPDNVRATITKLCAFMNAISQKIIDPERLEALQNDVVQCLVSFELIFPPSFFNIITHLLSHLVKDISILGPVYLHNMFPFERYMGVLKKYVRNRARPEVSIAKGYGTEEVIEFCLEFIEDLRPIGVAESRHEGMLRGKGTLGRKAIMTVDIDLYRKAHFTVLQQSFLVAPYIEEHMAIVRSENIGDQIGEQQGENNPQNRGNSGISAGPNQNLAMSVLENETSPVFFVPDSVQGKIQEVLLKNQLLRQLAERVQGPPAVPLALAPFTALLLPRRNAIYDSLPPVFHSSQLPVVVVQHEDHEDDMDHDMGPLGQDEILDVQLLAISEPLDQAQPKSPPRTGPVPLLLEPPRAPIKKKDGKTVLFDPNRRQSARMRSSSQELTQPDPRMGIGKPRGKSAKKLK

SEQ ID NO: 123022 - protein, 2103 aa, Oryza sativa
  unsure (1)..(2103): unsure at all Xaa locations
  Clone ID: PAT_MRT4530_25897C.1.pep
MDWQWMRADRRSKGFIDGLHNFLKVAEANKQNNGFIRCPCTIHIHLFETGFMPSNNVWTSHGEQGVQMEEHEVEDENIPDWAQYGGFEGNTTCEVEGADVEDDLGQMLQHIKEDCESEKEAQKLERMLADHKTPLYPSYEQGHKKLGTTLELLQRKAKNGVSDKAFGELLKLVKNILPEENKLPETTYEAKKIVCPLGLEIQKIHACPNDCILYRGEEYENLEACPVCNALRYKIRRDDPGDVDGQPSRKRIPAKVMWYFPIIPRLRRLFRNKEHARLMRWHAEERQQDGMLRHPADGSQWRNIDRKFKDFGKDPRNVRFGLCTDGMNPLGEMSSGHSTWPVTMCIYNXPPWLCMKRKYXQGPKQHGNDIDVYLRPLVKDLKPLWKKEGVPVWDEDKQVEFNLRALLLVTINYWPALKNLSGQSXKGYKACTHCLDETESTYLKHCKKVVYMGHRQFLVAIHPVRKKGKHFEXKADHHKKPIFRNGKTVFEMVKDLKVVFGKGLGSQPIASEDGHAAMWKKRSIFWELPYWEVLDVRHAIDVMHLNKNLCVNLLGFLGVYGKSKDTLEARNDLKDTNQREDLHPEPKEKGSQYLSPASYTLSKAEKESMFECLESIKVPSGYSSNIKRIINTKDKKFTNLKSHDCHMLMTQLLLVIIRGILPDNVRATITKLCAFMNAISXKIIDPERLEALQNDVVQCLVSFELIFPPSFNIMTHLLSHLVEEISILGPVYLHNMFPFERYMGILEKYVRNRSRPEASIAKGYGTEEVIEFCLEFIEDLRPIGVAESRHEGRLRGKGTLGRKAIMTVDNDLFRKAHFTILQQSSLVAPYIEEHMAIVRSENIDKSEGWMTXCHIDTFPAWLRQHLMRNATINQQLAFLARGPSGSIMTWQGYEMNGYTFYIRAPDSKSTNQNSVVRIDAIRHDGPTSTYYGAIDDIWELDYGPLKVSLFLCQWVRLSGGGVTIDESGMTAVDLAKVGYSDEPFVLANDVTXVFYVKDMASKAKKGKGPDKPKRHMVLPGRRKILSPVMDVCRRRPTXGRPSPPPVRPRAPPSLSPSXCRRRLRWPSSSPLGTADASAAAARCMTYEQMADRDDDEIIYETIREGSSQYWHDDEGIEDPYRYLNAEGNEEVNEEVNVEGNKEEAFGSQSQPSSVEKRARGQRGPTRKIEGRHVITGVGQDDRPIAPADAARNYVHHSGWVVRDNVPINIVNWHRRREHGDDELPFLPDAQKDMLWKTMLETFTIPEEHQAKVREWTLKRMAEQFQDFKGDLYKKYILKGLTPNFDNFPKLTDHWNEFVAYKTGVVGQAKMTKNKANAAKKKYHHHLGSGGYSTAMPKWEEMEAGLMERGIVPATVNWPNRSKNWYYAHGGTLNPVDGSFIFGDEIHEAASRLLDAVEASSEGTFWPDREKDELTLALQNLXHPGRMRGKGLLPWKLGFKEDSHTYKSRIRSKRDTEAKIVDLEYRVSFHEVRMEEEVARKVDERLAAHRSQXAPVMVSPSGNRSCCASTGQVXSQSMEAAPAHEETTYPVDGIKHRTSCELHIPFRNLTIKVASGMAFPTDPTGTYHCRPIPPGXSKIEIKQVEATYEDLELEIPGGDGETKLGDTSHAIILWCKRYIVFPDARSPPPAPSSPAPPPPATPPAPPPPLSPPAPSSRAPLPAPSKTRQAAPPPPQAPSKSRQAAPPTPAKSRSRQPSPAKTKRPTKKAKVEPRPTPYTKPYLCTDEEVDATVKEDVRKHFKPWSSEKKIPIDPKTKKFFQGMSAPAEEKIGLTDYERTVKKAHDKSKRQAKAVPQLGDQPQHELDPGDTFLTPEQWQIKVFLKETGLSFKQLTARNDADIPVAEVKYQFKLGELLVKPDQLQTLSTQLHKFHEWYMQESAKGRTMFGAKVKNADFFLGDDVVWIRFKKIFDVYNLDALDVSILSTWFLMEIQKACREGTFNTWCIDPSKINTRMLTDFERDTVKNLVHLLVQXSTKTFILLPYNTSFHWVLVLFDLSTCMVHVYDSMDKDEEVFDQLIRAIDRAWARFRRMVPGTWNEKLGRRFKFPVIRMKEDLPHEVFIRAVQEQLMGFINDQVLDPAGEFYYNGGTIHTVEPPRLSPTVAR

SEQ ID NO: 123023 - protein, 177 aa, Oryza sativa
  unsure (1)..(177): unsure at all Xaa locations
  Clone ID: PAT_MRT4530_25898C.1.pep
MEESFVPLRGIKNDLHGRLQCYKQDWTGGFRAGIRILAPTTYIFFASAIPVISFGEQLERNTDGVLTAVQTLASTALCGIIHSFLGGQPLLILGVAEPTVLMYTFMFNFAKDRPDLGRRLFLAWTGWXVCVWTAILLFLLAILGACSIINRFTRIAGELFGLLIAMLFMQQAIKGAC

SEQ ID NO: 123024 - protein, 615 aa, Oryza sativa
  unsure (1)..(615): unsure at all Xaa locations
  Clone ID: PAT_MRT4530_25899C.1.pep
MDRQWMRADXRSKEFFDGLHNFLKVAEANKQNNGFIRCPSTKCKNQREYSTVRTIHIHLFETGFMPSYNVWTSHGEQGVRMEEDEVEDENIPDWAQYVGFEGNTTCEVEGADVEDDLGQMLQDIKEDCESEKEAQKLERMLADHKTPLYPGYEQGHKKLGTTLELLQWKAKNGVSDKAFGELLKLVKNILSEENKLPKTTYEAKNIVCPLGLEXPNDCILYRGEEYENLEACPVCNALXYNIRRDDPGDVDGQPSRKRIPAKVMWYFPIIPRLRRLFRNKEHARLMRWHAEERQQDGMLRHPADGLQWXNIDRKFKDFGKDPRNVRFSLSTDGMDPFGEMSSGHSTWLVTMCIYXPPWLCMKRKYIMMLIVIQGPKQPGNDIDVYLRPLVEDLKLLWKKXGVPVWDEDKQVEFNLRALLLVTINDWPALSNLSGQSNKGYKACIHCLDETESTYLKHCKKVVYMGHRRFLVTNHTVRKKGKHRKKPIFRNGKTLFEMVKDLKVVFGKGPGSQPIASEDGHAAMWKKKSIFWELPYWEVLDVRHAIDVMHLTKNLCVNLLGFLGVYGKSKDTLEARNDLKDTNQREDLHPEPKEKGSQCLSPSSYTLSKVKKESMF

SEQ ID NO: 123025 - protein, 79 aa, Oryza sativa
  unsure (1)..(79): unsure at all Xaa locations
  Clone ID: PAT_MRT4530_2589C.1.pep
GGAAFXIPXGWXGRPXGXLGLRTXGLXLAXXIQCFXWEXXDGVEFXXXESGGXXIPKXVPLEPXCRPRDPMGGVFCEXX

SEQ ID NO: 123026 - protein, 729 aa, Oryza sativa
  unsure (1)..(729): unsure at all Xaa locations
  Clone ID: PAT_MRT4530_258C.1.pep
STGIHTCIDYRQLNASTVKNKYPIPVIQDLLDKLQGAQYFSKXDLRSGYHQIRMHPTNIYKTAISTHMGHFEYLVMLFGLTNAPATFQALMNTILAPHLRKFVLVFFDDILIYSNSLSDHVTHVDIVLQILRHHLSAKPSKCVFGQQQVEYLGYIISNLGVATDSXKVHAVAASPVPISVTELRGFLGLAGYYRKSIKDFGIICKPLFTALKKNGFVXKEEQQQAFETIKLKLANAPVLAMPDFSEPFILETDASGTRIGAVLMQGGQPLAYISKATGPTAAALSTYDKEALAILEALKKWKHYFCGTLLIIRTDQASLKYINEQRITEGVQHKLLIKLSSYDYKIEYKKSKENKAADALSQVPPNGQLFATTLIIPTLITNVVDSYATDTKCQELESQLRINSQAHPPYTLTRGILRYKNQILVERATYQRAKQLFYWPGMKKXIIYFVKHCPVXKNKAVHNLALGLLQPLPLPDMAWTHITMDFVEGLTKSEGKDVIWVIVDRRTKYAHFVALSHPFTAEQVLTXFMENYYKLHGMTSVIVGDRDRIFTSNTWKDIFEEAGVKLHFSSAYHPQTDGXTERVNQCLENYLCCMTFTKPKKWKSMLAHAEXWYNTTFHTALGMTPYQALYGVPPPLLAESLLPSSPFADARNKEEERAVVTVAVKSSLLKAQARMKHFADMHRSERVRXVGDMVYLKMQPYRHTSLGLHSSLKLHCKYYGPFRVLERIG

SEQ ID NO: 123027 - protein, 91 aa, Oryza sativa
  Clone ID: PAT_MRT4530_25900C.1.pep
MAATLLGEHHPAGMVGACVAIAVAMGVPNMGPTVSMSSSSRSGGGASSRSQMRQRASLGGVAVAMASKCRRSAAAGERRDDGRSGGSNWRG

SEQ ID NO: 123028 - protein, 680 aa, Oryza sativa
  unsure (1)..(680): unsure at all Xaa locations
  Clone ID: PAT_MRT4530_25901C.1.pep
VDRQWMRADXRSKEFIDGVHYFLRVAEAKKQNNGFIRCPCTKYKNQREYSAVRTIHIHLFETGFMPSYNVWTSHGEQGVQMEEDEVEDENIPDWAQYDGFEGDTTCEVEGAVEDIDVDDDLGQMLQDIKEDCESEKEAQKLECMLADHKTPLYPGCEQGHKKLGTTLEFLQWNAKNGVSDKAFGELLKLVKNILPEENKLPETTYEAKKIVCPLGLAVQKIHACPNDCILYRGEEYENLEACPVYNALRYKIRRDDPSEVDGQPSKKRVPAKVMWYFPLIPQLIRLFRNKEHARMMRWHAKERQQDGMLRHLADGSXDKTSIEKFKDFRKDARNVRFGLSTDGXNPFGEMSSGHSTWPLMMCIYNLPXWLCMKRKYIIMPIIIQGPKXSGNDIDVYLRPLVEDLXLLWKKEGVHVWDEDKQEEFNLXAPLFVTINDWPALSNLSRQSNKGYKACTHCLQETESMYLKHCKKVVYMGHRQFLAATHLVQKKGKHFDQKADHRKKHIFRNGKTVFDMVKDLKVVFGKXPGSQPVASEDGHAAMWKKKSIFWELPYWKILDVRHAIDVMHLTKNLCVNLLGFLGVYGKSKDTLEARNDLKDMKQREDLHPEPKEKESQYLSPASYTLSKAEKESIFECLESIKVPSGYSSNIKRIISRNDKKFTNLESHDCHVLMTSGLSRVI

SEQ ID NO: 123029 - protein, 140 aa, Oryza sativa
  unsure (1)..(140): unsure at all Xaa locations
  Clone ID: PAT_MRT4530_25902C.1.pep
HEGSLQNLHFLNLSRCGVLQAVPKNIGNLSNLLHLNLSQCTDLESIPTSIGRIKSLHILDLSHCSSLSEXPGSIGGLHELQILILSHHASSLALPVSTSHLPNLQTLDLSWNLSLEELPESIGNLHSLKTLILFQCWSLR

SEQ ID NO: 123030 - protein, 50 aa, Oryza sativa
  Clone ID: PAT_MRT4530_25903C.1.pep
FHPIFVVYKAFFVFFLLGKKTCVPWSFLWCMGHMFRAFSRRVSLNWGDWS

SEQ ID NO: 123031 - protein, 94 aa, Oryza sativa
  Clone ID: PAT_MRT4530_25904C.1.pep
MRLLDDLTTIFGSRTSSPRRSRSNLTLAHIESGSREVGVIFQPLGSCSSTEIASYLSPSSNGSCANTETINYSDVDDEYDFDNFACYDDYYGLL

SEQ ID NO: 123032 - protein, 314 aa, Oryza sativa
  Clone ID: PAT_MRT4530_25905C.1.pep
MAAGTSSSSGGGSGPLVVSNGVLLAAVIFLFMVVVFVFLLYLYAKRYLGANPLLAPVSPSSRFLFLDASPFPRRGLPAAALRALPVTVYAKPAAARGEEALECAVCLSEVADGEKVRMLPKCDHGFHVECIDMWFHSHDTCPLCRAPVGPDAGGEGLPRVPRGGTRLAMDFPPCSPPNVLFWGTAHDDVANAGDRHPFHPPPPPPPLMAAPSTSSSASARRKESLVIDIPSRSAAAAAADSVTSSSASTPLPASRMADDMRSPVSARLRSLRRLLSRGKQAVVGPSFSPRGGGDIEQGLAGAPPKTPKTPPPAN

SEQ ID NO: 123033 - protein, 88 aa, Oryza sativa
  Clone ID: PAT_MRT4530_25906C.1.pep
PPPGPGPEFPGGPPGPRKGILFPSISRIGPLPARVGAPVVRAPVDKNLAQGGCYVTPRAPKSMAGGGPVAFVARKMGSPFSSPLVNDK

SEQ ID NO: 123034 - protein, 102 aa, Oryza sativa
  Clone ID: PAT_MRT4530_25907C.1.pep
WLEKSISEEQLVGLWVQERCPGIASPANYWKIIFLSEMHYSAGISWTFRSMCNSASGGFECGGFVRTSNLSSIDIQDGMEFISNMWLLFGFNYSVGHISFPG

SEQ ID NO: 123035 - protein, 121 aa, Oryza sativa
  Clone ID: PAT_MRT4530_25908C.1.pep
LGPLLKIFGGAWPPSVGWVLLRGRPFFFFFFLGKLGCLSGWIIGPCTQKRTGYSKIKPNRPSTPVRRARFNDERAPTVFFSAKTFPAQKGFFFWELVSYFGGIGPLAWPLLCFSKQPPGLT

SEQ ID NO: 123036 - protein, 53 aa, Oryza sativa
  Clone ID: PAT_MRT4530_25909C.1.pep
FFFLAILLCMKSVFNFAVVHFGNNTHTQGTITSRNSWSNCHLNCTCISFNQQE

SEQ ID NO: 123037 - protein, 532 aa, Oryza sativa
  Clone ID: PAT_MRT4530_2590C.1.pep
MAATSPLPRWAPTPSPSRPLWRWGWGGGATPDARADGGVTGWTSSFFAAVFPWTRRRRVDDRWAPSAGGGVGTFDGVEVPLPAAQAVSLPRAAADVVDDPAVFLTWEDVRVTVPGRTRGSPPARILDGITGHARPGEVLAIMGPSGCGKTTLLDTLAGRLGQEMNQTGVILINGRQEKLAFGTSAYVTQDNVLMSTLSVREAVYYSAHLQLPDTMLASEKRAHAERVIREMGLSDTMDTRIGGRITKGISGGQRKRMSICIEMLTRPRLLFLDEPTSGLDSAASYHVMSHITRVAAREGMTVIAAVHQPSGDVFDLFHGLLLLAYGRMVFFGTVSNATEFFTQSGFPCPHLRNPSDHFLRTINKDFDEGTMESSKANRKTAAEATNILTNAYHSTYSEKTANEIVEMKGMELQRAGEQESSGSRTPLPLSLLYELRCNVGARLSADDVTGVRPVTDRSFLSTARQFSMPHVCPSSYNDFLAMVAMKPGMNLAGTDIPTPGVSTPAPARDECLEALIIPTGRGEACDRPGRGV

SEQ ID NO: 123038 - protein, 126 aa, Oryza sativa
  Clone ID: PAT_MRT4530_25910C.1.pep
RARTRRARDGGRRPRPRRRRRRAIGCTRHGSGKKILWGRAPILSAGALRTCIVFSTLITSLAFLVPRSRNPAIRPSVPAIAARVVRRPSAVAVAVAVAVVITVAVNVDESPWRRLRRCCCLPIRRW

SEQ ID NO: 123039 - protein, 112 aa, Oryza sativa
  unsure (1)..(112): unsure at all Xaa locations
  Clone ID: PAT_MRT4530_25911C.1.pep
SGFLLENNNACFLIANEGFIGVLADELSRHCIGLXGLYPIGFYWIILLFCYIIISRLSLFTLSVRFYINHIADSXKSYRLELDQTDWHACISSNFGPTLELNRSPRPLYSST

SEQ ID NO: 123040 - protein, 278 aa, Oryza sativa
  Clone ID: PAT_MRT4530_25912C.1.pep
MDAAAAAEIAAKLRVLGVCAASTAITLAAAAAAAATCEPPRCALGNSMWYYYYLVLSGTFLAGMILIGASVWVSDDDPRRRRGCAGSKLLYAAAPPLIVAVVGLSLWQLYTAAAAGRVIGFHYFVSMREKQIKGRLPYHFMAAEAEVLVVAARPEAWAGAPAANRRRRLRKVASHGTTPPKNVFSGAEDGGHDWNVAASVSALEKREDWAASSGGERDKRNREGDLFRLLCSFTLKGRRTRGGETNGTVWWSLSQLQLFPKAASTRSCPKQSTASENL

SEQ ID NO: 123041 - protein, 336 aa, Oryza sativa
  Clone ID: PAT_MRT4530_25913C.1.pep
MALLGVLVGAVIIVVATAAAVSGSGLPVPGYDGLAIGFYHETCPQAEDLVLAEMREIVQEDRTLAPALLRFMLHDCFVRGCDASIMLKSREKIGERDANSSYSLRGYEQIERIKAKLEDECPMTVSCADIIVMAARDAVFLSNGPRYQVETGRRDGKVSCTIDADNDLPPPGSNIVDLKIYFSVKNLGWKDLVVLSGSHTIGRAQCGSFARDRLYNYSGEGRQDPSLNTAYAPELRKACVAGDPFDKTYVDMDPGSPYTFDLSYYRDVYRNRGLFVSDQALLNDKWTKQYVERMASADSTDEYFRDYAEAMTNMGRIEVLTGDNGEIRKVCGAYVD

SEQ ID NO: 123042 - protein, 47 aa, Oryza sativa
  Clone ID: PAT_MRT4530_25914C.1.pep
MVMQAFEDTFRSLAMVSDNEKVPIAVVENVLKEVKVSADGSLWSRMC

SEQ ID NO: 123043 - protein, 71 aa, Oryza sativa
  unsure (1)..(71): unsure at all Xaa locations
  Clone ID: PAT_MRT4530_25915C.1.pep
YSIPLAGVHRRSGEXVSGTSTFDVLHWEKAAIRFLGSALRDCSLFVHDGSSSSPLAXCAPSSTPATASNSC

SEQ ID NO: 123044 - protein, 89 aa, Oryza sativa
  Clone ID: PAT_MRT4530_25916C.1.pep
IFRRSLSLAGFVHLAAPRRSLEAPSSSAPAASHLSPPQRPVLVEHQYTPASSVAGGDSGGMEQGDGGALRRHHGGQSRNNAPSPCSPCA

SEQ ID NO: 123045 - protein, 101 aa, Oryza sativa
  unsure (1)..(101): unsure at all Xaa locations
  Clone ID: PAT_MRT4530_25917C.1.pep
TFXQESNDDGXLQNVDEEEEYRKXXAAVLSGGDDGTQACQGDENQDEDENDADFXLEIXEALESXGDENENYEDTNMKEKDGRRVKTRKNRPVHRVQAANE

SEQ ID NO: 123046 - protein, 59 aa, Oryza sativa
  Clone ID: PAT_MRT4530_25918C.1.pep
YTRPGYAKKAHQSVPKDWWTEDVSELPDPLNHAAAAATANGQSSELETAAAKQRRVLET

SEQ ID NO: 123047 - protein, 52 aa, Oryza sativa
  Clone ID: PAT_MRT4530_25919C.1.pep
MERGGPCDGLCRFRIHLGTRRDCPLPCEEWGLALFSPTPEYEYVSDGGFSEE

SEQ ID NO: 123048 - protein, 52 aa, Oryza sativa
  Clone ID: PAT_MRT4530_2591C.1.pep
KKYVGPPSIYLIHIFLTQQHIILANTSFTLNQKKIILNKNKSQPPPFKLKNF

SEQ ID NO: 123049 - protein, 594 aa, Oryza sativa
  Clone ID: PAT_MRT4530_25920C.1.pep
MKYMKLGTKPDTFYTEEAVRSVLSDVPADLIIHVNNTKYQLHKLKFCSHSENADTEGTGCHPYYQFPLLLKCGLLQRLCSDDDGVDGVDAAPVPVALHDIPGGEEAFELCAKFCYGISINIGAGNFVAAALAARFLRMTEAVAKGNLVAKLDSFFDSCILQGWKDPIAALTAAWRISGWSESRIVQPCVDAIVEKILTPPSKVTWSYTYTRPGYAKKAHQSVPKDWWTEDVSELDIDVFRSLLSTVCAARLLPPPFIGEALHVYACKHLPDPLNHAAAAATANGQSSELETAAAKQRRVLETIVTMIPGDAGAVTGRFLLRLLRVASYVGASPSTRAQLVRQAGAQLDEARAVDLLVPMPSSSDPPAYDVGAAEAVLEHFLALFQRPAPPDERRRMSAAMEKVARTFDEYLRAVALHADFPVGKFVDLAECLPDIARNDHDGLYHAIDTYLKEHPELSKADKKRLCRMIDCRKLSPDVRAQAISNDRMPLRTIVQLLFVEQERAMGGGGASGSNSAVAPDAIAMLAARKEKEDEPPAPAADHKSDVHRPRGDHGERARADGAAMTRSLSASTTKTAGAAAPRTAESRGSRMRNK

SEQ ID NO: 123050 - protein, 48 aa, Oryza sativa
  Clone ID: PAT_MRT4530_25921C.1.pep
IKELEGIFPPFFAKMSQGPGGDMAGGMAKDHPPPPGGKGAGPKIEGVA

SEQ ID NO: 123051 - protein, 120 aa, Oryza sativa
  Clone ID: PAT_MRT4530_25922C.1.pep
MVLGPSQCTMLVSYFLPPPRLRDAVEKRGYRPSSLDIGRCRSSSNRLVISYSRVADLAAASGKERKGGGALVDLTAASPGVIVAWVAAPPPNTVSTRRLGFLCPVPSPLGSLPFHPTQGF

SEQ ID NO: 123052 - protein, 167 aa, Oryza sativa
  Clone ID: PAT_MRT4530_25923C.1.pep
MHARGRFGQNAGGATTTLIAHGYREELPFSFRAPIIIFTAPAWGPHSLNPSTWDEDRAHKPLTERSGVNPSHLQRAPVARLHEPRQAAEVPRRRRRIKGNITQASASLSLRRYHIQASNHRMLAALQQREFIVGCGHLSGASYLDGGGDGGKPSPVCGDGDGNGKII

SEQ ID NO: 123053 - protein, 70 aa, Oryza sativa
  unsure (1)..(70): unsure at all Xaa locations
  Clone ID: PAT_MRT4530_25924C.1.pep
RATPLRPSASTALLTXSXATTTSAAVGGGXNHHKNGGVGGRWGWDAAXLSRVSTGLXSRDRGFFRGVPSS

SEQ ID NO: 123054 - protein, 64 aa, Oryza sativa
  Clone ID: PAT_MRT4530_25925C.1.pep
GPPKRPNRGNLPNPQKLAPNQKMARNHLATGMDFLAFYGEPKLVFLDPCCLNTQKCFFAKRVFL

SEQ ID NO: 123055 - protein, 70 aa, Oryza sativa
  Clone ID: PAT_MRT4530_25926C.1.pep
MAVDEQCRRGACLPPPPLSSHPAPLLGFADCGRPESPPEPPGVAARDRPNSPPVSHSALESAWCAAGRNQ

SEQ ID NO: 123056 - protein, 755 aa, Oryza sativa
  Clone ID: PAT_MRT4530_25927C.1.pep
MVRTTPCVALLLLLGVAFAARSASAITDGLLPNGNFEEAPDKSQLNGTRVTGRYAIPQWEISGFVEYIGSGQMQGDMLLPVPEGAYAVRLGNEASIQQRLTLTRGMHYSVTFSAARTCAQSELLNITVTPESGEVPIQTVYTSSGWDSYSWAFKARRSVVSLIVHNPGVSDDAACGPLIDSFAIKTLHPPPSTKGNLLKNGGFEEGPYIFPNTSWGVLVPPMDEDDYSPLSPWTILASTKSVKYVDAAHYAVPGGARAVELVAGMEAALLQEVCTVPGRSYRLEFSVGDAGDGCAGSLSVQAYASRGSVKVPYQSQGTGGYKRGLLEFTATDKRTRVVFVSMAYTTKPDGTLCGPVVDDASLVGVHSHRRLLLEQLVVERLSPEDRHMTTPAMGHGPVETGAESSIRGGMPRLLPNGNFEDGPDKSQLNGTVVTGRYAILNWEISGFVEYIESGHREQDMILAVPEGARAVRLGNDATIRQRLSVTRRAYYSITFSAARTCAQKEKLNMSVTPEFGVLPIQTVYTSSGWDSYSWAFRAKHSVVWLSIHNPGEEEDPACGPLIDSIAIKNLYPPPRTKGNMLRNGDLEEGPYIFPDATWGVLVPPIFEDEHSPLPGWMIMSDTKVIKYVDSPHHRVPQGARAVELVAGRETALVQEVATVPGRSYRLSFSVGDAGNGCKDSLAVEAYAARATAKVPYESQGTGGHKRAQLEFAAVANLTRVVFQSFNYHTKPDGTLCGPLVDDISLVSVRKRAARL

SEQ ID NO: 123057 - protein, 144 aa, Oryza sativa
  unsure (1)..(144): unsure at all Xaa locations
  Clone ID: PAT_MRT4530_25928C.1.pep
AHRMLQVVVAAARKXGWRVPADAAALLYEGDKLACGTRRLAHTEQFRWLDRAAVVTPTTDKDDDTGSRWRLCPVTQVEELKAVVRLLPVWASGIVMSAVYGQMSTMFVLQGNTLDPRMGATFKIPSASLSIFDTLAVLAWVPVY

SEQ ID NO: 123058 - protein, 524 aa, Oryza sativa
  unsure (1)..(524): unsure at all Xaa locations
  Clone ID: PAT_MRT4530_25929C.1.pep
VYTFRNGVRHNRMLEKIASKEPKTTAELFKLADKVARKEEAWAWNSPSTGAAAAAAPESVTRSKRRDTRGKRKPARSDDEGHVLAADGPSRAPRKEKATGDKPSSTAPSGEGRSADKWCSVHNTYQHSLADCRSVKNLVERFRKADEKRQNRREGKAPATPANDWRGEAKKKAPADDGDDSEDLEFQIPQGTVATLDREACAHTSRRGFKVTRCELLAAVPTHKAARKARWSEVKLTFDQSDHPTMLARGGKLALVVSPTIHNVKMKRVLVDGEASLSIISPAAFDALKAPGMKLQPSLPIIGVTSGHVASGPALVKFMAATHYAYLQMKMPGPSGPITVFGDVKESALVSFLRANSDVFAWKPSDMPGVPREVIEHRLAVRPDARPIRQKVRRQAPERQAFIREEVTWLLEAGFIREVIHPEWLANPVVVPKANGKLRMCIDCTDLNKACPKDPFPLPRIDQIVDSTAGCDLLSFLDAYSGYHQIRMAREDEEKTAFNTPVETFXYTTMPFGLKNAGPTFQRM

SEQ ID NO: 123059 - protein, 288 aa, Oryza sativa
  unsure (1)..(288): unsure at all Xaa locations
  Clone ID: PAT_MRT4530_2592C.1.pep
RCPRDTSSCRSRSSSSATTSTTGSPAGRSRSSGTSSGKPTSTAPTRRRXRRRIGRTATTASRGTSSPSPSGRAAGAAPAPPAGSTAAASRAAARGTTRSAAASSRATATARRSSTAPPGTRRRTGSWRRSPATCRRRSPTRASWSSARSTSRRGPRRRRPTRRNAKKPTWFPGPRGSERRKPPATTRRRRRRHSPTSDARTPAAARRLKRPPRWTTAARRRHTRRTTRPMPPPTTTATLMPSSQMLTTAATTASASTQTGSWFSAATATVASGRRDRRHWQCRTPTGR

SEQ ID NO: 123060 - protein, 74 aa, Oryza sativa
  Clone ID: PAT_MRT4530_25930C.1.pep
ALDFEMFRCFRSPIFSLHRPSVRACVPPRSSFLVFLYGVHHSIFIRPRKKKKKKKKLETSSLSLPRADLQPGDP

SEQ ID NO: 123061 - protein, 1568 aa, Oryza sativa
  unsure (1)..(1568): unsure at all Xaa locations
  Clone ID: PAT_MRT4530_25931C.1.pep
PSPHASGDAGGSRGPRHRRRNSQTPPRRDPSRREDSTRSGGSAHSPPPGGGKPRRVGVRHRLTYGDGGSPRGALQAAGALLRHPPVNSGPETPVQRWLDDVANLVTTAQRQLAAAGRPTAAGTSRTPTTLSSSARRRAHRSATASRRSTAPTSSGASGSRRHHDGLYGEQDARINIERRRDERRAARMGEGASSSRVPRSSSRGGPPPTFTXGGTGCRAFVASLRNVRWPPKFRPNLTEKYDGNINHSEFLQIYTMIIVAAGGWGGHDQVMANYFPMALKGQARGWLMTQPPDSIHSWKDLCQQFIMKFQGTYPCLGEEADLHAVQRKADESLRSYIHRFCQVRNTISCIPAHAVVYAFRNGVRHNRMLEKIASKEPKTTAELFELADKVVRKEEAWVWNSPSTGAAAAAAPESVPHSKRRDRRGKRKPARSDDEGHVLAADGPSRAPRKEKATGDKPSSTAPSGEGRSADKWCSVHNTYRHSLADCRSVKNLAERFRKTDEEKRQSRREGKAPATPANDRRGEAKKKAPQMTATTGTVTTLDRGACAHTSRRGFKAMRCELLAAVPTHEAARKARWSEMKLTFDQSDHLTSPGMKLQPSLPIIGMTPGHTWPLGHVELTVTFGDSTNFRTERIDFDVADLNLPYNAVQGRPALVKFMATTHYTYHQMKMPGPNGPITVCGDVKVALACAEQRTDNLAAATKPQAPEASASRASKKRLASADEESTFISFLRANSDVFAWKPSDMPGIPREVIEHRLTVRPGAXPIRQKVRRQAPERQAFIREEVTRLLEAGFIREVIHPEWLANPVVVPKANSKLQMCIDYRDLNKACPKDPFPLPRIDQIVDSTAGCDLLSFLDAYSGYHQIRMAREDKEKTTFITPVGTFCYTTMPFGLKNIGPTFQRMTRITLSNQIGRNIEAYVDDLVVKTRHQDTLLQDLAKTFDSLRSTCMKLNPEKCVFVVERDEGDPRAPLTGDGPSSPDSLVPEAPNPREGPEAPVEGRETLAGGPEAYTPDMARDPPXAPEHGRPGPAAPNNKDRPHXKVQRPIYIVSEALRDAKTRYPQAQKMLYAVLMASRKLRHYFQAHRISVVTSYPLGQIFHNREGTGRVVKWAIELAEFDLHSKPRHAIKNQVLADFIAEWTPVDDPVPSNVPFLPGDGGDPNADIRAGYWVMHFDGSLHLQGAGVGVTLTSPSGDVLKYVVQLDFRAMNNMAEYEGLLAGLRAVAGMGIRXNTLPEGRAKPEKLTRISKQYVLVEGTLYRRAANGILLKCISREQGVELIADAHQDILGPFKAAQGGYXHLYVAIDKFTKWPEAYPVVKIDKHSALKFIRGISSRFGVPNRIITDNGTXFTNELFGDPKSNGQVERANTKILKGLKTKTYNVLKKHRDSWLEELPAVLWANRTTPSRPTGETPFFLVYGAEAVLPSELSLGSPRVVLYDEANQDDLRRDDLDYLEECRRRATLRAXRYHQRHVLARSLQVGDLVLCRVQSRLGLSKLSPMWEGPXKSVGVPRPGSVRLTXEDGTGLPNPXNIENLRRFYPXVARLSLSWCSGQPPHXPSACAGLAWGYHC

SEQ ID NO: 123062 - protein, 1144 aa, Oryza sativa
  unsure (1)..(1144): unsure at all Xaa locations
  Clone ID: PAT_MRT4530_25932C.1.pep
GLYGEQDARINIERRRDERCVARMGEGASSSGVSRSSSRGSPSPTFTPERTGCRAFVASLRNVRWPPKFRPNLTKKYDGSINPSEFLQIYTTIIVAXGGDNWVMANYFRMALTGEEADLHAVQWKDDESFRLYIQRFCQVRNTIPCIPTHAVVYAFRNGVRHNRMLEKITSKEPKTTAELFELADKVARKEEAWAWNSLSTGAVAAAAPESVPRSKRRDRRGKRKPARSDDEGHVLVADGPSRVRAPCKEKATGDKPSSTAPSGDTEGALVRGEAHLRPERPSDSARSGREVGPHGLPDHPQRQDEACPGRRGGGGASLSIISPVAFDALKALGMKLQPSLPIIGVTPGHTWPLGHVELPVTFGDSTNLRTERIDFDVVDLNLPYNAVLDRPALVKFMATTHYANLQMKMPGPSGPITVFGNVMVALACAEQRADNLAVATEPHAPEASVSRVSKKRLALADEVPVKEIPLGDDPSKTAKTAKFGDAYSGYHQIRMAREDEEKTAFITPVGTFCYTTMPFGLKNAAPTFQRMTRINLSNQIGRNVEAYVNDLVVKTRHQDTLLQDLAETFDSLSSTRMKLNPEKKLHHYFQAHRVSVVTSYPLGQILHNQEDTGRVVKWAIELAEFDLHFEPWHAIKSKVLAVFIAEWTPVDDPVSSNAPSLPRDGGDPNVDIRAGHWVMHFDGSLNIQSARTGVTLTSPSGDVLKYVVRLDFRATNNMAEYEGLLAGLRAAAEMGIRHLLVLGDYQLFVNQVSKEYQSTDPQMDAYVREVRRMERHFDGLELRHVPRRDNAVADELSRIASARAPLPPRTFEERLVQSSARFDPPRDPGATASAPTPDDPRASRPDGVNPDPPRQVVWMTDIRAYLDNNTLPEDRAEAEKLARVSKRYVLVEGTLYRRAANGILLKCISREQGVELIADAHQGGYQHLYVAIDKFTKWPEAYPVIKIDKHSALKFIRGITSRFGVPNRIITDNGTQFTSELFGDYCDDMSIKLCFASPAHPKSNGQVKRANAEILKDLKTKTYNVLKKHGDSWLEQLPAVLWANQTTPSHTTGETPFFLVYGAEADLPLELSLGSPRVALYDEANQDDLRRDDLDYLEERRRRPALRAARYQQRLRRYHQRHVRARSLQVGDLVLRRVQSRLG

SEQ ID NO: 123063 - protein, 289 aa, Oryza sativa
  Clone ID: PAT_MRT4530_25933C.1.pep
MALEISMEGIEARARELGVDLSTVDLDSVTLPAGEDFGILSDDEDLLRIDDPMELEMGFANVVVVDNLPVVPPEKFEKLENVIRKIYSQIGAIKEGGLWMPVNPETKKTYGYCFIEYNTPQEAELAREKTNGYKLDKSHIFAVNMFDDFDKYMKVPDEWMPAEIKPYTPGENLQKWLADEKARDQFVIRAGTFTEVYWNDARQKMPELVFQKQYWTDSFIQWSPLGTYLATVHRQGSQVWGGDDKFERLMRFAHAQVKLIDFSPGEKYLVTYSSHEPSNPRDTHRGVLN

SEQ ID NO: 123064 - protein, 509 aa, Oryza sativa
  unsure (1)..(509): unsure at all Xaa locations
  Clone ID: PAT_MRT4530_25934C.1.pep
PACRRSRLIGRAAAPPRRLYLWRSGGRCVRGLASGRRHRSWSPTPSGSEDGGGRRGPRNRRRNSRTPPRRDPPRRXDPTCSGGSALSSPLGGGKPRRVGARRRLTYGDGDLPRGALQVAXALLRHPPMNAEPEAPVQRWLDDVANLVTTAQQXLAAGGRSTTTGTSRTPTALSSSARRRARLSATXIERRRDERRAARMGEGTSSSGVPRSSSRGGPPPAFTPRGTGCRAFITSLRNVRWPLKFRPNLTEKYDGSINPSKFLQIYTTIIVAVGGDDRVMANYFPMALKGQARGWLMTQPPDSIHSWEDLCQXFITNFXGMYPRPGEEADLHAVQRKDDESLRSYIQHFSKEPKTTAELFELVDKVARKEEAWAXNSPSTGAVAAGAPRKEKATGDKLSSTAPSGEGQSADKWCSVYNTYRHSLADCHSVKNLAERFRKAVEKKRQSRREGKAPATPSNDRPXQKAPTDDGDDSEDLDFQIPQGTVATLDLGACAHTSRRGFKAMRRVMS

SEQ ID NO: 123065 - protein, 322 aa, Oryza sativa
  Clone ID: PAT_MRT4530_25935C.1.pep
IPQGTIATLDGGACAHTSRRGFKAMRRELLAAVPTHKAARKARWSEVKLTFDQSDHPTVLTRGGKLVLVVSPTIHNVKMKRVLVDGGTSLSIISLAAFDALKAPRMKLQPSLPIIGVTPGHTWPLGHVELPVTFGDSTNFRTERIDFDVADLNLPYNAMPGPSGPIIVFGDVKVALACAEHRADNLAAAMEPQVPEASASNASKKHLASANEESALVSFMRANSDVFVWKPSDMPGVPREVIEHRLAVRPDARPIRQNVRRQAPERQAFIREEVTRLLEAGFIREVIHPEWLANPVVVPKANGKLRMCIDYMDLNKVLLFSA

SEQ ID NO: 123066 - protein, 50 aa, Oryza sativa
  Clone ID: PAT_MRT4530_25936C.1.pep
NLAAGVECVLHQTLSIGPVSVLDDELVLPIRRCRLICPLHNRPAGAGGVG

SEQ ID NO: 123067 - protein, 1081 aa, Oryza sativa
  Clone ID: PAT_MRT4530_25937C.1.pep
MAPTSSGASGSRRHHDGLYGEQDTRINIERRRDEHRAARMGEGASSSAVPCSSSRGGPPTTFTPGGTGCRAFVASLRNVRWPPKFRPNLMEKYDGSINPSEFPQIYTTIIVAAGGGGDDRVMVNYFPMALKGEEADLHAVQWKDDESLRSYIQRFCQVRNTIPCIPAHAVIYAFRNGVRHNRMLEKITSKEPKTTAELLELADKVARKEEAWAWNSPSTGAAAAAALESVPHSKQRDRRGKWKPACSDDEGHVLAADGPSRAPCKEKATGDKPSSTAPSGEGRSADKWCSVNNTYRHNLADCRSVKNLAERFRKADEEKRQSRREGKAPATPANDRRGEAKKKAPADIAWKPSDMPGVPREVIEYRLAMWSGARPIRQKVRRQGPEWQAFIREENAGPTFQRMTRITLSNQIEHNVEAYVDDLVVKTRHLDTLLQDLAETFDSLRSTRMKLIPEKCLFAPGPEEPLLLYLAATPHTMSAALVVERDEGDPHCEPGYEEGPGAPLTSDGPSSPDGPVPEAPNPGEGPKAPVGGREALAGGLEAYNPDMAQDPPEAPDNGSPRPAAPDNKDRPRRKVQRPVYFVSEALRDAKTRYPQAQNMLYAVLMASRKLRHYFQAHRVSVVTSYPLGQILHNREGTGRVVKWAIELAEFDLHFEPRHAIKSQVLADFIAEWTPVDYPVSSNVTSPPEMEETQTPTFVPGTGLCTSTAPSTFKSPKSTSAPTRKWTHTSAKYDAWNATSTDSSSGTCPGATVQLLTSCRALPPGNFEKRLAQSSARMDPPRDPDATASGLSPDDPRASGPEGVDPDPPCQVVWMTDIRAYLDNNTLPEDRAKAEKLARISKRHVLVEWTLYRSAANGILLKCIFWEQGVKLIADAHQGFYWPTLLQDTQEWVRRCKFTKWPEAYPVVKIDKHSALKFIRGITSRFRVPNRIITDNDTQFTSELFGDYCDDMGIKLCFASPAHPKSNGQVKRANAEILKGLKTKAYNVLKKHGDSWLEELPAVLWANRTTPSRATRETPFFLVYGAEAVLPSELSLGLPRVTLYDEANHDDLRRDDLDYLEERRMRAALRAARYQQSLWRYH

SEQ ID NO: 123068 - protein, 128 aa, Oryza sativa
  unsure (1)..(128): unsure at all Xaa locations
  Clone ID: PAT_MRT4530_25938C.1.pep
LGPFKAAQGGYXHLYVAIDKFTKWPEAYPVVKIDKHSAPKSNGQVERANTKILKGLKTKTYNVLXELSLGSPRVVLYDEANQDDLRRDDLDYLEECRRRATLRAALPPAPRLRTLSGIGRPENRRKGA

SEQ ID NO: 123069 - protein, 66 aa, Oryza sativa
  Clone ID: PAT_MRT4530_25939C.1.pep
RPYTGPLARLGNVTPGGLIARRHTTSELMNDTYVPYSTVTYSRLDESELVDHEHQCRDATQVPILL

SEQ ID NO: 123070 - protein, 85 aa, Oryza sativa
  Clone ID: PAT_MRT4530_2593C.1.pep
GALIVLMYRSQCEVSPQCPRCHSSTLFTPVELDAHRLQSSVLLLLCIISMSSMSVRDPGLEVSCFYAFCISISVLSHPFAPEPFK

SEQ ID NO: 123071 - protein, 1131 aa, Oryza sativa
  unsure (1)..(1131): unsure at all Xaa locations
  Clone ID: PAT_MRT4530_25940C.1.pep
MIMVEVLEEEVVVHTPTPSGSEDGGGRRGPRNRRRNSRTPPRRDPPRRXDPTCSGGSALSSPLGGGKPRRVGARRRLTYGDGDLPRGALQVAGXLLRHPPMNAEPEAPVQRWLDDVANLVTTAQQXLAAGGRSTTTGTSRTPTALSSSARRRARLSATAXRRSTAPTSSRVSGSRRHHGGLYGEQDTRINIERRRDERRAARMGEGTSSSGVPRSSSRGGPPPAFTPRGTGCRAFITSLRNVRWPLKFRPNLTEKYDGSINPSKFLQIYTTIIVAVGGDDRVMANYFPMALKGQARGWLMTQPPDSIHSWEDLCQXFITNFXGMYPRPGEEADLHAVQRKDDESLRSYIQHFCQVRNTIPCIPAHAVVYAFXNGVQHNRMLEKITSKEPKTTAELFELVDKVARKEEAWAXNSPSTGAVAAAAPKSVPRSKRRDKRGKRKPARSDDEGHILAVDGPSRAPRKEKATGDKLSSTAPSGEGQSADKWCSVYNTYRHSLADCHSVKNLAERFRKAVEKKRQSRREGKAPATPSNDRPXQKAPTDDGDDGTVATLDLGACAHTSRRGFKAMRRELLAAVLTHETARKARWSEVKLTFDXSDHPTAPRLKLQPSLPIIGVTPGHTWPLGHVELPVTFSDSTNFRTKRIDFDVADFNLPYNAVLGKPALVKFMAATHYAYLQMKMPGPSGPITVFGDVKVALTYVEQRADNLAAATEPQAPEASAFRASKKRLASTHEESALISFLRANSDVFAWKPSDMPGVPREVIEHLLAMRPDAXPIRQKVRRQAPERQAFIREEVTQLLEAGFIREVIHPEWLANPVVVLKANGKLRMCIDYTDLNKACPKDPFPLPRVDQIVDSTAGCDLLSFLEAYSGYHQIRMAREDEEKIAFITPVGXFCYTTMPFGLKNAGPTFQCMTRITLSNQIGRNVEVYVDDLVVKTRHQDTLLXDLAETFDSLRSMHMKLNPEKCVFGVPADEKGPGALVTGDGPSSPDCPEPEAPNPXEGPEAPLGGREALTGGPETYNPDVARDPPEAPEHGRLGPAAPDNKDRPHRKVQRVYFVSEALRDAKTRYPQVQKMLYAILMALRKLRHYFQAHRVSVVTSYPLWHLVGRPLCTGSXVKWIRALSEYDPLLAPH

SEQ ID NO: 123072 - protein, 251 aa, Oryza sativa
  Clone ID: PAT_MRT4530_25941C.1.pep
MLAVFDPTVAKCPEGLRSPPVAGGAVAAGGAGALMKGFAGAHADAVTVSLGPAGALAYSAANQSPLVPRLFGAVNDIFCLFQGHIENIASLKQHYGLSKTATEVTILIEAYRTLRDRGPLPASQVVRDLSGKFTFILYDTLSKSTFVAADADGSIPFFWGVDSENHLVFSDNVDLLKASCGNSFAPFPKGCFYTTSGGLQSFEHPLNELKPVPRVDSQGQMCGSNYKVDSEAKKDSGIPRVGSAADWSNHF

SEQ ID NO: 123073 - protein, 479 aa, Oryza sativa
  unsure (1)..(479): unsure at all Xaa locations
  Clone ID: PAT_MRT4530_25942C.1.pep
RWPLGHVELPLTFGDSTNFRTERIDFDVADLNLPYNAVLGRPSLVKFMAAYLQMKMPGPSDPITVFDDVKVALACAEQRADNLVAATEPQPSESSASRASKKRLASADEVPVKDKSTLVSFLRVNSDVFAWKPSDMPGXPREVIEHRLAVRPGARPIWQKVRRQAPERQAFIREEVTQLLEAGFIREVIHPEWLANPVVVPKANGKLRMCIDYTDLNKACPKDPCPLPRIDXIVDSTAGCDLLSFLDAYSGYHQIRMXEKTAFITPVGTFCYTTMPFGLKNVGPTFQRMTRITLSNQIGRNVEAYVDDLVVKTHHQDTLLQYLAETFDSLRSTRMKLNPEKCVFGVPVGKLLGFLVSSQGIEANPEKIRAIEXMRPPSKLRDVQCVTGCMAALSRFISRLGERALPLIKLLKRPGPFVWTEEAEQALNXLKAYLTSPPXLVALGPEEPLLLYLAATPHAVSAALVVERDEGNTRREPGH

SEQ ID NO: 123074 - protein, 159 aa, Oryza sativa
  unsure (1)..(159): unsure at all Xaa locations
  Clone ID: PAT_MRT4530_25943C.1.pep
LGLFGAANDIFCLFQGHIENIARLKQHYVLSKTATEVTILIDAYRTLRDRGPLPASQVVRDLSXKFTFILYDTLSKSTFVAADADGSIPFFWGVDSDNHLEFSDNVDLLKASCGNSFAPFPKGCFYTTSGGLQSFEHPLNELKPVPRVDSQAQMCGSNY

SEQ ID NO: 123075 - protein, 68 aa, Oryza sativa
  Clone ID: PAT_MRT4530_25944C.1.pep
LRGRHTHGERHVGGVQVAYRCLLGRSSTSWSAPPRKPGGAGSAPSTSDAIYSPSARDHRPGPNYIGTL

SEQ ID NO: 123076 - protein, 143 aa, Oryza sativa
  Clone ID: PAT_MRT4530_25945C.1.pep
MASAGGGSGGAALGRAGSAAIGSGYGGDGRRLGDLGSAARHPLLTAADNDDDKATLPPPQHRGGGAARPPRADPVPPTIRVLVTGWYLLVLYVQFAMPMPMPVPQFAMQGFKALYGHMRGFKVLYGCGYKYCATNVCFSIGQV

SEQ ID NO: 123077 - protein, 119 aa, Oryza sativa
  Clone ID: PAT_MRT4530_25946C.1.pep
TPSTSCPCTATRGVTCSRPCSCGRKRGRTTGRAPCPSSTAPPASSSPASPPIALVTMSMPSASATSRLRKLSLSTIIKAESSSLYPLLSQNEAEKQKSQKFYQRSVGLGSCPSKLSEVR

SEQ ID NO: 123078 - protein, 56 aa, Oryza sativa
  Clone ID: PAT_MRT4530_25947C.1.pep
MASSSITSYKRVEMTNHLDLEQCWAKRPSNGWQILLVPLGLTEEDSRRVPTLVGAC

SEQ ID NO: 123079 - protein, 97 aa, Oryza sativa
  Clone ID: PAT_MRT4530_25948C.1.pep
YNFFLVGGIDRISALSNDLIQRILHFALAREAASIMLSSAPHRRRLMPLPPPPHSWKPPATSALVRRRRKPPLSPNPVERRVLPLPSSPLPPLERLP

SEQ ID NO: 123080 - protein, 55 aa, Oryza sativa
  unsure (1)..(55): unsure at all Xaa locations
  Clone ID: PAT_MRT4530_25949C.1.pep
VLGGPHSKSCKSNQCQYPRDLFPCKNCRQGLSPTPXRSHPNLCFPSSRPNLVSRF

SEQ ID NO: 123081 - protein, 100 aa, Oryza sativa
  Clone ID: PAT_MRT4530_2594C.1.pep
MEGGSGCGGGTGPAATRVRRRLRVQRKERRRRRWWPLSHVLVTSGAAQGTIPSLHGRVVTARPLALLPPFPRPGLRLPLFEPRRRVGRDDDDAVAKRMGG

SEQ ID NO: 123082 - protein, 583 aa, Oryza sativa
  Clone ID: PAT_MRT4530_25950C.1.pep
MATARARAALVFVALLQMAAVVVVRASHVVYPELQSLEAKHVDGKLRTGYHFQPPKHWINGPMYYKGLYHLFYQYNPKGAVWGNIEWAHSVSTDLIDWTALEPGIYPSKTFDEKGCWSGSATVLPSGVPVIMYTGIDPDERQVQNVAYPVNLSDPYLREWYKPDYNPIINPDGGINASAFRDPTTAWYGPDGHWRLLVGSKVNMKGLAVLYRSRDFKKWVKAHHPLHSAHTGMWECPDFFPVAVAGGSRHYRRGVDTAELHDAAVAEEVKYVLKVSLDLTRYEYYTVGWYDHATDRYVPDAAFPDNDYGLRYDYGDFYASKSFYDPAKRRRIVWGWANESDTVPDDRRKGWAGIQAIPRKLWLSADGKQLVQWPVEELKALRAKHVNVTDKVIKKGNYFEVTGFKSVQSDVDMAFAIKDLSKAEEFDPAWRTDAEALCKKLGSDVDGGVGPFGLWALASGDLKERTAVFFRVFKANDSSHVVLMCNDPTRSSYESKIYRPTFAGFVDVDIAKNKQIALRTLIDHSVVESFGARGKTCILTRVYPRKAVGDDAHLFVFNNGESDVKVTNLDAWEMKTPKMNAEE

SEQ ID NO: 123083 - protein, 42 aa, Oryza sativa
  Clone ID: PAT_MRT4530_25951C.1.pep
QAPLLANHYARLPTNISHGHHASLKAGHDCRRCTSIGPQPCS

SEQ ID NO: 123084 - protein, 121 aa, Oryza sativa
  Clone ID: PAT_MRT4530_25952C.1.pep
RGRGHRIRPSRRRRRRIRTTEGRRNDGIQMRRSEAGHRIRGEEEVVGSAPPVAGDGGSAQQWGGETTGSRRGGVKPSQSGNASSKKLNPAAARGKRRHQQQQQRRLGAAGGGMVDLVGNNY

SEQ ID NO: 123085 - protein, 1595 aa, Oryza sativa
  Clone ID: PAT_MRT4530_25953C.1.pep
MGTPGDQGILDEFSTNPFHAKKNKNWILIADNEVIANVAASYMSFMSALNLGLWLQSGVGTRAAVDDSIKKATPDRWLVMGAIALRAEPEFWARLVQRLDVCTFTRESGSPPGVVFLNSGERSDSGEGRNTWYQSRRSSGGGMSRHSEPHGGRSHTPPRRRRLSISPEPTRGRGGPKIIVRRTIKEANATIQYPTLTRTNYDEWAMLMQVNMEAAGIWYAVEPYPDEEVEYRDDRLALAAILRSVPSEMLPTLRGKRSARAAWDAIKTIRVGVERVRESKAQQLRREFAALTWKEGETAEDFSVRITGLANNLRTLGDNISDADVVRKMLDVVPEHLEQIAVAVETLLDLNTVSVEEVTGRLRAVEQRRHRSAPVVNNQGRLLLTQEEWMAKLKNPGASGEKGTPSGSGGGGNKRTGGSRRHDRGKGGSRQAAGPGDGSNQPKKTDKCRYCGKKGHWAKECRSRLRDEAHLAQGEEEEEPMLMVATAQVNAISSSSPPRFTSLPALEQIHLDESKLFVQLGGEHGGEATRWILDTGATNHMTGTRSAFSELNTGIRGTVKFGDGSVVGIEGRGTVLFKCKDGEHQALEGVYHIPRLTTNIVSLGQLDEEKFKWSCEDGVLKIWNKQRRLLAKVVRSPNRLYVVKLNIGRPVCLAAQGGDIAWRWHARFGHLNFRALEKLGRAVMVRGLPLINHVDQVCDSCLVGKQRRLPFPSKAKYRAKEKLELVHGDICGPVTPATPSGNKLFLLLVDDLSRYMWLILLSSKDQASVAIKRFLACAEAEAGRKLRTLRTDRGGEFTAHAFAEYCAEHGIQRHLTAPYTPQQNGVVERRNQTVMGMARSMMKAKSLPGWFWGEAVNTAVFLLNRAPTQCVDGKTPFEVWHGVKPPVHFLRTFGCVAHVKNGGQRLAKLDDRSMPMVFVGYEAGTKAYRFYNPVSRRVHVSRDAVFEEERSWEWGAEKGAGPDDDIEPFVVEHLATGPTGQGGPVAATPTATQRSTSAPAPMAPPATPSQAGTPTHGAGPRTPASASSPAIEFASPPQGDLDLDNDHDDDVPLRFRTVDNLLGASSPPGLAEREVTEGLMVAIEDEPATAEEAKQVKEWREAMIEEMASIEHNKTWSLVELPAGQRAIGLKWVFKIKKDEHGNITKHKARLVAKGYVQRQGIDYEEVFAPVARIESVRVLLAVAAHRSWSVHHMDVKSAFLNGDLAEEVYVQQPPGFVAAGHERKVLKLHKALYGLKQAPRAWNSKLDSSLLMLGFARSECEHGLYTRSDGEKRLVVGIYVDDLIITGGSTEVINTFKTEMKTLFRMSDLGVLSYYLGIEVRQGRRGIELLQAAYAKKILEKAGMGTCNPCATPMEARLKLSKQSTSPAVDATEYRSLIGSLRYLMNTRPDMAFAVGYLSRFMENPRQEHLAAMKHLLRYVAGTIDYGLVYTSGDTEFNLVGYSDSDMAGDIDDRKSTSGIIYFLGGNPVAWQSQKQRVVALSSCEAEYIAGAAAACQGVWLRRLLQDVVGVSGPPPQLKMDNQSAIALSKNPVLHDRSKHIDTKFHFLRECVDSGAVRLAFVSTQAQLADIMTKALGRSKFQELRELIGVTKLK

SEQ ID NO: 123086 - protein, 124 aa, Oryza sativa
  Clone ID: PAT_MRT4530_25954C.1.pep
MASSVLQPGVPVTLQELEPSSESFRQGASLRVTGVLQSYDLNSAIAVIQDGGASLKVDTQNLREISFRTNSTYQFIGELLIKPDNDAVLQARVGRNVDGIDLNLYQQSLLIRRQYEAQLRSRRA

SEQ ID NO: 123087 - protein, 199 aa, Oryza sativa
  unsure (1)..(199): unsure at all Xaa locations
  Clone ID: PAT_MRT4530_25955C.1.pep
KIFSNAIVVSYSHTLPVIPYNAFNPPPPEFALMKSDPPIAQRRSPRWKTSQASGGPKIRSIDQPDTSKSTNQSDSRKRKLVVSDDEGDDAEKAGNKGMTGKQPRXANPKKKTSSCPMPKIRKSSRKPSDIDPSGKDPEPTDTETGPSKETGPTAEDRPSDNQPATDNVETSNEPPTGNHSAEAGVGANQEPPTSNRLET

SEQ ID NO: 123088 - protein, 109 aa, Oryza sativa
  Clone ID: PAT_MRT4530_25956C.1.pep
GAEKQKGYRLIKPYKGGAHGEKETGKRVNRTQTGLTNPTKKLGPLISPQQVGLNIRWGQRTLYVSPQGARTANYLTRLLGTCAGSLKVKGWGQKKWDNWGEEPKRGPKG

SEQ ID NO: 123089 - protein, 48 aa, Oryza sativa
  Clone ID: PAT_MRT4530_25957C.1.pep
MAGGSRRRSLAIEEEWVPATGSDDRTVAEGQTGSTVVATQLGGDPSAV

SEQ ID NO: 123090 - protein, 62 aa, Oryza sativa
  unsure (1)..(62): unsure at all Xaa locations
  Clone ID: PAT_MRT4530_25958C.1.pep
MCDYLFLRFIQGHKANALATRCSQILLYYVPGQGGLKCSXGLSPPLHPPQTYCGIRSNPWRL

SEQ ID NO: 123091 - protein, 385 aa, Oryza sativa
  Clone ID: PAT_MRT4530_25959C.1.pep
MAAQRDDEAGWSAEAARRVWGGAVPLQVHLHDADVTTLPPPPPFLTLGPRIGYLPLLVPIIKAHFSSTLPPGIDTVWFEYKGLPLKWYIPIGVLYDLLCADPERPWNLTVHFRGYPSEILTLCDGEDSVKWSYMNSLKEAAFIITGNSKNVMNMSQADQGALWQSVMKGNLDGYMNISTRLKLGPFEEDCLVRTSSVEGQQGSDEPESPGSGKPFILWLGRVPVRLYVRSVQEDLYDLEDALPVGDWESISYINRPFEVRREEGRSYITLEHALKTLLPEFFSSKASRIPDDSETAPQAPDSAPNDDSDVTPRSCEKLESSASSSPQEANVANKGKIVKLVRVQGIEVDMDIPFLWVANNLKNPECYLHICVYVGTRKREPKDGR

SEQ ID NO: 123092 - protein, 66 aa, Oryza sativa
  unsure (1)..(66): unsure at all Xaa locations
  Clone ID: PAT_MRT4530_2595C.1.pep
NPRANTPEGRPTLSRLWHLPGQAXHHSHSQLARGKDTIMENWCDQXFSEVELSRFLQTHFDGPNPF

SEQ ID NO: 123093 - protein, 74 aa, Oryza sativa
  Clone ID: PAT_MRT4530_25960C.1.pep
NYWADNNPCRISLANMNFYVHFFQKQPPDAAPSIGASLSAIHYPSTPLLVSLNTSCQERSRLPHNLIYPIHLKR

SEQ ID NO: 123094 - protein, 170 aa, Oryza sativa
  Clone ID: PAT_MRT4530_25961C.1.pep
MAAPPARARADYDYLIKLLLIGDSGVGKSCLLLRFSDGSFTTSFITTIGIDFKIRTIELDGKRIKLQIWDTAGQERFRTITTAYYRGAMGILLVYDVTDESSFNNIRNWIRNIEQHASDNVNKILVGNKADMDESKRAVPTAKGQALADEYGIKFFETSAKTNLNVEQVF

SEQ ID NO: 123095 - protein, 172 aa, Oryza sativa
  Clone ID: PAT_MRT4530_25962C.1.pep
RTRGRWNLRNRRPAGEVPAAGRGPRRGVTARGSRRDGEAGGGGQPPNLLLLLLLLAAACSGCGAFLLPPPRGVGGEEARRTGRRSGGAGSGGRRRRSSRGRLPPARQPQPPGMHPAAVRGSSSRPAPWPGRRRARRRWGRRRHHFFFEDDATAAIEAAATATAWRPPPPRPP

SEQ ID NO: 123096 - protein, 207 aa, Oryza sativa
  Clone ID: PAT_MRT4530_25963C.1.pep
MAAPPARARADYDYLIKLLLIGDSVFYKLFLVLSSIQCVGKSCLLLRFSDGSFTTSFITTIGIDFKIRTIELDGKRIKLQIWDTAGQERFRTITTDIRNWIRNIEQHASDNVNKILVGNKADMDESKRAVPTAKGQALADEYGIKFFETSAKTNLNVEQVFFSIARDIKQRLAETDSKPEDKTIKINNKTDQGADKPAASGSACCGS

SEQ ID NO: 123097 - protein, 38 aa, Oryza sativa
  Clone ID: PAT_MRT4530_25964C.1.pep
ALTGSTTAARCASSWSTSSHHCLPWSVARMPCLRLADH

SEQ ID NO: 123098 - protein, 1135 aa, Oryza sativa
  unsure (1)..(1135): unsure at all Xaa locations
  Clone ID: PAT_MRT4530_25965C.1.pep
MPATATCPKALHAHLLRSGALFADPSAAGPLAAAASLASLPYALSILRAHPTTFSYNSAIRALARGPRPHLAILLYRFMLSHSRFHPNNYTYPPLLAGWARLADSDSSSAAAAAAAGVALHASLFRRGLESXRPFIRASLLSLYAAAGDLPAARQVFDLSPPXHRDLPLWNSLLHAYLSRAHYVQVLRLFRTMRTADHVTLLALLSACAHLGALHTARWAHAYLATTCSFPITTNLATALLNMYMRCGDVQTACSLFHSTPTRHKDVHTWTVMIAGLALNGFSTDALHLFTHMKDHNIQPDSVTLTAVLSACTHAGMVDEGKRILRRMPLDYHLQPTIEHYGCTVDLLGRAGLLEEALALIRAVPFKADVALWGALLVACRCHRNFEMGQMVAMEILRLDPQHAGAWVFLSNVYAAAGKWDLVQEVRSSMKQHRIHKPPGSSVVELDGVVYEFLSGDHSHPQSDQIYAMLDEIGKTLSLKGHKPATKLVTFDIDEEDKEVCISQHSEKLAVAFGLINTRRGAVIRIVKNLRICEDCHSVMKECICLRLTVFYPTLWKTVIASHSQECENIIVLRKMLELRTGDIFGAVFIACLIALQIMGSQRGKQSEKSFWPLIVMKKWLNIKPKLNDFSEDEFDTDGGDEDFSDCAEDASDNFFEIHENNHTINRSSGDKIMPLRRLQRRKSESLRVNYISNKDMRFGLYEFIFNPQCIPCHASGDFIIVVTTRVMIGTWNVAGRAPSEDLDLDQWICSQEPADMYILGFQEVVPLSVGNVLGAEDSRTVPKWEGIIRRALNKSQQPKANCKSYSAPLSPLRVPIPSDDGHDDTKREYDKMTENLSPQQQCRDKQTSISKCSCDWLDGTSSLDWPECPLDIPAKISVSNRGLRRVMSMGLFNTDYLENAQGFDLHGVALQDGIRRSYRSSGNLGMSWSEQQEKVDVLSSVDYMSDWTSDDTTSVVGPDERATFAKGESLKPPGNYVRVVSKQMVGIYVSVWVSRKLRQHVNNLEVASVGVGLLGYMGNKVILPSVDCRSLHQIFWFGDLNYRIDMPDAEIRDLVSMKRWDDLLKSDQLTKELTNGNTFAGWKEGLINFPPTYKYETNSSVIAYYGWERVSSNYHIGAQIYHARQMYIQRDLNI

SEQ ID NO: 123099 - protein, 97 aa, Oryza sativa
  Clone ID: PAT_MRT4530_25966C.1.pep
MEAEVRAARAGSGMEADVRVVWQAHRGHGDSRSAAKSIVYLSSLWCAVRLGRARCDGARGVAPSARASGRRGDWSGGGGDSDGAGGGGATGRGDVTP

SEQ ID NO: 123100 - protein, 104 aa, Oryza sativa
  unsure (1)..(104): unsure at all Xaa locations
  Clone ID: PAT_MRT4530_25967C.1.pep
HQGHVRVDHLVLKRDKDXIKVHDCYISCMTFTMXGHVLRTAGMKGTQIRIFNTQDGTRMXEARKGFDKADIYXAIGLSXNVHWLAVSRDKGTVHILSYRMRAAG

SEQ ID NO: 123101 - protein, 99 aa, Oryza sativa
  Clone ID: PAT_MRT4530_25968C.1.pep
TRKQPQRMEQTKKKQKKHNKTNRTPPNPTKNKQKNHKGDHAHAAVGEQTTRPKGRAQKGTAGKTETANKKHPEQTPATKNQNTRNTTTTPNGKGRETTQ

SEQ ID NO: 123102 - protein, 347 aa, Oryza sativa
  Clone ID: PAT_MRT4530_25969C.1.pep
MAVQAQYLSHASFPHDLYGLRALEGATAAGSLFLDDHGGCAPATPAAAAAGIGHTVLSDLPRSELTCNDNNGAGYGFVPRKRARLDADESAGALMAAAAAQQQRMVLPPHGLVFPGDVQSRAVGCGAASTSGRAGNAAGLSQGLLSQLYHQGVEIDALVRLESERMRAGLEEARRRHVRAVVSTVERAAAGRLRAAEAELERARCRNMELEERLRQMTAEGQAWLSVAKSHEAVAAGLRATLDQLLQSPCAALAVAGAAGAGGAEGDAEDAQSCCYETPCGGDNAGADDAASKTPAAALCKACGAGEASMLLLPCRHLCLCRGCEAAVDACPVCAATKNASLHVLLS

SEQ ID NO: 123103 - protein, 48 aa, Oryza sativa
  Clone ID: PAT_MRT4530_2596C.1.pep
VVLLSCSCRAALRQYMIFVALRYTTATFVTAFSNIAPVLTFLLAILTR

SEQ ID NO: 123104 - protein, 86 aa, Oryza sativa
  Clone ID: PAT_MRT4530_25970C.1.pep
AENTVLNMFEQHDGPNCVSVCLPSQYNIWTNPRWNKTTQSCNKARSGNYWLLYRKNLGLIHTSNRGWTCLQLLEPIFLPLGPNSLS

SEQ ID NO: 123105 - protein, 101 aa, Oryza sativa
  Clone ID: PAT_MRT4530_25971C.1.pep
MDTQDLDKLEVICLMPCFKVTKCQCFRFEYKLEKRLKILFECTKLDGQLTGGIWKRSKSNLGIYKEMVLSLPASFVPEQAAIRNAEVSTLRSSGYLRNPDQ

SEQ ID NO: 123106 - protein, 388 aa, Oryza sativa
  Clone ID: PAT_MRT4530_25972C.1.pep
MELFARAQVVRLKSHHDKFLYADEDEVHVTQDRNGAATNARWTVERVPHSPGVVRLRSRYGRYLSASNEPFLLGMTGRKVLQAPPPGGRATDSSLEWEPVKDGFQAKLKTRYGHYLRANGGLPPWRNSVTHDVPHRTATQDWVLWDVEIVQVLTPGHDRAPTSAAPPSPAHAPELKKPPPPPEAHHRPTKSYTGHPPPPPLEKDAPPQPPRPQEVHHRPTKSYTGNPPQPLEKDASPQPPPPKPAPSRLESSLSFSAPLHKVEGRAIYYHIADDKGDVDEDDETRSFTFNGSNLEELTHKLQEETGLHDIIICTRSPITGKLAPLRLQLPPNNAAMHIVLVQESSKDGAYTKSSATSLLIESYRTEDGGIILLAANIVQFRSWVFLKQ

SEQ ID NO: 123107 - protein, 549 aa, Oryza sativa
  Clone ID: PAT_MRT4530_25973C.1.pep
MALSCAAECALSLACARWALRRLSLSGADDSASWPAASPSSFAPVPRACRSALAAWQQGHDEAEQAPTPAPSRLCPPYRLSHDRARGEVVLAVRGLGLARLEDYRVLLDAGGPEPFAGGHAHRGLLRAAVWLLDREGPAIRRMVAEAGPAGCRLVFVGHSLGAGVAALAAVVAVRCWLERLGLRRGDVRCYAMAPPRCMSLGLAVETISCQELQRLCNTSSDQFSATRSHHDNRSKISGSRPATEPKSAATAMGSLGGKSDYESVRDARISENLARMEMLGLRRCAGEFSAIASASASASAAASRRAGIGGTTPRRNPKPPRVLTPLRRSGRLVAIAAAAPAGSASGPRRSARLNGQTTEHKALPLKGSLSKFAAEEAEEEEEEEEQEEKKAMVVIDKERVRILQERRCDSKGRGAVYDPVLGICCHFCRQKKLCGEEGCKRCGEGDLNQPCIGKTDCSSCHSSYGILCRACLKVRYGEDMDEVRKNKNWMCPHCIEEKGTKKFWICNSSICLKKRKLSPTGIAIYDAREQGYESVAHLLMDKLKCRAF

SEQ ID NO: 123108 - protein, 78 aa, Oryza sativa
  unsure (1)..(78): unsure at all Xaa locations
  Clone ID: PAT_MRT4530_25974C.1.pep
EQQHAGVDPARGVRPYMVVVHHLHLRPEGGLLVFWPLAIESIYICTHGPCERCNLRRTVHXTVLYXNWFNXERCFRIR

SEQ ID NO: 123109 - protein, 160 aa, Oryza sativa
  Clone ID: PAT_MRT4530_25975C.1.pep
AAARRSGNSSFGNVSNGGRIRCMQVWPIEGIKKFQTLSYLPPLTAEDLLKQIEYLIRSKRAPCLALSTVGFVYRDNHRSSGYHYRRSCTMRQLPLVRVPRPPSLLTVSHDAQIASPMHPPLLSVPSSSCTSILSLSSFPNPLPSLASLPLLFPFSPPPPV

SEQ ID NO: 123110 - protein, 60 aa, Oryza sativa
  Clone ID: PAT_MRT4530_25976C.1.pep
AYLHHVQTNDLTGTEKITRIISTGYTPKINVRYEPIITLNHAIYRLTNPEHTPYLSSPYN

SEQ ID NO: 123111 - protein, 93 aa, Oryza sativa
  Clone ID: PAT_MRT4530_25977C.1.pep
AAFQLSNKKLPNSAARVSCSCLALSPQPYIDPCTSQATRFNSCVLHLHLSLLFLLLLTKMKSSLNNPRCLIIDMMVGDALLNLQVDFILLGGN

SEQ ID NO: 123112 - protein, 92 aa, Oryza sativa
  Clone ID: PAT_MRT4530_25978C.1.pep
ATGTASRLTPATSLARRSSPHRKPSLGAARDPVGSSGVSETPAAARRRRRRTRAEARASLLLLMLRLGVERRALTDAQPRWRSYGIRARTEG

SEQ ID NO: 123113 - protein, 131 aa, Oryza sativa
  Clone ID: PAT_MRT4530_25979C.1.pep
FYLRLTTASPPLPSRMPPSQSHTPPTLNEALPPQPSIFVAASASKDPGAWRRGTRATTTFFPSSASEDGRILVRMAATRRRVSPPQRPPTFFLYSAILVRSKLNYLMAIYLSVLHYIGCFDFISTRCRMPS

SEQ ID NO: 123114 - protein, 67 aa, Oryza sativa
  Clone ID: PAT_MRT4530_2597C.1.pep
MADGTAALRPAPRLGPTRLRPSQLAPLRRPQMQPQIQGVHHVNAANAAAESDYPRSTFLIMSNLSVN

SEQ ID NO: 123115 - protein, 95 aa, Oryza sativa
  Clone ID: PAT_MRT4530_25980C.1.pep
MPPSQSHTPPTLNEALPPQPSIFVAASASKDPGAWRRGTRATTTFFPSSASEDGRILVRMAATRRRTEKNKLLGSPYACVAVQMQPAMECHNELR

SEQ ID NO: 123116 - protein, 123 aa, Oryza sativa
  Clone ID: PAT_MRT4530_25981C.1.pep
METDVARRYRQRRSGLCLQKSKDVSNVMWGIGYNQTWEEKRAVIRLGRFTMVDGQGYKEENIAGYGSSFLLLMKIMMLVIQSDFSVDEVQTHEANNFVDNSWPKMKVMPIANVPVVMFMIINC

SEQ ID NO: 123117 - protein, 152 aa, Oryza sativa
  Clone ID: PAT_MRT4530_25982C.1.pep
PPPRRICRLEGERSESPPPLLLFHSFISASPPPHRLFPHACRRRNLTLLQPSTKRFRHSPQFSSPHLLAKIQAPGEEEHELPPPSSLHLPVRMVPSPQRPPTFFLYSGALPPPRISNFLFFLYSGALPPPRISNFLFLWQCMHGKSHHIYNR

SEQ ID NO: 123118 - protein, 123 aa, Oryza sativa
  Clone ID: PAT_MRT4530_25983C.1.pep
FYLRLTTASPPLPSRMPPSQSHTPPTLNEALPPQPSIFVAASASKDPGAWRRGTRATTTFFPSSASEDGRILVRMAATRRRVSPPQRPPTFFLYSGALPPPRISNFLFLWQCMHGKSHHIYNR

SEQ ID NO: 123119 - protein, 1078 aa, Oryza sativa
  unsure (1)..(1078): unsure at all Xaa locations
  Clone ID: PAT_MRT4530_25984C.1.pep
ETSGRVDVVVSGVLVLVLAATICGRAAACAEAERAALLSFLAEASPPAGDAIVADWRGSPDCCRWDGVGCGGAGDGDGAVTRLSLPGRGFNGTISPSIGNLTGLTHLNLSGNSLAGQFPEVLFSLPNVTVVDVSYNCLSGELPSVATGAAARGGLSLEVLDVSSNLLAGQFPSAIWEHTPRLVSLNASNNSFHGSIPSLCVSCPALAVLDLSVNVLSGVISPGFGNCSQLRVLSAGRNNLTGELPGELFDVKALQHLELPANQIEGRLDQESLAKLTNLVTLDLGYNLLTGGLPESISKMPKLEELRLANNNLTGTLPSALSNWTSLRFIDLRSNSFVGDLTDVDFSGLANLTVFDVASNNFTGTMPPSIYTCTAMKALRVSRNVMGGQVSPEIGNLKELELFSLTINSFVNISGMFWNLKGCTSLTALLVSYNFYGEALPDAGWVGDHVRSVRVIVMEKSALTGAIPSWLSKLQDLNILNLSGNRLTGPIPSWLGAMPKLYYVDLSGNQLSGVIPPSLMEMRLLTSEQAMAEYNPGHLILTFALNPDNGAANRQGRGYYQLSGVAATLNFGENGITGTISPEVGKLKTLQVLDVSYNNLSGGIPPELTGLARLQVLDLRWNRLTGTIPSALNKLNFLAVFNVAHNDLEGPIPTGGQFDAFPPKSFMGNAKLCGRAISVPCGNMNGATRGDDPDKHVGKRVLIAIVLGVCIGLVALVVFLGCVVITVRKVMSNGAVRDGGKGVEVSLFDSMSELYGDCSKDTILFMSEAAGEAAKSLTFVDILKATNNFSPERIIGSGGYGLVFLAELEDGARLAVKKLNGDMCLVEREFQAEVEALSATRHENLVPLLGFYIRGRLRLLLYPYMANGSLHDWLHERLAGGAGAPQLVXLDWRAAKRIARGASRGVLYIHDQCNPQIVHRDIKSSNIILDEAGEARVADFGLGRLFLPDRSHVTTELVGTPGYIPPEYGQAWVATRRGRVNSFAVVLMELLTGXLRPVEAASPPHGQQRELVRWVLQMRSQGRQGEVLDPRLRGKGDEAQMLYVLDLACLCVDSTPFSRPAIQEVVSWLDNVDTIGRS

SEQ ID NO: 123120 - protein, 318 aa, Oryza sativa
  Clone ID: PAT_MRT4530_25985C.1.pep
MTHLREDGGEGHPKRKREITRQLAPAEWEATPNQTLRRLIQAWTTMLGGGGGGGRQRHLAALREIKAIAVESDRNKRCIEATPGAVKFLVSVVVQSHAAASTSTSARLDDDLLDSMIDSPMSTSSPKKEALGVLYSLKPSEPTLRRILGKDNGGFLDTLASVLRRPNYRSRVYAVLLLKVMTSAMLPERLGCRPRRRSIRGRTPLRERSLKKHASRTMRRSRLQPPLARSRRMTLPRPSRGSDRRVRFGVEDPVIRHASCGHAVRAARRPAAADARPPACRHRRRRTHGRFGKPATSRAPSRQLIETARLVPPANRQQ

SEQ ID NO: 123121 - protein, 71 aa, Oryza sativa
  Clone ID: PAT_MRT4530_25986C.1.pep
MEAGPWNPRWLSSAAGGWDWRGGRWGRRESDATGSDHHAHKVNISSTMESSGKDTNDKDHLFEPPEDEDKN

SEQ ID NO: 123122 - protein, 170 aa, Oryza sativa
  Clone ID: PAT_MRT4530_25987C.1.pep
MCGRPLGLQFHHASGDLYVADEYLGLLRAPARGGLAEVVTTETAGVPFNFLNGLDVDQRTGDVYFTDSSSTYRQQQHLIVCHCHARPPPAPPPRSPSASLPVAALALHFSARRHSAAALALCYATRIRAHRSACRRPLSLKKRNREEKRRRRKEKKKNVQLSCGSHVLFF

SEQ ID NO: 123123 - protein, 95 aa, Oryza sativa
  unsure (1)..(95): unsure at all Xaa locations
  Clone ID: PAT_MRT4530_25988C.1.pep
YNSLVGPVQLKPAGAKLLCRISGSANSGIDEPPSWMEAINQGMPTTRPIEPMATGVMGQHTPVSLVRAYPPRDTQXKLVLPGPSAVVVTRPSRES

SEQ ID NO: 123124 - protein, 142 aa, Oryza sativa
  Clone ID: PAT_MRT4530_25989C.1.pep
MESACPSLNFKFNTGAFTNVLIDIDNNALVKYPLDLWKTRIGGGEQLLRGRYGWIDQAYVRESRTRRPAGDEPRGEVNVSRRRPADRPIGRTPTVRCVDSHTYLGVATVKLCQNFRKFRSKKYRNFCSTEMSEILAEIQIGN

SEQ ID NO: 123125 - protein, 145 aa, Oryza sativa
  Clone ID: PAT_MRT4530_2598C.1.pep
TNKSKTTKIHMKNRQIQIGGKVAAAPKFHVPPQLWWLATGPLRRGSPLGPSATARRRTLRCRPARRPPPRARGSPSPPPVCACARVAAAAAPSARLAATTRKKKEKRISLQERKKRRGLVRGEMRKGGGGGPRVGGGERYLVPNS

SEQ ID NO: 123126 - protein, 46 aa, Oryza sativa
  Clone ID: PAT_MRT4530_25990C.1.pep
LLHTAMVNIWPGDNRLRLFSLFRTTDAMSESIMHRLLEDHPRCTEI

SEQ ID NO: 123127 - protein, 55 aa, Oryza sativa
  Clone ID: PAT_MRT4530_25991C.1.pep
SIPPSSIRDLGLHSLYVQAPQVRQARQASHVHLPGYSLVSAHLQVSASFYLCWLS

SEQ ID NO: 123128 - protein, 77 aa, Oryza sativa
  Clone ID: PAT_MRT4530_25992C.1.pep
GPFFADGGSWLHWTPLGRHSSSCLVDENQRPRPQRQKLPSSFTPRPNRSGTLTLCCCYLYPPKRWWWSPGNSAMGHV

SEQ ID NO: 123129 - protein, 923 aa, Oryza sativa
  Clone ID: PAT_MRT4530_25993C.1.pep
MRGRKQNKESEMKKVKENLMREIKNIEDEADHRNLSSDEWQKRYFLEGKLNQIYFDEEKYWQGRSGEKWLLEGDANTSFFHGVANGRKRKSLIRALEEDGRIIEEPAELKAHIYQFYKNLFGAEVAPKIFLSQDMWMHRGRLSQEEREHLIRPFTFEEMDQALKQMKTDTAPGPDGFTVSFYRAFWPQLRDQFKEMLDLLFEGRLDLWRINYGVISLIPKVKDANTIKAFRPICLLNVCFKLITKILTNRLTLVAHNVIGESQTAFIPGRFILDGVIILHEVLHEVKKTHQSGIILKLDFEKAYDKVQWSFLFDVLQKKGFDDKWIKWIKSATIDGRVAININGEIDQYFKTFRGVRQGDPLSPLLFNIVADALSEILLKAKEAGHLEGLVPHLVQGGLTHLQYADDTILFMTNNDQNVITTKFILHCFEAMSGLKINYQKSEVIVLGENPEETKRVADLFNCKCGKFPMTYLGIPISEGRLTAADLAIPPDKIEKRLSTWKCGLLSYGGKAILVNSSPMYMMGFYMLPEQTHQRMDSIRSRFFWEGIERKRKYHMVKWEALCRPKDFGGLGFLDTRVMNKVLLCKWIFKLESGQKDPCCDLLRRKYMMNGGGFFQSSTEGCSQFWRGLHEVKHWLKLGSCYDLGDGSATRFWDDVWLGDTPLKIKFPYIYSIVADPGKTVSQLWSSDGWRIDLRRSLGAEELVEWEQLLADLANVHLSTDRDRMRWKLTKSGQFSTKSLYREMTFGGIRDIKMQELWKTPMPLKIKIFVWLMLKGRIQAAHQLKKMKWNGDPLCKLCGAEEDVDHLMFKCAPARFLWCCFRDVFHWDHVPSSRREFMNILMTMGDDRAIIFLHVISAGIWAIWLVRNDWVFNNKLLSNICHLPHKAVSFLIQWRGLLPEKLKVEVDGLKDSLLASIRASGPN

SEQ ID NO: 123130 - protein, 91 aa, Oryza sativa
  Clone ID: PAT_MRT4530_25994C.1.pep
SPPWEEVVAAAPAAIAPHHVLLLHLGCAPALHLIYATTATADVIASGMGDVTRCPRTAAVLTVLMAAPPRFCHRRALHPLVATPLMACSPH

SEQ ID NO: 123131 - protein, 51 aa, Oryza sativa
  Clone ID: PAT_MRT4530_25995C.1.pep
TLVSKYPMPSVDLPMYSYPLSKTKLDCQDHMMTHDQTCRKELCVGSLFTSL

SEQ ID NO: 123132 - protein, 127 aa, Oryza sativa
  Clone ID: PAT_MRT4530_25996C.1.pep
MRCVSVPSPRPSRVVTRDVGPAAARRQRESRRRGALSPQPRASRRASRWHSKPAWSSSSGWSSRRRCRVRRHSASPWYPYVAADSRVVVPGEEATRCAEYSAGRSRGDAEEERNNDDASAPGRPIHG

SEQ ID NO: 123133 - protein, 325 aa, Oryza sativa
  Clone ID: PAT_MRT4530_25997C.1.pep
MATSETSNTTACTRGTLSQTWIAMFEAAKPTWQIHRPATTRYMIRLRSVGPKPPMLAQLKSTEKFGAWIKLAEREIWEMSELANKFLVLHLDGEGGGADDTEEALIQTSSSIKEADAGENALSDTLVLNYDEGSLVSSSGDYQMPLVWIDLEMTGLDVAKDRILEIACIITDGKLTKQIEGPDLVINQKKDLLDNMDEWCKTHHAASGLTQRVLQSTISEHDAETQVLDFVKKHVGSSPPLIAGNSVYVDLLFLKNYMPQLAAIFSHVIVDVSSIMALCIRWYPKERKRTPQKGKKHRAMNDIKESIAELKYYEDNIFKPQKSKQ

SEQ ID NO: 123134 - protein, 32 aa, Oryza sativa
  Clone ID: PAT_MRT4530_25998C.1.pep
LCFCLLTPNHVWITYATSCINSSSTFFIQNWG

SEQ ID NO: 123135 - protein, 42 aa, Oryza sativa
  Clone ID: PAT_MRT4530_25999C.1.pep
CNGGCSFFPLCLVGEKKIFRCHVERLTGCRKGFSNTNEKTNF

SEQ ID NO: 123136 - protein, 206 aa, Oryza sativa
  Clone ID: PAT_MRT4530_2599C.1.pep
MASRRRTLLKVIILGDSGVGKTSLMNQYVNKKFSNQYKATIGADFLTKEVQFEDRLFTLQIWDTAGQERFQSLGVAFYRGADCCVLVYDVNSMKSFDNLNNWREEFLIQASPSDPDNFPFVLLGNKVDVDGGNSRVVSEKKAKAWCASKGNIPYFETSAKDGTNVEEAFQCIVKNALKNEPEEELYVPDTVDVVGGNRAQRSSGCC

SEQ ID NO: 123137 - protein, 219 aa, Oryza sativa
  Clone ID: PAT_MRT4530_259C.1.pep
MSFLLDWFYDVLASIGLWQKEAKILFLGLDNAGKTTLFYMLSQENLAVHQPTQHPTSEELSIGRIRFKAFDLGGHRIARRVWRDYYAQLRRLPRYLYYRTPAVSPVTAVTRGKVDAVVYVVDAADRCRFAESKMELDALLSDDALAGVPFLVLGNKIDIPYAVPEQELCYYLGLTGLTTGKGNVNLAGTGVRPVEVFMCSVVRRMGYGDGFRWMSQYIK

SEQ ID NO: 123138 - protein, 39 aa, Oryza sativa
  Clone ID: PAT_MRT4530_25C.1.pep
IRISYQSLNTHLRLTTLMLSPNYLLVPEFLFPLVPNRLI

SEQ ID NO: 123139 - protein, 36 aa, Oryza sativa
  Clone ID: PAT_MRT4530_26000C.1.pep
LHWKGFVVLFPDSVGGDRKAAATPQVIAGDLFGIKP

SEQ ID NO: 123140 - protein, 745 aa, Oryza sativa
  Clone ID: PAT_MRT4530_26001C.1.pep
MDPPNHAKPAGPANVDLVLLIPPDHPQPQLHPNHHQPQQPPMTPTTPLPEAAKPPQNPEKTAASSPHAPSSRPPLPPASAALLRRRSSLTKPKSRFVEPAAPPSSAAAAAASSTSSHASPAHPAAAAGGGSGAASTPHTPAEADDEEEVFPKEVRRKSSARCRRRMKLSVELLVLVLFLALLVVSLVVRPLKGAGFWGLEIWKWCVMVICVFSGHLVSHWVVTLVVFLVERNFLLRNKVLYFVFGLKKSVQVCLWIGLVLIAWSQLFDRDVGRSAKTARILNYVSRFLASVLIGSVIWLVKTFLMKVVASTFHRKAFFDRILENVFDQYVLQTLSGPPVMELAENVGREGSGLGRVSFTKPKEEKGSPGVIDVMKLRKMSQEKVSAWTMKGLMAAIGSSRLSTISNTIESFDDVDGMEQKDKEINNEWEAKAAASAIFKNVARPGYKHIEEVDLLRFFNKEEVDLVLQRFEGAFETRKIKKSALKNWVVKAYLDRKSLAHSLNDTKTAVMQLHNLIRVLVIIIIIIITLLLMGIATTKILLVISSQLLVVVFIFGNACKTVFEALIFVFIMHPFDVGDRCVIDGIQMVVEEMNILTTIFLKNDNEKVYYPNSVLSTKAISNFYRSPNMYDTINFTIDVSTSIERIGALKSRIKGYIDSKPTHWCPIHTVNLKDILDVNKINMSLCVQHTMNFQNIRERNLRRSELVMELKKLFEEMSITYHLLPQKVELSFVGPNPIPIALPQSR

SEQ ID NO: 123141 - protein, 72 aa, Oryza sativa
  unsure (1)..(72): unsure at all Xaa locations
  Clone ID: PAT_MRT4530_26002C.1.pep
LLSLSAHFSSAPGIHPRPRGGGSRTPPRGEQGREGEEXNPLFQTEDITSGGEERVHSVSEGRVLSEISFDKG

SEQ ID NO: 123142 - protein, 120 aa, Oryza sativa
  Clone ID: PAT_MRT4530_26003C.1.pep
MTAARIDSMIEAVLEMGVIYGTMGDPKHSDELTTVVIEQASQAECATVRVLTKSLDCDIHALSIHTETCIALLRKMFKSSIPLDSKDWLAACLIKLQSTAGLSGHESGSSIDMEITIYET

SEQ ID NO: 123143 - protein, 115 aa, Oryza sativa
  unsure (1)..(115): unsure at all Xaa locations
  Clone ID: PAT_MRT4530_26004C.1.pep
DGGDDGGDAAPPGDGGRRRRGGAPGRRRGGPRRCGGPRQRRAALRWRRRXPPATAHGPQAAARRPXATAWGSQVTVRGFQAAVRRTSTAMWCSQAASACQWHFMDFLFKIRMVNA

SEQ ID NO: 123144 - protein, 69 aa, Oryza sativa
  Clone ID: PAT_MRT4530_26005C.1.pep
PRTSSNKESSLCLSLLTVPRWCLQIGGTGCTKNRITSLLKSVSFCANHLYSTSSIHPSPIISCSQQPHL

SEQ ID NO: 123145 - protein, 46 aa, Oryza sativa
  unsure (1)..(46): unsure at all Xaa locations
  Clone ID: PAT_MRT4530_26006C.1.pep
FXXFLYIMISSKARGISQXGLQRQPSQFPSLNLDVITRGSVSAVCN

SEQ ID NO: 123146 - protein, 100 aa, Oryza sativa
  unsure (1)..(100): unsure at all Xaa locations
  Clone ID: PAT_MRT4530_26007C.1.pep
ARLTLKALRAIQVXDLGLYNRLVSNDQVDLVIEGARLLYEGKTVGSHSRTQEEIDELLLNLEEAGANEPRMKGGHPLLLGRSAEEMDLLQQQRLRVDFMP

SEQ ID NO: 123147 - protein, 127 aa, Oryza sativa
  Clone ID: PAT_MRT4530_26008C.1.pep
YCRCLHRSTRLRPPPPLHLAGRAGPPAAGSIVPRHHLRPPPSTSPAPSPSLRRLAGRAGRQPPGPSCRAATSALSLHVASPVAWAAGRRIHRAAPPPPPSVSTSPASSPPSASTPPRRSCGPPAAGS

SEQ ID NO: 123148 - protein, 412 aa, Oryza sativa
  Clone ID: PAT_MRT4530_26009C.1.pep
MRAVRGGRGAAGPRAASRLAVDRTREWGGGKAADRGQLDPVAAEVAPTWRLRGCHAGRREVDDDVGRNGRRTTVAGGGANHGDTGESEHTGKLLGTRGDEPTARIRWGMLDGGGLRWRQPAAGEGGNSDGATGDRFGRARASTRLRESVASVGLGGATSSEAGDERVLRSTGGDGGEHTATGGNVISPGLGPGKRKKTSTRSPLPRPSAHRLLRHTRRRRSARGTTMAWVKNGGDWEGKKEGRGGRMTPAGGKREKEGEKGGLPPCHFGEKEEGERAMRQRWGELCLRPLEARARRGGAKAMTTAMTAGRFGAERRHGRQALTAAATGRSATMARVRAGSNGRRSDLGGVGGKRQRGRRALGSARLTRTRAQRTGRVGERERERDGEGGGDGPRGIRPIEPEGGEIDFCGGI

SEQ ID NO: 123149 - protein, 165 aa, Oryza sativa
  Clone ID: PAT_MRT4530_2600C.1.pep
SPGATVLGAAEAVSFPAKLLGPGGGGVSPRGWLALARTRAPAIAGGFLARGAPGGRGGVVFPDGSWLNRAPGVARVARGKGWRAWTRGRRRRNQPSRERNPRAFLASCRVEAETAEAPRRVPVLAAEFLASSWWRKKMEARVFGGKKRAELRELLARWWWREKMI

SEQ ID NO: 123150 - protein, 34 aa, Oryza sativa
  Clone ID: PAT_MRT4530_26010C.1.pep
VFTAAGKYYLVDSGYATRIGYLELYKGTKYHNTA

SEQ ID NO: 123151 - protein, 370 aa, Oryza sativa
  unsure (1)..(370): unsure at all Xaa locations
  Clone ID: PAT_MRT4530_26011C.1.pep
MRAVRGGRGAXGPRAASRLAVDRAREXGRREAADRGLLDPVAAEVAPTWCLRGCHAGRREVDDDAGRNGLRTTAASGGANHGDTGEGEHTGMLHRTRGDEPTARIRRRELDGGGLRRRQPAGREGGNGDEVTRGRFPAVRASTRLRESVASVGLAXATPSEAGDERVLRSSSGDGGEHTASDGNGXGRGRSPLPRPCSCRLLRHAQRRTATAKQRGGNGAERRQGEGRRMTPAGGKKXKEGEKRGLVPLPLREKKEGAGASRQRXGRLCLRPLEASAXSGGAEAMTTAMTVGRCGAVRRHGRQAWAGAADXLTAAATRRSATMARARAGSNGRRGDFGGVGGKRQRGRRALGSARLTRTLTVTFPAFRSC

SEQ ID NO: 123152 - protein, 461 aa, Oryza sativa
  unsure (1)..(461): unsure at all Xaa locations
  Clone ID: PAT_MRT4530_26012C.1.pep
ARAGGEGREPGFGKGGATHARGSRRTRCGGPMRSLTARGGVRARXGRREAADRGLLDPVAAEVAPTWRLRGCHAGRREVDDDAGRNGRRTTXASGGANHGDTGEGEHTGMLHRTRGDEPMARIRRGMLDGGGLRRRQPTAGEGGNGDEFTRGRFLAARASTRLREPTPCTGLGGIASREAGDERXLPSSGGDGNEHTASDGSSRGGAXLATGGGGGYSCYYPSLRGGDGTRRENGGRHYRVGRAPAPPAHATAAAGERDSNGAGEKRGRLGGERGRXGAWVYRAAMSVWKPTLGGQGSELALGARGQNGDRRXGGEDDAGGREKGKRGREREEGERATRQRXGALPPSLGGTRGERRGRVDDDGDDGGXGLEWSGDTGGRRGXQARQALTAAVTGRSATTAXRARAGGAAIWAASAGTAARVERESSTRLTGRAGREREGEREXGEMGREGFGPSNPREAK

SEQ ID NO: 123153 - protein, 809 aa, Oryza sativa
  Clone ID: PAT_MRT4530_26013C.1.pep
MKRKTITIDCFYKPVVARAVSVEIENPSPTNVEVADQQNLQAEQEVIVTTAFERDPGKRVQISALPADQQDEAQRFYISEGPYQFILDEYPLNDASHARRFQSNWFKQFSWLEYSPYTDRAYCLPCFLFSKKPIGRFGSDTFTVRGFQNWKKVNEGKECAFLKHMGNSGSAHNYSVGCFNNLKNSMAHIDRAVIAQKEKLFAGARLRLTTTIESIRWLTLQGCPFRGHDESINSLNRGNFLEMVKLLASFNKEVKEVVLENAPRNAKYISSDVQKEILSIIARKVQKSVREEIGNSKFCIMVDEARDESKKEQMAIVLRFVNKEGLIKERFLDLVHVKDTAALTLKNSICAVLSDNSLNIQDIRGQGYDGTSNMRGEWNGLKALVLNECPYAYYIHCMAHQLQLALVAASREVHEVHNFFQHANFIINVVSVSPKRNNELLATQAEEISREIELGELDTGRGANQMSSLQRPGDTRWSSHYKSIQSLKKMFGAIVSVLRNIAHDHSVSKYSRGDASCALRMIITFDFVFIMLMMEKIMKITDVLCQTLQKKSIDILNAVDSVSNTKMLLGDLRNDGWEPLLQEVKSFCEKHEIDIPDLNRKFVDVTKSRNKNDNTSTLHHYKVDVFNVAIDQQLIELEDRFGSQATDLLALCVSLDPRLDSFDMEKVCILVEKYYPTDFSNQERMQLECQLPHFQLDVCNHPELEILSSLADLTSGLVKLGKDSSYPMVDRLLRLVLTLPVSTATTERAFSAMKIVKTRLRSKMGDAYLRDYLVVYIEKDLSAMISSNDIIKAFDLANSRRCKFKLVEM

SEQ ID NO: 123154 - protein, 441 aa, Oryza sativa
  unsure (1)..(441): unsure at all Xaa locations
  Clone ID: PAT_MRT4530_26014C.1.pep
RLGCGPSERGGSAGLNGPAGPRRRPRARARAGRRERAGGPGPSHVVPGGTRLSVTRLTVSEVHAGRARVWGGRRSACARFAEDAVRRAHAQPHGSPRTMRTGGKWRERLAGSADPVAAEVAPTWRLCGCHAGRREVDDDAGRNGRRTTAASGGANHGDTGEGEHTGMLHRTRGDEPTARIRRRELDGGGLQRRQPAAREGGNGDEVTRGRFPAARASTRLREPIASVGLGGATPSEAGDERALRSTGGDSDEHTASDGSKEEGERPESPSASTNAPALPVXLAMNGGGETEGRQWRGGGKRNGRRNRWEGALVYXDDDVGLEELCLHPLEASAXEWRGPGRDDGDDGGXVWSGTATRAAGXGQAREMLTAAATRRSATXARAREATGGAAISAASTGSGXRGRRALGSARLTRTQGERERERGGGEMGREGFDPSNSREAK

SEQ ID NO: 123155 - protein, 376 aa, Oryza sativa
  unsure (1)..(376): unsure at all Xaa locations
  Clone ID: PAT_MRT4530_26015C.1.pep
ARCTRGVLGFGEGGAAHARGSRRTRCGGPTCSLTARGGPRARGRGNGGSGWPGQPIRSWPRWRQRGSHAGRREVEEDVSRNGRRTAVASGGANHGDTGESEHTGKLHGTRGVEPTARICRGMLDGGGLRRRQPAEGEGGNGDEVTRGRFPAARASTRLRESVASVGLGGAAPSEAGDERALRSTGGEHTAGGGNXGRRRAPGVFFRVXRASAPPAHATAAVGERDGNGADEKRGGLGGKRGREGAWVXRAAMSVWKXLPPSLGXSARRWRGRVDDDGDDGGXGLEWSGDTGGRRGXQVRQALTAAATGRSATTARARAGGAAIWAAGAGTAARTEREDLARLTAERXREREREREPGREGEMGREGFGPSNLREAK

SEQ ID NO: 123156 - protein, 131 aa, Oryza sativa
  Clone ID: PAT_MRT4530_26016C.1.pep
MFAVSPTVMRLRDHDVSTAPSFSSPSSSPSNVARHHSSPHCQETDARCSISSSSPSSSLPAVVKTKAVIAIESRDGVGTRPRHQSSGACSEHRRHSDLGVPTTVEHYRSSCLAIIITSSTSSKRPKNRQDR

SEQ ID NO: 123157 - protein, 438 aa, Oryza sativa
  unsure (1)..(438): unsure at all Xaa locations
  Clone ID: PAT_MRT4530_26017C.1.pep
CARFAEDVVRRAHAQPLGSRWTARARGRREAADRGLLDPVAAEVVPTWRLRGCHAGRREVDDDAGRNGXRTTAASGGANHGDTGEGEHTGMLHRTRGDEPMARIRRGMLDGGGLRRRQPTAGEGGNGDEVTRGRFPAARASTRLREPTPCAGLGGIASREAGDKRXLPSSGGDCGEHTASDGSMTMGRRHGSDLSGLGLGXGRRRVPGVPFRVLTRTNSSGTRDGGGRRERQQWRGRETGKIGRGKRKGGAWEXPTLGSQGSELALGARSQNGDRRGXEDDAGGRQKGKRGRERGLASLPLXEKEEGERATRQRGXELCLRPLEARTGRGGAESMTTAMTAGRFGVERRHGRQTRXGAAGADGGGDWPVGHHGARXAGGAAIWAASAGTAXEWRGRAQRGSRAERGERERGIERERETGREGEMGREGFGPSNSREAK

SEQ ID NO: 123158 - protein, 80 aa, Oryza sativa
  Clone ID: PAT_MRT4530_26018C.1.pep
VDGNRTKAIVEGVKVCPKLTFGYASMPVDLILQSARNKGKETAVKSINDSRSARTLSMRGNHLEAYQLNPMMYTKLYCWI

SEQ ID NO: 123159 - protein, 444 aa, Oryza sativa
  unsure (1)..(444): unsure at all Xaa locations
  Clone ID: PAT_MRT4530_26019C.1.pep
MRAVRGGRGAAGPRAASRLAVDRAREXGRREAADRGLLDPVAAEVAPTWRLRGCHAGRREVDDDAGRNGRRTTAASGGANHGDTGEGEHTGMLHRTRGDEPMARICRRELDGGGLRRRQPAAGEGGNGDEVTRGRFPAVRASTRLRESVASVGLGGATPSEAGDERALRSTGGDGGEHTASGGNVTRGRRHGSDLSGLGPGKRKKASARCPLLRPNAHRLLRHTRRRRPARETAMARARNGEDWEGKEEGRRLGNRPWAVKGASWRSALAAKTATGGGEDDAGGRGKGKKGGEKEGLPPCCFAEKEEGERATRQRGGALPPSLGGTRGERRGQVDDDGDDGGAVWSGAATRAADAGQVRQALMAAATGRSATTARARXAGGAAIWAASAGTTARAEREEGSARLTGRAGREREREXSRGGRGRWAERDSAHRTRGRRIRLLRRD

SEQ ID NO: 123160 - protein, 145 aa, Oryza sativa
  Clone ID: PAT_MRT4530_2601C.1.pep
MACASSPANVSDVFGRGGLVLGRRRLRRPPPPRVRTAAASCSLLPPPAAASPSTVAYDAEADAWVPLPDMATERDEARGLCVSGMFVVVVVGGDGARSGSHDGAASAMHALLLAAASTMYGVGGRRRQRRQHALHGIRPAAQPRG

SEQ ID NO: 123161 - protein, 417 aa, Oryza sativa
  unsure (1)..(417): unsure at all Xaa locations
  Clone ID: PAT_MRT4530_26020C.1.pep
MAPQPICQTCALNYLGSNEDPALSENPNQLAEQVTNQVAKTDDTVPGPNKEVANSGQSDSDKATEIQGLQSVEDTDTNKEKNKXFLNVMITGMKTPLRAHDYPNFQNSIDKSLLQEYSTVKEGSGHKRKTSPSEVDMQDVPQCQTMQPCQDIPKYPTLKSKKIRHVPGLICFICHEIGHYMRHCPQKPYMDALLQANMRTSRTPFYPQGSPNSQNVNTVRPTSPDDKRAKASCDMCQDIQEKKEMQEYKKRKVSSVEIQERESSRQKKNPPVQHNQGASQYPNSSGYMPRSTVSESSQHATMINSNSHEGSNSVSCPPPSKRRGYKAGVECFICHEMGHYSWDCLQKVKSKKVQPTTSLPNVSGXKNSKPPNNGSVSLTSPPVEQNRLNQVQEETNGEVMNLKQVGEQNAQKERDPQ

SEQ ID NO: 123162 - protein, 182 aa, Oryza sativa
  unsure (1)..(182): unsure at all Xaa locations
  Clone ID: PAT_MRT4530_26021C.1.pep
MSVWKPTLGGQGSEPALGGHGPNGDRRGRMTPAGGKREKGRRERGLAPLPLWGKGGGREGDAAGGELCLRPLEARAGRGGAESMTTAMTAGRFGTERRHGRQALTAAATSRSATTARARGRCGNLGGIGGXRQRERRGXGSARLTGRAGERERERDGEGGGDGPRGRPIKPEGGKIDFCEGI

SEQ ID NO: 123163 - protein, 816 aa, Oryza sativa
  Clone ID: PAT_MRT4530_26022C.1.pep
MASSAEPPPKKRRLVEVHVPSPAPSPSSSSAPAPASPRSPVPPPPGVPPPPPPPPQTLAAAASPRPEEAVRKRRNREELRGLFECYRRIRLCVERKDARLLPELEQVYLSLIASSRGCTSVQRILADLIPQYASYCPTALEAATKVSINMYKWNLAIVTRGEDVDENILDACFALIASAEDVNGEGLYFLKQLTCHLNSGIITDALDVQGDGISQCTGMDVDHPSTKESVDSNLSSHSVGVSGSSMLQPNECYMTMDAISRHPSLKGWILLRYKKLCDSCRTDVVSEVSSCLNVLGSLTQLEDNKSHMGSESSVLDKIDENSGGYLQPNKLACSYEQRMLLKTDIADRYGGKTVQNKNAQMVHTDEVKTEKLADVKLDVCKQGNVISDAGHQAARLDMHTPKSTHDSAGGAATLTSPGQNFGKAKHSYSEPSDLYGAHFSRDVISVSKELWIGSLGNSAAESLVRSKFEEFGPLANFLFYPPKNFALVEYGNIMHAVHAYGCMQGSSVWGGGLQIRYLDRLIGSKGFASGIAVGESRHIYVAKVKNKKDKDEVFDELKAAGLKRPCSFTDISSENALLLEFETATDAAAAKAHIRRQLHPDVCSQDKNTSGHELFVRNIDNSVPDMEFINAFSRFGIQGFQGIMQASQYQQSDQFMFPGGSAQQSEKRPPPPPPPPNVAPPPFTRQDIPPPPPSPPPLPITQPPSVPPPPNSPPPLQPATDPSDSQKQRSHPRWQGSLSKSGLHYCSIYASRIELDACRYEHAVSEPTGWPSRLDVTKRTDYQHVKTTFSNTPPSKLMVHGHISELEIWQIASFAI

SEQ ID NO: 123164 - protein, 510 aa, Oryza sativa
  unsure (1)..(510): unsure at all Xaa locations
  Clone ID: PAT_MRT4530_26023C.1.pep
MGRPAQEGGPGRARGXGRRERVGGPGPSRVVPGGTRLSVTRLTVSEVHAGRAMVWGGRRGACAQFAEDAVRRAHAQPHGSPRTMRTGGGGERRERLAGSADPVAAEVALTWRLRGCHVGRREVDDDVGRNGRRTTAASGGANHGDTGEGEHTGMLHRTRGDEPTARIRRRELDGAGLRRRQPXDEVTRGRFPAARASTQLREPIASVGLGGATPSEAGDERALRSMGGDSGEHTVSGGRGRRRAPGVPFRVHERIGSPGVXDERRRQDRGAAMARWRRAKREEESMGGRLGLXTTMSVWKPTLGGQGXELALGARGQNGDRGXDDAGGKGKRKKEGRKGACSLPLWEKEEGAGATRQREEELCLRPLEASAWSGGGRVVTTSMTAGXCGAEWRHGRQARADAVDNDGGSDQAVGHQGARAREATGGAAILAASAGSGSEGGGRLAQRGSLARXEQRTGRAGERERERERWEXRGRWAERDSAHRGRPNRLLRRPRVSVEPPPPPSRAKSP

SEQ ID NO: 123165 - protein, 34 aa, Oryza sativa
  Clone ID: PAT_MRT4530_26024C.1.pep
MISRSGLAHRGPQPLPNTLAAASEPNDRRTVEIR

SEQ ID NO: 123166 - protein, 43 aa, Oryza sativa
  Clone ID: PAT_MRT4530_26025C.1.pep
NLSKPAIITHQSNDPHYFLEEPLLTSTPPESFFSTFFITPTTT

SEQ ID NO: 123167 - protein, 82 aa, Oryza sativa
  unsure (1)..(82): unsure at all Xaa locations
  Clone ID: PAT_MRT4530_26026C.1.pep
RSGQLIDHVALQTPSDRFAAKICLLSSFTSSCXIKIVPTGASPSKQLWXSLWSKVHYISLYAPQDLPNSKATKKPCLFSVGR

SEQ ID NO: 123168 - protein, 271 aa, Oryza sativa
  Clone ID: PAT_MRT4530_26027C.1.pep
MATILFVGVLLMSCCFVLISSASGNGTIRPIFSMNQARKCGAIGGTARCKEIVDGYIIEDGSIFQAAGYLTKTYEAHYGFIATMDVYGFPLSPGQIVSYGSAWIITDNVDDPVSNLEVIQIGWRVEPGDKRLFSTSIAMDPDLIGRIPMSYYSTLSNSATNIWFGGMVATNATFQPTPPLPMGSGYMPADNGNMAASMKNIQLIDEQGRAWSAGNGLVGFSTKKDDYTFTPIVGDQFFYGGPFQLTSSGTMLRANVVYPLLLVLFFYYLFS

SEQ ID NO: 123169 - protein, 56 aa, Oryza sativa
  Clone ID: PAT_MRT4530_26028C.1.pep
MADEPMTITDHAVDAEGIVKRNQSAMRMRGINMGHENERYPGSRSEALDATLIEDD

SEQ ID NO: 123170 - protein, 111 aa, Oryza sativa
  Clone ID: PAT_MRT4530_26029C.1.pep
RQTTLHFFFFSRFLLCSCTAFLFSLGSCHVYAVASSTSIFSIGEIFFLSICFRQWKLLAFFILRHMLLACVINRCREMTYVINRCREMTVIYGCCHGGYFHHLKKKKKKRP

SEQ ID NO: 123171 - protein, 159 aa, Oryza sativa
  unsure (1)..(159): unsure at all Xaa locations
  Clone ID: PAT_MRT4530_2602C.1.pep
FRYVNKKFSNQYKATIGADFLTKEVQFEDRLFTLQIWDTAGQERFXSLGVAFYREQMLGLVYDVNSMKSFDNLNNWREEFLIQASPSDPDNFPFVLLGNKVDVDGGNSRVVSEKKAKAWCASKGNIPYFETSAKDGTNVEEAFQCIVKNALKNEPEEEL

SEQ ID NO: 123172 - protein, 183 aa, Oryza sativa
  unsure (1)..(183): unsure at all Xaa locations
  Clone ID: PAT_MRT4530_26030C.1.pep
MMRRPAPVLVLAILAVAASTAAAAAIEGEVKCGGCSPCGGADCPVLYPSPPPPALPPPPPYYYYSPPPPAYYPGSYCPPPPAAYVQFGGGAQSGRGPLYPQDPGFMPSSAPSSHGSRAVRLFTACAAFASLWFLXYSGHMIRIVLLPIYQVFFSFLLCFSLLSPVFRSFTVTCKKLIAKQNVL

SEQ ID NO: 123173 - protein, 348 aa, Oryza sativa
  unsure (1)..(348): unsure at all Xaa locations
  Clone ID: PAT_MRT4530_26031C.1.pep
MAIVDLVNAGEQQQMGSKRAAAEDGDGGVDDSREYYCRRGVRHLCDSGITRLPGNYVLPASDRPGQAAGAAAAAGGVVNHGVGGEVVGGMLDVARRFFELPQPERERYMSADVRAPVRYGTSFNQVRDAVLCWRDFLKLACMPLAAVVESWPTSPADLREVASRYAEANQRVFMEVMEAALEALGVGGGGVMEDLAAGTQMMTVNCYPECPQPELTLGMPPHSDYGFLTLVLQDEVAGLQVMHAGEWLTVDPLPGSFVVNVGDHLEVXLSNGRYRSVLHRVKVNSRRLRVSVASFHSVAPERVVSPAPELIDDRHPRRYMDTDLATFLAYLASAAGNHKSFLHSRRLY

SEQ ID NO: 123174 - protein, 162 aa, Oryza sativa
  Clone ID: PAT_MRT4530_26032C.1.pep
MGGCCCSSTRSASVGAPVYIYHQQNPASTIVAIDKNLDTSTPDTYRAPPTPLPYDVGLVLKDNPDLEKTGIKRKIHEHKESLMMDDNESLQKCVSEDKPDEEDVCPICLEVFRYSPEYDEENPRSMTKCEHHFHLCCILEWMERSETCPVCDQITMINAMYE

SEQ ID NO: 123175 - protein, 40 aa, Oryza sativa
  Clone ID: PAT_MRT4530_26033C.1.pep
VQDLPFKDGEIFSSWSNPGNHMRYMQSVPSVANKSSLNFC

SEQ ID NO: 123176 - protein, 53 aa, Oryza sativa
  Clone ID: PAT_MRT4530_26034C.1.pep
MVRLPVSLSKPEMVELSLARRAILRLLAVGRCGGDIVLAATGVGVVPGRRTSC

SEQ ID NO: 123177 - protein, 129 aa, Oryza sativa
  Clone ID: PAT_MRT4530_26035C.1.pep
YRSPGSAAAKHCLPRAAGPAHKSGGRSSSRRSRQNLRVASPQRGSTRPRDEQQPISPPPQKVANLPRRQPARPPAPPSCPGRRTADRPCCTFFASPAKAAKQESKNSSSEASRSGATPPARPSSSVEMG

SEQ ID NO: 123178 - protein, 83 aa, Oryza sativa
  Clone ID: PAT_MRT4530_26036C.1.pep
IYSYFAHVLFLVPESGLFTNIGRVGLTGNSWTWYLVSGVTTLSLIGEVVFKRLWAYTHWVHSLDPGGCTLDNPGPPLPNTKHY

SEQ ID NO: 123179 - protein, 235 aa, Oryza sativa
  Clone ID: PAT_MRT4530_26037C.1.pep
METADDQERAPLLYPQPHAQEGAGSEGDGSVDIHNQPALERNTANWRACFMILGDVLSECLAFYGISKNLVTCYLAAGGRGANADGLPAAGMAAGGRRGAEAGAISSPLTDYLKKGDVEYEVNKMVLRFISPSCKTPPAKEHRALHPLDLFRKSLLSGQHHRPRGDQGRGGGGAARRDDRRHDDDEEEANGGIIRSAAELYEAGIRFRRPHHPVGGGALRGERRERRGRKMGIGV

SEQ ID NO: 123180 - protein, 51 aa, Oryza sativa
  Clone ID: PAT_MRT4530_26038C.1.pep
STVHEIGYTMSVSSQRIRQLESPAFRQLSSKNRVNALKDYLVPVCNWWHFC

SEQ ID NO: 123181 - protein, 397 aa, Oryza sativa
  Clone ID: PAT_MRT4530_26039C.1.pep
MSRPPSPMLSVPEKKTAATELFRDRHFFNSAFFTDLREARASLSAPSSQATTQDAASRRALLLRYHRLLASARDDPCDFDDDLAFTWHDAFRPHLRRTAASLRFEKAAVVFNVGAASSRIAAAVDRAAVGGVKAACGEFQRAAGAFRAAGEMMEGEEEDTEDTVDMGPEASAMLERLMLAQAQECCFERALAAGTSSAACSKVAKQAALYYEEAYASLVIPPLQNHFERSWVAHILLKAALFNAEASYHYAIELHEKTEIGEEIARLQFGINAIVDAKKAVRGAPGSLYDAASRLEQDMNQNLERALNENNRIYLLRVPAAKLLAPLPAASLVRSASLSEILDVKTETASSVLLPSAAAAAAARCLGPLPRRARLRTARHRRAKGIARERANLVRLR

SEQ ID NO: 123182 - protein, 154 aa, Oryza sativa
  unsure (1)..(154): unsure at all Xaa locations
  Clone ID: PAT_MRT4530_2603C.1.pep
LPPRGPPPRVRTAAASCSLLPPPAAASPVVXVREDGEKRRRLRTRCVMRRGGRSSRGRRARRGEERAAVHGXYDAEADAWVPLPDMATERDEARGLCVSGMFVVVVVGGDGARSGSHDGAASAMHALLLAAASTMYGVGGRRRQRRQHALHGIR

SEQ ID NO: 123183 - protein, 43 aa, Oryza sativa
  unsure (1)..(43): unsure at all Xaa locations
  Clone ID: PAT_MRT4530_26040C.1.pep
AVHRSXWDKVAEYYLXKQDVRXNVXXFDATLAAAXDXXRPXHS

SEQ ID NO: 123184 - protein, 61 aa, Oryza sativa
  unsure (1)..(61): unsure at all Xaa locations
  Clone ID: PAT_MRT4530_26041C.1.pep
NILYCRSFKSWILKGGLLLRMIGLGFDMGVVNSYIINWPIGCGVVICMFLDXVWRGXMCVF

SEQ ID NO: 123185 - protein, 698 aa, Oryza sativa
  Clone ID: PAT_MRT4530_26042C.1.pep
MAKYWGQRLWRPPAPDAATTVHLASLLQSCGRAGDLRRGRLLHARLVLSGAAAASTFLANHLITMYSHCADLASALRLFAAMPRRNAVSWTTLVSGLSQNLMHADALAAFAAMRRAGVAPTRFALSSAARAAAALGAPLPGAQLHCVGVRLGFDTELFVASNLADMYSKCGLLSEACRVFDQMPQKDAVAWTAMIDGYAKNGSLEAAVLSFRDMKREGLVGADQHVFCSVLSASGGLKDGWLSKSIHCCVTKAGFELEVAVRNALIDMYAKSMDVESASRVLKIDPGGWNVVSGTSMIDGYIETDCVEEALVIYVELRRQGVEPNEFTFSSMIKGCAMQALLEQGAQLHAQVIKTDLIRDSFVGSTLVDMYGKCGLISLSMQLFNEIEYRTDIAWNAVINVFAQHGHGREAIQAFDRMIYSGIRPNHIAFVSLLTACSHAGLVDEGLKYFYSMKEAHGIEPKEEHYSCIIDTYGRAGRLDEAYKFISEMPIKPNAYGWCSLLGACRMRGSKELGEVAAQNLMKLEPGNTGIHVSLSGIYASLGQWEDVKAVRKLMRDSRIKKLPGFSWVDSNKKTHVFGSEDWSHPQQKDIYEKLEELTTRIKEEGYIPDTSFLPCNLEDIAKERILRYHSERIAVAFALISMPATKPIIVKKNLRICIDCHTAFKFICKVERRDIIVRDNSRFHHFVNGRCSCGDYW

SEQ ID NO: 123186 - protein, 114 aa, Oryza sativa
  Clone ID: PAT_MRT4530_26043C.1.pep
PNTLDIVFIKEKVRITPPNYCGRPNYPPKPQNRIFFTLHYANRTNYPARPNPRWFWSMWRTRGSPIRGAGTGGGPPYLTSCLGYCVETMSHAKYGFLLFPHLFTLPYHFFHLRW

SEQ ID NO: 123187 - protein, 59 aa, Oryza sativa
  Clone ID: PAT_MRT4530_26044C.1.pep
MKYGAFDMWGKAADRKVSLSALKNTNSQHSLSWSHHKLQKAKGLQVMQIIGYAARIREQ

SEQ ID NO: 123188 - protein, 539 aa, Oryza sativa
  Clone ID: PAT_MRT4530_26045C.1.pep
MGESLLTALSMDTTTAHHPHQGPSTFLSMDTASHDDFDLFLPPPPGPFRRCLHAAAAAPPDINLPLDADPSPPPPALQSGALHDPNVDMLDVGLGGPQLYDSDSPAATTGVSPAPAAATTTVAVSHAKGSNSSAARKCVKRNDTIWGAWFFFTHYFKPVMSADKNGKAKAPTAGGNGNNATLDAFLVQHDMENMYMWVFKERPENALGKMQLRSFMNGHSRLGEPQFPFSAEKGFVRSHRMQRKHYRGLSNPQCLHGIEIVRAPNLAGVPEADLKRWTELTGRDANFSIDAEASDYESWRNLPSTDFELERPATTAATKTSSHGHHKKLLNGSGLNLSTQPSNHSSGDGLDIPNICNKRRKDSSPTAMEEDCSNSNSDKVQDMEVSHTFEPSWMNDFTGVMRHASGPVTAAKTIYEDSKGYLIIISLPFADIQRVKVSWKNTLTNGIVKVSCTSVGRMPFLKRHDRTFKLVDPTPEHCPPGEFIREIPLPTRIPEDATLEAYCDESGTGLEIIVPKYRVGPEEHEVHVSMRPPSSWCQS

SEQ ID NO: 123189 - protein, 69 aa, Oryza sativa
  Clone ID: PAT_MRT4530_26046C.1.pep
DKLTTLLLLSAVAGAQWAMAICFIFFSFRGISKCFLVLCSTLLSIWDYHVIIPPSLLIYEAKLFPSLEK

SEQ ID NO: 123190 - protein, 202 aa, Oryza sativa
  Clone ID: PAT_MRT4530_26047C.1.pep
MILTDPPLGSPASGGDYERRQDREGGHTLRVSIVGKGTKCQCPPPPPPPPPASVLKLRGENEGWGSDHLITASPAPLPRTGPPAIRHRPLLDHHQQQQQHRKPDNETKASYDRRRPTSPAATEEGARSIPTSGVVRPPCPYARALGRRRRAGLAWGGGFGVGLCGIWESVSPPRCCFALLFVARQEEAGDPLPRNTAGKLGG

SEQ ID NO: 123191 - protein, 171 aa, Oryza sativa
  Clone ID: PAT_MRT4530_26048C.1.pep
MVDSASTTDSTTLPRRFGSDIFGVMTTTAIGRGMTAAATTSRRLFHTRRGSRHLSPTLTCGSVINDKGRDRSGGLSSSVQILPPLRPRCTRIRRWQRQERRILRPLLLPCRSRHLSTPTHSNLPPAVIGEVDPTTSQYNDNIGRPRREGGMMMWRVTTTVDFGQQGFRRWG

SEQ ID NO: 123192 - protein, 73 aa, Oryza sativa
  unsure (1)..(73): unsure at all Xaa locations
  Clone ID: PAT_MRT4530_26049C.1.pep
RGNFXXCGWXXVERXVKXSRXSLXNFXRLAFXILGKAPXAXXXNXGKGSFKNXXXKIRRVSFXXNPLKIGXIX

SEQ ID NO: 123193 - protein, 270 aa, Oryza sativa
  Clone ID: PAT_MRT4530_2604C.1.pep
MKLLLPNSEVPRIYWEKAQHLCGFLSMKLISRARCVASSVKQSYSFLVCKSNPLVVQLVYFVIISFAGFLALKNLKPQGKPGPKDLDLLFTSVSTLTVSSMATVEMEDLSDRQLWVLILLMLMGGEVFTSMLGLYFNNANANRNENSQRSLPSISLDIEFNSPANNGDHKITECGQSEETMSQNQKELGPFAPSDPADSSRQHLVFTTLAAMRMGFGEGYSLGYSCQKLLKPDATCKDASYGFVGRWTEEGKLIVILVMFLGRLKEFILK

SEQ ID NO: 123194 - protein, 447 aa, Oryza sativa
  Clone ID: PAT_MRT4530_26050C.1.pep
MQRAAAASRATAWSTARHGAARVTASASFSGGGGIVAGAALPLRVRGGQLMSLPLLSGGRAVTARVAAAEAPLPADDADAAAGRERGALAETAQLGAMIVAWYLLNIYFNIYNKQVFLPPQEPSPSSSSPSLNPISHGESQVLQPLPFPYTITAFQLAFGSFVIFLMWALKLHPAPRISISQLAKIAPLAAGHMLGTVFTNMSLSKVAVSFTHTIKASEPFFTVLLSAFFLGEVGDTIQWVPVNRFRDEIGAEFKFVFELQTPSLLVLGSLVPIVGGVALASLTELSFNWIGFWSAMASNLLYQSRNVLSKKLLGGEEEALDDINLFSILTILSFLLSLPLMLFSEGVKFSPGYLRSTGLNLQELCVRAALAGFCFHGYQKLSYLILARVSPVTHSVANCVKRVVVIVASVLFFRTPISPVNALGTGVALGGVFLYSRLKRTKPKNA

SEQ ID NO: 123195 - protein, 145 aa, Oryza sativa
  unsure (1)..(145): unsure at all Xaa locations
  Clone ID: PAT_MRT4530_26051C.1.pep
KILKRKSREPKVGNDTLRPTDREGEYYTTCMFGVAHIFASFXNDTFILTTVLASYYELLQVGGGMKIKADCDESSPYAAMLVSQDVALCCKVCMQTLFLLMLCAAGGNKTNTPGPDAQSASRLLLLVDMGLKSVPLVKSKFSNTS

SEQ ID NO: 123196 - protein, 110 aa, Oryza sativa
  unsure (1)..(110): unsure at all Xaa locations
  Clone ID: PAT_MRT4530_26052C.1.pep
SSSELLQVGGGMKIKADCDESSPYAAMLVSQDVALCCKVCMQTLFXVEYRTNGQILGDCFLEFCLIMLCAAGGNKTNTPGPDAQSALRALALARSGMNIGRIGKLRVSNT

SEQ ID NO: 123197 - protein, 1466 aa, Oryza sativa
  Clone ID: PAT_MRT4530_26053C.1.pep
MVASSGKKHLLTTEVESILKDLWKKEARFCMLLCDFQQNTLSVSEKRRGYEMFFLKNLLVAPNRFRPSISSSLGIMEHPQNVLLSKVQESNLALQQSIAASNHMEVLRRWMDLQRNVNVLYDSSKGLYAFMHPLKEAKNEKNANGIRQLLEKKEGILRQKMMGKRVNYACRSVISPDPYLAVNEIGIPPVFATRLTYPEKVTPWNARKLQEAINNGADIHPGATHYRDNNNMYKLQAAPPKRRAIAKMLPASRGSISQPGKDPKCEFESKVVYRHLQDGDVVLVNRQKGYPVLRANWKFDLQPPTTTLQAYFTKMSCSEPTLHKPSMMAHVVRVLPGEKTIRMHYANCSTYNADFDGDEMNVHFPQDEISRAEAINIVDANKQYIGPRSGDAVRGLIQDHIIGAVLLTKLDTFLSREEYNQLVYGSVLSSTRRSGQFGKKISIIMDDDALEPVPPAIWKPKPLWTGKQVITTILNHVTKGRPPFTVEKKGRIEKEYLIPEERNGDKVKTINPSEQVLYVHDNELIKGMIDKAQFGNYGIVHTVHELYGPETAGVLLSSFSRLFTMVLQLHGFTCGVDDLLLSQESDMTREEILGKSEKHSKIVHINFTRPKKDDKAEAKAEDIRPKEGDEAEDTRPKEGDEAEDTRPKEDHEAEDSTHPKEDHEAEDSTHPKEDHEAEGDDEDQMKLQMEVEKIIRRNGESATVILDRNMSSELNTLTSKVNKKVFPYGLRKPFPGNCLSLMTQTGAKGGLVNMTQISSLLGQQELEGKRVPRMISGKTLPCFPPWDTSSRAGGFIGDRFLTGLRPQEYYFHCMAGREGLVDTAVKTSRSGYLQRCLIKSLESLKVSYDHTFCYGEDGVDVLKTSFLDDKFRELSDNRRALLGKLDSHNDKHLLLNPNGYISELPEKLIENAMEFLKSKRNEKGRYDIKEKELMKLLKVKYISSLVDPGEAVGVVAAQSIGEPSTQMTLNTFHLAGRGEMNVTLGIPRLKELLMTASAKISTPFMKCPLLEDKTWDDDEEEMDDKLKKARDAERLAAKLRTIDDAERIAAKLRRVRVADIVERIEVCTVPFHNNNGCVSTLYKLQLKLYPQGLYPRQSELTVEECHETLRTVFIDAMDLAISKHLDLLHKINEIQAVKSNDMESQRSDGVEESENGPTDEDNGVSDGENEDDLGADAEKWKRQEIDEMEYDDDAEKEEGFDMDSESEEDTKSKPESEDHQAKLDEELEESEEGHVLDSSNKGENLKAKQATARLEDEMNEAEDEKAQVTIKFKKNIKWTIHYESTGLNFEVHYALQEQPHILLAQIAQRTARSVFVKASGVNFEVFHKLVDYLDINEVRSNDIHAMLNTYGVEAARATIIGEVKGVFGAYGIHVDMRHLNLIADFMTFDGGYRPMSRLGMGQFSTSPFGKMTFETATKFIVEAASHGESDTLDGPSASVCLGKPVKVGTGSFGLLQNFSLEQPVAM

SEQ ID NO: 123198 - protein, 167 aa, Oryza sativa
  Clone ID: PAT_MRT4530_26054C.1.pep
MKGSGWVGLEEVAPRCKRAVAQRAAWALSVEAMRLQIWGFGVAVVAGFRENGGGGRWALVRSEIGSQRDKELGAANTDALVHSQAVGTGLTDKAIPDAGGGGIGGGALPAYSGRRRSVLSPVAGRERIERGEEEEDEGSPTCGAHAREMTLQDFTDHADDEYLYVPK

SEQ ID NO: 123199 - protein, 182 aa, Oryza sativa
  Clone ID: PAT_MRT4530_26055C.1.pep
MNEAEDEKAQVTIKFKKNIKWTIHYESTGLNFEVHYALQEQPHILLAQIAQRTARSVFVKACKNIDRCEVNKPKKIDNNTINTPITLQTAGVNFEVFHKLVDYLDINEVRSNDIHAMLNTYGVEAARATIIGEVKGVFGAYGIHVDMRHLNLIADFMTFDGGYRPMSRLGMGQFSTSPFGKM

SEQ ID NO: 123200 - protein, 88 aa, Oryza sativa
  Clone ID: PAT_MRT4530_26056C.1.pep
MRFARTLIVAAAVEIKTLNDDLVKANKALKAALDDIKARKEHNHILGNQKGNFEDSWAQLSDLLPEGSAAIRRFSEAVANTSVGYTSA

SEQ ID NO: 123201 - protein, 371 aa, Oryza sativa
  unsure (1)..(371): unsure at all Xaa locations
  Clone ID: PAT_MRT4530_26057C.1.pep
SLTLPSSPRLSSHRSSSSSSSPPTSRRRRWGTRTRRRTTRACTTPSRRCASPSSPSAASGPAAASPPTRPRRGATPTRSSGSRNRSTASSTSPRSTARASSRPPTSTPSAPTCSPPSPPPRPRPPTPTSPPSSATSSSSSRSSCTPSASRRRSTTPPRAHSCSASRRSVSWSTAPTRTSAMAARLRRRHQPRRLPWRSGRRSTSGTRRPPRRPPTSRSTRPSSRHGRAEARRSWTHRGHRXPPSTRTTARTPHPSSWPRARRRKPCPPPRPTRGRGGTXRRCSTTAAMAARTRSPRRRPWKAQIRRRMRQRARRRVRGGSMASRSGRRQATMRRRPAVSGRSTLRRGLRTVSAGLRRARLLPRMQREPRRS

SEQ ID NO: 123202 - protein, 81 aa, Oryza sativa
  Clone ID: PAT_MRT4530_26058C.1.pep
MAPNAPKYSSAQCHHEVGGLLVYTFLQGDDPYKRKYKNDIHTTLLSGYRVLIAEESALLDYEILILDDINVSTYYRRIGGQ

SEQ ID NO: 123203 - protein, 58 aa, Oryza sativa
  Clone ID: PAT_MRT4530_26059C.1.pep
MDRGFCLFWSVVVIICNYSSSVLWCTLFILLETTRLHMFPKSRNWRIEIFSDMIFSII

SEQ ID NO: 123204 - protein, 74 aa, Oryza sativa
  Clone ID: PAT_MRT4530_2605C.1.pep
DKKSIYIKINPMVSLVSLNILYCLFFSKYITHLLFDSTKWGSLEQGQGRSLTSKLCIVSTTYHIRAPLVSSVYY

SEQ ID NO: 123205 - protein, 208 aa, Oryza sativa
  Clone ID: PAT_MRT4530_26060C.1.pep
AYLAYGIPNSSLKRMALFHKAAYNIGGHAVTANSIEHALLCCRSPRIGRWFESILSTAMRKKCADEKQLVQLKFGLPDCQPLALFALCTGASSDPMLKVYTAKNISEELERAKREFLQASVVVRKSKKVFLPRLVERYAREAGLAGADELLAWARDNADARATQDAIQRLCVDAGGGRRKAAQAVEWLPYNARFRYAFPRTMVDKPLF

SEQ ID NO: 123206 - protein, 98 aa, Oryza sativa
  Clone ID: PAT_MRT4530_26061C.1.pep
MKVKSTMMAASFLLFLFLLSGIFTATTNNNIRLPSIGCPCVDDNVHRRRCACRRCQDATSAKPPIYTAIQPYVYGCISSGVHISGFVVKGPQKILQLS

SEQ ID NO: 123207 - protein, 120 aa, Oryza sativa
  Clone ID: PAT_MRT4530_26062C.1.pep
RNSRVDPRVRKILFFPLSLRLKRKKKKWFFSSLSESQRLPARGAGEAESETARSPAPSLLPGFAVASHSRPGLADHSRSFRSRTHSCSIRSRWSILHRALACGSARAFRDSRAVCGRSDW

SEQ ID NO: 123208 - protein, 330 aa, Oryza sativa
  unsure (1)..(330): unsure at all Xaa locations
  Clone ID: PAT_MRT4530_26063C.1.pep
MAQPAMEGTVQGGGGGGGGAQEPRGQYGGGGKNGGDASPRKHAAAAAAAALPRHRRSKSASSDRSLEPCKHAGLHDQRCTQAAQATPSSHHQPDATTRKSHTAAAAAAEGSSIHHVLTRDRSAYLAYGIPNSSLKRMALFHKPPYLLRGRAARPMPARALGRAAGPLAPGXWFESILSTAMRKKCADEKQLVQLKFGLPDCQPLALFALCTGASSDPMLKVYTAKNISEELERAKREFLQASVVVRKSKKVFLPRLVERYAREAGLAGADELLAWARDNADARATQDAIQRLCVDAGGGRRKAAQAVEWLPYNARFRYAFPRTMVDKPLF

SEQ ID NO: 123209 - protein, 1182 aa, Oryza sativa
  Clone ID: PAT_MRT4530_26064C.1.pep
MPPARRRRRTAAEVDGEAVPSSAADLLALAATLFPAAADAPLRDPPHLKHLVHSLPDSHPVLLSLPGALAPPLSDGGAPGYPPRAAAVLLHLLLTHPSHPPRWGDLLPPLARLHDRLAQLATDDPPLAALAVACFELAWRAAAPGREAVVAQTLPYLFAEALSCGSATARSVLRRLLALRDALALLDYDDDDSISDFKMLLLRCFVSPLFLKAEEGRKLLSLVLGVSEGLAREGLELIRAQVGMPGVKRAALVAYGEVVFRAWKDGGWVRGEVGEAFLQGMLEGAVHARSKELAKAARKLLSAFVEQRMVAGVEKLIFQLAEPVLVRSLPVANSNVRHNSLHLLLDLFPLEDPDVTKDVNDPLLEKQYFLLDKLLMDDCPEIRTVAIEGLCRILNQFWEVIPSLTISKFLSKIVDDISKDSCTEVRVSTINGLIYLLDNPQSHEILKVLLPRLSDMVSDPALSVRSSAVDLLLAIRDLRSFQFNKVVGLGTLLSSLSNDHPRVAQKITKLLIPSYFPTKLPLKEACARCIALIKRSPTAGARFCEFALSEGSPPRSLVELIKVSITLALAPTGMNSEQTDGLVIASANLIKSLSEERSSLASLREFFANAKLKLLFKTEISVGARSALLSMAPVVSPDDLSALHDECMNVVMNAAGVSTQQGCQEAVLAAHKLVFSSGWSDEMFEALTNILQSKVSCFAEIYDIEPPICPVATSKRKKGKSLKKTPAKSGHDIGNGSSSEDFDIVAGASWQINDILKDEEKRVAFLQSSYSDVAFSSLKVICQVYIEQCLQFDSLNATPLLAYLSLATHSALQDIDQTDISTSESTTINHSLDHLLNCFDKLLNESVTGSTNSLKLKQNKKSARQKHHHGVPEGNALRGTVNVYMLGTSILKFIVDTITIKLISDNKVGCLNFALSFTKYASSAIKMHQEQSSSFKGNDLKDILMLIRSSFTYAAKLLHLVLANSIESQSPPEEAFFLANNLLDLVPSVESAAGSKFALSLVSVVKQWLPVVIMGLGCRWLIGPQAEGNMCDFGGSCLPLWVVALAKNELLDDEKPRDDDQSEQASEDSQSSRKLAEMMVILLKKGSPKILDSVAGVFLSTLKLALQRAEYGVVLGLTRFVCVRLLGSDSSASEKLHLAHDSLRENFFEIDKHVMDDLVDSEESRQQLESAKALIRSILSDV

SEQ ID NO: 123210 - protein, 347 aa, Oryza sativa
  unsure (1)..(347): unsure at all Xaa locations
  Clone ID: PAT_MRT4530_26065C.1.pep
MAATASNKRVILKRYVTGLLSEDDMEVVTTEVPPLAVVPAGSEAVVVKNLYVSCDPYMRNRMTRHEVPSYVSDFIPGEVLANFGVMRVISSGHPDFKAGDLVWGITGWEEYTVINNPESLFRINHPKLPLSYYTGILGMPGLTAYAGFFEVSKPKKGEYVFISAASGAVGQVVGQLAKIIGCYVIGSAGYDEKVNLLKSKFGFDDAFNYKKEQDLESALRRCFSRGXIDIYYENVGGKMLEAVLPNMSLGGRIVACGMISQYNLEQPEGVRNLYYIVTKRLRMEGFHVFDYYDRYYRFEEEMAGYLKEEKVSYVEDVVEGLDTAPAALIRLFTGRSVGKQLVAVARE

SEQ ID NO: 123211 - protein, 60 aa, Oryza sativa
  Clone ID: PAT_MRT4530_26066C.1.pep
PRDLNVLFKSSTSIPFFIFCYCFCRFRFCRMVCFLCFPFLVDAARFLLVSLLFCPFSSSS

SEQ ID NO: 123212 - protein, 384 aa, Oryza sativa
  Clone ID: PAT_MRT4530_26067C.1.pep
MVASASRLRPSSTTRTASSCKPETARGTHVFTIHGYSLQAVDGAGSNKASFIRSAAFDVGGFDWCLRYYHNGNIESDDDYISVFLELMTKDAEVRTIFDIRMLDQYTDDSSCVLVSTTNNTRRVFGTTNFKSKCLVWGSKNFIRRSELEGSVYLRDDRLMIECNLTVIKTPLVKTEERAAMPGDIIHFQVPPTNLSRDLGKLLEDNVGADLSFEVGGDVFPAHSVVLAARSPVFMAELYGPMRAKRGERIAIQDMQPVVFKALLHFMYTDSFSPAINDDLSRDERQELAKHLLVAADRYAVEGLKTICEKALCMSLSVDNVATIVALADQHNCGRLKEACVKFIASSNRLDDVVETEGYGRLKTSCPSILLDVIEMATKSRKIN

SEQ ID NO: 123213 - protein, 174 aa, Oryza sativa
  unsure (1)..(174): unsure at all Xaa locations
  Clone ID: PAT_MRT4530_26069C.1.pep
EEVMKDGWFXTGDIGEILPNGVLKIIDRKKNLIKLSQGEYVALEHLENIFGQNSVVQDIWVYGDSFKSMLVAVVVPNPETVNRWAKDLGFTKPFEELCSFPELKEHIISELKSTAEKNKLRKFEYIKAVTVETKPFDVERDLVTATLKNRRNNLLKYYQVQIDEMYRKLASKKI

SEQ ID NO: 123214 - protein, 552 aa, Oryza sativa
  Clone ID: PAT_MRT4530_2606C.1.pep
MHPPSLVLDTLKRIKLYIAMKLLLPNSEVPRIYWEKAQHLCGFLSMKLISRARCVASSVKQSYSFLVCKSNPLVVQLVYFVIISFAGFLALKNLKPQGKPGPKDLDLLFTSVSTLTVSSMATVEMEDLSDRQLWVLILLMLMGGEVFTSMLGLYFNNANANRNENSQRSLPSISLDIEFNSPANNGDHKITECGQSEETMSQNQVQQNKSITYNPCAVLVRIVTGYFVATVISSSVIIIIYFWIDSDARNVLKSKEINMYTFCIFTAVSSFANCGFTPLNSNMQPFRKNWVLLLLVIPQILAGNTLFSPLLRLCVWVLGKVSGKAEYAYILQHPGETGYKHLHVRRNSVYIVLSVTGLILLQVMFICSFEWNSESLEGMNWLQKLVGLLFQSVNTRQAGESILDISTLSPSTLLLFAVVMYLPSDASFLTANADNQPLTDKKTNSISRALWRNFTVNKLSCLAMFTFLACITERKSISSDPLNFNIFSIVFEIISAFGNVGYSLGYSCQKLLKPDATCKDASYGFVGRWTEEGKLIVILVMFLGRLKEFILK

SEQ ID NO: 123215 - protein, 61 aa, Oryza sativa
  Clone ID: PAT_MRT4530_26071C.1.pep
MVGRPHAQRGMVNPIHHCRLSKHAWQCYDHAPLKDAPRPQWIGWVNVARSSSPYLIRSVPC

SEQ ID NO: 123216 - protein, 112 aa, Oryza sativa
  unsure (1)..(112): unsure at all Xaa locations
  Clone ID: PAT_MRT4530_26072C.1.pep
LRTRPLDSAEHSKAVGEGYTAKCRXVFARAHVXNIDSXSNNCDGETFVSAXXLXINLWXLEXTDXCFNXLDMKPADMEDLXVISSAQFXPSSCXLLAFXSXXGFXXLVHLRX

SEQ ID NO: 123217 - protein, 108 aa, Oryza sativa
  Clone ID: PAT_MRT4530_26073C.1.pep
MANAFGLIPVQNMKNFPQHPLDIPFSPLIYINMYMDMNEYMGYYDLIEHVVRNMMRKMSYIGRHFKRYVASSMQGNFSPLFKGLMEHVVSFGQKLWSDIPDLQHDEED

SEQ ID NO: 123218 - protein, 172 aa, Oryza sativa
  Clone ID: PAT_MRT4530_26074C.1.pep
MDSTELRKVFKMFDKNGDGRITKKELGESFKNFGIFIPDDELDATMDKIDANGDGCVDVEEFGLLYRSILGDDAAGRAPRTAAAAIGGEGGAPDDEDEGMREAFNVFDQNGDGFITVDELRSVLSSLGLKHGRTADDCRRMISMVDADGDGRVDFKEFKQMMRGGGFAALGG

SEQ ID NO: 123219 - protein, 218 aa, Oryza sativa
  unsure (1)..(218): unsure at all Xaa locations
  Clone ID: PAT_MRT4530_26075C.1.pep
MKEREKVVRLAKLAEQAERYDDMVEFMKTLARMDVDMSAEERLLFSVGFKKTIGARRASWRILESLEQKVTAGDQPGVTINGYKKKVEDELRAVCNEVLSIIAIHCLPLANSGENVVFFYKMXCRFYQMMLRFHXGTEKKAATDQSLMAYQHAMVGACSELSPAHQLRLGLALNFGDFXEIMNSAERASQVAKQALDEATAEINSAGVVGYKGSVLMM

SEQ ID NO: 123220 - protein, 41 aa, Oryza sativa
  Clone ID: PAT_MRT4530_26076C.1.pep
TVHMVLYDFNLYIQTILLFQFSTRYHPQCQCSCASTIVVKG

SEQ ID NO: 123221 - protein, 266 aa, Oryza sativa
  Clone ID: PAT_MRT4530_26077C.1.pep
MMASRVMASSSPSHTASDLARFAAGRGGGGSAGLGSMNVEEILRGIYADMPTPALPLVGGDRPMSPLPAPDVAAAPRTAEEVWKEITGAGVAAAAGGVVPPAAAAAAAPAVVAGAGAGTGAEMTLEDFLAREGAVKEDEAVVTDPSAAKGQVVMGFLNGAEVTGGVTGGRSRKRHLMDPMDRAAMQRQKRMIKNRESAARSRERKQAYIAELESLVTQLEEENAKMFKEQEEQHQKRLKELKEMVVPVIIRKTSARDLRRTNSMEW

SEQ ID NO: 123222 - protein, 433 aa, Oryza sativa
  Clone ID: PAT_MRT4530_26078C.1.pep
MISLLATKDSAKDAWDAIKVMRVGVDRVRKAKAQQLHREYESISFHDGESIDDFALRLTSLVSQLGTLGERIEEQNVIEKFLRVVPERFSQIAVSIETLLDLSTLTIEDVTGRLKVAEERRPAPTSTTTPAGGQLLLTEEQWLARQKERQKGERSSKQSQVQVSLGATDAEDKEAWYLDTGATNHMTGRGDVFAELDRSITGTVKFGDSSIVDIKGAGNVIFTGKNGEHKVLSGVYYIPRLKSSIISIGQLDESGTRVLVEDGIMRIWDRRRRRRLLAKIKRGRSRLYVLRLEVARPICLATRHDDVAWRWHERFGHIHFGSLEKMGRQELVRGLPRLEHVEQLCDTCVITKHRRAAFPKAAKYRAQEPLDLVHGDICGPITPATPSGRRYFLLLVDDATRYMWVALLAAKSNAPDAIKKIQMAAETHCGRKL

SEQ ID NO: 123223 - protein, 174 aa, Oryza sativa
  Clone ID: PAT_MRT4530_26079C.1.pep
MDSDEFMEVAFGLEKSGHPFLWVVRPNLVRGVERACLPDGFESAVEGRGKVIKWAPQQEVLAHCAVGWFWTHGGWNSILESICEGVLMICRPQFADQMINTRYVEAVWGVGFELEGKLEWCKIEKAIMKLMGKNEGAEMRERANELKNKVARCLEDGGSSQIAIDRLVSYILSL

SEQ ID NO: 123224 - protein, 63 aa, Oryza sativa
  Clone ID: PAT_MRT4530_2607C.1.pep
TADEYVRIRSGSDIPFLGGVMHHIFKNGWEDKKYLEDRVWGMDKVREEVLTKWTPDKVQEACG

SEQ ID NO: 123225 - protein, 1828 aa, Oryza sativa
  unsure (1)..(1828): unsure at all Xaa locations
  Clone ID: PAT_MRT4530_26080C.1.pep
MEGVPAAGANASRSPQHRGRHHSLSPTPRRGRGRGAAVREVVVQRTVREVGGAAAFPTLTRTNYTEWSLLMKVMLQARGLWDAVEHGECDEQEDRMAMEAILRAVPSEMISLLATKDSAKDAWDAIKVMRVGVDRVRKAKAQQLHREYESISFHDGESIDDFALRLTSLVSQLGTLGERIEEQNVIEKFLRVVPERFSQIAVSIETLLDLSTLTIEDVTGRLKVAEERRPAPTSTTTPAGGQLLLTEEQWLARQKERQKGERSSKQSQGGARQRPRSHRKKRGFGGGVGGEKGNTNRDTAPNRCHNCGRLGHWAKDCRQPKKEAAHLAQGDDDDDVLLLSRACELEDDDATLLMAHACELNDGPIIAPSPVSLVEPRVQVSLGATDAEDKEAWYLDTGATNHMTGRGDVFAELDRSITGTVKFGDSSIVDIKGAGNVIFTGKNGEHKVLSGVYYIPRLKSSIISIGQLDESGTRVLVEDGIMRIWDRRRRRRLLAKIKRGRSRLYVLRLEVARPICLATRHDDVAWRWHERFGHIHFGSLEKMGRQELVRGLPRLEHVEQLCDTCVITKHRRAAFPKAAKYRAQEPLDLVHGDICGPITPATPSGRRYFLLLVDDATRYMWVALLAAKSNAPDAIKKIQMAAETHCGRKLCVFRTDNGGEFTSLEFATYCTDEGIQRHFSAPYAPQQNGVVERRNQTVVSMARALLKQRGMPAEFWGEAVSTAVFLLNRAPTKSLTGKTPYEAWHGKKPMVSFLRTFGCLAYVKELNDVRKLDDRSTPGVFIGYEEGVKAYRVLDPRTRRVRLARDVIFDESRGWDWTAASGIDARPSSDFAIEYHVEKTTGHPIPSVGGGVVTPSASPTPLQETSPATPATPAPSPSVAPTEFVSPPSHDEERIDAAHSNTPVRYRTVDNLIGENAPAPGIAKRELEEASLLLAGPGEPMXSFAEPEGDDAWRAAMREEMDAVNRNGIWELVDLPHGHRPIGLKWVYKLKKNEAGKVVKHKARLVARGFVQQPGIDFDEVFAPVARMESIRLLLAVAAQKGWHVHHMDVKSAFLNGDLAEEVYVKQPPGFVVAGEEDKVLRLRKALYGLRQAPRAWNAKLDCTLKELGFDQSKHEHAMYRRNNGGSALLVGVYVDDLVITGPSTRAIEQFKEEMKAKFQMSDLGLLSFYLGIEVKQGDDGISLNQGRYAQRIVESAGLKDCNPCATPMEERLKLSRDSTAPPVDATKYRRLVGSLRYLVHTRPDLAFAVGFVSRFMERPTEEHMVAVKRILRYVAGTMEYGLHYKREKEEQRLIGYSDSDLAGDIDTRRSTSGMLFFLGSSLVSWQSIKQRVVALSSCEAEYVAATNAATQGIWLARLLGELLGKQPKAIELKVDSKSALALAKNPVFHERSKHIDLRYHFIRSCLEEGSISASFITTMDQLADILTKALGRVRFHELVARIGVILNRQVVKSDSATIKIPELDFEIPPEAQRGSLSTVEGIIMRAVDELQALQDERKKVDPQKAEAIDKFLAKLRSLGLGEAAFTFVLDDPAGNSFIENQNAPSSDPLLSVRFYERMREQQAALGFLVEPSTEEPGDQPVNHASTVEGNSEVLQEPHGSVGAVAGRRAIAQGNPDEVAAALCRYSAPEECLVFDLWLEIPYFREVIVMATTCDMCGYRNSELKPGGEIPAKGKKITLRVQNGKDLTRDVIKSDSAGVKVPELELELASGTLGGIVTTVEGLIVKICEALQRVHGFHLGDSTLEWKKKKWEDFNDRLSKLLSLQEPWTLIIDDGLAASFVAPATDSLEDDNQLTIEEYVRSWEQNEELGLNDMDTSSADAAYNTTNP

SEQ ID NO: 123226 - protein, 199 aa, Oryza sativa
  Clone ID: PAT_MRT4530_26081C.1.pep
SMEHKQHYRASVPWVGPNNAESISFVTGTVYTLLRETAKWAAYSTKKRFATAKMDIGGAFPTIYSLTQCTPDLSSESCFKCLQGTIQESLKWFDGRRGGRIIGVRCLIRFETSIFYNGEPMRIMGPSTNSTSADGKASLQEKTSTYLYEEEALAWPIQGQSSELLFDFACIIRATNNFSRENEIGGGKFGTIYRGKLDR

SEQ ID NO: 123227 - protein, 56 aa, Oryza sativa
  Clone ID: PAT_MRT4530_26082C.1.pep
ATKQRLFRLNVEYHRPRSSGCFGETSNMMLVSSASTIRAIKVGWRARHRGMQMENS

SEQ ID NO: 123228 - protein, 76 aa, Oryza sativa
  Clone ID: PAT_MRT4530_26083C.1.pep
FPPHQVFTFLILKQGAVSPENLYLGHNGNKKVPCSEPSRVFGGFYRQARTSVAITLASVAGYILLSLISSYRLFRA

SEQ ID NO: 123229 - protein, 47 aa, Oryza sativa
  Clone ID: PAT_MRT4530_26084C.1.pep
YSNHLIYCSVSNWTSFLHTHSSNLRHHSVFYPATSRSSQSLHKQQHS

SEQ ID NO: 123230 - protein, 227 aa, Oryza sativa
  Clone ID: PAT_MRT4530_26085C.1.pep
MECTGNMSAAPLLVLTVAVLAVLASTCAADPEPIQDFCVAVPRAGGEASPAYPGFPCKPASAVVSDDFFFAGLAAAGSTDNPFGASLKPGNVEAFPALNTLGVAINRVDLAPGGVNPLHSHPRAAELVHVITGRMLVGFVSTAGKYYSKVVGEGETFAIPRGLMHFQYNPGNASARAMTVFNSQLPGVVPAATALFGADPEIPDAVLAKSFQVDAEIIKLLKSKFKK

SEQ ID NO: 123231 - protein, 311 aa, Oryza sativa
  Clone ID: PAT_MRT4530_26086C.1.pep
MAVGFRRTLSTLTSHKAVAPSFLLDCARPKKLSYARVRSTSLPVRLHPLVAGLHDAARALLKWADAPAQTGPAWVADGADRAGKVLAGLADLLHHPQAQDALRRPWTEQLLDDLLLLTDLHGCFRESLVALRQLLAETHAALRRRDGSRLAAALRAQRRSAREVSRLASSARDLSHRAAPGDDADEATLADAFAAAASSVAAAAAAVFAGVSSASAESAASAAPSPRTPTPYSPARTPASPMWLVTDLLRRRRTVSFEDYCNEEEEERKAAMARVRGLEECVAAAESGCEEVYRALVNARVSLLNLLTPTF

SEQ ID NO: 123232 - protein, 66 aa, Oryza sativa
  Clone ID: PAT_MRT4530_26087C.1.pep
LFSRRKLSFSDGDKLLAFQRKNRVKFRENANDDVYSGPMGNMDGGICLHNASSVSWAVQSSSDQSF

SEQ ID NO: 123233 - protein, 42 aa, Oryza sativa
  Clone ID: PAT_MRT4530_26088C.1.pep
MGSAEGKLAMTMTPVNNDKDAQPWSKGDGTSQQQKRRPAVKT

SEQ ID NO: 123234 - protein, 77 aa, Oryza sativa
  unsure (1)..(77): unsure at all Xaa locations
  Clone ID: PAT_MRT4530_26089C.1.pep
RESRYKKKERKEQRKIKKKSENKRENEKKRKERKKKDXKKEKKINKKKTNKAKEIKEKKKKKNKKKKEKEKNKRKRE

SEQ ID NO: 123235 - protein, 137 aa, Oryza sativa
  Clone ID: PAT_MRT4530_2608C.1.pep
MPLTGSCMCGAIAYKSTTDPDVTALCHCTDCQKWTGGAFTSNAVVPEESFSIAKGTPKQYDVTGASGKINHHFFCGDCGSSLYTRLDIMEGKIIIKAGGLDEGKANLDNKIGVEFYTRDRVPYIQPAQGAKQEQMFG

SEQ ID NO: 123236 - protein, 188 aa, Oryza sativa
  Clone ID: PAT_MRT4530_26090C.1.pep
MAARCLSSLALLSPSPSSSGKVSAMASPPVPSSAAPRRRPGTRLSVATGGEQLVTAQEASQEPAYGVVSIHHVGILCENLERSMAFYKDLLGLKVNPARPTDKLPYRGAWLWVGSEMIHLMELPNPDPLTGRPEHGGRDRHTCMAIKDVLKLKEIFDKAGIKYTLSKSGRPAIFARDPDGNALEFTQV

SEQ ID NO: 123237 - protein, 232 aa, Oryza sativa
  Clone ID: PAT_MRT4530_26091C.1.pep
MAARCLSSLALLSPSPSSSGKVSAMASPPVPSSAAPRRRPGTRLSVATGGEQLVTAQEASQVVAVRLSVPVKDLLADFGSVSRIKISLNSELYPGATYEQELVNLEPAYGVVSIHHVGILCENLERSMAFYKDLLGLKVNPARPTDKLPYRGAWLWVGSEMIHLMELPNPDPLTGRPEHGGRDRHTCMAIKDVLKLKEIFDKAGIKYTLSKSGRPAIFARDPDGNALEFTQV

SEQ ID NO: 123238 - protein, 140 aa, Oryza sativa
  Clone ID: PAT_MRT4530_26092C.1.pep
MAVAHFVFVSLMAQGHLMLAVDTALLLATCGDYGYPIPTRHGSGYAAASSGQQRVRCTAMTGSTLGPNKIRLNWIKSLGINYTGVASSFLPTSAMGFVSGIDDFVFPPGQAFWFGSLDFITNDFGRISLLDSEPNQSGRG

SEQ ID NO: 123239 - protein, 310 aa, Oryza sativa
  unsure (1)..(310): unsure at all Xaa locations
  Clone ID: PAT_MRT4530_26093C.1.pep
MAAAGRTTLVKSVLTSQPIYLLTALKITKESLEQIDKQRRRFLWAGTEGITGENVSQGGLGVLNLDKFTRALRLRWLWHKWKDPTKPWVGLDMPCDEIDRDLFAASTEITMGDGNMARFWSSAWIDGRRPKELMPLVYAISKNRGKSLXQGKDGDVXVRDLIIEPHSPITVNLIDXVALWEAVRNVHLDSEEPDQIAWKFTINRQYTSSSAYQAQCYGAPNTNIGXLIWKVWAPGKCKFHAWFIIQNRVWTSDRLASRGWQNNGHCLLCHCENETALHLVGTCRYTKRIWNLIATWVGHQQLEPAHWEEA

SEQ ID NO: 123240 - protein, 175 aa, Oryza sativa
  unsure (1)..(175): unsure at all Xaa locations
  Clone ID: PAT_MRT4530_26094C.1.pep
HSLPPLFLSPPQEPGGDRGRSGRAERRLKRGLRRGSDGVGSSGRGGGGAMAFHGGAGAGRAGWAADRGIDLGWRRHXGGGRRRRSVPSSPSQTANESYRTIIPGRRGGRIRCRCCRGSRRLHCRRSQEPCRGSWCLERRPSLPGRRPPPPADTFLPWPARRGRYLPQSTPRQRAR

SEQ ID NO: 123241 - protein, 318 aa, Oryza sativa
  unsure (1)..(318): unsure at all Xaa locations
  Clone ID: PAT_MRT4530_26095C.1.pep
MAEKEEAEERAKDGEEYXSAREDAPLSWARRRSATRDQEEGAGASGSTAPWSVAGSDIDSKSKTAVAESYEMLEVITYGCEEGYVRGVPGVRGFMRRAPVILQRAVEGDQEALLEHGVRMEHIVMIMAILKELYPNLTIMMIEKSTSIGKARAVMFSKLFTSSVRMAHNSLKPQSRPVYRVKAVVPSGRGNTLDSLSTNAMEEIDNPGSNLSGSASDNYIQYSKSSDKGTGARGLTLSDKGFHSIPSITSKFMLLARVHQLDLHHYFRFVLFHRALYYMDFPVSFLFPPQLCSSVDNILGDLIPLSLAGLCLDLWFDN

SEQ ID NO: 123242 - protein, 99 aa, Oryza sativa
  Clone ID: PAT_MRT4530_26096C.1.pep
PTPWLGGPMTAFRLVIFFQAFSCGPKGFFLGRGHPFSFKRRKISKCQPCFFGIAEPLEPWTFFSPSSLFLTIFLAPNPLRRQCILSKNTVPFNPWGPKF

SEQ ID NO: 123243 - protein, 494 aa, Oryza sativa
  Clone ID: PAT_MRT4530_26097C.1.pep
MDSKVKAMIKLLNEDADSFARRAEMYYKKRPELMKLVEEFYRAYRALAERYDQATGALRQAHKSISEAFPNQMPPMSDESPASSGQEVEPHTPDLFTFTRLPFDLDDLQKDGVGVSPQQFTSKRNGTHPEEASALPNRKGFDVKVRKGLSFGSPEVKGSDAISNEMVNLQQEISRLLAESNSMKQQILSESERANKAENEIQSTERLSTLESELSKAQDDLKKLTDEMATEVQKLSSAEARNSEIQSELEALDQKEEQDKRMQAESALLSEGKELAQCQEEVQRLTKEIQMANEKLNELKQTKVNLENAVSELKKEVENLTEQNRSSELLIQELRDEINSLKDSKNELQNEIQSLRSTISQLNTEKDATLFQHQQSVERVSDLESQLLKLQPELEEIEQKVQMLMQDLEQKRQEADSAHAQLQDECNRHTQTEADLHRFKNLHSQLEEEVIKLTENLDRSTKELEELENAKLDLENTSRELKSTILDLNSEKDA

SEQ ID NO: 123244 - protein, 67 aa, Oryza sativa
  Clone ID: PAT_MRT4530_26098C.1.pep
PAPILGAPPWVPLRALKTLFCPQTMGPYCQKLFNNLVFKACSWPSWSAFTLGPCLMDLGGAILGAPG

SEQ ID NO: 123245 - protein, 119 aa, Oryza sativa
  unsure (1)..(119): unsure at all Xaa locations
  Clone ID: PAT_MRT4530_26099C.1.pep
NSPNITGHRDVLPLAKRTRWKINRYNCLNQAPSLVGKYGYSNLGPDRAQIIPYRLYQPSASSTFINSHSVSSXIRYPADVXSDSKSNSISHQIRFNLLPSSPNLMQNSVVNNNTIADET

SEQ ID NO: 123246 - protein, 231 aa, Oryza sativa
  Clone ID: PAT_MRT4530_2609C.1.pep
AVYCNLVAKYGEAVKTIPDFFEGLIALGQQQFEQAKLCWYYALACKIDMGTEVLGLFNHAQDNMEKGMGMWEGMENTRLRGLSKPSKEKIIFEKMGIDGYMKDMSSDEAFEQASSIRSHVNILWGTILYERSVVEFILGLPSWEESLTVAIEKFKTGGASPADINVMVKNHSANETTQEGLSFKVEEIVQAWNEMYDAKKWRNGVPSFRLEPIFRRRAPKLHHMLEHIHYA

SEQ ID NO: 123247 - protein, 565 aa, Oryza sativa
  unsure (1)..(565): unsure at all Xaa locations
  Clone ID: PAT_MRT4530_260C.1.pep
MADLGISTSDLATLAKLSTDGAPPPEQDMAREEGGTAPSPALGRMVVVEDFVRSGFLPPPSEFLLLVLNFYGLSLLHLNPNSIAFLSIFTHLCEAYIGVVPFLDLFRFSYELRWMEAGKVSGCCGFRLRDGMKARYISLQCHTSQSKWRSRWFYLELEELDPVLVVPENQPVRQDCWTSKPPMTPSLEAFANFIGDLREQGLTGYEVIQDLVARRIQPLQARAHPAFDYEGASDVTRISSRALCVDVVTQRVKDVLISPASTAEEVPTLFCDKPAPTRQXAINMRENKIFSALPPKDEPXMTSSSXPPPSRRKSWKRLLSLPLPLSSRREVEPRGKPRPXTSGAAGSRQKSSGSEDTSGLPPPPKRRSVKKIAGKLRCXPSGPQDWSNMMAECRRLFENAFRVVGAQMDYLTARAVSSDGRVAQLDTELEVARDDLQKMKEIMAGNEMQHLGVEKKMNDLQDHIFSIRNQLQKSFTSLHQLALECGVKSSIPAHPDETSLTSALGELATKMEAIPSKHAAKVSEEISNGIHTGVCHVLACVKLALPNVDLKEILSKGAADAHTRT

SEQ ID NO: 123248 - protein, 868 aa, Oryza sativa
  Clone ID: PAT_MRT4530_26100C.1.pep
HQVPLNIHVGCSKQSGKGRFEGSHEEEGGQLPSEDDREVRRRFHDDISIIVVYLDRHRGRRHTRVVDSSINCTNGPVDIYYSTPANPWRLFKLIGAPAGLLKLLGSYSITLTNLVIIWTLRTNQLVSLLIAIANRHLSSCTIFLSTVSDEKDPTIEIFLEPFGVLGADMTNPPPRILPRVMTNQGRHWCHESNTDQLQTIIKTSLPQHLNYATDMDSKVKAMIKLLNEDADSFARRAEMYYKKRPELMKLVEEFYRAYRALAERYDQATGALRQAHKSISEAFPNQMPPMSDESPSSSGQEVEPHTPDLPTFTRLPFDLDDLQKDGVGVSPQQFTSKRNGTHPEEASALPNRKGFDVKVRKGLSFGSPEVKGCDAISNEMVNLQQEISRLLAESNSMKQQILSESERANKAENEIQVLKDTVLKLNSDKDTSLLQYNQSTERLSTLESELSKAQDDLKKLTDEMATEVQKLSSAEARNSEIQSELEALDQKVKMQQEELEQKQKELKSFNLTFQEEQDKRLQAESALLSEGKELAQCQEVQRLTMEIQMANEKLNELKQTKVNLENAVSELKKEVESLTEQNRSSELLIQELRDEINSLTDSRNELQNEIQSLRSTISQLNTEKDAALFQHQQSVERVSDLESQLLKLQPELEEIEQKVQMLMQDLEQKRQEADNAHAQLQDECNRHTQTEADLHRFKNLHSQLEEEVIKLTENLDRSTKGLEELENAKLDLENTSRELKSTILDLNSEKDAVLLQQQQSLAKISDLELQLSKTQLELKNSEQKMQLLELEITQKSENMNSLTLNLKEETEKKLTLKLNKFLFLHNRNLFAKLHPSSEKVAMHNQNYTPWSLVLKWYRFSPWPRFNLL

SEQ ID NO: 123249 - protein, 66 aa, Oryza sativa
  unsure (1)..(66): unsure at all Xaa locations
  Clone ID: PAT_MRT4530_26101C.1.pep
LLLLLLPAAHSNPPPHLPCRRCPEGAGDNLAGAPHRXCRSFFPRERQGVLGKLXFKXLXXGKGIGF

SEQ ID NO: 123250 - protein, 157 aa, Oryza sativa
  unsure (1)..(157): unsure at all Xaa locations
  Clone ID: PAT_MRT4530_26102C.1.pep
LCLFYLNLAYTLVPTILILCKYWNRDIKHTSESWLSWSYDYYLVFDQRCSXFSHYLYFNKVDIRPPRNLRELRLGTPRADKALSDHVETKYHENSIQHRXRLHVSMVLHQDRLRRVRQMLTRLHRRLCAFSIAQERLVDLDKEYGMKRWCTRRDKIS

SEQ ID NO: 123251 - protein, 1046 aa, Oryza sativa
  Clone ID: PAT_MRT4530_26103C.1.pep
MDGGGVAFYYTGVLYDIRFFVPLDRFIAYSSSGVSSDFRRHAEDWAITRRPGSTFAVTFVAKDTGKPSAAYHYEQVAAAEASGAAVVRIERRSRSRSRGGADRAAAVAGGEAQLVAEGSMALDGGGAADGSAASSRATSPPVILGLLLFLATATFIQQYGSIFGGTISIFQAAIPIIYGALKGRYLLTLELWNASITIINLVGNTTWMIYSAVNKGVELSMLMTNSVACGLNIYHLLSIYRHNKERKKWYSTLSLEIHVFILFYVPNILFAASELVLIVYKQYSMKIYVQLSYILNTIFYVIELPVMIRAMITNNPDSDNEAIDIENQAIVKIDGQKKHHNERQEDRAEKKTTFTEVYLLPAPPGLFGQGKRKHSDNDKEIHFSKRMRSHIYSRSIKRGSPPTRTLQLQMDSLSEDSYEPEYVEEHRLKDLVKNSEFISYPISLNEKKIEKEICDDEEVDAEEGKVEDVDEEKEKKGEKINEVSHEWHSSNKQKPLSDSKEITSENEEAKEGKVEDVDEEKEEKKKQGKKIKEVCHECNLINKQEAIWMRKSEGQLEFKAILFVPKGAPFDIFDTRKKLNNIKLYVRRVFIMDNCEELIPEWLSFVEGVVDYEDLPLNISFELLQQNKILKVIRKNLVKKCVELFFEIAENKEDYNKFYKAFSKNLKLGIHEDSTNRTKIAELLSKKAVENSPFLEKLKDYEVLYMVDAIDEYAVGQFMEFEGKKLISATKGLKLDEKFDNLSIVMKEVLVDTVERDVFSDRVVDSSCCPVTGEYSWVANMERIMKENAIMDELPNKSQVNKCAPKQKVDILPVKENAIRLQSSEEREVNTKFSVTGICGDGRCLFRSIVHGAYIKLMMIPPDDNLEKDMADDLRKKVCDALEKECADKPWMPITVFVVEKTGGLRVFTKYGKEYGRNAIQVLFDGCMKAASGCLPCKTSLPRESASAWWTQVDTVSGQGCGESSPLCRPPAYPPEPPVVLSLVGGQLVLRLPSGVVVNLDDLSCESVRVWVQAMEWSKCSSSHCAAVTFLGIVRFKASSYLAIAL

SEQ ID NO: 123252 - protein, 92 aa, Oryza sativa
  Clone ID: PAT_MRT4530_26104C.1.pep
ILSPKIVKPNVLVLENTPLHLCEVKTNKHLYKLYRVKTNRLAVLAVKSDVWICIEYRLVFILLNAEIYLQIGMRFENDLLAAMEGNEVHIYT

SEQ ID NO: 123253 - protein, 116 aa, Oryza sativa
  Clone ID: PAT_MRT4530_26105C.1.pep
MAIYPTNEESPQNKNFDDDPLAEEYSRNDDKSSNKANDNDGGHRSPEDHVKARVKENASIPEVSAYVTVATLEAKPSSSWEEAPTKSELEEKAPHQPPSSTPEQGQPTEPRLVFDK

SEQ ID NO: 123254 - protein, 164 aa, Oryza sativa
  Clone ID: PAT_MRT4530_26106C.1.pep
MAAAGEEKPLPAEEIQGINDEAEPHPPSRNKDFLHNEEFQRVMRDVVVGPDYVPGGYALRILTDPATAFEELLEYYRKAGLIEGQVWKRYNIFEEVEGLDNSQDEIKMEEEPMKVEEAVRCRGRDATPDCPNEVKKRRLMDSDREAVPCNLPQECLSNSWYAAV

SEQ ID NO: 123255 - protein, 507 aa, Oryza sativa
  Clone ID: PAT_MRT4530_26107C.1.pep
MAHTSSQKHGNDDVDTGAEAAMDQLAGRSSLSPAREKTRRRPEKSGTVWTATAHIVALLIGSSVLAVAWTFAQLGWVAGPAVVVALSVVTYYSSALLADCYRDDDPLHLGGGAVHGEYIMWSKRNQGPKSVTFCGIIQYGVLWAAMVGYTITSSSSMSAVRRVNRFHRNWLAAGDGDGGGGGGGATGVRYMVVFGAFQLLLSQLPSLENVAWLSVIAVATSFGYSSICLGLCAAKWASHRGGVRGTLAGAAAGSPGEKVFNVLLAVGNIAISYIYSPVLFEIQDTVRTPPSESKTMKRASLYGLAMSAVFYLVLGASGYAAFGDDAPSNILTGAAFHEPFWLVDVANACVVVHFLGAYQVIAQPVFARLEAYVGGRWPESRLVTASYELRLRVPAWTSAPPTAVTLSPARMALRAAVIVATTAVAAMMPFFNAVLGFIAALGFWPLAVYLPVSMHIARVKIRRGEARWWALQGASAALLVVAVGMGVASVRDMVQRLNEAAPFKTTG

SEQ ID NO: 123256 - protein, 97 aa, Oryza sativa
  Clone ID: PAT_MRT4530_26108C.1.pep
RNIMNACEFEQHSGESSNNQNNHIFLDSGISLYMVIQGLKYTKLDMLGDVIGKVISLPPNMIQYEKWKASFQLEKDYFDDAPSDPCSTQSSQESNIA

SEQ ID NO: 123257 - protein, 77 aa, Oryza sativa
  unsure (1)..(77): unsure at all Xaa locations
  Clone ID: PAT_MRT4530_26109C.1.pep
WAEIXTPDVEYRCFIGGLCXGTDDRSLEGRLSTYGEILDSKIINYTETARSRGLGFFTLSSSHTMRDAIQGMNGKEL

SEQ ID NO: 123258 - protein, 73 aa, Oryza sativa
  unsure (1)..(73): unsure at all Xaa locations
  Clone ID: PAT_MRT4530_2610C.1.pep
PAAQKKKNKHVSCDFYHVSRDTREVSCETCQVSDDFNHVSYDTHEVSCDTCHVLDDFXHVSRDTREVSYDTCQ

SEQ ID NO: 123259 - protein, 92 aa, Oryza sativa
  Clone ID: PAT_MRT4530_26110C.1.pep
PAGNSHPPSPQSPRAHPLASPPPPLPLPHPPAATGPRHVVTPPRPRRRLPPPSPSLPRGTSGGSAAPGAVTPRRSGCPAARRLGTSTAEAPL

SEQ ID NO: 123260 - protein, 111 aa, Oryza sativa
  Clone ID: PAT_MRT4530_26111C.1.pep
LTAVPAGGRRSRARHSKGKPAAARTNRRAMGGGEATSGGGGGFRARVEHYLYSGEKKHVVAGIAIFAAIFGVPWYLMTRGAKHQSHQDYMERANKARSERLSSGQASSPKE

SEQ ID NO: 123261 - protein, 412 aa, Oryza sativa
  Clone ID: PAT_MRT4530_26112C.1.pep
GSEKEMNEKDATDLEERSEASEHGQALSFHGGAMFLQEAQIASPAAANNALTSMANPFPIPPGLWNSTFTQHGSAGAPPPFVATPGFVDSTAGFPCYNGGNLGAMINHPFPGIHQPLGDFQNGVEPCREIEDIEIEGSKNVSQTGEKQQGDGETTHAVDSSSKELSMPGRNGGAGHDEGTRVSCSKKRKRSGQDGGVKHAEGGEQLATVGSAQKNEDDEKGEPKRSSVASGKSSGKQIKDNAGSPKEDYIHVRREKISERMKYLQDLVPGCSKVTGKAVMLDEIINYVQSLQRQVEFLSMKLASVNPTLDFNIERILSKDIFQCRGTTASSAFGFFPDIVHPRLHPPKYTQVGMPSIVNPTDAFGRVIHAPLGTNSAFKEPKHQMPNNLNGEFQDVIEMPFTHDHHGSNDQP

SEQ ID NO: 123262 - protein, 79 aa, Oryza sativa
  Clone ID: PAT_MRT4530_26113C.1.pep
YTPPHAFKEPVLSLIIFVDREDQNLFVSGYLIIPADPSQDDNIVDVVYGGHIDGTDGVHQCVTQRERFFPVTKVHARPE

SEQ ID NO: 123263 - protein, 220 aa, Oryza sativa
  unsure (1)..(220): unsure at all Xaa locations
  Clone ID: PAT_MRT4530_26114C.1.pep
FFSNVYHKIHKHSSMPHRPCPPPSAPPARTPPPPTXRCRHLHRPARAPPLLPAGAVTTQSAPLPPATHHPSRAPLPATGPPPPVRAPLPSRHAVSXPTRRQQLSRHRRQPACRRSSXIVPNLTGGDRRMGGERTGGEKVXRGTSVVFLCKYVKKLKGSGSFRVVWSCGAAKTQLHLRSTNLWNSSANSAPKNRESIPFGTVPALGKLELGARAVPNLRVL

SEQ ID NO: 123264 - protein, 40 aa, Oryza sativa
  Clone ID: PAT_MRT4530_26115C.1.pep
MDGVLATCENRLLMTTKMIRNYCSRRFGSWTYYLILGLSR

SEQ ID NO: 123265 - protein, 643 aa, Oryza sativa
  unsure (1)..(643): unsure at all Xaa locations
  Clone ID: PAT_MRT4530_26116C.1.pep
MLRKTLPFVNYVQGHPEIVSQLVDLIGXTSIMEVLIRLIGADETMYSGYVDSMRWLDDIXVLEMIVDKFSSSDSPEVHANAAEILCAITRYAPPALATKISSASFVARLFHHAFEDSRPKSVLVHSLSVCISLLDPKRLVLASYQVFRSQLSHATLVTASPDTVGGMLDSLCDLLKLLDVSSAENVLPTTYGVLQPPLGKQRLKIVEFISVLLXIGSVSAEIRLNVFKLLKEIFFKETFNNFLHHHVESIISSCLDSKQDQLICHVLDECKLVTRILEAEKNSALSIELTKHTHTVPLEGRFTPRIGLVGHMTRISNKLIQLAKTNSIIQSHLQQNSGWAEWHAGTLTRCNAVENVYQWACGRPTTLQDRGRDSDEEDFRDRDYDVAALASNLSQASKYGIYSYEDIDEDQVPHERDDEDVYFDDESAEVVISSLRLGDEHDSNSLFTNSNWFAFGEDKALNGEVNPEASPSPNSEISSPNVDDENDEVILTEVTDGRKGSESLLAVDLNEESSHTGLTNVSIDKLEDDIRPPTPDVKESPPEFVEWREEEAEPADVPENDTAVPNGEVGSVDQMDGIEDVMSGTTELRVEKEIEVLSGTSVPESTIGELLPGSTEISTTRHPEPVDDRNPMEPPMGEQKAES

SEQ ID NO: 123266 - protein, 111 aa, Oryza sativa
  unsure (1)..(111): unsure at all Xaa locations
  Clone ID: PAT_MRT4530_26117C.1.pep
MAQREKKVEEPTELRAPEMTLCANSCQNCFLAASASSSGGSAAASPSTTSLPVFPVVEKPRQAVQSSAAAAVALVVERPTAGPVESXXKAXRXXXGNRCHXWRRGVGLTGF

SEQ ID NO: 123267 - protein, 246 aa, Oryza sativa
  unsure (1)..(246): unsure at all Xaa locations
  Clone ID: PAT_MRT4530_26118C.1.pep
SDRRTWRRPCSPPPPCHSXGXGLSXFSGLRXSSSLPLRRXATSDNFXTRSXSGTHAVGTNGGXRRAPTXAXXKVXINGFGRFGRXFXRXWHGRGXNXPLXXXXXKNPXGXKXXSXXLILNSTLGXXNQXXPVGXNPFSXKGGXXXVFXNXXXXNLXGGXLXXXSSXGXXFFXXXXGGGXXXXXGPXCXLPPPXXVXSPLLLXXXAXXXXPKKPXXXPSCXXXXXPPFLKFPNXIXXFXGXXKTPPV

SEQ ID NO: 123268 - protein, 170 aa, Oryza sativa
  Clone ID: PAT_MRT4530_26119C.1.pep
MAQREKKVEEPTELRAPEMTLCANSCGFPGNPATNNLCQNCFLAASASSSSSSAAASPSTTSLPVFPVVEKPRQAVQSSAAAAVALVVERPTAGPVESSSKASRSSSVNRCHSCRRRVGLTGFRCRCGELYCGAHRYSDRHDCSFDYKSAARDAIARENPVVRAAKIVRF

SEQ ID NO: 123269 - protein, 75 aa, Oryza sativa
  Clone ID: PAT_MRT4530_2611C.1.pep
FFSDKTRFYIYAFDFKMSFLHLTEGVSVSSLVSHHMGTPCCLSHSDAMVRAGAGRAALTPHHTSVTLQQSRSVPL

SEQ ID NO: 123270 - protein, 93 aa, Oryza sativa
  unsure (1)..(93): unsure at all Xaa locations
  Clone ID: PAT_MRT4530_26120C.1.pep
LPVGQVTTIVAQWLRRPTGMFQPSMIRLXAGCIYETSYMSIMKCDIYMRNDLYCNIVXLSGGTTMLPGITPRMTTEITALSTSRIITKVVASH

SEQ ID NO: 123271 - protein, 125 aa, Oryza sativa
  unsure (1)..(125): unsure at all Xaa locations
  Clone ID: PAT_MRT4530_26121C.1.pep
IWSIAHNRGHGYSNSFTLARGAQLCPQDTIHRHVIVPGLTHXMSSDCDNXKTLRITXPNHPHHAXGFTPTPNQEWAVPSCATGESGSWTTGHPSRPNSITPTLATXPRKGSSYTTAQAVTHSHMW

SEQ ID NO: 123272 - protein, 72 aa, Oryza sativa
  unsure (1)..(72): unsure at all Xaa locations
  Clone ID: PAT_MRT4530_26122C.1.pep
KVKGIKKGGGAMFSRVGFFIQAXVTGEGPVENLFKHLRGPLGKNLVPVILGAAKRTPSLEKFCRRGRGVASS

SEQ ID NO: 123273 - protein, 47 aa, Oryza sativa
  Clone ID: PAT_MRT4530_26123C.1.pep
MWLLLSSEATLGSNKTCTRGNGKVSPFSTPALQKPRTLRYIQHSHNQ

SEQ ID NO: 123274 - protein, 39 aa, Oryza sativa
  Clone ID: PAT_MRT4530_26124C.1.pep
SYTHGAKLNASPSLTHVVSSRARIHRSPDDVLVDPSQTY

SEQ ID NO: 123275 - protein, 465 aa, Oryza sativa
  unsure (1)..(465): unsure at all Xaa locations
  Clone ID: PAT_MRT4530_26125C.1.pep
MATSGGEDPSGSASSSASALDSLPFSSGNPRIEETRGVVLLHPEPPAASSSSLLPVGRKPRVCVPGVPNHLTYADFGRFCASWASHILETRIIRIDGVEDQYGVLIKFDTQSFTDSFYMSFNGNRFSSLEGNVCRVRFVEDVHYTQLIEHAHSSVTSSAEQPTCPVCLERLDQDPGGILTTICNHSFHYSCMSKWADSSCPVCRYCQQEPEKSSCXVCGTSENLWICVICGHVGCGRYKGGHAIEHWKETQHCYSLGXRAAANYVHRLIQLETDGNLVEYNFYGDHSVDGMCSTCNGDAGISEALLDSKMEAIVEEYNDLVTSQLEKQRNYYESLLLEVKEDNEKEIAAATEKAVGIKVQKLQAKLDKCMEETGFLNDIHENLVKNMEMWRERIQKVKEREQAAIRLKDEKIEKLEEELRDLIAHFERQNTVAEASESMSSDINGSTILSVPSESSASSNSSIRN

SEQ ID NO: 123276 - protein, 398 aa, Oryza sativa
  Clone ID: PAT_MRT4530_26126C.1.pep
MAEPEQQQQQANPDEVVLGQETGGARVAILNRPRQLNVISDRVVYLLAQFLESWEKDEDAKLVIFKGAGRAFSAGGDLKMFYEGKSDDSCLEVVYRMYWLCYHIHTYKKTAVALVNGLVMGGGAAMVAPLKFAVVTEKTVFATPEASVGLHTDCSFSYIHSRLPGYLGEYLALTGARLNAKEMIAAGLATHFVPSEKLEELEKCLLNLNTGDESAVRAAIEEFSTDVQPDEDSILNKLRTDVLFQMLPTINKCFSAETIEDIIKAFESEGSIDGNQWIATVLKGMRRSSPTSLKMTLRSIREGRKQSLPECLKKEFRLTMNTLRSVVTGDVYEGIRALSIDKDNAPKWSPATLEEVKNEDIDRLFEPFSSEKELQVPSDDSNRWSGKFEHTVYGRTSE

SEQ ID NO: 123277 - protein, 673 aa, Oryza sativa
  Clone ID: PAT_MRT4530_26128C.1.pep
SSTLSSPFQWSVRAAGCGRSSQDPSGLNLQGNPAENQESWTSGVSVGRGTPNLGVGTAVAGRSCPSSTLFPGSSLSSTALLNTMHEGSFPQTALVAGSVSSADEQHGAPPVRPSYNLPAGCTQVPISILVFHRRLTGRGSRCRSPQSRSFMPAPALSGVSEDGAYGPIPQSDFLSLRGPSEVFPGDMAMNHSEPATSYGYNSEYAPMHLQPNGLYTEASNTESEREASQLQQSAEAVICDSLSKLESAMEKIQGQNPQESSGLVAEGSADDNIHKYHQKAKRARTQITHSDKIDLPTQAVSACKEKTITQIEMQIADAERTEALKGEDAPAQKLKTRRRKHRPKVIREDRPAKKQMATTSEEKPLNQKPKRKYVRKNRNPSSLEKCAEPFSDHSISRESRTTVRSSIASVRRRLQFEFGEHGVQRDQSSMTNSWYQNQEKPVNAESSLCSVTKSSVQVEHGQELHMENSPEGLFFGINSKLNKILDEYIHLPEAAPKPSEQIPLAASGHVSEELARKQYDVRHTHDPDSTSYNIERSGLITTKGHKKDLDLNYSNTNGFQMYCSASLLPEMDSTKGSMTKVSKMDKNKKRHYGGESSLAGTQSSIIMRTAAEMLAVYQACGIKKKRSARVRRNSFLSVMDLEKNTSQESTRLPRSCMEALYESSYMKFMNKKR

SEQ ID NO: 123278 - protein, 60 aa, Oryza sativa
  unsure (1)..(60): unsure at all Xaa locations
  Clone ID: PAT_MRT4530_26129C.1.pep
EEKKRWKKSNGGGGALPGPDQPXFNPKAXSFLPPSFSXSIAVNLANFRLATCXPRRSSSX

SEQ ID NO: 123279 - protein, 55 aa, Oryza sativa
  unsure (1)..(55): unsure at all Xaa locations
  Clone ID: PAT_MRT4530_2612C.1.pep
VDSPXPFFFFFQYQQGRGILLLMLHTISIWSATLDLLHPTNIKRVFFNNLLHFYT

SEQ ID NO: 123280 - protein, 277 aa, Oryza sativa
  unsure (1)..(277): unsure at all Xaa locations
  Clone ID: PAT_MRT4530_26130C.1.pep
RHHRRRLGWRMLAGERRRGGANGGHQYVEGDAAIFTEARTAADDDQMTTAARXERRRPSAXRRRRCSSDLRRRRRGGRGRRRLGDHEGGFPERRRXPERRRRTAGRTAATAALGCTRLGRYRRRRAKARVAAGGGDTGGPFIAARRRRRWPTVAGDGDGNFRVRERERNPIRARIHRFPNRIKRRFQKRKDRGDLGDHFPSIDFTGDGKERANWKGGGGAAQLGFXARRTTGPTGGTHLSAAEGARARWLLLTGPTGPREREKGFGPTFGPKPKERF

SEQ ID NO: 123281 - protein, 94 aa, Oryza sativa
  Clone ID: PAT_MRT4530_26131C.1.pep
MTHLAVEKGHSEVVENEDFRLELNVGDGGHNKLQQHRRPPLFHDATLVDRGEASPRGGLGGSCREENHVPIPHGLHLLDHQVRIMSRSPTGSTS

SEQ ID NO: 123282 - protein, 86 aa, Oryza sativa
  unsure (1)..(86): unsure at all Xaa locations
  Clone ID: PAT_MRT4530_26132C.1.pep
IVGCEHMVLMVVLMTVKDRFASIGCETLTMSTTSQYGQRLYLLYSMVHCGAPDXEVAEISPRGSLGSPCLXYKGVIMIQERCTAVN

SEQ ID NO: 123283 - protein, 665 aa, Oryza sativa
  unsure (1)..(665): unsure at all Xaa locations
  Clone ID: PAT_MRT4530_26133C.1.pep
MRKGAGLRKFIKKSHESDRRSKKNWNRDRSIYQLLKMVINPEVGRKIRLKCRGGDSPQDHLSPPYXGLILARTHSHAAHKKTIGKHAQTFPSRGMLPTNGSSKLQPPTQRPNPRDATHAGRQVGLXLGDMVQHHRATLLLHQQQRKGDATAEEGQQLVAEEGAGKMKELRRRLVDYACHHRKHGHDALLRMLAGFALVSCLLLLLPGSPFSAAVDDLLQMGRTRLDDETPPPPPCAAVSNGTICCDRTAMRTDVCIMRGDVRTEAASNSLFLLVPPPDNSTAAAGRDERIRPYTRKWESSIMSTIDELRLRAVPEGGAAPASCDVRHDVPAVVFSTGGYTGNVYHEFNDGIIPLYITARQYNKKVVFVMLEYHDWWMTKYGHIVEQLSDYAPIDFTNDRRTHCFPEAVVGLRIHDELAIDAARMPGNRTIQDFRRMLDDAYRGRIQMIIEEEEKAAAVALGTPTQGSIRKKSALKDDKPRLVIVSRNGSRAIENEAELVRAAAGAGFRVAVLQPRQDTELAKMYRALNASDVMVGVHGAAMTHFLFMRPGSVFIQVVPLGTDWAAETYYGEPARRLGLRYMPYKIKPAESSLYRQYAKDDAVLTDPDTVNAKGWQVTKKVYLDGQNVRLDMVRFRRRLRDAYDHWAELRRRHNADSTETEQRKPW

SEQ ID NO: 123284 - protein, 64 aa, Oryza sativa
  Clone ID: PAT_MRT4530_26134C.1.pep
HHRRPPQQPLVLLLDDVVRRGPQPPEPLHDCVDHRYISVRLCVCVVARVNTPSADARSASVTAT

SEQ ID NO: 123285 - protein, 193 aa, Oryza sativa
  Clone ID: PAT_MRT4530_26135C.1.pep
MPREPAAMRVYTVCDESKCTPMDAEDCDPYTDVFFIKFSQVSNARFAKRKLDESVFLGNRLQVSYAPQFESLLDTKEKLEVRRKEVLGRMKSSSGRPEGLSHHSPGQGSSAANSHRQMSSNKREYTKTLHASQFEDPRFTHVSSNKDYFPSESMNATVNLVREKLDKLCSIWISNGSYEVVTSVLWHEEFHDV

SEQ ID NO: 123286 - protein, 88 aa, Oryza sativa
  unsure (1)..(88): unsure at all Xaa locations
  Clone ID: PAT_MRT4530_26136C.1.pep
LPKSKANNXSDLLAIRFFLAFSHSTHIISQXFTINTRPTCLTHSVSWFLCPSHKPWFLCPSHKPTVSLQAASPLSTLFSPPTQHLAGL

SEQ ID NO: 123287 - protein, 187 aa, Oryza sativa
  Clone ID: PAT_MRT4530_26137C.1.pep
MPREPAAMRVYTVCDESKCTPMDAEDCDPYTDVFFIKFSQVSNARFAKRKLDESVFLGNRLQVSYAPQFESLLDTKEKLEVRRKEVLGRMKSSSGRPEGLSHHSPGNTQKHFMLLNLKILVSLMYPLIRYAVQQYVSSNKDYFPSESMNATVNLVREKLDKLCSIWISNGSYEVVTSVLWHEEFHDV

SEQ ID NO: 123288 - protein, 121 aa, Oryza sativa
  Clone ID: PAT_MRT4530_26138C.1.pep
PLPSPPLTSSSPPPSLPSLRLAGSGSTRPWRAGGGSRRCRRCRRDLLVAESFPSPGEGGVEPPHPLPSPHLLVAATSPPLPESSRWRIRAPATGRRWIRVPGASRQRIQKALSSLSRPPRH

SEQ ID NO: 123289 - protein, 67 aa, Oryza sativa
  Clone ID: PAT_MRT4530_26139C.1.pep
INDAFNFSKKKKKKKKKKKKKKKKKKKKKKKKKKKKKKKKKKKKKKKKKKKKKGGAFFRDKILNPRY

SEQ ID NO: 123290 - protein, 104 aa, Oryza sativa
  unsure (1)..(104): unsure at all Xaa locations
  Clone ID: PAT_MRT4530_2613C.1.pep
SGRHVNQDMILCLGQPTPKEEGQLLCRKGLLGETIVAXRLTYRXNHDKAYGXRVLGATHAEQEDXQHAIRVMICALEADPTNLKDFPALGVSDTNETELGESYA

SEQ ID NO: 123291 - protein, 166 aa, Oryza sativa
  Clone ID: PAT_MRT4530_26140C.1.pep
GRGFFFFFFAFFFFFFFFFGALNHFYFLILFIHSSQRDGSMEVFLPSSGKQSTHTRWQWKCYEQDANQHPELKQTRGSNQIPKKKTQGKVHIFFSSPTPPCHHHVLRIFFYPVLFAQASTISPSSFDARISSGCAAAGEGGLEEAGRGGGHGCHARGGGAELLALG

SEQ ID NO: 123292 - protein, 355 aa, Oryza sativa
  Clone ID: PAT_MRT4530_26141C.1.pep
MAAMATTASSLLKTSFAGARLPAAARNPTVSVAPRTGGAICNSISSSSSTPPYDLNAIRFSPIKESIVSREMTRRYMTDMITYADTDVVVVGAGSAGLSCAYELSKDPSVSVAVIEQSVSPGGGAWLGGQLFSAMVVRKPAHLFLDELGVAYDEQEDYVVIKHAALFTSTVMSRLLARPNVKLFNAVAVEDLIVKEGRVGGVVTNWALVSMNHDTQSCMDPNVMESRVVVSSCGHDGPFGATGVKRLQDIGMIDAVPGMRALDMNTAEDEIVRLTREVVPGMIVTGMEVAEIDGAPRMGPTFGAMMISGQKAAHLALKALGRPNAIDGTIKKAAAAAAHPELILASKDDGEIVDA

SEQ ID NO: 123293 - protein, 811 aa, Oryza sativa
  Clone ID: PAT_MRT4530_26142C.1.pep
MEMDEVGGRWTSLGQMKATRAAARKSINKWSNKSLNDLLAILQQAIPNGSNIPRTFSEARKIIGKLGLSYEKIHVCPNNCQLYRKDKANDDFCSKCGASRWKNKKDKTKLTKKERKKAAPRKVLRYFPIKPRLKRLFMHKETAAALRWHDEGRVKDGALRHPADSEAWKAIDSEFPEFASDSHNIRFGMASDGFNPFGTMSSSYSCWPIVLIPYNLPPWLCMKASSLMLSLIIPGPSYPGKDFHLAYSRTSTLKKIQEVPDFEKSKTWKGISGLFSLPYWDINLLRHNLDIMHIEKNVPDGYAGNISRCVNVEQGKISGLKSHDCHILMQELLPLALRGVLPDNVTAVLFDLCGYFRELNAKVHYIDELKKLDERIKLTLCHMEMIFPPGFFTIMVHLVSHLLATGALLGGPACFRTMYFVERYLGVLKSYVRNRAHPKGSMAEAYLADKCMVFCSRYLDGFETKHNRPSRNDDTHELDSYPIVKQGSSIFSHVGKPLGKPSNYVIRGMAKVQAHRYVLFNCSDVNKYLRAHADQIASTYPRRGVNPKTIERVQNEKFHEWFRAHIMDLERKNGLHIVNEDVRWLARGPLDAAKRYRAFNTRGFRFRPKRLDGVTQNSGVVLTAKKSSYTKASDANPILGDVTYYGRIIDIIELNYSGKFSVVLFKCEWVDVISGKGIKKDKYDYTLVNFSHLIHTGEKIEHEPFILPNQADQVFYVDDPMNPGWSVVRKMKPMDIYDTGKEEWIDEMEAEPFHVSHLGELFDQSNNQHWVRADVEGTMVDANNGLGTEVLWYFVSSIQVPCFLFHMEEQI

SEQ ID NO: 123294 - protein, 41 aa, Oryza sativa
  Clone ID: PAT_MRT4530_26143C.1.pep
TALSSGVHAENRAPNIMVVIGFPRVELRRMDRGSQKPSGRV

SEQ ID NO: 123295 - protein, 90 aa, Oryza sativa
  Clone ID: PAT_MRT4530_26144C.1.pep
HEEKTIDDQPWAEELPSSSMAVANPPPTNESSPTQSTKQLTNQKLHPSLCSPVWHVLRAQPPPHGEEDDDLGSRLTGKTSKERKRERGRR

SEQ ID NO: 123296 - protein, 569 aa, Oryza sativa
  unsure (1)..(569): unsure at all Xaa locations
  Clone ID: PAT_MRT4530_26145C.1.pep
DGSYPLDLATIKKLLLSPRPSDDYLTGVDGFLDFAYNGKSSGEKIRCPCVKCALRWLRKRNEEAQLQEKTKTNMHQLVIDAFGHMDNGHPMNSSTCQNSFETGPNPETQAFFDLIREADQPFWRKDKANDDFCSKCGASRWKNKKDKTKLTKKERKKAAPRKVLRYFPIKPRLKRLFMHKETAAALRWHDEGRVKDGALRHPADSEAWKAIDSEFPEFASDSHNIRFGMASDGFNPFGTMSSSYSCWPIVLIPYNLPPWLCMKASSLMLSLIIPGPSYPGKDFHLAYSRTSTLKKIQEVPDFEKSKTWKGISGLFSLPYWDINLLRHNLDIMHIEKNVCDNICGTLLGLEGKSKDNLQARLDLQDMNIRSXLHPQRRANDKYYLPPASYTMSXKNEKQQFCKVLHDIKVPDGYAGNISRCVNVEQGKISGLKSHDCHILMQELLPLALRGVLPDNVTAVLFDLCGYFRELNAKVHYIDELKKLDERIKLTLCHMEMIFPPGFFTIMVHLVSHLLATGALLGGPACFRTMYFVEYLGVLKSYVRNRAHPKGSMAEAYLADKCMVFCSRYL

SEQ ID NO: 123297 - protein, 75 aa, Oryza sativa
  Clone ID: PAT_MRT4530_26146C.1.pep
MNLFVTLSTFDITTTEFGWYVDRWYQGICEIEMPICPCKTRETNMDTIRVVLVVSIWNSIRPSLSGTLSIHKVCF

SEQ ID NO: 123298 - protein, 107 aa, Oryza sativa
  Clone ID: PAT_MRT4530_26147C.1.pep
RYYHRNKNNSKRNKLLCPYISIRRAFTKKQIPNQQPANTCNEGPPMSLKLDTRQGGERVLTRDHRIVGRWYLHCPKNWHYTVYSPKKIGEEISKETEKDIKGLPHYR

SEQ ID NO: 123299 - protein, 67 aa, Oryza sativa
  unsure (1)..(67): unsure at all Xaa locations
  Clone ID: PAT_MRT4530_26148C.1.pep
XNVLSLGSVGPGNKEVPLQERSSGFVMDLLLILFCGNFSLMAKCACAAYSSVTMCFFSVYFCSTIFY

SEQ ID NO: 123300 - protein, 67 aa, Oryza sativa
  Clone ID: PAT_MRT4530_26149C.1.pep
IRRRWWKERGWRNARRNIKGSEGGSVIKRPIKWGQKILVTKKTPCPPPALTPVKGSNFWESQDTNPE

SEQ ID NO: 123301 - protein, 329 aa, Oryza sativa
  Clone ID: PAT_MRT4530_2614C.1.pep
MNTAVEVRCAAAGGGGVNAAAFGRRMMRPAPAGHCRVIRAAATSTVASGRGEDDYYKVLSLDRAGEVGAEEIRRAYRRLALRYHPDACPPSRRAESTRLFLQLRRAYETLSDPALRVRYDAELMMRVRRPARPAAEEDASSSSSSLARDVWEAQLRTLRARSDERRRHGADGTARRGRWFEIIVEVVLEIINFQEMNRVYWFVGTGDSMPRESICTDGPGVGLVSNRQLNGGPTGDKQRLDRRHTGGQTGGGDSKRQLIPAVRLEIESRSDRRQPGGQTGASTSVRPRSIDFEEILGSAVCDNIEVGSSAPYSKENGQSRDKPNSIKNL

SEQ ID NO: 123302 - protein, 143 aa, Oryza sativa
  Clone ID: PAT_MRT4530_26150C.1.pep
LWVIGFVTFFLSSILDNLTSTIEMVSLLRKLVPPSEYRKLLGAVVVISANAGGAWTPIGDVTTTMLWIHGQITTLNTMQGLLVPSDVSLAVPLALMSLTSEANGSSQKSSSLLSSEQMAPRGQLVFAVGLGALVFVPVFKALT

SEQ ID NO: 123303 - protein, 77 aa, Oryza sativa
  Clone ID: PAT_MRT4530_26151C.1.pep
FEECIRKHAKSSVGTVRRTFFMVSGVSSYLSGCWARFTSVPMGNLGDISGAYHFSCRRGGQDLRFFFFSRGLRLGLY

SEQ ID NO: 123304 - protein, 100 aa, Oryza sativa
  unsure (1)..(100): unsure at all Xaa locations
  Clone ID: PAT_MRT4530_26152C.1.pep
MTAGRFGAERRHGRQAXAGADGGGDQAVGHHSTRAREAPAARRFERHARARVLACGAERLRGRAAGPGGADGAGAARAATTRARVREQRGPRHHSAREDN

SEQ ID NO: 123305 - protein, 115 aa, Oryza sativa
  unsure (1)..(115): unsure at all Xaa locations
  Clone ID: PAT_MRT4530_26153C.1.pep
WPPVTGRCCSSSPSSSRRPPWRSPTTPSRRSSPPWRTPRSAPSTATRRPTTPWTTRTPRRSGRPSAPPXPSPSPSSPPRRAPPARRQAAPAPVTPLVLPLTSAPPPRSSPACSPS

SEQ ID NO: 123306 - protein, 161 aa, Oryza sativa
  Clone ID: PAT_MRT4530_26154C.1.pep
MATLSMVSVPIATSSLPLSARGRSSSVSFPVPKKGGIGHGGLRIECIRIGGVEIPNHKRVEYSLQYIHGIGRSRSRQILLDLNFDNKVTKDLSEEEVITLRKEKRFNRVAIERLKEIRCYRGIRHKLGLPVRGQRTKNNCRTLKGRRASVAKKKSPASQEE

SEQ ID NO: 123307 - protein, 171 aa, Oryza sativa
  Clone ID: PAT_MRT4530_26155C.1.pep
MATLSMVSVPIATSSLPLSARGRSSSVSFPVPKKGGIGHGGLRIECIRIGGVEIPNHKRVEYSLQYIHGIGRSRSRQILLDLNFDNKVTKDLSEEEVITLRKEVTKYMIEGDLKRFNRVAIERLKEIRCYRGIRHKLGLPVRGQRTKNNCRTLKGRRASVAKKKSPASQEK

SEQ ID NO: 123308 - protein, 200 aa, Oryza sativa
  unsure (1)..(200): unsure at all Xaa locations
  Clone ID: PAT_MRT4530_26156C.1.pep
MGRPAQGGPNSRARGXGGERERAGGPDSPRAVPGGTRLSAAWLTVRREHATHARGQGTDSXACARSGTDAXVRRAHTQTDGSRWIARTRRDRPGSDPPCLAELAPTWHLRGCHAGRREVNNHPAANGRRAAAASGRTNHSHTGNSEHTGRLHLTRGSQPTALIRRRLIDGGXLRRQQPAAGEEGNSNXVTRGLFPAERAS

SEQ ID NO: 123309 - protein, 365 aa, Oryza sativa
  Clone ID: PAT_MRT4530_26157C.1.pep
MCGGAIIHHLKGHPEGSRRATEGLLWPEKKKPRWGGGGRRHFGGFVEEDDEDFEADFEEFEVDSGDSDLELGEEDDDDVVEIKPAAFKRALSRDNLSTITTAGFDGPAAKSAKRKRKNQFRGIRQRPWGKWAAEIRDPRKGVRVWLGTFNSAEEAARAYDAEARRIRGKKAKVNFPEAPTTAQKRRAGSTTAKAPKSSVEQKPTVKPAFNNLANANAFVYPSANFTSNKPFVQPDNMPFVPAMNSAAPIEDPIINSDQGSNSFGCSDFGWENDTKTPDITSIAPISTIAEVDESAFIKSSTNPMVPPVMENSAVDLPDLEPYMRFLLDDGAGDSIDSLLNLDGSQDVVSNMDLWSFDDMPVSDFY

SEQ ID NO: 123310 - protein, 145 aa, Oryza sativa
  unsure (1)..(145): unsure at all Xaa locations
  Clone ID: PAT_MRT4530_26158C.1.pep
EPRHCPPLHPRRGPPPPPVPPPPPPPPPPPRSLATTSRRAPSSSPVRAPPQGPRSXPPARRSPRPTAPSPVDAATSPDPCSLPVPNPDESSIAPPPASTTPPDHPPSPQSRQLLPSCESPIAQCGFVVAVIEPSHRRRLPLRPPA

SEQ ID NO: 123311 - protein, 64 aa, Oryza sativa
  Clone ID: PAT_MRT4530_26159C.1.pep
MANYGGDNNDDGNDDCGDNNDGGWGGWECDRGSFLKMDPNVLNVLVSKAKENLVHAESNEKGQA

SEQ ID NO: 123312 - protein, 144 aa, Oryza sativa
  unsure (1)..(144): unsure at all Xaa locations
  Clone ID: PAT_MRT4530_2615C.1.pep
MGGGSPCASCKLLRRRCTKDCIFAPFFPADDPHKFAIVHKVFGASNVSKMLQELPAHXRGDAVSSLVYEANARMRDPVYGCVGAISFLQNQVSQLQMQLXAVAQAEILCIQMQHRDDGAAHQLDAAADHXPLLDQQQQQMVVDA

SEQ ID NO: 123313 - protein, 118 aa, Oryza sativa
  Clone ID: PAT_MRT4530_26160C.1.pep
PRVRADSPEPEVAGGGGGGGIALFFLRCFSGKEAGSSWQLKTMGHFSNQRRGVGFDNWAGHPRGEKAHPAIVTKNGPAPNPGIFVGRLRSPDLPILHLRWPRKTWLTLMVGFTGNYNH

SEQ ID NO: 123314 - protein, 71 aa, Oryza sativa
  Clone ID: PAT_MRT4530_26161C.1.pep
IACKIRGRLHFHAVHFMRTLPTGSVDPNFGRRVRNRRQLNSLQNTWVGFSSPSLPFPPRFGSVVRLGFSLR

SEQ ID NO: 123315 - protein, 163 aa, Oryza sativa
  Clone ID: PAT_MRT4530_26162C.1.pep
MALSFLPNFGNYKRNPAKILVSYQNFGNYFGYAKIWRTPVRETCTVKHCEMDVRVEQPMAKSVRRRDSARHQQHFKDTNMVGLPGKVPWGIKHGLRFAHLESLGARKNANSTYSQSSKIGSGSPTSWRLEHDKIMGSAPSTVEKAKQLYISLSAADTRKEFET

SEQ ID NO: 123316 - protein, 42 aa, Oryza sativa
  unsure (1)..(42): unsure at all Xaa locations
  Clone ID: PAT_MRT4530_26163C.1.pep
SQALLTCIYAYVXQKSSDDCTHVLDDESCSLSPELLHADLST

SEQ ID NO: 123317 - protein, 66 aa, Oryza sativa
  Clone ID: PAT_MRT4530_26164C.1.pep
MIPNLERWAHNTTGTWDPHISDSSLCPRMDGGAMTSSDKEHPSPTWPNELECGEEQQRPADEPKSA

SEQ ID NO: 123318 - protein, 229 aa, Oryza sativa
  Clone ID: PAT_MRT4530_26165C.1.pep
MASLLLLLIVATSAMACVEQEKSSLLRFIAELSQDGGIAMSWQNGMDCCCGKASPSLGELTSLSRLNLSYNSLSGSLPAELMSSGSIVVLDVSFNRLNGDLQELNPSVSNQPLKVLNISSNRFTGEFPSITWEKMRNLVAINASNNSFTGHIPSSFCSSSTSFAVLDLGYNQFSGNIPPGIGKCSALRLLKANANNIRGPLPGDLFNATSLEYLSFANNGLQGTIDDAL

SEQ ID NO: 123319 - protein, 80 aa, Oryza sativa
  unsure (1)..(80): unsure at all Xaa locations
  Clone ID: PAT_MRT4530_26166C.1.pep
SPVQPLVRRPQLRLCVVSAYLQLIGVPHHLILQLFVSAAVGIRYGKYCGVGWSGCDGEEPCDDLDACCRDHDXHCVDKKG

SEQ ID NO: 123320 - protein, 593 aa, Oryza sativa
  Clone ID: PAT_MRT4530_26167C.1.pep
MASAAAPKRCYYEVLGVPRDCSPADIKLAFRRLALSLHPDKQPPGSDVAAATAAFQELQHAHSVLSDPHERSYYDSHRSQILFSDHHPSSGPGRGGGVASASASPVPDLFAFFSSSAFSGFSDSGRGFYKVYGDVFDRVFAQELAYARRMGMPADAVPTPPVIGNLDSPHAQVAAFYSYWLGFGTAMDFGWAAEWDAARGESRRVRRLMEEDNKKATRKARREYNDAVRGLAAFCKKRDKRVVDMALKKKVEEEKRKAEEAARKKEEERRRKERAMAYQEPEWARVDEDEAAVFEDDEEEETRAKRKEELYCVACNKKFKSDKQWKNHEQSKKHRDKVSELRMVFEEEEEALKDAEEEEPEEVDVGFDFQPAQESEESEFSDAAEELADELSEGLEVRDEEEKGDKHLGNGEQKVGSYDETSVLEEMLSRSRRKNRKSGFVAPQEEASPAGAMDDDDDEDTSYEINNVKKKGRRRRAAKKGGTYADNGQGRKSENQPEESRHNNDENGADDKMEGPSSNEDSAAASKEDQQKGKTGNTKKNKKGTEKNTTISSEQKGTSKGKKQKEQVVFSLGRNRSCNAEDTTEKSLKRTRK

SEQ ID NO: 123321 - protein, 298 aa, Oryza sativa
  Clone ID: PAT_MRT4530_26168C.1.pep
MGEDHVRSAVPRLGKADDAQEADLAVTAAACSVHCHVYAGDAPACHPKILGIEAAAAETASRSRYSRGSLWCSAAYACGIPDVSASTLADSCLIRDSTQPYGVADGKLLGDDAQELAHARHEDGRADATEEARDVGVDDPRALAQCFTHHSMVRNAAVPETSRRISSATRTPLRLRAVAWSSRPRSIDRSRCGPACSVLAASWRRRQRSGAVSAAQAATLLVAGRPEAVRKRLGLGRSASREGRWQGAWFLLGFGHLGASEHLFVGTSVATAGVEGGIFFDELYQNKLRNKTGQQIFE

SEQ ID NO: 123322 - protein, 181 aa, Oryza sativa
  unsure (1)..(181): unsure at all Xaa locations
  Clone ID: PAT_MRT4530_26169C.1.pep
MLSRSRRKNRKSGFVAPQEEASPAGAMDDDDDEDTSYEINNVKKKGRRRRAAKKGGTYADNGQGRKSENQPEESRHNNDENGADDKMEGPSSNEDSAAASKEDQQKGKTGNTKKNKKGTEKNTTTISSEQKGTSKGKKQKEASKAPSNDCXTCGSTFDSGXTVFSHLERTGHAMLKTRQNR

SEQ ID NO: 123323 - protein, 64 aa, Oryza sativa
  Clone ID: PAT_MRT4530_2616C.1.pep
MAATAALGCTALGLYQRRETKAGVAAAPAFQSPCKPDISDLNGNDNNSAHHDRGGEKDLSVTRG

SEQ ID NO: 123324 - protein, 539 aa, Oryza sativa
  Clone ID: PAT_MRT4530_26170C.1.pep
MESMETNALQVLGLDDNMRMVTKNVYSSLPDPPVSLHAPLAFAAAAWPPRDGVDRISALPVDILRDILSRLPARDAARTSALSTRWRRLWRSAPLVLADAHLKHTGRAPGPDELDRTGGLLLRAMDGMRDVARMVSSALAAHPGPFRSVHITCTPMDAHRSELALWLQLLAARGVQELVFVNRASKFDTDVPFPATLFRCSSLTRLYIGFLRFPAVATVPRAASFPHLRELGLCSLIMGQRELAFLLDRCPVLENFEIVCHRELLRLRVASHSLRCVEVCMSIVEEITVEHAARLERLMFWETCGTGGVIDNVGGIIDMRTRVKIGHAPNLRVLGFLVPVMHELSIGNTDIRAGTKPTRRTMVPSVQMLGIQLKLFDNNQVRMLPSFLRCFPNVETLYIQSETTLSGNTTGKLNPKLLQETSPIECLQKHIKKVIMREFRMQRSELDFLKFIAGRGQVLEKVVVVLTHTCSSSADRLRASLSTFMASTRLANEDCKLIVYESPFPIDATAWCFQGAFNMSKDPFDVSKCFKDGASCRAD

SEQ ID NO: 123325 - protein, 35 aa, Oryza sativa
  Clone ID: PAT_MRT4530_26171C.1.pep
MARVRLTSARQNAAQLPLMCRVQPPQFSFFAAGQW

SEQ ID NO: 123326 - protein, 33 aa, Oryza sativa
  Clone ID: PAT_MRT4530_26172C.1.pep
KLQDLYIYFNCPKQKNSLATTLTYHLIQMHELI

SEQ ID NO: 123327 - protein, 42 aa, Oryza sativa
  unsure (1)..(42): unsure at all Xaa locations
  Clone ID: PAT_MRT4530_26173C.1.pep
LYXLCDMLSAYSCVILVYTMLRLFYECAYHTQAFKLFDLINV

SEQ ID NO: 123328 - protein, 552 aa, Oryza sativa
  Clone ID: PAT_MRT4530_26174C.1.pep
MSLFRRLFHRRPPQGLVEISDNIFVFNHCFSTDFFEEDELKPYIGGILKQLIGRYSIDSFMVFNFEGSKKDNQIACIFSDFDMSVMGYPRNYEGCPLLTMEMIHHFVRSSESWLSLGQDNFLLIHSEQGGWPVLAFALAALLLYLRRYNNERKALEMVYKQAPPGLVEHFSPLNPAPSQMRYLKYVSRRHMSPEQWPPADRMINLNCVIIRGVPNFDGKGGCRPILQIYGPDPFAPNDKSTKVLFSTPKTSDSVQLYTQEDSEIIKFNARCPVQGDVVMECISLDENFEHEVMVFRVMFNMAFIEDNLLLLDRDQIDILWDTKLRFPVDFRVEVIFSEMDTITSLNSSQLSSEDKENFSRVEDAFSHLDWSTKSDDVTTNATEQNGSNNEHDGFDAVSLQETENSNSTSEHSLLGTRSVQVIQMETEHNHSSAPTFDIVKDPVADTHSLPETYSLALESQEHKLFEDSSPRELPKLDTTKNNPNSDLPSANSRDSEAAGDAAVAEWSDTNTDTFLSDTPSSSSPSSPQKFDEDSMEAGIVEIQTQTAEPQRC

SEQ ID NO: 123329 - protein, 63 aa, Oryza sativa
  Clone ID: PAT_MRT4530_26175C.1.pep
MGMGGVGGGIIVQAGGGLLRQSRGVEDDVMKARVTGGAWTDGGMSVGGANKCLGVEMPIGDRV

SEQ ID NO: 123330 - protein, 608 aa, Oryza sativa
  Clone ID: PAT_MRT4530_26176C.1.pep
MGSVAMDSDYGVPRELSALQKARALYRPDLPPCLQGTTVKVEYGDAAIAADVAGAHVISHAFPHTYGQPLAHFLRKTAAVPDATVITEHPVVRVGVVFSGRQSPGGHNVIWGLHDAIKAHNANSKLIGFLGGTDGLFAQKTLEISDEVLSSYKNQGGYDLLGRTRDQIRTTEQVNAAMTACQALKLDALVIIGGVTSNTDAAQLAETFAESKCSTKVVGVPVTLNGDLKNQFVETTVGFDTICKVNSQLISNVCTDALSAEKYYYFVRLMGRKASHVALECALQSHPNMVILGEEVAASKLTIFDITKQICDAVQARAEKDKNHGVVLIPEGLVESIPELYALLQEIHGLHDKGVSVENISSHLSPWASALFEFLPPFIRKQIETEKLLAQLVEAEMNKRLKEGTYKGKKFNAICHFFGYQARGALPSKFDCDYAYVLGHVCYHILAAGLNGYMATVTNLKSPANKWRCGAAPISSMMTVKRWSRGPAATQIGKPAVHMATVDLKGKAFELLRNNSTSFLIDDIYRNPGPLQFEGAGADSKPISLCVEDQDYMGRIKKLQEYLEKVKSIVKPGCSQDVLKAALSAMASVTEMLTIMSSPSFSGQATPL

SEQ ID NO: 123331 - protein, 133 aa, Oryza sativa
  Clone ID: PAT_MRT4530_26177C.1.pep
IFDITKQICDAFHARAEKDKNHGVVLIPEGLVESIPELYALLQEIHGLHDKGVSVENISSHLSPWASALFEFLPPFIRKQLLLHPESDDSAQLSQIETEKLLAQLVEAEMNKRLKEGTYKGKKFNAICHFFGY

SEQ ID NO: 123332 - protein, 608 aa, Oryza sativa
  Clone ID: PAT_MRT4530_26178C.1.pep
MAAERVEAAGGGDDDYTQDGTVDLHGNPVLRSKRGGWKACGFVVVYEVFERMAYYGISSNLVLYLTTKLHQGTVSSANNVTNWVGTIWMTPILGAYIADAHLGRYRTFMIASLIYLIGMSLLTLAVSVPSLKPPKCGAGTADPGCSEKASSLQLGVFFLALYILAVGTGGTKPNISTIGADQFDDHHPRERRHKLSFFNWWMFSIFFGTLFANTVLVYLQDNVGWTVGYALPTLGLAVSIAIFTAGTPFYRHKPTSGSSFARMARVIVAAIRKLAVALPDDARELHELEDEYSSKKKSTPLPYTPYLKILSKAAVKTSTTSRWSLSTVTQVEETKQILKMLPVLAVTFVPAAMMAQVNTLFVKQGTTLDRRVGGGGFEIPPASLQAFVTISMLVSVVLYDRVFMPLMARATGNPRGITLLQRMGVGLVIHIAIMGIASVTERHRLAVAREHGIADSKGTTIPLTIFVLLPQFVLMGVADAFLEVAKIEFFYDQAPEGMKSLGTSYAMTSLGVGNFLSSLLLSTVAHVTRRHGGGGGWIQNNLNASRLDHYYAFFAVLNCVNLVFFFLVCRLYVYNAEVSRVVDVGGRGGGEGGEVLRPKEVAMVDTNL

SEQ ID NO: 123333 - protein, 76 aa, Oryza sativa
  unsure (1)..(76): unsure at all Xaa locations
  Clone ID: PAT_MRT4530_26179C.1.pep
QTHATGSKMAKLSKEKTRKRKPWGCNITVSNPTCQMTQANVDLVIHLTQSGVPWPVEDDVMIANVSVTDDITLXAG

SEQ ID NO: 123334 - protein, 164 aa, Oryza sativa
  Clone ID: PAT_MRT4530_2617C.1.pep
MASSERGGGGGIHVVLLPYPSQGHINPILQFGKRLAGHGGVRCTLAVTRFILRQGEPPSTGAVHVAAYSDGYDAGGFHEAGSAGEYLSRLESRGSDTMDALLRAEAEQGRPVDAEVYDSFLSWAPRVAVRHGAETVSFFTQACAENAAYDSEDTGRKELPLVIY

SEQ ID NO: 123335 - protein, 93 aa, Oryza sativa
  Clone ID: PAT_MRT4530_26180C.1.pep
GGSAVKIFKGGVFLLESPQGLPLIFPEGTLFFNFSGLAFFPWGMFGLFLSHPITISLLGKACILLGPGKVFLVLPKGASPRFRVRYCSGNPGL

SEQ ID NO: 123336 - protein, 1955 aa, Oryza sativa
  Clone ID: PAT_MRT4530_26181C.1.pep
MEMALRPQSLLCPRSRLKVVIRPASSASGGGLAQYFLMTRRYTGSRIVRCMVSSSDCPNRKAKRTISLHTEVASSRGYAPRIAAESSIQEREHINSDEETFDTYNRLLRNESTEWKKLDTTEVDLSQDVSSSSMRKVDATDEAKLDILEDDLPRNLLNGVTMGEVDMLDEAGAEDDVFEVDLSALHNSTVGKMDAVNEVGTENDLFEVDLSALHSAAVGKVDVVDGAKAKEDLFEMDSLALHSVTMGKVDAINAAGAEGDKFEVDLSALASNNSMIEAVNVMDEAKAIEDTLEVDLSGNATSSSTYGEVKFEVDSLGNTSSTVMYGPADGAYEPRSDEVTFKVDSSENASNNVMYGRADVVDESWADEGIFEVDFFTNASSGAEYGKVDVVDEAKTDDFTFEIDSLEKDSNNKMHGKAHMVDEAWDDEAIFEVDLFGNASSIPIYGEVNVLDEARADDGKFEVDLLGNTSSNSTHEEVDVVDEAQTGEATFEVDLLGNALSSAIYKEVPVMGGAQDDEVDVDFSINASITETEKEADAVDEARVEDETFDMDLVGKQISIDSMNDDVVEEGTKHHRYPMLSSAFIEVKTIHETPVSLKPELMSVVMDQEQDKPISSVYQQEGSIFNLHAENQSTVDFHEREQMAITFDKQKESVAKLSKEDQQTAGLPEQNMSFDGVHRKSQSIIGLPFQHQSIVSSPEKYRSIVGFHGQNQSIISSHKQDKSIVGVPKKIQSIVGSTKHDDSIVGFRKQDRSIVSVPEQKQSIVGFHKQDLSIVAVSEQNLSIVAIPRESQSKQISIVRRHDPLHLKEVETKDRDGISKKSGGDDDLPHMLFEEELSQVEDVARAIAYKKQHEVDVISLTPDIQESPQDNIDPQELRRMLQELADQNCSMGNKLFVFPEAVKANSTIDVYLNRNLSALANEPDVHIKGAFNSWRWRPFTERLHKSELSGDWWSCKLHIPKEAYRLDFVFFNGRLVYDNNDSNDFVLQVESTMDEDSFEEFLVEEKKRELERVATEEAERRRHAEEQQRMGEQRAAEQAAREQAKKEIELKKNKLQNLLSSARTHVDNLWHIEPSTYRQGDTVRLYYNRNSRPLMHSTEIWMHGGCNSWTDGLSIVERLVECDDENGDWWYANVHIPEKAFVLDWVFADGPPGNARNYDNNGRQDFHAILPNAMTNEEYWVEEENCIYTRLLHEIREREEAIKIKVEKRAKMKSEMKEKTMRMFLLSQKHIVYTEPLEIRAGTTVDVLYNPSNTVLNGKPEVWFRWSFNRWMHPSGVLPPKKMVKTEDGCHLKATVSVPSDAYMMDFVFSESEEGGIYDNRNGTDYHIPVSGSNAKEPPIHIVHIAVEMAPIAKVGGLADVVTSLSRAIQELGHHVEVILPKYNFMNQSNVKNLHVRQSFSLGGTEIKVWFGLVEDLSVYFLEPQNGMFGGGWVYGGNDAGRFGLFCQSALEFLLQSGSSPHIIHCHDWSSAPVAWLYKEHYAESRLATARIIFTIHNLEFGAHFIGKAMTYCDKATTVSHTYSKEVAGHGAIAPHRGKFYGILNGIDPDIWDPYTDNFIPMHYTSENVVEGKNAAKRALQQRFGLQQTDVPIVGIITRLTAQKGIHLIKHALHRTLERNGQVVLLGSAPDPRIQSDFCRLADSLHGENHGRIYAGSDFILVPSIFEPCGLTQLVAMRYGSIPIVRKTGGLYDTVFDVDHDKDRARVLGLEPNGFSFDGADCNGVDYALNRQMNGPTLDTNIYGYTYFRMENWNWNLEGEKLACLGQPGKVVVKKARQGARDGEELVQAGAPTRSHSVYAMCCVAERRQAEANRIREKYPDRIPVIVEKAERSDIPDIDKKKSVLNHFTFKNKSSATLSLFVLASYVDTSFFMLLKIVLANYTRYLVPADLTVGQFVYVVRKRIKLSAEKAIFIFVKNTLPPTAALMSAIYEENKDEDGFLYMTYSGENTFGLFV

SEQ ID NO: 123337 - protein, 213 aa, Oryza sativa
  unsure (1)..(213): unsure at all Xaa locations
  Clone ID: PAT_MRT4530_26182C.1.pep
HSLSKVFSQVHSSFDSSPARDHARRRXNGWSLRCGGCASDSRFPRTLPLCVADLVVIHALRFVPPPXPKPRRRRELETKRGGRRPRAAPDQRRRPRPLAGTSSRGLEDASAARPQGCHRYYGSGRGEPGSLPCRHRRRIVVVALQIGAAIIGSSPSGFALPSSSRQLVTLQIHAAIVKSSPTRAYHRRCRPSSSSSPATSFLLIFSSYLSDQI

SEQ ID NO: 123338 - protein, 120 aa, Oryza sativa
  Clone ID: PAT_MRT4530_26183C.1.pep
MARSSFKLEHPLERRQAEANRIREKYPDRIPVIVEKAERSDIPDIDKKKYLVPADLTVGQFVYVVRKRIKLSAEKAIFIFVKNTLPPTAALMSAIYEENKDEDGFLYMTYSGENTFGLFV

SEQ ID NO: 123339 - protein, 108 aa, Oryza sativa
  Clone ID: PAT_MRT4530_26184C.1.pep
HRVLLSRFPPPVFCPPPWKDGFLLKRRAPPRVFFFSLKNQGNPLSGKGKGKFGPPPAFPGWAFTQLFGKGLVSFCFYHGGDGPFRFPFFPAPPPLFSQVFKTGLIEIF

SEQ ID NO: 123340 - protein, 300 aa, Oryza sativa
  unsure (1)..(300): unsure at all Xaa locations
  Clone ID: PAT_MRT4530_26185C.1.pep
ARLIFTIHNLEFGAHFIGKAMTYCDKATTVSHTYSKEVAGHGAIAPHRGKFYGILNGIDPDIWDPYTDNFIPMHYTSENVVEGKNAAKRALQQRFGLQQTDVPIVGIITRLTAQKGIHLIKHALHRTLERNXXQVVLLGSAPDPRIQSDFCRLADSLHGENHGRVRLCLTYDEPLSHLIYAGSDFILVPSIFEPCGLTQLVAMRYGSIPIVRKTGGLYDTVFDVDHDKDRARVLGLEPNGFSFDGADCNGVDYALNRAISSWFEARGWFHSLCKRVMEQDWSWNRPALDYIELYHSAHKF

SEQ ID NO: 123341 - protein, 71 aa, Oryza sativa
  Clone ID: PAT_MRT4530_26186C.1.pep
VFIPILASITLLDLDEEYINCRLRLLEYYTLVKQRPSYKVAIGKFFGGWKKYRTLFKTSFFLCVRTLFRKY

SEQ ID NO: 123342 - protein, 56 aa, Oryza sativa
  Clone ID: PAT_MRT4530_26187C.1.pep
MEVDPLPPHGTGGCEVKMAAWVEEEEEEEEEAMQPADGGLLVVFTVEHFHVKQWQL

SEQ ID NO: 123343 - protein, 70 aa, Oryza sativa
  unsure (1)..(70): unsure at all Xaa locations
  Clone ID: PAT_MRT4530_26188C.1.pep
MPPNCWICHCRTSLPPDPPHRTSPPPDPPPPPYGGGRMSSDRXSLPPDPPPPCRGGRPPSEPRGRRTSPP

SEQ ID NO: 123344 - protein, 61 aa, Oryza sativa
  Clone ID: PAT_MRT4530_26189C.1.pep
MDGTTPKGVFYGNGRIEGVKEAGADYGSASEHSVRMATGNCRERLTPIRESGGGALRSTDP

SEQ ID NO: 123345 - protein, 69 aa, Oryza sativa
  Clone ID: PAT_MRT4530_2618C.1.pep
MSPSSTWKPPDLRYKRDPLEDLRHRISEPTQPPQPTKSEPAGAKSPGDLVEPTRLRSRRFHRVPSWDAK

SEQ ID NO: 123346 - protein, 155 aa, Oryza sativa
  unsure (1)..(155): unsure at all Xaa locations
  Clone ID: PAT_MRT4530_26190C.1.pep
MPPSSAATTGGAVHKPIIMPPESERQINNLPDVLQPRRRWRSSLATGFRSALACTIVGVASIYAPLVIRRHLTFPAFSYVVTVIVVTDATLGSSLRGALSAVHATAMGAVPSVLPLWLAHRTGAGESVLATTXVVALSTFAVAVAGSAVTVAKRI

SEQ ID NO: 123347 - protein, 208 aa, Oryza sativa
  Clone ID: PAT_MRT4530_26191C.1.pep
MATAYAPMASQLMKSSLVCSKPRGLSGASLTRRPRFTVKAIQSEKPTYQVVQPINGDPFIGSLETPVTSSPLVAWYLSNLPAYRTAVSPLLRGIEVGLAHGYLLVGPFALTGPLRNTPVHGQAGALGAAGLVAILSVCLTMYGVASFGEGEPSTAPTLTLTGRKKEADKLQTADGWAKFTGGFFFGGISGVLWAYFLLYVLDLPYFFK

SEQ ID NO: 123348 - protein, 67 aa, Oryza sativa
  unsure (1)..(67): unsure at all Xaa locations
  Clone ID: PAT_MRT4530_26192C.1.pep
LTTFIXPMAKIKKMTSKLYVAHTYPKGGGGGILIRRIXIAIAWYREARTRVEEENGVGTGQKPYGVS

SEQ ID NO: 123349 - protein, 66 aa, Oryza sativa
  Clone ID: PAT_MRT4530_26193C.1.pep
GPSGCNPVWRWEVPVRVGPRQKSYRDVEGRKSPIFLSRMLVVVFKKSVKYVTNCGALPFKSQSPPL

SEQ ID NO: 123350 - protein, 127 aa, Oryza sativa
  unsure (1)..(127): unsure at all Xaa locations
  Clone ID: PAT_MRT4530_26194C.1.pep
MKRIVESKLNIKKVNPSCLFVRAIPSYESSDMFEDNLQSGNLYEVDAKDMNDKKFXELKPHPQPPQPSLSQXKGATRDKSGEEKIPSATGDRAKQSRVEKFSXQVCYXKTERKKSDKKRRPPNLSSC

SEQ ID NO: 123351 - protein, 448 aa, Oryza sativa
  Clone ID: PAT_MRT4530_26195C.1.pep
MPPRRRGAPRGAAAARLAPYHKGWLSRRRRRGRTNRRARNDDRDGNGGAFSDVPDSVLANVFTRFPDAADLVRCAATCRRWSRVITDAAVLLCRSLPLPQPVLPRLALGFFYQEAAAGKRKRSAAAGQTCRFVPTAAGARLLGPSLSPFVEDGEYSRPVTSRNGRVVLELRREGHADGLKLCVWNPMTGDVATLPPLHGDDKPGAYACALLTADDLDDPPPSSPTFFRVVVVYNRRTYTALRSYSSDTGRWSAEARRSSGPKMSSYTLHNLRQSVVHGGVAYWPLAHTAFAVRADTPEPEEMPMPPAVPKAPPHDHLLGISPDGKLSFIVTSRYFDGSAGVSSCYHLAFGSNGGCTREQVSVCTWRVRLHELRVHRSDAMNLRWFCERSGLLFFTIDAKGSSTPGAYVLNIATKELEKVADDIDCRSWTNFVGYEMDQASYYLSSVAC

SEQ ID NO: 123352 - protein, 198 aa, Oryza sativa
  Clone ID: PAT_MRT4530_26196C.1.pep
VMDTVVRDPFYHHIPAFFQMSMKELLENKHPTAWSEFEMGLIDENELAKKFFNDGRSFDLEGLKACMVRAYEYIDGVEDILYSLKQNNYEVHAFTNYPVWYQLVEEKLKLSKYLSWTFCSCTVGKRKPSPDFYLHAVDHLNVDPASCIFIDDRMTNIEAALSVGMVGLQFKNAEVLKKDLCSLGVEFAPVHEGEIQVQ

SEQ ID NO: 123353 - protein, 263 aa, Oryza sativa
  Clone ID: PAT_MRT4530_26197C.1.pep
MASTSAAAPAAAAATAEASASRPPRKLPVLLFDVMDTVVRDPFYHHIPAFFQFSASPVPCDRCWCGMSMKELLENKHPTAWSEFEMGLIDENELAKKFFNDGRSFDLEGLKACMVRAYEYIDGVEDIIYNIKQNNYEVHAFTNYPVWYQLVEEKLKLSKYLSWTFCSCTLNQSNYEAHCIYQLSSVVNVDPASCIFIDDRMTNIEAALSVGMVGLQFKNAEVLKKDLCSLGVEFAPVHEDAMRDLVKLIAIATIKLSSSILAV

SEQ ID NO: 123354 - protein, 202 aa, Oryza sativa
  Clone ID: PAT_MRT4530_26198C.1.pep
MNPEYDYLFKLLLIGDSGVGKSCLLLRFADDSYLESYISTIGVDFKIRTVEQDGKTIKLQIWDTAGQERFRTITSSYYRGAHGIIVVYDVTDQESFNNVKQWLNEIDRYASENVNKLLVGNKCDLAENRVVSYEAGKALADEIGIPFLETSAKDATNVEKAFMTMAGEIKNRMASQPATNASKPATVQMRGQPVAQQSSCCS

SEQ ID NO: 123355 - protein, 234 aa, Oryza sativa
  Clone ID: PAT_MRT4530_26199C.1.pep
MKSKYHLEKFKDVTAGERNLVFKATMKSKYHLEKFKEMSMKELLENKHPTAWSEFEMGLIDENELAKKFFNDGRSFDLEGLKACMVRAYEYIDGVEDILYSLKQNNYEVHAFTNYPVWYQLVEEKLKLSKYLSWTFCSCTVGKRKPSPDFYLHAVDHLNVDPASCIFIDDRMTNIEAALSVGMVGLQFKNAEVLKKDLCSLGVEFAPVHEDAMRDLVKLIAIATIKLSSSILAV

SEQ ID NO: 123356 - protein, 482 aa, Oryza sativa
  Clone ID: PAT_MRT4530_2619C.1.pep
MASSGKMEGPSAPAMRRDPYEVLSVPRDSSDQEIKSAYRKLALKFVLPLTCPPCSCCCFRSRYSDCRMYHPDKNASNPEASELFKEVAYSYSILSDPEKRRQYDTAGFEALENEGMDMEIDLSNLGTVNTMFAALFSKLGVPIKTTVSPNVLEEAMSGTVTVDKQSAHFYGVTISEEQAQSGIVVRVTSAAQSKFKLLFFEQEINGGYGLALRSFGCGGIECWRTGVLSIYPARGDKAACRALEVSAIVRSIPTPEVATAGLGEQWCVIVSLMDPSGGGEEEDSQKTGKVTSAGMYFLHFQVYRMDSTVNALAMAKDPEAAFFKRLEGLQPCEVSALKSGTHIFAVYGDNFFKPASYTIEAMCAKSYEDTTQRLKEIESKILEKRNDLRQFETEYRKALARFQEVTNRYTQEKEAVDDMLRERDDIHSSFTTERTMVNSVGAGSSSSRYPTESPENGNIDGKDKSSKKKWFNLNLNRSDKKA

SEQ ID NO: 123357 - protein, 68 aa, Oryza sativa
  unsure (1)..(68): unsure at all Xaa locations
  Clone ID: PAT_MRT4530_261C.1.pep
MEEAAPQCHVALPRGESGPRWGGGHSFPETRRRKXAPPNATWPSPEGGRARGAPPVLGGKIWQASSSR

SEQ ID NO: 123358 - protein, 51 aa, Oryza sativa
  unsure (1)..(51): unsure at all Xaa locations
  Clone ID: PAT_MRT4530_26200C.1.pep
GKSCLLLRFADDSYLESYISTIGVDFXVEFFHQDGKTIKLQIWDTGGQERF

SEQ ID NO: 123359 - protein, 92 aa, Oryza sativa
  unsure (1)..(92): unsure at all Xaa locations
  Clone ID: PAT_MRT4530_26201C.1.pep
MSRIRLVYERAKNIEMTRPIGPKFTSLRRGEVQEATSQLVGWLGQPRVRPNQGVRPNQCQCXWIQGFGGTVEIXTPYGGWRVFSTIPTTITV

SEQ ID NO: 123360 - protein, 65 aa, Oryza sativa
  Clone ID: PAT_MRT4530_26202C.1.pep
SDTRADSIHFTLTLAVSSSSLVPRPFLVPFDSCKPPHPACAASYEVGFGGGGGRLESEAIWCLTD

SEQ ID NO: 123361 - protein, 483 aa, Oryza sativa
  unsure (1)..(483): unsure at all Xaa locations
  Clone ID: PAT_MRT4530_26203C.1.pep
KKERSLDTPNSKDENLNGELCDSELARLNTDRLSSSRLTKTKGDRITPFSQRVNNFTQQYVLNSNNVASVPSKDEIESTENEVIRRVQPSKRCTLQVQRXQPEPGCRFMYDRIEDRFNYLEDRIRRSGSLFSASGLCGEPADATLASEESMFSVGMVICDGEGHLNEKSILLQGSVEHSRGQHVRLDLKDVDRFSLFPGQVVGIQGHNPSGHCFVVSKLNDSIPNFVDAQLPRAKKQAVDSEGNQSSDVVSRVLSSMGPFIDSDHPEIKKGAVDKSFQDIFLFEILRKLQDFTQYLGHNVRVILIPSVRDAHHDFVFPQPAFDLNLPEDITHQITCLANPSLFSCNEIHFGCCTMDILKHLSGEEISRKPPGEKHGDRIGRICTHILKQQSYYPLYPPPAGVPLDFSLANGALEIASAPDVLLLPSDLAPFVKVLSLDESSEEPKRFICMNPGRLAKGIGGGTFVELNYNEDTDKTSASLIRI

SEQ ID NO: 123362 - protein, 253 aa, Oryza sativa
  unsure (1)..(253): unsure at all Xaa locations
  Clone ID: PAT_MRT4530_26204C.1.pep
PLPSVSCLLPSARSNPRLLTREQPQHAGQSVNRLTQEQVAAMFLPNPPTADPIQSMPIQQMLPRQPMVRPIQQQNLQHASARLRNRPRQHAANQVVHEHLVHNVQANQSVVPQVVPEHLVHNIQLNFXNYQGGNLNYQYQAPSPHVQYRQTKLPQYAPQFXQFEPIQQQTQGIPQQRPWSDMIADVMREQFGLKPKDTGNLYRHPYPEWFERVSLPSRYKVPDFSKFSGQDNVSTYEHVSRFLAQCGEASAVD

SEQ ID NO: 123363 - protein, 219 aa, Oryza sativa
  unsure (1)..(219): unsure at all Xaa locations
  Clone ID: PAT_MRT4530_26205C.1.pep
LAAIEKLAKAAXGSIPDSLSLTDQAIALSYTNITLXIVSEMLGLIDDDQPLELVMALAQANGDQVMAIIQNIATKGIDWQQLLNDVAETLHQIAMLQLLKQETPSDTPLHLLAKQIPPEDVQFFYQLMLIGKKELAYAPEQSIGVEMVFLRALAFHPKRTEVTQVTTDKTSAQAVEFSSKRSIKPAQQTVPANITDSTNNTLISPALVAMQARKQLQQK

SEQ ID NO: 123364 - protein, 100 aa, Oryza sativa
  Clone ID: PAT_MRT4530_26206C.1.pep
WLYPTSVLRSTLSRKQQESSYSPKASAPLSNLLSSSFSRVVQASNFLDLLALALLLSVSVINQDKFIQVRSNLVPWWQIKIALLTYTMAARLLLEVESMD

SEQ ID NO: 123365 - protein, 59 aa, Oryza sativa
  Clone ID: PAT_MRT4530_26207C.1.pep
QKKKKNRICPKVYPDGITIRHILFCFFHFFRPHKRIKNPYFRVKYMSTISLDLHDQNPC

SEQ ID NO: 123366 - protein, 1462 aa, Oryza sativa
  Clone ID: PAT_MRT4530_26208C.1.pep
MEEGDVLVGADADGRGQLTELLFRVDAIGDSVLEVKAFWFSIISEDFKGSIGPEGAVDVKQSLVSLGATGRRPGFMIRLCTCTGRPSSLRNLNNSGVSMTCKGCGGESTTDRAGPSCSSKLNTMGLELPRPIDPEVRWKTVNRRQRAARRARTSFSGEDRIRDEIRSFYACGNATNQELAQDDAPVSESEKFGVSILGRRFSDPVGNVPIKKRRFLMDCSPSPPPTPLLVDPYEKLLSRSCGGISSHGKHHKVKTPRLDYMEETKEHFGVDDFSGISILAAAACTSELDDDTLNVECSKSAHCVERKPENITGSSELNFLNNIKEDMLNSLDASNCKSDPLLESSESVPDTKPVVATRLNCENLVESTHTQKDCSASFSALSSANKADDSSTASDTKSSGVTMSINASNPDKSVGGLQDAVVETKHSNGTRDSRLHWDLNVAMEAWDTDCGGDDVPDAADPDPVAFAISSCSDAENVLNKLQVCQAPFDSTIAGNIPDLSEDKTPVIDAPKDASTKSESDFAGDGSSQPLCSLSPQNVPVLESRPLECDGLSAGTKELPDNNDISKVKSQLGSDPDCSSLPPMTERFALTVIEEKLDVSHASALDCVGLSQMVSTDGCDGINSVQMSELGSRVKPFTSRLVSEESTNLATVTVFNKSSTDLGWSNDKLGQTSQQSISELKNQDLLDVDSGTSKIGQSGHDKVEHVTNELSISKKAADVDDDLDLSDSHMNDNPGSSDRAPPINSECIKPSTTDRDSIADSQSAEQSYLGKVLSNNFMEHCNETEAPHIIKDLAGTGNIVAEEDDSQYEDGELRESGEYWGDDCYEEVKPANYQVLDCKSDAPGISPFPLGSMSKNTGDRVANFNGKHSRNGGGDVSPAALKCSWSTTCIDDGSGTMCAGSTGEKALSVHLRVNGETRMYEMNPGHVIAGSSATVNQSERVNDGLGDDLSSLRTKPTGWDMLPEDQRHSQHDSRDTVDSSNRCVLSTSDTAGGGESLRHMELSSGDMQPRADRPRSFDRAHINELCRSDDGYGSGSKAERTIDIRKSHERGGASRHIQGSSRVEQWVENSNNSRTTWRKSPDYYNYGLPGPRNAAEAAVAKMQSNGFVVAPDGTLVKAVDTANASKMARRVRNNTLSSSYRPLSGRGSPIDRDGGCGVSRGPAHAREASPERRFSTSGNRSVRYGPDMDKDHANVNMSSARCSLASRQRRFPQHRASLNLSRAHSRSPSGSRSRSPHAWTSPRNRREVMVNGSSSLWRHSRSRSPPNYMTEVRMGRMTSPSRQPGFGDRVMRYSPSSRDRAYSQHASTWADGRNCSTVDLPDHKKRYSRRSPPLRVTSRNDRFDVDSHGRPRSGELYRPTQGRLPYGFERGRGNRHDGNGDDQREYADRYETHSAKPYDRNGATKQFRNHTGDKLRPCISAPRSPEPQRRGSPRRFDRGFGRQLGVDLPRGTKEDNKNPFRYD

SEQ ID NO: 123367 - protein, 200 aa, Oryza sativa
  Clone ID: PAT_MRT4530_26209C.1.pep
MAADGGDGSGGGRKTPWTQEEDEALRRAVREHRRQNWAEIALALPRRGPKSCRLRWCQHLSPELDSRVFTAEEDAIILAQQRVHGNKWATIARCLPGRYDNAVKNRWNSALRKLLQVQHASGAGSPPAAAAAAAGDDRDDAPVCLQLFPARAGGVKEAGLFAGEKDVEEEDVATSLTLGLPVLCEAELELRLGPAWPATA

SEQ ID NO: 123368 - protein, 255 aa, Oryza sativa
  Clone ID: PAT_MRT4530_2620C.1.pep
MASSGKMEGPSAPAMRRDPYEVLSVPRDSSDQEIKSAYRKLALKYHPDKNASNPEASELFKEVAYSYSILSDPEKRRQYDTAGFEALENEGMDMEIDLSNLGTVNTMFAALFSKLGVPIKTTVSPNVLEEAMSGTVTVRPLPVGSSATGKVDKQSAHFYGVTISEEQAQSGIVVRVTSAAQSKFKLLFFEQEINGGYGLALQEDSQKTGKVTSAGMYFLHFQVYRMDSTVNALAMAKDPEAAFFKRVEGLQPCEV

SEQ ID NO: 123369 - protein, 61 aa, Oryza sativa
  Clone ID: PAT_MRT4530_26210C.1.pep
DKLLIFDPRMCCSVTLTCSSWLNPNRSALVVVFHFPFVVRMCFSSTIVRSSATYYNPSLMS

SEQ ID NO: 123370 - protein, 67 aa, Oryza sativa
  unsure (1)..(67): unsure at all Xaa locations
  Clone ID: PAT_MRT4530_26211C.1.pep
FPGTVVRRDWVVPDEVAPLDQVSTSGAEGHVSGSRAPPCFSCQNCFGVVVFGGGSLLERGHIPRRXX

SEQ ID NO: 123371 - protein, 85 aa, Oryza sativa
  Clone ID: PAT_MRT4530_26212C.1.pep
FFSAVKPPFSWTTVEGGKNRRPIYMGNESCPLKRLLTSGPSEMGGITYSLRGGPLLSCLGPNTMRGANTRGGGLPFSVCPPSPGG

SEQ ID NO: 123372 - protein, 73 aa, Oryza sativa
  Clone ID: PAT_MRT4530_26213C.1.pep
RAENYSSLKKISGIWSTNNFLGFLMNFLKRCSLPRIMLTYNLSIQWCKLIRRRSDLLLISDGRELNQLRVRMV

SEQ ID NO: 123373 - protein, 69 aa, Oryza sativa
  Clone ID: PAT_MRT4530_26214C.1.pep
MEALRQEVSKVEAAAKRDAQRFAREMVKTTKSAKTVCRTLCLALTDMWAKVRGVPDEDASAFDFSEWTQ

SEQ ID NO: 123374 - protein, 552 aa, Oryza sativa
  Clone ID: PAT_MRT4530_26215C.1.pep
MAAAAVEEGGGGGAVARIFVGGISEGVAAADLEAMFASVGRVAGVEFVRTNGRSFAYVDFHCPSDKALAKLFSTYNGCKWKGGKLRLEKAKEHYLTRLKREWEQEAAAAQEMPASADVESKKEKLELNKAVLDSTKINIYFPKLRKVKALPFKGTGKHKYSFRHIEVPSYPIHFCDCEEHCGPPEAANDEYASVLDAAAYEKERSIMNSVMSKLFEKENDHLDSMEIQNHGVDFDAAEPSNARNELQMDKREETSEEDLDDQMEETEDPSEEELDDLVLNIVTCKPKSSVAQLNSEKQAADKDSRFRKRQQFEESSLQKRHKSSDFSETRNRKQSFPAISGAIQNEQKSSDLSGKGTHEFSSELDGDKSSASVQDVEALADSSTRNGSEQNSLASEPKRVSLWTQKSAWRDLVGGMGSASFSLSQILPNTNPAPPKVSNATEASASHAESRTKVKPSGKSLKPSEAATQLLPEQKMPTSSMAMLSSERKENNKLEKERVVPKITIGEVCPFMRNSESEKQWSKAKKVLTGFIKKGNESTGSNVGKGKPSTRR

SEQ ID NO: 123375 - protein, 130 aa, Oryza sativa
  unsure (1)..(130): unsure at all Xaa locations
  Clone ID: PAT_MRT4530_26216C.1.pep
RVEKKKKRQQHPSRTARLINRTRGRIEALKDLKLKEGLLLVNPNIGVKTRRNKXGSTRKVPIEXGSRQGRSFAIRWLLEASQKRLGQNMAFKLSSELVDAAKEGGGVIRKMQADPXNRMAKANRALAHFR

SEQ ID NO: 123376 - protein, 68 aa, Oryza sativa
  Clone ID: PAT_MRT4530_26217C.1.pep
LGGNQGGKLESIGNHQNHFHTLIIGQTLGSLMMHPPIGNQTIELIRIKPLLFIKNHEKATPKIKFFKS

SEQ ID NO: 123377 - protein, 146 aa, Oryza sativa
  Clone ID: PAT_MRT4530_26218C.1.pep
QSFEAPVLLVAGAASEAAPAAAAAGDAGTAPRATTTTSRPHVAAASPANPNTTSARRRRPRQRQARTPGNPPYYLLVVAIHPFLAVVGVWGGVRRPLAAGGGRRRRAPPVISLHSLPSLSSLSHSLSVYMQTLASSIARSIVWELR

SEQ ID NO: 123378 - protein, 417 aa, Oryza sativa
  unsure (1)..(417): unsure at all Xaa locations
  Clone ID: PAT_MRT4530_26219C.1.pep
AGGEEADTGRERPDAGGDGPREIRPIDPGGGPAGYTNDNVDIQIHVTGPAPLLNYPKSKDYTRVNPEATEAVTGPAPLHHAHPCLDELTRGKLHYKPSRCPRWLVVADVIKGGGGRRRQAGPTGQRHKGEGGSPWTGTTRVVHRQSTGPKAQIXPRGRSDGRWRPSSAQDRPSGHGDGDGARTRVAGDGNRRRRRRRKXAAPTGAAAKREREGNRRERMPHRGWPARRKTMANGDGEPREDDGHRRKGFGVPXRKEKREIRGREMNHGDRRVWPKAAVGVELTGARGDANSGDETRRARGGRGAGHGRERRXSPANVGSGGGERGGIRKSNPGHLGRGRGREREGSGRGGRSAHAGVGDVARRRRRRGRCGGGFGRGGAGXRKGTGPTGGAHLSASRGEREGRLGVTPRSSPPKPKI

SEQ ID NO: 123379 - protein, 535 aa, Oryza sativa
  Clone ID: PAT_MRT4530_2621C.1.pep
MASSGKMEGPSAPAMRRDPYEVLSVPRDSSDQEIKSAYRKLALKFVLPLTCPPCSCCCFRSRYSDCRMYHPDKNASNPEASELFKEVAYSYSILSDPEKRRQYDTAGFEALENEGMDMEIDLSNLGTVNTMFAALFSKLGVPIKTTVSPNVLEEAMSGTVTVDKQSAHFYGVTISEEQAQSGIVVRVTSAAQSKFKLLFFEQEINGGYGLALQERRLQGPACKDSLSGKEGSETNSVTRSFGCGGIECWRTGVLSIYPARGDKAACRALEVSAIVRSIPTPEVATAGLGEQCSLAYSRKIITSSFFPHFQEDSQKTGKVTSAGMYFLHFQVYRMDSTVNALAMAKDPEAAFFKRLEGLQPCEVSALKSGTHIFAVYGDNFFKPASYTIEAMCAKSYEDTTQRLKEIESKILEKRNDLRQFETEYRKRALIELNGVQALARFQEVTNRYTQEKEASCSLNVDSELCESMVDDMLRERDDIHSSFTTERTMVNSVGAGSSSSRYPTESPENGNIDGKDKSSKKKWFNLNLNRSDKKA

SEQ ID NO: 123380 - protein, 334 aa, Oryza sativa
  unsure (1)..(334): unsure at all Xaa locations
  Clone ID: PAT_MRT4530_26220C.1.pep
PGRPASLLSRGRRQVGPTCRPPLGSPQRRAAVAVGFARTNSISSAPSPSGFIAGIRIPLRSGHPESRPPVAVVLPWLAVAVRRRLPPRRPPSVRRLGAAFAPPPPPPVAVAGNACAPAVAVAVAAWPVLXEPGRHRPSDRPRGRSGPSVLWTGDGPPAWSRSTVNRPPPEPLPSGPACRRPFPPSPEFLRGVGFVHTVEDACGVVFPLQFXSRLSSCCLSFFRCIYNSIREFLGMTGKSPTPASRGRSSTRSSSLPLDAPQIHSLGLHPARGRGGRRWAPAPAGCRRSSSLPLAPRDAPLHRHRAANPLARSPPGEAVHNHEPDTAHAAQAYPS

SEQ ID NO: 123381 - protein, 53 aa, Oryza sativa
  Clone ID: PAT_MRT4530_26221C.1.pep
PQAHKFKCCSPLQALQQNNTSRVHIKLPLTSPHSVNLAMAPSPSYFSADPPSN

SEQ ID NO: 123382 - protein, 326 aa, Oryza sativa
  unsure (1)..(326): unsure at all Xaa locations
  Clone ID: PAT_MRT4530_26222C.1.pep
MRLCRRVGRAAMEQAPHNFATLKNLGEAERDGNNGLLVVAAGTCGSADAGPRVAEFAGTRVVALRRLLASVVGGALHLLRESSLVWSPRIGDIDACGRRFLPGAASVVVHLLGGFAEGLAPPSREHHSTGILDGTDKAYSSENPPSDTYSYSGVSPLSPAGDGQSPLVPRWIRKRQRPSQGPPRSITPTLAWMRQLEESYTTSPAVAHAGLWADVIKGGGADRRGPLISGSGEGGKGAPARGPTRQWLRGGGSPWTGTTRVVHRRSTGPTAQIALGADRTGGGDPARLKTGQAATATATAXRTRVAGDGNRRRRRRRKGGADGRRC

SEQ ID NO: 123383 - protein, 136 aa, Oryza sativa
  unsure (1)..(136): unsure at all Xaa locations
  Clone ID: PAT_MRT4530_26223C.1.pep
GXQIFGAGTTPWRKAHHETPAASAFAKXXPXSFIXPXXARSPRRXRFASLSPGQTTXAPVHSPXGLGGAXPXXGXXXXWGAFQXGQXXXXQNSRXVXXSFPXSXRXXSPXXXGXXXXFXFFGXXTRXPXLXXXXLF

SEQ ID NO: 123384 - protein, 149 aa, Oryza sativa
  Clone ID: PAT_MRT4530_26224C.1.pep
MAAAALRDQLTALLSSMFSQGLVDEQFQQLQMLQDEGGTPGFVSEVVTLFCDDADRIINEIATLLEQPVVNFDKVDAYVHQLKGSSASVGAQKVKFTCMQFRQFCQDKSRDGCLMALAVVRNDFYDLRNKFQTMLQLEQQIQAYDPKQQ

SEQ ID NO: 123385 - protein, 81 aa, Oryza sativa
  Clone ID: PAT_MRT4530_26225C.1.pep
MKAATGVAADEVNRRASGGGRREAEDRVFFLIDRMTQRDGVLIMEHYMHRPLSSILTLPIYGNMTGNHDREKEREPVIEET

SEQ ID NO: 123386 - protein, 105 aa, Oryza sativa
  unsure (1)..(105): unsure at all Xaa locations
  Clone ID: PAT_MRT4530_26226C.1.pep
RGRSGGDSDGSVEGVAGDHSSLRAAASRPRRARHRRHSNTRKEELLPRLSPEVYRPPPPPLRHPPAAASTXPRLPPAHQKPLGRKLTQLCTNKEIIVSRPLSLRL

SEQ ID NO: 123387 - protein, 71 aa, Oryza sativa
  Clone ID: PAT_MRT4530_26227C.1.pep
PNHGVQALKEWGLFYGLRIYKTGYFPKDSVRGISDGSVFVKLEKQRDSSQSTVFRNLSFRSSVLSNWEMKL

SEQ ID NO: 123388 - protein, 72 aa, Oryza sativa
  Clone ID: PAT_MRT4530_26228C.1.pep
ESTCQALGCDPDMCTSPDGAITCAKLIWNAPTDLAIPEADVTRTSCGSQAYSRFYREVPICWSVKSYPRPAT

SEQ ID NO: 123389 - protein, 120 aa, Oryza sativa
  unsure (1)..(120): unsure at all Xaa locations
  Clone ID: PAT_MRT4530_26229C.1.pep
MLAKGMMQLAENLAIKERDGCVWNHSPIASELYVSARLMFVGFDVQSKXLLIGKHCLMNGIAXGNLVMNEMGMMTRIGGCNANDWLSXPGIYYRSELDHKGISIYTGTIISDWGGRLELH

SEQ ID NO: 123390 - protein, 118 aa, Oryza sativa
  Clone ID: PAT_MRT4530_2622C.1.pep
PRLYPTWQRSKRSATSGATGLRAAGDEAATAAVMREQAAVSGSQSTTPAASPRRPRRSPVVSPSAFPEARPRRRRWASGDGRALRRSSGGGHPPPRPRDGGRPLHAKNRFSCAGAPPA

SEQ ID NO: 123391 - protein, 107 aa, Oryza sativa
  Clone ID: PAT_MRT4530_26230C.1.pep
MAASGEGASLTYAAQGHDHCWRGMSYLYEPSIEDYYYAHRHRRKPQHMQNLHVLRLHFVRHRLHGSCPKCVCSPATHAVSFKCQFHRIIFYGHPNFFLIDAVALKDF

SEQ ID NO: 123392 - protein, 66 aa, Oryza sativa
  Clone ID: PAT_MRT4530_26231C.1.pep
FIDVMKMTNSIYVGIGNCFEVNFQTYFLKCTGATIFFNGLSKYLIHGLIQRREDRFTTSNSSWVFF

SEQ ID NO: 123393 - protein, 931 aa, Oryza sativa
  Clone ID: PAT_MRT4530_26232C.1.pep
MVASPPPPHPTPPEQVGDGVEARSCASPTPSLRRKGSPNRSGGSARKSSSSREFGSSILNSVNKSASQFKKSINRKSGSPIDWFPRKKTEPYLKRKIKRLQESNGMTASLDETLGSANPHYTRMAREKIAAREAARKAMEARKAAMVEASWCRILHAARIQKKDAEEVMEKAKFRATEAFEEARVIGVMMYDRPDCSSQQYEVESSSQTGGRSTHKVTASFQTGFEVDMEVAAAVKKAFIQLANSSISSNKEEFKELLWKISQNPDVTEIDANSEDEQHQGDCNSEDKRNLKFNKETLGTGIFPSDFDNTNVQQSNDLVNIMLERLKALHEDELASLAVIVATSGLNAVLQSDRGKYQETESVNSFTSQRAHSRRYSTAASFVDVLQPKKEVTSELPSLDKFLVKHLSKLEKEVHEAREAGRKASSVNSCAQGAQRQITGRNPKATDSASDLSSILVKHVSKLEKEILEAKKNNNTRIQLLEESCKKVEAHVEKDASKESEFYNAQSESFCNSGSVGSCNSRESYEKSKHGRDCSQDKENKILFSHQLPPSGAKGKQGGKRLTRIEAAKLEALNSFCTKDGNAFDVGLDKILIRPIHRLEREKKKALEHGQTNVQKDPQKNVDRTIVTGSLDEILVKHVSRLEREKIDYERRNALGEGLTNVPHDQRKHGNNATASESLDQVLVKHVSRLEREKIDYEKRNALEEVLTNVAHDQRKHDNNATASESLDQVLVKHVSRLEREKVEYAKRNTLGERTSEQNHQERHSNTNIASDSLDQILVKHVSRLEKEKMEHGKSGDMIFLKKNDSKCTNEEADLSDILVKRSMKLEQAKLASSAAEETLTGSFNPVQERRRAREKELMDAWGGVGLGNSMKPHLSKIEKDKVCKTLEHTLPLFATTTDALIHAEPCVYFLRQLTFPLVLLLSHAHAFGKS

SEQ ID NO: 123394 - protein, 42 aa, Oryza sativa
  Clone ID: PAT_MRT4530_26233C.1.pep
YCSCETEARWINVLGHAVLGERSGGVQLDVEAQITRRGDGLA

SEQ ID NO: 123395 - protein, 584 aa, Oryza sativa
  Clone ID: PAT_MRT4530_26234C.1.pep
MEEDCKCIDRAKVAQPHAIITNGYHAGAVCWRWLGKCGGGPSGWRHRATAHRGSAAAVTAMALAAGDAEPLHVAGEWIAPEIGMGGFAYPFTPSPAWSRDAVFAGSPWAAGGVSSLADALVSYGAVDDEEAAFLGKTAASSPSTARLHEQQQLLLEAELLRHGDGLGFAAMDDDGGAAMLGALEPCAMPLTDSGGPPVICSSSSNDSSGSEHSAAMPAGGGFLVGEQQQHVPPAAYAAGGVLPSMAAGEETPQSFGFGSLFNGDLLQEATVSKYHHHQQQQQLGVVPSSQPHHLNDDIDFNTGKLMSFASGQQHVTPSIDSLQIDQKEFSSGLHHLNLSSLISGPLASFNATQSHRQPAEACGGKNGGAAPFVNLSEVLPKGNGSGSAGNGAPKPRVRARRGQATDPHSIAERLRREKISDRMKDLQELVPNSNKTNKASMLDEIIDYVKFLQLQVKSPGFLLSPRSSSGERQAGAGAVTGGLPGDQPELLDGGAMFEQEVVKLMEDNMTTAMQYLQSKGLCLMPVALASAISAQKGTSSAAVRPEKKKNGDGDGGGDEEDVKGEFDAPRRPPVGRPKEMRSRV

SEQ ID NO: 123396 - protein, 140 aa, Oryza sativa
  unsure (1)..(140): unsure at all Xaa locations
  Clone ID: PAT_MRT4530_26235C.1.pep
XXGXXXXXGXXXXXXXXPXXXGXXXXXXXVXRXXQXXXEXTXKXKKGFXXGXXXGXXSXXXGDXSXXGKXTXGXLNXXVIKKKQXXXXXXXGEXXKXXEXXXRXXXKIFXXSPPRXEXKKFXRXXTXWAGXXKSXAXXRF

SEQ ID NO: 123397 - protein, 117 aa, Oryza sativa
  Clone ID: PAT_MRT4530_26236C.1.pep
MPPLPPTGDGALRARRSAARRRRVATGLISLAAGSSLSLIRRSIAIAEAQPPRPSAAAAERPRRRPVVASHLRPRRRLPTLSSALAKAAATENADAAGGSGGNDGDQLPPMATALLG

SEQ ID NO: 123398 - protein, 132 aa, Oryza sativa
  unsure (1)..(132): unsure at all Xaa locations
  Clone ID: PAT_MRT4530_26237C.1.pep
CLHSPPTGDGALRARRSAVRRRRVGTGLISLAAGSLSRCPQSSSHSSQSTPPLRNDGRRRDGRWHIEGSALGSLARHHRPHLPDSLSLIRRSIAITEAQLPRPSAAAAAPXERPTPRPVVASHLRPPRPLPP

SEQ ID NO: 123399 - protein, 96 aa, Oryza sativa
  Clone ID: PAT_MRT4530_26238C.1.pep
ITTQNVHTKQQTLHSLLSSRARLLYFVTTSNRRCSSLLQVDSQLRSSCLSHGEQAKLPDNPGSAAELRAGAAGGHRVELRRRERLGDEANLELDGA

SEQ ID NO: 123400 - protein, 132 aa, Oryza sativa
  Clone ID: PAT_MRT4530_26239C.1.pep
MPPLPPTGDGALRARRSAARRRRVATGLISLAAGSLSRCPQSSSHSSQSTPPLRNDGRRRDGRWRIEGSALGSLARHHRPHLPDSLSLIRRSIAIAEAQPPRPSAAAAERPRRRPVVASHLRPRRRLPTLSS

SEQ ID NO: 123401 - protein, 98 aa, Oryza sativa
  unsure (1)..(98): unsure at all Xaa locations
  Clone ID: PAT_MRT4530_2623C.1.pep
SPEQFGIEDPXTACCGGGGPYGVSGTXRCGYGEYKVCDDPQKFGSWDGFHPSEAAYKAIAIGLLRGSYTQPSFATTTNSCPQITELSSSVEYKVLYDL

SEQ ID NO: 123402 - protein, 60 aa, Oryza sativa
  unsure (1)..(60): unsure at all Xaa locations
  Clone ID: PAT_MRT4530_26240C.1.pep
HILNSSCRNTVSSDARTCPRSISSGCIKGASYSGCQASTLMQLSLRITFRVTTXPCVSTI

SEQ ID NO: 123403 - protein, 158 aa, Oryza sativa
  Clone ID: PAT_MRT4530_26241C.1.pep
MAKPKQPPPHAPPPPPPPPPVEGKPKPPPHAPPPPPPEAKKSFMRRMFPFLLAANVFVGAYMLMRTYQKDSGKKDTENDPTSSTPTSSPAAAEKPAEPIVAPIKVLTPISQDDQRQLYKWMLEEKRKIKPRDAAEKKKINGEKALLKEFIRAGSLPSL

SEQ ID NO: 123404 - protein, 84 aa, Oryza sativa
  Clone ID: PAT_MRT4530_26242C.1.pep
RTRGYLMRWNGDNNNRSNTKYISRELHTTSNKVSYTLQGFSLANATKEKLAQHPQSQHKNKPKYHFTYCFGSWQYRRSNSSPRA

SEQ ID NO: 123405 - protein, 171 aa, Oryza sativa
  Clone ID: PAT_MRT4530_26243C.1.pep
MTPTDTISMMHWEYIAIHFIHSLELVTNVAISEVEIREKGGKDWVALKESSTNTCTIKSEAPLKGPFSVRFLVKNGGYRVVDKVGEGSSDTSLELVTNVTISEVEVKEKGGKYWVGLKESSTNTWTLKSEALLKGSFSVRFLVKNGSYHVIDNVIPESFTAGTEYKNGINL

SEQ ID NO: 123406 - protein, 66 aa, Oryza sativa
  Clone ID: PAT_MRT4530_26244C.1.pep
AFRYHSRSYNQSLHKCDITNTLTGIKHVMFVAPSCKIEKSRPDSSVKRCFYDLKPEYFNTITSKQS

SEQ ID NO: 123407 - protein, 178 aa, Oryza sativa
  Clone ID: PAT_MRT4530_26245C.1.pep
KRCHRRRHPCRCRRPPRRPPRAPGQHHRAPTPRRGGEEAEGSAVNDDRRPHPLRRPCRQRHRWLACSHAERERRRRGRRRARGEREEAAREHAGAPSLPCPPPRPAGGPKSSGSSPAATAPLPPATPLLRPPTAVLPPTTRRPSARRPCVHRPLPAARRRSAWTAAGTPLHRHPRRHG

SEQ ID NO: 123408 - protein, 218 aa, Oryza sativa
  unsure (1)..(218): unsure at all Xaa locations
  Clone ID: PAT_MRT4530_26246C.1.pep
MTIFLRQFFLLNKKMFFFSRTTQQLLRTHYVLLLCSFKELLQQYERVHAMEAVMAXSPREGSGATMSDDEDNQVDSESNMFDGNDGSDGMGFGPLMLTEGERSLVERVRQELKHELKQGYREKLVDIREEILRKRRAGKLPGDTASTLKAWWQAHSKWPYPTEEDKARLVQETGLQLKQINNWFINQRKRNWHSNPASSSSDKSKRKSAGDGKAEQSW

SEQ ID NO: 123409 - protein, 317 aa, Oryza sativa
  Clone ID: PAT_MRT4530_26247C.1.pep
MAFHYQDHALAMDAAAAAAETGGHHHPGFVGAGGVVGGGGGGGWEREKAAIAAHPLYERLLEAHVACLRVATPVDQLPRIDAQIAARPPPLAAATAAAAAAAAGGAPSGGEELDLFMTHYVLLLCSFKEQLQQHVRVHAMEAVMACWELEQTLQSLTGASPREGSGATMSDDEDNQVDSESNMFDGNDGSDGMGFGPLMLTEGERSLVERVRQELKHELKQGYREKLVDIREEILRKRRAGKLPGDTASTLKAWWQAHSKWPYPTEEDKARLVQETGLQLSQLASGFINQRKRNWHSNPASSSSDKSKRKRYRVVDF

SEQ ID NO: 123410 - protein, 331 aa, Oryza sativa
  Clone ID: PAT_MRT4530_26248C.1.pep
MAFHYQDHALAMDAAAAAAETGGHHHPGFVGAGGVVGGGGGGGWEREKAAIAAHPLYERLLEAHVACLRVATPVDQLPRIDAQIAARPPPLAAATAAAAAAAAGGAPSGGEELDLFMTHYVLLLCSFKEQLQQHVRVHAMEAVMACWELEQTLQSLTVVTLTAGASPREGSGATMSDDEDNQVDSESNMFDGNDGSDGMGFGPLMLTEGERSLVERVRQELKHELKQGYREKLVDIREEILRKRRAGKLPGDTASTLKAWWQAHSKWPYPTEEDKARLVQETGLQLKQINNWFINQRKRNWHSNPASSSSDKSKRKRKRSNAGDGKAEQSW

SEQ ID NO: 123411 - protein, 83 aa, Oryza sativa
  Clone ID: PAT_MRT4530_26249C.1.pep
HASAHASAYTSLTRGRTRRLPHPWGRGCHQHREPLRRIRQGPGMIRTKVQDDRRNLGLVLRQVRCVMVHLCDLHNIDDYYAYC

SEQ ID NO: 123412 - protein, 85 aa, Oryza sativa
  Clone ID: PAT_MRT4530_2624C.1.pep
MERGGPCDGLCRFRIHLGTRGDCPLPAGDGDKASDDGAGAAAPPALVPPSDQRLGGSGVTSTNHRCRKGRRKREEQEREREAARE

SEQ ID NO: 123413 - protein, 74 aa, Oryza sativa
  Clone ID: PAT_MRT4530_26250C.1.pep
LTEGITRSPIERTDEEGTEALTTGQRAPPTVTGEMTRWPSSRGTTATTYHKNKHTTSLWRYKLYYHPHGENTRT

SEQ ID NO: 123414 - protein, 118 aa, Oryza sativa
  Clone ID: PAT_MRT4530_26251C.1.pep
MAALNGKVVVAVMVVAMVVAAPGASAAITCGQVGSAIAPCISYVTGRSGLTQGCCNGVKGLNNAARTTADRQAACRCLKSLAGSIKSLNLGTVAGVPGKCGVNVGFPISLSTDCNKVS

SEQ ID NO: 123415 - protein, 112 aa, Oryza sativa
  Clone ID: PAT_MRT4530_26252C.1.pep
MSRDLALSCSDVAIAWAALCCSPGSRRAASTAVCRIVDDRATSSKKTARILSLWDDMIIDRSIAESEFALIAVGKRGRSVAFSWVGQWTVCTIDQRSVASCIGMAIGSDGHG

SEQ ID NO: 123416 - protein, 42 aa, Oryza sativa
  Clone ID: PAT_MRT4530_26253C.1.pep
NNEGILLTKQVERTITSKTVYPSIQRLCLSSLSFYPASGNKG

SEQ ID NO: 123417 - protein, 222 aa, Oryza sativa
  Clone ID: PAT_MRT4530_26254C.1.pep
AEWRTPSGGSSGVISSELYCKICRNVMADAVLASKCCFDSFCDWCIRDHIAAKSKCACGAQACVDDLIPNPTLRTTIANVLATTSGTASVSSGTEKPRSSASSNATEAAPQSLAASQVSRSNVSSKKSATISSGVLGPRKAWETVAGDHSTEYGALAVDGDHHGSYGFPFGPAPGYVDPFFGVGVPFGADPYMYYGVPYGCCGAAYGYYGDEDRRDTKRTRL

SEQ ID NO: 123418 - protein, 195 aa, Oryza sativa
  Clone ID: PAT_MRT4530_26255C.1.pep
MNGGDLPLETSAEWRTPPGGSSGVIPSELYCKICRNVMADADHIAAKSKCACGAQARANDLIPNPTLRTTIANVLAITGGAASASSGTEKPRSSVGSNAAEVAPQSPAASQASHSNVSSKKSATISSGVLEPRKARETVAGDQSAEYGALAVDGDHHGSYGFPFGLAPGYVDPFFGVGVPFGADPYMYYDGAPYG

SEQ ID NO: 123419 - protein, 99 aa, Oryza sativa
  Clone ID: PAT_MRT4530_26256C.1.pep
MVGSAAYSAASAIVVVMAKGKGRGGRGGPSGANKVSSFLLPSEHLVWYILNLIAHLLDYQQMEDLVLDPWVTGRLYGFASSHMTRCLFMCRFLSDGLLG

SEQ ID NO: 123420 - protein, 99 aa, Oryza sativa
  Clone ID: PAT_MRT4530_26257C.1.pep
GRACLCKNFTCMLCKCFNGAPPRLRPCGARLTGLIFCSSKARIYMLFQSPWSLISIVTNSNLVSSHPWNPGHLFGLVSFHGAGPGLVCKFGPRSLSFFC

SEQ ID NO: 123421 - protein, 34 aa, Oryza sativa
  unsure (1)..(34): unsure at all Xaa locations
  Clone ID: PAT_MRT4530_26258C.1.pep
MAQLPPKIPVAAPGHHQHWASAGGARHAGXANEK

SEQ ID NO: 123422 - protein, 170 aa, Oryza sativa
  Clone ID: PAT_MRT4530_26259C.1.pep
MAIKDRFAGNPGRVPRFVRAIEDAYGVGIPLRCKWRTRMRKSAEAQLAVTRARSIAVMLVAKRHHGAATWCRASCRRTRQIRRVVARSSLEGNGGEGGAQGRPVGRCSPLRQIHAHEGRATFGSMLREVEPKVSHPAFARHRARSTVLPPDPGAWGAEWRSDPRWREALE

SEQ ID NO: 123423 - protein, 226 aa, Oryza sativa
  Clone ID: PAT_MRT4530_2625C.1.pep
MHNERLHGPMHRDHDLRRGRENKFCANEYGCVRLPFFQLRLRLQHFEIAAAYNDFELPQPQRLRQPYLPNRAYGQFDRVFFMPCRTTAVRQRAKSTAWRRLFDTRRRVSSEPAAVRRVLRTAAAAAATILKEEEWRVLLLPRLAYSPGTGGARSTYDAAPPLIHLRGRRSTKPSHAAHAVSSYESGRQHERITCNNNNDNNVRLAKSRRRRTSCSKSATRDGIIQR

SEQ ID NO: 123424 - protein, 225 aa, Oryza sativa
  unsure (1)..(225): unsure at all Xaa locations
  Clone ID: PAT_MRT4530_26260C.1.pep
MDHQELEDGAEKVKLLGIWSSPXGVKVMWALRIKGVEYDYIEEDLRNKSNLLLECNPVHKKVPVLIYQGKPIAESDVILEFIDDVWKDLRYRILPEDPYECAMARFWSKFGLDKLSPPIWKWFTTQGKEQEDAYEAAMEQLLVLEKVLDEKKFFGGERIGFVDLSLGSLSYVIPIYEDITGVRLITSDKFPWLSAWMEGFLGLPLVKEHLLPLDKLRPSSSTSHC

SEQ ID NO: 123425 - protein, 113 aa, Oryza sativa
  Clone ID: PAT_MRT4530_26261C.1.pep
LLGQNGTSICSGPPRSARTGTCLQWSPRCYPSTPQTSLFQSVIPQPSCAWFTHGNSDVTPKLKQLKKISLCSTCPVITVIISTDSVNPSINDCPKLYAWFETPMFSQFVGHFK

SEQ ID NO: 123426 - protein, 77 aa, Oryza sativa
  Clone ID: PAT_MRT4530_26262C.1.pep
GLMCVSSGLRHGRICEGYTIFVCGEQWGWDSHVIKEPPIGIIGPRSGTGPDMPGGTPGGCEKKFGGHRMVQLNETAN

SEQ ID NO: 123427 - protein, 59 aa, Oryza sativa
  Clone ID: PAT_MRT4530_26263C.1.pep
CTYRMVSHRFPSPSLHPSSQDLHPASLPAGCIILQRYPSRAPACKVHTACSISQVIPCI

SEQ ID NO: 123428 - protein, 39 aa, Oryza sativa
  Clone ID: PAT_MRT4530_26264C.1.pep
LYMYTPFSFNTCLDPLPHKGQPSKRPCYKIKLTKETKRD

SEQ ID NO: 123429 - protein, 119 aa, Oryza sativa
  unsure (1)..(119): unsure at all Xaa locations
  Clone ID: PAT_MRT4530_26265C.1.pep
FNQSVGFLVNYTSSSTLLLFEHINMIPKKNPVRPPETALTSNGPSAFMSTPIWVILDLXESLSNYLSNASSLISXNSFRVNGNRQNKIVFLQKPSLGLGPCNRLDPSRKCLPPSPRITT

SEQ ID NO: 123430 - protein, 458 aa, Oryza sativa
  Clone ID: PAT_MRT4530_26266C.1.pep
MEGRRRRGEGVESIWDKGDEERRRSIWERGKAWGPCVGPRWRAPNAEPKRPSSQIPTAQPDPMVDRLRALVVNRSWRTSLQALPPPPLPPQLPWLLRPSAGGPTFSCLLSGADELSVHRVRVPADLRHARYFGSYDGGWLFLASRQTSGHMLFNIRTEQCLFLPDTVPRPWSSDDFPMIMLAATVSSPPSRGTDDPCIGAAIVHCTPFITDSRQITFWRMGSHMAIPSIPPDHQFDVVSNQFVVEEMEDVIYHKGAFHFVTKLKNVFVCRLALHQADLVVDHREWLMFAPQDDLGYPRPVATARYLVESREQLLMVLKCTCNLPGWPPLVFSVFEMTHVQAPAGAPQYVWTPVPTLVGRMLFVGHGCSRSYELANFPGFQEGIYFLDDLQFYSVSRIVQYQEYLCFDNGKYTLGPPHVASRCFWPDQVNSNYSSPVWLLPGGEDDANNAQAQVDVHMM

SEQ ID NO: 123431 - protein, 172 aa, Oryza sativa
  unsure (1)..(172): unsure at all Xaa locations
  Clone ID: PAT_MRT4530_26267C.1.pep
EMNPKKKRGVGGKRRPGLPFSRNXRAGRRGNPRVSGRFGRGPRRPNRLEPERVQAEQEALHEAATNGGGVRSPRPDSRQTALPQHAGGGGGGGGDHQNDGRTRRESQAVTSPRGHRREEILNPRTPAPPLPAPPPGRRRRRRRRGGGGQVGRRGGGWGLGGIYSVSFRSHAT

SEQ ID NO: 123432 - protein, 78 aa, Oryza sativa
  Clone ID: PAT_MRT4530_26268C.1.pep
EGSLTILSICITLFSYCHSHFGLTSANLFAADAMQFCTLQWPLSFRFFSRSDDYLLAGVKRHLLDSCVGLDRMLIQES

SEQ ID NO: 123433 - protein, 96 aa, Oryza sativa
  Clone ID: PAT_MRT4530_26269C.1.pep
LLCLVRAQAVLKSGASDDSRQQIADRACQVLPGSLTGPDQFKHIPIQAKRDQRLARLPHKPWYYVHGVSLECIVGSTRLRLLHSLLCGTLVQQQVA

SEQ ID NO: 123434 - protein, 64 aa, Oryza sativa
  Clone ID: PAT_MRT4530_2626C.1.pep
LSATSKETEQQKPISTLTSKGEASCNYVSTLTNSRRNCRLSQTSNVPPSTHIASPNLSKILQSQ

SEQ ID NO: 123435 - protein, 542 aa, Oryza sativa
  Clone ID: PAT_MRT4530_26270C.1.pep
MAFATSTLPFAPSNPSPSSRSAAAAFSPRGGVHFAAARSGLPLACAAPRHRGRPPPRRRRGGCLVVWASADYYATLGVPRSASNKDIKAAYRKLARQCSGSPFRVRTPLSLVLAVLTLTPSTLKIPMPSSVDEWHERAMLEQPTLVPVAATLYHPDVNKEPGATDKFKEISAAYEVLSDEKKRALYDQYGEAGVRSAVGGSAGAYTSNPFDLFETFFGASMGGFSGMDQGTFRTRRRSTAVQGEDIRYDVNLGFSEAIFGTEKDIILSHLETCDACAGSGSKIGSKMRICSTCGGRGQVMRTEQTPFGLFSQVSICPTCAGEGEVISEYCKKCAGEGRVRVRKEIKVKIPPGVSKGSTLRVRGEGDAGPKGGPPGDLFVCLDIEEPADIKRDGINLYSTVSVSYIEAILGTVKKVRTVDGNSELRIPPGTQPGDVVVLAKQGVPSLNKPSVRGDHLFTIKVTIPKRISGREKELLEELASLSNGGFAGAPVKPKSIRQENETTVAQENSDQPDEGEGDWLKKLQDFAGSIANGAAKWLKDNL

SEQ ID NO: 123436 - protein, 59 aa, Oryza sativa
  Clone ID: PAT_MRT4530_26271C.1.pep
IKNYWNNSLRKRLDGYNATNILPVQLHVVSKYFQKLSKLSPTKLKKRADHLFYISLGNS

SEQ ID NO: 123437 - protein, 207 aa, Oryza sativa
  unsure (1)..(207): unsure at all Xaa locations
  Clone ID: PAT_MRT4530_26272C.1.pep
MYESAICWAPFVFISPSLFSVAPAGARAGGGXAPGRCEGRRRRWPGRVXLGPDXVEAAPAXAPVGGQELXGVSRLPIAGDKRRPHRAKDEDNATAQRHRQAPPSIAAYLQSTTSFCIPTWPPLDSPSNHEPGGSRSGHPELEGRGSSHPEFGCSRSVREESSPPSTPLRVVEVNLPRGEQASAIPFHPIVDLSLQSTDSSISCGSCG

SEQ ID NO: 123438 - protein, 105 aa, Oryza sativa
  Clone ID: PAT_MRT4530_26273C.1.pep
HKFSSYGLGQTLPLSVCNKHYMHITCRPSINSHFSSQIPITFILFQQRFMCQNHILIIDGMSICIFLSMAKQVVAHRTYINPFELKESTLTIYRGSNRKDHNYSR

SEQ ID NO: 123439 - protein, 145 aa, Oryza sativa
  Clone ID: PAT_MRT4530_26274C.1.pep
RGSNSLDFSSLSLSLSLSLSVGLFVQRRPHRAKDEDNATAQRHRQAPPSIAAYLQSTTSFCIPTWPPLDRPSNHEPGGSRSGHPELEGRGSSHPEFGCSRSVREESSPPSTPLRVVEVNLPRGEQASAIPFHPIVGSHCLLIYFT

SEQ ID NO: 123440 - protein, 365 aa, Oryza sativa
  Clone ID: PAT_MRT4530_26275C.1.pep
MGTRAAFVVAFLIRSLYGGMQIVTKFAFNEGMSTSVFVFYRHVIAILFLVPVAFVLERKTAPPLTFKVSLKLFLHALYGMESLNLKRINGIAKVSGVVLCIVGVIILAFYQGPELKSFNHHHLFRTSTVYAAATSHPATTWILGIFLTTLSTTCWALWTVLQGPMLEVYPSKLLNTTIQIVFATIQCFFIALAIERDFSRWKLHLDMGLIAVIYSGVLVSGVAYYMQVWVIDKSGPVFLAMTMPITLLVTIMLSSFVLGEAVTLGSIISGVVMVGGLYCVLWAKKSEQAAISKQQMGLLHAIKAVFPDCAQSPEEGEKRRLICVPSRLKSALTLPTGCSARSGLGNSNKPFALPSHLTPLAHHFM

SEQ ID NO: 123441 - protein, 462 aa, Oryza sativa
  Clone ID: PAT_MRT4530_26276C.1.pep
MAAAAMAPSPPEPALPRELSLGDLRAVSMLGRGAKGVVFHVVPAAAGEEEASMALKAVSREAARHKKNGSGGEDGHRRIWFERDVLMSLRHPLLPSLRGVLATDAVVGFAIDRCGGGDLNSLRRRQTEKMFSDSVIRFYAAELVLALDYLHSLGIVYRDLKPENVLIQDSGHIMLVDFDLSTRLPTPPPPPEEQDATIADSMPEPPPSSPSPNRAKGKRQPGAASCFPFCSVGATKPAASADSPSPTSTSRTASASSSSSSSTATTASSSTAAGVRSPAKSNSFVGTEDYVAPEIIAGSGHDFSVDWWGLGVVLYEMLYGRTPFRGLNRKETFYRVLSKQPELVGEKTPLRDLIARLLEKDPEKRIGARGIKAHPFFNGVDWDRILRVARPPFIPPPPEDEDEAGEVLDVEKVVNEVFAANDGGAAAGVVEKPSPEAGGTLAVGDGEQRRDPSKEGDFSVFF

SEQ ID NO: 123442 - protein, 92 aa, Oryza sativa
  Clone ID: PAT_MRT4530_26277C.1.pep
LLVWNTIWLLATQQRGDPTSFEAGQLSLLLAGGKNAVLLGVNPEHERKGARLLLSLGQPNAGNPAVAVGDTRSSLPPTTPGGRTFVRTRTPC

SEQ ID NO: 123443 - protein, 196 aa, Oryza sativa
  unsure (1)..(196): unsure at all Xaa locations
  Clone ID: PAT_MRT4530_26278C.1.pep
WIPGLQASRRRRPASSRARAREKRDPPAPAATAVGIRAAATTYASRGPRYASGVHAHSAISASAAAAAAAAAALSATGIPLSARHLFGXSLXFTIAHCDAGAPTGLNDAPDLINGLNDKIQDSLQYPIKEYPLELKPLFSAFALKNFSLTTLRSFLLYYLPLLEPHPHTDGDDEDDLLQDESENRPPVDLVTPFYN

SEQ ID NO: 123444 - protein, 349 aa, Oryza sativa
  Clone ID: PAT_MRT4530_26279C.1.pep
MDDGSKLQPTATRFRWLNLARCTLASVVTVLAVVVIARAVVVLLRPEKLRLSVAGGRVSVSRMPAMKPLPRVNMSFVLRAFNPSGRASIEYTGITVALRAIDDGDAASPAAAAPIIAQFPFPDVPVAQQVAHEAAARVSLAAAEDVPLRYVKALFDGRGISAAIQVDGFLTTRMEIDGRISRSNGGVATTFYCLPVTIAVGDGDDDESRTRDTWCLDKFFGGFDPGFVLRAAESAWDPHEPHIRPALGRRPPGRGEAGEEEAAAVAEGEEMPGKGRRRREKNYRAAHGGEPRLPPPPKQRELDALPSKLRRLIAIQEKHKGGEKGAVAGDSSGKQGESDAAKNKALAKI

SEQ ID NO: 123445 - protein, 142 aa, Oryza sativa
  Clone ID: PAT_MRT4530_2627C.1.pep
KKGEDSRPAALAVVGRPSGVAGACARRIRWPCSSPPILLATVAAADKLRTVPAPTREPRARPRRRTRPYGAPPPPICAKWGRRQEAPPGRRDGGRWGRTSVDTGGQAADAALREGRRTGGVTTGGRRRRRGRAVVDGGGASC

SEQ ID NO: 123446 - protein, 55 aa, Oryza sativa
  Clone ID: PAT_MRT4530_26280C.1.pep
YGHSLLGNNLVSFWLSWMITSALLQLALAPRACSLFRCHRHWYWIAHMRTCASRS

SEQ ID NO: 123447 - protein, 130 aa, Oryza sativa
  Clone ID: PAT_MRT4530_26281C.1.pep
INSYMQHTREPLPIYARQHMQNILIHVQVMISVNSRHIPAFTVVGKNLAALCSTCFSVFFPAPGSPSRRLAHSLPWPARLLACSSSSAHSQPSPRPPPRPATASPRGGGRRRGTQPGRRPVGSRREEEKR

SEQ ID NO: 123448 - protein, 53 aa, Oryza sativa
  Clone ID: PAT_MRT4530_26282C.1.pep
KFSSPKPGPLREFFSSGLIWVWPFFAGIYLFWCLFFQKNQQKKKKNQHKKKNQ

SEQ ID NO: 123449 - protein, 993 aa, Oryza sativa
  unsure (1)..(993): unsure at all Xaa locations
  Clone ID: PAT_MRT4530_26283C.1.pep
MMTMSDDGDRTCPLCAEDMDITDQQLKPCKCGYEICVWCWHHIIDMAEKEDTEGRCPACRTRYDKDRIVKMAATCDRTVVEKNVDKKQKTQKVKSKAAVTVEAKKHLASVRVIQRNLVYIIGLPANLCNESILERREYFGQYGKVLKVSVSRPTGAPSQQAPTNNSISVYITYAKEEEAIRCIQAVHNFVLEGKVLRACFGTTKYCHAWLRNMTCGNPDCLYLHDVGSQEDSFTKDEIISAYTRSRVPQMASNVSQRRAGTVLPPPAEDFSYSAVVAAKHPIKNGITNTANQSRLSPPNSSSGRSTLPPAASWGHRDLNTRTTATGVASSQSLTKSKADPQSNSFSSSSTVSSTKLPSSWNDDTSTVPKMTEGRDSLSKTLKPYKPGIAKETQAVTSLDPSISKSEVKDGDGDYQVTNMASKTSTSVIRKDQSNQAAIDTATEDTRSESTDIDRLSVGVSSVTLSRKDGVQSIAENQQPDAILSTSVVVPFSQNLKLAECNDSTCQPSSDKHRDWCSDIQSSVSPQLNDIESYAVATDKSHGRVLDAADQASSSPYVHFPNTAPISLWNGKEINHTSTSDRTSTMMQPGLLSSVDSTSTMLNGHQEGLGTIYAPGKVSEHPRMKNHQPGAVGAVRIDNIGSFDKAVSVNKDESSIIADILSLEFDPWDESYSTANNFAKMLSASEKNDVLFDARSWKTKTSNSESRFSFARQDNQGSLLDSSMRNYKSEQNFSLPSQNSHGNIYQSGIAFQSPEEGFSKSNSLTMLDMLATGTSKPKVSAPPGFSAPARVPPGFSSGFSSHEGVGLIRSMVRHTQKLAHXDLLGINTSHYQPQLARQTSDIEFVDPAILAVGKGRMPGISDSGLEMKTSHTFPSQLQTSNDPRFQLLMQQNVPSHQNVGFAEHVQDAFNPMNDNYLASRLIPQNHGSLSSYTQMSLQQPRSSHLTNGHWDGWGDLRQGNNVSMPDMSRMLYPTEANNFHMLGSNDLYNRAFGL

SEQ ID NO: 123450 - protein, 100 aa, Oryza sativa
  Clone ID: PAT_MRT4530_26284C.1.pep
SDLWFGILRFSLSLLLLKQFQFLISLQCFAETRPFDDLLGINTSHYQPQLARQTSDIEFVDPAILAVGKGRMPGISDSGLEMKTSHTFPSQLSTSNVPRF

SEQ ID NO: 123451 - protein, 119 aa, Oryza sativa
  Clone ID: PAT_MRT4530_26285C.1.pep
PTSAAATPLRPLCRRRLPSSPLSRPTPASAALLRRPLIPPLPAYSVLHQMPPSSSLADGLHPSLLKSISRATVTNPTSPTAAMEGRNIRRYEAPDAPSFSLGIDSDNDDDEERRREEQR

SEQ ID NO: 123452 - protein, 107 aa, Oryza sativa
  Clone ID: PAT_MRT4530_26286C.1.pep
WRYSTSQYILQRGEQWCQLYIIEQTDKQINMLLMNELSIEHHPCLVSKSISFFFGCSGSTPVMFQGSFSLSRCHDNMRLLLPVPANRCPHKQHLASNKIHGLNLRNY

SEQ ID NO: 123453 - protein, 64 aa, Oryza sativa
  Clone ID: PAT_MRT4530_26287C.1.pep
LNLSCSKKLMECSQSVFSDSRTGIIHGVRNYKDSFLKHWQHDILNKRNFVVLILSRNNNFDNIK

SEQ ID NO: 123454 - protein, 51 aa, Oryza sativa
  Clone ID: PAT_MRT4530_26288C.1.pep
LKKDKAIKNTLILKQGGPPLLVPSFPPLPCGILMFLWGYLIFYFLARFFTP

SEQ ID NO: 123455 - protein, 453 aa, Oryza sativa
  unsure (1)..(453): unsure at all Xaa locations
  Clone ID: PAT_MRT4530_26289C.1.pep
MESEVCWLLCAALAAAMACYYLTGTMRRRSRRLPPGPTPLPVIGNVLSLRGNMHHALARLAGEHGPVMALKLGLVTTVVVSSAGAAREAFTKHDRRLAARAVPDTTRARGFASRSMIWLPSSDPRWKTLRGVAATHVFSPRSLAAARGVRERKVRDIVGHLAGHAGEVVDVGPXSCTGWRRWAXEKRYDKVFGIFDSVINSRLADASTGKHADAGAGDFLDSLLDLMSAGTIARDDVTSIMYDLFGAGTDTIAITVEWAMAELLRNPSVMAKARAEMNHVLAGKVKATEMEENDVEKLPYLQAVVKEVMRLHPAAPILVPHRAEEDDAEIGGYAVPKGSTVIFNVWAIMRDPVAWERPEEFMPERFLDMAEEVDFRGKDHKFMPFGTGRRLCPGLSMAKRVVPFILASLLHAFEWRLPAGVTAEALDLSEKFTTVNVLVTPIKAIPILASDQI

SEQ ID NO: 123456 - protein, 161 aa, Oryza sativa
  unsure (1)..(161): unsure at all Xaa locations
  Clone ID: PAT_MRT4530_2628C.1.pep
FLAFFAVLVLATAVVPAVSQQGYLSIDCGLEANSSYQDDNRILYVPDGPYVDGGENHKVAAEYASSFQRPDQTLRSFPSGVRNCYTLPTAAGSKYLVRLVFVYGNYDGKNIXSSSSSAAAAALRFDLYLRLSRWTTVQGGTRSGGEVHRPCSWRGPAGRPC

SEQ ID NO: 123457 - protein, 311 aa, Oryza sativa
  Clone ID: PAT_MRT4530_26290C.1.pep
MPLLSTASPRDFQPVCHLRSMHAVVVCGVPPPRRKGWRRWAEKRYDKVFGIFDSVINSRLADASTGKHADAGAGDFLDSLLDLMSAGKIARDDVTSIMFDLFGAGTDTIAITVEWAMAELLRNPSVMTKARAEMNHALAGKKTIEENDVEKLPYLQAVLREAMRLHPAAPILVPHRAEEDGAEIGGYAVPKGSTVIFNVWAIMRDPAAWERPEEFMPERFMDMAEEVDFRGKDYKFIPFWAGRRLCPGLLMAERVVPFILASLLHSFEWRLPGGMTAESLDLSEKFTTVNVLVTPLKAIPILASKNENIRE

SEQ ID NO: 123458 - protein, 55 aa, Oryza sativa
  Clone ID: PAT_MRT4530_26291C.1.pep
PPPGLIHASIHENPFLNTAKITFYHFPFLDKNFINVAMDIDPEWKMIKRDLGRIE

SEQ ID NO: 123459 - protein, 89 aa, Oryza sativa
  unsure (1)..(89): unsure at all Xaa locations
  Clone ID: PAT_MRT4530_26292C.1.pep
NNSIYSTLLLLLLCLTPATFFLLRFIQGVANXGASVRVGRDTEKDGKGYFEDRRPASNMDPYLVTAMIAETTILWEPSHGHGHGQSNGK

SEQ ID NO: 123460 - protein, 55 aa, Oryza sativa
  Clone ID: PAT_MRT4530_26293C.1.pep
PPLLVSAFYQIYSESQYHQMINPSRMVYVLEACIKSPYDLVFFSLIKCLKNCIQY

SEQ ID NO: 123461 - protein, 92 aa, Oryza sativa
  unsure (1)..(92): unsure at all Xaa locations
  Clone ID: PAT_MRT4530_26294C.1.pep
NPGVCLTIVRLIPPGYTAPAISPPQPPMPTAHSRAINFIPXSPRASSRWTXEYLNXFLARNLGNNAILYIQQVVANNNETVPAIPSHLDNSH

SEQ ID NO: 123462 - protein, 48 aa, Oryza sativa
  Clone ID: PAT_MRT4530_26295C.1.pep
HLLSAHTPPTDLLLLLLNYVASQLPDSKPRVTAADPTCGRIAKASVAL

SEQ ID NO: 123463 - protein, 91 aa, Oryza sativa
  Clone ID: PAT_MRT4530_26296C.1.pep
MADCKGHSQEANPIKASMMEVEAFMAKQENHNHRFEIHHQSPQGRAPTLAGLLIGKLKNGRRNLLLLVDLKDYMLQMLITKASVLSLTVAS

SEQ ID NO: 123464 - protein, 121 aa, Oryza sativa
  Clone ID: PAT_MRT4530_26297C.1.pep
MGSSKEPAGLYRRPGLPPSVRAASGSCRPLPGRQEGRRTAVPRRPARRVPRRLAALAKGGRNNATSLLPVPVPCAGQSMAGRGGGEPPPAPTSSGGSHEAFTWPGYGDVLPVPPLSPDKQH

SEQ ID NO: 123465 - protein, 237 aa, Oryza sativa
  Clone ID: PAT_MRT4530_26298C.1.pep
MVRNSDGRTTFWYRRFRPTFPWSSPLKVCPGSTPTCTVTSKPPETRTTSSRSSNAFKWTTLLIPPTTAAHHSTSSASSAGVSRRHQQRLRGVGPHPSGKALSFALPGHQSTSVPPFPSKGPSIGEGQGNTNAPTHLVCQFWFPCLPRPPIFFPLGSLVPRIGSTSTNSKPKGPWTSPAKSGQSNLLEEGRASTEFLAPFPPIRGPTKERSDLVKVFYCSLISLCSSVIFWNPEMFKL

SEQ ID NO: 123466 - protein, 77 aa, Oryza sativa
  Clone ID: PAT_MRT4530_26299C.1.pep
VSVVNELARASRSPHTRSDRQADCLSIRLYGHIADKGIPCTYMELFPVNIAVESKFTKSEYTEPSRQEILSNPSTTI

SEQ ID NO: 123467 - protein, 417 aa, Oryza sativa
  unsure (1)..(417): unsure at all Xaa locations
  Clone ID: PAT_MRT4530_2629C.1.pep
MPNTPAIVSLVLLLSCLVATGDQHATPAAYKLPLIVPLIRDTNTSLYTIAIKKDDAPLVVDLAGALVWSTCRSSTHATVSCLSGACGAANQQQPRRCRYVDGGWFWSGREAGSRCACTAHPFNPVTXSGTKLLCPEAFATVGACAPERLLXASLPAGATGVAGFSRRPLSLPSQLAAQRSFGNKFALCLPGFAAFGDTPVYIGTESLGIVNYTESLPYTPLLTNPRNPGYYLPVKGITVSWYGRDVPASLPAGALDMDARTGRGGVVLSTTTPYAVMRPDVFRAFAEAFDAAIRGTDYAKVVRVPAVEPFKLCYDGAFPFRKRPPTWDVPTIDLELAGATGIWRLFTENYMVQTPRGMCVGILEMEAGGGMPVDGEPAMVLGLKQLDTNLLVFDLDKMLLWFSGELSFRLTGCVSPF

SEQ ID NO: 123468 - protein, 197 aa, Oryza sativa
  Clone ID: PAT_MRT4530_262C.1.pep
MAASRGPPLLGFRALALALLLAILLLLGCSAPAAYAGAEGVLRQVVGRRGDDGGGGNFFEPFNVTYDHRAVLIGGKRRMLVSAGLHYPRATSEMWPSLIAKCKEGGADVIETYVFWNGHEPAKGQYYFEERFDLVKFAKLVAAEGLFLFLRIGPYACAEWNFGGFPVWLRDIPGIEFRTDNEPFKAEMQTFVTKIVT

SEQ ID NO: 123469 - protein, 320 aa, Oryza sativa
  Clone ID: PAT_MRT4530_26300C.1.pep
GLQEFGTRNSMCSSPDEVCCNQIQPELMAGHLRSLVQHTFNGAVLAVHPYLDRYVLAAAGNVLFVFGFLNESPHRIKKYTTSRTRFTITCMVFSSILIMSFFVVTSNPRIDLCQNLRKLELIYSDPAQRLVGDVALLSCETAVVSDRRGSISVLSCPRLEVSESPEKNLAVHCSFYMGETAMSIQKVAFKHWLPIDDLTEPVLESVYNCVVASTLLGSIFVMIPLTSEEHQMLQDVQERLSVHPLTAPLLGNDHAEFRRRGIPSGVPPILDGDMLVQFLELTSEQQHDVLNIVSPGKKRQHDISVFQVMRALERVHYALN

SEQ ID NO: 123470 - protein, 234 aa, Oryza sativa
  unsure (1)..(234): unsure at all Xaa locations
  Clone ID: PAT_MRT4530_26301C.1.pep
MLVWLTSLLILPIINGSNLAALNTILTLMWHIWKARNGFKFQGKHKEPSQVCHGAEAMVSTYLKYSNHLNGNRCYVDASWKDGSTGIGNFIHLTSNHNAILIKRSLXAMHLAMQVIHFLNIPETTFLTDNLIIAEVFRKKDFGADPGHWSLRPFWSQILSTIPESWMQVTWIPREINRMADKMAKEARAMLLNDPIYNCQNVSHLAYPNRGCYANAIKNSFSGTNCVIKHVLCF

SEQ ID NO: 123471 - protein, 54 aa, Oryza sativa
  unsure (1)..(54): unsure at all Xaa locations
  Clone ID: PAT_MRT4530_26302C.1.pep
RSFSYLLSLLLFHCNASAAGLILLVKVIGQYQLQSHLLLQQQXLSPCSEFVXTV

SEQ ID NO: 123472 - protein, 123 aa, Oryza sativa
  Clone ID: PAT_MRT4530_26303C.1.pep
VAVRRPLPHEQRFPTPPPFLTDNLIIAEVFRKKDFGADPGHWSLRPFWSQILSTIPESWMQVTWIPREINRMADKMAKEARAMLLNDPIYNCQNVSHLAYPNRGCYANAIKNSFSGTNCVIKH

SEQ ID NO: 123473 - protein, 175 aa, Oryza sativa
  Clone ID: PAT_MRT4530_26304C.1.pep
MAQGGGVVSIRQSTGAGAGSTREWRWGLQKEERGGGGGLRDWDARDEKLGFLMWAAGLLYDGFRPTCQWIALKSGSGSRSPEYVESGDSSSASENISDDEDDNVAAKNRTSNNAQAKNSKAVHPAPRSNRRLKNINTLIDNDKVLDCRWTVYEFLDFIVCSRILYELTSVFKDIV

SEQ ID NO: 123474 - protein, 227 aa, Oryza sativa
  unsure (1)..(227): unsure at all Xaa locations
  Clone ID: PAT_MRT4530_26305C.1.pep
QYTIGCKKVAFDLLPLPSTYDHVPAHVRWHRTVAEALLDRRWIRDIXWGVGYPGHPGLPQALVACSICXSQYRHVLRSFLSAPIWKSLAPPQRHFFIWLVAMNRCXQPIVLRNRGLPHLDRCVLCDQQDESIDHILVACSESXRQLWWXTLRAIEHPDCLPLNETSFHLXLCRSRMKIPKSHHRGFDTVATLVAWTIXKEXNNRVFDQQNRPWVEVAKGKVEEAVLW

SEQ ID NO: 123475 - protein, 94 aa, Oryza sativa
  Clone ID: PAT_MRT4530_26306C.1.pep
MAPRHHHNHSLHPAATVSHIAIAAVVMNPNLAAAFLAAPLAVAAQFAGGKRRGLTGGPSQSLETRRSHAVSRDTACIVTLSSLSRNDCARSTVY

SEQ ID NO: 123476 - protein, 121 aa, Oryza sativa
  unsure (1)..(121): unsure at all Xaa locations
  Clone ID: PAT_MRT4530_26307C.1.pep
HDSALFHLGQQHGVGVLMSHMIGHGFPLTSLSEXLWPMLMSMCSVASPSLSACRERPLCRLCRTCAPVLSIINLQLRLLRLSPLDRRQWGRCACPYFRQLGVHARTQLSHRPAATSRRQIK

SEQ ID NO: 123477 - protein, 57 aa, Oryza sativa
  unsure (1)..(57): unsure at all Xaa locations
  Clone ID: PAT_MRT4530_26308C.1.pep
KIVSCKXWKGCMKCCNTEGKVVLTPRTHXLDIYINKISSKKKKKKKKKKKKKKKKKK

SEQ ID NO: 123478 - protein, 61 aa, Oryza sativa
  unsure (1)..(61): unsure at all Xaa locations
  Clone ID: PAT_MRT4530_26309C.1.pep
HQDHPPGLPDHACHRTGLGTVHLRCHPVRGDIXQLIDDGXKRLLTSLTEQKIVQRIKADKG

SEQ ID NO: 123479 - protein, 72 aa, Oryza sativa
  Clone ID: PAT_MRT4530_2630C.1.pep
MLPTLAVARRLAGKKVMKDGGADEAMLAGDEDLGRGEPTVFPPARSSRGPLDLPRRTRDNGSGATEIVRGGG

SEQ ID NO: 123480 - protein, 231 aa, Oryza sativa
  unsure (1)..(231): unsure at all Xaa locations
  Clone ID: PAT_MRT4530_26310C.1.pep
MTAAAAAGEIPAEDAPPPGALYSFGTPWPEFNEGISYIDTFRCADAGATTTLIEFYSTSYKSSAPLPGWIKRIRDGQITVDGEVATDPDMILREGSKLVYHRLPWQEPFAPHLLDVLYEDDDMIALNKPSGLQVLPKGLFQQRTVLAQLQLKDWKMPSSFCSKRKDAQSHPVPVHRLGRGTSGLLLCAKTKLAKAQLAAYFAEGATNAGKXDICKARKISKFYRALVTGIL

SEQ ID NO: 123481 - protein, 134 aa, Oryza sativa
  Clone ID: PAT_MRT4530_26311C.1.pep
MDDSGSSSPPAPAPSFRNRYWILRHGRSVPNERGIIVSSLENGTKPEFGLAPQGVEQARLAGESLRKELEELGVPLDSVQIRYSPFSRTMETAREVARVLGVPFDTPSCIPAVELRERYFGPSHELLSHEKELI

SEQ ID NO: 123482 - protein, 137 aa, Oryza sativa
  Clone ID: PAT_MRT4530_26312C.1.pep
VVELGNSLIGTTKRGIGPCYSNKVIRNGLRVSDLRHMDTFGAKLNTLLRDAALRFEGFEYSTKTLKEEVEKYEKFAERLGPYITDTVHFMNQSILQNKKILVEGGQATMLDIDFGTLPNCYFLEFLNLVVFSPGLGI

SEQ ID NO: 123483 - protein, 72 aa, Oryza sativa
  Clone ID: PAT_MRT4530_26313C.1.pep
MATRFLAGKLLAAALRRRTAVSKSAAAPSSSGVCHEQGLCGEESGKAVREVFRELEPELKHEILGKYSSPSN

SEQ ID NO: 123484 - protein, 959 aa, Oryza sativa
  Clone ID: PAT_MRT4530_26314C.1.pep
MGTYVRNYSDDEFSVAGEKPDVEFMDYQNDGSIQDYSLEDAPVVVTVPFPFIDGKPKSVLVGETSADTISIENTSSEPVNLWSVRIFSSNPEDSYVLSMMKPPLNDTDEEAKRNFLGLTSVEDRTLQPGQTLTIWLSCTPKDIGLHTSIVHVDIGDEKIERVAFLLADDNVSQALFSDKPYSRKHTQKKKFECSSFVPGCRPTRQHSQGFKFKLPQFAIPADIRELIQSKQRPDVLSEELNMTNYAKFFSTLLVMEEINLEEEMRSYDMERILMRRRGLEFLSLEVPGLAEKRPSLVHGDFIFVRHAGSDARPYQGFIHKVEADEIFLKFDNQFHLAHRDRNQYDVSFTYNRLNMRRLYKAIHEAELLGPDILFPCRSSSGSVKKGPFKPLNPHINTEQADAVATILGCRGVAPYVIYGPPGTGKTMTLVESILQLYTAKRRANVLICAASNSAADHVLAKLLQASYLIRPSDIFRLNAASRQYEDVDPDFIRFCFFQDMVFKCPPLQALLRYKIVISTYMSSSMLQSEGIRRGHFTHIFLDEAGQASEPEAMVPLSGLCGRDTVVVLAGDPMQLGPVVYCKQAEKDGLGKSYLQRLLFEYEQYSTGDPNYVTKLVRNYRCHPAILELPSELFYGGELIACKEDEVSSIYDSIDLPNKSFPVLFVGIQGCDEREGNNPSWFNRIEASKVVNIIRNLTRGGDVREADIGVITPYRQQVVKIKKALETFEMPDLKVGSVEQFQGQEREIIIISTVRSTVKHNEFDKFFNLGFLSNHRRFNVAITRAKSLLIIIGNPHIITKDRHWDRLLRYCADNGSYQGCPLPPPEETQVSGFRDSQDEPARWGYNQQQESSANYSYKQDPHDSGSEHVNGLPSTENEVEWSEKTLNEEHQPCSSAAEADSPEFMLKQKAEEEEHVEQDGVQPEQCPAKDNKLQDAYAAKYSFPPEWCDVSNIPATGWDD

SEQ ID NO: 123485 - protein, 82 aa, Oryza sativa
  Clone ID: PAT_MRT4530_26315C.1.pep
IDINLVRTNIQALCSLSLKGFQLTLSPILLSAVCSLPLDFLMPLSTWCLSIREQICSCENSETDYLASYGNIYSILTCCYHE

SEQ ID NO: 123486 - protein, 481 aa, Oryza sativa
  Clone ID: PAT_MRT4530_26316C.1.pep
MARSPCDLRILLVAAAAAFIYIQVRLFSTQSHYADRLAQAEKSENQCTSQLRSLIDQVSSQQEKIVALEEMKIRQDEERVHLKILIQDLEKRSVQTLVNNNVAPVAAVVVMACNRPDYLQRTVESILKYQTSVASKFPLFISQDGINGEVKKKALSYNEITYMQIHESYQGNSRSNGYKLSSEKQGHNHTPNLWMYCLKGKLDATVLYFPPPHNIGMQQSDICKKHGKYFSAKTLSEHYKWALDELFIKHNFARVIILEDDMEIAPDFFDYFEAAAKLLDNDKTIMAVSSWNDNGQKQFVYDPNFTYWDDWVRLKEVHRDRQFIRPEVCRTYNFGEHGSSMGQFFRQYLEPIKLNDAHIKWNSEDLSYLKEDKFLIQFGKDVASATPLHGSDAALKAHNMDADVRIQYNDQEDFERIARQFGIFEEWKDGIPRTAYKGVVVFRYKSSRRRIYLVGPDSLSQLRFLNWTYARMKGNEILIDI

SEQ ID NO: 123487 - protein, 442 aa, Oryza sativa
  Clone ID: PAT_MRT4530_26317C.1.pep
MARSPCDLRILLVAAAAAFIYIQVRLFSTQSHYADRLAQAEKSENQCTSQLRSLIDQVSSQQEKIVALEEMKIRQDEERVHLKILIQDLEKRSVQTLVNNNVAPVAAVVVMACNRPDYLQRTVESILKYQTSVASKFPLFISQDGINGEVKKKALSYNEITYMQHLDLEPVRTERPGELIAYYKIAKHYKWALDELFIKHNFARVIILEDDMEIAPDFFDYFEAAAKLLDNDKTIMAVSSWNDNGQKQFVYDPKALYRSDFFPGLGWMLTKPTWIELSPKWPKAYWDDWVRLKEVHRDRQFIRPEVCRTYNFGEHGSSMGQFFRQYLEPIKLNDAHIKWNSEDLSYLKEDKFLIQFGKDVASATPLHGSDAALKAHNMDADVRIQYNDQEDFERIARQFGIFEEWKDGIPRTAYKGVVVFRYKSSRRRIYLVGPDSLSQLRV

SEQ ID NO: 123488 - protein, 77 aa, Oryza sativa
  Clone ID: PAT_MRT4530_26318C.1.pep
SSLHGYIIKIMKKCFISLLPASWCIYKTKGPAFFFIKTNLRFSTYFSNHFLSSFCLLIYHQVNSSLRCDCDSTAIMA

SEQ ID NO: 123489 - protein, 42 aa, Oryza sativa
  Clone ID: PAT_MRT4530_26319C.1.pep
RAIQEVECPDAALNDANVDDTIAWTGGTLDLSLRRRSKTMQP

SEQ ID NO: 123490 - protein, 159 aa, Oryza sativa
  Clone ID: PAT_MRT4530_2631C.1.pep
GPEFPGPPPFPQFLPLLGPPCFVLGPPPPPADQVFQNFFRHLPPVNNGWCRFGALLPLLSGIFRGLGPPKAGPPLAGVFPASRKGALGRAAATPPGFCNVAPPQGPGGVCPWLGDPGPPRPGPWAPIVSGGGGPLWGCPKIRAFFCRGAPIYIFGGNKC

SEQ ID NO: 123491 - protein, 196 aa, Oryza sativa
  Clone ID: PAT_MRT4530_26320C.1.pep
MAGGKKRKAEAARLEETDRALYGAFRGAANSLSQLYTLAMGGQKLSFQAGERHAMEKLYEWILRQHENGLRLTVADIASHIQHEIQYGGDNASASPRSQHASQSTQATVPIPNTMSQQPSPNLFALGNTGLVQSKNSAVFSNALSSPVRRSLQPFHLEQGGDAGYFANGVNRDQNSTASNDSSMDMHSDSPAHDSY

SEQ ID NO: 123492 - protein, 61 aa, Oryza sativa
  Clone ID: PAT_MRT4530_26321C.1.pep
FVCLVLLICIFFVNNCHGNSRDSSVHYEEHLSAHDFVILPVLIGLAKISASPFLSTSVPAG

SEQ ID NO: 123493 - protein, 72 aa, Oryza sativa
  unsure (1)..(72): unsure at all Xaa locations
  Clone ID: PAT_MRT4530_26322C.1.pep
AALFFFFLNGFFLRKGCITYLRKLTTNNSSECILRINPYAPXFNIDKHEHEDQSNKKSLVSTKAKNGSNMME

SEQ ID NO: 123494 - protein, 69 aa, Oryza sativa
  Clone ID: PAT_MRT4530_26323C.1.pep
NRWQLFLKVNHLKPMERGFKGNDKEKSTQENLWKIREERQETVIFELKQLSASLVPGQQGRHSTPEGCS

SEQ ID NO: 123495 - protein, 518 aa, Oryza sativa
  Clone ID: PAT_MRT4530_26324C.1.pep
MEEGVVGGGGAAVLVALLVTVVLAVMRSAGSRSSKRGRLPPSPMALPIIGHLHLIRPPPHRAFDRILARHGPLVYLRLGPSTHCVVIGSADVARDFLKFEASIPERPPTAVTRQLAYGKAGFAFAPYGAYWRFVKRLCMSELLGPRTVELLRPVRAAELADVLRAAQSAAERGEGVDMSHELVRMANNSIMRMVASALPGEMAEAARDCAKQVAELVGAFNAEDFVAVCRGWDLQGIGRRTNEVHARFDALLETIIEAKEEARRRSLRLGRRESSSKDLLDMLMDAAEDDTAEVKLTRDNIKAFVLDIFTAGSDTTATTVEWMLAELVNHPECMAKLRGELDAVVGRSRLVGEQDVARLPYLQAVLKETLRLRPPAVFAQRVTVEPVQVRGYTIPTDTQVFFNIFSIGRDATYWDQPLHFRPDRFLPDGAGATVDPKGQHPQLMPFGSGRRACPGMGLAMQAVPAFLAALVQCFDWAPPPSQPLPLDMEEAAGLVSARKHPLLLLPTPRIQPLPSFYS

SEQ ID NO: 123496 - protein, 101 aa, Oryza sativa
  Clone ID: PAT_MRT4530_26325C.1.pep
MEDEIDRSPYHDALGERYLGALHAVDASPAGSRTGAPAPARDEKRAQLAASASSTARRRGEGRRRGPAACVAVDPILVITAQSRHRHRVAHHRPPDLFSSY

SEQ ID NO: 123497 - protein, 73 aa, Oryza sativa
  Clone ID: PAT_MRT4530_26326C.1.pep
RERPPPVLPPRHTQAPPCSRTAPPPSPPSSAPSRASPRRSPKAHTTTQPRQETPSPPPRPSSRQPRRPLPPAQ

SEQ ID NO: 123498 - protein, 200 aa, Oryza sativa
  unsure (1)..(200): unsure at all Xaa locations
  Clone ID: PAT_MRT4530_26327C.1.pep
KPSPTQTPSHRRLRLRRRERERTSQRFAAVISSFCGSNTASALSPPRHASPIGIRRPHRELPRRGHTXGSIAAAAAASEGRGGYSEMAARLLANLLVIGGTVLGRXAAVQAYRQAIVNANKTGAAQEAINGIRRASKAMTEQEARQILGISEKSTWEEIVQKYDTMFERNAKNGSFYLQSKVHRAKECLEAVYQKPDVPS

SEQ ID NO: 123499 - protein, 407 aa, Oryza sativa
  Clone ID: PAT_MRT4530_26328C.1.pep
MAGCVVGEPELPPGQRLTLLEIAGGGIRGPIPGDIHDFREDELPQLDGPRPRLPDHLDCIAGTRPGRLISAMLAAPGGPGLPLFDARDSSPVHLDNAPLLYPQKRHRMAAGMAALRRRRYAGKSVQGSLGERLARTRVCNTMTSGVLSTFDVRLLQPTIFSTYDAKSMPLKNALLSDICISTSAAPTYLPAHCFQTTDDATGKVREFDLIDGGVAANNPITKKIMVKDKEELYPVKPSDCGKFLVLSVGTGSTSDQGMYTARQCSRWGIVRWLRNKGMAPIIDIFMAASSDLVDIHAAVMFQSLHSDGDYLRIQDNTLHGDAATVDAATRDNMRALVGIGERMLAQRVSRVNVETGRYVEVPGAGSNADALRGFARQLSEERRARLGRRNACGGGGEGEPSGVACKR

SEQ ID NO: 123500 - protein, 93 aa, Oryza sativa
  Clone ID: PAT_MRT4530_26329C.1.pep
SSLFSFLEGIFFFSKRGLTPFPKLFTPSCKVYANRKKTPPPFFAPICPLKGAGPTGLQGPQSRGVKGSRFFFSPHKNSLGPQKFIPLFLEKGG

SEQ ID NO: 123501 - protein, 166 aa, Oryza sativa
  Clone ID: PAT_MRT4530_2632C.1.pep
PPSSSVAVQAETKVAGESVSRLFPPFPLASTLPSPSSARSSAGLHSPLFGWHQLLLPPPPLTPLSSPPAQPVAVSVWDSSRHELAQASVLHRRPLCTSLSPPLPHLTPARPVASPLAGRSACRCHHNLGGETAGERGGGSGVRPGSPARLALICRRPAASWERRTE

SEQ ID NO: 123502 - protein, 111 aa, Oryza sativa
  unsure (1)..(111): unsure at all Xaa locations
  Clone ID: PAT_MRT4530_26330C.1.pep
SKRGLAPNIGLVRHQFGIAASPFLQSGGFXLRTPQVWQQLALVGHQSPYRGINIVRAKGQQFQLPPFGDLSFDGNWAQVQALLAFNGPSKYGIPPGDYGAPRPIPPLGGVL

SEQ ID NO: 123503 - protein, 83 aa, Oryza sativa
  Clone ID: PAT_MRT4530_26331C.1.pep
IRNPTFASIHMAHSFTCSIRTLSGSVLFCGPLCWQNSLPGTGQGVNGSGCPLCPTAEALSTCAAKTHHSLRLTPMSCKAQHPK

SEQ ID NO: 123504 - protein, 80 aa, Oryza sativa
  unsure (1)..(80): unsure at all Xaa locations
  Clone ID: PAT_MRT4530_26332C.1.pep
MCIKPMSRTSQGIQTTIVEIQIHVLQKYKRLQMQRKRXKPAKPEDLTPHAXLDGSDETNFFETSPTKKNFNSGVGKREQD

SEQ ID NO: 123505 - protein, 156 aa, Oryza sativa
  Clone ID: PAT_MRT4530_26333C.1.pep
MALIAPSPRVLRAREAPAAGALQPPAAACSTVAGGGGAAGRPLGMWSGGGGGGGGKGRRRERGDGMLRAEAYFWDVSKPVEMEEIDSMEKLDDALRVRFYFVDVNKVPQTVVKRGNITKMPTIQLWKDGEWAAEVIGGHKAWLVMDEVREMIQKHK

SEQ ID NO: 123506 - protein, 69 aa, Oryza sativa
  unsure (1)..(69): unsure at all Xaa locations
  Clone ID: PAT_MRT4530_26334C.1.pep
FFFFFFGVPKETLPGFDLVSSLYTLVXIMWSSHQHYSLLVAGXTQVWPPPYKRATSALXCVGAPQSYNN

SEQ ID NO: 123507 - protein, 167 aa, Oryza sativa
  Clone ID: PAT_MRT4530_26335C.1.pep
MALIAPSPRVLRAREAPAAGALQPPAAACSTVAGGGGAAGRPLGMWSGGGGGGGGKGRRRERGDGMLRAEAYFWDVSKPVEMEEIDSMEKLDDALRWSVENKQPIIIDWFYFVDVNKVPQTVVKRGNITKMPTIQLWKDGEWAAEVIGGHKAWLVMDEVREMIQKHK

SEQ ID NO: 123508 - protein, 71 aa, Oryza sativa
  Clone ID: PAT_MRT4530_26336C.1.pep
LVVGLHHKERTRGSNILLFALDKSFRFYESLHRSFLYVGTSHMSLRGFHRYPGTAVKTVHRQEDRYPGQFI

SEQ ID NO: 123509 - protein, 164 aa, Oryza sativa
  Clone ID: PAT_MRT4530_26337C.1.pep
MMMTMSSPAATACLPASPSLGPRSLRLLRGALARRGSRRLGVVRAASAEVAAPDAAAAAPGYTSDSLILYFKAEGTMEERAIPKITQALEGVEGVSDLEVLIEEGIGSVVLTKETTVQATGVASNLVEAIQGAGFKLQTLSLSFDDFNEDAATVAGEDDDQATE

SEQ ID NO: 123510 - protein, 119 aa, Oryza sativa
  Clone ID: PAT_MRT4530_26338C.1.pep
VPTFEETVNQIYGYLGKPKESYGQLTQTGVSFLGGYIAGIFCAVVSHPADVMVSKLNADRKSGEGAMKAVSRIYGNIGFSGLWNGLPVRIVMLGTLTGFQWLIYDSFKVFLGLPTTGGH

SEQ ID NO: 123511 - protein, 216 aa, Oryza sativa
  unsure (1)..(216): unsure at all Xaa locations
  Clone ID: PAT_MRT4530_26339C.1.pep
SSEKVQQRFVPVGCRVLLLFLRLEDGDGCGRGTGRVCVRHAAAGGRGDRRRRRERWSQGARAWSRSGRARRYKRGARSRKAAAWRATVGRAAAARVAGRGVQNTPRAGGRHKQRRARRTPRSPPSPTTRVRADTRRACRREQGRPSVARESRSVKGKRRRARTPRRACRRXRGRRRRTRRRSDADPPATGAPQGAGRERSRAGRTTGEPGHTTSTA

SEQ ID NO: 123512 - protein, 51 aa, Oryza sativa
  Clone ID: PAT_MRT4530_2633C.1.pep
PDIWTCECILVVTTMDRQYLIVLYIHGHMVLSQKKKKKKKKKGAAVIKEQS

SEQ ID NO: 123513 - protein, 215 aa, Oryza sativa
  Clone ID: PAT_MRT4530_26340C.1.pep
MNAFRLAGDMTHIMSVLVLLLKIHTIKSCAGVSLKTQELYALVFATRYLDIFTDFISLYNTVMKMIFLGSSFSIVWYIRRHKMVRRSYDKDHDTFRHQFLVLPCFLLALLIHEKFTFREVMWTFSIYLEAVAILPQLVLLQRTRNVDNLTGQYVFFLGAYRALYILNWAYRYFTEPHYVHWITWISGFVQTLLYADFFYYYLNSLKNNVKLTLPD

SEQ ID NO: 123514 - protein, 58 aa, Oryza sativa
  Clone ID: PAT_MRT4530_26341C.1.pep
DLIHEHNHEIKITNYVHNRHNTNPTHPFPHSPNNPSNNHKHPKHYPHNTHFLHLSHSH

SEQ ID NO: 123515 - protein, 458 aa, Oryza sativa
  Clone ID: PAT_MRT4530_26342C.1.pep
MAMAAASAMRPLAPLFLFFFFSLAASASDNILANSSLADGQKLVSAGGVFELGFFTPPGSTTAARFLGIWYRDIDPPTVVWVANRDAPVSGTAGSLAVVVNGGGGGGGGRLVLGDGSGRVVWSSAPSNVTASDPVAARLLDSGNFVLAGGGGSGDVIWQSFDYPSDTLLPGMKFGWDLTTGLDRYLTTWRSAGDPSPGDYTFKIDPRGAPEGFIWYNGTSPVYRNGPWDGLQFSGEPEMEPNNTSFRFEFVANRTDVYYTFVVDGGGGGGVLSRFVLNQSSAQRYVWLPQAGGWSLYWSLPRDQCDQYAHCGAYGVCDVGAASMCGCPAGFAPASPRNWELRDSSAGCARRTRLNCTGDGFLPLRGVKLPDTTNATVDAAIAVDQCRARCLANCSCVAYAASDVRGGGSGCIMWSSPLVDIRKFSYGGEDLFMRLAASDLRMILLSSLVRMPYTFLRF

SEQ ID NO: 123516 - protein, 41 aa, Oryza sativa
  Clone ID: PAT_MRT4530_26343C.1.pep
LLNPCTSHVSVFFTVLHSNSGSLSPSALSPLLLRSYRSTQA

SEQ ID NO: 123517 - protein, 60 aa, Oryza sativa
  unsure (1)..(60): unsure at all Xaa locations
  Clone ID: PAT_MRT4530_26344C.1.pep
VFVHTRPSXRGSIVVPLFNQFQSFYSSQFFVFLELTSTDIPCTRHCFTLRLREYLLAPQN

SEQ ID NO: 123518 - protein, 55 aa, Oryza sativa
  Clone ID: PAT_MRT4530_26345C.1.pep
LRCDDVVKGLHRATWLSARALHLGDSASRPRLNLSKPEDHAFKEDHVFFEVIESV

SEQ ID NO: 123519 - protein, 403 aa, Oryza sativa
  Clone ID: PAT_MRT4530_26346C.1.pep
MSGAGGTADFFYREAQRLGYVARSAFKLIQIQKQHKLIAPGAAVLDLGCAPGAWLQVACQNLGPLEKGGVIVGVDVKKVKVPSAHCDSRVRTVCADVMALMKQQARAMSPQERGFSVILSDMCPVVSGITTKDAAISCELGMRALSLAVGKMKAKDSDCIAILEKFQSSTEPDPDEDGILRRGGSLVIKFLENEDIPGFGKFCKEKFKKVSLLRPKATRSSSREIFMVCEGRGFSVAPRWHPLSHGPATYGTGSTCHAAAHSLVELRTVGLQREAPKCSDLKAQAQPAAFVRIPRGASLPATRNAAGLHSTLLVASLLHITTHRGGTHFYISLSVGWETPRREECRIPVVPPQCPAPPRKRPVALPELGKERREPPKGGYFQPPDLESLFVLAPPRRQASSCA

SEQ ID NO: 123520 - protein, 536 aa, Oryza sativa
  Clone ID: PAT_MRT4530_26347C.1.pep
MPTTTSDQGREQHIKFAVTILINHGRNANYMQRLTEPSDPAPGMFSLQMDPSGANQYTLLWNNSIEYWASGNWTGDSFTGVPEMSPASAYPNSAYTFQFIDNDQEVSFMYNVTDDALLTRNVIDMSGQTQAWVWVDAAQAWVLYFSQPKLMCGVYGICGAYSKCSSNAVLSCTCLKGFSESPRNGNPGNQTAGCRRNVPLQCGHGDSAKVKNQEGFYMIGCAHLPDKAQGTDAANVHSCWLAQNFLTQEGRNIGIGIIIVGLTVIIPDTATVAVKRLEGLCQGEKEFRAEVSTIGKIHHKNLIRLLGFCCGGSKKLLVYEYMPNGSLDQHLFGKSNLTLSWSTRYQITVGIAKGLAYLHEGCRDCIIHCDIKPQNILINESLAPKVADFGLSKLIGHDFSRVLTSMRGTLGYLAPEWLSGQAITSKADVFSYGMMLFEIISGKRNIEHGASTSSSMLIAEEIPKGGEVHRLFDPELVGDANPEELARVFKVACWCIQNHPDCRPSMREIIQILEGLKPFETPPVPRYLKLLADGQE

SEQ ID NO: 123521 - protein, 71 aa, Oryza sativa
  Clone ID: PAT_MRT4530_26348C.1.pep
IPITQNPVATSSNKTKNLTTVYIDRDMSPFFFPQHHHGNWNGLYIKEKADETLHMVGYRESLETLRTHLPT

SEQ ID NO: 123522 - protein, 92 aa, Oryza sativa
  unsure (1)..(92): unsure at all Xaa locations
  Clone ID: PAT_MRT4530_26349C.1.pep
LLPIASCFSSPHFYXLXQYYIQYXLLSPXXLLLLFXXPYSGGGGGLFFCAAXPFLHSXAFQLINSKSXSLLAGGAXQSLYQDINIXQALAQQ

SEQ ID NO: 123523 - protein, 209 aa, Oryza sativa
  Clone ID: PAT_MRT4530_2634C.1.pep
HTVRAEDGGRAWMAVGGSAPRHSSHALLLLSAAGSASVLPSTATTSLPPSTPLPTPPPVGREEAPDLLLAASSPVLLPPRVAAAPFVVVARRPPTSSRRRIRPPLLSRRLDPAPSSWQPIAERRRPRSAAAPEALPIGRCGGSGGDGSRQWWGGDRSWQRWRRERGETQEGREVERPRRDKGSGLRVVDFIRPNFFLILPTASENVADT

SEQ ID NO: 123524 - protein, 587 aa, Oryza sativa
  Clone ID: PAT_MRT4530_26350C.1.pep
MVMDPLTNKAAFSGLRQYVKELDSNTLPPFLARVCDPVKPCSFSEEEMLCIFETAAQAHGRKIVPHIALIVSAIVRMMSSRNAVGCSKVVCALSRYVVDPLATEALKSAIIGSLCRPFADCLMSTKVESNSFGSALCVAALVQSNNWRFASNELVNDVCLKVSGALEEAHAQSIAHLNLVVVLLTQNPLMLEPYGRSLIRSGLQILDESAKASSSQMIISSIQMIHSIMKGLDLGIISSEISSIIHAMEQFQDDTMPAISIAAFEASETAKLLVGRQKESGHDNNLSQLANYSVRNGRKGSYSHSLMDDADIRDDGSCDSHSCDLNSVHLSTDFDSQHSVGQCGSGSTRARRQLWCNKSDKSHGMSNHDLFRTVIPDSHEASGLMAHFSSVDPIKPDRRLSDVPTRVAGPCYVCSAAHETNHCSQISRAQVLSGDMRMNSTPRKQLHSCTFCRDPEQDGHPPLESPAIQHCSGPGTNILQFRKNSELKERKEFWDSIRQENQCHMQNTDALIEDLKFPADDDDEDFDGAAKSPCQECQAVNEKKTGGKKRNANRSHYPVFLFVFVVAIIALFFPWWKDYKEPYVVPT

SEQ ID NO: 123525 - protein, 84 aa, Oryza sativa
  Clone ID: PAT_MRT4530_26351C.1.pep
MTRSVTIKFTIQPFHFASSFVCLTVGVTSSALHGIGRHWDTLRCKILGILKCIVKYKFWDVVSGTLYVVLSVLTPGNVVGSVLI

SEQ ID NO: 123526 - protein, 75 aa, Oryza sativa
  Clone ID: PAT_MRT4530_26352C.1.pep
NYLVIMHFSYVSQQGTMYLLAVSSSFCTLVPCCGNPCYRYTGYHGLTLFVKALLTIPTYPYLRSSYCNLSESHFA

SEQ ID NO: 123527 - protein, 69 aa, Oryza sativa
  unsure (1)..(69): unsure at all Xaa locations
  Clone ID: PAT_MRT4530_26353C.1.pep
SLTLPSSTIWGGFIDLRRRFTHGMEKPKVLTREERXKLELERRQGGATDQGRSVLDLLQSLPRQGTPPS

SEQ ID NO: 123528 - protein, 221 aa, Oryza sativa
  Clone ID: PAT_MRT4530_26354C.1.pep
MDFDDHDDGDEEMPPMPVSSSYETPPQHGLAGGGMAPKPPGEIGSRVKGPSCGGGRYRECLKNHAVGIGGHAVDGCGEFMAAGEEGTIDALRCAACNCHRNFHRKESESLAGEGSPFSPAAVVPYGATPHHQFSPYYRTPAAGMSLGAGPSGSGSGKKRFRTKFTQEQKDKMLAFAERVGWRIQKHDEAAVQQFCDEVGVKRHVLKVWMHNNKHTLGKKLP

SEQ ID NO: 123529 - protein, 74 aa, Oryza sativa
  Clone ID: PAT_MRT4530_26355C.1.pep
PPKVLTLVPHKDLQKNQKSFWPGQTPWSTTNNKAWSDQWIFWVGPFIGAAILALYHKIILRASARGYGSFRSNA

SEQ ID NO: 123530 - protein, 84 aa, Oryza sativa
  unsure (1)..(84): unsure at all Xaa locations
  Clone ID: PAT_MRT4530_26356C.1.pep
VPVTAPSQSMERLHLXVAADWRPWSADGKDVPGYVIAYDGLVFPTVPGSGHMAPIDHPERALVLVSSFIRGQPLPPPQPDQHDA

SEQ ID NO: 123531 - protein, 257 aa, Oryza sativa
  Clone ID: PAT_MRT4530_26357C.1.pep
MLPAAVVRSSLRLAPPRAAARRRAAAVITMRDRSKNRKPTQRGRYLSTEAIQAVQSLKRAALRGSPSAAAAAVPVEPKLRRLLKADMVAVFRELAAQGEALLALQVFEEIRKEHWYKPKLLLYVDIVTVLASKGLRSEVDKVCSYLKREQLEPDTEGFNVLLKALLDAEFTQLTMDCFRLMKLWDSDPDRITYRTLIKGLESLGEMGLSADIKLEAQNDYGDLDFLDEEEMIDTLEQKSIWRGSSLIAENRRARISS

SEQ ID NO: 123532 - protein, 60 aa, Oryza sativa
  Clone ID: PAT_MRT4530_26358C.1.pep
HATQQGCSSLDIREGESLEQKMQGRRSEKFPEPEELKKQSLFFFSPCILLCILTTISAPD

SEQ ID NO: 123533 - protein, 393 aa, Oryza sativa
  Clone ID: PAT_MRT4530_26359C.1.pep
MFPTAGGRRLLVLIRRASAAAAAGANPNHHHHHATLFTHRYSSSPLARTPEAESAAAASYLVASVGLSPAAAARISRKARFRSNADAEAVVSLLRGHGFSDANIAQVLPKIPGLLILNPDKILRPKLEYFASLGVVPSALSRAPLLARSLEKHLVPCVEFIRGVVGTDANLCAAISRNPWALWCDINSSMRPAVESLRRHGLAEANISRLVVINLSALTMSPDRIDGIFGDLEALELPISHSRFVYGFWALSRLKRGAWEERMSVFMRFGVSRSELLKAFREQPGILVFTAKTIQRKLSFYQEKLKVAPADVIAHPLLLTFSLEKNIIPKCAVLNVLLREGKIKRYGREMDLLRPLQRSNISFFERFVRKYEEDVPDVVKAYEGKIKFTGFMD

SEQ ID NO: 123534 - protein, 60 aa, Oryza sativa
  unsure (1)..(60): unsure at all Xaa locations
  Clone ID: PAT_MRT4530_2635C.1.pep
GRVGGRVGGRVGGRVGKAMRLFVGEPVWTPYNRPHDHLPARKEYVXKIINRGGTQAVEAC

SEQ ID NO: 123535 - protein, 112 aa, Oryza sativa
  Clone ID: PAT_MRT4530_26360C.1.pep
GILRVRKRFVSAPFHFLPADPPGSARGRVHGVALPLPLGQITSGSDAALPSLFLPLPPILSFPDLAQRGEVGGGDKRECEGTPSPPLPLPLRSNRRGEPAVATAPVEAAGRR

SEQ ID NO: 123536 - protein, 692 aa, Oryza sativa
  Clone ID: PAT_MRT4530_26361C.1.pep
MPRRSTSTYNAMLAGYSANGRLPLAASLFRAIPRPDNYSYNTLLHALAVSSSLADARGLFDEMPVRDSVTYNVMISSHANHGLVSLARHYFDLAPEKDAVSWNGMLAAYVRNGRVEEARGLFNSRTEWDVISWNALMSGYVQWGKMSEARELFDRMPGRDVVSWNIMVSGYARRGDMVEARRLFDAAPVRDVFTWTAVVSGYAQNGMLEEARRVFDAMPERNAVSWNAMVAAYIQRRMMDEAKELFNMMPCRNVASWNTMLTGYAQAGMLEEAKAVFDTMPQKDAVSWAAMLAAYSQGGCSEETLQLFIEMGRCGEWVNRSAFACVLSTCADIAALECGMQLHGRLIRAGYGVGCFVGNALLAMYFKCGNMEDARNAFEEMEERDVVSWNTMIAGYARHGFGKEALEIFDMMRTTSTKPDDITLVGVLAACSHSGLVEKGISYFYSMHHDFGVTAKPEHYTCMIDLLGRAGRLAEAHDLMKDMPFEPDSTMWGALLGASRIHRNPELGRSAAEKIFELEPENAGMYVLLSNIYASSGKWRDARKMRVMMEERGVKKVPGFSWIEVQNKVHTFSAGDCVHPEKEKIYAFLEDLDMRMKKAGYVSATDMVLHDVEEEEKEHMLKYHSEKLAVAYGILNIPPGRPIRVIKNLRVCGDCHNAFKYISAIEGRLILLRDSNRFHHFRGGSCSCGDYW

SEQ ID NO: 123537 - protein, 139 aa, Oryza sativa
  unsure (1)..(139): unsure at all Xaa locations
  Clone ID: PAT_MRT4530_26362C.1.pep
AIAACNASAHIDVTRQSYRHNQLHSTVLLQXQALNLYNEITRHQHGIAWSPXMHSAEGQLKNNQVWQQLTLVAHQSHYHDINNDQAIAHELQLLQPEHLYCDQNETEAQPLLAVNRPSRYXIYTKYYGAPSSITTHSGV

SEQ ID NO: 123538 - protein, 135 aa, Oryza sativa
  unsure (1)..(135): unsure at all Xaa locations
  Clone ID: PAT_MRT4530_26363C.1.pep
SWSIAHNRGYGYSNSFTLARSAQLYPQDTIHRHVTMXAGHVTMLSDCDKTLRIIPSDQSXQTSSFAPAPNRQRAAPPPXSCHGESRSSIGRRRAHPYYITPNLDWVRQSEESYTTSQAVXHSRLWXALYVFQGFP

SEQ ID NO: 123539 - protein, 54 aa, Oryza sativa
  Clone ID: PAT_MRT4530_26364C.1.pep
ENGLPNLGDDREPRFGNLRNDRSYAKHTSRAKPYKEAITIHKKKAQGSLGYNKH

SEQ ID NO: 123540 - protein, 560 aa, Oryza sativa
  Clone ID: PAT_MRT4530_26365C.1.pep
MNTDDVINTDLFRPLTPGFNLHTCVDGSRCRAGFKRGVQHGLGNYRFSICDNYAGESCACRMHSFGVYILANGHRYEGAWHEGRRQGLGMYTFRNGETQAGHWQNGVLDTLSTQNIIPGSPIAVNHSKVLNAVQEARRAAERAYDVPRVDDKVNRAVASANKAANAARVAAVKAAQKRMPNNGNDLPLSVVRTPAQRERASCCRRQLIELPHGAPCIRCAICGAVTYVAAAAPPPAHGDPARGAAGPGAVAPQHQAPGWGPPPPPAHGRKRAVICGISYKFSRHELKGCINDAKCMRHLLTTRFHFPDDSIIMLTEEQTDPYKIPTKHNIRMAMYWLVQGCQPGDSLVFHYSGHGAQQRNYSGDEVDGMDETLCPLDFETQGMIVDDEINTALVRPLTPGVKLHALIDACHSGTALDLPFLCRMNSFGVVLFTIRLFSQLTANLPILISLVFFGTGVGNMYGKIIDLDLALSKITSTGAMTFCFIQAIERGQGTTYGSILTSMRSTIRSTGDSMGSGGGAVTSLITMLLTGGSVSSGGLKQDPQLTANEPFDVYAKPFSL

SEQ ID NO: 123541 - protein, 109 aa, Oryza sativa
  unsure (1)..(109): unsure at all Xaa locations
  Clone ID: PAT_MRT4530_26366C.1.pep
ENCVPLPVRVGISGVAPPAAFCVESPIPGVPRVGFPGEPVWATSPYFGVDPHQVSFFPPASLGLSGFPLSRGPPRSVLPPPMFSTNFAFLVVFSPNKSLCSLSSKKXTP

SEQ ID NO: 123542 - protein, 112 aa, Oryza sativa
  Clone ID: PAT_MRT4530_26367C.1.pep
KSKVHHRSLNLSRCVIPVPKLTNRPFRSLNLFDCIISVPKLADHSFRSSNLFSCDTPVSKLGFEYYLGQIGRDRSDTKQVGGTKRMICKFRDRDDTVKQTPSISTYLTRLTF

SEQ ID NO: 123543 - protein, 71 aa, Oryza sativa
  Clone ID: PAT_MRT4530_26368C.1.pep
FVLSQHRQGRVNVQGRAGFSYNRIDGLKAGTTHHVSVDQTISLSGDRTTGLDECRIYYLIDSGQALPAKVL

SEQ ID NO: 123544 - protein, 42 aa, Oryza sativa
  Clone ID: PAT_MRT4530_26369C.1.pep
SLVSFAQEQPVSHTDFNLLAITQNAIVSYDIAPDGRNVNPRA

SEQ ID NO: 123545 - protein, 413 aa, Oryza sativa
  unsure (1)..(413): unsure at all Xaa locations
  Clone ID: PAT_MRT4530_2636C.1.pep
KICKLLLXRYLSLGGTVTMLPKEITKLKFLETLDVRRTKIKVLPIQVIKLPCLTHLFGNFKLQDVGQKISKLQKYLSEKSKLETLAGFFANNDQGFPQLIDHMKNLAKVKIWCESETPSNSSSNTIHLSKAIQVFIQRGTNMNDVRSLSLNFGGCFQDQENMLKFSLEDSCYLSSLKLKGKINILPPFVTLLKGLTELCLSSSDKLNRDVLAALSNVRCLHYLKLITPNLEKFVIGQGPLKSLRRLCIMVQTMTEPEIQQGALPNLESFRLLCKDLNGLCGINIQYIGPECLKEVALDKRISEETKKKWKETVKNHPRWPKVSFVNTGEVGQMQNMEVAQPTEDAAALALAAGSLRPVPVFRRPKADQERTLDLCSMGQTSRESCSNTEPYFKTNGTSPGKLNPVNDECHHFC

SEQ ID NO: 123546 - protein, 45 aa, Oryza sativa
  Clone ID: PAT_MRT4530_26370C.1.pep
FYSTFFLAPIAPSVSSDVGDQVQLALVITQSSLNQIRGIIASWLG

SEQ ID NO: 123547 - protein, 595 aa, Oryza sativa
  unsure (1)..(595): unsure at all Xaa locations
  Clone ID: PAT_MRT4530_26371C.1.pep
YLSRRILNAETRPMLLNICCKGQFXGGEHDLAYEQLKYIKGQTAVDFIVDHHVDVAYDNEVYLLSVXPWKVXFNGSSGKEGQGIAVVLFSLSGLCFETSVRLEYFCTNNQAEYDVFYSAYXVLQAIVATDVEAFGDSELVIQQVAXVYKCFDGSLNSYDQCSDIIANFDDIFIRHIAREENLRANSLAQQTYGYNVKRGVFLILEKSVFEFKSLDKIGKITDQEWFDWCIAAGLTGGDRLSNRLSMAGLTGGDRLSNWSDRLCMASLTGYWKNGTIDLEAKLIVNSGICAXELEENWRIPLIYYLKDPSLRVDQKIXXHAFKYXFLDGELYRRNVDGVLLKCLDNDQSKISMGEGYRFMLVTIDYFTKWAEAMSLKNMTHKEVIYFILKHIIHRFGIPXTLTTDQAKSSSKTLLKLVKEKIEEHPKRCYEVLSEALWAHRISKHGVIKVTLFELVYGQXAILPVEVNLVSVRYIKQDDLSVEEYKALMGDNLDDATDKRLNALEEIEKEKKGVAKPYNKRVKAKSFQVGDLVWKTIFPLNNMFYAFRFTMFTKKXKGMCLHPKLVPRFKLGKXAEIWKSTGGRSDPRVLAGLTSG

SEQ ID NO: 123548 - protein, 120 aa, Oryza sativa
  Clone ID: PAT_MRT4530_26372C.1.pep
MASPSSYVATAPSPSTVLAHLAAAKVSILLGLSDPELACVTSNFLPTSNSARGAVLAVAVADYIQNFKSAKRAYVTIFAEIYGSFFLPPCTASSPWYVYMVLARIGMTAKTEWKMKMDYI

SEQ ID NO: 123549 - protein, 96 aa, Oryza sativa
  Clone ID: PAT_MRT4530_26373C.1.pep
AAPLFFCCFFNIFGYNPFFFFFFFSFFIFLFSSYVFRASPRAIYPPTEPPTSPEERTTPISGVRKKNFPLWGPGYPQPHVTGEETPLKTQPPPSLT

SEQ ID NO: 123550 - protein, 355 aa, Oryza sativa
  Clone ID: PAT_MRT4530_26374C.1.pep
MALMLAAFLCEAVSVRFVSTVLGLHWHRSTAPLPDTGQWLLLALNEKLPQIVVDLLRAPIISLHHYLMLFIMLGFSALFDCIKGPGLGIAARYMFTMAVGRSLRTVTFLATILPSARPWCAEARYQIPDHPHPWAQKYYAPYASDPDAIRRVIQEDMPYAFVKEYPREYRPKWGHMSFLVDILRPTVEEGSSWYHFLKKASGGCSDLMYSGHMLVAVLTAMAWTEAYGGWISVVIWFLVLHSAQREIRERHHYSVDCIVAIYVGILLWRMTGFIWSAIDNSHARRLAKLDKVQNRLFQAAKDSDMDEIRGLLNEVELAGQERKGFSQRVILSFSSAMIVFTLSCVLLAFTLTSDG

SEQ ID NO: 123551 - protein, 156 aa, Oryza sativa
  Clone ID: PAT_MRT4530_26375C.1.pep
MAMKAPTMEATESSVNRIGEVRQPYRRKYQSVATKAVDGEYTSRRLMRRLVGEDAKNQLTTTTAANGEDNAAIGNGSGKDEGNQRCGFQNRDLREVLGIKKRHRAAPIHPAENTSKNIQERMNMNIKNILPNYWEPSKLLIPIKNTITKNTSRTNR

SEQ ID NO: 123552 - protein, 147 aa, Oryza sativa
  Clone ID: PAT_MRT4530_26376C.1.pep
MVDTAPGGLKYHQPVTQISTTGAASQSEKDDDHELLHHYSAQRFPETSMRTLSLLHYGSARCHHASSEPSMVRLLVVGQERRSEADWGRNGTMDLGEKRRKRVRRMPPPNTKRGNLPIGAMDLRAFMVLRMWQVPSFTSSDIRLSVD

SEQ ID NO: 123553 - protein, 382 aa, Oryza sativa
  unsure (1)..(382): unsure at all Xaa locations
  Clone ID: PAT_MRT4530_26377C.1.pep
YELILTVFEKLSGLKINFHKSELFCFGQSKECHEQYSNIFGCRDFLVRYFGIPMHFRKLSNKDGSXIDKKLSSWKGKHMSVGGRLVLINSMLSSLVMFMILXFFEIPKGVLQKINYYRSCFFWQGDEHKKKYRLTXMGYYLLXKNQGGLGVYNLEIQNQCLLSKWLFKLINEQGVWQDFLKRKYLGTKSITPVERKQGDSHFLSGLMKVKNYFLNMGSWFINNGEVRFWEDKWLGNSSLKDKYPSLYSIIRRKNSSVASVMRTVLLNVSFRRALVGQNLIRWHNLCASIVHVNLTEEADIFGWNLHQSGQFPVRSMSLALINNGYIERNKFIWKLKMPLKIKIFMXYLLKXNLTRRNXNGSLKCCFCMKNESIYHLFLDCHF

SEQ ID NO: 123554 - protein, 170 aa, Oryza sativa
  Clone ID: PAT_MRT4530_26378C.1.pep
MAEVEGASTTASPRLRRDLVVRDALPYAGVAPPSLARPLPQLQATTSGGGGGARRGKSSPAVLFIIVILAVVFFICGLLHLLVRLLMKKQHRAEEEGIRWPGCHGRPPGMTEEEGTWHCRGCCSSCSTSLLARPPRAAPPHSAAERRLLARPPRTALGMGEGSDEEGGES

SEQ ID NO: 123555 - protein, 114 aa, Oryza sativa
  Clone ID: PAT_MRT4530_26379C.1.pep
VRAALDTLPHQPLPTKDDKSSQNRTKDGSSGDDFNKDSIERDDKRLVELGWKTLEFFALAHIFSRIEVAYQEAVALKRQEELIREEEAAGLAEIELKAKRSAAEKEKRIRKKQA

SEQ ID NO: 123556 - protein, 380 aa, Oryza sativa
  Clone ID: PAT_MRT4530_2637C.1.pep
KGATFLSFQVAKRREKLLNYMLFLRVTPTLPNTFINLASPIVDVPYHIFLLATLIGLIPASYVTVRAGIALGELTSLSDLYDTQSIALLFLIGIVSVMPSLHRIERMASSSLGVSNQITRANPNGFIVAKFYSRITGEINSTHAVAQFTAFSGPRELGPDSNTGRKKYNEAESASICQDAASAHTLSFPSSPFLSPFSPGRCGWRQLHRRSGEEMLKAFMPVAVYSLIVSFHTDSFRRASMLNMLGISAGVAVAVAAYGEARFDAFGVMLQLTAVAAEATWLVLIQILVTSNGKSLNPHHLALLYRAVLSRVLDAAMAKAAPPWLAANDVVTAVTAAGRRLPTPSSLVGLLPTLTSLRKEMRERRKGEKKRKSKGVTWKP

SEQ ID NO: 123557 - protein, 55 aa, Oryza sativa
  unsure (1)..(55): unsure at all Xaa locations
  Clone ID: PAT_MRT4530_26380C.1.pep
TELHAVLAQDHLHNADQRAQHRLPRLNLLDDHRVRPRVRPRVRGRVXYAWAXAWL

SEQ ID NO: 123558 - protein, 1137 aa, Oryza sativa
  Clone ID: PAT_MRT4530_26381C.1.pep
MAGTLIEDYTGDGRSSSTEELPSDQQSHSGESLAEWRSSEQVENGTPSTSPAYSDSDDDDCGPRPSELYGKFTWRIDNFSQINKRELRSNSFDVGGYKWYILIYPQGCDVCNHLSLFLCVANHDKLLPGWSHFAQFTIAVINRDPKKSKYSDTLHRFWKKEHDWGWKKFMELTKLHEGFVVDDVLTIKAQVQVIREKADRPFRCLDGQYRRELVRVYLSNVEQICRRFIDERRSKLSRLIEDKLRWSSFNAFWLGMDPSVQKYMTREKTDTVLKVLVKHFFIEKEVTSTLVMDSLYSGLKALEYQTKNKKGVPKLAETVQMDIRSTPMVLVDQDMFVLADDVILLLERAALDTLPHQPLPTKDDKSSQNRTKDGSSGDDFNKDSIERDDKRLVELGWKTLEFFALAHIFSSSFGCLVFSPYKSCISRIEVAYQEAVALKRQEELIREEEAAGLAEIELKAKRSAAEKEKRIRKKQAKQKKNSRKNNKGKNEKVDIKEIVIESSSPPDDRILDDLSSQAEEITSNADNPEEVSDISDNRDDSSELLHNDLEDSESSPVNWETDASETQATVPEGGEMQNEHAGKRTSFLDDSSSTCSSDSVPSVILNTGGAWTNVKSSSNRGNNRRNNKDHDARSGLGHGGLNSVPNGIAGSSSSTSVNSKDHQHEDDRVVSQKKQNAHRQTDVMSPSKLRMTESSVSPIKKQHIFSQQPKSSLESANNLSSRASEASGAVTASSVMGVTTTPTAQLVSNKGPLTIQATHNERSVPVARHPQVPTVSKSEAQKQTSLVSSGTATQAITVSRPLSAPQVPAAKQTAPVASAVQTVPLLSHSMSAVGRLGNEPSASAPSYIPRSYRNAMMERSSVGASSFTHQTSSEQRVAQSQSMFSLSPSILSPEHLIGNDRSSLRQGLTFGTVKPETLNQWREESSQQASSSSSSSSNDHGAVSSSNGGEFEKFYLFGKPRSKQLSEISARSTPFQPQGLVSDEFPHLDIINDLLNDEQCERRTLKVLQRSQQAFARQYSMPNNSSTPDYGMFAQSDPYLFDQPEQYYDEEIPRFYNSLNGTSRGLRERSYSHFDLPSYSNGQFDDMMMNQWPYGQTDLSLPNFGADMNGYPYQSSDYPNSANGLSRYPPYRPANGH

SEQ ID NO: 123559 - protein, 87 aa, Oryza sativa
  Clone ID: PAT_MRT4530_26382C.1.pep
NAVALFLHHVAPFHLIHFMYIHYISFVSCSGFIHSIVTFTGWHFISSSPLASIFFKSQHCTWVSHTIVAAHNSPKWAVPSHSTHTGV

SEQ ID NO: 123560 - protein, 123 aa, Oryza sativa
  unsure (1)..(123): unsure at all Xaa locations
  Clone ID: PAT_MRT4530_26383C.1.pep
SCTLPQLHGRLLLEQQLLRATPEWGRQQQCIAPSPLLQGXRALQLKHTQMTEQLTLVAQQSHYQPIHMTXTTIGHQIQPQEPTHLYFEPNLGQAHTQALXALDLPSIYGIYPTYYRALSSITT

SEQ ID NO: 123561 - protein, 812 aa, Oryza sativa
  unsure (1)..(812): unsure at all Xaa locations
  Clone ID: PAT_MRT4530_26384C.1.pep
MEEDVSLTVGSHDSGHGTPKYAPSLDWTEGNPAEKEGAGIPMERLNEYNLFRMVVDNVDSSAAIPPEYADPNILAPALGQRFKTERDTFNFYNVYAISKGFGIRLNKERLNVNKQRTMRQICCSHQGKNTNTKEPSIRIGCPAMIKINRSKGAGSWTVTKVVAAHNYPMKKSIGVTMNYHSHNQIDEGTRGIIEEMVDNSMSLTNMYGLLSGMHGGASIVPFTRKAMDRLAYAIRRDECSDDMQKTLNVLKDLQKRSKNFFYSIQLDEACRMKNIFWSHAVSRLNYEHFGDVITFDTTYKTNREETKESFAWLFETFKECMNGKEPIGILTDNCPSMAAAIRKVFPNTIHRVCKWHVLKKAKEFMGNIYSKRRSFKKAFHKVLTQTLTEEDFEAAWHKLISDYQLENSVYLRHIWDIRRKWAFVYFAHRFFAGMTTTQRSESANHVFKMFVKPSSSMNRFVKRYDRFFNEKLQKDDSEEFQTSNDKVEIKTSSPIEIHASQVYTRAVFQLFSEELTDSLSYMVKPREDESTVQVVRMCTEESSSFLRKEYQVYYDVEREEFSCVCKMFEHKGILCSHVFRVLVQYGLSKIPDRYILKRWTKNARDSVPPHLHGYKDDVDASQSRSYRHVMLNKKSVEVASVANKDVQTFKMAMTVMNQLLEDMKSRLSLDDDDNSGAAPKRATRQISRPTVLSEDGNEDVGAADVDSVYDMSSEEESGDNTGDVLPPVRKRSRGRPKVNRYKSGGEAASMKRRKEGXEKSKAANEGDSVEEENQDNDHADEMPFPRRFCHTCHQAGHNSRTCGRMSMYKRKL

SEQ ID NO: 123562 - protein, 46 aa, Oryza sativa
  Clone ID: PAT_MRT4530_26385C.1.pep
RMSPGGVNLFLCYGRFALNILFLDTLGNKLISLNLMYWFGPAKCYI

SEQ ID NO: 123563 - protein, 458 aa, Oryza sativa
  Clone ID: PAT_MRT4530_26386C.1.pep
MNSKHDDDEVQKIESCFVQPSKMLPRQALWLSPLDIIKASRGHTPLVHFYQHGDDAAADFFDVGGLKKAMAKALVAFYPFAGRLTTDADGRPSIDCNNEGVLFVVARSEQLTVDAFSNLKSLPELRRLFIPCIEPPSTVLAIQVTFLRCGGLALGSAVHHSAVDGHSMFHFLQAWSYLCREGDDAAEAVMDPPCHNRALLQPRSPPVVHPDALAMFSPKTNLHERPPGRPVSTKIFAISDDEVAALKAMCGGASTFTAVSALVWRCACAARRLPPDARSKLSFPVNIRRRVRPTLPDRYFGNAIVTAFVATAVRNIVASGSSSATETTTASLAKVAARISGVMRRLAADNKELLRSAVDYHEMAATATSRWRRPDRGSLPETELRVISWLHLPLYDMDFGWGFPRMMSRAESVRGGFVHVMSGRPADGGGVRVLACLEAENMDEFERLLSAKFTYARI

SEQ ID NO: 123564 - protein, 78 aa, Oryza sativa
  unsure (1)..(78): unsure at all Xaa locations
  Clone ID: PAT_MRT4530_26387C.1.pep
FGFTXLRLSDELXLEGQNYSTFXTFVKRMHANLGYNSNVDPLEPLQRSMPEMPIGKILQAAHPKLAPFRHEENTDLPV

SEQ ID NO: 123565 - protein, 222 aa, Oryza sativa
  Clone ID: PAT_MRT4530_26388C.1.pep
MAGAALLFPATVIAAACVVLSGGASAAPPGRVFVVGGDGPRGWSQPTGTDETYNHWASRNRFHIGDFLDFKYAKNDSVVVVSRADYKLCSADKPVQRFDDGADVRFRLDRNGNFYFISGAPGHCKAGQRMTVRVMADHAAKGAGGGDSPAGAPSPDGDGDDEDDSGGSYRTPGYGYSSGSPPTPPHGNTSAAAVVSPSRGGGGGGGYHRVAGVAAAALLVLA

SEQ ID NO: 123566 - protein, 171 aa, Oryza sativa
  Clone ID: PAT_MRT4530_26389C.1.pep
MVWVSLCGSASTRTSPTSNSLTLNGLCLHARRAEIVRRAPMVKGDDVIAADEAERRGGVRAGSPHLPPLSEEKKVKKKEKKENQWWRATEATAADEAERREGVGPLSLIGGRLSPSAAIVRREENKKKTNRCKKKGEEKRKDVTSAKPDIHTAMGPKMHSFVQFRKRRFMY

SEQ ID NO: 123567 - protein, 84 aa, Oryza sativa
  unsure (1)..(84): unsure at all Xaa locations
  Clone ID: PAT_MRT4530_2638C.1.pep
MFLPPQPGQQAPPRQQPLQPIQQTPLGQQNVQPTQHQASMSASAGYATSGGXASXVVPEHLARNIQPNLHNYQGGNLNYQYQHP

SEQ ID NO: 123568 - protein, 88 aa, Oryza sativa
  Clone ID: PAT_MRT4530_26390C.1.pep
MAEAGAQADCNVTSNEYQVGYTAARCLLRFIRPKSRVFLDQPTAMAMRRRARRDGAGWAVGVALRRPGAADAGEGESSPGHSSTGALP

SEQ ID NO: 123569 - protein, 121 aa, Oryza sativa
  Clone ID: PAT_MRT4530_26391C.1.pep
MAMIIEGEGPSKFLPSKVKFCTASFGLRFECRGAGIGWLGFRSSLYEMGNVKIIAATYGWKGTMIATGITVIEAKEDSIVILNILMIAIGLGTMILKVLRRLENNSIQSSKLDVAPLLVTG

SEQ ID NO: 123570 - protein, 200 aa, Oryza sativa
  Clone ID: PAT_MRT4530_26392C.1.pep
MAMIIEGEGPSKFLPSKVKFCTASFGLRFECRGAGIGWLGFRFYFFSPWLSDRATNQSTTGEILRIIPPQKRSSLYEMGNVKIIAATYGWKGTMIATGITVIEAKEDSIVILNILMIAIGLGTMILKAEITSVPLLHMRTACLYNESIVGFYQDATTGRLKRLLPRGIERRNTPKEKEKSEGKHQGDIFFLFCTLWSIYQ

SEQ ID NO: 123571 - protein, 72 aa, Oryza sativa
  Clone ID: PAT_MRT4530_26393C.1.pep
YAALPVPFALLARAVKTIGTFLSTDSDAARGHPNYYHLFRILEILAYYAAPDHNAAELSIHNCSNWFKRINN

SEQ ID NO: 123572 - protein, 164 aa, Oryza sativa
  Clone ID: PAT_MRT4530_26394C.1.pep
RMWNFASSAWGSGLGKKNTPNCTPSNGDCSDDEASSCTSREEGLECPICWESFNIVENVPYVLWCGHTMCKNCILGLQWAIIKVPTVPIQLPFFVSCPWCNLLSLRIIYKGNLAFPRKNYFLLWMVEGMNGERARSRSAIHSEQQTTWALSSSRASGMEVIRIP

SEQ ID NO: 123573 - protein, 198 aa, Oryza sativa
  unsure (1)..(198): unsure at all Xaa locations
  Clone ID: PAT_MRT4530_26395C.1.pep
LACPTCPVCLLFRSPKFLRPHNXHIPTIQPXHPPGPSPRPXHPDWPPPTPPWPRXRLPFQRPTRPYDPTIGPTPFPGPTPTSSFSHMPNTHHTPDSLAPTPTTIGFAPPTPTSPEASGFHRPHTIHPHPTRAPYTIHSFPRPPMXPRPHIPRPGADPRFWEPPPRPFLAXGPLSQTYGPLPPTRCGPTPLPPTYTPTY

SEQ ID NO: 123574 - protein, 580 aa, Oryza sativa
  Clone ID: PAT_MRT4530_26396C.1.pep
MWSGLGQAATVAQLVGADVGSLISVIMQAAMTARQNKECEQLARRVFMIAELLPHLQDPEVMRRPEVRRPLAGLDDALREAHELVASCQGRAAAYRLVMAWRQAERFREVQSKIDSYLLVFPFISHIDITRRLDRIYRVLLPNDTTLPSASAGIPNHEMVLQILSNFIVLEEEGERFTMAELAAATNNFATDRQIGTNPVARVYKGRLADGREVAVKQLVGNSNLSLAVEEEFQAELSLLSIRHCHIVRLLGWCAAGEKHLVVYEYMKNGTLDDHLHGAPSSSPSPVTTSWRTRVEILLGVSRAVEHLQSSSSDGERRRPVIHRDIKPSNILLDDAWAPRLTDFGLSLTWDERECSSELPVVGTHGYAAPEYVATGRIRPASDVYGVGVVMLEVLTGRKALSQRAVVLKDGCTGFAPESLVDLALPVIRSGKARKLLDKRLTPTPKRRQLRAADMVARTAARCLLHDWVKRPAISEVVVDLKAATAALEDSARLGFFSLFLALCSALGGKAPRRRGEARRPAAGAAATSGGASLATAALGGQDRQLEMAARREEREKERGERDGEGWQWCGENWAWGPLL

SEQ ID NO: 123575 - protein, 248 aa, Oryza sativa
  Clone ID: PAT_MRT4530_26397C.1.pep
MIYRREGVLAITISFTPNGRSLRRMAVKMVFSDSAQNSGHADAPDVDLGTILPLEHLQCDVRQNQLMQVPEDRRELGWKPPTWKEPVGSEAEPSHPDVPDSSSNIIGTAASIFSGGQRPWACRSCHLRGGCRSSATTRRRVTAEPRALRSTPPVAISRPDPTEGAGFLRPHHRHGNRPLALRRADTIAESRTHARKPYPYEHLQKLDRQILKIDEVTTCAPLSSGTSLRQPIGLEITIIRSPLDPWMI

SEQ ID NO: 123576 - protein, 128 aa, Oryza sativa
  unsure (1)..(128): unsure at all Xaa locations
  Clone ID: PAT_MRT4530_26398C.1.pep
SIRPANSQVFHQTRGEQANACSKSRTQGGAXGARARAHTQRRRQLMSSGIGRSLSALFIAVVRTPQPSSPPCSAPPPLPRLSRARARARASKKRKDTGETGGVCGAGWPRLRDAAKLLVGSTSSWIPF

SEQ ID NO: 123577 - protein, 140 aa, Oryza sativa
  Clone ID: PAT_MRT4530_26399C.1.pep
MQHAWIRQPSLAYPPDPPAVISLAATSIPAAGTPSPFPARSPRPPAATNCRRQPAIFNLRRHHHQLPPPPQADPPPAASPPDPAAAARIWVAFAVSRGPPPPTGEADEGDEAPPPPFLWPRGFASGGEAAERGRGERRCR

SEQ ID NO: 123578 - protein, 511 aa, Oryza sativa
  unsure (1)..(511): unsure at all Xaa locations
  Clone ID: PAT_MRT4530_2639C.1.pep
MAAAAAFFCALLFISVQHGVLGGYTRNDFPADFVFGAATSAYQYEGAAAEDGRGASIWDTFTHAGKMKDKSTGDVASDGYHKYKGDVKLMTETGLEAYRFSISWSRLIPSGRGAVNQQGLKYYNNIIDELTKRGIQVHVMLYHLDLPQALEDEYAGWLSPRIVEDFTAYADVCFREFGDRVSHWTILAEPNVAALGGYDTGEFAPGRCSDPFGVTKCTVGNSSVEPYVAAHNMILTHAAVVRLYREKYQTLQKGIVGINVLSLWSYPLTDSTADLQAAQRYKDFTYGWILHPLVFGDYPQVMKKAIGSRLPSFSKVQTELVKGTLDFIGVNHYFSLYVSDLPLAKGVRDFIADRSVSXELLKRIHRRGXQAPTRSMGDPHGLQLMLQHLKESYGDLPIYVQENGKLKLDLLPVFSGKGSSNDSLDDPDRVDYIKGYIGGVLNATRNGVDARGYFAWSFVDVYELLAGYQTRYGLYRVDFDDGARPRRARRSARWYRDFLKGKRQPVQIAQQ

SEQ ID NO: 123579 - protein, 232 aa, Oryza sativa
  unsure (1)..(232): unsure at all Xaa locations
  Clone ID: PAT_MRT4530_263C.1.pep
EPAGKKKKKGNGADSSPSTAAPPPTSLPPPPPPXTPSPPLNPSSRLPRPPPLCCRRIPPPPXIAAPQSTLATPHIAASAPPSSPSRIRHRRPPLSRTHPVTRRRRLLPPPSSRRNPRPAPPSTAAPPPSSHPASSPRPAPTIPKGVEGVVVVPISLRYFPADPIAHDHVARLSSVAASTSRLTSISSAQPSIPRRSPPRPPSASPGHQRRRPLLRQPPPQPVQWEVFGLPHH

SEQ ID NO: 123580 - protein, 258 aa, Oryza sativa
  Clone ID: PAT_MRT4530_26400C.1.pep
MAWRLKEPEEMEVLECTGQAARRPGSCRKDKAQRKSGTAVPESGQRQAGSSRSAGGGAVERHEVEAVWPAAEGATAVHEAGVREAGAVDGDVVDKPDLPMATVDVDDEDVAGPSPIVERRMMLSAMVWEGGYGFNDDRGGTAGFDSDALTCEGREIPGESLVLFRTDSGDALERHNPNEGTAVVFPPSLVDSSGENHALAAGGDAAVVQPPGGALPSARSGGRGGGGGGSTVGGGDSGFLGSGSSGGGALLLSMRQWR

SEQ ID NO: 123581 - protein, 108 aa, Oryza sativa
  Clone ID: PAT_MRT4530_26401C.1.pep
FRVSPSPSFQGKKWAPLPRNFGRKKPSFIYAPPKIKQTPKGQIVRVCPPPGFLIKKTFKFPPKKTVFFRPVPIPKCGGQIPFLVFLQWVFRLCPSPPFFSWGFPGPFF

SEQ ID NO: 123582 - protein, 260 aa, Oryza sativa
  unsure (1)..(260): unsure at all Xaa locations
  Clone ID: PAT_MRT4530_26402C.1.pep
MFVAPQIDTGMMRQAQMELFXRLFKFLSSEDLISCALVCRFMNVVASDETLWRRLYCMRWGLSCNTKLRECAWKKLYIQQDREDMVEFVRNTPTEFKEYYIQMQASKRSQAPLPSEVNDDKVILDKTIADQVSSWKSSRGLTDDAVKGHSCSGNTCSYTQIGDAYICEKTGRVHVCDDACREFVLDQSSGLLLCTISGHCFERWLCPDDEWDADDDTDLQQAGMTDEAEPFMGSGRFARAYQLGYSCADEKELEYALRFC

SEQ ID NO: 123583 - protein, 294 aa, Oryza sativa
  Clone ID: PAT_MRT4530_26403C.1.pep
MEGGQGESSYINNSQSQSRNLKMMLYALEETLDKIQLPRHRPGKKPLLTAADLGCSCGHNTLLIADVIVDHMTKLCGTGSLKWYVPEGVADKRSPAYNKGKVFVHGASEETGAAYRRQFQSDMMRFLHCRAAELKTGGAIFIVSLGRLSSTCGPTDQGYIYEVYGVMFDDSWRDLIEEGMVDGEKMDSFNVPLYAPTVEEFKEVVDADGSFKINELEIVMASPPVVDDPADRGMAGRMVANYVRALLGLLIDTHIGGVMADELFIRMQRHAEIRAEELMDEICFPHILCSLSLA

SEQ ID NO: 123584 - protein, 79 aa, Oryza sativa
  Clone ID: PAT_MRT4530_26404C.1.pep
GICYLCWVVEPHRQSPTEGSPATRLPKAEWLPDGLGESCAVDQAPPPTADAGDAASRSLGLNQYRFFLDGEGGDQTLGA

SEQ ID NO: 123585 - protein, 134 aa, Oryza sativa
  unsure (1)..(134): unsure at all Xaa locations
  Clone ID: PAT_MRT4530_26405C.1.pep
MVIIVMITNKAYLLFYDLWNIWIWYTFMYTGYFRMCCRNPLQIIENIPTSXVISKVLLGVLLGDQDDIWYKRDPXEGYKASNIIANTPTTVYKAGVRGAKSSGDLVEYIDYDLILVTMYINTQLIRFTSITHRQ

SEQ ID NO: 123586 - protein, 646 aa, Oryza sativa
  Clone ID: PAT_MRT4530_26406C.1.pep
MDLDKSTSTTASLKKLQDDSALPGRGTMQRETGGIEPEPMLGRMVVVEDYISCGVLPPPSEFLLLVLNIYGLSLLHLNPNSIEFLSILSYLCEAYIGAEPFLELFRFYYELRWMEPNRVSGSVGFRIQDCLKSRYIPYQCPSSRSKWRARWFYLQIENSDPVLVVPEEQPDKIPEWTAKPALTPSLQSFINIIDDLQTRGLSGYEVVANFIGLDSGTLGCRVGQVMISTPLTASDIPIPLCEKGPAEREAASTFIKGEKLFVGWHGRRRRKTGPARLPVRPLQRPRQMSRSLLRTGWQHRVAPPSASCLLGAHPLLPSPGGELQAEMECLLQAGAHGVGREIEEARAAESSANHRAEQLARDLAEAREDLVKMRELVAGNERQRQGLEHRMSKLENNLSEIRGSLRVSYTGLHQLAGECGVTTTIPANPDEFSLMSSLAELATAMEEIPSKHAARIGEETSNGIYTGACHVLTCVRLAHPDLDLKKVLGQGAVDDARKGMMEEVDVDVEDVQQCGQLDMLVIVLALALEPFMPREETKLEVAELERTMVEVKKDQDVEALRGRELEGIGKHVDEALKQECRRASRYAGGHVLASIRDHRPQLHLEFLNEGFSHSRRTPVEIDGLAQSMAPLAEKVFRSMDWRWPSW

SEQ ID NO: 123587 - protein, 75 aa, Oryza sativa
  Clone ID: PAT_MRT4530_26407C.1.pep
LGRLRETTLREANMQQTHWLRVIAPKEMCDRIQNSVRPFSQLRQGGIAGMNPANIAHSEGHSGAQSHPHQIEKEN

SEQ ID NO: 123588 - protein, 214 aa, Oryza sativa
  Clone ID: PAT_MRT4530_26408C.1.pep
MDRRDDSCCSGGGGGGGAPLIRQLVGDVVMWRRGDVSACLLAATVSGWLLFGSGGYTFLSLASNVLLLLLTVLFLWAKAARLLNRPEPPIPEMRISQQVVNEVAALLHSGMNTVFSVFHDIALGKDSVLFYQVFLSLWIISIIGSLTDFTTLCYTSIVAVLTIPALYQKYEECIDRYMRFAYLNLQMYEMVYERFSAKCFHRARDLVIEVLKEP

SEQ ID NO: 123589 - protein, 69 aa, Oryza sativa
  Clone ID: PAT_MRT4530_26409C.1.pep
VACSPPSACILFFGRPFFFFFWKGIKIEWNLFHGYGASQFTLIYSSKQGIGKGLQPSNTMLMECCSYLI

SEQ ID NO: 123590 - protein, 327 aa, Oryza sativa
  unsure (1)..(327): unsure at all Xaa locations
  Clone ID: PAT_MRT4530_2640C.1.pep
EEKMRALYDRQREELKILDEKGAEADKLEATERSIRKLSTKISIAIQVVNTISDKISKLRDEELWPQTCELIQGLMRMWSTMLECHQIQLHAISHAKNIDSMGLRAKFGEAHMDLIKRLELQHLDWXIASCASWVNAQKSYVGTLNDWLRKGVTYGPEVTDDGVPPFSPGRLGAPPISGGSPGWALGLRRISEKEVVEAMQAFASNVLGLWERHRSEQRQGLMANKGMDKDLRVMERDEQSMRKALEAQNKKLVLISNQSGVSLSAQAQALQDGGSHGDTGSLQLSLKNIFEAMENFTANSANTYKDLHLRAEEEKARVAQESCRVS

SEQ ID NO: 123591 - protein, 236 aa, Oryza sativa
  Clone ID: PAT_MRT4530_26410C.1.pep
MARPQEAPASAPAKKTETAAMMSTVQTETAAAPPATVYRDSWFDKLAIGYLSRNLQEASGLKNEKDGYESLIDAALAISRIFSLDKQSEIVTQALERALPSYILTMIKVMMPPSRFSREYFAAFTTIFFPWLVGPCEVMESEVEGRKEKNVVYIPKCRFLESTNCVGMCTNLCKIPCQKFIQDSLGMKVYMSPNFEDMSCEMIFGQQPPEDDPALKQPCFRTKCVAKQNHGVNCSI

SEQ ID NO: 123592 - protein, 41 aa, Oryza sativa
  Clone ID: PAT_MRT4530_26411C.1.pep
ASYGGPIDIGACRPVATTTGGRLNLAIATGLFDRAPDPPPA

SEQ ID NO: 123593 - protein, 96 aa, Oryza sativa
  Clone ID: PAT_MRT4530_26412C.1.pep
MCCKAIKLATRGDETETGSCGNHPRLRDQWSIGPLPPPKLKLEGLSGPNGNLNNVLRYSAGGVAHGETASPGVKPTLHMCNPETRRGLRVLQRLPF

SEQ ID NO: 123594 - protein, 83 aa, Oryza sativa
  Clone ID: PAT_MRT4530_26413C.1.pep
MLIGRVRSCASCSPACAAAAIIYISAQHIITTLLLVLLLLLSIGSIRIDIWSVDRSVSKLDAYSDGSMHSPPWLLVVILQILP

SEQ ID NO: 123595 - protein, 171 aa, Oryza sativa
  Clone ID: PAT_MRT4530_26414C.1.pep
MEHKEAGCQQPEGPILCINNCGFFGSAATMNMCSKCHKEMIMKQEQAKLAASSIDSIVNGGDSGKEPIIAGHAEVAVAQVEVKTLVVQPAEIAGPSEGVTVNPKGREGPNRCSTCRKRVGLTGFNCRCGNLYCAMHRYSDKHDCPVGYRTAARDAIAKANPVVKAEKLDKI

SEQ ID NO: 123596 - protein, 171 aa, Oryza sativa
  Clone ID: PAT_MRT4530_26415C.1.pep
MEHKETGCQQPEGPILCINNCGFFGSAATMNMCSKCHKEMIMKQEQAKLAASSIDSIVNGGDSGKEPIIAGHAEVAVAQVEVKTLVAQPAEIAGPSEGVTVNPKGREGPNRCSTCRKRVGLTGFNCRCGNLYCAMHRYSDKHDCQFDYRTAARDAIAKANPVVKAEKLDKI

SEQ ID NO: 123597 - protein, 296 aa, Oryza sativa
  Clone ID: PAT_MRT4530_26416C.1.pep
MGDVVKDLVAGTVGGAANLIVGHPFDTIKVKLQSQPTPAPGQFPKYAGAVDAVKQTIATEGPRGLYKGMGAPLATVAAFNALLFTVRGQMEALLRSEPGQPLTVNQQVVAGAGAGVAVSFLACPTELIKCRLQAQSALAEAAAASGVALPKGPIDVAKHVVREAGMKGLFKGLVPTMGREVPGNAVMFGVYEGTKQYLAGGQDTSNLGRGSLILSGGLAGAVFWLSVYPTDVVKSVIQVDDYKKPRYSGSVDAFKKILAADGVKGLYKGFGPAMARSVPANAATFLAYEITRSALG

SEQ ID NO: 123598 - protein, 478 aa, Oryza sativa
  unsure (1)..(478): unsure at all Xaa locations
  Clone ID: PAT_MRT4530_26417C.1.pep
GVAADAAAAAAGXVDLGKLSYEIFSLLESNFLFGAGAGGGGGVCSLPGTPGRALLGGKVRVLAIDGCGPGPGDALLAAAALVRLETALREKSGDGDARVADFFDAAAGAGAGGVLAAMLFLKGADGRPRYTAADALAFVAASLGKGGWRGGGGGGGGRRWWGVAALFRRGSSAERSSLRRVFGDATLRDTVAPLLVPCYDLATAAPFLFSRADAVESGSFDFRLRDVCAATCAGGAAATAVRSVDGRTAIAAASGGVAAMGNPTAAAITHVLHNKQEFPLAAGVDDLLVVSIGSGSSSAATPSTAAGWRTPLPSRSPSPAEMVRLTAEGVADMVDQAVAMAFGHTCGRNYVRIQAASPACKTKALSSVDAKKAAAIADGMLTQRNVEAELFRGRRLSEKSNREKLDAFAAELVKEHERRRASPGLPNVVIKQVAAAAAAVTPARLSSATTTSSATATTARTTVSSMPSPAASLDSGRH

SEQ ID NO: 123599 - protein, 44 aa, Oryza sativa
  Clone ID: PAT_MRT4530_26418C.1.pep
FSHLYLWGISILENFNKRKVELHVVPPLTTFLPLCKGRGSYKEE

SEQ ID NO: 123600 - protein, 51 aa, Oryza sativa
  Clone ID: PAT_MRT4530_26419C.1.pep
DVKRQGCFNITTGFSHSQAVAVCPGCQTVLCQTTRGKGRLIVGCYLRRKGD

SEQ ID NO: 123601 - protein, 71 aa, Oryza sativa
  Clone ID: PAT_MRT4530_2641C.1.pep
MGVDLMRRSVFLVGFVGRGLFLGREEGVGTGQARIASILTRTTTLACFTPNQSVLFNAPPSSSCASPDPLP

SEQ ID NO: 123602 - protein, 59 aa, Oryza sativa
  unsure (1)..(59): unsure at all Xaa locations
  Clone ID: PAT_MRT4530_26420C.1.pep
VSWHERIEKLMLYGIVLAVLDVVGGTRCVNTSELVLVRDLNGNPFTLTXNXLIFFRGGG

SEQ ID NO: 123603 - protein, 408 aa, Oryza sativa
  unsure (1)..(408): unsure at all Xaa locations
  Clone ID: PAT_MRT4530_26421C.1.pep
RAKXSITIVGNXAPAPFMTFQSTGFPPEILREVQQAGFSAPTPIPPRSWPIALRNRDIVAVAKTGSGKTLGYLIPGFILLKRLQHNSRDGPTVLVLSPTRELATQIQDEAKKFGRSSRISSVCLYGGAPKGPQLRDLERGADIVVATPGRLNDILEMRRVSLHQVSYLVLDEADRMLDMGFEPQIRKIVKQVQPKRQTLMFTATWPKEVRKIASDLLSNPVQVNIGNTDQLVANKSITQYVDVITPPEKSRRLDQILRSQEPGSKIIIFCSTKRMCDQLARNLARQYGASAIHGDKSQAERDSVLSEFRSGRCPILVATDVAARGLDIKDIRVVVNYDFPTGVEDYVHRIGRTGRAGATGVAYTFFCDQDSKYASDLVKILEGANQSVSQQLRDMVSRGGYGGRSRRW

SEQ ID NO: 123604 - protein, 113 aa, Oryza sativa
  unsure (1)..(113): unsure at all Xaa locations
  Clone ID: PAT_MRT4530_26422C.1.pep
ISISNHQISRKDVASEVWKKLNIYELATQSTDILHFVEQVLTVTPSHLKPGWPICFGACAHNLWKARNHRTFQQRDLTTANVTHQIRECLQLXGNHIKPQCRPPICRWIDLLA

SEQ ID NO: 123605 - protein, 69 aa, Oryza sativa
  unsure (1)..(69): unsure at all Xaa locations
  Clone ID: PAT_MRT4530_26423C.1.pep
KLPCIGLXLNAXKLESKXAXXXXARRXXXPTLGXXAPKGXCHRPSRPGRRAAAXHLEAPFPTGGXLNPL

SEQ ID NO: 123606 - protein, 79 aa, Oryza sativa
  Clone ID: PAT_MRT4530_26424C.1.pep
MAASWCLCLITMVTVSYWNNSVTTNSAIAARYSSNVPTSKSASAHAALLTLSHLNPSANPPSHAAGPPAAGARVHVSFA

SEQ ID NO: 123607 - protein, 228 aa, Oryza sativa
  unsure (1)..(228): unsure at all Xaa locations
  Clone ID: PAT_MRT4530_26425C.1.pep
MNDIFPFNEVISSLGFXELPIKGMAYTXSYMQHQPLLYLLNSPMNWTLSYPNTMVKPLSRXSFSDHIPCVVHIVINIPKAHTFRFESYWVEHEGLFDLVQTIWDNHGSPLDPARNITAKLKALRKDLKKXSKNLSRLQELIKNCNATIHFIDSIEELGDLTVLGXKYIVFIRSKLMTYLMYKQTYWQKICTIRWAKFGGENTKFFHAMATESFRRNSITYLTVVDMAV

SEQ ID NO: 123608 - protein, 207 aa, Oryza sativa
  Clone ID: PAT_MRT4530_26426C.1.pep
MASFLDSFSSLGVGYAVAIALGFLVLLASLLLAFYFCSRRGGAGVVRRGGGQGVHSARHAVSSASSSGHISITVPRVIFVADDSDSPGSSSRGGAGGGAASSPVGLDPAVIASYPKVPFSRAATGADAEAACSICLCEYKEGEMQRMMPECRHRFHLMCLDAWLRRSASCPVCRSSPIPTPVSTPLATPLSELVPLSQYAADRRRHR

SEQ ID NO: 123609 - protein, 2013 aa, Oryza sativa
  Clone ID: PAT_MRT4530_26427C.1.pep
MAEQAKAHDLSPSVSGDDGEPNPRRRARTPPPPPRQSPKQGEALEKVDKSMASPVAGGAGGRQDGERRLLVYGDGSTPQGALQAAGALLRHPPVVHDPESPAQRWLEDVANLVMTAQQRLGAGGRSTTTKTSGAATTGSVSSRRRARRAAAAARHSAATPSSTPSTREDQHEKPDARLNSERRRNSRRTPRATEGASSSRVSPRHGREDQPSVPPAGGVGCRAFVASLRNVRWPPRFRPTITEKYDGSVNPTEFLQVYTTGIEAAGGDDRVMANFFPMALKGQARGWLMNLPPASVHSWEDLCQQFTMNFQGTYPRPGEEADLHAVQRGDDESLRSYIQRFCQVRNTIPCIPAHAVIYAFRGGVRHNRMLEKIASKEPQTTAELFQLADRVARKEEAWTWNSSGSGVAASAAPGSAAQTGRRDRRRKKRSDRSGDEGHVLAVEGAPRATRKGRPASDKKKEAGTPSRERPAGRWCSVHNTSLHDLADCRAVKNLAERTRKWEEDRRQERREGKSPAVPSGKRRSEAKQMAPAVDIDDGDDDLGFQEPGATIATVDGGACAHVSRRSFKAMKRELLAMAPTHEAMRRARWSEVALTFDQTDHPPCIARGGQVAMVVSPTICNVKLGRVLIDGGAALNILSPAAFDAIKAPGMVLRPSQPIIGVTPGHTWPLGHIDLPVTFGGPANFRTERVSFDVADLSLPYNAVLGRPALVKFMAAVHYAYLQMKMPGPGGPISVHGDLKVALACMEQRADRLAAASKPEGGDERLGPSAPTAPRQRMATCDEVPEDALVSFLRANADVFAWRPADMPGVPREVIEHRLAVRPGARPVRQKVRRQAPERKAFIREEVARLLEAGFVREVIHPEWLANPVVVPKANGKLRMCIDYTDLNKACPKDPYPLPRIDQIVDSTAGFAWLGRMRKKTAFITPVGTYCYTSMPFGLKNAGPTFQRTTRISLGSQIGRNVEAYVDDLVVKTRNQETLLSDLAETFENLRSARIKLNPDKCVFGVPAGKLLGFLVSARGIEANPEKIRAIERMRPPSKLRDVQCVTGCMAALSRFISRLGEKALPLFKLLKRSGPFTWTEEAEHALTQLKVYLSSPPVLVAPEPNEPLLLYLAATPQVVSAALVVERDEDNPHSAHPHSVPTWPGSRQGGEAPESNGGLRPPTTGVGPLPARQTVPGAPDPQEGPEATAGRPHLPPFDPEANPVQIRPGREQGEEAPEPNGGLRPLTTGAGPLPACLTTPGAPDPRDGPEATVGRPHLSSSDPEVISAGDECAPRGHLDEEHPGDTAPSEEDRPRRKVQRPVYFVSEALRDAKTRYPQAQKMLYAILMASRKLRHYFQAHRVTVVTSYPLGQILHNREGTGRVVKWAIELSEFDLHFEPRHAIKSQALADFVAEWTPAPETVSMPEASTNPSQLPQTAHWVMQFDGSLSLQGAGAGVTLTSPNGDILRYLVRLDFRATNNMAEYEGLLAGLRVAAGLGIRRLLVLGDSQLVVNQVCKEYRCSDPQMDAYIRQVRRMERHFDGIELRHVPRRDNMIADELSRLASSRAQTPPGAFEERLTQPSARPDPLGETDAPNRPPRPVGVQASGPEGSAPSSLRLIAWISEIQTYLTDKTLPEDREGSERVQRISKRYVLVEGTLYRRAANGILLKCIPQEQGVELLVDIHEGECGAHSASRTLVGKAFRQGFYWPTALNDAVDLVRRCRACQFHAKQIHQPAQALQIIPLSWPFAVWGLDILGPFKRAPGGFEYLYVAIDKFTKWPEAYPVVKIDKHSALKFIKGITARFGVPNRIITDNGTQFTSELFGDYCEDMGIKLCFASPAHPRSNGQVERANAEILKGLKTKTFNILKKHGDSWIEELPAVLWANRTTPSRATGETPFFLVYGAEAVLPSELTLRSPRATMYCEADQDQLRRDDLDYLEERRRRAALRAARYQQSLRRYHQRHVRARSLCVDDLVLRRVQTRAGLSKLSPMWEGPYRVIGVPRPGSLFNKSSFNFLKVVSVPFFLLKNLNLK

SEQ ID NO: 123610 - protein, 124 aa, Oryza sativa
  unsure (1)..(124): unsure at all Xaa locations
  Clone ID: PAT_MRT4530_26428C.1.pep
LGETDAPDRPPRPVGVQASGPEESVPSSLRLIAWIXRISKRYVLVEGTLYRRAANGILLKCIPQEQGVELLADIHEGECGAHSASRTLVGKAFRQGFYWPTALNDAVDLVRRCRACQFHAKQIH

SEQ ID NO: 123611 - protein, 2027 aa, Oryza sativa
  Clone ID: PAT_MRT4530_26429C.1.pep
MAEQAKAHDLSPSVSGDDGEPNPRRRARTPPPPPRQSPKQGEALERVDKSVASPVAGDAGERRDGERRLLVYGDGSTPQGALQAAGALLRHPPVVHDPESPAQRWLEDVANLVMTAQQRLGAGGRSATTKTSGAATTGSVSSRRRARRAAAAARHSAATPSSTPPTREDQRGEPDARIDIERRRNNRRTPRATEGASSSRVSPRHGREDQPSVPPAGGVGCRAFVASLRNVRWPPRFRPTITEKYDGSVNPTEFLQVYTTGIEAAGGDDRVMANFFPMALKGQARVWLMNLPPASVHSWEDLCQQFTMNFQGTYPRPGEEADLHAVQRGDDESLRSYIQRFCQVRNTIPCIPAHAVIYAFRGGVRHNRMLEKIASKEPQTTAELFQLADRVARKEEAWTWNSSGSGVAASAAPGSAAQTGRRDRRRKKRSDRSGDEGHVLAVEGAPRATRKGRPASDKKKEAGTPSRERPAGRWCSVHNTSLHDLADCRAVKNLAERTRKWEEDRRQERREGKSPAVPSGKRRSEAKQKAPAVDIDDGDDDLGFQEPGATIATVDGGACAHVSRRSFKAMKRELLAMAPTHEAMRRARWSEVALTFDQTDHPPCIARGGQVAMVVSPTICNVKLGRVLIDGGAALNILSPAAFDAIKAPGMVLQPSQPIIGVTPGHTWPLGHIDLPVTFGGSANFRTERVNFDVADLSLPYNAVLGRPALVKFMAAVHYAYLQMKMPGPCGPISVRGDLKVALACMEQRADHLAAATKPEGGDERLGTSAPTAPRQRIATCDEVPEDALVSFLRANADVFAWRPADMPGVPRELIEHRLAVRPGARPVRQKVRRQAPERQAFIREEVARLLEAGFIREVIHPEWLANPVVVPKANGKLRMCIDYTDLNKACPKDPYPLPRIDQIVDSTAGCDLLCFLDAYSGYHQIRMAREDEEKTAFITPVGTFCYTSMPFGLKNAGPTFQRTTRISLGSQIGRNVEAYVDDLVVKTRNQETLLSDLAETFENLRSARIKLNPDKCVFGVPAGKLLGFLVSARGIEANPEKIRAIERMRPPSKLRDVQCVTGCMAALSRFISRLGEKALPLFKLLKRSGPFTWTEEAENALAQLKAYLSSPPVLVAPEPNESLLLYLAATPQVVSAALVVERDEDNPHSTHPHSVPTWPGSRQGGEAPESNGGLRPPTTGVGPLPACQTVLGAPDPQEGPEATAGRPHLPPFDPEANPVLIRPGREQGEEAPEPNGGLRPLTTGAGPLPACLTTPGAPDPQDGPEATVGRPHLSSSDPEVISAGDECAPRGHLDEEHPGDTAPSEEDRPRRKVQRPVYFVSEALRDAKTRYPQAQKMLYAILMASRKLRHYFQAHRVTVVTSYPLGQILHNREGTGRVVKWAIELSEFDLHFEPRHAIKSQALADFVAEWTPAPETVSIPEASADPSQLPHAAHWVMQFDGSLSLQGAGAGVTLTSPNGDVLRYLVRLDFRATNNMTEYEGLLAGLRVAAGLGIRRLLVLGDSQLVVNQVCKEYRCSDPQMDAYVRQVRRMERHFDGIELRHVPRRDNVVADELSRLASSRAQTPPGAFEERLTQPSARPDPLGETDTPDRPPRPVGVQASGPEGSASSSLRLIAWISEIQAYLTDKTLPEDREGSERVQRISKRYVLVEGTLYRRAANGILLKCIPQEQGVELLVDIHEGECGAHSASRTLVGKAFRQGFYWPTALNDAVDLVRRCRACQFHAKQIHQPAQALQIIPLSWPFAIWGLDILGPFKRAPGGFEYLYVAIDKFTKWPEAYPVVKIDKHSALKFIKGITARFGVPNRIITDNGTQFTSELFGDYCEDMGIKLCFASPAHPRSNGQVERANAEILKGLKTKTFNILKKHGDSWIEELPAVLWANRTTPSRATGETPFFLVYGAEAVLPSELTLRSPRATMYCEADQDQLRRDDLDHLEERRRRAALRAARYQQSLRRYHQRHVRARSLCVDDLVLRRVQTRAGLSKLSPMWEGPYRVIGVPRPGSVRLATGDGTELPNPWNIEHLRRFYP

SEQ ID NO: 123612 - protein, 1211 aa, Oryza sativa
  Clone ID: PAT_MRT4530_2642C.1.pep
MAAASSSSASAAAVARLRELTPAPGAELSETGAAALAECCARLLISAAGGDAGAARPALDALCAASGEAMRRHSDELAPLVVGRLGDGDPAVRDAARRFLVRLMEMKEMNARMGNGEKTPCISDVQDNRCMTIQIEPTDTNQAKKSPKVKIVTRDASLLAGAADYSAFPMLLKQLVTPLITQILDRRSSVVKQACHLLNFLSKELLRDFEPCAELLIPVLLKNVVITIHVIAESSDNCIKEMLRNCKVARILPKIIEFAKNDKSAVLRARCCEYAILMLELWVDTPEIQRSVDLYEEFIKCCIEDATSEMINDEDAETQQRHLSPVERVKLMQPQSSSCNSTEIDKVVKVDSGTSFSSVDLQSVQVKASVQHDDMTSKIQPEGKTDGTTTTGSSFKDTSTLEKETSPDKGPDPDKCDSGVNLSSCDPSSATQFILEPTSELLPSDATVVTIVQDKAECRPNTEQLTQQVQVLGHPSDLLNRSPPVSLKESGNSLKHNPIQVNFDGSSGGKLGAQKVKHHTSAPNKSVVRKEPRNNYIPNFRRPLLSKQMTNWFYASNRSDLDDKQLILGEMVSNMDVPSSLTEALSLGLKPKSDWMMRVYAFNFLRQSLLEQGPRGIQEVAQNFDKVMRFVSRYLADPHHKIAQAALSSLSEIMPVFKKPFEHYLDKTLPHVFSQLNDPKESIKQQCSAILKLAGEIYSIDSLLPALLRTLEEQKSPKSKLAIIEFANSSFVKCTVSSDNYSSSSFLKPWLEKLALLFKDKNSKLKEVSVAGFSSIYSHYDPASLLSFLVSLSMEEQKRLRRAIKQLIPTIESDLEEFLQQRKHKPKVPLFDSFVGAYQPYAKGLVIKQNKHHLHATYQSDCLQADDVFDSALHCLPRISLEVRERRAGKIESESYDESNGHDAEMMDKKSSDTRSSDPPRTFDYNVISDNTVESPRKEGTDIKRFEESNESELNITVRNRNVILNSCQDHGPSISRTYHQDEMSQMEEVPEINGPSVSIKGICKMLPYYCIEIESLLQNDLTIHRMSSSLLEMLDDPEESTRELALTLLVEILEKQRKAMENCIDTLIVKLLHATKDAALKVVNQAHICLTTVVTQFDPLTCLRAIASQLANQDEKVLIVSINSLSKLVIRLSQDNLMAHLSIFLPALLDAFENHSPYVRKAVVLCLVDTYLKLGPAFLPYLERLDSAQLQLVTTYASRLSQTSFIAVDA

SEQ ID NO: 123613 - protein, 107 aa, Oryza sativa
  Clone ID: PAT_MRT4530_26430C.1.pep
FFFFFFFFFFFFFLVFFFFFLCFFFLFKKKGADVHNWTGGTLFGTGKNWRPGKNGSRPMSWGNRKKKDIWGLNGPAGGYARPKKNTRTLKVGSKRDNRIPILKGPKG

SEQ ID NO: 123614 - protein, 123 aa, Oryza sativa
  Clone ID: PAT_MRT4530_26431C.1.pep
MEKVVARTQKVVMSGQKSSATCDGGRAGVTGGGCSLSPTTAIAQRGRHAQPMRIPTKTASQRDADHPWLGELEGDLANQAAPSSSSSAAGDDDDDDPFLSAGFISTFSAFSRERKREGGRERE

SEQ ID NO: 123615 - protein, 88 aa, Oryza sativa
  Clone ID: PAT_MRT4530_26432C.1.pep
MSRGWAAGSMMTTVAVEEAGFHSATTKMVAVAGIVLPMVMALAVRGIVDGGGDGSRDSAYQIVGFRVQIQPCEEWNEEIDVGASDSSG

SEQ ID NO: 123616 - protein, 234 aa, Oryza sativa
  Clone ID: PAT_MRT4530_26433C.1.pep
MELHPLVVSAAAADSTSPRRLRRHRRRISPSPPPPLVTPHLLVTSATDNDATSPYRLRVLQHLPLLAFTVTSESHPSNATVACIGSPSSQASASTARPPTDGRARTAAPRRLLQRSPPAPPPPAPPAPPPRSAPPLPATSVHARGPPPPRQLPRSPVPSAATRRRRRPRPPPARRPPPQDRYRHPLRRGGRPRRPPSWSKVLALRAHLHLHHHQNHAPNLLTHAFTPILLLVSQ

SEQ ID NO: 123617 - protein, 57 aa, Oryza sativa
  Clone ID: PAT_MRT4530_26434C.1.pep
RSSGHAALTWTCRWCSPCPGHINMISPGPSYRTPPPLRSTSNGIYLRAYLDLSIQNH

SEQ ID NO: 123618 - protein, 187 aa, Oryza sativa
  Clone ID: PAT_MRT4530_26435C.1.pep
MRDDFDITKADKIFNLLLRGKQIQLPTGHSIPSVDELEKRKYCNWHNTGSHTTNDCKVFRQQIQSAIEQGKIKFDDSKRPMKVDDHPFPVNMVHTSGTAADGRSHRNSQLNSVRIINKYQRRYERQEEKYCEDDGGFDPHWDYEFFRFCWNEEMRLPSIEDCPGCSESNRDSAGSLSRSYKRESRLR

SEQ ID NO: 123619 - protein, 59 aa, Oryza sativa
  Clone ID: PAT_MRT4530_26436C.1.pep
MRRRRCICRPLARSGLPGARGGSLGNIDDEAMWCEERKKVGGTNWEQIILSFCQRGGYY

SEQ ID NO: 123620 - protein, 87 aa, Oryza sativa
  Clone ID: PAT_MRT4530_26437C.1.pep
SLSPPCTRPIVVVPTVAGDKSGLPAVVGDGSSLPAVASDGSNLPAVAGDGSGLPAVAGDGSSLPAVAGDGSALLVVAVDGSAPPPPP

SEQ ID NO: 123621 - protein, 268 aa, Oryza sativa
  Clone ID: PAT_MRT4530_26438C.1.pep
MLRAPPQAPRASRRPPPPRCSPAAGASPPPSAGGIRRLVLTPEGRAKLDARPDRDFYAFPRLVKHVDDGFLAALADLYRERLRPGWDVLDLMSSWVSHLPPERELPLRRVVGHGLNAQELAKNPRLDYFFVKDLNKEQRLELQTSSLDAVLCTVSVQYLQSPEKVFAEIFRVLKPGGVCIVSFSNRMFYEKAIGAWREGTAYSRVQLVTQYFQCVDGFTEPEVVRKLPSDAAGGKPASPLDAVMRLFGMAGSSDPFYAVISYRNFKPM

SEQ ID NO: 123622 - protein, 67 aa, Oryza sativa
  unsure (1)..(67): unsure at all Xaa locations
  Clone ID: PAT_MRT4530_26439C.1.pep
EDGVVXISMLVDKSIPLIWTKVQSWPDPRLCMPILMILERVGTTEQVPPVNAGARVACRDLSDFKAV

SEQ ID NO: 123623 - protein, 43 aa, Oryza sativa
  unsure (1)..(43): unsure at all Xaa locations
  Clone ID: PAT_MRT4530_2643C.1.pep
MGGSMATSSLLFLLVLSSFSTASAXLGEHAGAKVEEEILAGHH

SEQ ID NO: 123624 - protein, 120 aa, Oryza sativa
  Clone ID: PAT_MRT4530_26440C.1.pep
MERYARSLPSLPARVGAASPPPLAGASSSNVVFAADFRHLSARSPADGTGESTRECHRRIRPPNPPPSAAAGSAVWSSGCSPHRRLDHRRSCMATPSVDSSTSFRGRLIRMHAGSCGKGE

SEQ ID NO: 123625 - protein, 351 aa, Oryza sativa
  Clone ID: PAT_MRT4530_26441C.1.pep
MAGADGLPPGLRFDPSDDELVSRYLLRRIQQKPLPLDGVIVDADPLSVPPWTPLADHTRGDEAFFFAGARAKNGKGKRQKRTVEGGGFWQGQRMAVDGERLVVPGDGGGGVDGSGGGGLEITWRKYVLSFFAEGEQGSSGWVMHEYAVTSSADLASSPLRLYRVRIDDDDLSVSQTEGTELSEQGSSGVIDDDYWREADATGGAEREEIALLDEERCPQPQPAPPTDALVPPLQGQNSYDVMADSSLLFADLPGRIDDDELQRSLRVSDMPDLFLSQTEEAGAGGGGGAAPVLNKQSNSSPLGVMDSEVPIVLSDLEFPESIDEVLSYIDFATDDCLDFDMDELFSDMPAD

SEQ ID NO: 123626 - protein, 321 aa, Oryza sativa
  Clone ID: PAT_MRT4530_26442C.1.pep
MAGADGLLPGLRFDPSDDELVSRYLLRRIQQKPLPLDGVIVDADPLSVPPWTLLADHTRGDEAFFFAEARAKNGKGKRQKRTVEGGGFWQGQRMAVDGERLVVPGDDGGGGGDEGLEITWRKYVLSFFAEGERGSSGWVMHEYAVTSPADLASSQLRLYRVRFSGHGKKRKREPQCLDSHDDDDGGDQESATHRRAVAETTLFDGYVPRPAADGTDQGTYGVIDGESSLASHCLPDQIVPPAEEADATAGVENPLLDEERWSPPQPALVKQNSYDLMAISSLLFSDLPDRIDDDDLSVSQTEGTDLFEQGSSGVIDDDYCR

SEQ ID NO: 123627 - protein, 137 aa, Oryza sativa
  Clone ID: PAT_MRT4530_26443C.1.pep
SISSRTGLWLRAALLVEQSDLFSLCTTGGIGFLCWQRDQVGKSMEHPPIIVVDHAGGALLGQLGALCLRHRQVIVIDSVGKIRKQQRRNDHQVVGVLLHQSSSRESGLWWRPALLVDCTSSGISFLCWGNDRIGKTM

SEQ ID NO: 123628 - protein, 114 aa, Oryza sativa
  Clone ID: PAT_MRT4530_26444C.1.pep
NKEVIFPFLHHTNLKNHSEGLLSNSFQLVSIAHLNGCQPVISFQIPAPVSLLCKSVQNPLNVSESQRQGETSSIWPRASFTSCYLSGKGKSGGPCRCPTAWPGCSRAEAGYNRG

SEQ ID NO: 123629 - protein, 102 aa, Oryza sativa
  Clone ID: PAT_MRT4530_26445C.1.pep
MAARGIPNVIKIMEKKLTRKRDKTVQSQQLHHRAKTPNITMPECAATENVGSTRSSPHRTGTPLLANAQASRWQDHHCQAFPSYQLLPVAASALLLELYKEK

SEQ ID NO: 123630 - protein, 68 aa, Oryza sativa
  Clone ID: PAT_MRT4530_26446C.1.pep
YTTDTADFGRSGKDSDLSSDSVVNRAILPFTSPLNSHTLSSTTPTPVSCTEHAAATLSEPKTSRGRHV

SEQ ID NO: 123631 - protein, 208 aa, Oryza sativa
  unsure (1)..(208): unsure at all Xaa locations
  Clone ID: PAT_MRT4530_26447C.1.pep
AAAADDDELRRRAAALREVFGDSSDSEADDLPVGGAGREQWRWEAVEGVRGLWLCAAFLSADEQSRLLTAIRREGWFSDARNQAMRFGDLPSWAVELSALIHEAICFGDVRVGCGLELKNEDEDACPLPSDLLWRKPLFDQMIANRYEPGEGICAHVDLMRFDDGIAIVSLEXSPCVMHFQSGRNKKVLSVRHWRVCMLKPTKESLST

SEQ ID NO: 123632 - protein, 458 aa, Oryza sativa
  Clone ID: PAT_MRT4530_26448C.1.pep
MADPAAAAAAAEFGDPDSPPAPAAEEAEAAAAVGEEAVPAAEAAAAKRWPGWPGDSVFRLVVPVLKVGSIIGRKGELIKRLVEETKAKVRVLEGPVGATERIVLVSGKEDPALELPPAMDALMRVFKRVSGITDGAAEGTQAATAPGVCAARLLVPGAQAINLIGKQGASIKAIQEGTGATIRVISIDERERPFYVIEDERIVEIQGETEKVLKALQAVSNHLRKFLVDHSVLPLFEKTNATVTQDRSTDAWTDISHPSIVSAQINQPPPVVDEYILPMKRDPLFLEREPLIDHNIHRSGVSLYGRDPALSTLRTSGIHGGGPGGPLLSQITQTMQIPLTYAEDIIGVKGANIAYIRANSGAVVTIQESLGSPDDITVEMKGTSSQVQAAYQLIQDSLAAHRDSVRSSYAGLDPVYRPSYSQYGSSTYPSSSLPSYSSMDGGGYSSSGLGGYGSSYRY

SEQ ID NO: 123633 - protein, 107 aa, Oryza sativa
  Clone ID: PAT_MRT4530_26449C.1.pep
FPGRVSPCSGSGLAPQATSASSAWSASPCSAGAPAVLWLFGRGQFVVGGRLRLGGGSFFVGLFRLDSAFCSSPLALVRSSSCKMSRGSCVGRVCFPAWCRMWSSLIC

SEQ ID NO: 123634 - protein, 139 aa, Oryza sativa
  Clone ID: PAT_MRT4530_2644C.1.pep
MKGVSPDAVRIRLFPFSLLGKAKQWFGTNRATINSWDKCSTAFLSKFFPMGKTNAHCRRISGFQHTREESIPEAWEQLQEYVAACPHHGMDQWLILQSFYNGLTPTSRDHLDVAAAGAFFSKTVRGAVDLIEKMVSNMG

SEQ ID NO: 123635 - protein, 72 aa, Oryza sativa
  Clone ID: PAT_MRT4530_26450C.1.pep
ATNITIVTEHDMDPLHLVQNRYYLHSITLSKVHKTLLHENFYTKLKSKQGGVTHTRCNMTRSTSRCTSSRAS

SEQ ID NO: 123636 - protein, 146 aa, Oryza sativa
  Clone ID: PAT_MRT4530_26451C.1.pep
MIERHDYCLVLDQRCSVSPTFHFKWSSYDYCLVHDQRCSDFSYYLYFNKVDSRPPRNLRDLRLGTPRANKALSDPVETKDHENSIRHCGRLHVSMVLHQDRLRRVQPMLTRLRRRLYAFSIAQEWLLDLDKEYGMKKWCTRRDKIS

SEQ ID NO: 123637 - protein, 679 aa, Oryza sativa
  Clone ID: PAT_MRT4530_26452C.1.pep
MEDGKSIVYRACKSRYIRHVSTKYAAISHTAASIGVQEIILLAQRFSHQYAAISHTATSIGVREIILLAHWFSHQYVAISHTATSIGVREIIPLAHWFSHQYAAISHTAASIGVREIIPLAHWFSHQYAAISHTATSIGVREIILLAHWFSHQYVAISRYDYDSVAVLVPRLQVIEGHLLTSPQPVDRSDLSYICFKWSSYGYCLVLDQRCGVTPATSTFSGRVTATAWSSTSDVAFLRLLPLSVVKLWLLPGPRPAMWRSSDYFHFQWSSYGYCLVLDQRCSVSPTTSFTSDWSSYDYCLVLDQRCSDLSHYLYFNVVGLITRHDCERTSGYAMSWYVAISHTVASIGVREIILLAHWFSHQYAAISHTATSIGVGEIILLTHWFSHQYTAISHTSPQPVDRSDLSYICFKWSSYGYCLVLDQRCGVPPTTSTFSGRVTATAWSSTSDLALLRQIPLSVWSSYDYCLLPDQRCSDFSHYLYFNVVGLITRHDCERTSGYAISWWSSYGNCLVLDKRCGVPPTTSTFSGQAISHTAASIGVREIILLAHWFSHQYAAISRTSPQPVDRSDLSYICFKWSSYGYCLVLDQRCGIPPTTSTFSGRVTATAWSSTSDVAFLRLLLLSVVQLQLLPRPRSAMWRSSDYFYFQWSSYGYCLVLDQRCGIPPTTSTFSGRVTATA

SEQ ID NO: 123638 - protein, 60 aa, Oryza sativa
  Clone ID: PAT_MRT4530_26453C.1.pep
FDALSAVSLPSSHCLSSAGQATAFMRHAPTRTCSYLFSSPLPIRLQGLISYFFFFFLPPY

SEQ ID NO: 123639 - protein, 146 aa, Oryza sativa
  Clone ID: PAT_MRT4530_26454C.1.pep
MSTKINQRPPVIRYIRHVSTKYAAISHTAASIGVREIIPLAHWFSHQYAAISHTAASIGVREIILLAHWFSHQYVAISRTATSIGVREIILLAHWFSHQYLAISRTATSIGVREIILLAHWFSHQYIAISRTATTIGVREIILLAH

SEQ ID NO: 123640 - protein, 76 aa, Oryza sativa
  unsure (1)..(76): unsure at all Xaa locations
  Clone ID: PAT_MRT4530_26455C.1.pep
MHLRPSKSGIRPLRSLHPNLNSNGKXIAIDILKEQRSPALTISKVLLSICSLLTDPNPDDPFPRVRPRVRPRVRNG

SEQ ID NO: 123641 - protein, 111 aa, Oryza sativa
  Clone ID: PAT_MRT4530_26456C.1.pep
MATILDNRRRISVGSWVEEKVEIGDGDGEPLMGREAGWEALALTHLDLTLPATKVASSAECLGCDGAVYMVTMAETSGGCRVGGGHGSVKEGCGSVVSRTRRWRQATTVGS

SEQ ID NO: 123642 - protein, 548 aa, Oryza sativa
  Clone ID: PAT_MRT4530_26457C.1.pep
MDDLADRPSQEAVFLSATGEIDRLRQKFSARSIVAWQVGTQGSKVDPNVFADDVRSAFRIRRSDIQITKFHPKDFFITCASQSDRDAILRQPRLATKSGRVYLFRPWEEGLHGVPACFRFRARVCIEGLPMHARTDEAVAKIIGRKCSVHYVEEYSHRRNYNRTFDLWIWTDAPKFIPRSSSFSLTNADEEGLPIDIPLPDLEPHHNPPPEEPKEGWTYNVLIHIDTLEDLHCKLARAYDYQYGAEDDERESRENREEKASGAAALRWLEGGDVGVHACSRARSTREGQCLAERAREMAGTATTRAHLRRVKEVVMALAAPCAVRNTRTGGGGGSAEDVTPDPRKGPDDDEEDREQRSQGQHRSRSLWSRVGGRSSSRSREPVGSERQVYTQDSRGRQWARAPSEGRSRSYRSRSPSEPELLIFSQGQVLDMLEKHLDPMLHEATIQHSMYSPVFIPSSAQEIVVGAATEMPPGARNLNELVAGLSTPVQAAHLPTPDVSSRRPCRNKHFKKPLSPASMKMITTLVEKGGCKGARLKTAKKKAVVVPV

SEQ ID NO: 123643 - protein, 101 aa, Oryza sativa
  Clone ID: PAT_MRT4530_26458C.1.pep
MGGYVHDALVTFAECKSPAWLSPRASPADRDGVSAPRPWRHRHPHRLFRLVATEPSPSTANRIESGSERGSSARAHRACVDLPARRRASRRPLDCGRDRER

SEQ ID NO: 123644 - protein, 428 aa, Oryza sativa
  Clone ID: PAT_MRT4530_26459C.1.pep
MSNSTWQPSPPQTPAAAASSASGIDGVENKISPSIVFIVAVLAIVFFVCGLLHLLVRHLLRLHRQRRAREDAESATAFEGQLQQLFHLHDAGVDQAFIDALPVFLYRNVVGVGGEDGKDPFDCAVCLCEFAADDQLRLLPKCSHAFHLECIDTWLLSHSTCPLCRRSLLAELSPTCTPVVMVLESESSRDMVHAADDEPADVGGEDAPGAEEVVEVKLGKFMCVEGNVFFNVNAIAGEGDRAGTSSNGNGDANAKAGGLGQRRCHSMGSYEYVMDAHASLRVSIKPPRKKPAAAASKSRRRGAMSECEFGASKRGESSLRLPPFRATPRKNPDDDAAAAAGAKLAKDSFSVSKIWMVPSKKEPGAAAERRAVSFRWPAAKDWDVEAGSCGGNSAVSSVAAEERPSFARRTLLWVVGGSRQLSRVGSCS

SEQ ID NO: 123645 - protein, 98 aa, Oryza sativa
  Clone ID: PAT_MRT4530_2645C.1.pep
GHKNPPFPFFFLHTDGGQRTKEENTPVSQILLAKNHLSRGTPPTGRVYAQPRAPLRATGAWGGTSLAQGRALPARGMWAGFKDQLSRETFPAGFHQQV

SEQ ID NO: 123646 - protein, 715 aa, Oryza sativa
  Clone ID: PAT_MRT4530_26460C.1.pep
MDAYEATKVVFSRIQALDPDHAAKIMGLLLIQDHGDKEMIRLAFGPEALLHSVMAQARKELALLPPPPPPSSSSPTVPAAHSPFLLSRQNSGRGPAPSPSPLSASSPSSWAQAQPFSRSNGSVDEVVGAGEELISPANSGGGAAANAPPFFPRGGDVLLDDFQLQEQLAFLNEGGVNPSHPLQGFDGAECRSPGPGEGGGMFPYGLGWANGGPGHRRSASVNELCLGGGSSDGFGWKPCLYYARGFCKNGSSCRFVHGDDAAALTGAAMDAATAEQQQCQDFLLRSKSQRLGPAAFPYSPTGSLPGSPSAATKCLSLLLQQQHNDNQRAAAAAALMLGGSDEAHKFMGRPRLDRVDFASMMNPGSRQIYLTFPADSTFREEDVSNYFSIYGPVHDVRIPYQQKRMFGFVTFVYPETVKLILAKGNPHFICDARVLVKPYKEKGKVPDKYRKQHQGDFSGCTTPTGLDGRDPFDLHQLGARMLQHSNSTNEMMLRRKLEEQQQAAELQQAIELHSRRLMDLQLLDLKNRAAAAVTTAMAMTIPTANAFGSSQPLATTMVESPPDSGEQLKGTGYFTEERKMVNGGGDKEESAGEASLNADSDQSLEHNLPDSPFASPTKSSVSAHQSFTTTDTGVVATSSCSASHVGISAGTNAGGGINHLRPSTLDIPSPRDFFSVSRNTRSKRKAIVEYRRKGVKCQHSVSSLVYFFLVALFSG

SEQ ID NO: 123647 - protein, 103 aa, Oryza sativa
  Clone ID: PAT_MRT4530_26461C.1.pep
YASDGTAAPLDTGHPIAAARTQGRSKKQGIASCVSSSTTTTSSSSSSSSSSSSTSGQSNGNAKLKLRRPGRRGRGPRWQRDQRERRRRRRRRGRGGARAGGGG

SEQ ID NO: 123648 - protein, 121 aa, Oryza sativa
  Clone ID: PAT_MRT4530_26462C.1.pep
SQSPYPMVNSTEEQHRYALVATSSFSYLLVLPIVSRPATRVWFTLSQYKCPGIVLPCSFEYIFVGKLITGVLYAGARISVCIRNSGVSALLNVKADSDVRKHRSCITDMSIFKLEHVSASS

SEQ ID NO: 123649 - protein, 45 aa, Oryza sativa
  unsure (1)..(45): unsure at all Xaa locations
  Clone ID: PAT_MRT4530_26463C.1.pep
HPMGAIWELSCDAGVLPCVWNMRGVLGCGCRFDCVVADVGCGHXT

SEQ ID NO: 123650 - protein, 74 aa, Oryza sativa
  unsure (1)..(74): unsure at all Xaa locations
  Clone ID: PAT_MRT4530_26464C.1.pep
VKKLGIGGLFNRGLPFRSVMIGXLSGAGRGGFQALKVAVGLPPSGGVRPAPGAAEIALQASGLLLCRDNGDVFL

SEQ ID NO: 123651 - protein, 486 aa, Oryza sativa
  Clone ID: PAT_MRT4530_26465C.1.pep
MVVAAGHGGRRRRAWGWAMRAAASAVVWTAVVQLASIAGLWRPRVLADCGGGGGAATGLAALAGEDRVAARLSPPALVPRRIYKSNGYLLVTCNGGLNQMRAGICDMVTIARYLNLTLVVPELDKRSFWADSSEFGDIFDVSHFINSLRDELMIVKELPMKLKLKTKRRLYSMPPVSWSNETYYLKRVLRLARKHKVIHFNKTDARLANNGLPVKLQRLRCRVNFEALRFTPQIEALGRKLISTLQKSGQFVVLHLRYEMDMLSFSGCTHGCSDEETEELTRMRYAYPWWKEKEIDSEVKRFQGLCPLTPEEITLVLKALGFKKDTLIYIASGEIYGGERRLAALKAAYPRLVRKEKLLSPEELQPFQNHSTQMAALDYMVSIASDVFIPSYDGNMARVVEGHRRYTGFRKTILLDRVKLVELLDSFQGGAMSWNEFSAAVKKAHQHRMGQPTERKVIPGRPKEEDYFYANPQECLGSREGLRDIL

SEQ ID NO: 123652 - protein, 1698 aa, Oryza sativa
  Clone ID: PAT_MRT4530_26466C.1.pep
MDHIAEEETVGVAEDPGLADVGKADETKEEGGGAGVHLDETRVAVDDPTEVRASQIDDGTAMVSVLGGDGDSFVEQDGQDTSGGGACNEGNEPEEDARVQVRLDDTSAAVDEGGASLIDDVMNTLPVGGVASFDDGPQTDKNAQDEGALIDVVSSTVLNDASIDLVKASDSVSEEGTGMDILVQPGEDIKEMVTIACDAATDDEGRKVDAVSSSSDRNEEVVGAAGLDETDEDMRLGTVGLSGDDNVANEAAAAAAGGADDEDLKMDGVITAGDKDVENGKADNADGVPEVNVVAISRDNSAENEAAAAGDDGADEEGIQMNVLNTTRGEGEEDDEAAQNVVEYAVDGTEELETIGLTGDDKAEKEAAPAGNNSADEEGMQMDAVTTTGAEDEDGKADENVVEDDDGVSEEAVADTVGEDIPEEDAVQIDEDEDDDDVPPPLTRKGGGRRKRGRASSKAQVVVKPPVRKKDDEEVCFICFDGGDLVVCDRRGCPKAYHPSCVNRDDEFFKSKGRWNCDSGMPDVDFDDKTSWWYLFKDYWLNLKTKLPLTFEEISAAKSQKNGSSLVIRDNDLSEPHDTNDEEEGNSDSSSVRHLEGNSKRKGRKRSKQAANDDSSVVKDSTRKSTKRGLTGGRDTKSSTGRKVRKLSKRALSSDHRPRESESVGTSTSSAEETSWASKELLDFVANMKNGDKSVLSQFEVQSLLLDYIKRENLRDPRRKSQIICDSMLKSLFGKARVGHFEMLKLLESHFLMSEVSPVEIDDNHGGVVDPDPSLDADGNSEASMVMSSEKRKKSRKYDQKALQTNLDDYAAIDNHNISLMYLRRNLLEELISEVDTFDEKVLGSFVRIRISGTGQRQDIYRLVQIVGTGIAPEQYKCGKKSTDITLEILNLDKREVITIDITSNQEFTEEECKRLRQSIKCGFIPRLTVFFWHMCTVSLFLNYLTIQGEVYEKAKVLQSLKVNDWIEIFTLRECVEKLKLLSTPEERVRRLNEEPEVHADHTMDPDYESPEEQEQDTGRSSFNKSRGSFSKKDNNPVSPGKGEGRSPAQRDLKTNWESNRNTWGESSTHIESPLGRRPAFSSHGESAGYTSKSDSPNIGTHAVKVGATAGANIGSGGTHASQSVINESEKIWQYMDPTGKIQGPFSIVQLRKWNGSGYFPPNLKIWKSTEKQDDSILLTDALLGRFEKDLPPWEPPVGSSSDVDGRPRNDSLLEEGTRAGEQPSKSAVLSSTQSFSGRAGQGNDAANLGPATIQSSTQGYYGMQNSQAAYAVQQSLSGSWNASSQFGTAINPVTLSQPAMGSFVVGQNAALGSAGQLTPVPGPATVSAEVVNSQLQSQNQIASFLSQSDGRLADGNDSKLGEDASRERMRSSGEDLGLSGAQPGGVQSNTQQLEDARNQLQTDASNSVKPSQLISTPSAEAVQPSSTAMAGGDNQNTAWAQLASTSGQSQPQAAGNMTWGATLQGNANMGWGMVGQNNMNMSWGGTAQSATGYNMGLAMQAQPNAVPNMGWVTPNPGNTNMNMMWATQGQGTPNAAAMVGTQMQGVAMAPWGAIAQGNTNSYPGWGGQVGNMNQNVGWGAPMQVNPGPSTGNGTGQDNNNMNWNSPSGNPNWNNQQRDNGGRHSGHGGDFNGGDSGGRSWRSQSGGDGGSWRPKRGVCYSILDKGYCKNGEHCNFSHSIPNDGYPSRNSRHFDRQNS

SEQ ID NO: 123653 - protein, 38 aa, Oryza sativa
  Clone ID: PAT_MRT4530_26467C.1.pep
MSRGCGKRHANHLSLGVSTRQKWVFVRRLRQCRYYMVI

SEQ ID NO: 123654 - protein, 1794 aa, Oryza sativa
  Clone ID: PAT_MRT4530_26468C.1.pep
MDGTRTNDHKIVGIVVVEAHIAEEETVGVAEDPGLADVGKADETKEEGGGAGVHLDETRVAVDDPTEVRASQIDDGTAMVSVLGGDGDSFVEQDGQDTSGGGACNEGNEPEEDARVQVRLDDTSAAVDEGGASLIDDVMNTLPVGGVASFDDGPQTDKNAQDEGALIDVVSSTVLNDASIDLVKASDSVSEEGTGMDILVQPGEDIKEMVTIACDAATDDEGRKVDAVSSSSDRNEEVVGAAGLDETDEDMRLGTVGLSGDDNVANEAAAAAAGGADDEDLKMDGVITAGDKDVENGKADNADGVPEVNVVAISRDNSAENEAAAAGDDGADEEGIQMNVLNTTRGEGEEDDEAAQNVVEYAVDGTEELETIGLTGDDKAEKEAAPAGNNSADEEGMQMDAVTTTGAEDEDGKADENVVEDDDGVSEEAVADTVGEDIPEEDAVQIDEDEDDDDVPPPLTRKGGGRRKRGRASSKAQVVVKPPVRKKDDEEVCFICFDGGDLVVCDRRGCPKAYHPSCVNRDDEFFKSKGRWNCDSGMPDVDFDDKTSWWYLFKDYWLNLKTKLPLTFEEISAAKSQKNGSSLVIRDNDLSEPHDTNDEEEGNSDSSSVRHLEGNSKRKGRKRSKQAANDDSSVVKDSTRKSTKRGLTGGRDTKSSTGRKVRKLSKRALSSDHRPRESESVGTSTSSAEETSWASKELLDFVANMKNGDKSVLSQFEVQSLLLDYIKRENLRDPRRKSQIICDSMLKSLFGKARVGHFEMLKLLESHFLMSEVSPVEIDDNHGGVVDPDPSLDADGNSEASMVMSSEKRKKSRKYDQKALQTNLDDYAAIDNHNISLMYLRRNLLEELISEVDTFDEKVLGSFVRIRISGTGQRQDIYRLVQIVGTGIAPEQYKCGKKSTDITLEILNLDKREVITIDITSNQEFTEEECKRLRQSIKCGFIPRLTVFFWHMCTVSLFLNYLTIQGEVYEKAKVLQSLKVNDWIESEKMRLGHLRDRASDMGRRKEYPSSLFTLRECVEKLKLLSTPEERVRRLNEEPEVHADHTMDPDYESPEEQEQDTGRSSFNKSRGSFSKKDNNPVSPGKGEGRSPAQRDLKTNWESNRNTWGESSTHIESPLGRRPAFSSHGESAGYTSKSDSPNIGTHAVKVGATAGANIGSGGTHASQSVINESEKIWQYMDPTGKIQGPFSIVQLRKWNGSGYFPPNLKIWKSTEKQDDSILLTDALLGRFEKDLPPWEPPVGSSSDVDGRPRNDSLLEEGTRAGEQPSKSAVLSSTQSFSGRAGQGNDAANLGPATIQSSTQGYYGMQNSQAAYAVQQSLSGSWNASSQFGTAINPVTLSQPAMGSFVVGQNAALGSAGQLTPVPGPATVSAEVVNSQLQSQNQIASFLSQSDGRLADGNDSKLGEDASRERMRSSGEDLGLSGAQPGGVQSNTQQLEDARNQLQTDASNSVKPSQLISTPSAEAVQPSSTAMAGGDNQNTAWAQLASTSGQSQPQAAGNMTWGATLQGNANMGWGMVGQNNMNMSWGGTAQSATGYNMGLAMQAQPNAVPNMGWVTPNPGNTNMNMMWATQGQGTPNAAAMVGTQMQGVAMAPWGAIAQGNTNSYPGWGGQVGNMNQNVGWGAPMQVNPGPSTGNGTGQDNNNMNWNSPSGNPNWNNQQRDNGGRHSGHGGDFNGGDSGGRSWRSQSGGDGGSWRPKRGVCYSILDKGYCKNGEHCNFSHSIPNDGYPSRNSRHFDRQNSGNERRYDRQNERTDRQFDRQSSGNERRDDRHNGRDSDRHDDRLTDTRSQSRERQ

SEQ ID NO: 123655 - protein, 269 aa, Oryza sativa
  Clone ID: PAT_MRT4530_26469C.1.pep
QFAVESPRWLAKVGRIDDARNVVEHMGTSATAACSRIPPPLLPLSFVFFDPSGRSLISDVYAVALIGGSLFFLQQFAGINGVLYFSSLTFHDVGITSGILASLYVGITNFAGAIVASILMDKQGRKKLLTGSYLGMALAMFLIVYAISFPLDEGVSHGLSITGTLLYIFTFAIGAGPVTGIIIPELSGARTRSKVMGFSFTVHWICNFLVGLYFLELVKKLGVGAVYAGFGGVSFLSALFAYNFIVETKGRSLEEIEMSLSPAAPGKRE

SEQ ID NO: 123656 - protein, 172 aa, Oryza sativa
  unsure (1)..(172): unsure at all Xaa locations
  Clone ID: PAT_MRT4530_2646C.1.pep
LLRQRLGFAVDRVHGGGSRERTAEINPVQXDGRDRTVHDRLTGEGDDDVGGDVTSGGGGSDGSDGARSPAXAKGRTRTAATWRSRRWPSRVTTATGTAAAHGWSDGDDGGARLHGARALPRRETKAKVAAGRGELGGPFKGASERRRWPTATGGEKERSDWREKSRSESNSN

SEQ ID NO: 123657 - protein, 89 aa, Oryza sativa
  Clone ID: PAT_MRT4530_26470C.1.pep
GQALAMLAMESINDCSAMLKEPGYSFIRELTAMIQDDRYKYVAASLLQNLCLHAQSKLSSSDLTELSHSLRKVSLLIQPAVKEGRQDRA

SEQ ID NO: 123658 - protein, 549 aa, Oryza sativa
  Clone ID: PAT_MRT4530_26471C.1.pep
MVRSGEPPSGGSVVRRRRAAIHRRPRLAGHVVHLVPAHVGERVARPLLHRRRRRRVVDEALVEEVDDGVLEPGEPSGLERSGAAFPHEQHPPLQVVDGQPGGARSPADGGGGRQRHDMEPEHAEHLRAALVVDVPRDHQQLAPGLHEVARDGSVASDEAHVLEVIVAPQHVVLHAAHPHLVVGQAAVPRPVHDDALVGGDEVEAPVVVDDVLRLVQPRAPVREPAFAPLDPERDVEPPRHEDDGGEHVGPRRRRRRRRRGGEGGEARDQGELLARGGHDPRRELDAVAGVEVVERVAVAGVEREDEPAAVGGAAEARDADVGREREGVARAADPAVEGGRRGAGEDEPRQLGRERRELGRRRRGARPLPHGGAPLPVDAGHADAVGAAGEAGGEAEEDVLGEVPPLRPVHGGHRRQPPGRRHRATPAAAAIVPRQGGWCLRLHEMEREPKRPEPGHRWIPPLRSPLGLARPAASASTRSSCAFGRSGGSRRWVPSPESLCVAKRRGVAECAGAAADSPRGARARREGARRNGGKALHFVAGRRLRLRAG

SEQ ID NO: 123659 - protein, 114 aa, Oryza sativa
  Clone ID: PAT_MRT4530_26472C.1.pep
MALIGARSKENMENKSLRFHSYTLPSPVVAGQGLILAFSRRFGKEKIRRELSSWENRQGRKKGEEDERVSCLPYEPELGARPGGGMGLGGEPRSVTGGAKSSWVHGTDKGRLET

SEQ ID NO: 123660 - protein, 45 aa, Oryza sativa
  Clone ID: PAT_MRT4530_26473C.1.pep
MAPAADGGAMPGGGSTAFSIRLQTRPLPICGDLLKSYALGTAPSY

SEQ ID NO: 123661 - protein, 168 aa, Oryza sativa
  unsure (1)..(168): unsure at all Xaa locations
  Clone ID: PAT_MRT4530_26474C.1.pep
MRRCRSGSILIRRRRSISELGGRAAVLGKXGDDEFGRAIRFDDNVATATARVKVEFREREDGSGGTRLVAETVKSHAEPSLPHPLPASTTAAWAPPPSAASTRAPSPSVTAIRRRRLGSVPIHPPPPPLSGSVHIRRHPSLPLRLRPHPTPPLPSLGHRPHPLPPLHL

SEQ ID NO: 123662 - protein, 110 aa, Oryza sativa
  unsure (1)..(110): unsure at all Xaa locations
  Clone ID: PAT_MRT4530_26475C.1.pep
RLLLLXLLLLSPAVAAASXPGEEEPLIRQVVXXGDDNELELNAEXHFASFVQRFGKSYRDXDEHAYRLSVFKANLRXXXRHQXLXPFXEXGVNKFXXXXXVEXRRVXLGS

SEQ ID NO: 123663 - protein, 234 aa, Oryza sativa
  unsure (1)..(234): unsure at all Xaa locations
  Clone ID: PAT_MRT4530_26476C.1.pep
GQMLHDVKEDCKSEKEMQKLERMSADQTSLYPGCEXGHKKLGTTLEFLQWNAKIGLSDXAFGELLKLVKNILPEGNELSETTYEAKKVVFPLGLEVQKIHVCPNDCILYRGEEYENLEACPVCKALRYKIRRDDPGDVNRHPSKKXVLAMVMWYFPIIPWLGRWFRNKSHARMMRWHAKXMXQDRVLRHPTDGTFEDFGEDAXNVRFGLSMDDMNLFGXEMSNSHSTWPDEYLR

SEQ ID NO: 123664 - protein, 253 aa, Oryza sativa
  unsure (1)..(253): unsure at all Xaa locations
  Clone ID: PAT_MRT4530_26477C.1.pep
LWAGSAATRQQHRHRHRGGVSSALARAHLPPPHKNARFPDPVAGRVDHRRGNTTMAHRRCSAGGSNQEGSKSMPLVVVATGVALSDAVLVLLXVVLMVFLACGRFQRRAMPGAYQSGTXKVSFDPGPDLFYLDVVKPYVEADHGDXSGVVKTLPELVGLRKEPRWEDXDNGVAMRLRHGQAWPRHRRGQHHDAQRDVHGTRPHRAGRGAQALHQVLPGHGRSRGQRHRRPACRAPRRYLVLQTAPGLGRARQL

SEQ ID NO: 123665 - protein, 179 aa, Oryza sativa
  Clone ID: PAT_MRT4530_26478C.1.pep
HASAEGNGGICNLQEEKEDEPSMQFEESESISTPSIEDHLHEQLPDPVDLKPLDMSASDSALYGQQAPSSDIPEQQSKNEEVKESFSEDKDVVVGNELHNGGQGADDIAKNITGIVKADDQSQLAEKEEARAKVDKVWRKDEPKSNDVIEETKSKLLEERKSRVKALVGAFETVMSFKE

SEQ ID NO: 123666 - protein, 325 aa, Oryza sativa
  Clone ID: PAT_MRT4530_26479C.1.pep
MATSKKDPPSRDRAARMSPNLKRSSGIEASSAAGYGPRRARSVPSSPDRKFGAAAAAPAAASGSPDTARRRHRATPGVSTASSRSAYPSGWPNSDRGWRRSPAAVTCAFATRYPERASAASATWRTTATCGASCRCCSATTRPRPAASGSSCSPSRRRCSGARRRRRRYRRCASPASGRGWRRSPASPAPTTKAASACSSSPPTTPRPRRRSVVAARRRRRWSTSPSIRARYPHWRRRRRIWTSTRRLRLRRQVSASPAPARGCGGARPRLRWRRRRLRSRAPRRRRRRRRRRQEMACSLLRWCGVPLIPVWPCTRCSPVVFHVA

SEQ ID NO: 123667 - protein, 234 aa, Oryza sativa
  unsure (1)..(234): unsure at all Xaa locations
  Clone ID: PAT_MRT4530_2647C.1.pep
GLRWIGCTAAVHGNGRPRSTLSKKDGRDRTVHDRLTGEGDDDVGGDVTSGGGGSDGSDGARSPANGEGADEDGGNLAIPTMAFPSDDGDWNGGGARLERRRRRRRXGYTAXSASDDERRRRRWRRGLASGDGGPRRPAARRKGRIGGRKVDPNRTRIHGFPNRKRRXFQKRKGRGDREDHFPSNDSAGDGKTRQRRAAARRTGLRADLSRLGRGEREERERFWADFRPKAKTDF

SEQ ID NO: 123668 - protein, 45 aa, Oryza sativa
  Clone ID: PAT_MRT4530_26480C.1.pep
SLDSLFFFILGVGASFSYTYFSSFCGTYPGRDYDPCKDAHFYCTN

SEQ ID NO: 123669 - protein, 105 aa, Oryza sativa
  unsure (1)..(105): unsure at all Xaa locations
  Clone ID: PAT_MRT4530_26481C.1.pep
FFFFFFEGTFGGPRDTWYSGGLPCGGGXLQXSIHTQRNRLSDTFQLSQWALTSWHLAHPSYGQGGSGVIPGIQQRYRRPPXHTTHLFSQHTLFHPKTRHIQXPTT

SEQ ID NO: 123670 - protein, 129 aa, Oryza sativa
  unsure (1)..(129): unsure at all Xaa locations
  Clone ID: PAT_MRT4530_26482C.1.pep
ELAANLFPFSSLVSLCFYCLPEMNSGAGGAGGAAVGRMPAGSLQWAQWRLADERCELREEEMEYMRRFHRHEISSNQCNSFIAKHVRAPLQNVSSDNNSKHHLVFLEPLLGHYLFCFFNYIXDWGCTIH

SEQ ID NO: 123671 - protein, 105 aa, Oryza sativa
  unsure (1)..(105): unsure at all Xaa locations
  Clone ID: PAT_MRT4530_26483C.1.pep
NLIDTNMIVDRKGPFPPQKLVIEVRGSPTYILGHLPFHNQCGTIQQSPPSHIGVPQPFTAPSPYPGPHRPTVHQXIRAPQAPTVHQAFTRGQPTHKIDPDPNSHQ

SEQ ID NO: 123672 - protein, 230 aa, Oryza sativa
  unsure (1)..(230): unsure at all Xaa locations
  Clone ID: PAT_MRT4530_26484C.1.pep
DALEPYISKETVEQHWGVHQNIHVERLNGMIGGSEWEGMSLGQMMLSSFNEGREAPHPPFFHAAXRDFGSYDGMIRQFMDAASTQFGSGWVWLCYKTSKLPHVKSRSPIPSDNYGRLVISKSPNAINPLVWGHSPLLAIDLWEHAYYLDYEDRRSDYVSTFLEKLVSWETVESRLKKAVQRAVERDEYVSTKHIRKQLLARAKSQIRAMPQQVNGDAREQTSGQEKSLGV

SEQ ID NO: 123673 - protein, 693 aa, Oryza sativa
  unsure (1)..(693): unsure at all Xaa locations
  Clone ID: PAT_MRT4530_26485C.1.pep
MAENNGAVPPGCKLPAGGFFGRLHVLVVDDDAAYLEELKLMLLLAGYAVTGKTTAEEALKEVDQNPEDYFHIVMTDVHMSGMDGFDLLHRINGRVPVIMFSEGEDVVMVMRTVMNGACDYMVKPMTSEAIKFIWKHVLRWRLSALPANASSSLQPSDXTGGGSSGSVWSSRGDGQEAPPPAVAAAAKAPSKKRGASEVSDRGSNNLEATTGRKKVRTRFTWTTVSHTSFVRAYEQLKDQEGPKKIKQLMELDGIFVTKTQVSSHLQKYRSWLENERKKEEATSSSPCNPLSYTNCLDRGNYVGVGAKEIENFISSHQRSLGTAIGQESTIEQASLHSEITSVSRDAHENGNSQARGSAMSNGPKKIKQLMELDGIFVTKTQVSSHLQKYRSWLENERKKEEATSSSPCNPLSYTNCLDRGYSTWKQSSVITEGQQSSSFSGRPIHSMATSNGCLTTTDTQAGNYVGVGAKEIENFISSHQRSLGTAIGQESTIEQASLHSEITSVSRDAHENGNSQARGSAMSNGTSGTRGVLVTNENLLHVVSASLPSNMGQPTQPSQSFCTNELAANYSIISDQNPGTSHPTSSSAINNQNSKTQEMSVSQTVELGCGNDVMLDWPELVGLEDQLDNDVLMNSFFDGDLLQQGVVTAIDGTQEMLAFDSTGDLGSVPPRGLNNEIASHENTNGKNGASSGP

SEQ ID NO: 123674 - protein, 374 aa, Oryza sativa
  Clone ID: PAT_MRT4530_26486C.1.pep
MAFATLVGVGGLSPALFSPSRPLSCSSSTSVSAPFILRAGGGGDARRHGLRRLVTPLRGSACRGESTNSRVLQCANEANVVTEDDIVNDGIDDETASDAEMDEDAEANGDESSGTDEDASVSWIEQQPLPYPSDALEPYISKETVEQHWGVHQNIHVERLNGMIGGSEWEGMSLGQMMLSSFNEGREAPHPPFFHAAQIWNHDFYWRSMQPGGGGKPPERLLKFINRDFGSYDGMIRQFMDAASTQFGSGWVWLCYKTSKLPHVKSRSPIPSDNYGRLVISKSPNAINPLVWGHSDRRSDYVSTFLEKLVSWETVESRLKKAVQRAVERDEYVSTKHIRKQLLARAKSQIRAMPQQVNGDAREQTSGQEKSLGV

SEQ ID NO: 123675 - protein, 125 aa, Oryza sativa
  unsure (1)..(125): unsure at all Xaa locations
  Clone ID: PAT_MRT4530_26487C.1.pep
VASNGLTRSIIKLMALELSKMMGNVVFISEDKDYXFYIEYAKGKGFITFKNXVKWKDCMVIWSQFVCSTXGYMDLKHFEKTNQKRDPQALTRCGCKAKLDIELNEERGVCCVKEFKNQHTRELAN

SEQ ID NO: 123676 - protein, 93 aa, Oryza sativa
  Clone ID: PAT_MRT4530_26488C.1.pep
TNSDFRRKGNLGLASYDNPRVRESCGMPVMLDFSAPGGRRIQLIAEVACIELLVSLNLGFTTVSILAAHPSSNRLDGSVMIIKTTMYQVLKQE

SEQ ID NO: 123677 - protein, 106 aa, Oryza sativa
  Clone ID: PAT_MRT4530_26489C.1.pep
SGKPPGVSKFTRPPKNPSHGKAGIILPLTGGDLPFVGENWLRGLSPGGFFPPLEGFYPVWAPGGHSYFKQLLLGTQKCSPVQNGALVSNLPWTPCCSFIGGGIFFW

SEQ ID NO: 123678 - protein, 136 aa, Oryza sativa
  Clone ID: PAT_MRT4530_2648C.1.pep
MDWSSLPLDMLVLVLDRLGWSSHPSFASTCRHWRSAVSPFRRRRIAAVFVGGGKRGKARRDDEAVESENKRDWDGDVGLGGENRPWAVKWLGWRSAHAAKSATEDDAGEGRKKKKKKKERGGTPCQNGKGRREKER

SEQ ID NO: 123679 - protein, 100 aa, Oryza sativa
  Clone ID: PAT_MRT4530_26490C.1.pep
CPGAPQRVLKTTFYDQWKNLPEQETEENQPIIGHTIIHGVHRDIRRFAGTVPNATTTGDIDSMVMYAGQGVGLITEIIPASEVVKRLVSEAQHVIREKLL

SEQ ID NO: 123680 - protein, 375 aa, Oryza sativa
  unsure (1)..(375): unsure at all Xaa locations
  Clone ID: PAT_MRT4530_26491C.1.pep
MGSATTICSDKTGTLTTNHMTVVKACICGKIKDVESASDTKSLFSELPESAMTLLSQSIFNNTGGDVVFNKSGSREILGTPTETAILEXGLSLGGRLPGRCARRSTLVKVEPFNSAKKRMGXGNVVPLDDATVAHLNATINSFANEALRTLCLAYVDVGDGFSANDQIPEDGYTCIGIVGIKDPVRPGVKESVAICRSAGIMVRMVTGDNINTAKAIARECGILTEGGIAIEGPDFRTKSAEELNELIPKIQVKFSLLLLVMARSSPLDKHTLVKHLRTTFDEVVAVTGDGTNDAPALHEADIGLAMGIAGTEVAKESADVIILDDNFSTIVTVAKWGRSVYINIQKFVQFQLTVNVVALIVNFSSACLTGTAKC

SEQ ID NO: 123681 - protein, 133 aa, Oryza sativa
  Clone ID: PAT_MRT4530_26492C.1.pep
MAAVCNSQFLLSTPGKNCNLLFRLKQKLQIRRLSHERPLRYSEDCKKKMGNCAAAPSDDGELGSPEREEMTGVEVRIRISKRQLQELLEMASMTAAGDEKVIAGIINAGEVVDHHQQRHWQPTLQSIPEAGEP

SEQ ID NO: 123682 - protein, 967 aa, Oryza sativa
  unsure (1)..(967): unsure at all Xaa locations
  Clone ID: PAT_MRT4530_26493C.1.pep
MESYLEENFGGVKAKNSSEEALRRWRKLCGVVKNPKRRFRFTANLDKRGEAQAIKHANHEKLRVAVLVSKAALQFIQGLSLRSEYVVPEEVKAAGFQICADELGSIVEGHDSKKLITHGGVTGIADKLATSPADGLSTAEESIKRRQDVYGLNKFTESEVRSFWVFVWEALQDTTLIILAVCAFVSLVVGIAMEGWPKGAHDGLGIVASILLVVFVTATSDYRQSLQFKDLDKEKKKIQVQVTRNGFRQRLSIYDLLPGDVVHLAIGDQVPADGLFISGFSLLINESSLTGESEPVVVNEDNPFLLSGTKVQDGSCKMLITTVGMRTQWGKLMATLSEGGDDETPLQVKLNGVATIIGKIGLFFAVITFIVLSQGLISKKYHEGLLLSWSGDDALEMLEHFAIAVTIVVVAVPEGLPLAVTLSLAFAMKKMMNDKALVRHLAACETMGSATTICSDKTGTLTTNHMTVVKACICGNIKEVNNPKNASDLCSELPETVVKTLLESIFNNTGGEVVIDQDGKYQILGTPTETALLEFALSLGGNFKAKRDETKIVKMEPFNSTKKRMCVVLKLPGGGCRAHCKGASEIVLAACDKFMDETGAVVPLDKTTADKLNGIIESFANEALRTLCLGYREMEEGFSVEEQIPLQGYTCIGIVGIKDPVRPGVRESVATCRSAGIMVRMVTGDNINTAKAIARECGILTEDGLAIEGPEFREKSLDELLKLIPKIQVMARSSPLDKHTLVKHLRTTFNEVVAVTGDGTNDAPALHEADIGLAMGIAGTEVAIIXPFEESADVIILDDNFSTIVTVAKWGRSVYVNIQKFVQFQLTVNVVALLVNFSSACFTGNAPLTAVQLLWTQGKSMFGLDGPDAEVVLNTIIFNSFVFCQVFNEISSREMEKINVLRGILKNYVFLGVLTSTVVFQFIMVQFLGEFANTIPLTRLQWIASVLLGLIGMPISAIIKLLPVGSS

SEQ ID NO: 123683 - protein, 332 aa, Oryza sativa
  Clone ID: PAT_MRT4530_26494C.1.pep
HASAIARECGILTEGGIAIEGPDFRTKSAEELNELIPKIQVMARSSPLDKHTLVKHLRTTFDEVVAVTGDGTNDAPALHEADIGLAMGIAGTEVAKESADVIILDDNFSTIVTVAKWGRSVYVNIQKFVQFQLTVNVVALLVNFSSACFTGNAPLTAVQLLWVNMIMDTLGALALATEPPNDDLMKREPVGRTGKFITNVMWRNILGQSFYQFIVMWYLQTQGKSMFGLDGPDAEVVLNTIIFNSFVFCQVFNEISSREMEKINVLRGILKNYVFLGVLTSTVVFQFIMVQFLGEFANTIPLTRLQWIASVLLGLIGMPISAIIKLLPVGSS

SEQ ID NO: 123684 - protein, 1090 aa, Oryza sativa
  Clone ID: PAT_MRT4530_26495C.1.pep
MCDGVGGKELDDDSSSSKGTHTVKFDGQLTSSNATTSSSKPDQLFWINGYICSICGFELPPGFMESYLKENFGGVKAKHSSDEALGRWRRLVGVVKNPKRRFRFTANLDKRSEAAAMKRSNQEKLRVAVLVSKAALQFIQGLAPASEYTVPDDVKAAGYGICAEELSSIVESHDIKKLKSHGGVEAIAAKLCTSPEDGLPKSRRRQAVREELFGINRFAETESRSFWVFVWEALQDMTLMILAACAFFSLVVGIATEGWPKGAHDGLGIVASILLVVFVTATSDYRQSLQFKDLDKEKKKITVQVSRNGYRQKLSIYDLLAGDIVHLSIGDQVPADGLFLSGFSLLINESSLTGESEPVAVNAENPFLLSGTKVQDGSCKMLVTTVGMRTQWGKLMATLSEGGDDETPLQVKLNGVATIIGKIGLIFAVVTFAVLTEGLFRRKIMDASYLSWTGDDAMELLEFFAIAVTIVVVAVPEGLPLAVTLSLAFAMKKMMNDKALVRHLAACETMGSATTICSDKTGTLTTNHMTVVKACICGKIKDVESASDTKSLFSELPESAMTLLSQSIFNNTGGDVVFNKSGSREILGTPTETAILEFGLSLGGDFLAVRKASTLVKVEPFNSAKKRMGVVIQLPGGAMRAHSKGASEIILASCSKYLNDQGNVVPLDDATVAHLNATINSFANEALRTLCLAYVDVGDGFSANDQIPEDGYTCIGIVGIKDPVRPGVKESVAICRSAGIMVRMVTGDNINTAKAIARECGILTEGGIAIEGPDFRTKSAEELNELIPKIQVKFSLLLLVMARSSPLDKHTLVKHLRTTFDEVVAVTGDGTNDAPALHEADIGLAMGIAGTEVAKESADVIILDDNFSTIVTVAKWGRSVYINIQKFVQFQLTVNVVALIVNFSSACLTGSAPLTAVQLLWVNMIMDTLGALALATEPPNDELMKRTPVGRKGNFISNIMWRNILGQAFYQFIVIWYLQTEGKWLFGLKGENSDLVLNTLIFNCFVFCQVFNEVSSREMERINVFEGILDNNVFVAVLGSTVIFQFIIVQFLGDFANTTPLTLKQWFNCIFIGFIGMPIAAAVKLIPVDF

SEQ ID NO: 123685 - protein, 766 aa, Oryza sativa
  Clone ID: PAT_MRT4530_26496C.1.pep
MATVSDIGLSAAINVSMAVAFLLVFAFLRLQPINDRVYFPKWYLRGMRDSPVSSGAAVQKVVNLNMRSYLKFLSWMPAALKMPEDELINHAGLDSAVYLRIYLTGIKIFVPISILASLVLFPVNWTNDTLDSMKVVHSKIDKLSISNIPYGSNRFVTHLVMAYAVTFWTCYVLFREYEIITTMRLRFLASEKRRPDQFTVLVRNIPPDPDESISELVEHFFLVNHPDHYLRHQVVYNANKLADLVEKKKKLQNWLDYYQLKYERNPSKRPTTKTGFLGCFGSEVDAIEYYKAEIEKIGKEEADERQKIMKDPQSAVPAAFVSFRSRWGAAVCAQTQQTSNPTVWITEWAPEPRDVYWNNLSIPFVSLTVRRLIVAVAFFFLNFFYVIPIAFVQSLASLEGIEKALPFLKPLIKIDVIKSFIQGFLPGIALKVFLILLPTILMFMSKFEGLISQSSLERRSASKYYIFLFFNVFLGSIVTGSALDQLKAYIHQSANEIPRTIGVAIPMRATFFITYVMVDGWTGVAGEILRLRALIIFHLKNFFLVKTEKDREEAMDPGSICFDWCEPRIQLYFLLGLVYAVVTPLLLPFILVFFGLAYVVYRHQIINVYNQQYESGAQFWPSVHGRIIIALIVSQLLLIGLLSTKGFEETTPVLVVLPVLTFWFYKYCKNRFEPAFVRNPLQEAMRKDTLERAREPTFDLKAYLANAYLHPVFKGREEEDNMSISEDVGMEEVIVPTKRQSRRNTPAQSKYEGSDTLSLPETVHER

SEQ ID NO: 123686 - protein, 218 aa, Oryza sativa
  Clone ID: PAT_MRT4530_26497C.1.pep
MPLASPNDQTLFLDLLFLPLASAQLGRGQTTPRYHTRQFGCDGVRHRAATTHWGGARRLAALRRTRGSSLARARKGGGRASGHRLRGGKRGVVEDEAANYAWGGGHQPAVRKEELVHRPPAGRISSAYQARGGALQHGGHTGKFVDLPRRPGSSAQRRWVGAGALSKRGKEMVVEDEAEAAQANPSTSTAATVGEEGRRDPRAPSRRRLRQRRSALCT

SEQ ID NO: 123687 - protein, 76 aa, Oryza sativa
  Clone ID: PAT_MRT4530_26498C.1.pep
MTWHEQLKPKGYRKAVAISKRPAAGELGGGKEAGTTTSRVTDMHTVMASTSSSAGAAFPWQTGHEAWDESHMSMHS

SEQ ID NO: 123688 - protein, 58 aa, Oryza sativa
  Clone ID: PAT_MRT4530_26499C.1.pep
LFTICWGFYIPSLSNNKKKQNKSNTFVRTAEREIFQNISPLHQHLKEKFYHNFAQLNL

SEQ ID NO: 123689 - protein, 104 aa, Oryza sativa
  Clone ID: PAT_MRT4530_2649C.1.pep
MSSSLNYAVHLHRILPANNLFRLLLLIPTAQTSPGFGRGTDHAIGSFQLLLMDDAFDLIFVDNSTGSLAPSSRHRSSWKSRKQFGKKWRRRWRLELRLGVHLRR

SEQ ID NO: 123690 - protein, 498 aa, Oryza sativa
  unsure (1)..(498): unsure at all Xaa locations
  Clone ID: PAT_MRT4530_264C.1.pep
MYTYLRLRLGVAAAEDAPAEQRDEEHGEREREGEVAAVVVQDGGGALQAGAVHDVLGDVEDAGYPERAEEEVERGREGEEAAAGRRLHGLPPRSGGGGGVGGLALEESEPCASPRPVPPAPAPNPHLVVVVVAAPRRCRCGGRTRAASPPPLDPPPPLLPTAELAPERGGEQPASSPPPDTPPPLLPAAELAPERGGEQPASSPPPDTPPPLLPAADLTPERGGXSRRGEGRGEENRATAAVGGGCGRCGASTDDESFLERASPPPSPPPPDAAPVVAQQGGATQACAARGGVGDVEGAGHPERAEEGVERREAAXPAEEAPPPQPWRRPCRTPAGAPRGGWRWPWRRGGGGRGRGVAPPLQPSSLRPPPSAILPPAPLSPSASHLSPGEGGGAWSAHIEQWRGRRAPRDPDQAAAAPSLLVGGIDGLRPVWIDGLRCRCAGEKLRSWGPQRGPRRREPTFSCIDPFSSGASSCSSKPTTAKQTEKSANRTTRPRPPS

SEQ ID NO: 123691 - protein, 69 aa, Oryza sativa
  Clone ID: PAT_MRT4530_26500C.1.pep
FFPVCHNSASRHSFRSIGCPAYDTFTCSYPKRCPRCMCISCSSSFLEMLSKPVLQIRQPRGNPDRCLRT

SEQ ID NO: 123692 - protein, 75 aa, Oryza sativa
  Clone ID: PAT_MRT4530_26501C.1.pep
EATSSKQKLTLGATKCTTELLLIYLEPQELFHPEPPKCSTGTCPAEERILKNTSSSCCHCEPTTEDIYNAETRYH

SEQ ID NO: 123693 - protein, 50 aa, Oryza sativa
  Clone ID: PAT_MRT4530_26502C.1.pep
MLVPSWEMQALVKENVRMVTDQEAWRSRGIAMQDVEGCTVAGGVVLSLRP

SEQ ID NO: 123694 - protein, 243 aa, Oryza sativa
  Clone ID: PAT_MRT4530_26503C.1.pep
MSCGGAGQSGWLLEYGLVEEEIQGSDFIYMVDDPAAVSSVLLGFDVPRKEDGSGGQDNSASKKRSRPESSAPPGTKACREKLRRDRLNERFNELSAILEPGKPPRADKVSILSDAARLLSQLRAEAQKLKSSNESLQDSIKSLKAEKSELRDEKTRLKAERERLEQMLKGVGAATPAAPAPFVPHHAAAVAAAPAYHPAAFAQAGGKYVPYATSYAPPAAFWQWIPPTSLDTSKDPVMWPPVA

SEQ ID NO: 123695 - protein, 65 aa, Oryza sativa
  Clone ID: PAT_MRT4530_26504C.1.pep
TKRYGPKFFFGSINKGGPLLGHEHKTFPGGPPPGVGPSNFLNPPGILKPPGKTGGVYGALETFIF

SEQ ID NO: 123696 - protein, 135 aa, Oryza sativa
  unsure (1)..(135): unsure at all Xaa locations
  Clone ID: PAT_MRT4530_26505C.1.pep
FFLVRQELVSTHGYXNMYTQGINTIRRIATFYLFYFILSSDGTWHLTWGYVXLRLRGKSNXSVGLGNSIVYVGVVQVCIXVHSISWIALVWMIYLPTYLSYVSVNIVLAYQFSSIGCFSFXGFCQYRLNRVARLD

SEQ ID NO: 123697 - protein, 80 aa, Oryza sativa
  Clone ID: PAT_MRT4530_26506C.1.pep
QGSNRSTTYIGSCRLAAHPNRIYIIYSSTLYMFLQESKTWSLFSINSTWCMKQIHHYVGQLESRVHLSVQAAPQIEHCIP

SEQ ID NO: 123698 - protein, 139 aa, Oryza sativa
  unsure (1)..(139): unsure at all Xaa locations
  Clone ID: PAT_MRT4530_26507C.1.pep
QGLVSTHGYXNMYTRGLCNLSPRSIQFGASPXFYLFYFILSSGGTWHLTRGCIGVRSPAKGXVQCSVGPGNCIVYVGVVQGCIXVHSTSWITLVWIIYLPSYLSYVYVNLVLASQFSSIGCLSLXGFRRYRLNRLAILD

SEQ ID NO: 123699 - protein, 104 aa, Oryza sativa
  unsure (1)..(104): unsure at all Xaa locations
  Clone ID: PAT_MRT4530_26508C.1.pep
FYFILSSSGTWHLTRGCIGLRSPEKGXVQCFVGPGNCLIYVGIVQGCIXVHSTSWIALVWMIYLPTYLSYVSINLVLAYQFSSIGCFSFXGFCRYRLNRVARLD

SEQ ID NO: 123700 - protein, 169 aa, Oryza sativa
  unsure (1)..(169): unsure at all Xaa locations
  Clone ID: PAT_MRT4530_26509C.1.pep
LQSSFASARIYHCSISPESIPRLSESFFLVLQGLVSTHGYXNMYTRGHCNLWLRSIQFGVSPXFYLFYFILSSGGTWHLMQGCIGVRSPAKGXVQCSAGPGNCIVYVGVVXAASVHSTCWIALVWMIYLPTYLSYVSVNLVLAYQFSSIGCFSFXGLCRYQLNRVARLD

SEQ ID NO: 123701 - protein, 252 aa, Oryza sativa
  Clone ID: PAT_MRT4530_2650C.1.pep
MDLTRRRRRRQPAPGAMPKFDAINDSGANPEYNLDEPTMEEKLATLNLLNGGGDGTAGEATQEQPLPVVMPPSADSVHVLLKQALRADDHASLLNCLYNKDHKVIVNSISLLTPADAVKLLKFFILLMQSRGAVLVSLLPWLQSLLSQHMSSIVSQESSLLLLNSLYHLIDARTSTFKSSLQLSTCLDYLFSEIDDDGSGEEEGSPPIIYEDKDTDDEESEVDDMETSGEGEDLGGVTDASEHSDGSEVMSD

SEQ ID NO: 123702 - protein, 213 aa, Oryza sativa
  Clone ID: PAT_MRT4530_26510C.1.pep
MAMAAPFIAMASNMQGVVSVDGNAEKRRRTSSDALQRTVSDVSYELHHHVGAKGTTMVDDAAAAEQKQQLDDIAEVEDARCECCGMSEECTPEYIRGVRARFAGRLVCGLCAEAVAEEAARRGGAGGVEAALRAHTAVCKRFNGFGRTHPVLFQAEAMREILRKRSKLGPRSRSSINPREARQAGAAGGGGIARSSSCLPFITDEFSQRVNIN

SEQ ID NO: 123703 - protein, 171 aa, Oryza sativa
  unsure (1)..(171): unsure at all Xaa locations
  Clone ID: PAT_MRT4530_26511C.1.pep
NKAGCLRSPRPTPTAPLAAGRLPAAAGRFFLIRQGLVSTHGYXNMYTRGLCNLSPRSIQFGASPXFYLFYFILRSGRTWHPTRGCIXLRSPAKGXSLXSAGPGNCIVYVGVVQGXSVHSTSWIALVWMIYLPTYLSYVSVNLILAYQFSSIGCFSFXGFCRYRLNRVARLD

SEQ ID NO: 123704 - protein, 136 aa, Oryza sativa
  unsure (1)..(136): unsure at all Xaa locations
  Clone ID: PAT_MRT4530_26512C.1.pep
GLVSTHGYKYVHLGXCNLSLRSIQFDASPPFLLLLLFLRSGGTWHPMQGCIVFDLWRRDKSNXSAGPGNCIVYIGVVQGCIXVHSTSWIALVWMIYLPTYLSYVYVNLVLAYQFSSIGCFSFXGFCRYRLNLICLC

SEQ ID NO: 123705 - protein, 146 aa, Oryza sativa
  unsure (1)..(146): unsure at all Xaa locations
  Clone ID: PAT_MRT4530_26513C.1.pep
ESFFLVLQGLVSTHGYXNMYTRGHCNLSLRSIQFGSSPHFXLFYFILSSGGTWHLTRGCIGVXSPAKGXVQCSAGPGNCIIYVGVVQCCIXVHSTSWIALIWMVYLPTYLSYVSVNLVLAYQFSSIGCFSFXGFCRYQLNCVARLD

SEQ ID NO: 123706 - protein, 152 aa, Oryza sativa
  unsure (1)..(152): unsure at all Xaa locations
  Clone ID: PAT_MRT4530_26514C.1.pep
LPRTDRESFFLVLQGLVSTHGYXNMYTQSHCKLSSRSLQFGASPXFYLFYFILSSGGTWHLTRGCIGVRSPAKXVSLXSVGPGNCIVYVVVVQGCIXVHSTSWIALVWMIYLPTYLSYVSVNLVLAYQFSSIGCSSFXGFCRYRLNRVARLD

SEQ ID NO: 123707 - protein, 290 aa, Oryza sativa
  unsure (1)..(290): unsure at all Xaa locations
  Clone ID: PAT_MRT4530_26515C.1.pep
GSDSGGAVCGGPGPRTGKGXGAPCGADVAPTRRPRGSHAGGRTDGPGRSDGRGXRVAGAHGRLXPARRPWRTAARLXRSGGTRRRXPAAEGGGVAATRTAIAAAKRLGGGAAAKRHGXEREKGEEGPHRXRSTTASDGGRWRRRDELWDHLRDQKGXVREGKGNHGWLRRRPWRXHRRAVRTGFRRRIPTEEGWTAWPSGLRTRRRRRRGSARRLAMASGYRSGGSDGGEEGDGARAIEATGELGEMGKKREGMAVXLNRGGGVRTWPGEAGIAGRRGGVGEEREAGFVI

SEQ ID NO: 123708 - protein, 141 aa, Oryza sativa
  unsure (1)..(141): unsure at all Xaa locations
  Clone ID: PAT_MRT4530_26516C.1.pep
SFLSDKDFYTHGYMYTRGLCNLSLRSIQFGASRPFLLLLLFLRSGGIWNPTRGCIXLRSPAKGXVQCSTGPGNCIIYVGVVQGCIXVHSTSRITLVWIIYLPGYLSYVYVNLVLASQFSSIGCLSLXGFYRYRLNHLARLD

SEQ ID NO: 123709 - protein, 104 aa, Oryza sativa
  unsure (1)..(104): unsure at all Xaa locations
  Clone ID: PAT_MRT4530_26517C.1.pep
PAAXTTICKHNERNPELVGTLVHCVRHGHEQGQAPWRRRRRPAEAAAVADPTPLFLHHHIGHGIRHQCXRGGRERRRGAPSTASRXRQRRXSAEAQDRWQCPAS

SEQ ID NO: 123710 - protein, 59 aa, Oryza sativa
  Clone ID: PAT_MRT4530_26518C.1.pep
MAVCTEIVVTVVLLVVIVIVIMGPHHLIALANPPLVVILMEVDVAWRTMTVALAAGTPS

SEQ ID NO: 123711 - protein, 65 aa, Oryza sativa
  Clone ID: PAT_MRT4530_26519C.1.pep
TSFAMARNRSQSSRLSSMAGPAAAAAAVPAGQQEPRGGRRHVNGARHRRRRRRRARVDFEFQVSG

SEQ ID NO: 123712 - protein, 56 aa, Oryza sativa
  Clone ID: PAT_MRT4530_2651C.1.pep
MGEGPTLWCHGVGPRRVSLGPTTTHNTSTEPTPAGPVPCPCRAVALPRPAQHSSNT

SEQ ID NO: 123713 - protein, 46 aa, Oryza sativa
  Clone ID: PAT_MRT4530_26520C.1.pep
LRRRMQAAVGWEPPELVCPPFFFFFGQPMILYSFILDSNNKCAKPI

SEQ ID NO: 123714 - protein, 39 aa, Oryza sativa
  Clone ID: PAT_MRT4530_26521C.1.pep
MVVNLVSNGSFTKANHGSSAPAVAVREDPTIADVVVART

SEQ ID NO: 123715 - protein, 348 aa, Oryza sativa
  Clone ID: PAT_MRT4530_26522C.1.pep
MLPRRSGGSAERRSADGAAAVGLRVRAAWEHLILSTTHCPHSPLSLSHFPLATSPPLPDLAEGRGVGSGAGRGGGGGSVGVGAAGWEVWLPSLSSPSTLLSSAAGHDDDEADCDDDAVWIRRRLDSGRGGGSAAGGGVGGGAAEQELYSPSAAGRNNNNDDDDATAAWIQGGKGGHHRPEGEAGGAAGGRVYLPPAKMIFVGGPLGRLRKSYIFASLCVQAGRAGSAREKKGVPVPLLTLPPPHHRGWIRRCQVSTVPDPPPPSLPTAATKSLDLHHLIIPSRGQPAVDPRGRQRGPSAVTVADLLRRHRIRPYRGQLFVLCVAVTVPPLPALAEPPRHCGRLAAPLP

SEQ ID NO: 123716 - protein, 100 aa, Oryza sativa
  unsure (1)..(100): unsure at all Xaa locations
  Clone ID: PAT_MRT4530_26523C.1.pep
VAVDRAPYXLRKVDLEAYPGYYQMLASLQDKILCHFTIPKLGNEETKLLXTASGDEYMPTYEDNDSNLMLPGDVPWKMKGETRPRLRLKKSSEADNLAPR

SEQ ID NO: 123717 - protein, 74 aa, Oryza sativa
  Clone ID: PAT_MRT4530_26524C.1.pep
TRGRPTRPRLLFTTTAVTHGHQDKGRGGAHIGSHGEELSSASAPPSLMLGADTEGTASIDDTMAADPRLGRGAR

SEQ ID NO: 123718 - protein, 258 aa, Oryza sativa
  Clone ID: PAT_MRT4530_26525C.1.pep
MPELLALFSGRTEQIVLAEFRGLIDRSSSTVLQLFMELNNLIKSQRLVMVDIGVHHITRHITEYMRVLFEKKSTIYQMLDSKPNAFGELVMGLVSSLESMLEMNSRSLVLQGQKQVFLLNNLHFMIEQVKRCIDSGLILGESCLVQREDQLDQLITAYIEASWDPVISSFEKRTQVAIILWPHQLFDKFNSSFERIYSVQKTWKVTNPNVRLKLREAIIQKLIPVYQMQMGNQSEKKQMSARYSVEQLESQLLEMFEG

SEQ ID NO: 123719 - protein, 421 aa, Oryza sativa
  Clone ID: PAT_MRT4530_26526C.1.pep
MPICPPSSESSPAPGLGGRALIFHGLALGAAAAAAAAAAYLYRRPGGFRGRAVGIIPARFASSRFEGKPLAPILGKPMIQVGPDSRPTAYATRLICAFASRVETGSESASGKLVLRNSSEEMESVMKTREMSSIRVFSLRFAAAAAVPVASSSSGCNFTTVVGSSSSSSDLLSFQLDSIIGNCSFRYVRHGQTLAHILGKPMFQRSWERVMFASFLGDVVVATDDERIAECCRGFGADVIMTSESCRNGSERCCEALQKLNKHYDIVVNIQGDEPLIEPEIIDGVVMALQRAPDAVFSTAVTALKPEDASDTNRVKCVLDNQGYAIYFSRGLIPFNKSGKVNPQFPYLLHLGIAGFDSKFLKIYPELPPTPLQLEEDLEQLKVLENGYRMKVIKVDHDAHGVDAPEDVEKIEALMRARNIQ

SEQ ID NO: 123720 - protein, 91 aa, Oryza sativa
  unsure (1)..(91): unsure at all Xaa locations
  Clone ID: PAT_MRT4530_26527C.1.pep
SLTPLXHSPLAPPRQELVPSLASPTKTTRRSVVVVVWIGVHPWRGSSRRPEEPRTTSSTTSSASPPPPQTAPAALEDLARVTTTPSRSCLA

SEQ ID NO: 123721 - protein, 224 aa, Oryza sativa
  Clone ID: PAT_MRT4530_26528C.1.pep
MRMEEATIYRPSMTAASTIDGAPPSSLCVGDGSSLRALQPLSSNHDAAPPHADATAEPRPLSGQRRRSSAHRCGCLHGAAVASSSKPWMQTLIWTTRRSCFVVVNDVLQQALHPSHPLQPLCLRRQHHERASGHLKSVIVLMGCGYQELQVPCAHGDGDGGDEGWHASLSSYVFAAFLHLVQPSSIELPWVQPLASHNERERERGGEDKRKDVTSTKTTINTIE

SEQ ID NO: 123722 - protein, 58 aa, Oryza sativa
  unsure (1)..(58): unsure at all Xaa locations
  Clone ID: PAT_MRT4530_26529C.1.pep
TNDSFLFFSFIMIHANVTIISSPNHFHQQVGLYRSICRPLWXQHDRHFDWPTDMAKRR

SEQ ID NO: 123723 - protein, 551 aa, Oryza sativa
  Clone ID: PAT_MRT4530_2652C.1.pep
MAPFAASGSPGAQAWPLGSREAAAAWQPAGNHRRRGWEAMLRPRCASASPLSLCPCAVRSRESGSGGRQGEDRLGRRESHSRGPCCMVEAINPLWRWFPLSMICILRNDPKAAPHVHIGHTKIISDEPWHLGTGHFAISEETRIKISMGVRRGWNLRLQKLMIQDGCFVEWRDMIADAARKGFAGGISLQWNSYKILTEQMRQEWLEKVQKRRSMPRPTGNRRAPKSPEQRRKIAEAIAAKWLDKEYRERVCSGIASYHGTSSGTKVPRKPRSAREPGSKRDTVKKKPIQSRSAGLEDACGTTPTVKRKKSATPYKDPMAGEKLEMITKIRAQRAALEIEKKEAIKRARSLIAEAEKAANALETVASTSPFAQASLIEARKLVTEARLSLQHVDDEGPADSASDDASQDSGASDLHNHDMANQNDVIKQENKPVNGMELPPSNVNGRDFYFDVSTLTETDHLRDYQRIENSMERAYLLPSASSAIQDVNENHRMKDFNAHQLMVNDESITIDQIASEVAEIYPDEPQEDDTLPVQKSKMRWVRGRLVEVEE

SEQ ID NO: 123724 - protein, 77 aa, Oryza sativa
  unsure (1)..(77): unsure at all Xaa locations
  Clone ID: PAT_MRT4530_26530C.1.pep
RLLXANHEVSSELTLPGGGFVQYXSMCAGRGRGSAGRSRGSSGGHSSGMSMGSRELLXDAGHLVDAGSCRRDTGARR

SEQ ID NO: 123725 - protein, 138 aa, Oryza sativa
  Clone ID: PAT_MRT4530_26531C.1.pep
MSSAGGGGGRGKSKGSKSVSRSSKAGLQFPVGRIARYLKAGKYAERVGAGAPVYLSAVLEYLAAEVLELAGNAARDNKKNRIVPRHIQLAVRNDEELSRLLGAVTIAAGGVLPNIHQTLLPKKGGKDKADIGSASQEF

SEQ ID NO: 123726 - protein, 157 aa, Oryza sativa
  Clone ID: PAT_MRT4530_26532C.1.pep
FGQNLSGQNGFALLLTGPNMGGKSTIMRATCLAIVLAQLGCYVPCQSCELTLADAIFTRIGAMDRIMSGESTFLVECTETASILENATEDSLVLLDELGRGTSTFDGYAIAYAVFRHLVEAVRCRLLFATDYHPLTKEFASHPHVTLQHMACMLKPR

SEQ ID NO: 123727 - protein, 1244 aa, Oryza sativa
  Clone ID: PAT_MRT4530_26533C.1.pep
MQPRRRQQQQQSILSFLQKKPAAAAGEEGATPERPPRPPAASVAGIMERLVRPPRQQQQGRDQDASQARHVEQRALPVKNQTTSNECSSALFLESCNAGDNKAAMLIAEEGSNMTPLQEPLKSLWPSKDDFVRASTLSPELGLYQNLPPHCPKKLPFESSNNNCIGANSSFEEFDVQTPQDTSKTVFWRSSRGADTPLTESDSDQTPLQHPSKFSFVSPNGEYVRGATLFALDSNYTPRRESSEKLSSGPSDLPYIKATKLFTEFDSNGTPSQNHLKKLSSVPKNDKRIGAGAELFSEFDPSPLKPETPVMRAVIPRLKRVQEDQRVTTNDSCSPFWGPNKKVKPAQCSPVENKVHDEMAESARSKFEWLNPSNIRDANRRRLADPLYDKTTLFIPPDALRKMSTSQKQYWNIKCKYMDVVLFFKVGKFYELYEVDAEIGQKELDWKMTISGVGKCRQVGISESGIDVAVEKLLARGYKVGRIEQMESADQAKSRGSNSVILRKLVHVSTPSTVGDSNIGADAVHLLSLKEITLASNGSRVYGFAFLDYAALKIWVGSVHDDDTFAALGALLVQVSPKEIIYETSGLSKETHRLIKKYASAGSVKMQLTPLYGLYFSDVSEIQTLIDSRGYFKASTSSWLSALNSSVNKDAVICALGGLLEDALKNGEVLAYHVYRTCLRMDGQTLVNLEIFSNNFDGGSSGTLYKHLNHCITPCGKRLLRRWICHPLKDIDAINERLDIVEGFIQNCGLGSVTLEHLRKVPDLERLLGRVKSTVGLSSAVLLPFVGEKILKRRIKTFGMLVKGLRVGIDLLDILQRQDHGISALSKAVDIPTLSSLGELIHHFEEAIDDDFPRYQDHSVKDDDANTLAMLVDLLVGKASEWSLVINALSTIDVLRSFAAMALSSFGTTCRPNILLKGKAPVLQMKGLWHPYAFAESVNGLVPNDLSLGQNLSGQNRFALLLTGPNMGGKSTIMRATCLAIVLAQASLFECIIEVASDLQLGCYVPCQSCELTLADAIFTRIGAMDRIMSGESTFLVECTETASILENATEDSLVLLDELGRGTSTFDGYAIAYALMGFMTLLHLSIKVFRHLVEAVRCRLLFATHYHPLTKEFASHPHVTLQHMACMLKPRNGGDGGEKELTFLYRLTSGACPESYGLQVATMAGLPRSIVERASAAGEMMRSKIAGNFRSSEERAEFSTLHEEWVRTIVAIGGVKDAHLDEDTMDTLFCVFHELKAHFRKRR

SEQ ID NO: 123728 - protein, 50 aa, Oryza sativa
  Clone ID: PAT_MRT4530_26534C.1.pep
LRGSNRAYALHSSIASRVNLKDALRCCCILPSMLHNMMFELFRTHVRSRE

SEQ ID NO: 123729 - protein, 143 aa, Oryza sativa
  Clone ID: PAT_MRT4530_26535C.1.pep
MADGGGAGAPPNVRGKSRGSERKPGGGAASAAGEEEGVGPESVAGEASWSGYEDDYPMARDRGHPMGAVFSLPPAPAAPLPPRPMECSSTLRRNASSFPAKNSSGHTGPDATTFAVVLLSRVYDFDEIRSDFAKFRHSDEARK

SEQ ID NO: 123730 - protein, 250 aa, Oryza sativa
  unsure (1)..(250): unsure at all Xaa locations
  Clone ID: PAT_MRT4530_26536C.1.pep
GGSILTFYALWEASVFAKHWLPFCKXYNIEPRPPAAFFVESEGHHNLCTPKEWSFIKILIDGKSQNVVDDDGNVLPSLVYMAREKRPQYHHNFKSWAMNALICNNPIILNVDCDMYSNNSDSIRVPSELYNMTKNNIYGNSLLVLNEACEGHPSIPRGDTLKGCWNGQRMWMVRRITSYLYDLIDTIRKLLGLSKMTFAVTAKVILCGMIVITSIPIYEAMFLRKDKGRIPSSVTLASLGFVMLAFLIKY

SEQ ID NO: 123731 - protein, 150 aa, Oryza sativa
  unsure (1)..(150): unsure at all Xaa locations
  Clone ID: PAT_MRT4530_26537C.1.pep
DILINRYNCLPGPLSVHGNHLEVHXLEPDVVYKSYCRNRLYRLTXPNSDLADPNHSRSGLRPIPALFPNSISASDLALIQSSFSLVGTLSCLVTKDFHWLLPGSWLRKCCTYSPPPCLISQRSSVSLHCACRQPPCRFSYRTTCANIHFR

SEQ ID NO: 123732 - protein, 269 aa, Oryza sativa
  unsure (1)..(269): unsure at all Xaa locations
  Clone ID: PAT_MRT4530_26538C.1.pep
GGSILTFYALWEASVFAKHWLPFCKXYNIEPRPPAAFFVESEGHHNLCTPKEWSFIKILIDGKSQNVVDDDGNVLPSLVYMAREKRPQYHHNFKSWAMNALICNNPIILNVDCDMYSNNSDSIRGTLCFFLDEEMGHKIGFVQYPQNYNNMTKNNIYGNSLLVLNEACEGHPSIPRGDTLKGCWNGQRMWMVRRITSYLYDLIDTIRKLLGLSKMTFAVTAKVILCGMIVITSIPIYEAMFLRKDKGRIPSSVTLASLGFVMLAFLIKY

SEQ ID NO: 123733 - protein, 231 aa, Oryza sativa
  Clone ID: PAT_MRT4530_26539C.1.pep
MVGASVARLSLLDATLLARLRDGEARFELLEDSAAAAAASPAPAPVWPGLSCFSRVATSLRGGWSGALNKVEHYGVQRVTGDGRCMFRALVKGMAKNKGIPLTSREEVQDADDLRMAVKEVICDDETERQKYEEAVIAITVDESLRRYCHRIRRSDFWGGESELLVLSKLCRQPIIIYIPEREYHGRGNGFIPIAEYGLEFSKDSKQWKKKVPFFACVSADSFDATPSIPN

SEQ ID NO: 123734 - protein, 56 aa, Oryza sativa
  Clone ID: PAT_MRT4530_2653C.1.pep
FFFFFILWQYVISIFCRTIGVHLHMTFFIIPRGRSERGTRIYVMVGKPLKLWTNSQ

SEQ ID NO: 123735 - protein, 41 aa, Oryza sativa
  unsure (1)..(41): unsure at all Xaa locations
  Clone ID: PAT_MRT4530_26540C.1.pep
GTGXXFXGVFNCVSVYSYVLSXXFSRXXSXXTLVQKKKKKK

SEQ ID NO: 123736 - protein, 3042 aa, Oryza sativa
  Clone ID: PAT_MRT4530_26541C.1.pep
MSTSREVDDGPAVLQLYRWKSSQPHMPLVFVFPACRNGDGPNPHAESPKGDLILSMTNVDQSQVESPSLSDSCSPVVFDCFSSIPRVKSLAWGQCYNASSQLEDSIFNEVLVVSDDDSITLHGFCHSYKSTLTDNSKLDTGDLHGEWKEWRPTQCSVPEDDEAGTKNSFRSFLTTISGSVSDGKYQAKFPLKSSLPHSAEVVSFSIYDITLSFIKFWSSNYPSKTWMQNDTKSQQGFLGHVPTTETSCNCQWECLKVLPSSSGYLIGLVLIRNEPVSCEVHQRNMKDILVVVIELNQWGIQWNFVADLQNVYDGAVPNQQWVDFQLSDDFLACLNSGGFVVIWNVRTCNIAASFSVLERCRTDIDIPMGSITPTVKTSDGENIYIGNHARRMFKRLVLASYSLVLAVVDEVGVIYLFYAKDILDFKTSMHGNFHPPSMFYRGDSFAAWEAAGHDIGSVTFCCHRSVQQLVYDFSERDNPGVVRPRKRRKHCSSNENQVDSWPSGFSTTTPMKDGLAYPDTMAVSNPLRRVILPPCRLQENIISLSPFGLTRIFKSHNADGNKHFRIVHTNFLMASLHLDERDIDASFLKRSSFQKDSTFTGECVLCSFQGYVYLITQDSLSVVLPSISVSSFSSHNNGIKFWQPTSAGGSACDALNLSSVNRPETRWKPWQIEVLDRALLYEGPAFADRLCWENGWDLKFSRLRWLQLALHYTKISDLEQLMVLAVRFATRMIKCYGLLKQNKDAPDNSVKLHEMAFLLGVIRSIQSRISAKNQNSIRMGDDKNSSKIGAEVSLNTSLPIVVVDGVSAGQSGGIESRDRQESTPAMFELVSGSNGQLALTPVESSISATMHHAIDTDQVVIPSTQGNIKDMMNRWETNNLDLRTVVKEALQSGRLPLAVLQLQLLRQRESFSNDPEDVFSEVHEIGRSIIYDLLMKGETGLAVATLERLGDDIESDLRQLMQGTVRRLLRRQIAEEMKKRGYMSSNEWKMLEIISLIEQFYPSSSFWDTYLGRENVIHDAAKIVTLPGEDKPVLVLDIHNHCPIECGDVDGAVIGSWANVNDYTNLKEFSESILSDGYWACAAIWSDAWDQRTVDRIILDQPCHAHAYAHFSWESQFEYFVAHNDVLEVCKLLDSIPDSVLLEGILRVNVDNSQATYNTLSDVATHGYKMYLFDSEEIEPVCMEIPHVKVFRSLCNHESTSWMRMIMLQELAKKHIFMKEYWQSTTEIIPILARAGMLVNTSELCSDVLHGAYHQDCDGALHKLVLRFCVQYNTPNLLDLYLDYCNLALEKDSIPLLKEATGDCKWAQWLLFSRVKGYEYEASFCNALWNLSQEMVRHNNLAAIEIDEILYTVDDMAERIGEMSALATLMYASTPIQKSICTGSVNRNRGVSSQCTLENLSPHLQQFPTLWKTLLSSCFGQDGYGCLNCSPTNAGGDTSLLQMLPCWFPKSIRRLVQLFEQGPFGMQLLSNAPSSEELFTHSVTDYIYNTAGYSEANALSLEASIQKSVEEELYSSLEEKDLRVEHHLHRGRALAAFRHLLGKRASQLKSANASQVISVQSSVQADVQLILAPLSQTERPILLSVAPLAITNFEDSTLVASCTFLLELCGLCANMLRLDIAALQRISSYYKSFQQNKQCDLSSPRSPGLHVLSHGADLAPTLARTLAEDYIQSDHLHVLEQKQPSKAPKREHSSQPLKAILHHLEKASLPVLEEGRTCGFWLLNGIGDASLYRTQQNEASQHWNLVTEFCQAHHLPLSTKYLALLANDNDWVGFLTEAQVSGFPIEVVIEVAAKEIRDSRLRTHILTILKNMMSARRKSSSNVSSGSDSSFFAVDGDNSMELFSVLAVCEKQKNPGEALLNKAKQMQWSLLAMIASCFSDVTPLSCLSVWLDITASREMSLIKVDDISSKIAKNVGSAVEATNKLPSMSRNVEYRYNRKNPKRRRFLEASQESFTSGFSSCGPSPTATPNFPNFDVQQKILKPISEETKIPVDIDERFASLSSMVAVLCEQQLFLPLLRAFEMFLPSCSLLPFIRSLQAFCQMRLSEASAHLASFSARLKDETSHAQLNSSKEESAMAGWVAVTVVKAADAVLSTCPSIYEKRCLLQLLAVVDFSDGGSSAAYFRRGYWKIILAEPSVCKDGDTYKWNDSMDDASLLASLEKDGRWEEARTWARQLESSDVAWESTFDHVTESQAEAMVAEWKEFLWDIPQERAALWSHCQSLFMKYSLPPLQAGSFFLKHAEAVGEEIPARELHEILLLSLQWLSGTMTNSSPVYPLHLLRDIETRVWLLAVESESQCKADGEYAPSSVTQNLATGNNTNIIEQTADVITKIDNSMSSPRMRITERNGIRDNTTPSFHQHLQLFESNGEGVHNTRARRRSKTNTLLRRVAKDSVESSINDSGDNSNSFNSSKIAGQARSLLSEEEFAKMEVSLSGWEQNVRPVDMEKAVLSLLEFGQITAATQLQQKLSPSYVPEELVLVDIALRVANNSSNGEISLSCFDPEALSILQSLGSNTTDPSEIHSFYEYNSAPVMEKLAMKCGEGRGRALVRRIAAVVQTAKVLGLPFSEAFEKQPIELLQLLSLKAQDSFDEAKFLVETHTMPASSIARILADSFLKGLLAAHRGGYLDSQKEEGPAPLLWRSSDFLKWAKLCPSEPEIGHALMRLVMTGHEVPHACEVVELLILSYHFYMSSSCLDGVDVLVTFAANRVESYVSEGDFSCLARLITGVSNFHSLSFILSILIENGQLELLLQKYSATDSATGAPASVRGFRMAVITSLKHFIPSDDDALSLVYKHFDMKHEAASLLESRAEQYMNSWLSRYDKERRNDELLEAMHHLVEMAEVLSTIDAGQRTHRACARASLLSLQIRIPDLLWIGLSETNARRIFVEQSRFQEALIVAEAYNINQPMEWAPVFWNQMLKPDLIEQFVAEFVLVLPLQPPMLLELARFYRAEVAARGDQSHFSVWLSPGGLPAEWVKHLGRSFRSLLRRTRDMRLRLQLATLATGFSDVLDACNSVLDKVPENAGPLILRKGHGGTYLPLM

SEQ ID NO: 123737 - protein, 230 aa, Oryza sativa
  Clone ID: PAT_MRT4530_26542C.1.pep
EKKKKALPSFLYLVFIVLLPWGVSFSFNKCLELWIKNWWNTRQSQTLLTAIQEKRVLERFMELEDLFILDEMIKEKPNTHVQNPPIGIRKEIIQLAKIDNEGHLHIILHFSTNIICLAILSGSFFLGKEELVILNSWVQEFFYNLNDSVKAFFILLVTDFFVGFHSTRGWELLIRWVYNDLGWVPNELIFTIFVCSFPVILDTCLKFWVFFCLNRLSPSLVVIYHSISEA

SEQ ID NO: 123738 - protein, 52 aa, Oryza sativa
  Clone ID: PAT_MRT4530_26543C.1.pep
MENNYTLVDHIVLYAILTKPPRNLRGFRLGTPRADKALKVRLQGFVADSTTT

SEQ ID NO: 123739 - protein, 84 aa, Oryza sativa
  Clone ID: PAT_MRT4530_26544C.1.pep
STVSFCKGPLSNAAVVRCSLAFSACLSLSEIPVFLFLKFEWKVYMCPTCNICLIWMAHFSPKNGKNLCLWIISLVAKLMKCFHS

SEQ ID NO: 123740 - protein, 343 aa, Oryza sativa
  Clone ID: PAT_MRT4530_26545C.1.pep
MATSTPPPLPCLVVDNGETAATLYGVSDGEHRPCEAEELRRNRCWATSHGWVLCCDPATLSTFLWNPTGGDDDGGGGGGKIALPPFTQPPPPPNSQCALSREPTDAGAGRFTVVIVEPSGSYVLWYCHVGGGGGGSSSSPSPAAGWTRHEYDVGGTNVRVAGGHRFVRRSVAGLTACRGRFYCFHTATDYGVLDFSPAPVFGTVPMRAVDMAEKVAAGEAMAKASVHTLEIGGELYMAYIFFHGDDGSRVVEVGVYRMDFRRRRAVRVRSVGDRAIIAGSNIGGWCPAGGETGLRPNCVYWTSPYDKCLHVCDIGANARKLREPFKGLAKLPHRSFWIIPVHK

SEQ ID NO: 123741 - protein, 116 aa, Oryza sativa
  unsure (1)..(116): unsure at all Xaa locations
  Clone ID: PAT_MRT4530_26546C.1.pep
FFFFFXWXXFFLKTYPSIFHTQLVHWLXPYTHNNKNSTTTGDCGTGTHTXKAFLFRSACIXSLVTRHSSSYPTLLVTHLILPVAIGCRQSWGIYCHFMLAXGHPIPGVQASILRGA

SEQ ID NO: 123742 - protein, 108 aa, Oryza sativa
  Clone ID: PAT_MRT4530_26547C.1.pep
MTNTGDNSNTGDKEKEAPVNTNGGNTASNSSGEPFSGYNDLLLPFVLRFLLLSVAMLLRCLVYVDAYFILSTLILYTFSTATRSSQIANIKICRIMTKFPTYSWTVWE

SEQ ID NO: 123743 - protein, 150 aa, Oryza sativa
  unsure (1)..(150): unsure at all Xaa locations
  Clone ID: PAT_MRT4530_26548C.1.pep
MVPLETRTVPNQVAAMKALKDSLKIPASVRWNGDPCAPRTWDAWEGVTCLRKDKGLVITQLDLASQGLKGYITDEISHLTDLXNLSYNSLTGSLPPGLGQPSLATLDLSSNQFTGGIPGTIGSSKLQTALLNNNQXDGQVPERLYFIGVH

SEQ ID NO: 123744 - protein, 205 aa, Oryza sativa
  Clone ID: PAT_MRT4530_26549C.1.pep
MSAIVLGFEISMPVMIAPSAMQKMAHPDGEYATAMAASAGGTIMMQPYRYRNVVEQFVRRAERAGFKAIALTVDTPWLGRREADIKNRRLDFNYGGLPADSVAAEEEAAVVERRHGRREMELGGRWQWGRGQDEEEEKRGEEEYTAAAAAAANGGAMGGREATLVVCISAEAGGGDPYAELWIQEEDARREKKKTTEKGKRGWKK

SEQ ID NO: 123745 - protein, 351 aa, Oryza sativa
  Clone ID: PAT_MRT4530_2654C.1.pep
MASARPPRGTAWCGGCGAYLAVPPGARSVRCALCRAVTRGLISAFAPPPPLTPSAGAAAAASYYPRVSGKKRALLVGISYAATGYELKGTVNDVNCMSFLLRERFAFPADCILVLTQENGDPYRVPTRANLLAAMRWLVEGCSAGDSLVLHFSGHGVQKLDVDGDEADGYDEALCPVDFERAGVILDDEINETIVRPLVAGVKLHAIVDTCHSGTILDLPFLCRLSRTGYWQWENHCRRPELAKGTSGGLAISISGCGDSQTSSDTTAFSGGAATGAMTYSFIKAVETEPGTTYGRLLSAMRATIRGGGGEVGIPGPLGAFFRRVITFSCAQEPQLCASEPFDIYRKPFLL

SEQ ID NO: 123746 - protein, 152 aa, Oryza sativa
  unsure (1)..(152): unsure at all Xaa locations
  Clone ID: PAT_MRT4530_26550C.1.pep
CLDDGCADSISLFIDVAGGGNGSGVAGHARFSVLDHAGSPARRTDDASSEVVDFRTHFSGQRSLITREELERSPDILRDDCFAVRCDLTVMDEHLLTVDLDHEAXLAADADAAAVVPPSDLHRHLAEFLWSKEGADVGIEVGDTTFHAHRWV

SEQ ID NO: 123747 - protein, 246 aa, Oryza sativa
  Clone ID: PAT_MRT4530_26551C.1.pep
MEPLVPGATRAALSEFVATAVFVFAAEGSVYGLWKMYRDTGTLGGLLVVAVAHALALAAAVAVSRNASGGHVNPAVTFGVLVGRRISFARAALYWAAQLLGAVLAVLLLRLASGGMRPMGFTLGHRIHERHALLLEVVMTFGLVYTVYATAVDRRSGGGDIAPLAIGLVAGANILAGGPFDGAAMNPARAFGPALVGWNWRHHWVYWLGPLIGAGMAGALYEFVMAEQPEPPAAADTRLPVAAEDY

SEQ ID NO: 123748 - protein, 83 aa, Oryza sativa
  Clone ID: PAT_MRT4530_26552C.1.pep
MAKMELLQCPAAALLRPVEVEIPACCICWKWSRHVRQWRRRFPTTAGLEPFRLAAVAAMLCPMEVQILACRVRQRWGRHVRRH

SEQ ID NO: 123749 - protein, 101 aa, Oryza sativa
  Clone ID: PAT_MRT4530_26553C.1.pep
AIALAHKRRGGSGGENVPFRRRGGAGAWCSERETARRGVEGEAVAAARGGDARRGGDFIEEESGRRECFQLVGWRELEGLGTSWPSIGLGFRRRHLGRGRP

SEQ ID NO: 123750 - protein, 388 aa, Oryza sativa
  unsure (1)..(388): unsure at all Xaa locations
  Clone ID: PAT_MRT4530_26554C.1.pep
MNKYIFSRIYLLCLGLLKIQTVSIEPXLLLISPPWLALPLCNFSSRPKLRKRPSQQPSGAFDTWPRRVDDLKTPSSISASPRRVVTPHPPFQCRSNRGRASLLPFSTVSLSPVAKKMMATFVDXATVISSSFAFQNLLSMPSLFXSNFVPFYAAVERERHRAHXALERTTTTAVGFSSSFXPNRTTPSRTLAPPESPRRPLQDSPRTSWIGESRRDIXRHLLHLRPPNGLXSRSTLFLGSPESGWWLSPLACRFPPPSGHPLHRRRCPGLPVPRPSFGEHXQPIEHTCMHPFGYIQTIAXHAPPPENILCSDSPLALLQCPLSDKLYKLCRVRTNRLAVLTVISSMWICIEYRLVFILLNVEXYLQIMLRFENDLLAAMDGNEVHIYT

SEQ ID NO: 123751 - protein, 99 aa, Oryza sativa
  unsure (1)..(99): unsure at all Xaa locations
  Clone ID: PAT_MRT4530_26555C.1.pep
FFLPGVSRGFPFMIGKAPNFSLGNQAPTKGGELFVFIGVFFSERKNRSVCSNCLEPLYAGVTTPWGGGGPLGXXDLDGASVFPGGRXGGPLPCLGGGGV

SEQ ID NO: 123752 - protein, 110 aa, Oryza sativa
  Clone ID: PAT_MRT4530_26556C.1.pep
VRTRLNGYRRGGAATIELPEEGEKGLEKKRSVSDTRVLDNVDKDDTCPEPLKLAPSDELEAFTSSRLFLYKITTSPRVTTSRRRHRLPLHPPPRRLPFGTPSSSAPPPAK

SEQ ID NO: 123753 - protein, 51 aa, Oryza sativa
  Clone ID: PAT_MRT4530_26557C.1.pep
AVLDVVPADMVVNATLAYMAKHGRNSPEEIAAVGEVMHFFHVDYTTVNPSR

SEQ ID NO: 123754 - protein, 298 aa, Oryza sativa
  Clone ID: PAT_MRT4530_26558C.1.pep
MTPSALAHLASASPLPAFSPKPRARPGSAAGPALRRLAVAAPAPRAYFSSSPMPYQPQPQQPAGYSSHQAFGLVPMVIETTSRGERAYDIFSRLLKERIVLIHGPIADETASLVVAQLLFLESENPLKPVHLYINSPGGVVTAGLAIYDTMQYIRCPVTTLCIGQAASMGSLLLAAGARGERRALPNARVMIHQPSGGAQGQATDIAIQAKEILKLRDRLNKIYQKHTGQEIDKIEQCMERDLFMDPEEARDWGLIDEVIENRPASLIPEGATGVDLPHHSAAGVGGRGRDVEEPSAV

SEQ ID NO: 123755 - protein, 159 aa, Oryza sativa
  Clone ID: PAT_MRT4530_26559C.1.pep
HEASCRIRHEGKAFSKMSIQLYNYGEGLMGKVASDKCHKWVFKEPSECEPNIANYWQSSFDALPPEWTDQFASGIQTIAVIQAGHGLLQLGSCKIIPEDLHFVLRMRHMFESLGYQSGFFLSQLFSSSRGTSPSPSSFPLKQRRRRTRGTVARRTCRST

SEQ ID NO: 123756 - protein, 141 aa, Oryza sativa
  Clone ID: PAT_MRT4530_2655C.1.pep
INKRASAGNTQRPRRRWGGACRAIGFVYKEKHRLPCPNPAADAKVHNNIDPASLETLVQEKKDELFRLLLQMDLHNGSCEKSAEENKAILRLLRQFRAETRDNGTLSGADTKNLANRYVLPVSIILSGIIIVAQGHFISHL

SEQ ID NO: 123757 - protein, 114 aa, Oryza sativa
  Clone ID: PAT_MRT4530_26560C.1.pep
MRREGRQRGWVCVYDRALVDPEGKRRVVGAVAAPATVANGGFIRAPRKPTNHSKFTGGRAFRELASGKGACSGGPAASTTGGKGRHKFKHDEIKAYYLELEAGADDAVDELGSL

SEQ ID NO: 123758 - protein, 305 aa, Oryza sativa
  Clone ID: PAT_MRT4530_26561C.1.pep
SRTPWWRRTTSPSPSPSPTPSRPRPRPLAAAAAATQNPRNPRSSQAFPAWGHLRFMRRRELEEMGFVRDDRLTIECVVNVVLDPVVTAGDAPELDHPPSNILGHLAGLLGDKGTADVTLVVRGEEFAAHRAVLAMRSPVFKAALYGPMKESTDANAGRVAIDSVEPAVFRALLHFIYTDTTAAMDDLDDDDDDKAQMIMHLLEAADRYDVERLKLICELMLCKSIAVDTVAATLAMADQHHCQKLKEACIEFLATSKKMEGVMESQGYEKMKLSCPSFMVDLWEIIGRKMTSYSVIPNIYARDKD

SEQ ID NO: 123759 - protein, 600 aa, Oryza sativa
  Clone ID: PAT_MRT4530_26562C.1.pep
PAGTNQPLLSPRRPLHLHLHCAMAASTTLALSHPKTLAAAAAAAPKAPTAPAAVSFPASHAACAPLAARRRAVTAMVAAPPAVGAAMPSLDFDTSVFNKEKVSLAGHEEYIVRGGRNLFPLLPEAFKGIKQIGVIGWGSQGPAQAQNLRDSLAEAKSDIVVKIGLRKGSKSFDEARAAGFTEESGTLGDIWETVSGSDLVLLLISDAAQADNYEKIFSHMKPNSILGLSHGFLLGHLQSAGLDFPKNISVIAVCPKGMGPSVRRLYVQGKEINGAGINSSFAVHQDVDGRATDVALGWSVALGSPFTFATTLEQEYKSDIFGERGILLGAVHGIVEALFRRYTEQGMDEEMAYKNTVEGITGIISKTISKKGMLEVYNSLTEEGKKEFNKAYSASFYPCMDILYECYEDVASGSEIRSVVLAGRRFYEKEGLPAFPMGNIDQTRMWKVGEKVRSTRPENDLGPLHPFTAGVYVALMMAQIEVLRKKGHSYSEIINESVIESVDSLNPFMHARGVAFMVDNCSTTARLGSRKWAPRFDYILTQQAFVTVDKDAPINQDLISNFMSDPVHGAIEVCAELRPTVDISVPANADFVRPELRQSS

SEQ ID NO: 123760 - protein, 138 aa, Oryza sativa
  unsure (1)..(138): unsure at all Xaa locations
  Clone ID: PAT_MRT4530_26563C.1.pep
SVWKKFEDKFVQTLLKYGYKGEYMSEDWLKQPLFIQSFAPSSLIYMSNMTNSPKIFLIDDTTVRTQDTNQSYYEITSDAYLAFIRKYIVGIGPWKDTIVPPINNYLGPPTDLVARAHALNLQVHPYTXRNENMFLHFD

SEQ ID NO: 123761 - protein, 108 aa, Oryza sativa
  Clone ID: PAT_MRT4530_26564C.1.pep
MGTKRHGSNGGTRAQVVVPSPGEAELGPHQEGHCHDLTSGEAELGQRRRGSTLPYEIWLPRMGAASSQPYRDNGVGIDVVIQDRTLGGRKAESSQKMEKCDRGTNRCY

SEQ ID NO: 123762 - protein, 207 aa, Oryza sativa
  Clone ID: PAT_MRT4530_26565C.1.pep
MQLARQVSRLESGHDVMYEYVAGILHTIFFHRTLTLVRPKDVDCDLFEITYVQCGLPDLEKEVDEKINQFIAWVEKHPNRRSQVCLSFFDEKNKNPSWFTSKTERIYWEQWFINLHVISPKGHGKSRSSKASTSIRGKALEEASSKRAALGLLIQEVLFQIINFANEKKDHIPPISDRIFNHEISIPSSSDSVFGWNADVLRRVLNS

SEQ ID NO: 123763 - protein, 390 aa, Oryza sativa
  Clone ID: PAT_MRT4530_26566C.1.pep
MGELLMFPPVALASAESAEPTAEARSRRFPLIAPAVAVGSVGCGGGMGKRKTIVQKGMLGKPEPSKKTRGVSQRAKKRSIGDDHADDTEQPPPKRSRSKATRWNVSCCVTRECEFKFIWNWLMEHFNPATNQLVFPGRGAIDVNEESVKSVLGIPMGDKDVSYDMESEATEFVLNLLGINDGISPSLTSLGIQLEKLKLADDKHLRMWIIYAISSVLAPTTATTVSPRCYPSVVDAGNIKNLNWCKFVISILQKAAKAGKTTNSACLLYMMILYLDSLSFKNLNVPVEGYRATVWTNELINQAILADTSADGSFGALPEKDRIVIAVQNLCEGFSGLVTKFVRQISGLDFVDPRGSQPRKMRMNRKKLAQRPKRVQQDEDLGLVFALCIF

SEQ ID NO: 123764 - protein, 157 aa, Oryza sativa
  unsure (1)..(157): unsure at all Xaa locations
  Clone ID: PAT_MRT4530_26567C.1.pep
LSGLVPPGVRXVGPAGSYQRARRRVPYSGRGKGWSVPWRAAGVVGAGLRXSRVYSGXALRSLLARSPAYRFTPTXRAPVVPGTRPPPHATRXTLPPTXPHPPTPCPLPLPYRTLPLPYXHTLVVPIPSSAPARVRASALVXCLRWCYLCXVLSPRAS

SEQ ID NO: 123765 - protein, 772 aa, Oryza sativa
  Clone ID: PAT_MRT4530_26568C.1.pep
MAMRSSSSPCLPRPDAGMGKRKTIVQKGMLGKPEPSEKTRGGSQRAKKRSIGDDHADDIEEPPPKRSRSKQESSRASPMKLIKLYPHMSGEQKRLIEGAGFHGLVDLKCSKLRPDLCSWLMEHFNPATNQLVFPGRGAIDVNEESVKSVLGIPMGDKDVSYEMESEATEFVLNLLGINDGISPSLTSLGIQLEKLKLADDKYLRMWIIYAISSVLAPTTATTVSPRCYPSVVDAGNVKNLNWCKFIISILQKAAKAGKNTNSACLLYMMILYLDSLSFKNLNVPVEGYRATVWTNEMINQAILADTSADGSFGALPLRSSFQHEGTNLFGSNVDFSTFINSNVPNTMQQQEKDRIVIAVQNLCEGFSGLVTKFVRQISGLDFVDPRGSQPRKMRMNRKKLAQWTKRVQQDEDLDVTSSDDEDFVADEEEVEDTEEDEYTDEDGDSDDDEDEGDEDDDDEGEEDDDEDRSENDDDDGAKTGRNGSCATPKGQEAAGTSQGKEFPGIITNEDYGSFTTEDYEKVGREADEAIASKSATKSPVAEVISKEPIACEVEEETPVPHEYNKRVVKPAKFKRSPLIDYENKKQFMVSRVINEVYDDICKNGGRTKSRRNSQKIIDTGEYYIYLSDLANSVKPMGSLDNNTCELALIVLSTDIKDNSKRIFPARIGGYLLDSQLDRNELKKHFDQTRANHLDHKELAFFPILQELGNGNDKASHYFVVCLNLKAERFEVYDSLRGEDDEALISASHLVVASIKTMWDRFYMRVFFRRKPS

SEQ ID NO: 123766 - protein, 483 aa, Oryza sativa
  Clone ID: PAT_MRT4530_26569C.1.pep
MEHFDPATNQLVFPGRGAIDVNKESVKSVLGIPMGDKDVSYEMESEATEFELKLADDKYLRMWIIYAISSVLAPTTATTVSPRCYPSVVDAGNIKNLNSCKFVISTLQKATKAGKNTNSACLLYMMILYLDSLSFKNLNVPVEGYRATVWTNELINLADTSADGSFGALLLKSSFQHEGTNLFGSNVDFSTFINSNVPNTMQEQENDRIVTSVQNLCEGFSEEVEDTEEDEYIDEDGDSDDDEDEGEEDDDDEGEEDDDEHRSENDDNDGAETGRSGEQADAATDVTGCKGDDTNEGIGSGGKGADGVTGCNGDDTNEGTASGGKGADDVIGKGKQVDEGIGFGDKDKHEEKQAPNAAAQNVPESEKQPVQKAEKYPFLTTTIDSHEVPNFNLGFDSSQEVVQTPKGQEAAGTSRGKEFPGIITNEDYGSFTTEDYEKVGREADEAIASKSATKSPVAEVISKEPIADDCEVEEETPVPHEYN

SEQ ID NO: 123767 - protein, 186 aa, Oryza sativa
  Clone ID: PAT_MRT4530_2656C.1.pep
LSMAALRYAARKICGRALQRPRVVYPAVTSPALEAERRLLPMLIRGEMPHISYTRHFSSSATPQPPLANNNKSISGHRLPCPNPAADAKVHNNIDPASLETLVQEKKDELFRLLLQMDLHNGSCEKSAEENKAILRLLRQFRAETRDNGTLSGADTKNLANRYVLPVSIILSGIIIVAQGHFISHL

SEQ ID NO: 123768 - protein, 988 aa, Oryza sativa
  Clone ID: PAT_MRT4530_26570C.1.pep
MAPGDHLTTCWDSEPRIQPLIKHRLLEFIKEASSKIYIFEMEENRVGVLPSLLPEVGMEFNTVDEAWMFWVSYGGQKGFEVRESRVPQPDGESEGGEEDEHDGESEGGEEDKNDGDGGGQTRRMGKRKTIVQKGMLGKPEPSEKTRGGSQRAKKRSIGDDHADDIEEPPPKRSRSKQESSRASPMKLIKLYPHMSGEQKRLIEGAGFHGLVDLKCSKLRPDLCSWLMEHFDPATNQLVFPGRGAIDVNEESVKSVLGIPMGDKDVSYEMESEATEFVLNLLGINDGISPSLTSLGIQLEKLKLADDKYLRMWIIYAISSVLAPTTATTVSPRCYPSVVDAGNVKNLNWCKFIISILQKAAKAGKNTNSACLLYMMILYLDSLSFKNLNVPVEGYRATVWTNEMINQAILADTSADGSFGALPLRSSFQHEGTNLFGSNVDFSTFINSNVPNTMQQQEKDRIVIAVQNLCEGFSGLVTKFVRQISGLDFVDPRGSQPRKMRMNRKKLAQWTKRVQQDEDLDVTSSDDEDFVADEEEVEDTEEDEYTDEDGDSDDDEDEGDEDDDDEGEEDDDEDRSENDDDDGAKTGRSGEQADAATDVTGCKGDDTNEGIGSGGKDVDGVTECKGDDTNEGIGCGGKGADDVIGKGKQVDEGIGFGDKKKHEEKQAPNAVAQNVPESEKQPVQNAEKYPFLTTTIDSHEVPNFNLGFDSSQEVVQHQRGKKQQEHLKDYGSFTTEDYEKVGREADEAIASKSATKSPVAEVISKEPIACEVEEETPVPHEYNKRVVKPAKFKRSPLIDYENKKQFMVSRVINEVYDDICKNGGRTKSRRNSQKIIDTGEYYIYLSDLANSVKPMGSLDNNTCELALIVLSTDIKDNSKRIFPARIGGYLLDSQLDRNELKKHFDQTRANHLDHKELAFFPILQELGNGNDKASHYFVVCLNLKAERFEVYDSLRGEDDEALISASHLVVASIKTMWDRFYMRFSKKTI

SEQ ID NO: 123769 - protein, 494 aa, Oryza sativa
  Clone ID: PAT_MRT4530_26571C.1.pep
MAPGDHLTTCWDSEPRIQPLIKHRLLEFIKEASSKIYIFEMEENRVGVLPSLLPEVGMEFNTVDEAWMFWVSYGGQKGFEVRESRVPQPDGESEGGEEDEHDGESEGGEEDKNDGDGGGQTRRMGKRKTIVQKGMLGKPEPSEKTRGGSQRAKKRSIGDDHADDIEEPPPKRSRSKQESSRASPMKLIKLYPHMSGEQKRLIEGAGFHGLVDLKCSKLRPDLCSWLMEHFNPATNQLVFPGRGAIDVNEESVKSVLGIPMGDKDVSYEMESEATEFVLNLLGINDGISPSLTSLGIQLEKLKLADDKYLRMWIIYAISSVLAPTTATTVSPRCYPSVVDAGNVKNLNWCKFIISILQKAAKAGKNTNSACLLYMMILYLDSLSFKNLNVPVEGYRATVWTNEMINQAILADTSADGSFGALPEKDRIVIAVQNLCEGFSGLVTKFVRQISGLDFVDPRGSQPRKMRMNRKKLAQWTKRVQQDEDLGLVFSLCFY

SEQ ID NO: 123770 - protein, 132 aa, Oryza sativa
  unsure (1)..(132): unsure at all Xaa locations
  Clone ID: PAT_MRT4530_26572C.1.pep
LTEPARTSAAVSLPRITAGAXFLLARRVPPPPVRASASPVVAAXFFLRAGRRVRRAAALRACAVIFGRRRXRLRTGRRRLPRRRSPPVTARVAAGRHGRRSALSGAHLPAAPSLSPCAAASGARMSAPPPPL

SEQ ID NO: 123771 - protein, 404 aa, Oryza sativa
  Clone ID: PAT_MRT4530_26573C.1.pep
MASAAMSTLNLSSSPLTKQQLRFGASTLSAEHVSGFSSARPAPSLCCSSSHWRAVKLRPRRRPWRRAGNRVVAQAGGYKVAILGAAGGIGQPLSLLVKMSPLVSALHLYDIANVDGVTADLGHCNTPAKVAGFTGKEELAGCLAGVDVVVIPAGVPRKPGMTRDDLFGINAGIVRELVEAVADHAPAALVHVISNPVNSTVPIAAEVLKRKGVYDPRKLFGVTTLDVVRANTFVAEMKGLPLADVDVPVVGGHAAATILPLLSKARPKTAFTDEEVEALTRRIQNAGTEVVEAKAKAGGGSATLSMAYAAARFLEASLRGLDGDADVYECSYVQCQAVPELPFFACRVKLGRDGVEEVAAAGAELRGLTEFEARALEALKPQLKKSIDKGVAYAQQQPATVAMG

SEQ ID NO: 123772 - protein, 530 aa, Oryza sativa
  Clone ID: PAT_MRT4530_26574C.1.pep
MGQCPSAPRYHHHRHPPRNPPPPSPPPADHAPPQPLPTPDDDAPAAEDHTADLPDDLLAVVFGLLGSADRKRCSLVCRRWLSVDAASRLRLALDARAPLHAALPGILARFPAVSKLALKCDRRAESVADPTLALLADRLGPALRRLKLRSIRLVTDDGVAALAAAATNLRKLSVGSCTFGAKGIEAVLRSCLHLEELSIKRLRGLAQSEPVAVSSLCLHSLCLKELYNGQCFSSLITNSPNLKTLKIIRCSGDWDPVLQDLPQDAMLAELHLEKLQVSDRGVSALSGLEVLYLAKAPEVTDVGLGKLATRSPRLRKLHVDGWKANRIGDRGLAAVAQKCAALQELVLIGVNLTSASLELIAANCPALERLALCGSDTFGDAEISCVATKCAALRKLCIKACPVSDAGMDKLAQGCPRLVKVKVKKCQGVTPECAERLRASRNGALAVNVDTPGGAGELQDARSVDESGVLENAGSDTLPDDLDDRIGGPDLSCGSSGRPSGWKARMGAFMSRSLSVSMFRRRPRGRCHEP

SEQ ID NO: 123773 - protein, 60 aa, Oryza sativa
  Clone ID: PAT_MRT4530_26575C.1.pep
SFPEESVHLDHIHRYIDNLKIAADERRGHSWMILFTITRTSITLGGLGTYSSCEWEENAG

SEQ ID NO: 123774 - protein, 99 aa, Oryza sativa
  Clone ID: PAT_MRT4530_26576C.1.pep
MVCFLLLLQGTLREHKDSDEYVIPCGDWFNRVSCPHYLAELVIYFGMLVASGGEDIPVWFLFVFVITNLSFAAVETHKWYLQKFGDYPRSRYAIIPFVC

SEQ ID NO: 123775 - protein, 81 aa, Oryza sativa
  Clone ID: PAT_MRT4530_26577C.1.pep
SSPPASPHRRRPRPPSRRARRPPERRRSPTTRAGPPACLHSSLLLCYPRLTRGDPQTAEYSTVTYTFVGIRYISPMDNANA

SEQ ID NO: 123776 - protein, 205 aa, Oryza sativa
  unsure (1)..(205): unsure at all Xaa locations
  Clone ID: PAT_MRT4530_26578C.1.pep
RPTVSSIPLNRRFWMRVLLLQELDNIVQLLIYXDNTLNAKCYLNKLESQGFEVLLPDKASLEHTVLPAIGAFRRGDMEGARNLLRISLQVMFVRAVNTIILASDDFVGILPDDDPLLKKCIDPMDALVRETIISCNRDDASILTWESQSEWACSLVFQENLVIGVEEEGEGLECSVHRNQGQKERKHRGQCNTNWAFLSLFFRMF

SEQ ID NO: 123777 - protein, 242 aa, Oryza sativa
  Clone ID: PAT_MRT4530_26579C.1.pep
MAPSSRKERAAEARASTSKPSPAPAPAPAVQVQRRPVGGGRWTSRRISFYASRAFFLLIILQIPLFRVPCRAGTCTTPIQVTSSQLVSNGIFPPSVVKALLFPGAIASNLTKSMTFPRWNDLFDIYNLTEAKTASAVIDLQRLEILAGSYFCAAGALVGVINPGRMTLFGTLLVIWGLVKEALFGKPVNSDPTQSVHVYPTILIALICAFLSITYNVKKTVRNSQSVSITKPLQSSAKSKLK

SEQ ID NO: 123778 - protein, 66 aa, Oryza sativa
  Clone ID: PAT_MRT4530_2657C.1.pep
MHGFRVVSDDGEGDDDASRVEVEQAGDELVLVRSKQQVDIILDCLKETGTKSMDMATLDQTTYLYV

SEQ ID NO: 123779 - protein, 77 aa, Oryza sativa
  Clone ID: PAT_MRT4530_26580C.1.pep
LKVVAINEESQDVHVPTGDAAKTIQAEKTEADAVIVNIGGQGRSDRHCTAGLTGDDRRSDQLCMAGLTGQTGWSDRH

SEQ ID NO: 123780 - protein, 74 aa, Oryza sativa
  unsure (1)..(74): unsure at all Xaa locations
  Clone ID: PAT_MRT4530_26581C.1.pep
MVTQLSESYQCVFFFRSCNRDDASILTWESQSEWACSLVFQENLVIGVEEEGEGLECSVHRWDCKRXRKHRGQC

SEQ ID NO: 123781 - protein, 65 aa, Oryza sativa
  Clone ID: PAT_MRT4530_26582C.1.pep
FGYSKEQVNPLLSCCPFKGRISGKEGSPNAVATLAIPTAIFDQVWCQQPNTISLTQNICYQSVII

SEQ ID NO: 123782 - protein, 90 aa, Oryza sativa
  unsure (1)..(90): unsure at all Xaa locations
  Clone ID: PAT_MRT4530_26583C.1.pep
GCFSMECSVXVFSVFFFYFQFQXIKFIIFQCEHFVFVISQFLTGNIIRPLLIGSFLFFRLNMCNGLFFFTFCLXXFFVDHSFYRFFLPYR

SEQ ID NO: 123783 - protein, 383 aa, Oryza sativa
  Clone ID: PAT_MRT4530_26584C.1.pep
MAERRSNMMMIYGFNLLIVAAAVRSSSSSILGDATVVSTDDRWVRRRLLLIDGMVDGKRMRKTVVVAKDGTANFTTITQALGAAPPRGRFGIFVKAGVYEETVNITRPNVVLWGEGIGKTVITGSRSCPIENNKTKTDMMPWTATVTVQGHGFIAQDVTIENKAGPTGTPAVALRCDSNMSLIHRCRIDGYQDTLWAQNNLQVYLRCDIAGTIDFVYGNAKAIFQYCRLLVRNPGNGKHNAITAQGRNDPTSEESGFIFQGCNITAMEGESLAGVDTYLGRPWKNHSRVVFMGCFMSDIINPDGWVHWNKATPVEETTRTVEYLEYGNKGAGAETADRVKWKGVRVITEAEANRFTVDHFINGNQWLPNLVNGEQINYTHGLI

SEQ ID NO: 123784 - protein, 61 aa, Oryza sativa
  Clone ID: PAT_MRT4530_26585C.1.pep
LAICSQISFVRALSPLSLATVVGPMLCCSGNDKILLVSQNLYYKSRYNHIYVGVMVGYFFG

SEQ ID NO: 123785 - protein, 47 aa, Oryza sativa
  Clone ID: PAT_MRT4530_26586C.1.pep
KRGPLFPHMGWFFPSLSDRFFCESISIMVGWGYVKKRLGLYTLKLGI

SEQ ID NO: 123786 - protein, 99 aa, Oryza sativa
  Clone ID: PAT_MRT4530_26587C.1.pep
SDGITAKPKVLPEETLTTLFGASNSVSKCTYVALFWVQLIKPLFHNFITPWGLNIQGLKGPKMYAHTLTCVKMWSFRISLLVIGVSNGSKILRQMCSPF

SEQ ID NO: 123787 - protein, 569 aa, Oryza sativa
  Clone ID: PAT_MRT4530_26588C.1.pep
MGAASSRLEKALGEQFPEGERYFGLENFGNTCYCNSVLQALYFCVPFREQLLEYYANYKSTGDSEDNLLTCLADLFSQITLAKKKTGVLAPKRFVQRVRKQNELFRSYMHQDAHEFWNFLVNDIIDILEEDCRTANSSPETTPEEVSNGAANALANGARERPLVTLVHRTFQGILTNETKCLMCDTITAKDETFFDLSIDVEQNSSLTSCLKSFFSTEILNGEDKFFCDKCSSLQEAHKRMKIKKAPHVLVIHLKRFKYVEQLSRHKPLPPPPPPPPLHTLLISSPSFPPIGIQTRRIPVHVLPLPMSPPLELDYIGLSPPPPPPSSSSAAAARADDVDLKGTELRLGLPGSESPDRRPAAIAAAAATATTLELLPAKGAKRVFPDEAALTPPTAAAGKGKAAREGEEVGAEEEDKKVAAPPQPAAKAQVVGWPPIRSYRKNTMATNQIKSNKEDVDAKQGQGFLYVKVSMDGAPYLRKVDLKTYKNYKDMSLGLEKMFIGFSTGKEGAENQKDGEYVLTYEDKDGDWMLVGDVPWEMFTDSCRRLRIMKGSDAIGLAPRAGEKSKNRN

SEQ ID NO: 123788 - protein, 73 aa, Oryza sativa
  Clone ID: PAT_MRT4530_26589C.1.pep
MLAWRGGVAAGGKRPPGPALPRRSHGHGRWSGLVAVVAVWIGGARKRGRRAMGWERTRALQLQSIATSGEVFR

SEQ ID NO: 123789 - protein, 65 aa, Oryza sativa
  unsure (1)..(65): unsure at all Xaa locations
  Clone ID: PAT_MRT4530_2658C.1.pep
XPGVCKAAVRSVLEDKRSNAGIQIQLVDHTDTQSILLSCLVILFFYIALSSLVNSQLCVSVAAXA

SEQ ID NO: 123790 - protein, 59 aa, Oryza sativa
  Clone ID: PAT_MRT4530_26590C.1.pep
ARGPPPLFFLFFFFFFLKSISSPICSRCNSITDMIYRYLSLKQGGKMYVQLRAGKAERR

SEQ ID NO: 123791 - protein, 110 aa, Oryza sativa
  unsure (1)..(110): unsure at all Xaa locations
  Clone ID: PAT_MRT4530_26591C.1.pep
MVSSQDYPDSEFWKAYLMCKATFGVVCDELAVVVAKEDTMLRADIQKRKHVAGCVWHLATGXEPLRLXSSCFCLGSFTCHKLVLQVCAQLKAIVMPTVKALIRGRQQRKT

SEQ ID NO: 123792 - protein, 244 aa, Oryza sativa
  Clone ID: PAT_MRT4530_26592C.1.pep
MAAIKEAGDAAVIEEAEVVARRRQAQQRVTETVSAVDRVIFEQENGHRMMLSGDEQIRSMISKSASVLPHVSGTSAFDVLHREKAAIRSSISPCEAERHFDRQAGAAAKGGSLGAAAEGGRGAAGGGAAVASPLGLDDTIATDMTNVGRKRKRGGGDGEDGGTLPTRKDGPRRMDRDLRLRRLRLRADAVALPRLGPHLLIRSSCPGPLPTAPLDRCLLMTLRSPFQLPDQVASADGALLRVFA

SEQ ID NO: 123793 - protein, 111 aa, Oryza sativa
  Clone ID: PAT_MRT4530_26593C.1.pep
RKWHWYALQQSLKSGNRAAQFNCSVITALILTLTFSLLQPKIKGYTVPDYILSLTLDREAETFESAEQTLLLYPLNGHSMDTRSSYHKLCRGKETKDHSLCSLDWPDLPNR

SEQ ID NO: 123794 - protein, 285 aa, Oryza sativa
  Clone ID: PAT_MRT4530_26594C.1.pep
MAFLAMVAPTMKTSGRVGGDRARGLLKRRLHGKLFPPLSSTGYQGPPSWTVSAGKLRGGGGGDGNSARSPPAGRSDMSGDSPRKSHRKPWPAFLCGLIFCFSVCAQQEGGTNMWVMGESPIGRTKIRLILRKSTMAHRAFGPARHDPRRVVPCLGRRRVNEEAMEGMGRSAPMWHRGTRNQSGNSGASLVSKQREQIDGDDCAMASLAMVAPTTKMRRSVGGGRSSAGAPQAAAAQQALPAAALTGYEGPPSWQSPQANSAGAEAAMGTLHALLRWAGATTSGSP

SEQ ID NO: 123795 - protein, 58 aa, Oryza sativa
  Clone ID: PAT_MRT4530_26595C.1.pep
GLINEAVAPSSVTPPQSRLPMALDSHAGTGSFLFHATAVYDELHQLQCRHGLAKLRSF

SEQ ID NO: 123796 - protein, 686 aa, Oryza sativa
  unsure (1)..(686): unsure at all Xaa locations
  Clone ID: PAT_MRT4530_26596C.1.pep
MAEERESFESQWAPSNVTEENLKEMVAHGVLLAKEIIGWRPAFGEAFPTPDTHEVVXLHHLNPNSIVHIANFIHACEAFXGIRPHFALFRRIFFLKPQPNKSKPCVVGGAGFQLRGTLSQKYFSMPFKTSNKGWHANWFYVQNPEPAVPEYSCLPLVYQDTWNSLPMGNEAAQAVELMDRMIKLKEQGLQGEQITRHFIKSRLAPIKERSRTAFEFDGKHDPNCEDPDSLDFKVMKERMYKIFSNAIVVSYSHLLPVVPYNAFNPPPPEFALMKSDPPIAQRRSPRRQTGQGSGEPKIRSEAQPNTSNPAGQSDSRKRKLVLSDDEGDDAGKLGDKETIGKLPKHANPKKKTSSRPMPKIRKFSRKPSDIDPFGKDSDPTNMETSSSKETGPTAKDHPSDNQPATDNVESSYQPPTGNQSAEAEVRVNQEPPTGNQSDIGPSQEIPEVETQANSPRGQDASNDPRSGSPAKAQESTRPRPEIITGPMIGDEEEILRIRVAEDSHPPILVKWQKEDEEVCLLKKALGQATRIVNSQCSASRQDISTGEKQIQTLENDKAELARQRDSALKDVEDRKIKSQAQFDVLVGKIKRLEGARDEVANDATPLVQAMFFNNNGPSTFDASEIFDKLRVAPDTYFKNIKEAGSMGASLALAMTKFLYPKIDIDAIDGFADGTSEEAALDLINDA

SEQ ID NO: 123797 - protein, 115 aa, Oryza sativa
  Clone ID: PAT_MRT4530_26597C.1.pep
MAIHPGNRVNYTSETQSQGGFLLEPGRAVGSRQASDLEDAELYTRQRKRCGGGGGAISVWGHREAEAKDGMVSDGEAEDGAAHDKDEEKGVWEQAGTGEAEDENGTTGEVEADDG

SEQ ID NO: 123798 - protein, 648 aa, Oryza sativa
  Clone ID: PAT_MRT4530_26598C.1.pep
MAEERESFESQWAPSGVTEENLKEMVAHGVFPAKEIIGWRPAFGEVFPTPNTHEVVVFSHFFCGRFSLPTSRFFQGILNFYGISLHHLNPKSIVHIANFIHACEAFLGIRPHFALLCRIFFLKPQPNKSKPCVVGAAGFQLRGTLSQKYFSVPFKTSNKGWHANWFYVQNPEPTLPEYSCLPPVYQDTWNSLPMGNEAAQAVELMDRMIKLKEQVDNGRYYAQQFALMKSDPPIAQRRSPRHQTGQGSGGPKIRSKAQPNTSNLAGQPDSRKRKLVLSDDEGDDARKPGDKETIGKLPKQANPKKKTSSRPMPKIRKSSRKPSDIDPSGKDSDPTNMETSSSKETGPTAKDHPRGNQPATDNDASNGPRSGSPTKAQESTRPRPEIIIGPMIGDEEEILRIRAAEDSRPPILVKWWDDDMQPQGIVINRKKEDEEVCLQKKALSQATRIVNRIHLRNEAKTATLEKLVPHLGTLEAIRDQLHEAKELAKKTEHDLRDRIAELQESNFELTGSSKDRKIKSQAQFDVLVGKIKRLEGARDEVANAATPLVQAMFFNNNGPSTFDASEIFDKLRVAPDTYFKNIKEVGSMGASLALAMTKSLYPKIDIDAVDGFADGTSEEAALDLINDAQKAADKTVVDVVERFQDTDL

SEQ ID NO: 123799 - protein, 67 aa, Oryza sativa
  Clone ID: PAT_MRT4530_26599C.1.pep
HHRYLITMHNQRCSNQKSTTYHMQYSILTTGFKHIWPHKLTTTRKAHLTIIKWLILYPNVTLLNKQS

SEQ ID NO: 123800 - protein, 92 aa, Oryza sativa
  Clone ID: PAT_MRT4530_2659C.1.pep
VIYLLQAVCWRSVSKLNNASGKSQSSLGKKPVDQKRAGGATIVHVCMKGLVLFHISHVMLVCSSVCLYAWLFMYSSLMSICYAIPAIPVLAR

SEQ ID NO: 123801 - protein, 516 aa, Oryza sativa
  unsure (1)..(516): unsure at all Xaa locations
  Clone ID: PAT_MRT4530_265C.1.pep
MSSPSSAHWLSLVGSIWLQTINGPNSDFPVYSSQLKELKSISQVQLNFLAFASDAGKLFGWFSGVAALYLPLWVVAFVGAAFGLVGYGIQYMFLDSSGLRYWHLFLLTALAGNGICWINTVSYLLCINNFASNSRVAVSLATSYLGLSAKVYTSLAETFPGLANSKTKTYLLLNAVVPLFVTVMVAPSLRVFDLKSAAASSDAAFLVMFAITLATGACAVVGSIGSTANGLSSKEHMISLGVLLATPILIPVGLKIRETLTKIRETQRENRIHDLGTDESESVESVVVIDVAADANAEVAKEEDAVVKKPQEEVGGLRLLKSPDFWLYFFSYMFSGTLGLVFLNNLGQIAESRGIGQTSTLXGYSISRTGSMASLMAPMAGAFFLLLNQRDFFLYLATAVIGTCTGAITSVAVSATRELFGTKNFGVXHNVVVANIPVGSLCFGYFAAFLYQREAGARGTLTCSGAGCYRETFAIWGTTCAVGTLLCAALYARSRNFAGRLPVRIPSCLARLANLV

SEQ ID NO: 123802 - protein, 89 aa, Oryza sativa
  Clone ID: PAT_MRT4530_26600C.1.pep
MDFCANKRDGNFAHGSGYPQIPDPMGTGAGVIFYPWACPPETRGHLIIHVRSIGYPPDIPVPVGHRYGHGQSKRVNESRLSIQDSALVG

SEQ ID NO: 123803 - protein, 139 aa, Oryza sativa
  Clone ID: PAT_MRT4530_26601C.1.pep
MRQIQQHPPYWRPPLSGTGHQCHRSCSSLSKSVHRPPGSSDSPSPRRPTRTAAGSAGEEAGVTGSDSPGLLVGGCGAGARGWRWQDDGAATATARSRECAGEVANCGKKRMRGRHAAAAVAWAGERAEREERRQRNGGG

SEQ ID NO: 123804 - protein, 108 aa, Oryza sativa
  unsure (1)..(108): unsure at all Xaa locations
  Clone ID: PAT_MRT4530_26602C.1.pep
SVYITPRKLARATSEMAQEATYGAPFHGLKSTAGHALNRCYSSLRYGNVSNGSWIXCMQVWSHRGHLRSWRLLVRLAGSDRXDHAKHTEFLLRSKSMPRLEWSKVGHI

SEQ ID NO: 123805 - protein, 344 aa, Oryza sativa
  Clone ID: PAT_MRT4530_26603C.1.pep
MANLGGGAMPAGSSGGDGEVEAGFAKLQGEDFEYYMQTYSIMLGRNSKKSTVDVDLSSLGGGMNISRHHARIFYDFQRRRFALDVIGKNGCLVEGVLHLPGNHPVKLDSQDLLQIGDKKFYFLLPTRSIFASAAAARHPPIIPQQMPPPSYVRTGRPRLSEFHDRSFEGDYGREGDEIGNGISESGGMRGKLIKRNKKLSAESEMYGGHRINVEAIGTLGEGDSRSEIRSRGDRDMDNQHILQAEEKDVVSSVATVLSDLCGPGEWMPMAKLHTELLEQFGNVWHHSRVRKYLSPEDWSPTETKGRPWYGLLALLRKYPEHFVINTRSKGRVTSEFVSLVSLLS

SEQ ID NO: 123806 - protein, 105 aa, Oryza sativa
  Clone ID: PAT_MRT4530_26604C.1.pep
VKKVKKLKNTKLNLREYERALLGVCVEMEKVRGLYSLPMTVVTVGMVGNTLQPSFGANLHRPEETLHPTAMRLYKPNQGLAQPTYNLAGGLLDFSSPQTFELLPN

SEQ ID NO: 123807 - protein, 498 aa, Oryza sativa
  Clone ID: PAT_MRT4530_26605C.1.pep
MAFQVMNAFALGYQISCGATSEKVVGDVTWVPDGRFVSVGNVSDVRSPGVLPVLSSLRYFPDTSARKYCYVVPAERKRKYLVRTTYFYGGFDGGSAPPVFDQIIEGTRWSEVDTAGDYARGLATYYEAVVLATEKEVSVCLARNAATKSSPFISALEVSPLEDSVYNSTDFESYALSTIARHSFGHDGSAAVSYPGDRFNRFWEAHSDGMPVVESQASVSQAAFWNKPPEDVFRRGVTTAGGRGESLELQWPPAPLPAASYYLALYFQDNRAPGPLSWRVFDVAVNGETFFAGLNVSTAGSMLYGDKWPLSGRTKITLTPAPGSPVGPVINAAELMMVVPLGGRTHPRDVIGMQALARGFDNPPADWAGDPCLPQGNSWTGVTCTQEPLARVVSLNLTNFKVGGSISDGIANLTAISSIWLVGNNLTGPIPDMSLLHHLVSLHLENNRLTGQIPPSLGSMPRLRELFVQNNALQGAIPISFKNKTGFMFQYAPGNNLS

SEQ ID NO: 123808 - protein, 479 aa, Oryza sativa
  unsure (1)..(479): unsure at all Xaa locations
  Clone ID: PAT_MRT4530_26606C.1.pep
MAFQVMNAFALGYQISCGATSEKVVGDVTWVPDGRFVSVGNVSDVRSPGVLPVLSSLRYFPDTSARKYCYVVPAERKRKYLVRTTYFYGGFDGGSAPPVFDQIIEGTRWSEVDTAGDYARGLATYYEAVVLATEKEVSVCLARNAATKSSPFISALEVSPLEDSVYNSTDFESYALSTIARHSFGHDGSAAVSYPGDRFNRFWEAHSDGMPVVESQASVSQAAFWNKPPEDVFRRGVTTAGGRGESLELQWPPAPLPAASYYLALYFQDNRAPGPLSWRVFDVAVNGETFFAGLNVSTAGSMLYGDKWPLSGRTKITLTPAPGSPVGPVINAAELMMVVPLGGRTHPRDVIGMQALARGFDNPPADWAGDPCLPQGNSWTGVTCTQEPLARVVSLNLTNFKVGGSISDGIANLTAISSILEKDCSGXWLVGNNLTGPIPDMSLLHHLVSLFVQNNALQGAIPISFKNKTGFMFQYAPGN

SEQ ID NO: 123809 - protein, 411 aa, Oryza sativa
  Clone ID: PAT_MRT4530_26607C.1.pep
MAIDLAPLAGELEVAGAAVGGKKEEGEGEEGGVCGGEAVVVAAADAEVEGHPYDFHVSGPRNLPPPNWREIIRSSWKDPNYKRMVMACFIQAVYLLELDRQDEKGEEDGLAPKWWKPFKYKVTQTLVDERDGSIYGAVLEWDRSSALSDFILIRPSGAPRAVLALRGTLLQKPTIKRDLQDDLRFLVWESLKGSVRYIGALEALKTAVERFGSANVSVAGHSLGAGFALQVCKELAKQGVFVECHLFNPPSVSLAMGVRSMSEKASYLWKKVKASLPLTEEALPDSTKEEGSAKKKLRADKKWVPHLYVNNSDYICCHYNAPNCSTTTTTTTTDGASDEQQQQRKASEIAGDVVAKLFVTSKGPQKFLEAHGLEQWWSDGMELQLAVYDSKLIYRQLKSLYTATAPSPPAK

SEQ ID NO: 123810 - protein, 283 aa, Oryza sativa
  Clone ID: PAT_MRT4530_26608C.1.pep
MVEEDPHDFFSQSYNDAPAAHMNGSEYDFSQGSLGHAGSSVGIHFGGGGGRGSRGLDLNSQADAFPDFASYQQILQPVSGNGGVRARAPSMSHDGPPFFEFGVFGGGGRLGASLFQGTSVAEDDANDEDEEDIGPDGQPTMLGGKRIKVRSCVKNCRSLHAFGDFCDVDSVSIQEKGDARKFRNGNPEYLDFLIELFQGVAVDGSTAYFPGFDEDEEEGEEEAGETRRGETTTWDGFENSPMSTNSRKRGSSSCDVSTASSPGKKKQEPSGEAHEGPAQFFLL

SEQ ID NO: 123811 - protein, 96 aa, Oryza sativa
  Clone ID: PAT_MRT4530_26609C.1.pep
MVLVIWLVPCGAARAGARPCVRLCGAPKLPTCTEYAGRANCSASRTRDAGLGRRPEGATAQGEGFRSSVACGLSSSNYLRTKDSHRTYTGPFESQE

SEQ ID NO: 123812 - protein, 94 aa, Oryza sativa
  unsure (1)..(94): unsure at all Xaa locations
  Clone ID: PAT_MRT4530_2660C.1.pep
QSGIRARPPKFFSPLDSCGNSWARWGLIASAIGSHKSFCSLNWVREFSRSASATADYXKPRYVMKMAAKVLDQDSKLDLLLKKMEDVDRKQGSK

SEQ ID NO: 123813 - protein, 81 aa, Oryza sativa
  Clone ID: PAT_MRT4530_26610C.1.pep
FMDSPDSLSPSSLAPDLEVSPFLSLPPAAASLISPSSPPPPQSGNPAYSPPPEVLSDNHPLAITALPQRPPLTGIAAMFTL

SEQ ID NO: 123814 - protein, 71 aa, Oryza sativa
  unsure (1)..(71): unsure at all Xaa locations
  Clone ID: PAT_MRT4530_26611C.1.pep
KSFSMTYSFNINIIFKMNVVSSINLKIRGSXPLYLYPRLILSEANALLISCLLSLVLGLIPTHVKRSNSLA

SEQ ID NO: 123815 - protein, 82 aa, Oryza sativa
  Clone ID: PAT_MRT4530_26612C.1.pep
MPRGAREILLGARTAAAPPRRKGAEEAGRCAVAGGSTAKVARVPMPTTRANVVIAATTTVVVLSIILLVARRTVREGATGSA

SEQ ID NO: 123816 - protein, 702 aa, Oryza sativa
  Clone ID: PAT_MRT4530_26613C.1.pep
MARLVRIEVLVLLGVAALFVLLILGSYRRQSSRNAVRVSIWVAYAASIPMVSYTLGLMQSSPYKNSLFSVWAIILFIFLGSADSLSAYRLQDNDNWKRFYFEQLIHSFWVGWLMVSSGAGSDFRYVLWPIYVIVVLKSGTRILSFKLASRRSMLSESTKWVADYMTYERELSTAGEWDPVTMRGYRYVVAGEEKQRRKVEAPEYVSKLDGDDRAKAKLVTVEQIWRCNGSLLCGDGDRAGQLKDVCLSMALSKMLNRRFAGFHKLVESELDKTHDFLFRGLLHGQKYVERAFRVIEVELAFVHDYFYTKYFVIYMYRHDDTVLSCAMIPFCGWLAYMLFQRVHVPNDELKLIDDHNNNFDALITAVLIIGVALVEGLQVYIYLASAWCKVALISKYVARESWSSRQWVANLIGCITSFKSFRSWEDKLGQYTLLKNVDYIPINFMYYATMFLVDRTKKGRKEDKRVRLSMKVKKAVIDTLRSSNGQLTNGVKSLKANGIEVFRKLSWSCTTVRTTTHTIIAWHIATTLCEVEDEERHRMDSTTTNYKDVACSLSRYCAYLVAFAPELLPDHSFVSQTIFDALVDEATQELLNLKTLEQRCEKLKEIGKVSDMEQNGGDNRLIVLGARLGCQLLEIENPSRRWKVLSDFWAEMVLYLAPSDDARERLETLTRGGEFITHLWALLTHGGILERSTTGAGQCQNV

SEQ ID NO: 123817 - protein, 121 aa, Oryza sativa
  Clone ID: PAT_MRT4530_26614C.1.pep
APKGDEIGMTVAATLRRIPAEKGWTAFGLALQCPRRKLRGSATMGEAAKLRRRSKHGDGSAFTVMANSGRVWRNGAGGRGSSHPCEAEGGDGADRRRPRRRRTAAGEATGGGERGSSRGGG

SEQ ID NO: 123818 - protein, 121 aa, Oryza sativa
  Clone ID: PAT_MRT4530_26615C.1.pep
ARGGKRERERDEPGGGDGSTLAGGVHGRGGGRVRRGGGLLRRHPVAVRRGVDHLHLRRRRRRPQQPGVRRRRRHLRRHRPRVQRRVRPLRHLRRLASRCREASTSSLLALADAAASHGDFD

SEQ ID NO: 123819 - protein, 118 aa, Oryza sativa
  Clone ID: PAT_MRT4530_26616C.1.pep
DSELKIDTKAADEFRNEGKTVRVVSFVCYELFNEQAAEYNESVLTEAGTVRVSLEAESTIAWNKYVCSISTAIDIDKFCARAAARKIYHEYCITLRERHHSSIEPVRIKPRVLSIWHM

SEQ ID NO: 123820 - protein, 665 aa, Oryza sativa
  unsure (1)..(665): unsure at all Xaa locations
  Clone ID: PAT_MRT4530_26617C.1.pep
MKPAVEVEEGDERAAELARKKAAAAAAAAAKKAEEAAVEEEEVVNGEEEVEEEAVDGEEGDGDEEGDGEEEGDDEEEDAEEGEKGAAGHTVVEISDEEDEEDGEEGDGGDDDDDDDDDDDDDDDDEEEEEEVEGDEQEELGTEYLVKPLGDAEDEEHSSDFEPDENGEGAEDEEIDEDDDGDDDSAKAQSSSKRKRSGGDDEDDDDDDDDGDDDDDEDEQEADRVAFLPGQPRSPQMSQFSGYITVNSQNGRALFYWFFEAQALPSKKPLLLWLNGGPGCSSVGYGAASELGPLMVNGNGTGLEFNKFAWNNEANLLFLESPVGVGFSYTNTSSDLESIXDRFVAEDTYNFLVTHLWWXSSFSSTSLHSRVCRSYAAAVFNEQQEADRVAFXPRANKQTNANKILQVGNAETDDYYDYKGLVEFAWSHSVISDQLYKHVNNVCDFRLSPRSNECNHVMGYIYDQYDMIDIFNVYAPKCNTDDSSLFSTSYSTADMNAKKRLKGTRMYSGYDPCYSSHIEDYMNKMDVQKSLHANTSGLIKDRKWSICSYSIFDNYDITVFSVLPIYSXLSRLAYEYGSTVETWMAGFQXIGSRYCVEALGLPVKSQWQPWYLNNQVAGRFVEYQGLTMATVRGAGHAVPQDKPEQALVVINSFLSGRRLPTKNNR

SEQ ID NO: 123821 - protein, 125 aa, Oryza sativa
  Clone ID: PAT_MRT4530_26618C.1.pep
MAGTDPVVGWEETSDIESGIGGTSGAPQLPSRFQIWLVGRRVLAAAKTEETAGFPTPLPYLASPKSGRRGGGRQMTAASHPRWFQRPYKVISKIVHGSSPSPSPVESSSTAAGDAHSARLQIWPS

SEQ ID NO: 123822 - protein, 50 aa, Oryza sativa
  Clone ID: PAT_MRT4530_26619C.1.pep
LRKSKVSQTEQIMGLVGKLAAVAKAEAASCVCNTVGAGCATAVAQAAEQA

SEQ ID NO: 123823 - protein, 183 aa, Oryza sativa
  Clone ID: PAT_MRT4530_2661C.1.pep
ARLASSREPTVSPHHHTVVAILLSLRSMHPPTRRPGPSDPGDPGLIVGGSGRPEARGDRLSPSLLFSFYVRHRYNDGRADRVRQRIGGGLQQQRPRGRAIEEAGNHQIRKDGGPIRRGSNPICVIEAHYPGSLGLLSSVSTAAVARARWKKRVRHGLLREHTPATCRRPRPKPIFPNPIWHYN

SEQ ID NO: 123824 - protein, 907 aa, Oryza sativa
  unsure (1)..(907): unsure at all Xaa locations
  Clone ID: PAT_MRT4530_26620C.1.pep
MTPAPAAASYRALVALLLVAVAVADDGSTLLEIKKSFRNVDNVLYDWAGGDYCSWRGVLCDNVTFAVAALNLSGLNLGGEISPAVGRLKGIVSMYGRRGGVLCCCLEMWLAGAWTRSNLILKNNQLIGVIPSTLSQLPNLKILDLAQNKLSGEIPRLIYWNEVLQYLGLRGNNLEGSISPDICQLTGLWYLDLSYNKLSGSIPFNIGFLQVATLSLQGNMFTGPIPSVIGLMQALAVLDLSYNQLSGPIPSILGNLTYTEKLYMQGNKLTGPIPPELGNMSTLHYLELNDNQLSGFIPPEFGKLTGLFDLNLANNNFEGPIPDNISSCVNLNSFNAYGNRLNGTIPPSLHKLESMTYLNLSSNFLSGSIPIELSRINNLDTFNLSNNGLVGFIPAEIGNLRSIMEIDMSNNHLGGLIPQELGMLQNLMLLNLKNNNITGDVSSLMNCFSLNILNVSYNNLAGVVPTDNNFSRFSPDSFLGNPGLCGYWLGSSCRSSGHQQKPLISKAAILGIAVGGLVILLMILVAVCRPHSPPVFKDVSVSKPVSNVPPKLVILHMNLSLLVYEDIMTMTENLSEKYIIGYGASSTVYKCVSKNRKPVAVKKLYAHYPQSFKEFETELETVGSIKHRNLVSLQGYSLSPVGNLLFYDYMENGSLWDVLHEGPTKKKKLDWETRLRIALGAAQGLAYLHHDCSPRIIHRDVKSKNILLDKDYEAHLTDFGIAKSLCVSKTHTSTYVMGTIGYIDPEYARTSRLNEKSDVYXLWHCSAXAADRKKASGQRVQSPSXILSKTANNAVMETVDPDIADTCKDLGEVKKVFQLALLCTKRQPSDRPTMHEVVRVLDCLVRPDPPPKSAQQLAMPQRPAVPSYINEYVSLRGTSVLSCANSSCTSDAELFLKFGEVISQNTE

SEQ ID NO: 123825 - protein, 95 aa, Oryza sativa
  Clone ID: PAT_MRT4530_26621C.1.pep
MTVTGVLRRFRTLSSKIGPPEFWMRPSPPYSCSTLDHVTGAVTTSSDSEADRGRDTCIGDGLPDLEKMRGRSLTLVNLLVRDSPGLFGGSVRNKK

SEQ ID NO: 123826 - protein, 115 aa, Oryza sativa
  Clone ID: PAT_MRT4530_26622C.1.pep
GYSTKAVSDVVKANTVVNIQVNGGEWDPSAYKYMQKTGLLGNYQFDLSAVTDGPILDWDTFAASIKDNMVPVHYEIVPMYSIFSDPVIANNFKIVTQQWIASRLKQRANVFPRKI

SEQ ID NO: 123827 - protein, 140 aa, Oryza sativa
  unsure (1)..(140): unsure at all Xaa locations
  Clone ID: PAT_MRT4530_26623C.1.pep
XRVGXTWCGKKKKKKKKKKKKKKKKKKKKKKKKKKKKKGQKDIKLAGPLFFFFFCGRVLDRFVVGFIPVASIFFNLVDCFTPFLFRDFFGFAPLYSFCLLSYFPLVSVLSTCPSLCFFPGVGGVAWPLALSFWGFFGPAP

SEQ ID NO: 123828 - protein, 231 aa, Oryza sativa
  Clone ID: PAT_MRT4530_26624C.1.pep
RGSRKVASRAVWLEEAGAAEVVDSKGKLWLTTGVNRDGKLYYNVEEIGFLAERGALVLLDYEGETIGMEEIYGKIAGGKYGCSWDAFQAYKHLKLLGYIIGRYGVPWTVKRSHTYSVTDASTSVVETDQIQSLNRVGGASNDITKLLKEMCIDDMHPSFEVYLPNSKFKKTSPGDPSFVLCLLSNKPPSREELETVENKFEGIPLKFCHVDNGRNPSSRYTSFQTPEFSSS

SEQ ID NO: 123829 - protein, 56 aa, Oryza sativa
  unsure (1)..(56): unsure at all Xaa locations
  Clone ID: PAT_MRT4530_26625C.1.pep
KSSIFRDIPNNVLTNVYRISXKKAHRLKHNTGDXFGAFTPIKYKRYQNVYNAAESY

SEQ ID NO: 123830 - protein, 970 aa, Oryza sativa
  Clone ID: PAT_MRT4530_26626C.1.pep
MAKFPIVICFVVERYTQATLVRCAIRLDKNLMSEAVILLVVKKIGVALGNEAINQATSYFQKYVTQLTELQGSMGRIKRELRLMHEFLSRMDIRNRNNKIYEIWVEDVRMLAHQIEDIVDDYLHLVSHKDKHDDTGWTTYLKKGFKRMKGPNALLSLNRIAPSVKEAEANLVHLFQAKERWVRMVADETSGESSCYIVEASRHLASISCSLSEEDLVGVDENRKRLREWLAGDELEREVIVLHGMGGLGKTTLAANVYRNEREKFECHAWVSISQTYSIKNILKCLITELFRNAKQNPPVNLGDMKAEGLQDELKAFLRDRKYLVILDDVWAPEAISNLFGALVSNLRGSRVLVTTRIDEVTHLAFPNKRIRLEPLSQNDSWELFYKAAFPREKKLECPTEVTQLAYQIASKCKGVPLAIVSVGRLLFVRDKTEEEFRRIHNQLDWELINNPSMEHVRNILYLSYIYLPTQLKSCFLYCSLFPDDYLFTRKKLVRWWIAEGFVEKRGGSTMEEVAEGYLKELVHMNMLQLVERNSFGRIKAFRMHDIVHELAVDLCRRECFGVSYSCENKRFEFLEENDERRMVIHRLDKDINQVISSECRLRSFIALDKAMPSSTLLPLLSEKCRYMSVLELSGLPIDNVPDAIGDLFNLRHLGLRDSNVKLLPNSIEKLSNLLTLDLCTSEIHELPRGIIKLKKLRHLFAEKANDRSGRQLRCRTGVCIPSGLENLRELQTLQALQAQDEPLSWLGELRQMRSIKIWDVKGSCCECLCASLRHMEFLSYLSIAASDENDILNLSSLNPLPPNLEKLRLRGRLAQANMLLGAAGGQNHLYSIHLSWSQLVDDPLPSLSRWSNLTDLLLNRAYIGDELVFHHGWFPALKELYIGDMPRLKRLEIQQGSMASLQQLYLVNLSSMMEVPLGIEFLMSTLKSLGFAEITRQFLAALRQCSRINCGIQWWYTLLGEDRTQEASI

SEQ ID NO: 123831 - protein, 218 aa, Oryza sativa
  Clone ID: PAT_MRT4530_26627C.1.pep
WKEKKRVKAGRRSSHRRRRRRAPCSPTRTSSARSSSASSPTTTSSPSRSSASTGSASPPASSSSAASVSSTRRASSASASTTAAAATLGGGRSSRHSRSIRASPLPPRTGRGTGSSARSATSPATTVRPSPTAATAVSSSSPPTERRGGSASTRRTATPCSGRPTRVNPCNSSLRCRRRQAAAPGSTSSNACSCPRTAAAAAATMVSRWCTCCWSSGE

SEQ ID NO: 123832 - protein, 356 aa, Oryza sativa
  Clone ID: PAT_MRT4530_26628C.1.pep
RVTLHSQMAVDRDIFGISGPTYLNPVNWNCEHNRRSVAACLVQAVYVLERDRQLGRQSVEALGPPWWEFFHFELIRKLVDDADLSIFGAIFEFNPPSSKESSADNAPRFVIAFRGTITEKETISRDIALDLHLVQNGLHRTSRFTIAMQAVQNVASVFPGSNIWLAGHSLGAGMAILTGRNMVKKGVLLESYLFNPPFVAAPIERISDERVKHGFRIARSVITAGLAIAMKGKGEGSSQRSVAEDSFHILSSWTPYLFVNPGDHICSEYIGYFQHRKNMEDLGAGFIEKLATQNSIGDLFYKALGWESEPLHLLPSADLIVNVSPSPDFKYAHGISQWWQPELNLQCSKYRYSVGA

SEQ ID NO: 123833 - protein, 48 aa, Oryza sativa
  Clone ID: PAT_MRT4530_26629C.1.pep
LILNLHPTLRQRKKCVHQNDCHYENDILSVENAKKNTRAMQKKTPFIS

SEQ ID NO: 123834 - protein, 243 aa, Oryza sativa
  Clone ID: PAT_MRT4530_2662C.1.pep
MAQRSKARATHLLSAQAQSAGRGRSASAPVNPGAYDDGFPTTEYLVHLAAGTPRQEVQLTLDTGSDIAWTQCKRCPASACFNQTLPLFDPSASSASPLGRRRGSYRCRSTPRSSNSGTSITSLPPRTYRAVREEFAAQVKLPVVPGNATDPFTCFSAPLRGPKPDVPTMALHFEGATMRLPQENYVFEVVDDDDAGNSSRIICLAVIEGGEIILGNFQQQNMHVLYDLQNSKLSFVPAQCDQL

SEQ ID NO: 123835 - protein, 79 aa, Oryza sativa
  unsure (1)..(79): unsure at all Xaa locations
  Clone ID: PAT_MRT4530_26630C.1.pep
HPHPARGLMRPLTRGASPFRPFRLAQLVGXGRSVAGPLSLIYAQLAKRGDCASKGDLSWVTAXGFXPSPPTVVKTDRPK

SEQ ID NO: 123836 - protein, 108 aa, Oryza sativa
  Clone ID: PAT_MRT4530_26631C.1.pep
SPQLPLPPSLTATATASGGLAAGGRRPPLQRWQGRGHRSGRDGEMGGSGRLAASPPPGLKGCKSGVKEPSAGGARSVGRQRRVFVNFFYFWNDLEIVLGIIVHVGIML

SEQ ID NO: 123837 - protein, 59 aa, Oryza sativa
  Clone ID: PAT_MRT4530_26632C.1.pep
YIFWLVVILENYLCSLDYQPFDALCSFDGNLCLLRQLVLIFKPETHCIVFRHCLLKKKK

SEQ ID NO: 123838 - protein, 74 aa, Oryza sativa
  Clone ID: PAT_MRT4530_26633C.1.pep
MTDPLFASLVFLDSHSPSSRSHFLATSSRRTLPPSPLCRLLRSARCTASSMGGECERATADNDEATDGSGLISS

SEQ ID NO: 123839 - protein, 47 aa, Oryza sativa
  Clone ID: PAT_MRT4530_26634C.1.pep
MAERSSGDSPGDSSALTPLVGSPTTPPLILTTLNQQAPAPPLLHQSS

SEQ ID NO: 123840 - protein, 652 aa, Oryza sativa
  Clone ID: PAT_MRT4530_26635C.1.pep
MAARPRGVVRRGCETERSRITSGVRFQGIGRYCTTGLPSDITVTVGEQSFHLHKFPLLSKSGLLERCIREKIENGDNSCVIDLSDIPGGAKAFELTAKFCYGVKFEMTASNVVHLRCAAEYLEMTEEIAEGNLIAQTENFLTQTVLRSWKDSIKALHTCDDIIDLAEKLQIVKRCIDSVATRSCTDPDLFGWPVVQYGGPMQSPGGSVLWNGISTGARPRHSSPDWWYDDVSCLSLPLYKKVISAMEYRGINQDIIVGSLNHYAKRRLPGLNRRKSISDVSSCLSISSLTSIPSEEEQKYLLEEIDRLLPFQRGVTSCKLLFGLLRTAIILKASPSCVSNLERRIGMQLDKATLEDLLIPNISESVETLYDVDCVHKILDHFLAMDQETGGASPGLGEDAQMLASPSLMPITMVAKLIDGYLAEVAPDVNLKLPKFRSLAAAIPDYARPIDDGLYRAIDIYLKAHPHLSESEKEELCRVMDCQKLSLEACTHAAQNERLPLRVIVQVLFFEQLQLRSSIAECLMVSENLEGGSRQLIPTISGEQYRPGWPLASRENQALREGMDNMKQRVADLEKECSTMRDEIERLGRSRSTGKGRFSLNMKPQICSTKEAIPTTATTTATASEEKMAVVKGDTTPRLKLSRHKKKLSIEA

SEQ ID NO: 123841 - protein, 139 aa, Oryza sativa
  unsure (1)..(139): unsure at all Xaa locations
  Clone ID: PAT_MRT4530_26636C.1.pep
MAIDQVELGENPDDWRTPFVKYLKEGWLPDDEAKAKQLQIRSTKYSLVSGQLNRTGMLXPMLRCVSFSEGEEMIREIHQGMCGAHQAARTVASKVFRQGIYWPTVLKVCVEQIKKCESCQKHGRSQAAPQYDLQPIAPI

SEQ ID NO: 123842 - protein, 79 aa, Oryza sativa
  Clone ID: PAT_MRT4530_26637C.1.pep
MAAAAPSVAAAIEETAVVTEQTSRKAAPNLDDGTNPVELLLLVTSQVGPLSLRRPKRGTQSSYVAGTCITQMEKGHGRI

SEQ ID NO: 123843 - protein, 362 aa, Oryza sativa
  Clone ID: PAT_MRT4530_26638C.1.pep
PLTTCGFHFHHSQFPVDANLIMACTGEGAVFVDAVADAAMADLGDITRPDPAVLGELVYSVPGAKNVTKFKCGGFVLGLAINHCMFDGVGAMQFVNSWGETARGVPLSVPPALDRAVLRARDPPRVAFPHHEFAQIDDGDGGGSPAQDGAEPPLLHRSFRFTPESIARVKALAAGDGGGVGGVGGRAPTTFEALAGFVWSARTAALGMGRARRSKLLFAVDGRPRFTAPPLPAGYFGNAIVLTSAACAAGELSPARAVRLVRGAAEAVTDAYMRSAVDYFEATRARPSLASTLLITAWSRLPFRAADFGWGPPAAYGPAALPEREVALFLSCAGEGGGVRVLLGLPAAAMAEFERLVDEVIF

SEQ ID NO: 123844 - protein, 375 aa, Oryza sativa
  Clone ID: PAT_MRT4530_26639C.1.pep
MLTLVGAREPFVKAQTNLPATMQLKFPTRTQGDSYGALIPGLPEDLAKVCLALVPRSYFPVMGAVSKSWMSFIGSKEFIAVRKEVGRLEERIYALITGDGGKGPYWEVLGSLEQQNRMLPPMPGLTKAGFSVVVLDGKLLVMAGYGVDYGKECVSDEVYQYDARLNRWAALAKMNVARRDFACAEVNGAVYVAGGFGSDGDGLSSVEVYDPQRNKWTIIESLRRPRWGSFACSFNGKLYIMGGRSSFTIGNSRFIDVYDPILHSWTEIKKGCVMVTSHAVINKRLFCIEWKNQRSLAIFNPSDSSWQKIPVPLTGSSATLFSLGVLDGKLLLFSQEEEPGYQTLMYDPTAPAGSEWHTSTLKPSGLCLCSVTIES

SEQ ID NO: 123845 - protein, 238 aa, Oryza sativa
  Clone ID: PAT_MRT4530_2663C.1.pep
LNMHLRFLSVSNKHHHKTCKVLKNMYYIYTRKSAYAFILNIHIISSLPSSICTIDHHHFHWSTKNTKKNKNLQVIMPDGVGEDRLWPRPPARRWCMLSEEAVSNTFLPSCPSYCCRRYRAQQTQRPWITVKERPPSTLTMSLNDTDRVAPSPNRAAVLPDLVIPGLLDCSPARPLLLQASADLQRNSGDRREKRREQPPVASRDPRGRRCSGAGRRRRRVERVIAGLPSPPGGRIHRQ

SEQ ID NO: 123846 - protein, 93 aa, Oryza sativa
  unsure (1)..(93): unsure at all Xaa locations
  Clone ID: PAT_MRT4530_26640C.1.pep
MADGGEKCRDAAGEGGGGGGDLYAVLGLKKECSDADLKLAYRKLAMRWHPDKCSSSSSAKHMEEAKEKFQEIQGAYSVLSASNKRXFLYDVGV

SEQ ID NO: 123847 - protein, 130 aa, Oryza sativa
  unsure (1)..(130): unsure at all Xaa locations
  Clone ID: PAT_MRT4530_26641C.1.pep
APQALYNVYXLPASYVCVXLLSGITNFTPGNSYDPCITAKALIRLYYMGIAGTPAGTVRNSRVDPRVRPRVREEPGYQTLMYDPTAPAGSEWHTSTLKPSGLCLCSVTMKVDVISRHRVVRFSVPVKNKS

SEQ ID NO: 123848 - protein, 102 aa, Oryza sativa
  Clone ID: PAT_MRT4530_26642C.1.pep
KKKPPGGPKPHPPPPPGGPIQKTSGPHRFPPRKTASDPPPKKVGGPPQKAPPAFPLKPPGRNNNAPKNPQPLTPPQKGKMGPPPPPPRNPRGNPPDQFLFPP

SEQ ID NO: 123849 - protein, 302 aa, Oryza sativa
  Clone ID: PAT_MRT4530_26643C.1.pep
MADGGEKCRDAAGEGGGGGDLYAVLGLKKECSDADLKLAYRKLAMCVRAPPLQQKANYKVCDLSKAGTAATFNERWHPDKCSSSSSAKHMEEAKEKFQEIQGAYSVLSDSNKRFLYDVGVYDDDDNDDDNLQGMGDFIGEMAQMMSQARPTRQESFKELQQLFVDMFQADLDSGFCNGPSKCYHTQAQSQTRTSSTSPSMSPSPPPPVATEAESPSCNGINKRGSSAMDSGKPPRASEVGSGQSQSGFCFGQKSDAKQAAKTRSGNTASRRRNGRKQKVSSKHDVSSEDEMPGHPYTVKAKN

SEQ ID NO: 123850 - protein, 284 aa, Oryza sativa
  unsure (1)..(284): unsure at all Xaa locations
  Clone ID: PAT_MRT4530_26644C.1.pep
HASATAEGASDGKKRRKSRKQSTEAAKENDDEDDEGPADSEDASMGEEDDEDSEAKDNAGSDEEPDEPPAKKKATDDKQTKKAKEKDATAKKASTRPAKGVSKPSQDTEEDDEPEVELESKKVVKKVSKSSKESDVTVDKTTKKASKSKKDEGKDGQNNNSGALNNKARKKDAAKTTNKNKGKGKGSTEAGAAPTTEELHAVVSDILKEVDFNTATLADILXRQLGTHFKMDLMDRKSEVKHIIEEVINSMSDDEEGEEDNAEDDKDKNAKEENSKEDADGDEK

SEQ ID NO: 123851 - protein, 123 aa, Oryza sativa
  Clone ID: PAT_MRT4530_26645C.1.pep
MADGGEKCRDAAGEGGGGGDLYAVLGLKKECSDADLKLAYRKLAMRWHPDKCSSSSSAKHMEEAKEKFQEIQGAYSVLSDSNKRFLYDVGVYDDDDNDDDNLQGMGDFIGEMAQMMSQARPTA

SEQ ID NO: 123852 - protein, 158 aa, Oryza sativa
  unsure (1)..(158): unsure at all Xaa locations
  Clone ID: PAT_MRT4530_26646C.1.pep
MASDAKPDSPPAGVDPPPPKEEAKAEKEGEGEEPQSGGRKRGRRKKGVAXKEKEKPPPATPTIERPSRERKTVERYSELAPRXTPAKKSPAILQGSGSKLKDIPNIRCRLSGRKADENLRRLHGLMYGRKSGGPLLGRNVSHFSGFCWAWPSGPRWGP

SEQ ID NO: 123853 - protein, 243 aa, Oryza sativa
  Clone ID: PAT_MRT4530_26647C.1.pep
MSSPGQLNVRPAACDDVHWHPRSRLLALHSSLTKCCAPPARLYSCAMEWNSPFGEDEEDRRGKVGEITSIWIVPKSVTEADKYLENYERALRGFEAAALKDPGLGADTEVQKIISLLDKLDSAMKSGTSLSSLIHGSALVTTPSHEISAGELEHCLPKRRLLPRRCSAEATAEADEVGGTEVVEGGARHHLRFLSPSSSSASVPSPTTKTAQLPRLLVPPPDLLSEHGVDATGVRDHRCCLAH

SEQ ID NO: 123854 - protein, 41 aa, Oryza sativa
  Clone ID: PAT_MRT4530_26648C.1.pep
MDALLFEHLLWLQAPVQFFSSSSGLAPLLHLDVDGFSGLLP

SEQ ID NO: 123855 - protein, 76 aa, Oryza sativa
  Clone ID: PAT_MRT4530_26649C.1.pep
RRRRPFLAPPPPPPPPPPWTPGWICGGRRRAPRRGEWSRGTGRSASSPPLPSPPRRRRRLPPPRVAPTSTRGRSPP

SEQ ID NO: 123856 - protein, 85 aa, Oryza sativa
  unsure (1)..(85): unsure at all Xaa locations
  Clone ID: PAT_MRT4530_2664C.1.pep
RPGLPPHAPTTTIPPIPRPWKQTSRPPPPPPPPSTPTXPSSTPSTPSLPHPLLLTPLPPPPSAARLRGRGGAHGGEAWGGVRSSG

SEQ ID NO: 123857 - protein, 90 aa, Oryza sativa
  Clone ID: PAT_MRT4530_26650C.1.pep
MDVGEEGAGRRRADVGRGGEPASRSSLSLARGGGVAVVVVAGGGGGEPRMEPTAAEVGGRPAAEALLKWSACENDFRRRHLSGLFSQADS

SEQ ID NO: 123858 - protein, 59 aa, Oryza sativa
  Clone ID: PAT_MRT4530_26651C.1.pep
NELKLNWFPTQVRPTEKQSVCASESVFIIIPSQKKCSSLTKVQFQENFQRPGSSRLFRH

SEQ ID NO: 123859 - protein, 246 aa, Oryza sativa
  unsure (1)..(246): unsure at all Xaa locations
  Clone ID: PAT_MRT4530_26652C.1.pep
MHRFLSFVNERIHSLNGSTEISELKQCSQSMMSSGRVRMRRRLGDTARRNARCTTSTTAGLDRRRRNTTAVXEFQKLTLNGSPRSIRCSSASKPDRLREKRSRQTATSARSLFTLREMVVSDEELVVVDDGQGWMERRRQTPPDQRRWTRMVEAPTDLVTKSSGRYASRQRVTYTDTIDADCLNKVASLLFTVVVVIGSYIRPLRRIPAKLDINPSVVVCKQSLKVKVYERCQKQSNRTSAYNRRE

SEQ ID NO: 123860 - protein, 103 aa, Oryza sativa
  Clone ID: PAT_MRT4530_26653C.1.pep
VGPPGTARPGLRLVGPARPNRHTGPCRASPLPILCVPGLACRPIVPGRPDSVPAGRPRHGPAIGPGWHGPDPSRAMLCLGRAKKSCHGPGLRASGLMAIYRVY

SEQ ID NO: 123861 - protein, 108 aa, Oryza sativa
  Clone ID: PAT_MRT4530_26654C.1.pep
HEADGCVCPQRVHLDIQVGEHTNNYPEIAAKDKLTELQLRARQLLDQVEQIQKEQNYQRYREERFRMTSESTNQRVLWWSIAQTVILILTGIWQMRHLKSFFEAKKLV

SEQ ID NO: 123862 - protein, 173 aa, Oryza sativa
  Clone ID: PAT_MRT4530_26655C.1.pep
MNRKPGDWDCRACQHLNFSRRDLCQRCGEPRGAADRGSGGGGDYANFGGRGGSSFGGGFGTGSDVRPGDWYCNCGAHNFASRSSCFKCAAFKDDAAVNSGGAGAFDGGDMSRSRGYGFGSGAVRASRPGWKSGDWICTRSGCNEHNFASRMECFRCNAPRDSGSAMTYENYLH

SEQ ID NO: 123863 - protein, 95 aa, Oryza sativa
  unsure (1)..(95): unsure at all Xaa locations
  Clone ID: PAT_MRT4530_26656C.1.pep
SCQCGNGCGGCKYSEVEPTTTTTFLADATNKGSGAASGGSEMGAENGSCGCNTXCKCGTSXCGCSLLATCNLEELISIHFITFNELPVPLHMPCT

SEQ ID NO: 123864 - protein, 169 aa, Oryza sativa
  unsure (1)..(169): unsure at all Xaa locations
  Clone ID: PAT_MRT4530_26657C.1.pep
MNRKPGDWDCRACQHLNFSRRDLCQRCGEPRGAADRGSGGGGDYANFGGRGGSSFGGGFGTGSDVRPGDWYCNCGAHNFASRSSCFKCAAFKDDAAVNSGRRWCPLTVGTCRARGATASXSGAVRAXRPLPWKSGXDWICTRSGCNEHNFASRMXCFRCNAPXDSGTGV

SEQ ID NO: 123865 - protein, 670 aa, Oryza sativa
  Clone ID: PAT_MRT4530_26658C.1.pep
MEELESEEVKGFVDAQAAVAEAVLSTCDDHRVRLRGQLTALFDHPRYRAPFKRAGSYFYLHNPGLQPHSALYVQHGLGGGEEPDVLLDPNTFSDDATVSLAMFGVSHDGEHLAYGTSASGSDWVTIRVMRVRDRRHLHDEICWVKFSAIAWTRDGKGFFYSRFPAPKNDGAPLGAGIKTSVNLNHEVYYHFLGTDQSEDLLCWEDPDHPKYIYTPEVSEDGKYVILSVAETSEPVNKLYYCDLSALPDGLEGMKGNHGNAMLPFVKLVDEFEAYYALIANDDTQFTFLTNKNAPKYKLSRIDVNEPHSWMDILPEDEKAVLESACAVHGDKLLVNYLSDVKYVLQMRSLVTGELLHDIPIDIGSVNGISGRRDNSEVFIEFASFLTPGIIYRCDVSKETPEMNIYREISVGGFDRTDFEAKQVFYPSKDGTKIPMFIVSKKSIVLDGSHPTLLYGYGGFGMNMTPHFSVTRIVLMRNLGFVSCIANIRGGGEYGEDWHKAGSLANKQNCFDDFIAAGEFLVSAGYTNPSRLCVEGASNGGLLVAACINQRPDLFGCALAHVGVMDMLRFHKFTIGRAWTCDFGCSEKEEEFHWLIKYSPLHNVRRPWEKGHRRQQYPSTMLLTADHDDRVVPSHTLKFLATMQHVLCTSVKESPQTNPIVARIDRKSGHG

SEQ ID NO: 123866 - protein, 226 aa, Oryza sativa
  Clone ID: PAT_MRT4530_26659C.1.pep
MMSFPYSSGDLGEATTAAAAAVDMITLDQMFRDYDASTGDDLFELVWESCGGGEIDSGAGEVQPAGVPCCRRLLPGSSPEPTSEDEMAAWLSTIVTGSGGGGGDDVAAGGDHQDPAVKKPDGEPLTEKMDKKLPTRTEERRRVKHKARRNPGYAETHGLTEKRRRSRINEKFKMLQRLVPGCDKCSQSSTLDRTIHYMKSLQQQLQVDPPAAIYNRISVERIDMII

SEQ ID NO: 123867 - protein, 78 aa, Oryza sativa
  Clone ID: PAT_MRT4530_2665C.1.pep
GSSDLREDADGGRLRVRRLGGAVAEAVLMVALVAGRRLARRRRRRRRRPESWESRWNGNGSFGFVSPATARGFFGRVG

SEQ ID NO: 123868 - protein, 36 aa, Oryza sativa
  Clone ID: PAT_MRT4530_26660C.1.pep
SVIHGSYSIGLGGKEIALWFPQGLAEWWSILHPLDP

SEQ ID NO: 123869 - protein, 43 aa, Oryza sativa
  Clone ID: PAT_MRT4530_26661C.1.pep
SHVLVQVCVVSVRHAYDIYLASVNPVSSCPAWLYIMVVAKHFS

SEQ ID NO: 123870 - protein, 213 aa, Oryza sativa
  unsure (1)..(213): unsure at all Xaa locations
  Clone ID: PAT_MRT4530_26662C.1.pep
ASEVEDDAAAVLTNGGAGAAEVRRRRDQAKEILSKQAVKIATKAEEHERFIFKVTHLLGVLGFGTFCYLLGARPQDVPYVYCLFYVIFVPLRWIYYRYKKWHYYLLDFCYYANTFLLVMILFYPKDEKLFMVCFSFAEGPLAWALIVWRCSLVFSSFDKLVSVLIHLLPGIVIFTIRWWNPXTFAAMHXEGRAARVTWPYVEDKSYLWTWLFA

SEQ ID NO: 123871 - protein, 391 aa, Oryza sativa
  Clone ID: PAT_MRT4530_26663C.1.pep
MASEVEDDAAAVLTNGGAGAAEVRRRRDQAKEILSKQAVKIATKAEEHERFIFKVTHLLGVLGFGTFCYLLGARPQDVPYVYCLFYVIFVPLRWIYYRYKKWHYYLLFSYGYYNREEALQFQAIDCLDFCYYANTFLLVMILFYPKDEKLFMVCFSFAEGPLAWALIVWRCSLVFSSFDKLVSVLIHLLPGIVIFTIRWWNPQTFAAMHPEGRAARVTWPYVEDKSYLWTWLFAVPLAAYTLWQLMYFLIVNVLRRQRLLKDPEVMTSYRELSKKAQKANNIWWRLSGLLGDRNRPLMYILLQALFTVATMALTVPIFLSFQMHVVFQILKVCASTWNGGSFILEVMPRQVVQKEKKKLEMKPMEEANSSQNAEESQGDLSANGQHSSEHS

SEQ ID NO: 123872 - protein, 653 aa, Oryza sativa
  Clone ID: PAT_MRT4530_26664C.1.pep
MRAPSPSRRQGRIWLMQHLVLIAFLSASFLFLHIPCARCADLNSDRQALLAFAASVPHGRKLNWTLTTQVCTSWVGITCTPDGRRVRELRLPAVGLFGPIPSDTLGKLDALQVLSLRSNRLTISLPPDVASIPSLHSLYLQHNNLSGIIPTSLSSNLTFLDLSYNSFDGEIPLKVQNITQLTALLLQNNSLSGPIPDLHLPNLRHLNLSNNNLSGPRPPSLQKFPASSFFGNAFLCGLPLEPCPGTAPSPSPMSPLPPNTKKSFWKRLSLGVIIAIAAGGGLLLLILIVVLLICIFKRKKDGEPGIASFSSKGKAAAGGRAEKSKQEYSSSGIQEAERNKLIFFNGCSYNFDLEDLLRASAEVLGKGSYGTTYKAVLEDGTTVVVKRLKEVVAGKREFEQQMEIIGRVGQHQNAVQLRAYYYSKDEKLLVYDYMTPGSLCAALHGNRTAGRTTLDWATRVKISLEAARGIAHLHAEGGGKFIHGNIKSSNILLSQGLSACISEFGLAQLMAIPHIPARLIGYRAPEVLETKRQTQKSDVYSYGVLLLEMLTGKAPLRSPGREDSIEHLPRWVQSVVREEWTSEVFDADLLRHPNSEDEMVQMLQLAMACVAIVPDQRPRMEEVVRRIEEIRNSSSGTRLSPEDKLKEEAIQIT

SEQ ID NO: 123873 - protein, 98 aa, Oryza sativa
  Clone ID: PAT_MRT4530_26665C.1.pep
GALWLQAIEAHRKGAKVYHHAGLCAVNAGELLAEIHMPVSLLPMSVMEEDEFIRATATMGIIHHTDIAHTLKADALEEHGTPLIDEFLPKDPLMKYLF

SEQ ID NO: 123874 - protein, 122 aa, Oryza sativa
  Clone ID: PAT_MRT4530_26666C.1.pep
WNLSGFTSIYKNIYTKSSLLTHDDFEKMHGNTKAALDYYVSVSSDAYVATFFGNMDKMVTAMRTMQGHQKTLVLSRRAYANYTAVGLSGEQLAMAMWDAHREEYIMGRGSALPEQCFCEFKL

SEQ ID NO: 123875 - protein, 44 aa, Oryza sativa
  Clone ID: PAT_MRT4530_26667C.1.pep
KVTTRSHPVGNDSFLRNLYISVKLTDVEKPTKKRLTPNMCKNYA

SEQ ID NO: 123876 - protein, 70 aa, Oryza sativa
  unsure (1)..(70): unsure at all Xaa locations
  Clone ID: PAT_MRT4530_26668C.1.pep
KLELPLCRRRHAAGDHIELHQKRHGRXLDYEXRNXRLSAREXHKXSRDARQXLXDKGKRFXKKRYAEKDR

SEQ ID NO: 123877 - protein, 217 aa, Oryza sativa
  Clone ID: PAT_MRT4530_26669C.1.pep
MKTTHTAGTKSYARWAKDMRQDDPQKKQPHRAMVYLATHKKRAEDRNEHLAELESLMDEQPELDEDDQGRVAWKGDALHQVLGEEKPGQRVQCDAADREDLLSQQRYPFKMAKEGQKMFVKSTDNAHDQVIQSRVRSKKTRPSPMEATGASDPIVAILRSTSVGLQLWVCQWWGLVPHPAAATALERVRGVGGDSVGPASEVESSVAAPAQPVGGNG

SEQ ID NO: 123878 - protein, 185 aa, Oryza sativa
  Clone ID: PAT_MRT4530_2666C.1.pep
MAVKYFGHRTPVIVVTKSHMYERGQIHQSLYIVWYIKIIKYTVTSDTVHFPQQQFKVTLHQKFAMSSPHVLVVDDTHVDRHVVSMALMRHNVRVTAVESVMQALMFLDSEHDVDMIVSDYCMPDMTGYNLLMEVKKSPKLAHLPVVIASSDNIPERIRKCLDGGAKDYILKPVKIVDVPRIMKYI

SEQ ID NO: 123879 - protein, 114 aa, Oryza sativa
  unsure (1)..(114): unsure at all Xaa locations
  Clone ID: PAT_MRT4530_26670C.1.pep
KNGAPAVIFLANNLILGFMNDLMYXGENKTLNEKFFPLKKWLFFQPNSMALNMALAQLEVVKPVFKLPNVPVLLKKRVKFVRIVXFIGRKNFLGQNKARVLINKLLCWSEGTNK

SEQ ID NO: 123880 - protein, 711 aa, Oryza sativa
  Clone ID: PAT_MRT4530_26671C.1.pep
MRAGGGGGGDTRRTAAGQAMVELQANASSAGGGMVVGLSPLSETLWRDSKAMPGAAAALIGDVSARLTWKDLSVTVALGPGKTQTVLDELTGYAEPGSLTALMGPSGSGKSTLLDALAGRLAANAFLSGNVLLNGRKAKLSFGAAAYVTQDDNLIGTLTVRETIGYSAMLRLPDKMPREDKRALVEGTIVEMGLQDCADTVIGNWHLRGVSGGEKRRVSIALELLMRPRLLFLDEPTSGLDSSSAFFVTQTLRGLARDGRTVIASIHQPSSEVFELFDMLFLLSSGKTVYFGQASQACEFFAQTGFPCPPLRNPSDHFLRCVNSDFDKVKATLKGSMKARIERSDDPLDRMTTSEAIRKLVASYSRSQYYYAARERVNDISRLKGTVLDSGGSQASFLMQAGTLTKRSFINMSRDFGYYWLRLLIYLLVTVCIGTIYYDVGTKYTSILARAACTAFVFGFVTFMSIGGFPSFVEEMKVFQRERLNGHYGVAAFVISNTISALPFLVLICFLSGTICYFMVRLHPGFSHYIFFVLNLYASVTVVESLMMAIASVIPNFLMGIIIGAGIQGIFMLVSGYFRLPYDIPKPVWRYPMQYISFHYWALQGQCQNDMDGLVFDNQYPDQPKIPGDFILKYIFQINVHRSKWIDLSVIFSMIFIYRILFFLMIKVNEDALPWIRGYIARKRLQKKEPLGKTPSLRGYVVDPELGPNES

SEQ ID NO: 123881 - protein, 105 aa, Oryza sativa
  Clone ID: PAT_MRT4530_26672C.1.pep
LRTNHQSYWFFHWIQKKKSSSGLGPPPPLPSMGNRTRPRRTYRGEGRPPPPPRWPPPWGTPPCPFWTPPWPPGPCRSTPGFPPPRAFFTLPTQARAGGSLPPRGA

SEQ ID NO: 123882 - protein, 83 aa, Oryza sativa
  Clone ID: PAT_MRT4530_26673C.1.pep
MAFNKDTASRRLLRYQRHASSSGRLQALTTTYSRCRLQSYILVHQQVLSLCTHCDREQHSITVTACSKPPTFELLNNKFMQDW

SEQ ID NO: 123883 - protein, 76 aa, Oryza sativa
  Clone ID: PAT_MRT4530_26674C.1.pep
MGVAQPKRWAPRQPRIPLQGQGDAKQAAQMGQCVLTADLCNGEVASLRRRRSLLPRRRRGWTRMHSPKDIVAKNTL

SEQ ID NO: 123884 - protein, 60 aa, Oryza sativa
  unsure (1)..(60): unsure at all Xaa locations
  Clone ID: PAT_MRT4530_26675C.1.pep
FSALNTFDNLTNGNQEALVCVLLKSGGLENIACCSLSHTQLIIVMVGRRMXFLXCIXIAL

SEQ ID NO: 123885 - protein, 579 aa, Oryza sativa
  Clone ID: PAT_MRT4530_26676C.1.pep
MKATAAAAVGAAGTAGASPVGVGPAGDASAAAGRRVTRLRSRELGLEATTGAGGDVASDDPGPARKKGKVQPATKGAKGKAARADPPTPPPRPRLPPFPKSGDPMDFLKWDKEFRRICALPGTVIPCTVRRKPTGPRTVSITGVASVADNSMIRKASRSVVGISSRIPGIVHLPVLYLSCFSVAQEKGQKATDFFSDSLFASSGRSGSGKGGCVGSRADQDGRIGGREVRDGGISSGGPKGNTGPSITVETEMEQPRQLKGRPPRLGRMQEVSSAAGGVDFRRFRGCRECEKCRPWARLREESISGDSAAGGCDLQRENAISGERRRAADCGWGIDVVVRHHGRVSAYARGCGGSRAVVQRKGEHQRWSAAVAGDDLGSGGAVAAGDDLGSGGGQQRLVTASTPAGAAVAGTREEERVVDGGIISRGRSKHAVEGVQAEIAVEGVESVSDGKEIMQCSGIVVDWNKTSRLATIVTCSAAVCFDGALVHPNPKVCDDSTAGRLGISRGDVIVSYNGLRDFTLHTFEEYLLNLGWGFLESTDPSWTINLELEIYDPVRGTIRGVTFPLGFSDICEDVLVLP

SEQ ID NO: 123886 - protein, 391 aa, Oryza sativa
  Clone ID: PAT_MRT4530_26677C.1.pep
MEQQPKMVTGWAARDANGLLSPFSYPLRAKGDEDVVVKILFCGICHSDLSTIKNEWGNAKYPVVPGHEIVGVVAEVGSSVARFAAGDTVGVGYIASTCRACANCRDGFENYCAGLVPSFNAALPDGATVHGGFSELAVVNQRYVVRIPGGGGGASPAPLDRLAPLLCAGVTVYCPMRRLGLDRPGVHLGVAGLGGLGHLAVKFGKAFGVKVTVISTSPWKEAEAVERLGADAFLLSTNAEQMKAAAGTMDGIIDTVSAVHDLTPLITLLRTHGQLVPVGSPGKPVQLALYPLQSGPSPVGPRIDWAGGPIRARWAVLMVCDVADGKSVAGSMIGGMRDTQEMVDFAVEHGVAAEVEVIGMEDVNGAMERLQKGDVRYRFVIDVANTMARAR

SEQ ID NO: 123887 - protein, 172 aa, Oryza sativa
  unsure (1)..(172): unsure at all Xaa locations
  Clone ID: PAT_MRT4530_26678C.1.pep
MTSCPLPRSTVLISWASSPSMFSIGAAPPRPRSIPTAVLVGTPIPLPPPRFLPALPPPRVYSAPARXFRRPLLAPPRVSPPPLPPPESRPSPAAAAXPPEPRSSPAATAPPEPRSSPATAALHRCCKPPPPSPFPRAMPPPPLCYSLPPLLSRVPPSAGLPPGTHRSHARTR

SEQ ID NO: 123888 - protein, 458 aa, Oryza sativa
  Clone ID: PAT_MRT4530_26679C.1.pep
MPPKRSGTMKATAAAAVGAAGTAGASPVGGGPAGDASAAAGRRVTRLRSRELGLEATTGAGGDVASDDPGPARKKGKVQPATKGAKGKAARADPPTPPPRPRLPPFPKSGDPMDFLKWDKEFRRICALPEPAGTVIPCTVRRKPTGPRTVSVTGIASVADNSMIRKASRSVVGISSRIPDGKEIMQCSGIVVDWNKTSRLATIVTCSAAVCFDGALVHPNPKLLVHLPNRSTAEGQLLFFNAHYRIALLEALVDSPLEPANFGSSPKFGQKVFTLARDKKSSFFARSGTVLLQDPPFFLKYKYWLSLSSAIELCGTGGPAIDERGDVAGMTFGRLPNPDVLSISILQTCIDMWRRFSRVARPFLDMDLIAFETLDISHQEEIESEHGITDGFIVDLVCDDSTAGRLGISRGDVIVSYNGLRDFTLHTLEIYVPVRGSIRGVSFPLGFSVICEDVLLLP

SEQ ID NO: 123889 - protein, 150 aa, Oryza sativa
  Clone ID: PAT_MRT4530_2667C.1.pep
MRVSKHTCEVRYGELQGLNKQETADRFGNEQVHKWRRSYDIPPPNGESLEMCAERAVAYFKEHVVPQLTAGKHVMIAAHGNSLRSIIMQLDKLTSQEVISLELSTGIPMLYIFKEGKFIRRGSPVGPSEASVCAYTRKLAQYRQKLDSMV

SEQ ID NO: 123890 - protein, 152 aa, Oryza sativa
  Clone ID: PAT_MRT4530_26680C.1.pep
MLTNHDPISSICRRLYNISDVQTTSLFTPIRFMASEAATTCIGFILLTASSMVDEQSSHGEITETSFIVVSYLSLVLLFVFLRRFEAAPRNSPARGGAKAGVWVVTALLAAVFSWRVSALMPWPVDAIIWVMAASTVLGGFYALFLHHPGVD

SEQ ID NO: 123891 - protein, 176 aa, Oryza sativa
  Clone ID: PAT_MRT4530_26681C.1.pep
RGSWWTRTADAHAAPRSGAGRRDSPREAEQGAAAAGYPRCSSTGPRARRDGHGLAVRRQPEAAMRPRKGWNRCPCLLRPSRRRAPHLPSALLVRAVPPHIIGRAVPARRLRPAWPPPSSRHRPDAPDTPLPASSAASSPPPPQPRSPADAAASPAPALARRPHPRSAIAAAPAADL

SEQ ID NO: 123892 - protein, 84 aa, Oryza sativa
  Clone ID: PAT_MRT4530_26682C.1.pep
SHKSSGNGDTAKVKSVFRTSRESVQQRACKGQVSGVHLVKQVRWAAERPVAASGEEGERQPGGSGGCGLPTLGIVATVQKSVVR

SEQ ID NO: 123893 - protein, 143 aa, Oryza sativa
  unsure (1)..(143): unsure at all Xaa locations
  Clone ID: PAT_MRT4530_26683C.1.pep
YLRKEAPDGQEADFDQRPDLFMSTIRXASVHAHLGRXTGITRDDLESAAYTLILPLIGRAHXHGYQVRNTNYXTCCKHKLDTCIDLVCCCXCPHSKLLLASAPDMRLDELPNYEQLILLFDELIEHQHXMXIRIYGALNAGQK

SEQ ID NO: 123894 - protein, 69 aa, Oryza sativa
  unsure (1)..(69): unsure at all Xaa locations
  Clone ID: PAT_MRT4530_26684C.1.pep
EERKIDGFGRKKKEKKKKKKXDSKDYCLLDGNLWYFENRIIRLPILDSFALEQEFNWSFCRSWEFNHIS

SEQ ID NO: 123895 - protein, 71 aa, Oryza sativa
  Clone ID: PAT_MRT4530_26685C.1.pep
LLKISSCVRITVAGVRNVIESCMALEHLDVRSCPQVTRQSCEQAGLQFPGSCKVNFEGSLSESDPSVAIFF

SEQ ID NO: 123896 - protein, 83 aa, Oryza sativa
  Clone ID: PAT_MRT4530_26686C.1.pep
QEFRTYQEVSCSTMPIRRQQVLPLALIFMLIFSTTITISHASRLLGARSQPRQGSTVFLTSAKPGASGCTNDPNNPGRRCQTP

SEQ ID NO: 123897 - protein, 489 aa, Oryza sativa
  Clone ID: PAT_MRT4530_26687C.1.pep
MDDDPTSVNYELRTMGMRGDDDDDVEEDRVEVFGNTSDIPIHVNVDDDDPPVDDSGNGTPTGSSATCTNKKTKTSKDRRSVIIDRLNSASSIALTSDIWSGHAKEDYLSVVAHFVNSDWQLEKRVLGLRLIDESHTGANIAERVIAVAEEYGITDKVFSITLDNASANSKAMITLTPALFGYIGPSTGKKRTAWGKIFGSVVAVGLGAGNAGASPGAGNAGASPGAGLGAGNAGASPGAGLGAGSLSRMTSATALLQAASSTANLNSSELSAYLDSDTVNQYDDDFNILSWWQQHKLTYPVLSILAKDVMTVPVSTISSESTFSLTGRIIEDRRRRLNPRLVEILAMIKDWELADAKSQHTTENVELQNAYENMYLDDEIDGFFARACLGRHGHDGLAGPSGQPGTARGYLGRAWAVVVARGLARHGTACSSGRAGPTDLGPGPESVEEKPLSTDPDDVSGDVISGGGSAARTRKLAGERRRFGTNGGH

SEQ ID NO: 123898 - protein, 664 aa, Oryza sativa
  Clone ID: PAT_MRT4530_26688C.1.pep
MDDDPTSVNYKLRTMGMRGDDDDDVEEDRVEVFGNTSDIPIHVNVDDDDPPVDDGGNGTPTGSSATCTNKKTKTSKVWDDFEELYETTNGNRVRVFAKCNYCHKTLSARSSAGTGHLLRHIKSCKPRKLGSNALPQSMLRFSADGSVIPWEYSPEVARFELCRLIAREDLPISFGQSPAFVNYIKAAHNPRFVPVSRQTTTRDFYKLFKDRRSVIIDRLNSASSIALTSDTWSGHAKEDYLSVVAHFVNSDWQLEKRVLGLRLIDESHTGANIAERVIAVAEEYGITDKVFSITLDNASANSKAMDTLTPALSGYIGDLFLHQRCACHIINLIVKAGLDKFKPMLNDIRAAISFLNASNQRIATYKNVCIAAGYRPQIAGHLNTYGNVQNIANVVGPMKTKFMNYWSKIPILYSFAFILDPRAKIRGFSKVLQIMAQLIGDDYSAYLTTVRASLSDTFAKYERKFGSVRLHSSTIPGPSTGKKRTAWGKIFGSVVAAGLGAGNAGASPGAGNAGASPGAGLGAGSLSRMTSATALLQAASSTANLNSSELSAYLDSDTVNQYDDDFNILSWWQQHKLTYPVLSILAKDVMTVPVSTISSESTFSLTGRIIEDRRRRLNPRLVEILAVIKDWELAYAKSQHTTENVELQNAYENMYLDDEIDVNP

SEQ ID NO: 123899 - protein, 648 aa, Oryza sativa
  Clone ID: PAT_MRT4530_26689C.1.pep
MDDNPTSVNYELRTMGMHSDDDDDVEEDRVEVFGNTSDIPIHVNVDDDDPPVDDSGNGMPTGSSATCTNKKTKTSKVWDDFEELYETTIGNRVQVSAKCNYYHKTLSARSSAGTGHLLRHIKSCKPRKLGSNALPQSMLRFSADGSVIPWEYSPEVASSIALTSDIWSGHAKEDYLSVVAHFVNSDWQLEKRVLGLRLIDESHTGANIAERVIAVAEEYGITDKAGLDKFKPMLNDIRAAISFLNASNQRIATYKNVCIAAGYRPRMFGLDMDVRWNSTYLMLKHLIPHREPFIVFISTQHPFVNGHPLLTDLHWACAESVLCFLEQFYDSTVVLSGVYYPTSPLIMYHILKIAGHLNTYGNVQNLANVVGPMKTKFMNYWSKIPILYSFAFILDPRAKIRGFSKVLQIMAQLIGDDYSAYLTTVRASLSDTFAKYERKFGSVGLRSSTILGPSTSKKRTAWGKIFGSGNAGASLGAGLGAGNAGASPGAGLGAGNAGVSPGAGLGAGSLFRMTSATALLQAASSTANLNSSELSAYLDSDTVNQYDDDFNILSWWQQHKLTYPVLSILAKDVMTVPISTISSESTFSLTGRIIEDRRRRLNPRLVEILAVIKDWELADAKGQHTTENVELQNAYENMYLDDEIDVNP

SEQ ID NO: 123900 - protein, 107 aa, Oryza sativa
  Clone ID: PAT_MRT4530_2668C.1.pep
MANLPHSLVRNIVSTSTTLHPALQQERGRGGGEGARSRVRYAPSEEQEDAAVEHVFVLEMGLQLRRRKEGKDGEWRGKIRGNFGHWINITAGGDVTVCLKVGGGLVC

SEQ ID NO: 123901 - protein, 688 aa, Oryza sativa
  Clone ID: PAT_MRT4530_26690C.1.pep
MDDDPTSVNYELRTMGMRGDDDDDVEEDRVEVFGNTSDIPIHVNVDDDDPPVDDKGNGTPTGSSATCTNKKTKTSKVWDDFEELYETTNGNRVRVFAKCNYCHKTLSARSSAGTGHLLRHIKSCKPRKLGSNALPQSMLRFSADGSVIPWEYSPEVARFELCRLIAREDLPISFGQSPAFVNYIKAAHNPRFVPVSRQTTTRDFYKLFKDRRSVIIDRLNSASSIALTSDIWSGHAKEDYLSVVAHFVNSDWQLEKRVLGLRLIDESHTGANIAERVIAVAEEYGITDKVFSITLDNAYANSKAMDTLTPALSGYIGDLFLHQRCACHIINLIVKAGLDKFKPMLNDIRAAISFLNASNQLIATYKNVCIAAGYRPRMFGLDMDVRWNSTYLMLKHLIPHREPFTVFISTQHPFVNDHPLLTDLHWACAESVLCFLEQFYDSTVVLSGVYYPTSPLIMHHILEIARHLNTYGNVQNIANVVGPMKTKFMNYWSKIPILYSFAFILDPRAKIRGFSKVLQIMAQLIGDDYSAYLTTVRASLSDTFAKYERKFGSVRLHSSTIPGPSTGKKRTAWGKIFGSVVAAGLGAGNAGASPGAGNAGASPGAGLGAAKDVMTVPVSTISSESTFSLTGRIIEDRRRRLNPRLVEILAVIKDWELADAKSQHTTENVELQNAYENMYLDDEIDVNP

SEQ ID NO: 123902 - protein, 80 aa, Oryza sativa
  unsure (1)..(80): unsure at all Xaa locations
  Clone ID: PAT_MRT4530_26691C.1.pep
SAKQDLVSVNLTDDSSSCIFQSXFVSNLSNTLPMPASVAPFSXAADSESQNASIASLDSPSRALVMEGFGMRDCNIKCFQ

SEQ ID NO: 123903 - protein, 575 aa, Oryza sativa
  unsure (1)..(575): unsure at all Xaa locations
  Clone ID: PAT_MRT4530_26692C.1.pep
MDDDPTSVNYELRTMGMRGDDDDDVEEDRVEVFGNTSDIPIHVNVDDDDPPVDDSGNGTPTGSSATCTNKKTKTSKVWDDFEELYETTNGNRVRVSAKCNYCHKTLSARSSAGTGHLLRHIKSCKPRKLGSNALPQSMLRFSADGSVIPWEYSPEDARFELCRLIAREDLPISFGQSPAFVNYIKAAHNPRFVPVSRQTTTRDFYKLFKDRRSVIIDRLNSASSIALTSDIWSGHAKEDYLSVVAHFVNSDWQLEKRVLGLRLIDESHTGANIAERVIAVVEEYGITDKVFSITLDNASANSKAMITLTPALSGYIGDLFLHQRCACHIINLIVKAGLDKFKPMLNDIRAAISFLNASNQRIATYKNVCIAAGYRPXASLFDTFAKYERKFGSVRLHSSTIPGPSTGASPGAGNAGASPGAGNAGAXPGAGLGAGSLSRMTSATALLQAASSTANLNSSELSAYLDSDTVNQYDDDFNILSWWQQHKLTYPVLSILAKDVMTVPVSTISSESTFSLTGRIIEDRRRRLNPRLVEILAVIKDWELADAKSQHTTENVELQNAYENMYLDDEIDVNP

SEQ ID NO: 123904 - protein, 569 aa, Oryza sativa
  Clone ID: PAT_MRT4530_26693C.1.pep
MEDDPSSVNYELKIMGMRSDDDDDVEEDRVKVFGNTSDSPICVNVDDDDLPVDDSGNGTSTGSSATATNKKTKTSKVWDDFEELYDTTNGNKVRVSAKCNYCHKTLSVRSSAGTGHLLRHIKSCKPRRLGSNALPQSMLRFNADGFVISWEYSPEVARFELCRLIAREDLPICFGQSPAFVNYIKAAHNPRFVPVSRQTTAKDFHKLFKDRCSVIVERLKSTSSIALTFDIWSEKRVLGLKLIDVSHTGANIAERVIVVAEEYGITDKFYDSTVVLSGVYYPTSLLIMHHILEVAGHLNTYGNVENLANVVGPMKDKFMTYWSKIPILYSFVFILDPRAKIRGFSKVLQIMAQLIGDDYSAYLTTVRAALSDTFAKYESKFGSIRLHSSSILGPSTGKERTARGKIFGSVAAGASPGAGLGAGESPGASSLSRMTSATTLLQAASSTANLNASKLSTYLDSDTVNQYDDDFNILSWWQQHKLTYHVLSILAKDVMTIPVSTISSESTFSLTGRIIEDRRQRLNPRLVEILAVLKDWELADAKGQHTTENMELQNAYENMYLDDEIDVNP

SEQ ID NO: 123905 - protein, 1604 aa, Oryza sativa
  Clone ID: PAT_MRT4530_26694C.1.pep
MDAAANSTPTSSASTVAQNQLHQRQIFLMQQAQAQAQAQGQGHTPTLQQLSQQAMSFFPSNIDAHLPLPGPDSTPTSSASTVAQNQLHQCQIFLMQQAQAQAQAQGQGYTPTPQQLSQQAMSFFPSNIDAHLPLPGPIRFQQPLPQQPPPPQQQIHSWGPSLLQSWASLQQQQQAAVAAVARVQSPEVEMALQDVMQVCNPDIKTPFQSIEDAVNRLLPYHVVADYEAEEDDRILDSDTTGQIPSRLQQWDHNILVKIAEFTTTFEKQVLAYNIMTKKRAIGEFRSEERLMLEQALLMEEKQAMMGLRAEIESREKAGREAAEAKMRMAMAEQARAEAQAHSEMIGHGPLRAHAAASQGEDGPSHEMMQEQGEDGWGNAQRDDEDPSEDFLNDENEPENGNSDMQEDWRRSGELDLNSRRRSSGAPAWRAPRGAAPRANEPALWRRIDLHSDVAAHGADSSFSDGGDDDDDDADDSDGYSVPVEDGSRSDALVEESNSDDAENKGDDAASVQSNRSSDDDFFGFSDAFVDVEESDDDDDDVPRKESADYEYEPKGWKEMARAGECVAFWGRAIDGHKARGPTARPKARQIGPAQARHGPTGVVPVPARPNSRAVLGPLPRHGGPARPSTKEVGTILRSTHPPPKSSLSSCLLVDLWISIINGNSGAPDAQVAERQAAATVEEPECLRWMGDDEDDLEEERVQVFGITSSPPHFDGSQPETEPDVDGTGGGDGDGGSGVPSGTDSSATNKRPRSSKVWDDFEELYETTNGNRVRVSAKCNYCHKTLSARSSAGTGHLLRHIKSCKPRKLGSNALPQSMLRFSADGSVIPWEYSPEVARFELCRLIAREDLPISFGQSPAFVNYIKVAHNPRFVPVSRQTTTRDFYKLFKDRRSVIIDRLNSASSIALTSDIWSGHAKEDYLSVVDHFVSSDWQLEKRVLGLRLIDESHTGANIAERVIAVAEEYGITDKVFSITLDNASANSKAMDTLTPALSGYIGDLFLHQRCACHIINLIVKAGLDKFKPMLNDIRAAISFLNASNQRIATYKNVCIAAGYRPRMFGLDMDVRWNSTYLMLKHLIPHREPFTVFISTQHPFVNDHPLLTDLHWACAESVLCFLEQFYDSTVVLSGVYYPTSPLIMHHILEIAGHLNTYGNVQNLANVVGPMKTKFMNYWSKIPILYSFAFILDPRAKIRGFSKVLQIMAQLIGDDYSAYLTTVRASLSDTFAKYERKFGSVRLHSSTIPGPSTGKKKTAWGKIFGAAACGSSLGAGNAGASPGAGNAGASSGAGLGAGNASPGSGFGASASPGSGLGDAGASAGSGLGAGSLSRMTSATALLQAASSTANLNPSELSAYLDSDTVNQYDDDFNILSWWQQHKLTYHVLSILAKDVMTVPVSTISSESTFSLTGRIIEDRRRRLNHRLVEILAVIKDWELADAKSQHTTENVELQNAYENMYLDDEIDGFLTRACLGRHGHNGLAGPSGQPGTARGYLGRAWAVVVARGLARHGTACSSGRAGPTDLGPGPAVPGPCRAGRPIWPTIAPEEEEADEEGATELAFVVEDEEEEVDDIEGLVHHGPRLLAAVVEAERRHGVGGAEEEEEAGPDDE

SEQ ID NO: 123906 - protein, 893 aa, Oryza sativa
  Clone ID: PAT_MRT4530_26695C.1.pep
MAEQEQHGVEAVQQQQQKSAEESPDLQRDEYEVREGRRHQRRRGAGDDDSLTTCGGGLAAEEDGHGGPLLADDTRMPLLVALLQGAVVDAAAALVSAEWSAGSRFTGISTDPATATASAMEVWEIREPIVFNGNSGAPAAQLRTMGMRGDDDDDVEEDRVEVFGNTSDIPIHVNVDDDDPPVDDSGNGTSTGSSATCTNKKTKTSKVWDDFEELYETTNGNRVRVSTKCNYCHKTLSARSSAGTGHLLRHIKSCKPRKLGSNALPQSMLRFSANGSVIPWEYSPEDARFELCRLIAREDLPISFGQSPAFVNYIKAAHNPRFVPVSRQTTTRDFYKLFKDRRSVIIDRLNSASSIALTSDIWSGHAKEDYLSVVAHFVNSDWQLEKRVLGLRLIDESHTGANIAERVIAVAEEYGITDKVFSITLDNASANSKAMITLTPALSGYIGDLFLHQRWACHIINLIVKAGLDKFKPMLNDIRAAISFLNASNQRIATYKNVCIAAGYRPRMFGLDMDVRWNSTYLMLKHLIPHREPFTVFISTQHPFVNDHPLLTDLHWTCAESVLCFLEQFYDSTVVLSGVYYPTSPLIMHHILEIAGHLNTYGNVQNIANVVGPMKTKFMNYWSKIPILYSFAFILDPRAKIRGFSKVLQIMAQLIGDDYSAYLTTVRASLFDTFAKYERKFGSVRLHSSTIPGPSTGKKRTAWGKIFGSVVAAGLGAGNAGASPGAGNAGASPGAGLGAGNAGASPGAGLGVGSLSRMTSATALLQAASSTANLNSSELSAYLDSDTVNQYDDDFNILSWWQQHKLTYPVLSILAKDVMTVPVSTISSESTFSLTGRIIEDRRRRLNPRLVEILAVIKDWELADAKSQHTTENVELQNAYENMYLDDEIDVNP

SEQ ID NO: 123907 - protein, 148 aa, Oryza sativa
  Clone ID: PAT_MRT4530_26696C.1.pep
SLRWRAASPSPRIHIAFLAKASGSSLHSSLDLLSLHQLRRRHIAVVPLSLPHTSHSLSPSPRIIVSFPFSGKEGTAENNANASPPSHPTSLLASKTPKLEADSLAPTGAKLVPLLVSLAVGLAVRFLASHPAEVSPQAWQLLSIFLST

SEQ ID NO: 123908 - protein, 69 aa, Oryza sativa
  Clone ID: PAT_MRT4530_26697C.1.pep
QHLTCSISHEMMNDPLMGAGGYTYEAKNIRDWFRRGHNTRAITNAELEHKKLAADRALRSGIEECRTIT

SEQ ID NO: 123909 - protein, 55 aa, Oryza sativa
  Clone ID: PAT_MRT4530_26699C.1.pep
ETISILHARCHPLLQQSGTLRGLWYSRKCYSTDPIKWVLSITVTQQLSVSTLAGL

SEQ ID NO: 123910 - protein, 94 aa, Oryza sativa
  Clone ID: PAT_MRT4530_2669C.1.pep
MARVGVMELEILVREFLGVTKEVHGTASAWRGRQGGSGGGKIVGGGDKAAYGSCGGVERAPTKEELAAASAQLGRHGPRREMDQREKRGIFGPN

SEQ ID NO: 123911 - protein, 540 aa, Oryza sativa
  Clone ID: PAT_MRT4530_266C.1.pep
MSSPSSAHWLSLVGSIWLQTINGPNSDFPVYSSQLKELKSISQVQLNFLAFASDAGKLFGWFSGVAALYLPLWVVAFVGAAFGLVGYGIQYMFLDSSGLRYWHLFLLTALAGNGICWINTVSYLLCINNFASNSRVAVSLATSYLGLSAKVYTSLAETFPGLANSKTKTYLLLNAVVPLFVTVMVAPSLRVFDLKSAAASSDAAFLVMFAITLATGACAVVGSIGSTANGLSSKEHMISLGVLLATPILIPVGLKIRETLTKIRETQRENRIHDLGTDESESVESVVVIDVAADANAEVAKEEDAVVKKPQEEVGGLRLLKSPDFWLYFFSYMFSGTLGLVFLNNLGQIAESRGIGQTSTLVSLSSSFGFFGRLLPAFMDYYSAKSGYSISRTGSMASLMAPMAGAFFLLLNQRDFFLYLATAVIGTCTGAITSVAVSATRELFGTKNFGVNHNVVVANIPVGSLCFGYFAAFLYQREAGARGTLTCSGAGCYRETFAIWGTTCAVGTLLCAALYARSRNFAGRLPVRIPSCLARLANLV

SEQ ID NO: 123912 - protein, 212 aa, Oryza sativa
  Clone ID: PAT_MRT4530_26700C.1.pep
NWRPSAQSGQRRRPHSSSPPPPPRSSTPTRQPQPSQLHAVVDAAAAAALAVRRRRRSRHPRSSVPPPQRRARSRGQRLRVTGEETRLAFGGGRGGCRRRARRRGLSRRIRVPAGSSSSAFPRVRQAPCSGGSVELRVLAGPSSSTACSCRPAAPSTADTTGRRCRRMPSPAQRRPSSRRRPPPRPCSLFVMKNLQLGPRCQRYWRRPIPHRR

SEQ ID NO: 123913 - protein, 113 aa, Oryza sativa
  unsure (1)..(113): unsure at all Xaa locations
  Clone ID: PAT_MRT4530_26701C.1.pep
RYHPHSGQIAVPDIETIVGGNLATGVDASACRRANEDNDHQQVTDSLLHDDLQREGPIERSKFIKMEMLTNRXLDYDDRRSTTIAIEXLNARHLEGQTIKVNGAYASTKREDT

SEQ ID NO: 123914 - protein, 192 aa, Oryza sativa
  Clone ID: PAT_MRT4530_26702C.1.pep
MGSGSVLHVAWASGPATAASGRRSPEGASPPFKRQPCEAPMAPKAAPAKKGDAKAQALKAAKAVKSGTAKKTTKKIRTSVTFHRPKTLKKSRDPKYPRVSTPGRNKLDQYQILKYPLTTESAMKKIEDNNTLVFIVDLKADKKKIKAAVKKMYDIQAKKVNTLIRPDGKKKAYVKLTPDYDALDVANKIGII

SEQ ID NO: 123915 - protein, 75 aa, Oryza sativa
  Clone ID: PAT_MRT4530_26703C.1.pep
THKLSALSYRTVYPAKHTYIDLWRHNTHIKYTLSSSHTILWCTLVRTEGNLNSGRLMGRWESAGEGPSKSAQTQQ

SEQ ID NO: 123916 - protein, 151 aa, Oryza sativa
  Clone ID: PAT_MRT4530_26704C.1.pep
MARNERECLSSSTPVQMYEAGWEQTGNAPGWTQAPRHSIGVSSWASASEDQWHAPHDIQWGDNQRPRSSGVPPSPSGWRSSSSHWEFGEITWRMDTLDMQTEEIQYNLTEHIAQMQEWQQNADAQFANFNNMMQQQHDDLQAYFRFQGFTP

SEQ ID NO: 123917 - protein, 99 aa, Oryza sativa
  unsure (1)..(99): unsure at all Xaa locations
  Clone ID: PAT_MRT4530_26705C.1.pep
QHDVTPRQLARVCELAGDRDLGRGFGGHVHVEDDEANPTVLTTTTNDERXWPATKRTAAAARLDGDGGAPVVGGEGGRAAEVPLTTAHLTGGTGNGGDI

SEQ ID NO: 123918 - protein, 132 aa, Oryza sativa
  Clone ID: PAT_MRT4530_26706C.1.pep
KKKAGFFFLKGLKKGPFFTHPSGDRGVTPEFSDGSLGGNHFFFWGVVLKVGEKRGKGVSWGKFFSVKNSKKITTRKNKGKTRGGLMGGLTQFIWVGLTAPFKGGKPVGPIFLNNWPTPGGGGFVFWAPGGFF

SEQ ID NO: 123919 - protein, 62 aa, Oryza sativa
  Clone ID: PAT_MRT4530_26707C.1.pep
MQLLFTAASKQQRCPCLYYSLQFLLRANRSSSLERCTGERTAASFSSPVKRNDDDCDGDASL

SEQ ID NO: 123920 - protein, 181 aa, Oryza sativa
  unsure (1)..(181): unsure at all Xaa locations
  Clone ID: PAT_MRT4530_26708C.1.pep
MPNHFSVDHLPFCASQPPERDHANNALKHALERHRFDIIVDRPFSSISKQAAVPRISPRLPLQDASRTPAGDVKDLENASFXSRRRSRIASAIIVDYRCLGEPLFDSSRIHHLHNLTNLLDTHAWQVLELFEPSPFTXGGAPPSNLSNRNRCYPSFGDFFLQLVTAHVYLPLTLQCLLAKK

SEQ ID NO: 123921 - protein, 91 aa, Oryza sativa
  Clone ID: PAT_MRT4530_26709C.1.pep
MANPDPKFSTRSRTKTPASRRVGVSQPPAAAATTSRTADGGERRSASAALVPRPAVGLGLVSGEIALRVEEFWFPHSVLRLEFRILITGDG

SEQ ID NO: 123922 - protein, 101 aa, Oryza sativa
  Clone ID: PAT_MRT4530_2670C.1.pep
PRRVFGPTLKPSFTKNTGGYNRQRGNLSIFPWILLLPIGGTAKQRDIVYKGFLLIRLGVVLSSCYRGELPDPIIVCTHKECIGIWQTPKQIGAHQQLFTCK

SEQ ID NO: 123923 - protein, 205 aa, Oryza sativa
  Clone ID: PAT_MRT4530_26710C.1.pep
MKKKTGATPLVPVGGTKDSPLYSRLYNRDYRGSQPGVKPLSPPVNSNTRAIEGCGVILDYRQHERYAREDTYERGDTKLTVRGERIPYGRGDKVDGDIDLVGTEEEEKPTKPPQSAQLAPTWNPYGPKSPIQVSSRNLLDAYTAEGHDSQLAYILDAGRSDRRSIVLNSTNMASTQGGHGLEPHPELHGCTTVTRSSRGQSSNSH

SEQ ID NO: 123924 - protein, 87 aa, Oryza sativa
  unsure (1)..(87): unsure at all Xaa locations
  Clone ID: PAT_MRT4530_26711C.1.pep
SQXAADPGAXHRGAARXEPSRSRNPPAERVEAPLSPPPSXPRXNRRRGEGAGFNTGAPRGGSRRGKPSHPFAALGFXARVGGFGGIL

SEQ ID NO: 123925 - protein, 623 aa, Oryza sativa
  Clone ID: PAT_MRT4530_26712C.1.pep
MAAAAATSRLLRRHPPPLPLLLRSSISSSRPLLQQPELSPAAAADAAPATDAAPLPPKPSTGSPFYGENWRNPAAAANPSSSSLLPAVVGGGAHARAAAYSASPGAAELKETFAEWMAEQRWEEMKQLFEFWVRSLDPASGKPNRPDVDLFNHYLRAQLMSGALPIEMLDLAEQMREFEITPNTASHNLILKSMVQAQEADGAEKLIERMLQTGTQPDDESYNLVVNLLIKLNRVDSTLKYLDLMLKSGYTISSSVFVEYVRACVRSGRLDTLASVIEKCKATDQNKVLCPPWSWCVEIAEAAFEANNSKLGLFALEYLARWIARSERVIPPLHLSVDEGLVLSALSAAARTCSTDLLNAAWSILRKSLHQKRAPTPEAYLAKIYAHSSIGHLQRAFGTLREFENTYGNFEDIDSELFSPFTSLRPLVVACCKDGYTTLDSVYVQLENLSSADSPYKSVAALNCVILGCANIWDLERAYETFEAIKEKFGLTPDIHSYNALLHAFGKRKKTEEACNVFQHLVSLGVKPNATTYGLLVDTHLVNRDAKAALAVIAEMVDAGFTPSKETLKKVRRRCSRESDFDSDEKVQSLAKQFNYRMGGENRREMLFNIEYSAEFTSTPSPS

SEQ ID NO: 123926 - protein, 375 aa, Oryza sativa
  Clone ID: PAT_MRT4530_26713C.1.pep
MESGSYEGVLLGMGNPLLDISAVVDEAFLAKYDIKPGNAILAEEKHLPMYNELASKVNVEYIAGGSTQNSIRVAQWMLQIPGATSYMGCIGKDKFGEEMKKDAQTAGLHHCTYCLDLTIFKQAHYYEDDNAPTGTCAVCIVGGERSLVANLSAANCYRSEHLKRPENWTLVYVFHLIAFLTIIRSLIVVEKAKYIYIAGFFLTVSPDSIQLVAEHAAATNKVFMMNLSAPFICEFFRDAQEKALPYADYIFGNETEARTFAKVRGWETENTEEIALKISQLPKASGAHKRITVITQGCDPVVVADDGKVKTFPVIVLPKEKLVDTNGAGDAFVGGFLSQLVQEKSIDECVRAACYAANVIIQRSGCTYPEKPDFN

SEQ ID NO: 123927 - protein, 104 aa, Oryza sativa
  Clone ID: PAT_MRT4530_26714C.1.pep
AALVDRERAMKRKIPISPGQMTGLYGFIVRRALEPFAAPMANMTGAVSSAMPQMPIGSYAAPMMTPAAAPAQQSFLLTPQPQVGGYNMQPVSLSTKDKRYSVDV

SEQ ID NO: 123928 - protein, 40 aa, Oryza sativa
  Clone ID: PAT_MRT4530_26715C.1.pep
YSVLDSCVVLLRCRLVAFPGVVLLAYGLTYLLCSLLFYAV

SEQ ID NO: 123929 - protein, 73 aa, Oryza sativa
  Clone ID: PAT_MRT4530_26716C.1.pep
LQLNPKTKLTSLHGSEHVVNNYTSRGWNLMLLRKILFPCVIIKSPVSCKVKRHLKHSTGQFLCPKNSIGVGCE

SEQ ID NO: 123930 - protein, 42 aa, Oryza sativa
  Clone ID: PAT_MRT4530_26717C.1.pep
GILDGEVRVTRLMRSATPARHTVRGDANEDVVRRTDVHGHGY

SEQ ID NO: 123931 - protein, 136 aa, Oryza sativa
  Clone ID: PAT_MRT4530_26718C.1.pep
ELLPRKVNGPWEGKISHIATRGAHTAAITDSGELYNWGCDEGDRRLGLGSRGGPGAAGSLSVPSKPPWDLEIGDAFIIHYTYRCDYDMKGKLTHGKVAESRFDKRSYDSKPPPKNLPLPQNGLPQSVREREAYFVF

SEQ ID NO: 123932 - protein, 405 aa, Oryza sativa
  unsure (1)..(405): unsure at all Xaa locations
  Clone ID: PAT_MRT4530_26719C.1.pep
GAGLTWEDTALVGLGYCVGVTGVLPSHSRAPGVALGGTLTTSMARSPHDLVWGYGGFGAFGHXVCHRELLPGKVNGPWEGKISHIATRGAHTAAITDSGELYNWGCDEGDRRLGLGSRGGPGAAGSLSVPSKPPWDLEIGDAFIIHYTYRCDYDMKGKLTHGKVAESRFDKRSYDSKPPPKNLPLPQNGLPQSVLSYALNCEGKGSLLCFLKAKGWASSLSVGGCTYGTQRSSYAYIFEMSIRLTDSGLKNPKENCMFDVPVLCHLIPPGKPAAIQYGNGSVAGFFNEDSVTIGDLVVKDQEIAVWRCSACVNYFTKGIGIVLIGTWEMIIVLIFYLKFFYKYLFKLKDFDKGSYKRIVFSEVAVDVRAPSAYGSYLNVCRRLFIGHNNPHHVFMSTILALVPIN

SEQ ID NO: 123933 - protein, 89 aa, Oryza sativa
  Clone ID: PAT_MRT4530_2671C.1.pep
EIRLRTMTVPLLEDNPTNMEILFAFSPLATGTCNSPWRFDAPNLTLKPYIMYSCISDNTNMVSPYAGILVSQHYKIGPPPLWNRYTFHL

SEQ ID NO: 123934 - protein, 275 aa, Oryza sativa
  unsure (1)..(275): unsure at all Xaa locations
  Clone ID: PAT_MRT4530_26720C.1.pep
RQHKGAAPTCGPHGSAARERVREGRRHVGPTGSGTRREGLRLAGGPHRPGSKRGGGGGTWLGSAPSRPAGHGVAARAELAAGHGYRRRSGSRRRRLEAAAGEAAAAXRKAAASAEGDGECVERGGANERDGKREERGSSPASTAAGAKDEGGGDDPTSVXADGRRERGVPAAGLDGDAAAGVALAAAKLTAAADWLGGGSSGGGVRPXARRRAAALEEIGASAXRACESVAKRGKGRGGRGEALXGSGGGVAGRPGLFPXSGSRAASSTGQTPPL

SEQ ID NO: 123935 - protein, 401 aa, Oryza sativa
  Clone ID: PAT_MRT4530_26721C.1.pep
MWVRTKVNLDDHIIVPDLGPTDTSADPEKAVEDYVSSLSTPSMPMDRSRPLWELHVLGFPTAEAAATVALRMHHSLGDGVSLLSLLIACTRRADDPDAIPALPSSAAGRRRREGPLHALPPRPPLAAGALALAAWALSYLVLAWHTVVDVVCFTLTAASLMGDARTVLKGDEGAEFRPRRFVNRTISLDDVKNIKNAVGCVRESEGKKNIKVRTALMVNLRPTPGLHELAKMMESGKNNGVKWGNRFGYMILPFHLAKHDDPLEYVRKATKVTRRKKSSMEAIFTYWSADMVVKLFGIKAAASLCYGMFSNTTLSFSNLAGPSEQILFCGNPIVYISPTSYGHPHALTMHWQSYMNTIKLALAVDETQFPDAHELLDDFTESMRLIREAASRGTDKAQDGP

SEQ ID NO: 123936 - protein, 84 aa, Oryza sativa
  Clone ID: PAT_MRT4530_26722C.1.pep
MAGGPNGLIVSQRETERVLGSTLSHYRDTEGGGWACGITRVERDTVSVLHSRCARPRSTEIGEWARGIAHSKVKYLCALFYHFR

SEQ ID NO: 123937 - protein, 45 aa, Oryza sativa
  Clone ID: PAT_MRT4530_26723C.1.pep
LLAVAPWRERPGYTLAAYMYICTEQLHLGMRRSKEHSPLKKKKKK

SEQ ID NO: 123938 - protein, 249 aa, Oryza sativa
  Clone ID: PAT_MRT4530_26724C.1.pep
MAQAVEEWYRQMPIITRSYLTAAVVTTVGCTLEIISPYHLYLNPKLVVQHYEIWRLVTNFLYFRKMDLDFLFHMFFLARYCKLLEENSFRGRTADFFYMLLFGATVLTGIVLIGGMIPYISETFARILFLSNSLTFMMVYVWSKHNPFIHMSFLGLFTFTAAYLPWVLLGFSILVGSSTWVDLLGMIAGHVYYFLEDVYPRMTGRRPLKTPSFIKALFADDNVVVARPPNAGLGAGARFGAMGADPQAQ

SEQ ID NO: 123939 - protein, 40 aa, Oryza sativa
  Clone ID: PAT_MRT4530_26725C.1.pep
MAIELGAIAVADASLGGKLNLKLEKFGVDCGGMKKPKLSV

SEQ ID NO: 123940 - protein, 69 aa, Oryza sativa
  Clone ID: PAT_MRT4530_26726C.1.pep
KTVSVDEKTNIVVPEDRYGLYAIDTLDPDMIIGDDSVCYYHDMIVQMIKWGYQEGKTLFGFGYDFRQSN

SEQ ID NO: 123941 - protein, 101 aa, Oryza sativa
  Clone ID: PAT_MRT4530_26727C.1.pep
MQCTARCSARARAASLRPAADCGSHVGSPTPSISPPPPLPPSDDTRAPLDDRRITPASAPPASRSMLHDRTQRGTDTGDHLDSDEDGGDSGEARVRPSDIG

SEQ ID NO: 123942 - protein, 49 aa, Oryza sativa
  Clone ID: PAT_MRT4530_26728C.1.pep
RKKKAVLLFMIKTIFIDTNNDYGLFYSAYIGRNICILGAFMHIETDPLT

SEQ ID NO: 123943 - protein, 86 aa, Oryza sativa
  Clone ID: PAT_MRT4530_26729C.1.pep
MGKVARVSAGKTKRRLAFGVIRVSEALMGLGLKHPSQSLILVLGRSRQKESKYSDYRFGLREKTISSTVKVSVKVSGVTVEIMDTP

SEQ ID NO: 123944 - protein, 558 aa, Oryza sativa
  unsure (1)..(558): unsure at all Xaa locations
  Clone ID: PAT_MRT4530_2672C.1.pep
PRVRVINFGSAGVIRCRRCRTYINPYATFADAGRKWRXNLCTLLNDVPGEYFCGIDXPSGRRYDADQRPELSKGTVEFVAPTEYMVRPPMPPSYFFLIDVSVSAVRSGLLEVVAKTIKSCLDDLPRFPRTQIGFLTFDSTLHFHNFKSSLSQPQMMVVADLDDVFLPLTDDHLVNLVDSRHVVASFVDRLSNMFQDNVNVKSALNQPPNCVFPGVIDIYMLLRGTASQGAXQLHLWSQILVKCIVKQILVPYVSLLSRIAVENSLSDKLDSVRQQLQLKLVRSLKEYRNLYVVQHRIGGRLIYPESLRFLPLYILSICKSLALRGGYADVSLDERCAAGFSMMILPAKKLLNFIYPSLHRVDEVSSXTAIAPVVTDLGEMYRQADTGAIVSLLSRIAVENSLSDKLDSVRQQLQLKLVRSLKEYRNLYVVQHRIGGRLIYPESLRFLPLYILSICKSLALRGGYADVSLDERCAAGFSMMILPAKKQLNFIYPSLYRVDEVLSMEPDRIGGSLKWLPLTMQCLDTGGLYLLDDGFTFLVWLGRMLPPELVNNILGVSL

SEQ ID NO: 123945 - protein, 150 aa, Oryza sativa
  Clone ID: PAT_MRT4530_26730C.1.pep
KTETSPRESKHKSGKQGENTQTQAGRKFGGKKRNQRLCIYSLDLKPPSNNKFHFEQPPPRPGKRQNHPPTGGGEKTKPNQEPPQKQGSRTPGHPPFGKLSKKRVKPRKKHPCGGGKTGNPPWPPGRGRKRHTRTRGDGEKKTNRPPMTSI

SEQ ID NO: 123946 - protein, 146 aa, Oryza sativa
  Clone ID: PAT_MRT4530_26731C.1.pep
MPGAERKGNAAGGGKEKATAWDSGWMGRLLTAKFGKAQSHHRLRVNIGWNQPIGGISRWESSNCHDVVFSMESDQSKEAYLEESEFKKDAAWQAASVQFDLRRRGKSYVPSGPGEFVIYVGIAQGCIRAKQISQAAVFDFYVNKGR

SEQ ID NO: 123947 - protein, 65 aa, Oryza sativa
  Clone ID: PAT_MRT4530_26732C.1.pep
MEASWVASSSRRLCRRRPSALVKSLHNDDSATGGSETNVGQGSALPCEQDEGPVPPPIPADLAAA

SEQ ID NO: 123948 - protein, 61 aa, Oryza sativa
  Clone ID: PAT_MRT4530_26733C.1.pep
MEQASCDYPTSAGARGHGTREHVYLGATRVALPLAAADAFGATATPSLGPSPALGSASGSP

SEQ ID NO: 123949 - protein, 90 aa, Oryza sativa
  unsure (1)..(90): unsure at all Xaa locations
  Clone ID: PAT_MRT4530_26734C.1.pep
FFFFFFCEGGQYMSHILQLAKEVTLLHSSHSTHSNISTTCQHHHHNTGTRVVAPGQFRHRYPAGVPSFPYSAVRHSAAHVLSDPIXSIQP

SEQ ID NO: 123950 - protein, 59 aa, Oryza sativa
  Clone ID: PAT_MRT4530_26735C.1.pep
GCSQIFLSCRPNDVSDTCRGIYSGGPSPASRGGYYTIHNLSIAHLLFINKNVKNIYLAL

SEQ ID NO: 123951 - protein, 327 aa, Oryza sativa
  unsure (1)..(327): unsure at all Xaa locations
  Clone ID: PAT_MRT4530_26736C.1.pep
ATSPGLSPAPLRAPPAPPPTLSPPPPTPPPPPRPNPNFFSTPPPPPPPPHARCHPPPPXPPLPAASSPPPXPPPTPSPCPASPSSPPAPPAAAPSSSPFSRTPSPRPPAPLPRLSPRSPRFSRAEPTPPPPSPPSPPPSPTPSATGSSCPAAGPRGPPRRPRRSTRSTAPSRPRRPRRSTRSRSPSSSCWPXPPPPAPPPRRRRAAAAPPQVLRLVGEPRAVLPHARRVPLRLPPPLPLPPLRRGGGLAPPXSPTPTRPPPGRASTTRSSSATPSPAIPSAGSASSVACDSAASTSTPSPPTSSSIPSSRRRSMSMLIPSLATLLQV

SEQ ID NO: 123952 - protein, 148 aa, Oryza sativa
  Clone ID: PAT_MRT4530_26737C.1.pep
MGKDSKPKDKGKGKQAAGSSGGDDAGGGGKGGKGKGGKSADGLGTCTYVKARHVLCEKQGKINEAYKKLQDGWLDNGDKVPPAEFAKIAQEYSECPSGKKGGDLGWFPRGKMAGPFQDVAFSTPVGATSAPFKSTHGYHFILCEGRKN

SEQ ID NO: 123953 - protein, 158 aa, Oryza sativa
  unsure (1)..(158): unsure at all Xaa locations
  Clone ID: PAT_MRT4530_26738C.1.pep
TSPRPRLQTERHYAYAGSRAQCRSRRVHRSRTRQATSRRQPRWARLYGDEGALQAAPTRQPVXVSWRPPSQDFRHYRSGFYAGSPQCGXRLNHPVTXVGYGAXADGGGEYWLVKNQWGTXWWGEAQAYMQQSQXGRQPAQAGNCRHRQHYAFYPTMDS

SEQ ID NO: 123954 - protein, 162 aa, Oryza sativa
  Clone ID: PAT_MRT4530_26739C.1.pep
MGKDSKPKDKGKGKQAAGSSGGDDAGGGGKGGKGKGGKSADGLGTCTYVKARHVLCEKQGKINEAYKKLQDGWLDNGDKVPPAEFAKLNAAVPVISYESQMIAQEYSECPSGKKGGDLGWFPRGKMAGPFQDVAFSTPVGATSAPFKSTHGYHFILCEGRKN

SEQ ID NO: 123955 - protein, 394 aa, Oryza sativa
  Clone ID: PAT_MRT4530_2673C.1.pep
MLASKLAHWDEIDISQALALTAAKAASVSAVSKLSTEPFKEWFNNFYDGFPKNDRIWFAYEGSASFELTCDFRFDEINSEKYDKSREVFSTAISPCIIPVGIYQDKNIQMTYEFYHPTSAARQFGMGQLPISLFFADRIQSRGEISSFHMMDWLLNLPGPPLGNIDNIKLRTFRSMAFDRWWIEWKKHLFHQSPSMYLTNLFPDDVPLRPKAAAETAARCGWIDDDGGELRVDGAGGAPMICGGNGGRDEDGDDIAMLMKETATDGDDRSDSGTDWRPAGGGDTKNHAEATLEKAAVEGGDGDAERRSRRSFYRGLGVSMEAHGDRRREGKLWLEEEKSIRIELKSVGFQTKLAEVSKREKEEEIEEIISPQLIWPGKEGGGRILEGGGGLQRG

SEQ ID NO: 123956 - protein, 108 aa, Oryza sativa
  unsure (1)..(108): unsure at all Xaa locations
  Clone ID: PAT_MRT4530_26740C.1.pep
ACSGSFLPIMLLPLLLAGAAVAXGARGAXGWRRAGRRVGQQQQQCWEVLMEIKSCTGEILLFFINGEAYLGPGXCXAIRVIEQSCWATDAMLSVIGFTPXEXDMLKGY

SEQ ID NO: 123957 - protein, 91 aa, Oryza sativa
  Clone ID: PAT_MRT4530_26741C.1.pep
SSQMFCLTFKYFLGEMYRSFIFSELSRAVHELVLGSRPLYISFRQWVSLIRRHLGLHHQERARYTYKALRLTFYIGIMLINRGLKTHVLYA

SEQ ID NO: 123958 - protein, 77 aa, Oryza sativa
  Clone ID: PAT_MRT4530_26742C.1.pep
SIKLIQASAVLDLTEDDFDFLTSNKVWIATDRSRARRCVEACVYGTLDFVGYPRFPAPVEFIAAVIAYYVHPVNIQT

SEQ ID NO: 123959 - protein, 139 aa, Oryza sativa
  Clone ID: PAT_MRT4530_26743C.1.pep
TTERRRRSSPLLTTGHAVSHQGRGRGGRAWRSEGSKQSPSVQRRRGTHRGVLGPRRRRRALGLGEENGEAVVPIARPPPHPSLRHAPPCQSPRRPPPHPPLRRTPLCQPPRCPPLHSPPQRPGPPLSLRPPPQCPPRRP

SEQ ID NO: 123960 - protein, 87 aa, Oryza sativa
  unsure (1)..(87): unsure at all Xaa locations
  Clone ID: PAT_MRT4530_26744C.1.pep
PIFLWYIGXVLLWERDVFRIQQYEVXQVEGNFRQGLIFPRAQGVHVMVNYHNXXXRNLDVLGAQARGTXESRTRCXGCDPLEFRLWV

SEQ ID NO: 123961 - protein, 151 aa, Oryza sativa
  Clone ID: PAT_MRT4530_26745C.1.pep
MAKARKHPQGPFVAAEERSLLGFHHRRGGSVASAYGDDDDLPDLAEADVWYTQSFGGECGSSRRRRTRAGNRRGGGGGKHKSSSQGSVWRPARSSSPAPNSVADVERPPTAVIRRRVGSRSGQVPRQRSMHAWLGVSYSNTFKSASEIDFT

SEQ ID NO: 123962 - protein, 121 aa, Oryza sativa
  unsure (1)..(121): unsure at all Xaa locations
  Clone ID: PAT_MRT4530_26746C.1.pep
WGGARAPPTPFPLFGGPPPLGPWVFPGGFSHXREVPAPAPFLFSTLQASRGPGGPPFEKNPGPFFPLFGGLKKGDHGSTQGPGALSDMFSPWGGPGVFPTRGGLAPFLFYRKSPPVRFFLP

SEQ ID NO: 123963 - protein, 62 aa, Oryza sativa
  unsure (1)..(62): unsure at all Xaa locations
  Clone ID: PAT_MRT4530_26747C.1.pep
RFLNACRMDVLLVXWFFVHLSXYSKQGLTLLILFMFFNFNGFTTHPSVMVSLEQVIYQFNFL

SEQ ID NO: 123964 - protein, 65 aa, Oryza sativa
  Clone ID: PAT_MRT4530_26748C.1.pep
MFPGGNPDALAGRRLGLARFWCGTEGMAHRHGHDAVHGGDTRCGDGAIDHVRGSVVTGKERTRSM

SEQ ID NO: 123965 - protein, 85 aa, Oryza sativa
  unsure (1)..(85): unsure at all Xaa locations
  Clone ID: PAT_MRT4530_26749C.1.pep
FVLPDSYVGPEFKGYGAXLFVNGEIFXRSPERQRRVKPVPPKASDRPWFNDRAPFARRRENPRWFFFPKPNNKTPWVGLGPSSLF

SEQ ID NO: 123966 - protein, 1385 aa, Oryza sativa
  unsure (1)..(1385): unsure at all Xaa locations
  Clone ID: PAT_MRT4530_2674C.1.pep
LCAAAGDDGDGARRLGARGGDGTRERRRDVDGDGDSGDATGGDGARRLGARGDGGAAQRRRQRGGGAARGARGARQRGRGGARARGTTSSTVTNYVGKMQALVDELTVSGKVVDDYDLISYIIAGLDDDYEPMIQSIVGQPDQVTVGEAFAQLLNFEHRLLLHRGGEDGQVSVNSASHGXGQQRGNTSSGSGGNNNFSNNRGGRGRGNPSSGRGNPAPGGVDNRPKCQLCYKRGHTVKECRYDENFVADERFAGPASSYGVDTNWYLDTDETDHVTGDMKKLTVREKYHRHDQIHTASGAGMEITHIGNSVVKTPSRNIYLNNILYAPKANKNLVXAYRLTCDIFAFIELYRKFFCIKDLATKRTLLRGRCHNGLYARPLASPSHHPIKQVYGIFTPSFERWHSRLGHLSYNVVEKVIKSHRLPCLDMSSKGSVCDTCQXEQLPFSRSSSESEYPLELIYSDVWGAAPQSVGGFKYYVSFIDDYSKFTWIYLLKYKSDVFQKFHEFQQLVERLFDRKIIAMQTDWDGEYQKLHTFFQQTGITHHISNPHTRQQNGSAERKHRHIVEVGLSLLAHSSMPLKFWDEAFLSAVYLINRTPSRVLKDISPLEKLFTKQPDYTTLRIIGCSCWPNLRPYNKHKLXIPSKEYTFLSCSIFHKGFKCLDPSNGRDYISREVVFDENKFPFFKVHPNAGARLRAEISLLPDAPAPVGQQHNCHVNNSPENPEVLQQNSTESAAYHNTAQAGTDATSSSAAPQQPSGWPLQQASSTAPSSPSSSPGQPTGATSSPVQKSPRGSAPGXSPLSGSSAARGTASSHATTTKDPTSAPDAAGNDDAAGHDGAGDDAPRPRRLXSGIRKEKVYRDGTVKWGLLTSTDKPQNLQEALNNSNWKEAMDTEYMALIKNKTWHLVPPIKGRNIIDCKCAYKIKRKXDGSLDRYKACLVAKGFKQLYGIDYVDIFSPVVKAATIRIILXSVAVSRGWSLRPLDVHNAFLHGVLEEEVYMKQPPGYENPSNPRYVCKLDKALYGLKQTPRAWYSRLSNKLCDLGFRGSKADTSLFYFNKGDLTMFLLMYVDDIIVVSSKEDVVSVLLQNLQKDFALKDRGELHYFLGIKVTKASNGILLTQXKYISDLLKRTGMSDCKSVNTPLSPSEKLTANEGTVLGVNDATXYRSIVGVLYLTLTRPDIAYSVNKECQFLHSPTTLHWASXAVKRILRYFKQCTSLGLKICXSKSLLVSAYSDANWAGXFDDRRSTGGFAIYLGDNLVSLNAKKQATVSRYSTEAEYKALANATTEIMWVQTLLQELHISSPSTAHLWCDNMGARYLSFNPVFHARTKHIEVDYHFVRERVAQKLLQVDYVSTRDQVAYSFTKAISVKQLENFRYNLNLGKL

SEQ ID NO: 123967 - protein, 107 aa, Oryza sativa
  Clone ID: PAT_MRT4530_26750C.1.pep
FFFFLDEQKNQYKNLVTRICNNVLQFSQPRQAQLFNRFCVHIISKTERVTIVAAVNMTASTNQFHNQRREVVSQTIAQSWISFHLQVVCTCQGRPGTGKIHLSFLPS

SEQ ID NO: 123968 - protein, 103 aa, Oryza sativa
  Clone ID: PAT_MRT4530_26751C.1.pep
ISSLYTTQHITMSSKCPRCGKTVYFAERQTAEGRDWHGICLMEAIKEKKASAAKHMFCIDAHPNIDPTKQPAAGASGKSFCTGCGAAQAPGDKFCPGCGNKVA

SEQ ID NO: 123969 - protein, 91 aa, Oryza sativa
  unsure (1)..(91): unsure at all Xaa locations
  Clone ID: PAT_MRT4530_26752C.1.pep
MAPSPSSLTNMFATKGLDLKDLTVLSGXTHTIGIVHCPYYAYRLYNFTTVGDADPSLDLNYAAKLRTRARRRATYAHARERGSLIELCVPP

SEQ ID NO: 123970 - protein, 80 aa, Oryza sativa
  Clone ID: PAT_MRT4530_26753C.1.pep
FLSNFASRCCEALILIEFHLPEGNARRSSGASSSHPMLALDPNPQQHNSLLLPAVTAATEHPRRHKSLSPPLFLSLTQME

SEQ ID NO: 123971 - protein, 59 aa, Oryza sativa
  Clone ID: PAT_MRT4530_26754C.1.pep
ATAYYYQAPASVGLPWTTRSAPTSTTSTSPTASRMRIACTTSSDVSSTRPGPTSTTTSP

SEQ ID NO: 123972 - protein, 158 aa, Oryza sativa
  Clone ID: PAT_MRT4530_26755C.1.pep
DNIKFSSVHCHLPNIIRLASKNCSMTFVYLRSSSVTMHVWIWIALTFMHLYLNRWGSWQYRPCVRSSFGVCLRTLCSPPAGSLSAAASYAPAGLGPRVLAPRRGSPLTLSSPCSIATLLRDCAFACRVRSGFPGASLAPGSIQDDNRVAGLYLSKKQR

SEQ ID NO: 123973 - protein, 45 aa, Oryza sativa
  Clone ID: PAT_MRT4530_26756C.1.pep
VLHYCSHYIYFIQSAEIWNDLQLVTCYVCFRIVRAASVLQQDDQS

SEQ ID NO: 123974 - protein, 73 aa, Oryza sativa
  unsure (1)..(73): unsure at all Xaa locations
  Clone ID: PAT_MRT4530_26757C.1.pep
GPAGSPAKVSSACRLPXNVKPXQIKGSMXENGXLTVTVPKEEAKKPDVKSIQIXGLGIAGVMLRNGGSTGGGF

SEQ ID NO: 123975 - protein, 570 aa, Oryza sativa
  unsure (1)..(570): unsure at all Xaa locations
  Clone ID: PAT_MRT4530_26758C.1.pep
MSEERESFESQWAPSDVTEDNLKEMVAHGVLPAKEIIGWRPAFGEAFPTPDTHEIVVFAHFFYDGFSLPTSRFFRGILNFYGISLHHLNPNSIVHIANFIHACEAFLGIRPHFALFRRIFFLKPQPNKSKPCVVGGASFQLRGTLSQKYFSMPFKTLNKGWHANWFYIQNPEPALPEYCCLPPVYQDTWNSLPIGDEAAQAVELMERMIKLKEQGLQGEQITRHFIKCRLAPIKERSCTAFEFDGKHDPNREDPDSLDFRVMKERMYKIFSNAIVVSYSHLLPVVPFNAFNPPPXRPGDRGTTKKLPKQATPRKKTSSRPAPKIRKSSXDPSGKDSDPTSVXQGIVINKQKEDEELCLLKKALGQATRIVNESNFELSGSSKVNVVQAAKISQLEKQTQILENDKAELARQRDLASKEVEDRKIKSQAQFDVLAGKIKKLEGARDEVANAAAPIVQAMFLNNNGPSALDASEIFDKLRVAPDIYFKNIKEAGSMGASMAFVMTKSLYPRVDIDAIDGFADGTSEEAALDLISDAKKAADKIAADVVERFQDNDLRPAGPENSDDEKTDTD

SEQ ID NO: 123976 - protein, 63 aa, Oryza sativa
  Clone ID: PAT_MRT4530_26759C.1.pep
RGWWSEQGYFGEGCRCVRLWASVPLHRGMPRVRLARGRQYAAQLPSMCRVLGHQGWVVSAGQW

SEQ ID NO: 123977 - protein, 560 aa, Oryza sativa
  unsure (1)..(560): unsure at all Xaa locations
  Clone ID: PAT_MRT4530_26760C.1.pep
MAEERESFESQWAPSNVTEDNLKEMVAHGVLPAKEIIGWRPAFGEAFPTPDTHEIVVFAHFFYGGFSLPTSRFFRGILNFYGISLHHLNPNFIVHIANFIHACEAFLGIRPHFALFRRIFFLKPQPNKSKPCVVGGAGFQLRGTLSQKYFSMPFKTSNKGWHANWFYVQNPEPVLPEYSCLPPVYRDTWNSLPTGDEAAQALLTLAASRTVQCIQSSSTVNNEGYYTQEFALMKLDPPIAQRRSPRHQTGQGSGGPRIRSETQPMNTLGPMIGDEEEIPRIRATEDSCPPILVKWWDDNLQPQGIVINRQKEDEEVCLLKKALNQATRIXMNEAKTATLERIXPHLGTLEATRSQLHEARELAKKNEHDLRDLNVVQAAKISQLEKQIQTLENDKAELARQRDSALKEVEDRKIKSQAQFDVLVDKINKLEGARDKVANAATPLIQAMFFNNAGSSTLDATEIFDKLRVAPDTYFKNIKEAGSMGASLALVITKSLYPRVDMDAIDGFADRTSEEAALDLISNAQKAADKIAADVVERFQDVDLQPTGFDKSNDEKTDTD

SEQ ID NO: 123978 - protein, 656 aa, Oryza sativa
  unsure (1)..(656): unsure at all Xaa locations
  Clone ID: PAT_MRT4530_26761C.1.pep
MAEERESFESQWAPSDVTEENLKEMVAHGILPAKEIIGWRPAFGEAFPTPDTREVVVFSHFFYGRFSLPTSRFFRGILNFYGISLHHLNPNSIVHIANFIHACEAFLGIRPHFALFRRIFFLKPQPNKSKPCVVGGAGFQLRGTLSQKYFSMPFKTSNKGWHANWFYVQNPEPALPEYSCLPPVYQDTWNSLPMGDEAAEGVELMERMIKLKEQGLQGEQITRHFIKSRYSHLLPVVPYNAFNPPPPETAGKQPRQANPKKKTSSRPMPKIRKSSRSFWKRLRPTGMETGSSKETGPTAGNHPSDEQPATDNIDPSSEPPAGSQSAEAGVGASQELPTRNQSDTEQNKDIPEVEAQADSPPKKDVNVDPGSSSPAKVQGPTHPRPEIITGPMIGDEEEILRIQSAEDSHPPTLIKWWDDDKQPQGIIINRQKEDEEVCLLKKALNQATRIVNXHLRNEAKTATLAKLVPHLXKLEATRNQLHEIKELARKTEHGLRDRVAELQESNFELIGSSKVQAARISELEKQVQNLEKGKAELAKQRDSALKDVEDGKVKSQAQIDVLLRIAPDIYFKNIKEAGSMGASLALAMTKSLYSKIDIDAVDGFADGTSEEAALDLINDAQKAADKIAGDIVERFQDNDLRPAGSNNSDDEKTDTD

SEQ ID NO: 123979 - protein, 522 aa, Oryza sativa
  Clone ID: PAT_MRT4530_26762C.1.pep
MGDEVAQAIELMDRMIKLKEQGLQGEQITRHFIKSRLAPIKERSRTAFEFDGKHDPNREDPESLDFKVMKERMYKIFSNAIVVSYSHLLPVVPFNAFHPPPPEFALMKSDPPIAQRRSPRRQTGQGSGGPKIRSEAQPNTSNPASQSDSRKRKLVLSDDEGDDAEKPGDRETTRKLPKQATPKKKTSGRPVPKISKSSRKPSDIDPSGKDPEPTDMEASPSKETGPTAEDRPSDKQSATDNVEPRNEPPTGNQSAEAEVGANQEPPTRNQSGPMIGDEEEILRIRSPEDSHPPTLIKWWDDDKQPQGIIINRQKEDEEVCLLKKALSQATRIVNNNTVQAARISELEKQVEALEKDKAELAKQRDLALKDVEDRKIKSQAQFDVLVGKINRLEGARDKVANAATPLIQAMFFNNAGPSTLDASEIFEKLRVAPDTYFKNIKEVGSMGASLALAMTKSLYPRVDIDAVDGFADGMSEEAALDLISDAQKATDKIAVDVVERFQDNDLRPTGSNNSDDEKTDTD

SEQ ID NO: 123980 - protein, 54 aa, Oryza sativa
  Clone ID: PAT_MRT4530_26763C.1.pep
SMMASHPPHEGLYCSRCLTGSRPRIPVAHVSHQHGCRSSLCVSAGTGSSASPPP

SEQ ID NO: 123981 - protein, 693 aa, Oryza sativa
  Clone ID: PAT_MRT4530_26764C.1.pep
MAEEKKSLKSQWAPSDVTEDNLKEMVAHDVLPAKEIIGWRPAFGEAFPTLDTHEIVVFAHFFYGGFSLPTSRFFRGILNFYGISLHHLNPNSIVHIANFVHACEAFLGIRPHFALFRRIFFLKPQHNKSKPCVVGGAGFQLRGTLSQKYFSMPFKTSNKGWHANWFYVQNPEPALPEYSCLPPVYQDTWNSLPMGDEAAQAVELMERMLKLKEQGLQGEQITRHFIKSRLAPIKERSRTAFEFDGKHEPNREDPDSLDFKVMKERMYKIFSNAIVVSYSHLLPVVPFNAFNPPPPEFALMKSDPPIAQRRSPRHQTGQGSRGPRIRSETQPSASDPIGQPDSRKRKLVLSDDEADDAARRPGDRETTKKLPKQATPRKKTSSRPVPKIRKSSRIMIGDEEEIPRIQAAEDSCPPILVKWWDDNLQPQGIVINRQKEDEEVCLLKKALNQATRIVNRIHLRDEVKTATLERLVPHLGTLEATRSQLYEARELAKKNEHDLRDRIAELQESNFELSGSSKVQAAKISQLEKQIQTLENDKAELARQRDSALKEVEDRKIKSQAQFDVLVGKINKLEGARDKAMFFNNAGSSTLDAAEIFDKLRVAPYTYFKNIKEAESMGASLALAMTKSLYPRVDIDAIDGFADGTSEEAALDLISDVQKAADKIAADVVERFQDVDLRPTGSDKSDDEKTDTD

SEQ ID NO: 123982 - protein, 69 aa, Oryza sativa
  Clone ID: PAT_MRT4530_26765C.1.pep
MADWGPVFIGLVLFILLSPGLLFQIPGKGRIVEFGNFQTSGLSILVHSIIYFALIAIFLLAVNVHMYLG

SEQ ID NO: 123983 - protein, 67 aa, Oryza sativa
  Clone ID: PAT_MRT4530_26766C.1.pep
HFALFRRIFFLKPQPNKSKPCVVGGVPTGDEAAQAVELMERMIKREDPDSLDFKVMKERMYKIFSNA

SEQ ID NO: 123984 - protein, 545 aa, Oryza sativa
  Clone ID: PAT_MRT4530_26767C.1.pep
MAEERESFESQWAPSDVTEDNLKEMVAHGVLPAKEIIGWRPAFVYRDTWNSLPMGDEAAQAVELMERMIKLKEQGLQGEQITRHFIQCRLAPIKERSRTAFEFDGKHDPNREDPDSLDFKVMKERMYKIFSNAIVVSYSHLLPVVPFNAFNPPPPEFALMKSDPPIAQRRSPRHQTGQGSGGPRIRSETQPSASDLVGQSDYRKRKLVLSDDEADDTTRRPEDRETTKKLPKQATPRKKTSNRPVPKIRKSSRKPFDMDPSGKDSDPTNMNTSSSKETGPTAGDHLSDNQPATDNVESVNTLGPMIGDEEEIPRIRAAEDSCPPILVKWWDDNLQPQGIVINRQKEDEEVCLLKKALNQATRIVNISQLEKQIQTLENDKAELARQRDSVLKEVEDRKIKSQAQFDVLVDKINKLEGARDKVANAATPLIQAMFFNNAGSSTLDATEIFDKLRVAPDTYFKNIKEAGSMGASLALAMTKSLYPRVDMDAIDGFANGTSEEAALDLISDAQKAADKIAADVVERFQDIDLRLTGSDKSDDEKTDTY

SEQ ID NO: 123985 - protein, 720 aa, Oryza sativa
  Clone ID: PAT_MRT4530_26768C.1.pep
MAEERESFESQWAPSDVTEDNLKEMVVHGVLPAKEIIGWRPAFGEAFPTPDTHEVVVFAHFFYGGFSLPTSRFFRGILNFYGISLHHLNPNSIVHIANFIHACEAFLVYRDTWNSLPMGDEAAQAVELMERMIKLKEQGLQGEQITRHFIRCRLAPIKERSRTAFEFDGRHDPNREDPDSLDFKVMKERMYKIFSNAIIVSYSHLLPVIPFNAFNPPPPEFALMKSSPPIAQHQSPRRQTSQGSGGPRIRSETQPSASDPVGQSDSRKRKLVPSDDEGDDIGKLKDKGATGKPPKPTNPKKKTSSRPLPKIRKSSRKPSDIDPSEKDSDLTNMETDSSKETEPTAKDHPSDNLQASGNVEPSDKPMTASQSTKAGVGVNQEPPIGNQSDTGPSQKIPEVEAQTNSPPEKDADHDSETRSRAKTQESTRPRPGIITGPIIGDEEEILRIRAAEDSRPPILVKWWDDNMQPQGIVINKQKEDEELCLLKEALGQATRIVNRIHLRNEAKTATLERLVPHLGTLEATRNQLRETEKLARKNEHDLRDRIAELQESNFELSGSSKVQAAKISQLEKQIQTLENDKAELARQRDLALKAQFDVLVGKIKKLEEARDKVANAATPLIQAMFFNNTGPSTLDASEIFDKLRVAPDTYFKDIKEAGSMGASLALAMTKSLYPRVDVDAIDGFVDRTSEEAALDLISDAQKSADKIAVDVVERFQDTDL

SEQ ID NO: 123986 - protein, 536 aa, Oryza sativa
  Clone ID: PAT_MRT4530_26769C.1.pep
MASLLAQELKHELASLNSPTTGRAGGESSPPSIMIDKVAELTRNVDKQEYEPHFVSIGPYNRSCDCKSKLARDSDKVGRLQEVLSAAAAHTTAPLQLEDFITELARMEARARKCYKLSFDHVQSKDFLRWLLLDGCYILVRFGDVVMRRRPEDEEVEEEEETTADGIVLRRVRRWFHVPSCKGFLRRRLLDACYVLVRLRDVVVGRRSKAPVAAEANRVVPSVEEREEESAVDQQEAVAVVRDVFYLAENQIPFFVVDKIHQLTFLDGQTPAVHAIARYAHELLRVNGYSVATPTKVEEPERPPEPANLLHLLHMHFTPTVLTSAATTGSRRRGGGRPVGRWRTAMEYYFAGVTFKKRPLDRRGGARCVLDVKVSGCGGGTLEMPQLTVDAETWPLLRNLMALEQSNPAAAGSHVTAYCVFMSQLACTAADVELLSRRGVIVHGLGHHGEVAKHFADLCKGAVFDADDADMNYLRPVCQVLERRFQSRPRRWMAWLKKKYFANPWLIAGLVAATVGLVCTVIQAVYSVLGYTKPGS

SEQ ID NO: 123987 - protein, 710 aa, Oryza sativa
  Clone ID: PAT_MRT4530_2676C.1.pep
MDLEKSSSNTAFMKKLQYDGALPGRGTMQREAGGIRLCQIPTSGWPEIKIHPLPMPSSRSKWRAGWFYLQIENSDPVLVVPEEQPDKIPEWTAKPALTPSLQSFIGIIDDLRTRGLSGYEVAADFICRWIQPLQARAHLAFDYSGPEDTTRVSRRGLDSNTVERRVGQALPLTDIIGPLADHQAAASLKEGVTKEASDVAVTATTSGRNVLKKGRKFSSILGTRRKASTPAASDASPPPQRRQRLVTIGMKAARAKATQDGAGATSSASPAATSTDVVVITRDREATPSSPAVGLVPIRSPAADALTWGELQTEMERIIQVDARGVGREIKEARAAASSATQRADKLACDLAEAREDLLKMRELLAGEYGVMTTIPVNPDKFSLTSSLAELATAMGAIPSKHAARIGEETSNGIYTGACHVLACMRLAHPDLDLKKVFDQGAADDARRGVMEETKLEVAELEKTMVEVKKDQAVEALRGREVWFNSYLKSCCTAMAGVCRELRVPRGNPEELTAGYISWLNGACTQLEGVGKRKDEALKQEFRRSSRYAGGHVLAFIRDHRRNCTSSSSTKGSYVLEFANSRPSPSAILNAPGRKTCVIVSVGSIASEPYTRKKGVSLLDVVGVYYVVCPLDLSIALRVRNRGKADLDSQSDAVILEIGTDELGAVVCYDAVRQSISAKYPFDKFDGVVGLDFPHGRRFNPLGELVDRHE

SEQ ID NO: 123988 - protein, 656 aa, Oryza sativa
  Clone ID: PAT_MRT4530_26770C.1.pep
MEAHGVLPAKEIIGWRPAFSEAFPTLDTHEIVILPGDSRPSRFLQGEQITRHFIKSRLAPIKERSRTAFEFDGKHDPNREDPDSLDFKVMKERMYKIFSNAIVVSYSNLLPVVPFNAFNPPPPEFALMKSDPPIAQRRSPRQQTGQASGGPKIRSDTRPSASNPVGQSDARKRKLVLSDEEGDDTGRLGDKGATEKPPKPTNPKKKTSSRPLPKIRKSSSITQTRRKPSDIEPSEKDPEPADIEANPSKETGPTAEDRPSDKQPATDNVEPSNEPPTGNQSAEAEVGANQESPTGNQSDAGPNQKIPEVEAQTNSPLGKDADSESETRSPVKTPKSTRPRPGIITGPIIGDEEEILRIQVAEDSCPPILVKWWDDNMQPQGIVINKQKEDEELCLLKKALGQATRIVNRIHLRNEAKTVTLEKLVPHLGTLEATRNQLHEAKELARKNEHDLRDRIAELQESNFELSGSSKVQAAKISQLEKQIQILENDKAELARQRDLALKEVEDRKMKSQAQFDVLVGKIKKVEGARDKVANAAAPIVQAMFFNNNGPSALDASEIFDKLRVAPDTYFKSIKEAGSMGASLVFAVTKTLYPRVDVDAVDDFADGTSEGAALDLISDAQKSADKIAVDVVERFQDTDLRPTGPDNSDDEKTNTD

SEQ ID NO: 123989 - protein, 139 aa, Oryza sativa
  Clone ID: PAT_MRT4530_26771C.1.pep
MKIFVILSLLALAASSASAQFDACTYGQCQQQPFMQPIMNPCNEFVRQQCSPISLLGKQSPRLQLTSCQGMRHQCCHKIRLMAHHNNGQLIAPMGQLYMHKGQLELALVGKPKVKAKAKWVLNWPSCGEATLGTGATPC

SEQ ID NO: 123990 - protein, 105 aa, Oryza sativa
  unsure (1)..(105): unsure at all Xaa locations
  Clone ID: PAT_MRT4530_26772C.1.pep
LTHRYVPRPKPAPAAGXLKPCALSPRAXLALXRRLSPEAGAVSSEEEEEEGGAEPEGEDDEDLKEYVGNPHASDDSAQXARIIEQDETAEKDEAVYDRQTGRSQG

SEQ ID NO: 123991 - protein, 271 aa, Oryza sativa
  Clone ID: PAT_MRT4530_26773C.1.pep
MPLLSSWLFHKLRRRRSAARGEPDVVEAASKKQQPPMAAAAAAAPCSPSPNRASYYFASRERCLPPARAATDNHKLRDTRFPRSPQPNDDIVFDVVAVSASPARGQFDGMKAMPELKLRPILTKRATAKNDGDEGDALDSGTSAAASPTSRVRRFVHHAKPSSGRRKGRVAALPADATSRRRRRRRRCRWLYESLVVVKESADPEEDFLESMAEMIAANDVRSPRDLEELLACYLALNAAEHHRAIVGAFRRAWLHAAAATAAPPSPSPIK

SEQ ID NO: 123992 - protein, 294 aa, Oryza sativa
  Clone ID: PAT_MRT4530_26774C.1.pep
MPCKPDYRKDESGLTTEDGQYDGWDDQQSAGGSSNWNSRANRSFGLADIPEWTGKPSLPYEDPDMLRFLGEPILTPKNNEVFDDTIGKGRPDKCNCEVPGSTSCVRFHVAEKKTELKREMGSSYYAMKFDEIGQDAALTWQKDEEKKFETIVQQNLPSSKYNFWDKLRAAFRYKGERALVSYYNNVFQPRRRAFQNRVAQHANGVDSDDDSIEPAFLRLRQDGVQLHLELKTQKVHLFLSSPIGYWTGDDYLKRLFYHYLGVLGGMSGCFMLILSQRSGQMFLRIFSCKVTTET

SEQ ID NO: 123993 - protein, 240 aa, Oryza sativa
  Clone ID: PAT_MRT4530_26775C.1.pep
MTVVGAGRGRSRRSGAGGGGDGTGSSGATAGGGRNGGSSGGDGSRAPGPNRGPGGDSASDPKGKRKMSEFGPPSPPHGGGAERTADRPPAGHKCPAASGVGRKKKRLRKIGQTEPCRGSFIEPPKWTFKRPPRSILAGPTGHTPGPALNPPQPRYNRPRGASAAVPLPGAIPRAAVELVLASHQARDPDLVPWRALEDFPPGTEARAWEQVREAADAIISSFEGSAPRFTFGYLGRGERK

SEQ ID NO: 123994 - protein, 111 aa, Oryza sativa
  unsure (1)..(111): unsure at all Xaa locations
  Clone ID: PAT_MRT4530_26776C.1.pep
WTPPSPSTSTGRSRSPPRARSTISTRPPPPPPPPRPSSISSRARAXAVTTARPSSRTRARAAAASAPPVPPVDARRQGQGRHGRRRHGRVRRHLRPPPPPPRAPPRRHLLL

SEQ ID NO: 123995 - protein, 49 aa, Oryza sativa
  Clone ID: PAT_MRT4530_26777C.1.pep
VLAVSSIRGFSKTLLRSHQFESKASHAILKDRFTGNPGRLTVLTTSGSG

SEQ ID NO: 123996 - protein, 83 aa, Oryza sativa
  Clone ID: PAT_MRT4530_26778C.1.pep
RPRLFLYPDHRFTRGKNKAGELRCIHHKTLEKKKNGDSALIWEVLVLSEPLQDARFTPQEELFDAQQTVAGKKAPRGTQKRGG

SEQ ID NO: 123997 - protein, 56 aa, Oryza sativa
  Clone ID: PAT_MRT4530_26779C.1.pep
SQKIGSTLLFGLQFLALNYPAMLGKPIDFHNPGNLPGPAENCLGASSVGWALDVGD

SEQ ID NO: 123998 - protein, 645 aa, Oryza sativa
  Clone ID: PAT_MRT4530_2677C.1.pep
MADNEKGNKVRSQDIGTSSSRVNEAPDTSCVAVVQHLINQNQLLIEILQQHRMPILNPSQMQPQVQLEAVQALTPQVSAPPTSQKAPHAMPHVDPKEASIICFMCDEQGHYARNCPQQKRKAPMRTEDEVRKMIITSTEWPPPGMTKHQRRDSFRGAQQLTEHLLASGGRVSDSEDSDQVSSDDEDEKSPQGFNQNKIELKACSRCGEIGHVASSCASTCVHCKEDHPPDRCPTSRITCFFCEGTDHVPKDCQFSFLLTKKMANQPASSNGEKHQGNTNPRQDHRFSLTPVPGQRNRNEKRKCRVREDICCFNCQGMGHFADKCPKPRNIAAGTSVHATPCNQKLAPQRIVIHASRSSPIARVATTPIPMSALTQGVNAQFQPQPPADKTEASICVVPLEVPIQQLRNQVQDEEPECKKVIVCYNCSEEGHYSKNCPQPRQNRPPHYRQFTRSRHSNRIVVTGANAVPAEPRAINLRRAIPSRRPSSASTSNQKEASPVNDSSMQSYHIITEPIEDAVTGTMPAISLQNQNEQPCLWFSVRYLSWCNRKFAAIIFMSINIDNLSEVDSEDMNHEKFWNGSITELPQPSLSQPKGAPWSKSGEEKIPSATGGQAKQFRVVKFCWKFVKTQRKKSDKKRSPPNLSSC

SEQ ID NO: 123999 - protein, 100 aa, Oryza sativa
  Clone ID: PAT_MRT4530_26780C.1.pep
TLFFGSNYSSRILVQEIILIIYWAKLCYFSILYMLVTVHFFTKMHVVLPPFGIACHFRPNHKDQGVVNSFIWDLITPFNTVFSLINGSQDYSTILIVIKS

SEQ ID NO: 124000 - protein, 81 aa, Oryza sativa
  Clone ID: PAT_MRT4530_26781C.1.pep
SLFPSPCPPTLSPSVRDAAAAAAAAHPSPPPHIAPPSSRILRRAAALPPRSPPLPCRKGRRTFSNGRVAGYQWSLGLALVV

SEQ ID NO: 124001 - protein, 83 aa, Oryza sativa
  unsure (1)..(83): unsure at all Xaa locations
  Clone ID: PAT_MRT4530_26782C.1.pep
FXSXMAAAGVAPSASXXSAGRKQPXRXXIAVGATKGKPAPAXEEKXLADFIFGFIFXKDXLXQTDPLLNKVYSAPPSGSTVSR

SEQ ID NO: 124002 - protein, 56 aa, Oryza sativa
  Clone ID: PAT_MRT4530_26783C.1.pep
VMEMMIYIPCFFLKIYNHKFVLDRSLISLHDLDFGEGQKRDHGHEAPQPPQHCQDI

SEQ ID NO: 124003 - protein, 86 aa, Oryza sativa
  unsure (1)..(86): unsure at all Xaa locations
  Clone ID: PAT_MRT4530_26784C.1.pep
FXGGWAPMACYXSEAHRPMISNEFSLVFPXKKLEVFXPSVSYLDSXLLFSIHAWGCXPLYQLRQHDLLVCMPEQFVGLRIWILACT

SEQ ID NO: 124004 - protein, 480 aa, Oryza sativa
  Clone ID: PAT_MRT4530_26785C.1.pep
MQKMFPETVVKALLVLYPIPSISFLISQLMRYLLLIAHLMIPLAMKIQLKVVALLKVSNSQPMPLNDSLENGCATQGLPANAPTNSTGVSSVKLWTNAGLFGLEPSKPPVFGAHDGPKEDTTPGHTQPQLCHSTGCPEVHFSKPTESAQVYVPNGNSPITSSFVGKLVGICPGSTSHSSETNQSTVRTPDTVIGQTEGSTGCSTSFEHSDHKNIIGKQTSISELLESEDSAENGAEMFSKTDMTGRNNMNQVSASSFSSIAQRFLANTLQRRTPKYTDLPMSSVIVNTDANGTDESTQISSLAPNETTFEASQFEKKTENDTNGLPKSSLFSSSHYSEKSSPPLEYMKISFHPMSAFEMSKLDLDFSDENLHENADDMMLPTFQLLPGSSVPQLGSGSESEDDTFGRSYSYSSYDDLSPRLYSNSELWDQEDANGLEDHDMHNNPNQIGSFGAPISSFVEFEQMDLSGAKIHCITYRSWG

SEQ ID NO: 124005 - protein, 45 aa, Oryza sativa
  unsure (1)..(45): unsure at all Xaa locations
  Clone ID: PAT_MRT4530_26786C.1.pep
QSAILGKKHRTRCGDQGSELVLNISVARXXPLTRSSKSEHSRQTP

SEQ ID NO: 124006 - protein, 53 aa, Oryza sativa
  Clone ID: PAT_MRT4530_26787C.1.pep
SQDAWYADSYSLGFGWSVHYGDTGNNVIWCTRQRGSAITKWTMHSISRLQSNC

SEQ ID NO: 124007 - protein, 399 aa, Oryza sativa
  unsure (1)..(399): unsure at all Xaa locations
  Clone ID: PAT_MRT4530_26788C.1.pep
MLKQTVLSKEYTYVLPPAKKKKGYIASYKSSLPPGRASGPLLPSTLAGPPPSIPLQVELPPPPPPHVELPPSPPGXPPPSPSPHAESPPPPPPSVELPPSSPAPCPPPPSXSSQPPPNPLPIVASKPPHPRRHALSPCRAGGVCAEAPPADACSPPPADARSSPPAAPPGSSHGPPPRQPSSAPXSAKASTTPPSQPRITPPMPHPRQPQPPPSPPEPRRGGGRPPLLPPQLLPPSSXPPPPPPPPSPRSRSPPACCPPPSFPPRPLPPLWTPPPLSPPLPPATPACDRPVPALTPNHPFGSPYPDHPLPPQPPPXPSPLLHTPHSPPPPPLYIYEPTRAXHPTKPSARTPPPPPPGPRDAVRPQRRHQRRRQLRNGSHGKAPDWRSRCRGRSAGSIHK

SEQ ID NO: 124008 - protein, 99 aa, Oryza sativa
  Clone ID: PAT_MRT4530_26789C.1.pep
MASAGYDRWVAWHYAGAWLVKRTCLVWLALQHMADRCSGQLSRYARHGDLSRSGALQRRMSYGMWLARAHVVRVVGYGGWCLDYPNRLAPLTQKKVLVV

SEQ ID NO: 124009 - protein, 1431 aa, Oryza sativa
  unsure (1)..(1431): unsure at all Xaa locations
  Clone ID: PAT_MRT4530_2678C.1.pep
MSYYVDPRTSVPQYPLYPVYGYPPSTVVRQVGGLGAQGSTTMTSSFIDNSVNTSLNQGVPTSTMLVWTQVGEIVFPVYTTVPISAGPSMAGNENAVATTQDDSMSKDPPAEAEIGTSTTSEPEKDPSAAKPCLPDKNHEPTRMTSEVTRSCFPIHKTRKHTLQACWVFLNVHAEIRACKERGIQRTSPTRDIYCPIHKTKNHDLSSCKVFLSAMKTSPPKVQQSRIPLRDEDKEQGATLISDRFVGVIDIDPHEPSVLHLLEDYGSSSMSTPREVLAIDETGTSARANAEAENQVTTPAQHIRAVNAILRETPLRSQRLRESGTNLSNAFEEAAAAAHPEQPPTGDANGENPEQRESPHRATPPPRGTGDLRDHLNGRRXRDAHEITRTIPDVASLHGFTITKNEEAVREKTETVITATTAAITTIANGGCWAILVEDVAIMTTMMEIGAETTTGSTRSWLMHLPXYSISLWADLWQQFVANFQGTYKRHAIEDDLLALTQNPGESLRDYVRRFNECRNTIPEITDASVIRAFKSGVRDRYTTQELATKRVTTTRRLFEIVDRYTHADNALRRKNDKPKTGEENKLAKDALESSKKKNRKNGKRKAQAEVLAIEYADPPKRPDPQGSDAKKTWCPIHKSDRHSLEDCLIFKKSLAKHMALKKGKRVRVVEKDAEAATQESDSTYPDSDLHVLHIFGGSTAYSSKREYKKVEREDCSMWQGAAPKMKWSEQKIEFLEEDHPKTAVILXDIRSWSNPLFGISRTALAKFMAASHYAYQVLKMPGPKGTITIQGXAKLAVQCDKRILDMVEHTPSPPATAEPPKKPSDMPGVPREVIEHKLMVRPDAKPLKQKLRRFAPDRKQAIREELDKLLKAGFIREVLHPEWIANPVMVRKANGKWRICVDFTDLNKACPKDHFPLPRIDQLVDSTAGCKLLSFLDAYSGYHQISMAKEDEEKIAFIMPFGVFCYVKMPFGLITAGNTFQRTVQGALSDQLGNNVEAYIDDIVVKIKTSDSLIDDLRETFDNLRRYRLMLNPEKCTFGVPSGKLLGFLVSGRGIEANPEKIKAIENMKSPTRLKEVQKLTGCMAALSRFVARMGERGQPFFALLKKQDKFVWTQEAEEAFIALKRYLSNPPVLVVPQPNEELFLYIAATPYSVSTVIVVEREKVQRLVYYISEALHNTKTRYPQIQKLLYAVIMTSRKLRHYFQAHRVTVVSSFPLGEVVRNIDVVGRIAKWVVELSQFDFRFVPRIAIKSEVLVDFVADXPDNRSDNQIDNETWTMAFDGALNSQGAGXATNNTTEYEGLLAGIRAAAAFGVRRLIVKGDSELVTNQVHKDYKCSSPELSKYLAEVRKLEKRFDGIEVRHVYHKDNIELDNLAQCASRREPLEPGTFLDVLNRPSVKEASGEDSPVAPNISSGVIEAERAVADIETTDD

SEQ ID NO: 124010 - protein, 183 aa, Oryza sativa
  unsure (1)..(183): unsure at all Xaa locations
  Clone ID: PAT_MRT4530_26790C.1.pep
DLHLSSWQKIFNLKEAGVQLHLSSAYHPQSDGQSERVNQWLKTYLRCLTVTKPKKXILYLDQVECWYNTTFHTSLNISTYQALYGQKPPMVGEALIPANFVGRLQKQXQARAALIDSVKAGLDKAQAFTKYFADVKRSERTLQVGDMAYLKVQPYRHNALGLHSSFKLHSRYYGPFIVIDKIS

SEQ ID NO: 124011 - protein, 247 aa, Oryza sativa
  unsure (1)..(247): unsure at all Xaa locations
  Clone ID: PAT_MRT4530_26791C.1.pep
MSRVSTSWGFVYSRVNKPGERXARTGSTGVGPTRQPLGPRWTGCTRLPPTGAVGPTRQPHPRARAADGRXPPGRRGARPKAASPGRATGGGAPWPRWSAGATSGSTDRRARGGGEWGXERCPGLAAGYDGGGGEAGGGGCGGPWGCARTGVLRPGGSGAVWRRGGCGGGVFVQGGGVVEVGGGGGVRGVVSARVGLCRSAGPRGCGGGGRVRGGCGSRCRCAGGAGGRGRVVPALGVWGRGLGRVWV

SEQ ID NO: 124012 - protein, 994 aa, Oryza sativa
  unsure (1)..(994): unsure at all Xaa locations
  Clone ID: PAT_MRT4530_26792C.1.pep
MWATLLCKHLQIKIRIGIVHQLVLLLMSSSLFLVVSAQSVPADNMDQEALLGLKSLVTSDPSGMLLSWGNGSACTWSGVRCNRHGRVLVLDLQGLNLVGKISPSIGNLSALHGLYLQKNQFSGEIPDQIGWLGQLQTLNASANILTGNIPAALINCTNLEIIDLSQNTFFGTIPASISSFQKLRVLKIGGNQLSGSVPRYIGNLSLLSTLDLSTNNLTGTIPYEFGHLRQLKYLQLSINNLKGTVPEPLYNLSSLSFFAIANNDLHGKIPSDVGFRLPRLLVFHICINRFTGPIPPSLHNVTNIQSIRMSHNHFSGSVPPGLSGLHNLVLYNIGFNQIVGNTSVLVDLMNCTKLQLIAFDENLIEGILPDSIGNLSSSLTRLYVGGNRITGYIPASIGRLSSLTLLNMSYNLLFGSIPPEIGLLKELTMLSLARNKLSGIIPAEIGDLAQLTRLEMNHNELVGEIPVEIGNLQHVLSLDISSNSLKGGIPASIFSLNSLSTLLNLSHNLLTGSIRENIGQLGQITAIDLSYNFLNGSIPVSIGKCQSLQSLSLSRNSLSGVIPGTIGNLKGLQTLDLSSNQLSGIIPATLVKMQALRLLNLSMNDLDGLVPNNGIFKDHSVVYLDGNPKLCYSNMLCYYIHSSHRRKMAVAIAVGTAAMAAITIVVIISMLLLPRKWLRNRKPKKLGSFIKKSHPLVSYEELNQVTSSFDNRNLIGTGGFGSVYKAVLRSRTAVAIKVLDLHKMGALKSWTAECEALRNVRHRYLVKLVTMCASIDFSGNEFRALVYELMSCGSVEDLIHKGRQGENVAGVNADMILSIAIDVASALDYLHNDCGEQVVHCDIKPSNVLLDEDMTAKVGDFGIXGMGSKPSAKADVYSYGXLLLEMITGKRPVDPQFGGDMNLEKWVRDGFPHRAHEVVDERLRGTIVDICHEGQQQASAEQKRQQLMLNNIILPVMEVALSCALESPDERSTMRDALCRLKRIKEAFLKNHSF

SEQ ID NO: 124013 - protein, 332 aa, Oryza sativa
  Clone ID: PAT_MRT4530_26793C.1.pep
MAAGERPATMRAMETGEAWPACLGGDRGRGGAAGACKGRRKPARHDWHVQAAVEANKAAVEAAGHGTAALRICTTQGGAVGNGRSQYDARRHGGWWQRLVGCPTAGGLAEYVATSDKLTVARPAGISAADAAGVPVAGLTALQALKAIGTKFDGSGTSGGADVLITAASSGVGTYAVQLAKLGNHRVTATCGARNLGLVAGLGADEVLDYKTPEGAALSSPSGKKYDYIVNISNKNKWSVFKPRLSSHGRVVDVAPNFGNFVASVVTLFSRRKKLSLVSLKMSKEDLGLLLELMREGKLRTVVDSRHPFEKAADAWARSLSGHATGKVIVEM

SEQ ID NO: 124014 - protein, 93 aa, Oryza sativa
  unsure (1)..(93): unsure at all Xaa locations
  Clone ID: PAT_MRT4530_26794C.1.pep
MENSQVWLLWXALSVAVLFYLSTLRRXHAGGKPLPPGPTAXPXIGNLXXAGGXXXHHKXRDLARVHGPXXTXKXGXGXNVVIFFREAAIGVQP

SEQ ID NO: 124015 - protein, 66 aa, Oryza sativa
  Clone ID: PAT_MRT4530_26795C.1.pep
MPPHNVDRCHGPSIPGPSRRHRDCSPTHPLLYCDAAVDSLVPSALRCAATLALSTVTRTRPNLLSS

SEQ ID NO: 124016 - protein, 78 aa, Oryza sativa
  Clone ID: PAT_MRT4530_26796C.1.pep
KKKKVGGGGVAKSSPLPLFIGGLDPREKPIYQHTKRGPPRDKGSYPLFIGGPTPGKNFWVIKFNSKIFMQYCKRVGKA

SEQ ID NO: 124017 - protein, 76 aa, Oryza sativa
  Clone ID: PAT_MRT4530_26797C.1.pep
EPAPPGLFKPSSPQGGSAGSFISSGAPNSKGAGSWMVSVLIPSCALFYVLKKLPKVFLMEIVARIRSSSRYYATLK

SEQ ID NO: 124018 - protein, 184 aa, Oryza sativa
  unsure (1)..(184): unsure at all Xaa locations
  Clone ID: PAT_MRT4530_26798C.1.pep
SILPEMLNYAEAAKLGAHSSDGAHRWSGFGDDWISQVIAXFVILCGRLDRALVAGQTGSICAVRPAXSPRSDRPTLCRFRFRVVYLDIXVYFMIMTSRWILYSSSICVYRVSAVXTGDLPAVRPAASGGQTGGXGRSDRRRRQARRAASAVRPVDLYRSDRRHPSGQTSKATSVRPISVDFEGN

SEQ ID NO: 124019 - protein, 443 aa, Oryza sativa
  Clone ID: PAT_MRT4530_26799C.1.pep
MEGNSTNLDAAIESLLNVEKQMRLAGDVAGTRKAAIDIVELCYKAGAWKTLNDQIVVLSKRRGQLKQAITAMVQKAMEYIDLTPDMDTRIELIKTLSSVSAGKIYVEIERARLIKRLAKIKEEQGQIDEAADLMQEVAVETFGSMAKTEKIAFILEQVRLCLDRQDYVRAQILSRKISPRVFDADPSKEKKKPKEGDNIVQEAPAEIPSLLELKRIYYELMIRYYSHNNDYLEICRCYKSIYEIPSIKEDPSKWIPVLRKICWYLVLAPHDPMQSSLLNATLEDKNLSEIPNFRLLLKQLVTMEVIQWTSLWEFFKDEYANEKNFLGGALGDKAAEDLKLRIIEHNILVVSKYYSRITLKRLADLLCLSLQEAEKHLSDMVNSKSLIAKIDRPMGVVCFRTAQDSNGILNSWAANLEKLLDLVEKSCHQIHKETMIHKAVLKA

SEQ ID NO: 124020 - protein, 297 aa, Oryza sativa
  Clone ID: PAT_MRT4530_2679C.1.pep
MEDLSVEELASNLSTYKEQLREVRKIIKEKNDDPGISEYLDMEKELQEVITLTEELLATANQSGNTQNDVGLSPPNYSSGLQSEALDDPSQSHEKFAVGTKVQAVWSEDGEWYNATIEELTENGYYVSFEGWGNKEEVDPANVRSLEEEAADALRQAEKEAEATKMAIKRKIEQAATSDFQMRSLPTKLRIDPNDPEDVKATKRKKIHAFKSKARFEQLEFAQNKRQNAWQQFQTTKGKAKKVGFFSGRKKESIFKSPDDHRGKVGVTGSGKGLTEFQRREKHLHLKDGSSDALDEE

SEQ ID NO: 124021 - protein, 110 aa, Oryza sativa
  Clone ID: PAT_MRT4530_267C.1.pep
MQTIYNKEPDSKQNAIVKLTEDGGKESKAPRHTLHCSATSKLCLERILLLLKLPNFDNTCFRLNQEEEEEEEEEEEEEEEEEEAIYVHSNTRIYNLDYIQMDANSSSSPV

SEQ ID NO: 124022 - protein, 112 aa, Oryza sativa
  Clone ID: PAT_MRT4530_26800C.1.pep
HARSMTSLQSYRTVLTLDLPYMDRCRSRLSSVALSALVGEPRPLKPRVVTAPPPLRCRCVLPTPPFTRNQPPLVRACACRAVAPSPRKRLRRALSPLLRDRQPAAAAFREKE

SEQ ID NO: 124023 - protein, 128 aa, Oryza sativa
  Clone ID: PAT_MRT4530_26801C.1.pep
MYCLLDFIVFLFWFLALYLSVDFQFFAFVQNILVVSKYYSRITLKRLADLLCLSLQEAEKHLSDMVNSKSLIAKIDRPMGVVCFRTAQDSNGILNSWAANLEKLLDLVEKSCHQIHKETMIHKAVLKA

SEQ ID NO: 124024 - protein, 96 aa, Oryza sativa
  Clone ID: PAT_MRT4530_26802C.1.pep
MVWTKIPPLTTSQALWFPILDQLTLDLLAQLRSDLTSATQAHALAFKGELGRGLAIKPIAREVERLEMAQPAEELQVLVEAGVARELELVEELAVG

SEQ ID NO: 124025 - protein, 112 aa, Oryza sativa
  Clone ID: PAT_MRT4530_26803C.1.pep
MVESVGKGGWSDSGKHGGAMATTDAASWRRRWRGGHNILVRAMTCKGDDRSFRRRWVAQMGAWLPLPPMLPVAQLLQRSTSRSSAPLPLYPHSSIVTPSLSSLSTRRHGQRR

SEQ ID NO: 124026 - protein, 340 aa, Oryza sativa
  Clone ID: PAT_MRT4530_26804C.1.pep
MDEEYNALVKNKSWHLVEMPQGKNIIDCKWVYKIKRKADGTIDRYKARLVAKGFRQRYGIYYEDTFSPVVKIATVRLVLGIAVSRGWSLRQLDVQNAFLHGILEEEVYMKQPPGYEGDLHYFLGIEVKKVPDGIILNQAKYASDLLVKVNMENCKTAPTPLAISEKLMVHTGDPLGVEDSTSSTLVSAFFDADWAGSLDDRRSTGGFVIYFGPNLVSWSARKQRTVSRSSTEAEYKAMANATAELIWVRSVLEELGVKIDQSPVLWCDNLGATYLSSNPVFHARTKHIEIDYHFVQERVANKMLDIRFIGTKDQIADGFTKALSTQNLRHFMYNLNLAKL

SEQ ID NO: 124027 - protein, 643 aa, Oryza sativa
  Clone ID: PAT_MRT4530_26805C.1.pep
MPHQTKATVQQQRPPAAASVVRAGAQEEDASAAGSLRAILAQIPLQIRPPQGLHPAQQVTMRVRSRMEPMKLTVKSRCGVCSHGVKTGAAAVFTAECSHSFHFPCIAAHAHALAAATALSCPVCAAPWRQAPFINKRTTTTDDHKRKSYDDDEPLLAPKAAAGAFNPIPEDDEDDATEFRGFFPARPRSGLAVTLAPDAALVSAGRRHGKYVVAVRVKAPALRSSPSTRAPIDLVTVLDVSQGMMGDKLHMLKRGMRLVIASLGPADRLAIVAFSGAAKRLLPLRRMTRQGQRSARQIVDRLVVCAAAQGQEQPQAVCVGDALRKATKVLEDRRDRNPVATVMLLSDTQQQQQQQQDAIRRPPAAPPATRFTHVEIPIGPGEEPARSALVAEEDDDQFSEHAFAKCLGGLVSVVMQEVQLELAFPTGEITAVYSCGHGQQAVALGGGGGGAAVSVSLGEMYAEEERELLVELRAPLSQSHPHSLSVRCSYREPASQETVRGAEQQLVVPALHGGSSSRRLHDLFVATRAVAESRRLAELNDYATAIHLLSSARAVVVQSAEQGLVGSLDTELSDMRWRRGQSAGRRRGGESEETPVGTPRARGGEPLTPTSAWRAAEQLAKVAIMRKSMNRVSDLHGFENARF

SEQ ID NO: 124028 - protein, 183 aa, Oryza sativa
  Clone ID: PAT_MRT4530_26807C.1.pep
MFINTASFVAGAVVASPEQPAKLVRDQRRVVPGSCRARRGAASNGFRTYCMQTWNPFTNRRYEAMSYLPPLSAKSISKEIEFIMSKGWVPCLEFDKEGEIHRSNSRMPGYYDGRYWTLWKLPMFGCSDAAAVLREVEECRREYPDAFIRLIAFDSSRQCQCMSFVVHKPPSAAASPATVAGAE

SEQ ID NO: 124029 - protein, 353 aa, Oryza sativa
  Clone ID: PAT_MRT4530_26808C.1.pep
MSAAAAALRPTEPLPLPSGLSLAPRLKLLLTFFRADLSVRPVDEWQLKTALLAFLRDPPLSLPVLPDSDLSVRTLPDLHKRRRDEPVASGVLHVRDLSFLRPRRRNGDDEEEEAEEMTREQEEEKYFQWRSSLVEKLAGIELNLEGVKFRMSVEIPPSDDFRAMKKSWENFYASELLSSRNPVRKIAKRPDTILVRGVPSRWFAETRISSKASTLVMNCPSHFGELTPHTLFFGILLPIFRNLNISSDDEWGAKQDGTNKEIISGLNCKVWVQFENYDDFNSAMQALCGRSLEKEGSRLKVDYEVTWDHEGFFRNAQYEPVRSNLEERNSSAHGRKKHYTSRIESDHRKRFRD

SEQ ID NO: 124030 - protein, 548 aa, Oryza sativa
  unsure (1)..(548): unsure at all Xaa locations
  Clone ID: PAT_MRT4530_26809C.1.pep
MGFFRRIAGMFGISRDDADHHPHHHHHDGAAGDSAAAAEVPQDKVVAAAAAAAAAGNVQRRGFSVQVPVPVERPGPGPVLVPCPQGDGGVQGFRWYTRKLRIDEDGDVADEFLDEVVPEISINNDSTPAGRYQVKYNTKSAALAMRKQISVIDGDICHSLEYQGRLRWNCQSLLAKGLQEFDMRVCLGASQECGSVEFLVDASFLNLSVLGCLMGTNDPGTPSKATKASEPEQSPATTSGTTAPVYPEWPGFQAYSAIPPHGFFPPPVAASPQAHPYMWGAQGVHPFNHYPMLANGNVETAGTAPGASEINGKNELGRTSGPSANGITSHSESGSESESEGSDANSQNDSHSKENDVKEDACSQYQIIHTAFTKKILMAPSQPEAVMGGVAPTTNSNIPTEXSGAAGSAPFPAMQCKATSASVRGEQWDETELKKQTRKXSNPALARRSRLRKQNIMDRLIEAPNYLSQPECEELSVRADNLRAENSSLRAELERIKKEYEALLSHNASLKEKLEGNSDSIPYMNEQNDTNGTHQKQQDSDAQPNDAP

SEQ ID NO: 124031 - protein, 1226 aa, Oryza sativa
  Clone ID: PAT_MRT4530_2680C.1.pep
MVLTRSNGNGPNNNNNNNNGENPTLAQVLAQQAQLMNMMMQQLQNQQNQGNNHAPPQNKLAEFLRVRPPTFSSTTNPVEAGDWLHAIEKKLDLLQCTDQEKVSFASHQLHGPASEWWDHFRLNRTTAEPITWLEFTAAFRKTHIPSGVVSLKKKEFRSLTQGSRSVTEYLHEFNRLARYAPEDVRTDEERQEKFLEGLNDELSYPLMTGEQKKCRIAHFKAQQGNTSTPQQPAKREQGSKPGVCFNCGDPGHYADKCPKPRRVKVVPDQSNSTVPASKARVNHVVAAEAQDAPDVILEKKDHTQRMCVDYRALNDVTIKNKYPLPRIDDLFDQLKAEGRGRADRVHGSGAHAAASRSTVDRPLGAPEGGQAGAAGGRRRACAPMVAAGYHQRDGAAPERGEGKGETKRRSTAHHGSTATMETATGAEEGGGAARVDGVDGVPAVGERNGGVDEVGEDAAKPKEAASRWEVVRGDNGGGPELGSDGGERERRRELDSGGERGRRVAETVVGSSGRVYIGLGVREGGRRRGKWARETRPPLMAPASKCEFWLSEVKFLGHVISAGGVAVDPSNVESVTNWKQPKTVSEIRRFLGLAGYYRRFIENFSKIAKPMTRLLQKDVKYKCLATPSSPLLQPCSAIAPVIAVARGGRHRGRRCVAVLVRPFAVAVDRRNTAAVVKPKVAAASSLTPSPSVDLPPPFWSPVSSPRHPLRAGALRSRRRAVVRRRVCKPEPPPVVTSPLTSSSSSLVVRPWTGEDFEEFQGQQGNLLLCASADFWTRIYTHMPRFKPEYLFGTEGFVQELRTLSFAIGFGTAPLYAQIPHDHDEEKCHVKVTLNSNREDIPSVMFEAGGGSYIHACQEVARITIGELRESYNDQLADTEYRYHPRQPQGSDRGSYLEPAGIENDATTRHLVEMLWAMDETCAEIMLAAQDREGRNRGKICKLEDKVDRLEKELAALKGEAPPQKARVRLTARKRALFVPRYQLAPKVRVVEKEAASAPADPPIVNMVFTRSNGNGPNNNNTTNNNNGENPTLAQVLAQQAQVMNMMMQQLQNQQNQGNNHAPPQNKLAEFLRVRPPTFSSTTNPVEAGDWLHAIEKKLDLLQCTDQEKVSFASHQLHGPTSEWWDHFRLNRTTVEPITWLEFTAAFRKTHIPSGVVSLKKKEFRALTQGSRSVTEYLHEFNRLARYASEDVCTDEERQEKFLEGLNDELSYPLMTGDYHDFPEVGG

SEQ ID NO: 124032 - protein, 50 aa, Oryza sativa
  Clone ID: PAT_MRT4530_26810C.1.pep
ILVHYIYGAITLQNHFSEILQPSHAADTSNKLYIALCCTFKRAMTHKCII

SEQ ID NO: 124033 - protein, 62 aa, Oryza sativa
  unsure (1)..(62): unsure at all Xaa locations
  Clone ID: PAT_MRT4530_26811C.1.pep
YHVLALGTNPSIFGQKXDKALVVHYNRNIKPCLXIAIAKKSPYXARYIKYDQPIIRGSNLAE

SEQ ID NO: 124034 - protein, 102 aa, Oryza sativa
  Clone ID: PAT_MRT4530_26812C.1.pep
METGIFIQVRAPELSVDNRVAFLLESVPGEIRDSSFVSPDSIRKHRRGLAVLIPEVDIRRCVLAYVGFYVVASMSIVLGVDPVGCRSSPPRGACIYTHRCPL

SEQ ID NO: 124035 - protein, 176 aa, Oryza sativa
  Clone ID: PAT_MRT4530_26813C.1.pep
MLVLFETPAGFALFKVLDEGKLDKVEDLWKEFTTSDSARKVVELKAFNKFENTSDALSAATLIIDSKPTKGLRKFLQKHCEGETLAVADSKLGNAIKEKLKIDCLHNSAVMELMRGLRNQLTELISGLGAQDLGPMSLGLAHSLSRYKLKFSPEKVDTMIIQAIGLLDDLDKELNT

SEQ ID NO: 124036 - protein, 104 aa, Oryza sativa
  Clone ID: PAT_MRT4530_26814C.1.pep
GGRRLYTLGKTGDLLTTNAPRWAREKPHLPWPTKQHKGLNIHSNWFGGTQHSTNRATALNYGRALAHKHRNKHHRCTQKSTPLDDAMLQTTLPGGPRARGAPNP

SEQ ID NO: 124037 - protein, 40 aa, Oryza sativa
  Clone ID: PAT_MRT4530_26815C.1.pep
MCADYWALDDGTIKISFSKIDLRSGSHQLRIQEEDIPKTA

SEQ ID NO: 124038 - protein, 54 aa, Oryza sativa
  Clone ID: PAT_MRT4530_26816C.1.pep
MSRIFGDACEIWRDRQVEWRARGRDVAVKAACTHLHLQGFGVAVGEAVATTVAR

SEQ ID NO: 124039 - protein, 288 aa, Oryza sativa
  Clone ID: PAT_MRT4530_26817C.1.pep
MSGELPSALGNCTSLKIIGIKHNNFIGDIPGSIGQLNRLEELQLDNNRMSRVFPSSLSNFTSLKIINLKHNNFTGELSKVNFSRLPNLKLLDLMSNKFTGEILDSIYRCSNLTTLQLSSNKFYGQLSPRIDNLKSLVFAGVFELPVYADYEEPSLTYGMTNALPAMLNLGNNKLTGAIPSEVGQLKSLTVLFLSFNSSSGHIPPKLFNLTNLQVLELSNLHLTGSIPPGLNNVHSLSIFDVSNNDLEGSVPIGYEYWGFDGNPKLCGFPMKGGKYKNKEKDIGGNSFF

SEQ ID NO: 124040 - protein, 231 aa, Oryza sativa
  unsure (1)..(231): unsure at all Xaa locations
  Clone ID: PAT_MRT4530_26818C.1.pep
HVVDLRRLLQLEKSVQANKGFNWAKLVGFGDLGGPPLSAAEDYSLHSXHLAKANSLSLSEIAEMKIIYRGGVDSEGRPVMVVVGAHFLLRCLDLERFILYVVKEFEPLIQKPYSIVYFHSAASLQVRPDLGFMKRLQQILGRKHQRNLHAIYVLHPTLGLRTAILALQLFVDGEVWKKVIYVDRLVQLFRYVPREQLTIPDFVFQHDLEVNGGKGIIIDPRTKHVYQRPSG

SEQ ID NO: 124041 - protein, 116 aa, Oryza sativa
  Clone ID: PAT_MRT4530_26819C.1.pep
MGGQEMIVEAGDSVTLQFPVTEIVGGDESKVNNAIEVAIDHGDVLTISLRDREQQKKQQPSLLDVRLLMTPGYDEKKVEWRSKKVDDKVWLEVTIKKKAPTEDGTRIVDISAIEEN

SEQ ID NO: 124042 - protein, 61 aa, Oryza sativa
  Clone ID: PAT_MRT4530_2681C.1.pep
ISGFRQQPVLVRLELRTRLLARLLHSSFSIHANRYGLSAQVPGVRDSCVPCGHHPVSVLIL

SEQ ID NO: 124043 - protein, 97 aa, Oryza sativa
  Clone ID: PAT_MRT4530_26820C.1.pep
DRVKLSQIWIERGLGFPSKLVMDDSMPLHAWSRSAVASESDLAAVAATTCLSACREAGGPWTWRESPASRAMQKCPACKRTHTGDGRTVKPAHFNVP

SEQ ID NO: 124044 - protein, 78 aa, Oryza sativa
  Clone ID: PAT_MRT4530_26821C.1.pep
MSSELAPWLNSEGRVPCLPIRGASCSDRWHARKIMVGGQYQGDSDPDAAVELPAEEFGDLTQTPPHHPQSPSRRTARN

SEQ ID NO: 124045 - protein, 339 aa, Oryza sativa
  Clone ID: PAT_MRT4530_26822C.1.pep
MMAETMTTKTKPGMAERLLLPLSMVLVQLFTIGALLLAKLSFNSGMAPFVLLAYRNLIGTVTMLPFAFWFERQMMKKVNYKVLGWIFFNALFGLEKLKLKTRSGMIKVIGTVICVVGTMVVSLYRGKLLHLWPTHLLKPAQLRAIGGSDDSTFPTHHNMLIGTLFLCGSCLSYAFWFIVQAKVNKEFPSKYFSTMLACLMGTIQAVVIGIAVDRDRSAWALHWDLQLITIIYSGVFNTAATFCLITWAVSRRGPTYPSMFNSLALIITVVLDSMLLGSDISVGSLLGAFMIIIGLYSFLWGKGKEIKEQQQQVPTNTEADQSKITYPKSNGEVRIMLDT

SEQ ID NO: 124046 - protein, 136 aa, Oryza sativa
  unsure (1)..(136): unsure at all Xaa locations
  Clone ID: PAT_MRT4530_26823C.1.pep
MNSMNPYRSIDMCLRLRRSASSWAADVADHARSGRHDAALTVFRRVLAVHPTTAADDELACSALLRCCDARLAYQIHAQACRRGLVASNPVLACSLLAFYADADYYATVVIPXACNLFDEMAHKDAVSYTSMIFAL

SEQ ID NO: 124047 - protein, 46 aa, Oryza sativa
  Clone ID: PAT_MRT4530_26824C.1.pep
ETDGTLTGLAGRTPWRRGPWCWSPLRMQTPRCLVLYAGVSLQPGDP

SEQ ID NO: 124048 - protein, 129 aa, Oryza sativa
  Clone ID: PAT_MRT4530_26825C.1.pep
IRGGGRGGAVAVRYGSRHARELGASERTPGRRATVVVLWKRRRKRRREVVPWWCRGSGSATPTYVRRRPRWPRPRPPLRITTKAAPAHRGRAKAEKNPEGNAALTFSRSTDLDGQHGDTVVAGLMSKRF

SEQ ID NO: 124049 - protein, 204 aa, Oryza sativa
  unsure (1)..(204): unsure at all Xaa locations
  Clone ID: PAT_MRT4530_26826C.1.pep
SARAAASPKVSFSEREKAAATASAVLNGFGPHFLRGGKRSHALLAAGIGGKVGAVVSPXRVIEAVAAAPKKSWIPAVKGGGNFIDPEWLDGSLPGDYGFDPLGLGKDPAFLKWYREAELIHGRWAMAAVVGIFIGQAWRGVPWFEAGADPNAIAPFSFGSLLGTQLLLMGWVESKRWVDFFNPDSQSVEGATPWSRTAENFGNS

SEQ ID NO: 124050 - protein, 126 aa, Oryza sativa
  Clone ID: PAT_MRT4530_26827C.1.pep
MASRRNAASRWGGGKEAEDADGGERTGVRQQVLGLQRHPALIEGISSNRGGPSHGSRGACGDAAFVRDFGGSVGRRSHAGVARHTARRTVQGDQEGAPVVRDTFAARRCGVVCAAWARALVEHLAA

SEQ ID NO: 124051 - protein, 127 aa, Oryza sativa
  Clone ID: PAT_MRT4530_26828C.1.pep
MNTGVPVSWRARRKYTDVDVREESESAFGRIAHSNSNGLAPRTPGPVAARPTQHRRGAFVRRGGLFPLENLEKPGEKSRRRWEYLDGISKPSDGIGLGPDWTVTMESRRSHVTAAAAIAAVQYQQRP

SEQ ID NO: 124052 - protein, 93 aa, Oryza sativa
  Clone ID: PAT_MRT4530_26829C.1.pep
MAAADDHRGAGAAFRRPRRHGRLRARRVAAAWGPAVSRPRPRVRLTRGARGAGQCEPGCARSTVDHAAASKDPLFVEVEADVWESEQGKSHHP

SEQ ID NO: 124053 - protein, 307 aa, Oryza sativa
  unsure (1)..(307): unsure at all Xaa locations
  Clone ID: PAT_MRT4530_2682C.1.pep
MRTEDEVRKMIITSTEWPPPGMTKRQRRNTFRGAPQLTEHLLANGGRVSDSEDSDQVSSDDEDEKSPQGFNQNKMERMITLRKREFRYLKQEDLTVTEYLHEFHRLAHYAPEDVENDEDKQEKYLQGLKDEITVQLLLEEYEDFEKLVDKAIQLESEHNRMKNCKRRIVSIPVFPCGNQRQRTEPLQITGSSVAHQEFXPQEDGHNADNNISNTNDDDTTNNHASCPISDHSNQACNVNIIHQGVDDSINDGTQNDNPSNCDSEKDSNGDSNYGTTDANVSKDFQPPIPTPSQNDRPQTDSSAKKTL

SEQ ID NO: 124054 - protein, 374 aa, Oryza sativa
  unsure (1)..(374): unsure at all Xaa locations
  Clone ID: PAT_MRT4530_26830C.1.pep
MAEQAPLAPMPRVKLGTRGLEVNMPACSIVNSYFPVFPFVRFALNRPVTVSKLGFGCMGLTGAYNSPLDDDAGAAVIAHAFRRGVTFFDTSDVYGPLANEILLGKALKQLPREQVQVATKFGIRRGADGVRAVCGRPEYVRACWETAIHFHSLPHCLPXSHSHSPCDRRREAMAEQAPLAPMPRVKLGTRGLEVSKLGFGCMGLTGAYNSPLDDDAGGAVIVHALSRGGTFGDTGIGIVXPYSPIARGFFGGRGVTDQLSAESNLQGHPRFSAENLEKNKQLYLKTEELAKKHQCSPAQLALAWVLHQGDDVVPIPGTTKIKNLDANIDSLKVNLTDDDLKEISSQVREEDVAGGRQYTSFAHYTWKYADTPKK

SEQ ID NO: 124055 - protein, 95 aa, Oryza sativa
  Clone ID: PAT_MRT4530_26831C.1.pep
APPRPLFMSQPHGAPAAAHVALHAILGTDASRGPCGHTTVATDGCTRHAHTSYLCWILGHSTQMMDRWRCRCHRHCGTHGPWCNFQLLLPSGCVV

SEQ ID NO: 124056 - protein, 45 aa, Oryza sativa
  Clone ID: PAT_MRT4530_26832C.1.pep
RQIVRSDLGYRAERLNRTILVLVPSRKVSLQNNLNPITNSIRVNQ

SEQ ID NO: 124057 - protein, 843 aa, Oryza sativa
  Clone ID: PAT_MRT4530_26833C.1.pep
MKLEQREAEKLALHNAGFLAQKRLARGLRLNYTEAVALIAAQILEFVRDGDRTVTDLMDLGKQLLGRRQVLPAVPHLLETVQVEGTFMDGTKLITVHDPISSDDGNLELALHGSFLPVPSLEKFSSVGVDDFPGEVRFCSGHIVLNLHRRALTLKVVNKADRPIQIGSHYHFIEANPYLVFDRQRAYGMRLNIPAGTAVRFEPGDAKTVTLVSIGGRKVIRGGNGIADGAVNRSQLNEVMEKVIANGFGHEDYPDSSEGIIGDGTHDYSVDHEKYASMYGPTTGDKIRLGDTDLFAEIEKDYAIYGDECIFGGGKVLRDGMGQSAGYPASDCLDTVVTNAVVIDYTGIYKADIGINGGLIVAIGKAGNPDVMDMDGVNEEMIVGVNTEVIAAEGMIVTAGGIDCHVHFICPQLAEEAIASGITTLVGGGTGPAHGTCATTCTPSPSHMKLMLQSTDELPINMGFTGKGNTTKPDGLAEIIKAGAMGLKLHEDWGSTPAAIDNCLSVAEAFDIQVNIHTDTLNESGCVEHTIAAFKDRTIHTYHSEGAGGGHAPDIIKVCGVKNVLPSSTNPTRPFTLNTVDEHLDMLMVCHHLDRNIPEDVAFAESRIRAETIAAEDILHDMGAISIISSDSQAMGRIGEVITRTWQTANKMKRQRGRLPISSSPDAAEDNDNFRIRRYIAKYTINPAIVNGFSDFVGSVEVGKLADLVIWKPSFFGAKPEMVIKGGAIACANMGDPNASIPTPEPVMMRPMFGAFGGAGSANSIAFVSKAAKEAGVAVQYKLGKRVEAVGRVRGLTKLNMKLNDALPKIDVDPETYTVTADGEVLRCQPTPTVPLSRNYFLF

SEQ ID NO: 124058 - protein, 119 aa, Oryza sativa
  Clone ID: PAT_MRT4530_26834C.1.pep
RPMSPQSQWMVRWVPALSPWRIRAAVLSQLHAVRQCTGGCWRRPSGYSWRFSQAASGVGAAAGVGEAGRRDGVGQAAGDGRCRRAGWPGTALPQRGAASAGPWRMVPTYVRRGLSVCIG

SEQ ID NO: 124059 - protein, 154 aa, Oryza sativa
  unsure (1)..(154): unsure at all Xaa locations
  Clone ID: PAT_MRT4530_26835C.1.pep
GARGGAAVLWVVRKRRRRGCVGRRRRWIERRKSNRERGLARLGVVKVGAARRCGGVRGSVSARAPGQEGEQDGRAREGKAKEGGGKGALLHTDLGEQREERRXSSGSVFWTRAHWGGATRQQGMGGDRAAWRARARSSWRGRNQMARAGDLAPE

SEQ ID NO: 124060 - protein, 62 aa, Oryza sativa
  unsure (1)..(62): unsure at all Xaa locations
  Clone ID: PAT_MRT4530_26836C.1.pep
LLAEVGTKRLMDFKRSYVEKKGWVNFYGQIFQVTDIVLEVDKIWKQVKNXRVSFIQEELCSS

SEQ ID NO: 124061 - protein, 84 aa, Oryza sativa
  Clone ID: PAT_MRT4530_26837C.1.pep
QHQVPKFCTFLTVNTFTKPARHPTNPTLLSYTVGANRSHACIIANHIDCNSPCQGKIAPMPLLLFHTLVSDSHDMITKKGKASQ

SEQ ID NO: 124062 - protein, 155 aa, Oryza sativa
  Clone ID: PAT_MRT4530_26838C.1.pep
SSAAAPPSPATGSTSTTSSSTPTSPSAPSSSHRRRRRTPPPPCRTPSSASGGTWATSSRTSSSSTAAPPTRCGAASRKAGATTCSRTGRCSSSPGGAPPGRRRRGGGRRGSSATWCSGSAPTCSACSPPCAGTSPMNTTTSARSSDAGDGGSTTN

SEQ ID NO: 124063 - protein, 297 aa, Oryza sativa
  Clone ID: PAT_MRT4530_26839C.1.pep
MASPSAAATARKLGSHLPRLRDIIDHDDEDDDFVEEEEEEEEEWEDMSKRMSRLSVEGSDGGDADDEDDGYLRGEEEEEEEDGDEVRSDVNGEYGDGGGGGGQWHPYGDDDPRNPQAPSSASLPGTPDRGAPAPSPWMYSKEYASETEAARWPGGDKRRMRHRRERMMREVWLDRAWQMRKQRRQMLMQGQGLGADAVTVVVSAAAAGGESPARGVAMDMEEMRACRDLGLDLPCDWTVEIPCYALSGVDTASSGGNSPASGSWRISSPGDDPKDVKARLKVWAQAVALASASRLGS

SEQ ID NO: 124064 - protein, 302 aa, Oryza sativa
  unsure (1)..(302): unsure at all Xaa locations
  Clone ID: PAT_MRT4530_2683C.1.pep
VLPTERGRDRTLRITPSNQAHHTSGFTPTPRKAAGSPLSCLGESGSRIGRRRAHPNSITPTLAWMRRLEESYATSPAVAHAGLWTTQVVHRRSTRPTAQIAXDDRTGGDRGGRPGLAAAARARRVAGDGIRRWRRRRKSDAKAAAADGGNDRRRRRARAAATHGELGKKRKGEGVLTGGDGGVRRRGATEGGRHAADGDRDDMATLTNARWEWRSGDEPRRRRGGRGGSRPREPDGGDGAVRRRARGRGRRGPKEAETWARRRLRARREVGEGPDRWAPPVGDPGRGGRRGGLAGPRPDLSH

SEQ ID NO: 124065 - protein, 51 aa, Oryza sativa
  Clone ID: PAT_MRT4530_26840C.1.pep
LNTSEKVSNRAIHRPLNEPGSHSTRTPGLTPQSLLSTPASSQAYSIHKQER

SEQ ID NO: 124066 - protein, 48 aa, Oryza sativa
  unsure (1)..(48): unsure at all Xaa locations
  Clone ID: PAT_MRT4530_26841C.1.pep
CIELGPKGHMLSTRGIPDMGRRLYYPNPCLLVHXYTLTPYIIDKYHTY

SEQ ID NO: 124067 - protein, 67 aa, Oryza sativa
  unsure (1)..(67): unsure at all Xaa locations
  Clone ID: PAT_MRT4530_26842C.1.pep
IPVIKATGISTPIFSCXQLGRSYIFFLDDLLIHLPAIYHVTIYLKEKCTSTCGXCSVWPGMKKKKKK

SEQ ID NO: 124068 - protein, 45 aa, Oryza sativa
  Clone ID: PAT_MRT4530_26843C.1.pep
LSKAVPLLREIVSRISVIVCYFFSSKGPHIYNCLFYYSGLFPLIV

SEQ ID NO: 124069 - protein, 72 aa, Oryza sativa
  unsure (1)..(72): unsure at all Xaa locations
  Clone ID: PAT_MRT4530_26844C.1.pep
MFLPSQPVQQTPPRQQPQGGNLNYQYQPPSPQAQYQPGGLAQPQFASQYGQFEPMQQXSQGAARQRPWADVI

SEQ ID NO: 124070 - protein, 312 aa, Oryza sativa
  unsure (1)..(312): unsure at all Xaa locations
  Clone ID: PAT_MRT4530_26845C.1.pep
MALAAPLLRLRLLPLAAFVSVVSLTAAPRRAEAWGKQGHIIVCKIAEKYLSEKAAAAVEELLPESAGGELSTVCPWADEVRFHYYWSRPLHYANTPQVCNFKYSRDCHNSRHQQGMCVVGAINNYTDQLYSYGDSKSSYNLTESLMFLAHFVGDVHQPLHVGFEEDEGGNTIKVHXYRRKENLHHVWDNSIIETAMKDFYNRSLDTMVEALKMNLTDGWSEDISHWENCGNKKETCANDYAIESIHLSCNYAYKDVEQDITLGDDYFYSRYPIVEKRLAQAGIRLALILNRIFGEDKPDGNVIPLQVHVPLE

SEQ ID NO: 124071 - protein, 255 aa, Oryza sativa
  unsure (1)..(255): unsure at all Xaa locations
  Clone ID: PAT_MRT4530_26846C.1.pep
PLFPTLFPYFPPKMPDSPPPSLPPPVNTGKKKWKKDKRKEIPPPPPLAETPPPMNERPPTPPPVQPPPDRETSAMVPAIVEEEKPRDRVAELEPPSPHKEMPLPQPTTMEMPPPPVTCTPVVEKPRPPPCARPFYPVDMATPTMVEIPSWPAAPAPPSCCAPPPPPPLLPPPPPNSIPIPLHTRRLTSPTPAISSAPSPPPPPPPTXSARPPPPPPEGEPPPPXAPAPPTPPCPIPSSPPIPPPPPXSDPPPPPP

SEQ ID NO: 124072 - protein, 143 aa, Oryza sativa
  unsure (1)..(143): unsure at all Xaa locations
  Clone ID: PAT_MRT4530_26847C.1.pep
NTQAFKGARRRRRRPTTTGDEKERSGSEREKPIRFDLESNTFQADLADXFQKRKGRGDPGDHFPSFDSAGEGKERPDLEGNGGGAKLGFRAAAAGGRRRXLTGGPHLSAGGRARARRRTGPTWAEERESGFGPTFGPKPKETF

SEQ ID NO: 124073 - protein, 141 aa, Oryza sativa
  unsure (1)..(141): unsure at all Xaa locations
  Clone ID: PAT_MRT4530_26848C.1.pep
SQRQAAGEPATGDEQGQRDPHATERRGVGGGTSETQVGAANGDGDGDTRGXLGSLPDPAEGRGGRTCGGSGGSPPSQIQLEGVWGRAAAVPLPPRSAPTPAGAAAPHQTRLSPGTNLPSTLMLQLHRLRCCRPPHCAHHYR

SEQ ID NO: 124074 - protein, 124 aa, Oryza sativa
  unsure (1)..(124): unsure at all Xaa locations
  Clone ID: PAT_MRT4530_26849C.1.pep
QGFPSHDVVKRRPVNCNTTHYRANSSSVPGDPLESTCRLGNLYEVDSEDMNHEKFWNGSIIKLPQPSLSQLKGAPWFKSGEEKIPSATGGQAKQFRVVKFCXKFVKTERKKSNKKRRPPNLSSC

SEQ ID NO: 124075 - protein, 406 aa, Oryza sativa
  Clone ID: PAT_MRT4530_2684C.1.pep
MESLLAASSSLPAAAFSPPSSLSSTSSSPHALRSAVAGAARADSILYALEHDEMFNSAEVIQWESGKSINSIAAAQGIRIRRRCRPRYPSEGSGADKAVPRNMLEQIIWDKEVEVSQRKAKKPLQKVIESSQHAPPARDFVGALTAAYSRNVAPALIAEVKKASPSRGVLREDFNPVEIAQSYEKNGAACLSILTDEKHFQGSFENLETVRNSGVKCPLLCKEFVIDIWQIYYARSKGADAILLIAAVLPDLDIKYMLRICKNLGMTALIEVHDERELDRVLKIDGVQLIGINNRSLGMVIIISCKCLQSFETLRIIVDIDVYWNFVIIETFKVDTSNTKTLLEKRGDLIRDKGILVVGESGLFTPDDVAYVQNAGVSAILVGESLVKQENPGQAIAGLYGKDLLH

SEQ ID NO: 124076 - protein, 46 aa, Oryza sativa
  Clone ID: PAT_MRT4530_26850C.1.pep
SVGDLSYDRNVAQAQDPLAFNVPSKYGIHPRCYGAPSTISTLAGVL

SEQ ID NO: 124077 - protein, 99 aa, Oryza sativa
  Clone ID: PAT_MRT4530_26851C.1.pep
EAMDKHTPHAPSASPPARATRARSGRAPPRGGQGRGRRRGRAQSSGRGVWWGHQRPTTSRPQRQRWWRQQMRARLLRPHSSSSSSYDNLKLAIHMWYLS

SEQ ID NO: 124078 - protein, 72 aa, Oryza sativa
  Clone ID: PAT_MRT4530_26852C.1.pep
MSPGAHPHIWLYILSTAESLDEIKMALGLLGLVAAVSGWQALDYAIVAWFHKERNLFEELEKEFMYEKKLTE

SEQ ID NO: 124079 - protein, 42 aa, Oryza sativa
  Clone ID: PAT_MRT4530_26853C.1.pep
DAWADAWEKKKKKKKKNKKKKKKKNGGTFWGSYLTGACFLTD

SEQ ID NO: 124080 - protein, 286 aa, Oryza sativa
  Clone ID: PAT_MRT4530_26854C.1.pep
MQASARLYTAAASKRVIAGVSSTISRSCHRTCRWKSHAAPLSAQEAPKGPKRMTKQERRVKIEKFVEEYKASNDGKFPTMTTVRQHVGGGHYTVREIVQELEYNQRMLQLDQSKAAELPETAEHSEHLKPKDVHGNAQFNSESFSGNQNTDDLHLSQKVAATSTEIIDKTETWRLEESQMTSGTSHYTGETEAVKQDLHTADSLQGANESIKSCQTESDSIKNEDSISLGLDTKSDPTDLELGESKSDKIELNSTARFKNVSEPPVSDPIEGDKTVKANVLDSVFV

SEQ ID NO: 124081 - protein, 296 aa, Oryza sativa
  unsure (1)..(296): unsure at all Xaa locations
  Clone ID: PAT_MRT4530_26855C.1.pep
YLTEAFCEHTIPSRLCYKINTYFNQCQLVDVNALRACPFTVCGDLWSDIFDLLNMFELNGLQKTLTFSMETLDRGSFSPEVIFTHFAFWWLNPTCIYLAXGYHESKSMNKTIYGFEEXTESKLSDTFVELFSEVXCHLPRAHVISKEFVAFGSLFSVHGVKLYXYVIKAIGYLCEPPVXRHIRSSLXSFAKPQLQRGSRKRGAVLSFGVDAIKRFLDGNNLDLVIRCHKXEGYEIKHDGKFIXFSAPSCFYQMGNTGAFIPFTSPDLKQDTAKFYMVCHPRNPAFLFRNNFLFNYY

SEQ ID NO: 124082 - protein, 55 aa, Oryza sativa
  Clone ID: PAT_MRT4530_26856C.1.pep
LLVFLNDITRNIIPSNDAKILLVYYGYRVHPQAHGYNIVAFHPRVFQWYRIYFIP

SEQ ID NO: 124083 - protein, 853 aa, Oryza sativa
  Clone ID: PAT_MRT4530_26857C.1.pep
MAASPPPPPRPLLLLLPLLLVWGVVVAAAAATDTLRQGESLTGAATLVSSPSGVFEVGFFAPDPKLPSRLYLGIWYRSISPRTVVWVANRAAPATAPSPSLTLAANGELRVLDGSAADADAPLLWRSNASTQSAPRGGYKAVIQDTGSLEVRSDDGTLWDSFWHPSDTMLSGMRITVRTPGRGPSEPMRFTSWTSETDPSPGRYALGLDPANSGQAYIWRDGNVTIWRSGQWTGQNFVGIPWRPLYLYGFKPANDANLGAYYTYTASNTSLQRFVVMPNGTDICYMVKKSAQEWETVWMQPSNECEYYATCGANAKCTAMQDGKAKCTCLKGFQPKLLDQWNMGNWSQGCVRSPPLGCQVNQTGDGFLSIPNIKWPDFSYWPSTVQDENGCMNACLSNCSCGAYVYMTTIGCLLWGSDLIDMYQFQSGGYTLNLKLPASELRSHHAVWKIATIVSAVVLFVLLACLFLWWKRGRNIKDVMHKSWRSMHTSTRSQQNSGMLDISQSIPFEDDTEDGKSHELKVYSFDRIKAATCNFSDSNKLGAGGFGPVYMGKLPGGEEVAVKRLCRKSGQGLEEFKNEVILIAKLQHRNLVRLLGCCIQGEEKILVYEYMPNKSLDAFLFNPEKQGLLDWRKRFDIIEGIARGLLYLHRDSRLRVVHRDLKASNILLDKDMNPKISDFGMARMFGGDQNQFNTNRVVGTFGYMSPEYAMEGIFSVKSDIYSFGVLMLEIITGKRALSFHGQQDSLNIAGFAWRQWNEDKGEELIDPLIRASCSLRQVLRCIHIALLCVQDHAQERPDIPAVILMLSSDSSSLPMPRPPTLMLHGRSAETSKSSEKDQSHSIGTVSMTQLHGR

SEQ ID NO: 124084 - protein, 50 aa, Oryza sativa
  Clone ID: PAT_MRT4530_26858C.1.pep
HAFESYVVCKYHVVTPLLLLCKWMIHALENYAVNDQSTTSFGFGKKKKKK

SEQ ID NO: 124085 - protein, 115 aa, Oryza sativa
  unsure (1)..(115): unsure at all Xaa locations
  Clone ID: PAT_MRT4530_26859C.1.pep
IGFTLQKKRVINFHEGRLEPLYPTPRPLYFFFYFFWLVFFVFFFFFFFLVLFFFLFFFFFXCXRNIVHITFHQLIPIHSVSQRTSSLAVPFNYLNQSDQIVLSGRVGGRVGGRVG

SEQ ID NO: 124086 - protein, 110 aa, Oryza sativa
  Clone ID: PAT_MRT4530_2685C.1.pep
MFGRSGITAAVKVEEEDDGKTPAAKRAGEYVTLKVQDTDGRAVYRTMRWTEQLQGLMDFYYDRAHGRVQRGTGRFLYDGRRLSGWQTPAELDMEDGDEVDFFEELIGGAA

SEQ ID NO: 124087 - protein, 283 aa, Oryza sativa
  unsure (1)..(283): unsure at all Xaa locations
  Clone ID: PAT_MRT4530_26860C.1.pep
RNNELFLKRNRGLLRQRVGFMVDRVHGGGSRKRTAEIXSVHGRTTGDDDDDVSGDVITSDDLGTHARRRTTARRRERRAPKRCGXRSELTGDQNNGGDDLRLDDGDGVPAVDSDGGGADEIGDGLVIPTAXSRATTTTGATAAHGWTNDGAKAHGARALQTAAGEGESGCGGKEAAAKAHGDRRREGKVRVRRXETNPIRDRIHEFPNRIRRXFQKRKGRGHREDHFPSIDFTGSGKGRWAPPVSGRTRARAAAAGLGRGREREVLGRLSAQSQKRLLKTFFN

SEQ ID NO: 124088 - protein, 293 aa, Oryza sativa
  unsure (1)..(293): unsure at all Xaa locations
  Clone ID: PAT_MRT4530_26861C.1.pep
LFLKRKRGLLRQRVGFMVDRVHGGGSRKRTAEIDPTKTNGRDLSVHGQSTGDDDDDVSGDVITGDDSGTHARRRTTARWRERRAPKRCGRRGELTGDQRRSGEDLRLDDGDGVPAVDSDGRGADEIGDSLAIPMAXSRATTTTGATAAHGXTNGGDGGAKAHGARALQTAAGEGESGCGGKEAAAKAHGDRRREGKFMVRRXETNLIRDRIHEFPNXLGDXFQKRKGRGDREDHFPSIDFTGSGNRRWAPPVSGRMRARVAAAGLGRLGRGREXVLGRLSAQSQKLFSFRIIT

SEQ ID NO: 124089 - protein, 134 aa, Oryza sativa
  Clone ID: PAT_MRT4530_26862C.1.pep
WNRNRIESSVLGVFGRIRRTWYRFRHLVRGTWKEKLRRKFKFACAKQEEGTNLCGYYVCEYCHCLTTQIITTRELDVIHMRDNLTHKEFIAAVQEQLMGFINEQVLDPEGEFYYDENTIHKSLASKITTTTSKS

SEQ ID NO: 124090 - protein, 71 aa, Oryza sativa
  Clone ID: PAT_MRT4530_26863C.1.pep
VFCDEARPLPVGAIPVHTLLMGKKSAGTKQYDDATMEVQKVLLAASAVTLKDIMTWRPTRLRYSTIMIRCN

SEQ ID NO: 124091 - protein, 812 aa, Oryza sativa
  unsure (1)..(812): unsure at all Xaa locations
  Clone ID: PAT_MRT4530_26864C.1.pep
NAAKKQYFHQLGSGGYWKGVPKXQTMETALEERSIILATVDWPERSKVLYYAHGXTLNPGDGSLIFXDDIRQTAHHLVDALEAFAQGTFXPDREKDELPLALQNAEHSGXTRGKGVVPWKXYGFQEDVHTYRSHMRSKRDQHEKLTSLELKVASYDARMQEELARRVDKCLSESRQQTQLSIPHPMVSPSGRENRCTSIGXVGDQSIEAVSGPDVDEPPCLVDEITXQTLCELYIPFRNISIKVADGMAKPVQQDETYHCRSVPTRYSKVEVERVVPSFEDLELDIPGRDGEIKLGDTDHSIGRCRESDLSMNGPRXAEMTQPIMPKFTSLKXEQQKRRPPAENGPDWASPWFSRTHPGAVGCRVAARWCGLAPNDGWRVFPTIPTITTVIGRLYKELTLSISRHTSSKKFISSLKLSIVSRNRIFSPRSLRKNSGMDNSIWXFKRGVQITGYHYLGLYAAEMRWAADGDSXQYGYSSARVYSPKLISWGGYSSVFSPSCMVTTDCRXGTRQSRVASRSTRRXIGKRLVYGSLYYNLPTGLNKYDTLGILSGEILQWYIHALVDELCNHNIPELFLRHCWELYXSNDVKKYQHISRHSTMVQVLHRFSRASSGVHSYISSAASSVSSISYANSVSAVSTISSATSVSAVSTISSASSNKATSFKYHVYSISSCVVKVHTTNEEAKTCTNHIFKLHXRTWYRFRHLVRGTWKEKLRRKFKFACAKQEEGTNLCGYYVCEYCHCLTTQIITTRELDVIHMRDNLTHKEFIAAVQEQLMGFINEQVLDPEGEFYYDENTIHKSLASKITTTTSKS

SEQ ID NO: 124092 - protein, 61 aa, Oryza sativa
  Clone ID: PAT_MRT4530_26865C.1.pep
THYAHKAGRTGRLGRKGTVVTICEETETFVVRKMRKQLAVPIKPCEFTEGKLLVHKEEDVE

SEQ ID NO: 124093 - protein, 107 aa, Oryza sativa
  Clone ID: PAT_MRT4530_26866C.1.pep
MRKERRRWRPGAAAAAAPRSRATSGPRGRVVGSGAGGGAGEGRYLARNGNRTVIKRRGTADAVELTRAIGFTNPVWPTRRPSVQQRGMDTMRSAGTMLPIAPSLLSA

SEQ ID NO: 124094 - protein, 35 aa, Oryza sativa
  Clone ID: PAT_MRT4530_26867C.1.pep
WPHQQLPLRNKSVTRHCCLYTRSSSSSSLLASKVR

SEQ ID NO: 124095 - protein, 75 aa, Oryza sativa
  Clone ID: PAT_MRT4530_26868C.1.pep
ECQLIRLEEGYIAEGMRLSVIGILSKKDGDLMILPPPEPISTGCVFLSFLLPTYFDGIVLRLVDRSYFMHNSGVS

SEQ ID NO: 124096 - protein, 117 aa, Oryza sativa
  unsure (1)..(117): unsure at all Xaa locations
  Clone ID: PAT_MRT4530_26869C.1.pep
VFTAAWAATALAFGVACRXIHDAAAAGPAGAARGWRMRALEGLTVTLAFTQLLYVLLLHAGFAGEXCGLXCAAVAYFSSSPSFFFRACLCFVSGCVLLLCSRWGSLRVFCCLAFLLL

SEQ ID NO: 124097 - protein, 67 aa, Oryza sativa
  Clone ID: PAT_MRT4530_2686C.1.pep
NNIRSYKLLSPPVPKHTTSPITGETKIKKKSRSRTAMDLHRWTVGSWQQAALDVLSAPPLPPLHRER

SEQ ID NO: 124098 - protein, 90 aa, Oryza sativa
  unsure (1)..(90): unsure at all Xaa locations
  Clone ID: PAT_MRT4530_26870C.1.pep
PPVTALRFFYRVENPVTPQPNNPDLCVRPVTRRIQGYDRLFIPXVFTKGLGDKLQVFSIRLHARPPRVGLSRRHQGPRQRPRVILHVRPL

SEQ ID NO: 124099 - protein, 79 aa, Oryza sativa
  Clone ID: PAT_MRT4530_26871C.1.pep
FFSPVHIFFTDPILFGFSLFSNAPPICQPKSSTHKPINLQFQVPPQIHLFHKPTSSSPSHKPHYSKFRCPFTNSGVSQT

SEQ ID NO: 124100 - protein, 163 aa, Oryza sativa
  unsure (1)..(163): unsure at all Xaa locations
  Clone ID: PAT_MRT4530_26872C.1.pep
MIRSDRARRTGRRMRRTIITAMCSAYCLASCCTSCACEACRTVVGSIGRRXSARFGYCGLFVLSLFHCCALHEVAAPLLXSILWINHLHRTPNREXTQTDALLMARLDNFGFFTISLIXMCGIKDQNDPLPXIHHGVWMVKIFCXLVIAFLMLFEPNGHICYY

SEQ ID NO: 124101 - protein, 229 aa, Oryza sativa
  Clone ID: PAT_MRT4530_26873C.1.pep
MSSLRREAPPISDYEALDGSGKCTDEPSCSSDPSKDSSSCTSAFAFTILAINCGAAIYHSRRDPWSVAFVLAAFLMLISLFCALRLFESLPRSSPRRSHVKAGVWVLSTVLTILFTYRVAALMPFPVAVVVWAMSVFTILAGFYMFFVCSDELYGFDRVSGPKTVPPPCADSPVVPVDTVSSKASGFQNDQRNHRRYTRARITKSRQTVSGFATVLLYGLPVASSLYCH

SEQ ID NO: 124102 - protein, 78 aa, Oryza sativa
  unsure (1)..(78): unsure at all Xaa locations
  Clone ID: PAT_MRT4530_26874C.1.pep
ADPFRGGSGGADQFXXGGDDEVAARCDGGGADPVRSGRGGADQVRGGGDDVVAARRDGGGADAARGDGGSTDTVLSGG

SEQ ID NO: 124103 - protein, 628 aa, Oryza sativa
  Clone ID: PAT_MRT4530_26875C.1.pep
MSPSMPQPLPLPSPPSSPRSGATTTTTTSVRARPRPPTAPPDAPWLALSGGGAGSSDVAGSSSGSGSNVDETLAAMRDAAWARFYAVMGKGKGKAGERGSFSFPDLGAPHDVVDAAAVVDHFATVEAERRAGARAQFLDATMEATASARLGRVKRELLVDRRVLDLAGLERWLRRGEAVAELAWFAELCAGEGGEPVPPLELFESAFRALQAARSDELHRGAGFRKRWVGPAAVPEFFLCPISNKVMVNPVVISSGKTVEVLALEKWWSENRRLCPVTDEILDNSIFIPNILIMLCTALWRTRNGITDVTTIAEPPKISSEEEALFREINLLALSPSLSDKTFDAILRLHELISNAQSSLLHLLGQSPGMIAKLACLLPETCLDPDPGLDDIILKIIAKTASYNPNKVILGDDQYAIPVLIARALLGPVDTRVKSAQILGLLADNYYNKIKIGELGGFAALMELLLLVGDREVKRTVAMAIASLCEAQENWSRFVREGVADAAISLLRDDNLVDEARSIFLKATGFELAMTQVLDKLMSFGDDANCLKMVESIWNTFIRTKLRRRRPNVTHASSSTRASDVFSDTSSDGSVELPMHVELTDKAEDDVRTIVSWLQKRTCYPRTYKYED

SEQ ID NO: 124104 - protein, 99 aa, Oryza sativa
  unsure (1)..(99): unsure at all Xaa locations
  Clone ID: PAT_MRT4530_26876C.1.pep
PLPPRAAPSVSPTPPXRRRPPKSVAAPPPAGRPXRPXPSSPPPTRPNAFPSPPPTXPSPPPPVPASTSSSDIKEVPLFRCFRDGFGGELVAISCLKVEV

SEQ ID NO: 124105 - protein, 219 aa, Oryza sativa
  Clone ID: PAT_MRT4530_26877C.1.pep
MWGKKRGPRRPFIGWGASLTGGAGRWTGRSGAAGAVTGHRRRAGTQGNSGVEEGGAIGAAREVLATMGAVGEEESVGSAGKGDGRRGKGGVERAAEEKLRGGGDRRRGGRRDGQQRDGRLPVAVREKVQLHASRSDRRRSACPAPLRPRPAAALLCSGRPAPPARSGRCRSACPAPLRPRPAAAPATPSFARSSRRRPALPLRDPLYLVLWLKDENRIR

SEQ ID NO: 124106 - protein, 91 aa, Oryza sativa
  Clone ID: PAT_MRT4530_26878C.1.pep
MEATEAETKGEVSWWGGWNRVDRTVPYKPKGLDRLVTMRSGLEKYLSGHSPAPQPIEISPLCTSALRLYMAAPRCSGYKVLLYSYLTLMME

SEQ ID NO: 124107 - protein, 69 aa, Oryza sativa
  unsure (1)..(69): unsure at all Xaa locations
  Clone ID: PAT_MRT4530_26879C.1.pep
IPGRHWNSHQPAGQVSRPGQLRMGEKTGHIFLRFAVPTAQTLCCAQQRGHLMGLVVVVXPRSHQLPVVL

SEQ ID NO: 124108 - protein, 1374 aa, Oryza sativa
  unsure (1)..(1374): unsure at all Xaa locations
  Clone ID: PAT_MRT4530_2687C.1.pep
MSSSFVDNSVNTNLNQGVPTSTMLVWTQVGEIIFPVYTTVPISAGPSMTGRENAVATTQDDSMSKDPPAEVENGTSTTSDPEKDPNAAKSCLSDKNHESTRMTSEVTRSWCPIHKTRKHTLQACWVFLNVHAEIRACKERGIQRTSPTLDVYCPIHKTKNHDLSSCKVFLSAMKTSPPKVQQSRIPLRDEDKEQGATLITDRFVGVIDIDPHEPSVLHLLEDYGSSSTSTPCEVLTIGWTSTSARANSEAENQVTTLAQHIRAVNAILRETPNDPVLNDDVARWTERLRESVTNLSNAFEEAAAAAHSEQPPTGERGGRSSEDRDRDNRHNRHDHDDRERQVLGDTGRGRRHNDDDDGDRRRDNNRRRRQDSREPGRRPRNRTPEPSDPSSSSSSSSSSSSDRHPRRTYDRRQPTAPSAGCRAFSRSLRDVRWPERFRPGAIEKYDGSTDPEEFLQVYSTVLYAAGVDDNALVNYLPTALKGSTRSWMMHLPPYSISSWADLWQQFIANFQGTYKRHAIEDDLHVLTQNPGESLRDYVRRFNECRNTIPEITDASVIRTFKSSVRDRYTTQELATKRVTTTRRLFEIVDRCAHADDALRRKNDKPKTEGEKKLAKEAPESSKKKNRNSGKRKAQAETLHPEWLANPVMVRKANGKWRMCVDFTDLNKACPKDYFPLPRIDQLVDSIAGCELLSFLDAYSGYHQISMAKEDEEKTTFITPFGVFYYVKMPFGLITTGNTFQRTVQGALSDQIRNNVEAYIDDIVFKTKTSDSLIDDLRETFDNLRRYRLMLNLEKCTFGVPSGKLLGFLVSGRGIKANLEKIKAIENMKSDNQIDNETWIMAFDSALNSQGAGAGFILTSPSGNQFKHAIHLNFRATNNTAEYEGLLAGMRAAAALGVKRLVVKGDSKLVVNQVHKDYKCSSPELSKYLVEVKKLEKRFDGIEIRHVYRKDNIEPDDLAWRASRREPLEPGTFLDVLTRPSVKEASGKDSLIVLNISSWAIEAERAVADIETTDDWHTPLIKFIGSEELPEDDAEAEKITRKAKIYCMIGNDLYKKTPNGILLKCVSSDDGRHLLLDIHEGICESHAVGRTLVRKAFRQGFFWPIALKDACDMGLXHTRAIPTRAGRLQVPIXVAIDKFTKWIEATPTGEIKADHTIKFIKGIFCRFGLPHRIITDNGSQFISADFQDYCIRLRVKICFASVSHPQSNGQAHITYKKWVEELPSVLWAVHTIPTTSNKETPFFLVYGSEDMLPTELRHQSTRVQKYSDEDQEEQGNDAVNLLEEHRERVAVRAASYQQAIRRYHEKRIRARTLSIGDYVLRRVQSQAGRNKLSPKWEGLYTITQVLRPGAFKIADSDGRELANSWNIDQLHKFYV

SEQ ID NO: 124109 - protein, 85 aa, Oryza sativa
  unsure (1)..(85): unsure at all Xaa locations
  Clone ID: PAT_MRT4530_26880C.1.pep
TDTVADWAFPHADHKKKKVLGIXVDPRLAEDYPVKAVQKTAMLAYHCLNRNPKARPLMRDIVATLEPLQQMEEDPSISLVSGTEV

SEQ ID NO: 124110 - protein, 111 aa, Oryza sativa
  Clone ID: PAT_MRT4530_26881C.1.pep
MARGSQSDGAGGGELNASEAGGAASRGHPSSWSWLPLTPLQENATVIVTGHRLDVSSQGRRRSKPGLPLLPSLSGSTKPPSWPINCSPEHRSHQPITSLQIRKMGKTEWVV

SEQ ID NO: 124111 - protein, 51 aa, Oryza sativa
  Clone ID: PAT_MRT4530_26882C.1.pep
MKFDQKLKAKPCNTAKDMQKMAWAGMVQRAAAMEHTAGVHVPGGMQPVRKF

SEQ ID NO: 124112 - protein, 1226 aa, Oryza sativa
  unsure (1)..(1226): unsure at all Xaa locations
  Clone ID: PAT_MRT4530_26883C.1.pep
MRQRTPADGREGEEQWCASVGSRWEGGRGAAAHGDQWEGAACGDPQRCFVAPLRAASGMALPGASARFHEYEAAITACIERRALWEGRQVHARMITARYRPAVFLGTRLVTMYVRCGALDDARNVLDRMPERSVVSWTTMISGYSQTERHVEALDLFIKMLRAVVSWNAMLMGYGRHGLGHEVISLFKDLHKEVKPDSVTLLAVLSGCSHGGLVDEGLDIFDTVVKEQSALLHTGHYGCIIDLLGRSGRLEKALNLIENMPFESTPSIWGSLLGACRVHANVHVGELVAQKLLEMEPENAGNYVILSNIYAAAGMWKDVFKVRKLMLEKTVTKEPGQSWIILDKVIHTFHSSERFHPSKKDINAKIKEIFVDIKAAGFVPDLSCVLHDVDDEQKERMLLGHSEKLAITFGLMNTPPGLTIRVIPLEGRHSDGLPHLNQAEEATWMGLLPRRAGPRDELDWLALYRSITRGGGDVGGEPAGFLSPASLHDVRVDPYGANMYWQGQQTNLEYLLYLDPDRLTWTFRQQAKLPTVGEPYGGWEAPDGQLRGHCTGHYLSAAAHMWASTHNDALREKMTKVVDILYCCQKKMNTGYLSAYPESMFDAYDELAEAWSPYYTIHKIMQGLLDQYTLAGNPKGLEIVVWMTDYFSTRVKKLIQEYSIQRHWEAINEETGGFNDVMYQLYAITKNQKHLTMAHLFDKPCFLGPLGLHDDDISGLHVNTHVPVIVGAQKRYEVVGDQLYKVSRNLFRWTKEGKYTDHYERLLINGIMGNQRGKEPGVMIYFLPMGPGRSKSISGMPTSGLPPKNPGGWGNANATFWCCYGTGIESFSKLGDSIYFLEEGEIPGLYIIQYIPSTFDWKAAGLTVKQQAKPLSSTDSHFEVSIFISSKGDARPANVNVRIPSWTSVDGAIATLNGQKLNLTSAGDFLSVTKLWGDDTLSLKFPITLRTEPIKDDRPEYSSIQAVLFGPHLLAGLTHGNQTVKTSNDSNSGLTPGVWEVNATHAAAAVAVWVTPVSQSLNSQLVTLTQRDGDAQAAAAFVLSVSIADGALTMQESPVAGSDACVHATFRAYHSPSGASAIDAATGRLQGRDVALEPFDRPGMAVTDALSVGRPGPATRFNAVAGLDGLPGTVSLELATRPGCFVQXHHGLPRRRQGQVSCRKPTAAGGGEDDDDTAFRRAASFTQAAPLRLYHPLSFSATGTDRNFLLEPLQSLQDEFYTVYFNVLTK

SEQ ID NO: 124113 - protein, 755 aa, Oryza sativa
  unsure (1)..(755): unsure at all Xaa locations
  Clone ID: PAT_MRT4530_26884C.1.pep
MTRRRSLAGGAAAAVVVLAAAAAAAFLSLLDGAAALHLCTDRLFNDTQGRHSDGLPHLNQAEEATWMGLLPRRAGPRDELDWLALYRSITRGGGDVGGEPAGFLSPASLHDVRVDPYGANMYWQGQQTNLEYLLYLDPDRLTWTFRQQAKLPTVGEPYGGWEAPDGQLRGHFTGHYLSAAAHMWASTHNDALREKMTKVVDILYSCQKKMNTGYLSAYPESMFDAYDELAEAWSPYYTIHKIMQGLLDQYTLAGNPKGLEIVVWMTDYFSTRVKKLIQEYSIQRHWEAINEETGGFNDVMYQLYAITKNQKHLTMAHLFDKPCFLGPLGLHDDDISGLHVNTHVPVIVGAQKRYEVVGDQLYKEIATFFFDVVNSSHTFATGGTSTMEHWHDPKRLVDEIKISSNEETCATYNLLKVSRNLFRWTKEGKYTDHYERLLINGIMGNQRGKEPGVMIYFLPMGPGRSKSISGMPTSGLPPKNPGGWGNANATFWCCYGTGIESFSKLGDSIYFLEEGEIPGLYIIQYIPSTFDWKAAGLTVKQQAKPLSSTDSHFEVSIFISSKGDARPANVNVRIPSWTSVDGAIATLNGQKLNLTSAGDFLSVTKLWGDDTLSLKFPITLRTEPIKDDRPEYSSIQAVLFGPHLLAGLTHGNQTVKTSNDSNSGLTPGVWEVNATHAAAAVAVWVTPVSQSLNSQLVTLTQRDGDAQAAAAFVLSVSIADGALTMQXSPVAGSDACVHATFRAYHSPSGASAIDA

SEQ ID NO: 124114 - protein, 191 aa, Oryza sativa
  unsure (1)..(191): unsure at all Xaa locations
  Clone ID: PAT_MRT4530_26885C.1.pep
MAAAARPLVSVKALEGDMATDSAGIQMPQVLRAPIRPDVVTFTHKLLSCNRRQPYAVSRRAGHQTSAESWGTGRAVSRIPRVPGGGTHRAXATAVPSLVLARGHRIEGVPEFPLVVSDSIESIEKTAQSIKVLKQIGAYADAEKTKDSVAIRAGKGKMRNRRYINRKGPLIVYGTEGSKVVKAFRNLPGVD

SEQ ID NO: 124115 - protein, 602 aa, Oryza sativa
  unsure (1)..(602): unsure at all Xaa locations
  Clone ID: PAT_MRT4530_26886C.1.pep
IWPIHFLSRNSAHNRAASGMALPGASARFHEYEAAITACIERRALWEGXQVHARMITARYRPAVFLGTRLVTMYVRCGALDDARNVLDRMPERSVVSWTTMISGYSQTERHVEALDLFIKMLRAGCIPNEYTLATVLTSCSGPQSIYQGKQVHSLLVKTNFESHMFVGSSLLDMYAKSENIQEARRVFDTLPERDVVSCTAIISGYAQKGLDEEALDLFRQLYSEGMQCNHVTFTTLVTALSGLASLDYGKQVHALILRKELPFFVALQNSLIDMYSKCGKLLYSRRVFDNMLERSVVSWNAMLMGYGRHGLGHEVISLFKDLHKEVKPDSVTLLAVLSGCSHGGLVDEGLDIFDTVVKEQSALLHTGHYGCIIDLLGRSGRLEKALNLIENMPFESTPSIWGSLLGACRVHANVHVGELVAQKLLEMEPENAGNYVILSNIYAAAGMWKDVFKVRKLMLEKTVTKEPGQSWIILDKVIHTFHSSERFHPSKKDINAKIKEIFVDIKAAGFVPDLSCVLHDVDDEQKERMLLGHSEKLAITFGLMNTPPGLTIRVMKNLRICVDCHNFAKFVSKVYEREISLRDKNRFHLLTHGNCTCGDYW

SEQ ID NO: 124116 - protein, 127 aa, Oryza sativa
  Clone ID: PAT_MRT4530_26887C.1.pep
KKGFVLPRPKMANADLSRLINSDEVQSVVKPINKEVKLREARRNPLKNVAAVLKLNPYFGTARKMAALAEAARVKARTEKLDSKRTKLSPEESSKIKAAGKAWYKTMISDSDYTEFENFSKWLGVTQ

SEQ ID NO: 124117 - protein, 373 aa, Oryza sativa
  unsure (1)..(373): unsure at all Xaa locations
  Clone ID: PAT_MRT4530_26888C.1.pep
MEASTPLLTPYKMGQFDLAHRVVLAPVPRRLSHGNVPGAPNAGYYPQCGARGARMLVEACVASATSIPFPEVPAIRTAHYWMTREFHEVADLRXVRPSQIKDRPRCLVLPTAWGTCMHLADKQVTPQVSHDGQVLEFAPPRRLKTEEIPNIVDDFRIAARNAIEAGFDGVEIHGANGYLIDQFMKDSVNDRTDAYGGGIENRCRFAAEVITAVAGEIGAHRLGVRLSPFADYMDCHDSDPEVLALRVIGLMNNLGVLYCHMIEPRMCVGAGEDGSKPVIAHGRLLPFRKAFRGTFMVNGGYDRDEGDKAVADGYADLVAYGRLFLANPDLPERFRRKAGLNKYDRSTFYTSDPVVGYTDYPFLDDQNSELATR

SEQ ID NO: 124118 - protein, 404 aa, Oryza sativa
  Clone ID: PAT_MRT4530_26889C.1.pep
MAAAARPLVSVKALEGDMATDSAGIQMPQVLRAPIRPDVVTFTHKLLSCNRRQPYAVSRRAGHQTSAESWGTGRAVSRIPRVPGGGTHRAGQGAFGNMCRGGRMFAPTKIWRRWHRRVNIRLRRIAVASALAATAVPSLVLARGHRIEGVPEFPLVVSDSIESIEKTAQSIKVLKQIGAYADAEKTKDSVAIRAGKGKMRNRRYINRKGPLIVYGTEGSKVVKAFRNLPGVDVANVERLNLLDLAPGGHLGRFVIWTECAFKKLDEVYGGFDTPALKKKGFVLPRPKMANADLSRLINSDEVQSVVKPINKEVKLREARRNPLKNVAAVLKLNPYFGTARKMAALAEAARVKARTEKLDSKRTKLSPEESSKIKAAGKAWYKTMISDSDYTEFENFSKWLGVTQ

SEQ ID NO: 124119 - protein, 115 aa, Oryza sativa
  Clone ID: PAT_MRT4530_2688C.1.pep
AARAQRGLAACGGGGGVRAVRGGSANAGSWGEEAAVLGEERRHRRGEGRGQRRREGREWRRWGDAGGNADAREDDIAASAGGGSTSGSGGVRPLIILLDHKLRREYSDLGGVFDL

SEQ ID NO: 124120 - protein, 50 aa, Oryza sativa
  Clone ID: PAT_MRT4530_26890C.1.pep
MQSCMMLAIPSQSFGTAVQFTSLDTLRPRTLHADCTKSDVQVPFGRISHK

SEQ ID NO: 124121 - protein, 54 aa, Oryza sativa
  Clone ID: PAT_MRT4530_26891C.1.pep
PHRKPQLCQLSHAILTHQNDIETEAENSISKNTTPHITNAIAPLKRYIQEGASC

SEQ ID NO: 124122 - protein, 72 aa, Oryza sativa
  unsure (1)..(72): unsure at all Xaa locations
  Clone ID: PAT_MRT4530_26892C.1.pep
IEILHTKDSIITNCFRHLCHRYKKKKKKKKKKKKKKKKKKKKKKKKKVKNKKKKKXKKKNILKKKKLYKNKY

SEQ ID NO: 124123 - protein, 547 aa, Oryza sativa
  Clone ID: PAT_MRT4530_26893C.1.pep
MPEQARGKAALHALPLLHHRAAAPPHSRRSGGGAEGQAEWRGGGMPRPRDELVDDTAPRTHRHDRRGGDCHVHPGAPPNPSSAPHHLPRRRAPRRRILPRVTLLVPNHTATSMHRTCATCITSLCLMVGRSSIAAAAGGPFVRDADFEKMDPEDLTDSEEDEDDDMMFFILPTLYLVSTGSEEPCHTSKFSGAEWICEVLEDDRGEGYAKFRMEPQILQKFSDLLRSKNLLRNTRGVSVEEQIGMFIYMLSRNASFQKMSDRFEHSRETIHRHIKACFDAITSLTDEFVKHPSTETHWKISSDPQYGPYFKNCIGAIDGVHVPITISDYEAAPYRNIEDSLSQNVMLACDFDLNFVHVCSGHEGSASDAAVLYAAVESGFEVPSNKYYLVDRGYANTPSFLAPYREAAYHIEEEEQSNCQPSDYKELFNLRHSKLRNNIKRATALLKMRFPILNVATFYQIETQAKIPAAAVVLHNIMQGQKDDDDDDGWAFNQAMPVSSRRTVVLPSGDDAYGNDVEELNNQCSMGDALRDYIAKKMWTDYERNRR

SEQ ID NO: 124124 - protein, 93 aa, Oryza sativa
  unsure (1)..(93): unsure at all Xaa locations
  Clone ID: PAT_MRT4530_26894C.1.pep
APXASDATIQPHVATVSNLDLYFNNYQASMXCLYPSNLPXPGVAGSFDXVVAAFXXGLPSLLNHFYPLXXAGIVLQPXLPXSXXLHXHNXGKV

SEQ ID NO: 124125 - protein, 252 aa, Oryza sativa
  Clone ID: PAT_MRT4530_26895C.1.pep
MKDHLMLNVSNLPESVEATEAAMNLPSGGVSLPPLSTTHTLLSVRESMGAEEEPLIQTVECRICQEEDNISNLESPCACTGSLKYAHRACVQRWCDEKGDLTCEICHEPYKHGYTALPRAHPDETTIDIRQASILYYSHFFIYFNYLPVPITIGGWTITGTAFDLHDPRIIAMAQNHIMEADYDDYSVTNASSAAFCRSAALILMALLVLRHVLVLTDEDEDDASSMFLASEIIFLEVYIDTLVSVFLAPSY

SEQ ID NO: 124126 - protein, 67 aa, Oryza sativa
  Clone ID: PAT_MRT4530_26896C.1.pep
MGMGWPRPRPRESSPASPGSPWKSSRAGGDDHRVVIYRGYPAAAGGGVLAEERGRGRDGEVAVHQKA

SEQ ID NO: 124127 - protein, 62 aa, Oryza sativa
  Clone ID: PAT_MRT4530_26897C.1.pep
CNTAPTWLYIPNKDLKLMWLEGLMKDLSIIMGFMLTAGFRNLMGSQLHSLIIYTTREGMGKG

SEQ ID NO: 124128 - protein, 56 aa, Oryza sativa
  unsure (1)..(56): unsure at all Xaa locations
  Clone ID: PAT_MRT4530_26898C.1.pep
ITXSDATPSSSHQRIVMIXAVSIXSSRRREGISRVPLASDGASVSLVVIIAIAYMA

SEQ ID NO: 124129 - protein, 91 aa, Oryza sativa
  Clone ID: PAT_MRT4530_26899C.1.pep
MEGKDFKSLKISYHTLKDKWSIRELISHDVNEEEQQNAERRNKQAFPTKALKTNENITDEPNESSATIVSKLRHKSRHEQEDCEGFRKWLP

SEQ ID NO: 124130 - protein, 68 aa, Oryza sativa
  Clone ID: PAT_MRT4530_2689C.1.pep
WRTAIGGGRSRRLQPSSRPRAVAREACRAYRRRGEACERSRYISSVGSSARWKAASAKQSRGAGASSG

SEQ ID NO: 124131 - protein, 58 aa, Oryza sativa
  Clone ID: PAT_MRT4530_268C.1.pep
ARRSGRPTPSPVWRAAHAHDLESSLEAIVLLQRSMLEKQWELPFDDDNHAMAIGLAED

SEQ ID NO: 124132 - protein, 169 aa, Oryza sativa
  Clone ID: PAT_MRT4530_26900C.1.pep
KIIGFYVVGSAGSDEKVSLLKTKFGFNDAFNYKKEPDLEAALRRYFPEGIDIYFENVGGKTLDAVLPNMRLGGRIAACGMISQYNLERPEGVKNLFYIVTKRLRMEGFLVFDFYDRYYQFEDEMARYLKEGKVAYVEDVVEGLDAAPAALIKLFTGRNVGKQLVAIARE

SEQ ID NO: 124133 - protein, 184 aa, Oryza sativa
  Clone ID: PAT_MRT4530_26901C.1.pep
SVIGYYLFIYFQPTDVKDPVIRPLVELDTKSLESMLPEVPHWVKNPDFDRIDWLNKFVENIWPYLDKAICKTAKEIAKPIIAENTAKYKIDSVEFETLTLGSLPPTFQGMKVYTTDEQELIMEPSIKWAGNPNITVVVKAFGLKATAQVIDLHVFALPRITLKPLVPSFPCFAKIGARLMEKPR

SEQ ID NO: 124134 - protein, 63 aa, Oryza sativa
  Clone ID: PAT_MRT4530_26902C.1.pep
TQHSQTGKAQVRVNSRVSCRGLRLTTLLIDILSLLNKITALYYYYYSAPVFSPRALYSVCHLS

SEQ ID NO: 124135 - protein, 625 aa, Oryza sativa
  Clone ID: PAT_MRT4530_26903C.1.pep
MGFFRTVLGFFGFGVGVTMGLVIGYYLFIYFQPTDVKDPVIRPLVELDTKSLESMLPEVPHWVKNPDFDRIDWLNKFVENIWPYLDKAICKTAKEIAKPIIAENTAKYKIDSVEFETLTLGSLPPTFQAYVPNQPRLPISIPLKYASIQCNSNQTPVNRGGEEDELREFNWWKMPETSGRKRKKEAPNDQAQFIPELSTMNSCARPQREMSQRFPWMKVYTTDEQELIMEPSIKWAGNPNITVVVKAFGLKATAQVIDLHVFALPRITLKPLVPSFPCFAKIVVSLMEKPHVDFGLKLLGADLMAIPGLYVFVQEIIKTQVANMYLWPKVLEVPIMDPAKAQKKPVGILHVNIVRAVKLTKKDFLGKSDPYVKLKLTEEKLPSKKTSVKRSNLNPEWNEDFKLVVKDPESQALELTVYDWEQVGKHDKIGMSVIPLKELIPDEAKSLTLDLHKTMDANDPANDKFRGQLTVDVTYKPFKEGDSDVDTSDESGTIEKAPDGTPEGGGLLVVIVHEAQDVEGKHHTNPYVRIVFRGEERKTKHIKKNRDPRWEQEFQFVCEEPPINDKMQIEVISRPPSIGIHSKENLGYVVISLADVINNKRINEKYHLIDSKNGRIQLELQWRTS

SEQ ID NO: 124136 - protein, 111 aa, Oryza sativa
  unsure (1)..(111): unsure at all Xaa locations
  Clone ID: PAT_MRT4530_26904C.1.pep
ALKGPGGGKIGKLPLRVGLLKGNGPXLLGPSGARVPGPGKSGGCPPGGAIYSHPTGGGGGPMVTRPSLPGGPVGPKQWVLGSGXPNPPGRPGSGGPFGCKEKKKKKEEHPP

SEQ ID NO: 124137 - protein, 80 aa, Oryza sativa
  Clone ID: PAT_MRT4530_26905C.1.pep
GNKRFFFFNSPLPSPNGLFLVYPGLQGPFCLLGTWDLLGTLYFFTKYKNPIVRPKQPVQTQTFGLLSFPYLPNCPLSFFK

SEQ ID NO: 124138 - protein, 85 aa, Oryza sativa
  Clone ID: PAT_MRT4530_26906C.1.pep
MKLNMKRPPYNRTSRMDFSFPGALELLSLLETWTPRVHEDLSSWSGYCQCEVIKRLCHGASHVLGRGSCVGQSQSAGKVYIHYSV

SEQ ID NO: 124139 - protein, 623 aa, Oryza sativa
  Clone ID: PAT_MRT4530_26907C.1.pep
MARMAAAATLLLAVSGLASGLVVPADERCHSTDNAVLGIDIGATYSCVAVYCKGRVEIIPNDQGSRLTPSWVAFTDGGGRLVVGEAAKEQAVGSPGRAVHDFMRLLGKKLGDDDVQREMTRLPYAVVDMEGKPHVLVEAADGDVRVLSPEEIAAAVLAKMKKTAEAHLGRTVSSAVVAVPVYFNDAQRRAISDAGDIAGLDVMRIVSEPIAAAVAYGLDNVRSNGKRVVVFDLGGENLDVTALVADDGFFDVLATNGDGYLGGEGFDQRVVNHFVDLIKRKHGRDITGDGRAMHRLRREAQFEELNDDLFARTMAPLRKTMADAGLEKGDINEIIHVGGSTRIPKVQQLIRDYFDGKKEIVKVNNPDETVAYGAAVIGRHVAGDDDDKPTMLGPLDLPSFLSDTISIETAGGAVTPMIPRRSRLPAERTHVFTTYLGRQTAVAINVFQGEGSTAKDNTLFGRLVLTGIPPASVWNWGWRWRPIQVTVKVDELGDIHVEATDKGGSGKSERLSIVSGEGHEHGRLSKEEIDRMIREVAEDLVEEERIVKERVDALNMLETYIVKNTAVTGGETDCEAKARAASEWLDGNPAAEKEDYEEKLKELEDACGPVHGGRARDIWTWPR

SEQ ID NO: 124140 - protein, 200 aa, Oryza sativa
  Clone ID: PAT_MRT4530_26908C.1.pep
MGGTMDYLSDLLGGGGSSSRRRYKKRKQFQTVELKVRMDCDGCELKVRNALSSMKGVQSVEINRKQYKVTVQGFVEPHKVVKRVQATGKKAEIWPYVPYTLVAHPYAAPAYDKRAPPGHVRRVDAVMPVASYGSAAAAAAPEERLTTMFSDENPNACSIMHSKRKNRTVQEAMRQGRWISDIRHSLTIALLTEFFHIWGF

SEQ ID NO: 124141 - protein, 90 aa, Oryza sativa
  unsure (1)..(90): unsure at all Xaa locations
  Clone ID: PAT_MRT4530_26909C.1.pep
MASTLTNVXLSTPXXEGSSLVRPVAGXGRVVFPRVGRGGFAXVRAXGPXXPPDISDKXSEXIHKAXXACXDXXASGKCXAXWDXVEELSA

SEQ ID NO: 124142 - protein, 1127 aa, Oryza sativa
  Clone ID: PAT_MRT4530_2690C.1.pep
MAPPIAGNGRANSGHLPWPPAAIPVAVPPSPMPGLLPSAIKWDPHPPFYRFNPIPSLPVPAAVPRQSVGRRRRLLRRHRGIASFPGITSSSPEARQSGLLVGVQYLPVSGRLLYVAGTPIDVAISSVDVAALSSPPAAPLFRRNAVARAGLSFLLVDVAFGSLLRRACAPADVAIFPSGIAAASGAFHGILASVQPLPAALVVSSPAPVVVVVVVLPSFPVVVAFVPPPSRSRSPPVVRQASCCSPVVVFVLASASSSLVPAVSRLRSRIAAEVVPSPSASAAPSGYKQKYTDGDGRSRGSMDISRTNEGYTSCGPVVEMSWHRAGVLLLGAQSCLPVPGVPAVGGIGSPSDMPGVPREVIEHKLMVRPDAKPVKQKLQRFALDRKQAIREELDKLLKAGFIREVLHPKWLANPVMVRKANEKWRMCVDFTDLNKACPKHHFSLPRIDQLVDSTAGCELLSFLDAYSSYHQISMAKEDEEKTTFITPFGVFCYVKMPFGLITAGNTFQRTVQGALSDQLGNNVEAYVDDIVVKTKTSDSLIDDLRETFDNLRRYRLMLNPEKCTFGVPSGKLLGFLVSGRGIEANPEKIKAIENMNEALHDAKTRYPQIQKLLYAVIMTSKKLRHYFQAHRVTAVSSFPLGKVVRNKDVVGRIVKWVVELSQFDVHFVPRIAIKSQVLADFVADWTMPDNKSDNQIDNETWIMAFDGALNSQGAGAGFILTSPSGDQFKHAIHLNFRATNNTAEYEGLLGGIRAAAALGVKRLIVKGDSELVTNQVHKYYKCSNHKLSKYLAKVRKLEKRFDGIEVRHVYCKDNIEPDDLARPAPDISSEATEAEHAVADIETTDDWRTPLIKFINSEELPEDDAEAEKITRNAKIYCMIGNDLYKKAPNGGGYRFIFVAIDKFTKWIEALPTGEIKADNAIKFIKRIFCRYGLPHRIITDNGSQFISADFQDYCIGLEVKICFASVSHPQSNGQVERANGIVLQGIKTRVYDRLMPPRNLRDLRLGTPRADKASSDPVKTKDHIRPGRVKGRRALSSEKNPPTTRLGARERYKDYQEGQYQSIDWKTFSANGAIDFARLPTLLYILDINISTRDNKVLKIKMLRKTKVLTAHAKAVGTNWSFIQHD

SEQ ID NO: 124143 - protein, 120 aa, Oryza sativa
  unsure (1)..(120): unsure at all Xaa locations
  Clone ID: PAT_MRT4530_26910C.1.pep
IESKTKKTCFTNPAMPKIDSIALVDRKLDATPTWRANCRNMNSAIIKGGSVRDLKXDGCRDKGFRQVQALSMRGKRERAAAAEAELSKAQLLLRAFVVAVVVVLLLLLVRGSAAALRERL

SEQ ID NO: 124144 - protein, 77 aa, Oryza sativa
  unsure (1)..(77): unsure at all Xaa locations
  Clone ID: PAT_MRT4530_26911C.1.pep
LLHTVALFPLCTCNHHHNHIPVPIRGRVAFSFXSESLAFLFLSFFLFQIPRVKFQARHTPGNLEPWCLFPQGFLGXV

SEQ ID NO: 124145 - protein, 816 aa, Oryza sativa
  Clone ID: PAT_MRT4530_26912C.1.pep
MTGFVLELRGMCVALGYPHGVDYQARPLPEQEGEDAEPHAGWEVTAVILAGSSERTSLTVTAGGDSFPAACQSAALLAIGTLHQRYPDELQHSPYRYHPRRGGARDYATFRDASSEDDATIVHLARMVEAYDAARIDFHQMVRRGMVENNMKILELRQENLQLKKDLDAVEAQLHQLKVAQGEICRPKRRRVCRSQKITARKSTSRPELVRQSLAWTCFVETPRAEPAPVVPQEGEASGVGSSEAPSLFAGSVWGFQMVTTRRNVSTGEGNQPEGSDHNHQGNPPPPPPPPPPPPPPPDTNAILTQILAQQANMMTAFLHHLQNPPQQNAPPPPPQHSKLAEFLRIRPPTFSSSNNPVDALDWLHAVGKKLDTVQCSDEEKVVFAAHQLQGPASLWWDHFQATQPEGQPITWTRFTAAFRRTHVPAGVVALKKREFRELKQGNRSVMEYLHEFNNLARYAPEDVREDEEKQEKFLAGMDPELSVRLVSGDYPDFQRLVDKSIRLEAKHKELESHKRRLANFRNQQGANQRVRYTNPYPGGSSSQQQQQPRPAPRPQFVVRVPQPQQQQNQQGTRAPRPPTPAVQPVQGRRDAQGQQRLCFNCFEPGHFADKCPKPRRQQGQAPPRSNNGGKDVIRGRVNHVTAEDVLTTPDVIVVVDRLTKVARFIPVKTTYGGNKLAELYFARIFRRRLQWSRDLRGRFPFSPAALSLSRRYKIVPRASLFRFRRSPLALAVGFVLTPCTSLSAVAVELRSAAVVAPVFLPTRRHLHPRRRVVVDPVRISVSPADRRSTVVIVIPNRAAAFFRFGRRSRRRRRPG

SEQ ID NO: 124146 - protein, 40 aa, Oryza sativa
  Clone ID: PAT_MRT4530_26913C.1.pep
GAGRCEPGCARSTVDPLEDPLFVEVEADVWESEQGKSHHP

SEQ ID NO: 124147 - protein, 66 aa, Oryza sativa
  Clone ID: PAT_MRT4530_26914C.1.pep
FFFFFFLVWYVSSDIDMCTTDIRHVFSPHHISHRGCALRHQTVISITRHKHNHHSMRSRCSQRSPT

SEQ ID NO: 124148 - protein, 643 aa, Oryza sativa
  Clone ID: PAT_MRT4530_26915C.1.pep
MTGFVLELRGMCVVLGYPHGVDYQARPLPEQEGEDAEPHAGWEVTAVILSGSPERTSLAVTAGGDSFPAACQNAALLAIGTLHQRYPDELQHSPYRYHPRRGGARDFATFRDASSEDDATVVHLARMVEAYDAARIDFHQMVRRGMVENNMKILELRQENLQLKKDLDALEAQLHQLKIAQGEVSRPKRRRVCRSQKITARKSTSRPELVRQSLAWTCFVETPRAEPAPVVPQEGEASGVGSSEGALLLTFRPGPSQRRNVNTGEGNQPEGSNPNPQGNPPPPPPPDTNAILTQILAQQANMMNAFLHHLQNPPQQNAPPPPPQHSKLAEFLRIRPPTFSSSNNPVDALDWLHAVGKKLDTVQCSDEEKVVFAAHQLQGPASLWWDHFQATQPEGQPITWARFTAAFRRTHAPEDVREDEEKQEKFLAGMDPELSVRLVSGDYPDFQRLVDKSIRLEAKHKELESHKRRLANFRNQQGANQRVRYTNPYPGGSSSQQQQQQQPRPAPRPQFVVRVPQPQQQQNQQGTRAPRPPTPTVQPVQGRRDAQGQQRLCFNCFEPGHFADKCPKPRRQQGQAPPRSNNGGKDVIRGRVNHVTAEDVLTTPDVIVEKKDKTKRMCVDVTTGNNPTGIPYVRALILVPGGK

SEQ ID NO: 124149 - protein, 808 aa, Oryza sativa
  Clone ID: PAT_MRT4530_26916C.1.pep
MAGSVTRRGLHMTGFVLELRGMCVVLGYPHGVDYQARPLPDQEGEDAEPHAGWEVTAVILSGSPERTSLAVTAGGDSFPAACQNAALLAIGTLHQRYPDELQHSPYRYHPRRGGARDYATFRDASSEDDATVVHLARMVEAYDAARIDFHQMVRRGMVENNMKILELRQENLQLKKDLDALEAQLHQLKIAQGEICRPKRRRVCRSQKITARKSTSRPELVRQSLAWTCFVETPRAEPAPVVPQEGEASGVGSSEGALLLTFRPGPSQRRNVNTGEGNQPEGSNPNPQGNPPPPPPPDTNAILTQILAQQANMMNAFLHHLQNPPQQNAPPPPPQHSKLAEFLRIRPPTFSSSNNPVDALDWLHAVGKKLDTVQCSDEEKVIFAAHQLQGPASLWWDHFQATQPEGQPITWARFTAAFRRTHVPAGVVALKKREFRELKQGNRSVMEYLHEFNNLARYAPEDVREDEEKQEKFLAGMDPELSVRLVSGDYPDFQRLVDKSIRLEAKHKELESHKRRLANFRNQQGANQRVRYTNPYPGGSSSQQQQQQQNQQGTRAPRPPTPTVQPVQGRRDASGPQRLCFNCFEPGHFADKCPKPRRQQGQAPPRSNNGGKDVIRGRVNHVTAEDVLTTPDVIVAPPFRFRRSPLALAVGIVLAPCSSLSAVAAELRSVAAVLRLAAAAAPLFLPTRRHLPRHRRIAVDPVRASTSPADRRSTVVIVFPNRAAAFFRFGRHSRRRRCPGVSRRPPFAFPLSSSFSGATPPRRWSPAATIGARVRAVPVGRAGEAALGRALAATKWARQSAARARGFG

SEQ ID NO: 124150 - protein, 670 aa, Oryza sativa
  Clone ID: PAT_MRT4530_26917C.1.pep
MTGFVLELRGMCVVLGYPHGVDYQARPLPEQEGEDAEPHAGWEVTAVILSGSPERTSLAVTAGGDSFPAACQNAALLAIGTLHQRYPDELQHSPYRYHPRRGEARDFATFRDASSEDDATVVHLARMVEAYDAARIDFHQMVRRGMVENNMKILELRQENLQLKKDLDALEAQLHQLKIAQGEDSRPKRRRVCRSQKITARKSTSRPELVRQSLAWTCFVETPRAEPAPVVPQEGEASGVGSTEDALLLAFRPGPSQRRNVSTGEGNQPEGSNPNPQGNPPPPPPPDTNAILTQILAQQANMMTAFLHHLQNPPQQNAPPPPPQHSKLAEFLRIRPPTFSSSNNPVDALDWLHAVGKKLDTVQCSDEEKVIFAAHQLQGPASLWWDHFQATQPEGQPITWARFTAAFRRTHVPAGVVALKKREFRELKQGNRSVMEYLHEFNNLARYAPEDVREDEEKQEKFLAGMDPELSVRLVSGDYPDFQRLVDKSIRLEAKHKELESHKRRLANFRNQQGANQRVRYTNPYPGGSSSQQQQQQQQSRSAPRPQFVVRVPQPQQQQNQQGTRAPRPPTPTVQPVQSRRDAQGQQRLCFNCFEPGHFADKCPKPRRQQGQAPPRSNNGGKDVIRGRVNHVTAEDVLTTPDVIVVRRRPSAPSPSGVGKVAGTSIVCQA

SEQ ID NO: 124151 - protein, 78 aa, Oryza sativa
  unsure (1)..(78): unsure at all Xaa locations
  Clone ID: PAT_MRT4530_26918C.1.pep
MTWHGMVPWSDEGRKNKKPKFHKGDNTHGRLSKIPAVLPWSTRLNIAVGAAKGLAFLHXAEKPVIYRDFKASNILLDS

SEQ ID NO: 124152 - protein, 310 aa, Oryza sativa
  Clone ID: PAT_MRT4530_26919C.1.pep
MALKKREFRELKQGNRSVMEYLHEFNNLARYAPEDVREDEEKQEKFLAGMDPELSVRLVSGDYPDFQRLVDKSIRLEAKHKELESHKRRLANFRNQQGANQRVRYTNPYPGGSSSQQQQQQQQPRPAPRPQFVVRVPPPQQQQNQQGTRAPRPPTPTVQPVQGRRDAQGQQRLCFNCFEPGHFADKCPKPRRQQGQAPPRSNNGGKDVIRGRVNHVTAEDVLTTPDVIVGVAVDPETVTAVTEWKQPKTVTQIRSFLGLAGYYRSVSRQNTNDRLDFSSLSKCRNGNGMKLGWISSPAFQKPKVDMTLYG

SEQ ID NO: 124153 - protein, 87 aa, Oryza sativa
  Clone ID: PAT_MRT4530_2691C.1.pep
SSRIIRGLTPPLPLVLPPPADAAISSSRASALPPPSPLLPRRTDATVPLPAPPLPPLTAPLTPPLTAPVPPLLPLRVNAAAPPLPPP

SEQ ID NO: 124154 - protein, 101 aa, Oryza sativa
  unsure (1)..(101): unsure at all Xaa locations
  Clone ID: PAT_MRT4530_26920C.1.pep
LFAGPVWDFQMVTTRRSAATGEGSHPEGSNHNNHGRPPPPPPLPPPPPPDTNSILTQILAQQANMMAAFLXSSNNPVDALDWLHAVGKKLDTVRCNNEEKV

SEQ ID NO: 124155 - protein, 652 aa, Oryza sativa
  Clone ID: PAT_MRT4530_26921C.1.pep
MTGFVLELRGMCVVLGYPHGVDYQARPLPEQEGEDAEPHAGWEVTAVILSGSPERTSLAVTAGGDSFPAACQNAALLAIGTLHQRYPDELQHSPYRYHPRRGGACDYATFRDASSEDDATVVHLARMVEAYDAARIDFHQMVRRGMVENNLKILELRQENLQLKKDLDALEAQLHQLKIAQGEISRPKRRRVCRSQKITARKSTSRPELVRQSLAWTCFVETPRAEPAPVVPQEGEASGVGSSEGALLLTFRPGPSQRRNVNTGEGNQPEGSNPNPQGNPPSPPPPDTNAILTQILAQQANMMNAFLHHLQNPPQQNAPPPPPQHSKLAEFLRIRPPTFSSSNNPVDALDWLHAVGKKLDTVQCSDEEKVIFAAHQLQGPASLWWDHFQATQPEGQPITWARFTAAFRRTHVPAGVVALKKREFRELKQGNRSVMEYLHEFNNLARYAPEDVREDEEKQEKFLAGMDPELSVRLVSGDYPDFQRLVDKSIRLEAKHKELESHKRRLANFRNQQGANQRVRYTNPYPGGSSSQQQQQQQQPRPAPRPQFVVRVPQPQQQQNQQGTRAPRPPTPAVPPVQGRRDAQGQQRLCFNCFEPGHFADKCPKPRRQQGQAPPRSNNGGKDVIRGRVNHVTAEDVLTTPDVIVEVQNCIR

SEQ ID NO: 124156 - protein, 312 aa, Oryza sativa
  Clone ID: PAT_MRT4530_26922C.1.pep
MVITRRTAATGDGNQPEGSNTNIQGGPPPPPPPPPPPPPDTNPILTQILAQQANMMAAFLHHIQNPPQHNAPPPPPPPQHSKLAEFLHIRPPTFSSSNNPVDALDCLHAVGKKLDTVQCNDEEKVIFATHQLQGPASLWWDHFQATQPEGQPITWARFTAAFRRTHVPAGVMALKKREFRELKQGNRSVMEYLHEFNNLARYAPEDVREDEEKQEKFLAGMDPELSVRLVSVDYPDFQRLVDKSIRLEAKHKELESHKRRLVNFRNQQGANQRVCYTNPYPGGSSSLQQQQPRSAPRPQFVVRVPQPQQQQS

SEQ ID NO: 124157 - protein, 310 aa, Oryza sativa
  Clone ID: PAT_MRT4530_26923C.1.pep
MDHERQANLLRVGTSSSSPKLNSPSTSAISLELLGHRLHISQDPNSKHLGTTVWDASMVFVKFLEKNSRKGRFSPSKLKGKRVIELGAGCGLAGLDQVEVLPLLLRNVERNKSWISQSNSDSGSIGSVTVAELDWGNKDHIRAVDPPFDYIIGTDVVYSEHLLQPLMETIIALSGPKTKIMVIAFTTIQTVLFLLLTIYEMMQMWKSNFNVKTVSKSKMDVKYQHPSIHLYIMDPKATLIPEVSDNGNNEEEEVVSNPGDDEDPGAESGGPCTGSVDSAEAKTAGYLDDDWEIRRCGAMAARLLKDVKLA

SEQ ID NO: 124158 - protein, 400 aa, Oryza sativa
  Clone ID: PAT_MRT4530_26924C.1.pep
MVTTRRNVNTGEGNQPEGSNPNPQGNPPPPPPPDTNAILTQILAQQANMMNAFLHHLQNPPQQNAPPPPPQHSKLAEFLRIRPPTFSSSNNPVDALDWLHAVGKKLDTVQCSDEEKVVFAAHQLQGPASLWWDHFQAAQPEGQPITWARFTAAFRRTHVPAGVVALKKREFRELKQGNRSVMEYLHEFNNLARYAPEDVREDEEKQEKFLAGMDPELSVRLVSGDYPDFQRLVDKSIRLEAKHKELESHKRRLANFRNQQGANQRVRYTNPYPGGSSSQQQQQQQQPRPAPRPQFVVRVPQPQQQQNQQGTRAPRPPTPAVPPVQGRRDAQGQQRLCFNCFEPGHFADKCPKPRRQQGQAPPRSNNGGKDVIRGRVNHVTAEDVLTTPDVIVVVGLNFKE

SEQ ID NO: 124159 - protein, 56 aa, Oryza sativa
  unsure (1)..(56): unsure at all Xaa locations
  Clone ID: PAT_MRT4530_26925C.1.pep
FLTSTLDIVXXDLKQMLIQSNSPVPPELARHEASKFKPGSVPDRPPRRNDTVYATH

SEQ ID NO: 124160 - protein, 63 aa, Oryza sativa
  Clone ID: PAT_MRT4530_26926C.1.pep
DRSVCRSIFFRLELIQQAGPLNYIISHVRYKMAVCRWICMLNQMCSSFAIINIYYQVRVKKIK

SEQ ID NO: 124161 - protein, 93 aa, Oryza sativa
  Clone ID: PAT_MRT4530_26927C.1.pep
SLNSLPPQSTTDGDLRPITGPIPERWSRESSSRLIRSRRVRRLRGRGASRAAVIRGFDTQPSSREGEGGDGEGLVVVRSCDGEIRRSAPPLSS

SEQ ID NO: 124162 - protein, 235 aa, Oryza sativa
  Clone ID: PAT_MRT4530_26928C.1.pep
MWIVSCGLVSGKARPSRAVAVGRWVCVVDELWWPNDFGNRRKIKDKHFGPFDSDDGDFGGEGNGRECVRCRYQEGGEKEQLEVDLEPAREVTERERSLPRSVARRHRRPWLHAAATERWSRESSSRLIRSRRVRRLRGRGASRAAVIRGFDTQPSSREGEGGDGEGLVVVRSCDGEIRRSAPPLSSIVQLDANVAPLMAADDEICLFLAEILALALRPPLHLGPLLHTEPPPLDL

SEQ ID NO: 124163 - protein, 28 aa, Oryza sativa
  unsure (1)..(28): unsure at all Xaa locations
  Clone ID: PAT_MRT4530_26929C.1.pep
XYYLXVITKLLLRGRNFTGFDSFHLKIR

SEQ ID NO: 124164 - protein, 899 aa, Oryza sativa
  Clone ID: PAT_MRT4530_2692C.1.pep
MMSRSYTNLLDLAAGNFEALGPAGGGRRRSFGAKRMTRVMTVPGTLSELDDEDDEPAATSSVASDVPSSAACERLIVVANQLPVVARRRPGAAAGGWAFSWDDDSLLLRLRDGVPDEMEVLFIGTLRADVPACEQDEVSQSLIDGFGCAPVFLPAGLYDRFYQHFCKGYLWPLFHYMLPFASALPAAASGDGRFDRGAWEAYVLANKYFFEKVVEVINPEDDYVWVHDYHLMALPTFLRRRFNRLRIGFFLHSPFPSSEIYRSLPVREEILRTLLNCDLIGFHTFDYARHFLSCCSRMLGIEYQSKRGYIGLDYFGRTVGIKIMPVGIHMGQLQSVLRLSEKEKKVAELRQQFEGKSVLLGVDDMDIFKGINLKLLAFENMLRTHPKWKGRAVLVQIANPARGKGKDLEAVQAEIRESCDRINKEFGQSGYSPVIFIDQSVPSAVRLAYYTVAECVVVTAVRDGMNLTPYEYIVCREGIPGSECAPEVSGPKKSMLVVSEFIGCSPSLSGAIRVNPWNIEATAEALNEAISMSEREKQLRHEKHYRYVSTHDVAYWSKSFVQDLERACKDHFRKPCWGIGLGFGFRVVALDPHFTKLNFDSIIMSYERSKSRAIFLDYDGTLVPQASLNKNPSEELLRIINTLCADRNNTVFIVSGRSKDDLSKKLISCPKLGIAAEHGYFLRWTRDEEWQTTAQTSDFGWMQMAKPVMDLYTESTDGSTIETKETALVWHHQDADQGFGSSQAKEMLDHLESVLANEPVSVKSGQFIVEVKPQGVTKGLIAEKVLTSMKEKGQLADFVLCIGDDRSDEDMFENIADVMKRSIVAPKTPLFACTVGQKPSKARFYLDDTFEVVTMLSSLADASEPDLMADLEDDLATSVSSIEISDRVVSFSNLRTEGS

SEQ ID NO: 124165 - protein, 125 aa, Oryza sativa
  Clone ID: PAT_MRT4530_26930C.1.pep
MATFLASGMRQSTASQAQHPLGSLLRLPLAHAALALSPHGAQTHNAHRGQNPVCCVEATGPFGSRALAEGAGHARATTTASWAKGPAWRRGQCRVAQGMDVAQNGTLWRPMLLTDVCLLHSAVVL

SEQ ID NO: 124166 - protein, 120 aa, Oryza sativa
  unsure (1)..(120): unsure at all Xaa locations
  Clone ID: PAT_MRT4530_26931C.1.pep
LPVLSSGAARLLSRTSAAPYXRRCHTSFPVPLPSSXPHSGGEGREAGGGGERREEGKRRQEEGGKGTARHRPRTDARLSSXITAACIAIVAAAHSPSVAIAATHSCWSRRAPPPEDQNHR

SEQ ID NO: 124167 - protein, 310 aa, Oryza sativa
  unsure (1)..(310): unsure at all Xaa locations
  Clone ID: PAT_MRT4530_26932C.1.pep
MEGSAGAPLRTRVCIIGSGPSAHTAAIYAARAELKPVLFEGWLANDIAAGGQLTTTTDVENFPGFPEGILGGELMDRCRAQSLRFGTSIISETVTAVDFSARPFRVASDSTTVLADAVVVATGAVARRLHFAGSDAYWNRGISACAMLLXGFSCPLLASYYLMCWRFICIYAEDDVXACGYPHFLHLLMIELLXTYGVFSGVKVKNLVTGKISDLQVSGLFFAIGHEPATKFLGGQLELDADGYVATKPGSTHTSVKGVFAAGDVQDKKYRQAITAAGSGGSDHQRFKKSNVVAAESYTLNVYAMGCSDF

SEQ ID NO: 124168 - protein, 42 aa, Oryza sativa
  Clone ID: PAT_MRT4530_26933C.1.pep
AAGDVQDKKYRQAITAAGSGCMAALDAEHYLQEVGAQEGKAD

SEQ ID NO: 124169 - protein, 92 aa, Oryza sativa
  Clone ID: PAT_MRT4530_26934C.1.pep
SKFGFFGTSLPSHVPFLEPIGWVVPGAIILVKFLDMLLTNGSSCSAASMATRARRRAARAILLSSAPASAPSAASAIAGRAAVSRRRRRPER

SEQ ID NO: 124170 - protein, 225 aa, Oryza sativa
  Clone ID: PAT_MRT4530_26935C.1.pep
MDPNAVHVQMPAVDTEACCDDEKNPQPAREIISDHVAVRPTPAVDKTLSGASDLLKLLPTGTVLAFQALAPSFSNHGVCHAVANRYLVLALIGACAASCMLLSFTDSLIGHDGKLYYGVATLRGFRPFNFAGTREEHGTVFKDLSRFRITALDFVHAFFSAVVFLAVAFADAAVQTCLFPEAEADMRELLVNLPLGAGFLSSMVFMIFPTTRKSIGYTDMTPHSQ

SEQ ID NO: 124171 - protein, 73 aa, Oryza sativa
  unsure (1)..(73): unsure at all Xaa locations
  Clone ID: PAT_MRT4530_26936C.1.pep
QRRISLFQNIKSCVHGNLCFFKIIRAGTIAGYKPTANIFXEDKXXGERKVANYRFVVSCSTDSKIQCVYYMWD

SEQ ID NO: 124172 - protein, 139 aa, Oryza sativa
  Clone ID: PAT_MRT4530_26937C.1.pep
MAWASAAWGERKMAAAVEEEAESTFFLGAKAHQPLDKEVGSASSATDHRSPPPLGDINTIVCYRSSPSLPQRPRSSYSSSSPCPHAFTTSTVAPSHPGSSGSVDPPVTGMLDSGTHCGATRRRIPPRGELAAESSWERS

SEQ ID NO: 124173 - protein, 611 aa, Oryza sativa
  Clone ID: PAT_MRT4530_26938C.1.pep
MKRSSPWRKLTEAEDAVNRAVAATRVGRYFKLEARKSSFTKELRAGAATFLTMAYIISVNAAILTDSGGPCTVSDCTPVVVGNSTAVPGPECTVGSNPGYEQCLGRTKSDLIVATAVAAMAGSFAMGALANLPLGLAPGMGANAYFAYNMVGFHGSGSIPYSTALAGVMVEGIVFFILSAVGLRSRLARMIPRNIRLATAVGIGLFLAFTGLQAHQGVGLVGASPSTLVTLTACSETDPATGACLGGSMRSPTFWLGAVGFLITATCLARDVKGGMIYGIVFVTVVSWIRGTAVTVFPDTAAGNAGFDYFKKVVDFHTITTTAGRLSFGGLRHGNALLAVFTLLYVDVLATTGTMYSMAEYGGFTDGAVEGFDGEYRAFLVDAGSTVLSAALGSTTVTTYVESTAGIREGGRTGVTAITVAACFLASLFFGPVLTSVPPWAVGPSLVLVGAMMMRVAKDIEWADMKEAIPAFVTMVLMPLTFSIANGIIAGLGVYIALHCYDWARIAYLKASKVLDERRNQVAASSAGEASGITATTATAAAADEIPDEFGQGIILCLEKEMGTGSGRFLICRMMHLSDHYTNSKDARDLVRARSTKPQWHLFLQAIENYQ

SEQ ID NO: 124174 - protein, 117 aa, Oryza sativa
  Clone ID: PAT_MRT4530_26939C.1.pep
MAHALFPEFSLLMPSRNHRSHPFSHPIRIEIEAEGEVMKVVLRSICRLQEVFGMAMELGHIKDDDDNVRPPSCASMEAKVASHLAALVSHTIAACRTAKRLPPPTRFHPGNAAAALA

SEQ ID NO: 124175 - protein, 1245 aa, Oryza sativa
  Clone ID: PAT_MRT4530_2693C.1.pep
MAQTCQPCTSSLASAHAVRAGALTPPSKTEREILVKDKFAHGPTCQSLFLSLFLCSSSSRVPGVWRCDEAWKLYEAEDENDPFDVIHSESVPCSTAGTSPGPRRRRAHVAGVQPQPGPVGELVLSEVRFFRSYAHHVAISDVAREMLRDMYQIPNRVHVILNSVDEAQFEPDGAGPRVPGGPHAAQGRQPGARALASCALAPPSPPSLQPCAAAVPDVAVAREDRRRGRQVVAVLVRPFAVAVDRRSTVAVVKPKSAAASSSSPSPFVPLPPSLWSPMRRYKPEYLFGVEGFIQELRTMSFVIGFGTAPFYAQIPHDRHEEKCRVKVTLNSNSEDIPSVMFEAGGRNYIHACQEVARIAIRELRDRYSDQLADTEYRYHPRQSQGSDRGSYLETEGIENDATTRHLVEMLWAMDESRAETVLAAQDREDRNRGKICKLEDKVDRLEKELATLKGEAPPQKARIRLTARKRALFVPRYQLAPKVRVVEKEVAPTLADPPVIIISDDEEEESKRNHSKIEWVATQDDEDEPNEPSIDLRCSEELETTAEPITWLEFTVAFRKTHIPSGVVSLKKKEFRSLTQGSRSVTEYLHEFNRLARYAPEDKLVDKAIRQEDKYNRMEQKKRRIAQFKTQQGNNQKPRLTLGPQSMPQGGSLSVVRPQRQFFNNNAGNNIRNQAPRPVAASTQQQPAKREHGSKPVVCFNCGDPGHYADKCPKPRRVKVVPTQSNSTVPASKARVNHVAAAEAQDAPDVILVREYPDVFPDDLPANELAEVKRQVDDLLQKGYIRPSSSPWGAPVIFVEKKDHTQRMCVDYRALNDVTIKNKYLLPRIDDLFDQLKGATVFSKIDLRSGYHQLRIKEEDIPKTAFTTRYGLFKCTVMSFGLTNAPAFFMNLMNKVFMEYLDKFVVVFIDDILIYSRTKEEHEEHLRLALEKLREHQLYAKFSKCEFWLSEVKFLGHVISAGGVAVDPSNVESVTNWKQPKTVSEIRSFLGLAALEAKPTLIDQVREAQINDPDIQEIKKNMRRGKAIGFLEDEQGTVWLGERSCVPDNKDLKDAILKEAHDTLYSIHPGSTKMYQDLKERFWWATVAVAREGRHRGRQVVAVLVRPFAVAGDRRSIVAVVNPKVSAVSSSSPSSSVVLPPPFWSPVCSPRRPLRAGVLRLRPCAAVRRRACAARAVRSAEPPPLSVTSPLKSSGSSAGAITIQEGALQWIVLCEGYCHNSFPRYRGGIEAHEEEFYNEADGVED

SEQ ID NO: 124176 - protein, 85 aa, Oryza sativa
  Clone ID: PAT_MRT4530_26940C.1.pep
MGGRAVGVGATAPRWFSAPLVRHSWSANLVASRVESRGQAIKLSGEAIVVQRRCGVGLLDRLLAADVVRNSAVRGDFSKYQEGIR

SEQ ID NO: 124177 - protein, 135 aa, Oryza sativa
  Clone ID: PAT_MRT4530_26941C.1.pep
MTAARARCGTPRGVDGGGHGRKRRAPAWPPATSSQRGMAVDGGGCNLRQRAPAHGYGRRKMQPPVTSFGVAAGDELRRGAARGQRRTWPPATSPAWRVAAEDATASNKPAKDAATGDELRRGAWMTKDTAAGDDL

SEQ ID NO: 124178 - protein, 52 aa, Oryza sativa
  unsure (1)..(52): unsure at all Xaa locations
  Clone ID: PAT_MRT4530_26942C.1.pep
MAASALHQTTSFLGTXPXRXELVRXVGXSGGRXXXXRTVKSXTXXIWYGPXR

SEQ ID NO: 124179 - protein, 69 aa, Oryza sativa
  Clone ID: PAT_MRT4530_26943C.1.pep
STKTPRATEQVQTKSKGVVGAGRGVVGAGGAGGVGGGVLDGGALGAGGVGELGGSDARRLVGPLHLHSG

SEQ ID NO: 124180 - protein, 1234 aa, Oryza sativa
  unsure (1)..(1234): unsure at all Xaa locations
  Clone ID: PAT_MRT4530_26944C.1.pep
MAGPEDKDEEAASHSPRTKGIIQYFTRQVKQHTEGLDTDLQVTNEKIGQLESTQISTNTKLTGLETAVARIDTSLAALVRHFDALNAGGNGGGNDDDIDGEYVEDNLEDEYIADTEQDDRDARDRRRLHNNRRGMGGRRRREVRNNDDAFSKIKFKIPPFDGKYDPDAYLSWEIAVDQKFACHEFPESTRVRAATSEFTDFASVWWIEHGKKNPNNMPQTWDALKRVMRARFVPSYYARDLLNRLQQLRQGAKSVEEYYQELQMGLLRCNLEETEDAAMARFLGGLNREIYDIVDYKDYTNMTRLFHLACKAEREVQGRRASAKANFSAGRMRDVQCHRCKGFGHVQRDCPSKRVLVVKNDGEYSSASDFDDDTLALLAADHADNEPPEEHIGAAFADHYESLIVQRVLSAQMEKAEQNQRHTLFQTKCVVKERCCRMIIDGGSCKNLASSEMVEKLALSTKPHPHPYYIQWLNNSGKAKVTKLVHINFAIGNYHDVVECDVVPMQACNILLGRPWQFDRDSMHHGRSNQYSFLYHDKKIVLHPMSPEDILRDDVAKAAKSKCESDKKAQSDGKKPETINLKPKCLLATKSDINELIASPSVAYALEYSDVFPKEVPPGLPPVRGIEHQIDLIPGASLPNRAPYRTNPEETKEIQRQVHELLDKGTFMRLMNEVLRPFIGKFVVVYFDDILIYSKSMGEHFNHLRAVFNALRDARLFGNLEKCTFCTDRVSFLGYVVTPQGIEVDQAKVEAIQSWPTPKTVSQVRSFLGLAGFYRRFVQDFSTIAAPLNALTKKGVPFTWGTSQENAFHMLKDKLTHAPLLQLPDFNKTFELECDASGIGLGGVLLQEGKPVAYFSEKLSGPVLNYSTYDKELYALVRTLETWQHYLWPKEFVIHSDHESLKHIRSQGKLNRRHAKWVEFIESFPYVIKHKKGKENIIADALSRRYTLLTQLDYKIFGLETIKDQYAHDADFNDVLLHCKDGRTWNKFVINDGXRRDVGRFVARCATCQKAKSRLHPHXVYGLLPRAPIDLMPLPSSEKLNFDAKQRAELMLKLHETTKENIERMNAKYKFAGDKGRRELNFEPRDLVWLHLRKERFPDLRKSKLMPRADGPFKVLAKINENAYKIDLPADFGVSPTFNVADLKPYLGEEDELESRTTQMQEGEDDEDINTIDTSMSPHVQHDGPITRARARQLNYQDECPRGRVDAHHKFAATIGDGVSVAKAQRLWTVVVGP

SEQ ID NO: 124181 - protein, 129 aa, Oryza sativa
  Clone ID: PAT_MRT4530_26945C.1.pep
MATATTRTRTAVEASSDVDSDEDGVAGAHGMPYQIQCLGVALYTLGSGKNVMRHNCTSQPSCRLLTPSLTASTTTVLSRGDGIEALFGWVPGSKHHQKEPITTVFALTWNFGSGKVKEGRYSNVRCDRM

SEQ ID NO: 124182 - protein, 1395 aa, Oryza sativa
  unsure (1)..(1395): unsure at all Xaa locations
  Clone ID: PAT_MRT4530_26946C.1.pep
MGNLRGHEFKDWNGVVQYRGIHASKFVSFEGGIHASSGFKVWALQQLLAWKTQSLKGAISILGPTTNNSNGTHISPIVSKVLMWLKNTVGAGFSYFNTYSAVLCASFCRSEASSTVAAPLQCRSTRLQIFPGSYSLQAFGRMMRSLIELLRLFILYTCDLMPQDSIAGDGSGVDLVDECPCGQVDAHHKFAVTIGDGVSVAKAQRLWTVTNEKIGQLKSTQISTNTKLTVLETAVARIDTCLAALVRHFDALNAGGNGGGNDDDIDGKYVEDNLEDEYIADTEQDDRDARDRRRLHNNRREHGKKNPNNMPQTWDALKRVMRARFVPSYYTRDLLNRLQQLRQGAKSVEEYYQELQMGLLRCNLEETEDAAMARFLGGLNREIFDIVDYKDYTNMTRLFHLTCKAEREVQGRRASAKANFSAGKTSSWQTRTTPPAGRTASPSSTPTISRAAPPPSSDKSATKAAQPALSASSMASTGRTRDVQCHRCKGFGHVQRDCPSKRVLVVKKDGEYSSASDFDDDTLALLAADHADNEPPEEHIGAAFADHYESLIVQRVLGAQMEKAEQNQQHTLFQTKCVVKERCCRMIIDGGSCNNLASSEMVEKLALSTKPYPHPYYIQWLNNSGRPWQFDRDSMHHGRSNQYFFLYHDKKIVLHPMSPEDILRDDVAKATKSKCESDKKAQSDGKKPETINLKPKCLIATKSDINELIASPSVAYALEYSDVFPKEVPPGLPPVXSLPNRAPYRTNPEETKEIQRXVHELLDKGYVRESLSPCAVPVXDDMLDELSGSIVFSKVDLRSGYHQIRMKLGDEWKIAFKTKFRLYEWLVMPFGLTNAPSTFMRLMNEVLRPFIGKFVVVYFDDILIYSKSMGEHFNHLRAVFNALRDARLFGNLEKCSFCTDRVSFLGYVVTPQGIEDFSTIAALLNALTKKGVPFTWGTSQENAFHMLKDKLTHTPLLQLPDFNKTFELECDASGIGLGGVLLQEGKPVAYFSEKLSGPVLNYSTYDKELYALVRTLETWQHYLWPKEFVIHSDHESLKHIRSQGKLNSRHAKWVEFIESFPYVIKHKKGKENIIADALSRRYTLLTQLDYKIFGLETIKDQYAHDADFNEAHGGGLMGHFGAKKTHDILASHFFWPQMRRDVGRAVLKKNIKMWEECLPHIEFAYNRSLHSTTKMCPFQIVYGLLPRAPIDLMPLPSSEKLNFDAKQCAELMLKLHETTKENIERMNAKYKFAGDKGRRELNFEPRDLVWLHLRKERFPDLRKSKLMPRADGPFKVLAKINENAYKLDLPADFGVSPTFNVADLKPYLGEEDEHESRTTQMQEGEDDEDINTIDTSTSPHVQHDGSITRARARQLNYQDECPRGRVDAHHKFASTIGDGVSVAKAQRLWTVVVGP

SEQ ID NO: 124183 - protein, 794 aa, Oryza sativa
  Clone ID: PAT_MRT4530_26947C.1.pep
MAAEAGSGGVVKHILLARFKEDVAPERLDQLIRGYAGLVDLVPSMKAFHWGTDVSIENMHQGFTHVFESTFESTEGVKEYIEHPAHVEFANEFLPVLEKTLIIDYKPTIDECPRGRVDAHHKFVATIGDAHQQLHHKPDYSLTGLVATAPIHLVPRLLTCGLLSPSCGQGLEDKDEEGASHSPRTKGIIQYFTRQVKQHTEGLDTDLQVINEKIGQLESTQISTNTKLTGLETAVARIDTSLAALVRHFDALNAGGNGGGNDDDIDGEYVEDNLEDEYIADTEQDDRDARDRRRLHNNRRDNEPPEEHIGAAFADHYESLIVQRVLSAQMEKAEQNQRHTLFQTKCVVKERCCRMIIDGGSCNNLASSEMVEKLALSTKPHPHPYYIQWLNNSGKAKEYSDVFPKEVPPGLPPVRGIEHQIDLIPGASLPNRAPYRTNPEETKEIQRQVHELLDKGAINNITIRYRHPIPRLDNMLDELSGSIVFSKGIEVDQAKVEAIQSWPTPKTVSQVRSFLGLAGFYRRFVQDFSTIAAPLNALTKKGVPFTWGTSQENAFHMLKDKLTHAPLLQLPDFNKTFELECDASGIGLGGVLLQEGKPVAYFSEKLSGPVLNYSTYDKELYALVRTLETWQHYLWPKEFVIHSDHESLKHIRSQGKLNRRHAKWVEFIESFPYVIKHKKGKENIIADALSRRYTLLTQLDYKIFGLETIKDQYAHDADFNDVLLYCKDGRTWNKFVINDGKRMEADECPRGRVDAHHKFAATIGDDISGGEDAAKEEENGNDAIARTRHLLGAA

SEQ ID NO: 124184 - protein, 68 aa, Oryza sativa
  Clone ID: PAT_MRT4530_26948C.1.pep
TDHMNIISCIEAHESVANRCKKKLTTYTVCQQTPIPNLCKDKRRANRFVMNHDSYIGKKNGMRWFHCY

SEQ ID NO: 124185 - protein, 168 aa, Oryza sativa
  unsure (1)..(168): unsure at all Xaa locations
  Clone ID: PAT_MRT4530_26949C.1.pep
MDGGGCGRWCGTRRRTSTPAACSASPSSPVSCASPSTPPXLLSIEHQRRRRTQEEEDGATVDDHHLVGGGAGVPSVTXEEGGGSGGEELRMVVRRRSLAEVTAWLEEYFLKASVTGDAVSNHLEASNDGFKRGPHSILGALCCLSAPSVAHDRVDSINGEQRHSSTLR

SEQ ID NO: 124186 - protein, 473 aa, Oryza sativa
  unsure (1)..(473): unsure at all Xaa locations
  Clone ID: PAT_MRT4530_2694C.1.pep
TCDTRSRAXRYHPPIHGGLHLRHLLLHSHQARLLLLLLLKSQLRLLRQXSGRCRMASVVVRAEAVDATISPTVSALRPSKTMAITDQATALRQAGVPVIGLAAGEPDFDTPHVIAEAGMNAIKDGYTRYTPNAGTLELRKAICNKLQEENGISYSPDQVLVSNGAKQCITQAVLAVCSPGDEVLIPAPYWVSYPEMATLAGATPVILPTSISENFLLRPELLASKINEKSRLLILCSPSNPTGSVYPKELLEEIADIVKKYPRLLVLSDEIYEHIIYQPAKHTSFASLPGMWDRTLTVNGFSKAFAMTGWRLGYLAAPKHFVAACGKIQSQFTSGASSISQKAGLAALNLGYAGGEAVSTMVKAFQERRDYLVKSFKELPGVKISEPQGAFYLFIDFSSYYGSEVEGFGTIKDSESLCMFLLEKAQVALVPGDAFGDDKCIRMSYAAALSTLQTAMEKIKEAVALIKPRVAAK

SEQ ID NO: 124187 - protein, 1567 aa, Oryza sativa
  Clone ID: PAT_MRT4530_26950C.1.pep
MAGLEDKDEEGASHSPRTKGIIQYFTRQVKQHTEGLDTDLQVTNEKIGQLESTQISTNTKLTGLETAVARIDTSLAALVRHFDALNAGGNGGGNDDDIDGEYVEDNLEDEYIADTEQDDRDARDRRRLHNNRRGMGGRRRREVRNNDDAFSKIKFKIPPFDGKYDPDAYLSWEIAVDQKFACHEFPENTRVRAATSEFTDFASVWWIEHGKKNPNNMPQTWDALKRVMRARFVPSYYARDLLNRLQQLRQGAKSVEEYYQELQMGLLRCNLEETEDAAMARFLGGLNREIYDIVDYKDYTNMTRLFHLACKAKREVQGRRASAKANFSAGKTSSWQTRTTPPAGRTTSPSSTPTTSRAAPPPSGDKSAIKAAQPAPSASSMASTGRMRDVQCHRCKGFGHVQRDCPSKRVLVVKNDGEYSSASDFDDDTLALLAADHADNEPPEEHIGAAFADHYESLIVQRVLSAQMEKAEQNQRHTLFQTKCVVKERCCRMIIDGGSCNNLANSEMVEKLALSTKPHPHPYYIQWLNNSGKAKVTKLVHINFAIGNYHDVVECDVVPMQACNILLGRPWQFDRDSMHYGRSNQYSFLYHDKKIVLHPMSPEDILRDDVAKAAKSKCESDKKAQSDGKKPETINLKPRCLLATKSDINELIASPSVAYALVCKDALISLHDMQHSLAPAVANILQEYSDVFPKEVPPGLPPVRGIQHQIDLIPGASLPNRAPYRTNPEETKEIQRQVHELLDKGYVRESLSPCAVPVILVPKKDGSWRMCVDCRAINNITIRYRHPIPRLDDMLDELSGSIVFSKVDLRSGYHQIRMKLGDEWKTAFKTKFGLYEWLVMPFGLTNAPSTFMRLMNEVLRPFIGKFVVVYFDDILIYSKSMGEHFNHLRAVFNALRDARLFGFQHHCCTIECASKKGVPFTWGTSQENAFHMLKDKLTHAPLLQLPDFNKTFELECDASGIGLGGVLLQEGKPVAYFSEKLSGPVLNYSTYDKELYALVRTLETWQHYLWPKEFVIHSDHESLKHIRSQGKLNRRHAKWVEFIESFPYVIKHKKGKENIIADALSRRYTLLTQLDYKIFGLETIKDQYAHDADFNDVLLHCKDGRTWNKFVINDGFVFRANKLCIPASSVRLLLLQEAHGGGLMGHFGAKKTHDILASHFFWPQMRRDVGRFVARCATCQKAKSRLHPHGLYMPLPVPTVPWEDISMDFVLGLPRTKRGRDSIFVVVDRFSKMAHFIPCHKTDDASHIADLFFREIVRLHGVPNTIVSDRDTKFLSHFWRTLWAKLGTKLLFSTTCHPQTDGQTEVVNRTLSTMLRAVLKKNIKMWEECLPHIEFAYNRSLHSTTKMCPFQIVYGLLPRAPIDLMPLPSSEKLNFDAKQRAELMLKLHETTKENIERMNAKYKFAGDKGRRELNFEPGDLVWLHLRKERFPDLRKSKLMPRADGPFKVLAKINENAYKIDLPADFGVSPTFNVADLKPYLGEEDELESRTTQMQEGEDDEDINTIDTSTSPHIQHDGPITRARARQLNYQDECPRGRVDAHHKFAATIGDGVSVAKAQRLWTVVVGP

SEQ ID NO: 124188 - protein, 38 aa, Oryza sativa
  Clone ID: PAT_MRT4530_26951C.1.pep
PISFRAYRGDADLCELQPNVSISAGAVQCNAMHGVVPS

SEQ ID NO: 124189 - protein, 1661 aa, Oryza sativa
  Clone ID: PAT_MRT4530_26952C.1.pep
MAGLEDKDEEGASHSPRTKGIIQYFTRQVKQHTEGLDTDLQVTNEKIGQLESTQISTNTKLTGLETAVARIDTSLAALVRHFDALNAGGNGGGNDDDIDGEYVEDNLEDEYIADTEQDDRDARDRRRLHNNRRGMGGRRRREVRNNDDAFSKIKFKIPPFDGKYDPDAYLSWEIAVDQKFACHEFPENTRVRAATSEFTDFASVWWIEHGKKNPNNMPQTWDALKRVMRARFVPSYYARDLLNRLQQLRQDAKSVEEYYQELQMGLLRCNLEETEDAAMARFLGGLNREIYDIVDYKDYTNMTRLFHLACKAEREVQGRRASAKANFSASKTSSWQTRTTPPAGRTTSPSSTPTTSRAAPPPSGDKSAIKAAQPAPSASSMASTGRMRDVQCHRCKGFGHVQRDCPSKRVLVVKNDGEYSSASDFDDDTLALLAADHADNEPPEEHIGAAFADHYESLIVQRVLSAQMEKAEQNQRHTLFQTKCVVKERCCRMIIDGGSCNNLASSEMVEKLALSTKPHPHPYYIQWLNNSGKAKVTKLVHINFAIGNYHDVVECDVVPMQACNILLGRPWQFDRDSMHHGRSNQYSFLYHDKKIVLHPMSPEDILRDDVAKAAKSKCESDKKAQSDGKKPETINLKPRCLLATKSDINELIASPSVAYALVCKDALISLHDMQHSLPPAVANILQEYSDVFPKEVPPGLPPVRGIEHQIDLIPGASLPNRAPYRTNPEETKEIQRQVHELLDKGYVRESLSPCAVPVILVPKKDGSWRMCVDCRAINNITIRYRHPIPRLDDMLDELSGSIVFSKVDLRSGYHQIRMKLGDEWKTAFKTKFGLYEWLVMPFGLTNAPSTFMRLMNEVLRPFIGKFVVVYFDDILIYSKSMGEHFNHLRAVFNALRDARLFGNLEKCTFCTDRVSFLGYVVTPQGIEVDQAKVEAIQSWPTPKTVSQVRSFLGLAGFYRRFVQDFSTIAAPLNALTKKGVPFTWGTSQENAFHMLKDKLTHAPLLQLPDFNKTFELECDASGIGLGGVLLQEGKPVAYFSEKLSGPVQNYSTYDKELYALVRTLETWQHYLWPKEFVIHSDHESLKHIRSQGKLNRRHAKWVEFIESFPYVIKHKKGKENIIADALSRRYTLLTQLDYKIFGLETIKDQYAHDADFNDVLLHCKDGRTWNKFVINDGFVFRANKLCIPASSVRLLLLQEAHGGGLMGHFGAKKTHDILASHFFWPQMRRDVGRFVARCATCQKAKSRLHPHGLYMPLPVPTVPWEDISMDFVLGLPRTKRGRDSIFVVVDRFSKMAHFIPCHKTDDASHIADLFFREIVRLHGVPNTIVSDRDTKFLSHFWRTLWAKLGTKLLFSTTCHPQTDGQTEVVNRTLSTMLRAVLKKNIKMWEECLPHIEFAYNRSLHSTTKMCPFQIVYGLLPRAPIDLMPLPSSEKLNFDAKQRAELMLKLHETTKENIERVNAKYKFAGDKGRRELNFEPGDLVWLHLRKERFPDLRKSKLMPRADGPFKVLAKINENAYKIDLPADFGVSSTFNVADLKPYLGEEDELESRTTQMQEGEDDEDINTIDTSTSPHVQHDGPITRARARQLNYQERWRGSKGKRIRAGWIRIAGQRQLLTAATTSCELRFGTSALVAGLTRPTSSRRPLETPTNSSTTNPTTA

SEQ ID NO: 124190 - protein, 37 aa, Oryza sativa
  Clone ID: PAT_MRT4530_26953C.1.pep
SKPKRLWKIQITPYKLLVVSFSPYNLISYKIFFISSF

SEQ ID NO: 124191 - protein, 750 aa, Oryza sativa
  Clone ID: PAT_MRT4530_26954C.1.pep
MRGRGGGGEGGETGQRAPPQPLVGGRVPPPLAGSGVFDEDINTIDTSTSPHVQHDGPITRARARQLNYQDECPRGRVDAHHKFAATIGDAHQQLHHKPDYSLTGLVATAPIHLVPRLLTCGLLSPSCGQGLEDKDEEGASHSPRTKGIIQYFTRQVKQHTEGLDTDLQVTNEKIGQLESTQISTNTKLTGLETAVARIDTSLAALVRHFDALNAGGNGGGNDDDIDGEYVEDNLEDEYIADTEQDDRDARDRRRLHNNRRGMGGRRRRERDCPSKRVLVVKNDGEYSSASDFDDDTLALLAADHADNEPPEEHIGAAFADHYESLIVQRVLSAQMEKAEQNQRHTLFQTKCVVKERCCRMIIDGGSCNNLANSEMVEKLALSTKPHPHPYYIQWLNNSGKAKEYSDVFPKEVPPGLPPVRGIQHQIDLIPGFQHHCCTIECASKKGVPFTWGTSQENAFHMLKDKLTHAPLLQLPDFNKTFELECDASGIGLGGVLLQEGKPVAYFSEKLSGPVLNYSTYDKELYALVRTLETWQHYLWPKEFVIHSDHESLKHIRSQGKLNRRHAKWVEFIESFPYVIKHKKGKENIIADALSRRYTLLTQLDYKIFGLETIKDQYAHDADFNDEAHGGGLMGHFGAKKTHDILANFGVSSTFNVADLKPYLGEEDELESRTTQMQEGEDDEDINTIDTSTSPHVQHDGPITRARARQLNYQDECPRGRVDAHHKFAATIGDGVSVAKAQRLWTVVVGP

SEQ ID NO: 124192 - protein, 314 aa, Oryza sativa
  Clone ID: PAT_MRT4530_26955C.1.pep
MAGAEWSPFDGDAAFAEYSSAVLAELGGWAAPGEEGGAGMMVPAALDLPVDVVGAAAREEEEEEEEAPARSGDGAAAAASSSSSGEPAAPDKRPAAAEAAPAAAATATATAKKGQKRARQPRFAFMTKSEIDHLEDGYRWRKYGQKAVKNSPFPRSYYRCTNSKCTVKKRVERSSDDPSVVITTYEGQHCHHTASFQRGVGGAAVAAHIHGAAAVALAEQMSAFVSPPPQPHMLYGLPRLHPPSSETAVSCSMPTTTSLQELNNSEGLQRPGYNNSPQAAVTIAQRPPSPSVPPAVSFDKGLLDDIVPPGVRLG

SEQ ID NO: 124193 - protein, 650 aa, Oryza sativa
  Clone ID: PAT_MRT4530_26956C.1.pep
MAKLNKSLEGCFKDKNTLDKILSEQRCIVNKEGLRFIPKKGKKPSHRATRFVKSNASLWVNILIIYVLFLMLFVMHVYLGIEVDQAKVKAIQSWPTPKTVSQVRSFLGLAGFYRRFVQDFSTIAAPLNALTKKEVPFTWGTSQENAFHMLKDKLTHAPLLQLLDFNKTFELECDASGIGLGGVLLQEGKPVAYFSEKLSGPVLNYSTYDKELYALVRTLETWQHYLWPKEFVIHSDHESLKHIRSQGKLNRRHAKWVEFIESFPYVIKHKKGKENIIADALSRRYTLLTQLDYKIFGLETIKDQYAHDADFNDVLLHCKDGRTWNKFVINDGFVFRANKLCIPASSVRLLLLQKAHGGGLMGHFGAKKTQDILAGHFFWPQMRRDVGRAVLKKNIKMWEECLPHIEFAYNRSLHSTTKMCPFQIVYGLLPRAPIDLMPLPSFEKLNFDAKQRAELMLKLHETTKENIERMNAKYKFAGDKGRRELNFEPGDLVWLHLRKERFPDMRKSKLMPRADGPFKVLAKINENAYKLDLPADFGVSPTFNVTDLKPYLGEDDELESRTTQMQEGEDDEDINTINTSTSPQVQHDGPITHARARQLNYQVSSFLSSYSSSLYPGDACTRVLLRNNGEDSKGRGFARGGFGLQGSANF

SEQ ID NO: 124194 - protein, 180 aa, Oryza sativa
  Clone ID: PAT_MRT4530_26957C.1.pep
MASSRSEGSSASSRRTSASPIPYRVGPLEYEPAVVCRYSNKAARWISWIPDNPGCRYFKCVNARSGCCDYFAWVDGPSNSFVREVLNDLRDEVWKLRREKGDFSAAVEEGRCVQSELVLARNELATSRKVVGEKEAVVGVLKDRNRNESGIFLVAVECNVVSYGMELGWYCVMESRMELC

SEQ ID NO: 124195 - protein, 983 aa, Oryza sativa
  unsure (1)..(983): unsure at all Xaa locations
  Clone ID: PAT_MRT4530_26958C.1.pep
MAGPEDKDEEGASHSPRTKGIIQYFTRQVKQHTEGLDTDLQVTNEKIGQLESTQISTNTKLTGLETAVARIDTSLAALVRHFDALNAGGNGGGNDDDIDGEYVEDNLEDEYIADTEQDDRDARDRRRLHNNRRGMGGRRRREVRNNDDAFSKIKFKIPPFDGKYDPDAYLSWEIAVDQKFACHEFPESTRVRAATSEFTDFASVWWIEHGKKNPNNMPQTWDALKRVMRARFVPSYYARDLLNRLQQLRQGAKSVEEYYQELQMGLLRCNLEETEDAAMARFLGGLNREIYDIVDYKDYTNMTRLFHLACKAEREVQGRRASAKANFSAGKTSSWQTRTTPPAGRTASPSSTPTTSRAAPPPSSDKSATKAAQPAPSASSMASTGRMRDVQCHRCKGFGHVQRDCPSKRVLVVKNDGEYSSASDFDDDTLALLAADHADNEPPEEHIGAAFADHYESLIVQRVLSAQMEKAEQNQRHTLFQTKCVVKERCCRMIMDGGSCNNLASSEMVEKLALSTKPHPHPYYIQWLNNSGKAKVTKLVHINFAIGNYHDVVECDVVPMQACNILLGRPWQFDRDSMHHGRSNQYSFLYHDKKIVLHSMSPEDILRDDVAKAAKSKCESDKKAQSDGKKPETINLKPKCLLATKSDINELIASPSVAYALEYSDVFPKEVPPGLPPVRGIEHQIDLIPGASLPNRAPYRTNPEETKEIQRQXHELLDKGYVRESLSPCAVPXINNITIRYRHPIPRLDDMLDELSGSIVFSKVDLRSGYHQIRMKLGDEWKTAFKTKFGLYEWLVMPFGLTNAPSTFMRLMNEVLRPFIGKFVVVYFDDILIYSKSMGEHFNHLRAVFNALRDARLFGNLEKCTFCTDRVSFLGYVVTPQGIEVDQAKVEAIQSWPTPKTVSQVRSFLGLAGFYRRFVQDFSTIAAPLNVLTKKGVPFTWGTSQENAFHMLKDKLTHAPLLQLPDFNKTFELECDASGIGLG

SEQ ID NO: 124196 - protein, 127 aa, Oryza sativa
  Clone ID: PAT_MRT4530_26959C.1.pep
MEAGMARWWRGGRPGEVVVAAVEKAGGTSRRAREEQAVSLLRAEVACMHPAPPNLPDTTSTFVGHGGRARDEPWCSSKWNGTHADEDRVIGVIDGQKAQGPTARPTARHFGPAQARHGPSRVGPVPA

SEQ ID NO: 124197 - protein, 1485 aa, Oryza sativa
  Clone ID: PAT_MRT4530_2695C.1.pep
MAGERKEKVGFGGYASNSKAYRVYNKNKGIVEETADVQFDETNGSQEGHENLDDVGDEGLMRAMKNMSIGDVKPIEVEDKPSTSTQDEPSTSATPSQAQVEVEEEKAQNPPMPPRIHTALSKDHPIDQVLGDISKGVQTRSRVASICEHYSFVSCLEQKQVDEALCDPDWMNAMHEELNNFARNKVWTLVERPRDHNVIGTKWVFRNKQDENGLVVRNKARLVAQGFTQVEGLDFGETFAPVARLEAIRILLAFASCFDIKLFQMDVKSAFLNGEIAELVFVEQLPGFEDPKNPNHVYKLSKALYGLKQAPRAWYERLRDFLLSKVFKIGKVDTTLFTKIIGDDFFVCQIYVDDIIFGFTNEVFCKKFGDMMSRKFEMSMIGELSFFLGLQIKQLKDGTFVSQTKYIKDLLKRFSLEDAKPIKTPMTTNGHLDLHEGAMPPRTRRDRREPTPDPVSENEESSGDEYVQSEDENMENVEGDEVEEQQQFKRKKATLSLPDRRERNRLCRLDRAPAGRAVASSSVAATPSTPACPPFPAETPGATFPPSPFPFLRTGRLQPPLSPCLSAGQRRHHLPRLRDAALIPGITSSSPEARRSGLLAGVQWRRHHFSVSGRLLFVAGTPTDVAVSSVDVAASPSTPACPRFHRNVAANISVRLAGVVWPPVPPRPCTGRPHLHHLRHRSGKVVLGIVSPPSKPLRGPSSSSPIVLVVDVPSVARLVVSRRRLRRRHRSGVVLAVLVPVQPLPAVLVASSPVPVVVVVVVLSSFPVVVAPIIVFVLGSASSSLVPAVSRLRSRIAAEVVPSPSVSAAPFVVVVPTPRRVVLSSFRRFPKRGLRSSPKVRKAVLSEQGKANEGYTSCGPVVEMSWQRVGALLLGAQSCLPVPEVPAVGGIGSVLLFMARMGWELCHVFRPYTVVNKPNIHHNSKRLRSVKVLSLVSNLSLPFAFPLSLSKPLQQMADNEKDNKVRSQDIGTSSPRVNEAPDTSCVTLVQHLINQNRLLIEILQQHQTPILNLSQIQPQVQLEAVQALTPQVSMPPASRRTHGDVPHVDSKEASIICFRCDEQGHYARECPQQKRKTPMRTEDEVRKMIITSTEWPPLGMTKRQRRNTFRGAPQLTEHLLANGGRVSDSEDSDQVSSDDEDEMERKACSRCGEIGHVASSCATTCVHCEEDHPPDRCPTSRITCFFCEGTDHVPKDCQFSFLLTKKMANQPASSNGEKHQGNTNPRQDYSFSLTPVPGQRNQNEKRKCRVREDICCFNCQGMGHFADKCPKPRNIAAGTSVHATPCNQKLAPQRIVIHVSRSSPIARVATAPTPASALPQGVNAQFQPQPSVDKTEASIGIVPLDAPAQQPRNQVQDEEPEREKVIVCYNALTLLCTDGLSKELSSMEEVVSLPDLLQAKRRAINLRRAIPSRRPLFASNSTQKEASPVNNSNMQSYHIITEPIKDDAVTRTMPAISLQNQNEQPRLWFSVRYLSLCSRKFAAIM

SEQ ID NO: 124198 - protein, 113 aa, Oryza sativa
  Clone ID: PAT_MRT4530_26960C.1.pep
MAAEAGSGGVVKHILLARFKEDVAPERLDQLIRGYAGLVDLVPSMKAFHWGTDVSIENMHQGFTHVFESTFESTEGVKEYIEHPAHVEFANEFLPVLEKTLIIDYKPTIVNNS

SEQ ID NO: 124199 - protein, 74 aa, Oryza sativa
  unsure (1)..(74): unsure at all Xaa locations
  Clone ID: PAT_MRT4530_26961C.1.pep
VVGQVEPLHLPXGVLDDDRRXXXXLAVAHFSLPPPPSSRXAGXXAXXPRXXWXLRVLGSXEEEVEVVEVMQLPF

SEQ ID NO: 124200 - protein, 77 aa, Oryza sativa
  Clone ID: PAT_MRT4530_26962C.1.pep
SFGQNLKTTRCEPEELEEFEDESQTKKKTRWGIRLKSIKPFIKSYFQVYNISITYMKPPQPKKINPKKNKTTPKKKS

SEQ ID NO: 124201 - protein, 164 aa, Oryza sativa
  unsure (1)..(164): unsure at all Xaa locations
  Clone ID: PAT_MRT4530_26963C.1.pep
NYNSPSPARSPATCATGTPPRPRPPSTCVVSPQPRRRRHCPAHRHGALLLELNRVLRPGGFFVWSATPVYQKLTEDVQIWKAMTALTKSMCWELVTIKKDQLNDIGHMLVWYEXLTKSMCWQPLMCSDDDDANAAWYIRLNACTASQRRRTSPWTTTAPVSSPR

SEQ ID NO: 124202 - protein, 62 aa, Oryza sativa
  Clone ID: PAT_MRT4530_26964C.1.pep
GKTGSHFEPKTIPPPLTNKADWEINPLELDFSKAVIIGKGSFGEILKANWRGTPIAVKRILP

SEQ ID NO: 124203 - protein, 320 aa, Oryza sativa
  unsure (1)..(320): unsure at all Xaa locations
  Clone ID: PAT_MRT4530_26965C.1.pep
MAPAAASSSALLPAGTFSTARPVAGRPAGQRLPTRVAAASRTTTARSPAACLSVGGRRRGAEAVRASAGGAPAASLPAALLFDCDGVLVDTEKDGHRIXFNETFAEVRFGVSWDVELYGELLKIGGGKERMTAYFSKMGWPAKAPKTDDERKEFIASLHKRKTELFMALIEKKLLPLRPGVQRLIDEALGKGVKVAVCSTSNEKAVSAIVSCLLGPDRAEKITIFAGDVVPRKKPDPAIYLLAATTLGVDPSSCVVVEDSTIGLAAAKAAGMKCIVTKSGYTAEEDFATADAVFDCIGDPPEVRFDLEFCANLLQKQFVS

SEQ ID NO: 124204 - protein, 236 aa, Oryza sativa
  unsure (1)..(236): unsure at all Xaa locations
  Clone ID: PAT_MRT4530_26966C.1.pep
PRSLSLPPWAGFPFPSSLFGPPAQPFCSSLAEKSILPPPEFKYFXRDGGDGSWRRWQRHGSAALGSGLELAVVGAARPGASGSGGGDLGQRVGGDLGRRHRHLLLTAAADEEEEATGQIRRRRFSSRPDPAAAGLVLPESDGXSSGGGATTISSSPPPSMTTRRXGQVAARAAGELGRRLGVWPSSTVWPVAGVVRVVCGGGGGENGGGEDGAREEWRRDDGGEVARSRLAEDGGQ

SEQ ID NO: 124205 - protein, 84 aa, Oryza sativa
  unsure (1)..(84): unsure at all Xaa locations
  Clone ID: PAT_MRT4530_26967C.1.pep
LLAGRSXXXKGIXRXXNXAIKKFVTGEXXWXNWVXXLVRKXFVXVGXVXEIFGFGTFPXTTXXLTGXINNXFEXCALSLCILNN

SEQ ID NO: 124206 - protein, 266 aa, Oryza sativa
  Clone ID: PAT_MRT4530_26968C.1.pep
MEIAMSSKRAEELEQLIQRMEQAAARRRKTQPAGSKRKVPEPDTFCPTRWLPTPESLRESEEKHQAFMRGAREVIREADEALESIALQQRGDSCDEGSWQRRRHGSAALGSGLELAVAGAARPGASGGGGGDLGRRVGDDLGRRHHCHLLLIVAADEEEEATGQIRRRRFSSRPDPAEAGLVPPESDGVLGRRLAATSGGGATAISSSPPPPTTTRRRGQWPASSASSVVVRGGENGGGEDGAREEGRRDGGGEVARSRLAEDSGQ

SEQ ID NO: 124207 - protein, 98 aa, Oryza sativa
  Clone ID: PAT_MRT4530_2696C.1.pep
ASSRSVADHAAQQRILRLVAPTNARFDDLTGKGVMKTRRRQVAANQARWSRDDDIQASISRQGPQAREEGISLRDRKTMGPHLLYDPATLRVVQCCVA

SEQ ID NO: 124208 - protein, 51 aa, Oryza sativa
  Clone ID: PAT_MRT4530_26970C.1.pep
APPQPPTTGRNIIRSRRRRRHGLRRGVGSDPARRGRPSRSLPTTATDAALA

SEQ ID NO: 124209 - protein, 669 aa, Oryza sativa
  Clone ID: PAT_MRT4530_26971C.1.pep
MTSSEKYSMHFIGFAHYKVQTNNKYSALNNAPSSRIFRHKYNHIFCVTDMGDWYDKLSQSFRDTAKEVLAKTDIDPNVRCFPKRQMKRITNNYSTTLGRGGFSVVYKGRLDDGRSVAVKQYNWRTQKEFTKEVIIQSQCSHKNIVRLLGCCVEAAAPILVTEFVPNGNLSDLLHGNSGLLPVTLETRLQIALDVAEALVYMHCSQSYPILHGDVKPSNILLGDKGVAKLCDFGISRLLSMDSDEYTGFVIGSKGYVDPVFCQTGRLSQKCDVYSFWVVLLELFTRKKGIDDMKVCLAEIFACSSRKGDEHKLFDMDIVTNENMEFLQGIGRVALECIKFEVEERPEMRLVLEQLLSLKRSRDKSIHEMLVVRKEIEVFLRGCGFGRFILSKESVDDLICNLKIVLKECASGKAYIGKSRGTPLMAIKMSTAVTEKWKDMLGNEIAVQSRIKHMNVAKLIGYCLDHSDGTVLIYEYGAISLYDVLFGDAGKIYRPFTCDLRLKIAIGAAEGIAHLHSLGVVHGDVSINDILLDHVSSSLVKIAGYGTSGLPDIDKALDSLETGHGKKEHDVYSFGLVLLTLFTWKKVSLPHDLKSEPDKPVLLHQEAIRGRRCNHLEMIKGLASRCLTSEATKRPSMVEVAKHLNFILIFPERRKTCHDLAIYQSRMLSD

SEQ ID NO: 124210 - protein, 169 aa, Oryza sativa
  Clone ID: PAT_MRT4530_26972C.1.pep
METVTLRRFELADADAMMAWASDPEVTAFMTWEPYESVDSLRAFIRDTVLPHPWFRAICLAGDGDGGAVSVTPTADRCRAEVAVAVARAHWGKGVATAALRRALAAAFADLDGVERVEALVDVGNAASRRALEKAGFQQEAVLRSYCVVKGQLRDMVIYSFISTDPLVE

SEQ ID NO: 124211 - protein, 83 aa, Oryza sativa
  unsure (1)..(83): unsure at all Xaa locations
  Clone ID: PAT_MRT4530_26973C.1.pep
DRLTTPAKDNTITGSHPDRIATTARAAAYLVTNNNTGMLPETKASIRASCGHRIEDKALMAQXTACPSPVYAQTFITIAVRSN

SEQ ID NO: 124212 - protein, 92 aa, Oryza sativa
  Clone ID: PAT_MRT4530_26974C.1.pep
MKIRRARIVFENGDNLIYDTNITSIVWPPSSALCTSSKHHVVPNNFGYTPSCLKYYSPLNTIYLCLLFHFVTGRFLLEKNCGIILKKYETYI

SEQ ID NO: 124213 - protein, 69 aa, Oryza sativa
  Clone ID: PAT_MRT4530_26975C.1.pep
MANDDRAADSHVADLAALPVCHPSQAKGTLDLGGGRSSPRRHVAFAPSPPHGLVVTGRPFLASHTVSDG

SEQ ID NO: 124214 - protein, 931 aa, Oryza sativa
  Clone ID: PAT_MRT4530_26976C.1.pep
MAPLHRRLLHLAVVFAGLLLPGVRAGTGGAASGDAGALLAARAALTDPTAALSAWRGDNLCRWPHVACDAAAGNAAVSGVGLYLVRSVPRRGALETLNLASNNFSGELPAAYGGGFPSLAVLNLIQNLVSGAFPGFLANVTALQELLLAYNSFSPSPLPDNLGDLAALRVLFLANCSLTGSIPPSVGKLTNLVDLDLSSNNLTGEIPPSIVNLSSLVQIELFSNQLSGRIPAGLGGLKKLQQLDISMNHISGEIPEDMFAAPSLESVHMYQNNLTGRLPATLAAAARLTELMIFANQIEGPFPPEFGKNCPLQSLDVSDNRMSGRIPATLCAGGKLSQLLLLNNMFDGAIPDELGKCRSLMRVRLPCNRLSGPVPPEFWGLPHVYLLELRGNAFSGNVGAAIGRAANLSNLIIDNNRFTGVLPAELGNLTQLVVLSASDNSFTGTVPPSLASLSVLFLLDLSNNSLSGEIPRSIGELKNLTLLNLSDNHLSGSIPEELGGMDKMSTLDLSNNELSGQVPAQLQDLKLLGVLNLSYNKLTGHLPILFDTDQFRPCFLGNPGLCYGLCSRNGDPDSNRRARIQMAVAILTAAAGILLTSVAWFIYKYRSYNKRAIEVDSENSEWVLTSFHKVEFNERDIVNSLTENNLIGKGSSGMVYKAVVRPRSDTLAVKKLWASSTVASKKIDSFEAEVETLSKVRHKNIVKLFCCLTNEACRLLVYEFMPNGSLGDFLHSAKAGILDWPARYNIALDAAEGLSYLHHDFVPAIIHRDVKSNNILLDADFRAKIADFGVAKSIGDGPATMSVIAGSCGYIAPEYAYTIRVTEKSDVYSFGVVMLELVTGKSPMSSDIGDKDLVAWAATNVEQNGAESVLDEKIAEHFKDEMCRVLRIALLCVKNLPNNRPSMRLVVKFLLDIKGENKPKAMKITEALPAT

SEQ ID NO: 124215 - protein, 967 aa, Oryza sativa
  Clone ID: PAT_MRT4530_26977C.1.pep
MAPLHRRLLHLAVVFAGLLLPGVRAGTGGAASGDAGALLAARAALTDPTAALSAWRGDDLCRWPHVACDAAAGNAAVSDGVVAGLYLGGLYLAGGFPVALCSLRSLRHLDMSSNDLTGPLPACLAGLQALETLNLASNNFSGELPAAYGGGFPSLAVLNLIQNLVSGAFPGFLANVTALQELLLAYNSFSPSPLPDNLGDLAALRVLFLANCSLTGSIPPSVGKLTNLVDLDLSSNNLTGEIPPSIVNLSSLVQIELFSNQLSGRIPAGLGGLKKLQQLDISMNHISGEIPEDMFAAPSLESVHMYQNNLTGRLPATLAAAARLTELMIFANQIEGPFPPEFGKNCPLQSLDVSDNRMSGRIPATLCAGGKLSQLLLLNNMFDGAIPDELGKCRSLMRVRLPCNRLSGPVPPEFWGLPHVYLLELRGNAFSGNVGAAIGRAANLSNLIIDNNRFTGVLPAELGNLTQLVVLSASDNSFTGTVPPSLASLSVLFLLDLSNNSLSGEIPRSIGELKNLTLLNLSDNHLSGSIPEELGGMDKMSTLDLSNNELSGQVPAQLQDLKLLGVLNLSYNKLTGHLPILFDTDQFRPCFLGNPGLCYGLCSRNGDPDSNRRARIQMAVAILTAAAGILLTSVAWFIYKYRSYNKRAIEVDSENSEWVLTSFHKVEFNERDIVNSLTENNLIGKGSSGMVYKAVVRPRSDTLAVKKLWASSTVASKKIDSFEAEVETLSKVRHKNIVKLFCCLTNEACRLLVYEFMPNGSLGDFLHSAKAGILDWPARYNIALDAAEGLSYLHHDFVPAIIHRDVKSNNILLDADFRAKIADFGVAKSIGDGPATMSVIAGSCGYIAPEYAYTIRVTEKSDVYSFGVVMLELVTGKSPMSSDIGDKDLVAWAATNVEQNGAESVLDEKIAEHFKDEMCRVLRIALLCVKNLPNNRPSMRLVVKFLLDIKGENKPKAMKITEALPAT

SEQ ID NO: 124216 - protein, 434 aa, Oryza sativa
  Clone ID: PAT_MRT4530_26978C.1.pep
MPPSLSLHHHLLLFPFPSHVQTLNPLSASPRLHPHSKSLLPRRRPLVTSPSSFAVAAVDEFDEDFAIGDCVVFEDDAFEEPDVDLPSPAPSTTSRPRRKPAAEAGGGGGSSLVPERWRDAAEEINLTKKEKRRIAHGLRFGSRLERRAPPAVAAPDEYRAYREGRLDAELGRVARDYPEPIERSPVPDRVEAPPPPEPGARVAPRNPRLGLGRRKLFTDEEKVLLNKRVPDLEAATSSKWLPLHTIAASGDFYLLDNLLKHNINVNALDKDGLPAIHKAILSKKHAIINYLLRNSANPFIHDKDGATLMHYAVQTACSQTIKTLLLYNVDINRPDDYGWTPLHLAVQTQRTDIVKLLLIKGADRTLKTQDGFTPLELCLRLGHHARTYELIKLLKSFRLPKQHDPVQHLDDRGCSLKGINRLWYAHDNWKAKVP

SEQ ID NO: 124217 - protein, 215 aa, Oryza sativa
  Clone ID: PAT_MRT4530_26979C.1.pep
MPPPAPLAPLRSRAHLRLHCRLPPSPSPSPSPLLSRAPSRRWPPPLRASASGRGGASAAAAPTSSALDALLSAVELLCLAPPAICSVVCAARLVFPPPTTTGAPASGLVGGRMFVVQYVLLVGAVAVGSLIRRRQWGRLCQVGVDGGGGAAARGVDFAGRIGEVEESVRGVVAAVGVLSRTVEKLGVRFRVLRRTLRDPINELFVPTKLSRSKCT

SEQ ID NO: 124218 - protein, 98 aa, Oryza sativa
  Clone ID: PAT_MRT4530_2697C.1.pep
MGTKEDVWLRRCTGVSMRRERDGLRQLSHASAGDCPSHLSPHADVTPLPSHEAPHMMSQSPQNLAAVAGPTEEEDRISGMQTATTMAALGEAARQEAM

SEQ ID NO: 124219 - protein, 105 aa, Oryza sativa
  unsure (1)..(105): unsure at all Xaa locations
  Clone ID: PAT_MRT4530_26980C.1.pep
EGGTTGLDHLRVLFIRPSSHDELPGARVGLGXPRVRVAGAWLSRKLGCCRRRGKRHARGRWGGGGGPRRGTPLLLHHQTEIKNQETTIRANQTPQINNNNKKKKI

SEQ ID NO: 124220 - protein, 175 aa, Oryza sativa
  unsure (1)..(175): unsure at all Xaa locations
  Clone ID: PAT_MRT4530_26981C.1.pep
LWSDSPRQCCRSSLRWRSQAQAQGSASPFAPPYPSRGPPTILGDEKKLPLSWRLXNHPSPLQFKYPTITRYTGNSDPSRFLSIYESAIEVACGEENTKASVIHLALDGFARSCSVDLLTSSGYSWKHLRHVLIXNFWGTYKEPNIQQELFGIRQKPNESTREFVRXRFSQTRCQV

SEQ ID NO: 124221 - protein, 546 aa, Oryza sativa
  Clone ID: PAT_MRT4530_26982C.1.pep
MAIASMAAAAAAAIVGAVREHVRASDLAVAGAVLFAFSAAVSAVRARRRGAPVLWPLVGIVPTLFVHRDDIYEWGSAALLRAGGVFPYRGTWGGGSSGVITSAPANVEHVLRANFGNYPKGPYYRERFVELLGGGIFNADGEAWRAQRRAATAEMHSSRFVEFSVRSIEQLVYGRLVPLAERLSGGGAAVDLQEVLLRFTFDNICAVAFGVDAGCLADGLPDVPFARAFELATELSLLRFVTPPFIWKAKRLLRAGSERRLVEATRAVREFAERAVADRRNEMRKVGSLRGRCDLLSRLMSSAPGADYSNEFLRDFCISFILAGRDTSSVGLAWFFWLLAGHPDVESRVVGDVLAAGGDIKRMDYLHAALTEAMRLYPPVPVDFKEALADDVLPDGTPVRARQRVIYYTYAIGRDPASWGDDAAAFRPERWMRGGAFAGGESPFKYAVFNAGPRLCIGKRFAYTQMKTAAAAVLSRFAVEVVPGQEVKPKLTTTLYMKNGLMVRFRRRSPPPPSPPPRHVVADDDDDDDVAAGRHVAVGSCNSNHL

SEQ ID NO: 124222 - protein, 515 aa, Oryza sativa
  unsure (1)..(515): unsure at all Xaa locations
  Clone ID: PAT_MRT4530_26983C.1.pep
MGHIDFDLKSSLITMAQASPFCGKLNEDASAHLQQFLEIYSTYTVKGVSSDAVRLRLFSFSLLGKAKQWFYANRMTVNTWDRCSTAFLSKFFQMGKTNAFPWERLQEYVATCPHHGMDDXLILQRFYNGLIPSSGNHLDATAGGAFFSKXRLDDQEKAKPQATVKALDSHITCKVCENTGHSGNHCPETREEAMFMGNNGYRPQGSQGWNQPRPYYQGGNNGNNNNNSNFNQPSVKDLVFAQAKTNDAINKKLALNVKVLENINVKLEGFASAFQNQLSFNKMIDSAGTKQARKEAQPASINEPEEDEEMQLNKIAPQEYCDTTRLPFPQCWKKPSMDEQFARFMDVIQKIHINIPLVDALRAQCDLEASVSVMPKDAFDKLNYTGLIPTPMRLQLADSSVCYPVGIAEDVPIKVRDFFILVDFVELEVELDKETPLILGRPFLSTAEANIDVGAGNIRFHINGKEQKFNFRPRAEQCSMVKIKYDLNARNMKEVEVQPPKMDSLVTFMKKYPSW

SEQ ID NO: 124223 - protein, 463 aa, Oryza sativa
  Clone ID: PAT_MRT4530_26984C.1.pep
MWEAEEIEDEETLEALLEASRSAQGRAALSDALADTLHLLPASTHRLLLLRLRLLRNLLAGDDLNQGTFVLLSGPAAVVSSALSSPSDSSDVARAGLQALGNAALAGEHHRAAVWDALFPGSLLELARVREKGVLDPLCMVIDTCCSGEGGRGRLEELCHEELGLPILVEIVTTAWQVGHDEEWLEWLLFKICVEEQKFETLFVALCSRNDAEHSDGDECKTEFNAKHAYLLGKLSKCLANRPKEVSVSISFALDIFNAQKHAAEIVDFTCRVNSPLPTGHPAIDVLGYSLVLLKDICAWESPPSDTQAPVDSLMQTGLVKHLLTYLRELEPPSMIRKSMARGQGDHQPALGTAKVCPYIGYRRDVVAVIANCLHRSKKVQDEVRHLDGIILLLQQCVVDEENPYLREWGLFAVKNLLEGNEENQKEVSGLKMQEAVITPEIADIGLRVEIDKETGHPKLVNN

SEQ ID NO: 124224 - protein, 46 aa, Oryza sativa
  Clone ID: PAT_MRT4530_26985C.1.pep
MAPKKDAGLAMGVSEAPVTNKVDAGVKGGGGNDILHKHAHIGEERH

SEQ ID NO: 124225 - protein, 87 aa, Oryza sativa
  Clone ID: PAT_MRT4530_26986C.1.pep
KKRRAPLEKPRNTGEVFFPIGPIPQVKNPSPSFYPVGSSNPHPYKNRRLLPKAAPIATPKAESRPRKFFFPRSLVAKFMFRRKPPFK

SEQ ID NO: 124226 - protein, 1132 aa, Oryza sativa
  Clone ID: PAT_MRT4530_26987C.1.pep
MANLLGTASSASTVLIASLLGHVGLQSTASSASTVQPTSKHQRASSWDSGVGFGESPNNDHVVPMNKDQLTPQGNKLRNHVTLPNHIDRTEKIAKMENEKGEAKKKKKICSKSESQLQRKFKEGKNVFGESTQLSNMLGTGAEQVIKEKELIGKNVFGESTQLSNMLGTGAEQVIKEKELIGKNVFGESTQLSNMQDKKAEQIIKEKELIGLFTPRVTYSPQALHDELTMLNSQTTQEGQQNFTRLFQTPTAYHISEWTTIEDLYELKNTHFKSQGKSSSFTNGDEQPAIYTNNEQEISLCIQDQHMDKENGTAQETVEEIQIQQTEQHETMPESNETSNSEPNSREELNEEDIDNFLRNDEDGNTQIDKKHIPELGMKFKTDKEAHGFFNFYAYLAGFSTVITHHYKSTSKKRNGEITKYTYRCNLQGKNEPEDKNAEQEEEEQEEEEEEEEEVEEEEQIEEATEQERQTNVLKKTGCKCMMMVEKMFALGDVWQIATLDLKHNHALCPRREAKFLKSHKNMTIKEKRLIRTLKECNIPTRSMIVILSFLRGGLPALPYTKKDVSNVGTAINSETRNNDMKQVLAYLRKKEIEDPGISYKFKLDENNKVTSMFWTDGRSTQLYEEYGDCISFDTTYRTNRYNMPFAPFVGVIGHGTTCLFGCAFLGDETAETFKWVFETFATAMGGKHPKTIITDQDNAMRSAIAQVFQNTKHRNCLFHIKKNCREKTGSMFSQKSNKNLYDEYDDILSNCLTEAEFESLWPQMIEKFNLQNVNYLKIMWKNRAQFVPVYFKYDFCPFIQSTTLSEGTNSRFKRGVGPQHSVMSFMKEYENINDTIFDTLYSKDFQSRPKKPKTLWFNYLIEEQASELYNLEIFKKFQLELKETLSLQVSVLQQGKVYEVFVSPTSIQKEYRPRKHIVIVDLPNENYSCICGKFSKDGMLCSHVLKVMLDLNVRKIPEKYIIERWRKKERKETKKHIMQKENGDNSVLMFNVLSRKGADIASKASKRKRTYDYLVDELDKLEKNIDLMIQQEDQTQFSQHQDSGIEIANAEQQEQEKDVQEEHIEDPDTANTKGRKPKRYRRIVEKIIESSKKKIEEQEDAEENQNKARPKRNTNEEKQTANSATKGNAEN

SEQ ID NO: 124227 - protein, 217 aa, Oryza sativa
  Clone ID: PAT_MRT4530_26988C.1.pep
MIQLLFLVVLAEAAVALLLMVKVGPLREVAMRGVEQAKTGKGPATVKTLACTLSVILMSSVASILKIQNRGLKLGTVSPMDQVLWRTHLLEASLIGFTLFLAFVIDRLHHYLRKLITLRKAANTSREEVEKLQMENRLFREKEEKSSSEIKKLHQEIAKLNESMKKLKSESEDHERKVLEAEAHVNALQKQSEELLLEYDRLLEDNQILQSQLHYKG

SEQ ID NO: 124228 - protein, 76 aa, Oryza sativa
  Clone ID: PAT_MRT4530_26989C.1.pep
LFLMGPVGGYIVITQPVSNTTHHRPQGNGLLWQNAGRLAATRITWSPSPDSQEHLVQGWPLSGVPPSSWSYSTQQV

SEQ ID NO: 124229 - protein, 135 aa, Oryza sativa
  Clone ID: PAT_MRT4530_2698C.1.pep
LRLELLVARLADVVEDAAGAEHDGEVLELHLRALPLVEGVDGAARRGEQERSGQREVEASSLRPRACRRPRRRRPCPQACAPLRRACCRPRRRARLGHVAVLAAASGPSACVRAAAAPSCHPQRRAIVALASSIH

SEQ ID NO: 124230 - protein, 174 aa, Oryza sativa
  Clone ID: PAT_MRT4530_26990C.1.pep
MLPSRQRSIFHLGEEGGGAADAEHLGADHGDGHGDHGIISIHQQRLRVVGLQIVLAQTRHHHRQQHGHVVLKQMQMVSPPPAARHRRRRRPCGDFLSACSLCRLELGPDKDVYMYRGEQGFCSEECRWQQIMTDEARERDAMAKKERLGLHHRTPRPPPAAIRGGSPRRLLAVA

SEQ ID NO: 124231 - protein, 155 aa, Oryza sativa
  Clone ID: PAT_MRT4530_26991C.1.pep
IWGSGSRRRGRKVAAVDDAAALELAAAAGGDCGWLASASVTAAADGGRGRRRLTAGEEAAGDEAAVAMVTAEAVTVAAATDAPVGDEAAAGELWRRADGCCGGSCGGRSRLAVAGPVLAFSRLCVLALSVCGWRYIFFFFLVTTLQGCNLVIFSF

SEQ ID NO: 124232 - protein, 62 aa, Oryza sativa
  Clone ID: PAT_MRT4530_26992C.1.pep
YLAISRIATSIGVREIIPLAHWFSHQYVAISCTATSIGVREIILLAHWFSHQYVAISCTATS

SEQ ID NO: 124233 - protein, 80 aa, Oryza sativa
  Clone ID: PAT_MRT4530_26993C.1.pep
MMVAASSLVGFARRWPRGRCNHDPRVVAATEEVARHFTNPRCSDLGDPALYSNRSIALALVHHNSKVLVNAEKTIELKPD

SEQ ID NO: 124234 - protein, 228 aa, Oryza sativa
  unsure (1)..(228): unsure at all Xaa locations
  Clone ID: PAT_MRT4530_26994C.1.pep
SRAWQTAAFGRRGNGWRRVGDRLGAERRSRWQRRPARRERRGRRRWRPSWRERRGRRXRRRPWCEEELPVDVARSSAHEGWPAGGAGAVVPHVSRGXVVVEHRCFSHGFVGGEQWVKTXHGLGLTDNDGXFPLLRALSCCLIPHGWLPGENPVLAPLSPDGRWRLFSVASLLEDVVLVSPSRSLSIGASMLLSGGQSGVNLLPVLCVDAVGVWVAVYFFSFSDVLTRF

SEQ ID NO: 124235 - protein, 293 aa, Oryza sativa
  Clone ID: PAT_MRT4530_26995C.1.pep
MMKFHTCFAQPVDSIRSQYDDRGASSPASPPPERALAKPCARKDGGGGASLPFAPGGWGRRSSATVVPRSAMAGRIWGSGSRRRGMKVAAVDDAAREIWGSGSRRRGRKVAAVDDAAALELAAAAGGDCGWLASASVTAAADGGRGRRRLTAGEEAAGDEAAVAMVTAEAVTVAAATDAPVGDEAAAGELWRRADGCCGGSCGGRSRLAVAGPVLAFSRLCVLALSDPITYFLIHSSMYTRETNTYQSSLVREKSIPVCEAFDDNQLMINLLWSPWCSILGPLRIYMDTYVEN

SEQ ID NO: 124236 - protein, 214 aa, Oryza sativa
  unsure (1)..(214): unsure at all Xaa locations
  Clone ID: PAT_MRT4530_26996C.1.pep
SRAWQTAAFGRRGNGWRRVGDRLGAERRSRWXGGRLGARGAGDGDGGWLDARDAADGGRPDXARRVRWRRPARHERRGRRWRRRPWCXEELPVDVARSSAHEGWPAGGAGAVVPHVGRGXVVVEHWCINRGFVGVEQRVKTXPGLGRADNDGXFPFLRALSCCLIPHGWLPGESPVLAPLSPDGRRRWFSVASLLEDVVLASPSRSLSIGASML

SEQ ID NO: 124237 - protein, 97 aa, Oryza sativa
  Clone ID: PAT_MRT4530_26997C.1.pep
NVWDTACLTRNKASRVSLRTARCQSVRIHRGTLVGGCPPNNSSVRLRCLRLRRRRLRSRLLLACPPAKQVPRSPPESYHGQQRRISRAPVEYFMAAI

SEQ ID NO: 124238 - protein, 87 aa, Oryza sativa
  unsure (1)..(87): unsure at all Xaa locations
  Clone ID: PAT_MRT4530_26998C.1.pep
LSVVKKAPREGCAYXSFKTHPNSMVTTXSGKSSIFRALPNDVLXQCISISREEAQRLQHNRGDDFGPFTPIPYQTYPDVYNPRILLV

SEQ ID NO: 124239 - protein, 522 aa, Oryza sativa
  Clone ID: PAT_MRT4530_26999C.1.pep
MAGGCKAAIGCVDARVPVRASYVSLYKWPESDAEFVRSVAMARRHGGEAAAAAPPPESPAVPHHYYYNGSGSARRGGGEGWYYCSPRVVDSYSCRQIYLRSYTFSKKKETVPERTMACLGRVRDRGAAVFPLFIPHRAGSGGGGGSDAGSVNSASSITRETASTAGDRKRIRRRRSSKGCAVARRLQEASCGAVRALFHRLLACTTSVEVADAGEPTASSPASPPPGRALAKPCARKDGSGGASLPFAPGGWGRRSSASVVPRSAMAGRIWGSGSRRRGMKVAAVDDVERELDLGERQPAAGKEGGGGGRRGGAGVGGGGWWRLWLAGVRVGDCGCRRWRLTAGEEAAGGEAVAAMVTAEAVTVAAATDAPAGDEAATGELWRRPDGYCGGSWRGSAAAVAAVSGSGDCRRWRMRRRGRRGEVGMAAGKDAATGGGGGGGRRHGGLRRLVEGVADGCIWPARQWLEEGRRPAWRREAQPMVAEAGSAREARAAEMEASLAREARPVEGGRIDARRVRWRRPA

SEQ ID NO: 124240 - protein, 134 aa, Oryza sativa
  unsure (1)..(134): unsure at all Xaa locations
  Clone ID: PAT_MRT4530_2699C.1.pep
MRTGYAAGRTAARTRPQARGLDLPLPRALLFSSTRRPIYAFNERVGDLRRVAVDAFAXLKARWACLQKRTEVKLQDLPVVLGTCCVLHNICETRDEELEPXAPETPVRSEAAKRNRDNIAHNLLHRGFAGTTFL

SEQ ID NO: 124241 - protein, 250 aa, Oryza sativa
  Clone ID: PAT_MRT4530_269C.1.pep
MGAEAARGGCIHTALLRNLSEHVLPSGTDGAAAAVRAGHSKASYSVCSPTTGEILHLARSHRPHCAAAMGFHVTAKEFKVVRLGVEVGKLHLHAIVLTVGDARGWRAPAAIGNHDDAFLGFTDDDASIDSDVHAPGVGGRDGCLHWSFRTDYLDKPPRRPLLLGSRRRRFLPPWLVAALRYLDDDGDLSMAEKKKRRRRKLLLATTAQEAHIYDPDSDSLRKMASIAGRATTIQCDSCCTRRALSGFLAS

SEQ ID NO: 124242 - protein, 61 aa, Oryza sativa
  Clone ID: PAT_MRT4530_26C.1.pep
VTNHLSRGIPEDDERKEQSIDGSFRDHGMSVHSSVQAWPTGWVLLLLFFSCFFFFSFGGFQ

SEQ ID NO: 124243 - protein, 66 aa, Oryza sativa
  Clone ID: PAT_MRT4530_27000C.1.pep
MENEMVTNLSPSRMTGAGTPPGASPLAAFSRAVRALFRPSIDAGKMPSLARPVDSGTRSATMEAQS

SEQ ID NO: 124244 - protein, 48 aa, Oryza sativa
  Clone ID: PAT_MRT4530_27001C.1.pep
LGWPNLKVVAKALGFCPPVFCFASFLRAAAAGVVYPKSGFVPRVFLGI

SEQ ID NO: 124245 - protein, 173 aa, Oryza sativa
  Clone ID: PAT_MRT4530_27002C.1.pep
MADRQQQHAHGEGRTAAQRLGYAPAASADSPSTTLLRRVQTHAPNSTQVVGFLTLAVSGAVLLLLTGLTLTGAVVALIFLGPIALLTSPIWVPVAVALFVLAAAALSACAFVVVAVAAGTWMYRYFTGRHPVGADRVDYARSRIADTASHVKDYAREYGGYLHSRAKDAAPGA

SEQ ID NO: 124246 - protein, 79 aa, Oryza sativa
  unsure (1)..(79): unsure at all Xaa locations
  Clone ID: PAT_MRT4530_27003C.1.pep
MGPAATDGPHPTAAEWDLLRRRTEKKRLRRGCGGSNPERGGCVAAVIRSEEEERRPQPHXELATADGRSGAAEGTSILV

SEQ ID NO: 124247 - protein, 407 aa, Oryza sativa
  Clone ID: PAT_MRT4530_27004C.1.pep
MDPRVWRRLPQPLVDRILACLPTPSFLRLRAACRRFYHLLFSSPFLHSHLLLSPHLPFFAFVVPAAGHLLLLDPTATASWSRLPLPLPPVAGGPAAFSPAAASAGLLAFLSDASGHKTLLLANPITRLLAALPISPTPRLSPTVGLAAGPTSIIAVVAGDDLVSPFAVKNISADTFVADAASVPPSGFWAPSSLLPRLSSLDPRAGMAFASGRFYCMSSSPFAVLVFDVAENVWSKVQPPMRRFLRSPALVELGGGREGAARVALVSAVEKSRLSVPRSVRLWTLRGGGGGGGGGAWTEVARMPPEVHAQFAAAEGGRGFECAAHGDYVVLAPRGPVAQAPTSALVFDSRRDEWRWAPPCPYVVVAHHGGAGAAGFRVFAYEPRLATPAIGLLDATAPVALHGMHDG

SEQ ID NO: 124248 - protein, 299 aa, Oryza sativa
  Clone ID: PAT_MRT4530_27005C.1.pep
MRLRVGTASFSLYYLSFCVFWSAGDGAHKGNDPRTKVTAKWVQGVRRMGLNLNTNPPQVDVERARQHRPSIVIVYPVKVIDGRRVVMHGAGSGFIISSTADGKCIVLTCRHVVKGSKGFDPATDLLRIRFLQGVEEDMQGQLILEDPFLDIAFILVSNMPIMLPALRFAPGVDLPVGTPVFLLGNCFLEQLPGCNIQTAIMPTIPTVSPGGISAPCKVEYGPHITRREIQFTCPNKAGYSGSPLLHEEKVIGILGRGAYQASLAVCTENLITFLETRLGVDEGTIPVEDLIQMLYQYRT

SEQ ID NO: 124249 - protein, 139 aa, Oryza sativa
  unsure (1)..(139): unsure at all Xaa locations
  Clone ID: PAT_MRT4530_27006C.1.pep
MVAKAAAAPLSDCDSSGRRRCSGGARRRRKRRRSATEKAEVAALGDGDGSSGGGDVARRTGAVRSASPDHMEAGSGRRRSARXRRSARGDLRRDGAEVYGDGGGGAGYGCARRRRTEEAEAPAPAAVREGEGRRERDGV

SEQ ID NO: 124250 - protein, 213 aa, Oryza sativa
  Clone ID: PAT_MRT4530_27007C.1.pep
GPAQADLRDSIAQVKSDIVVKEDSIVFALIKQQPTLPLPKLPVAVAPVGPGGCVTPRPSLGRHVATERAEVVTGCQRIGQASAHPRPAYSGGVGAAVSGSTTAVAIHLRAVAAKVASRRPPPRADRRRPDPASMWSGDADLTAPVRRATSPPPLLPSPSPSAATSAFSVAERRRFRLRLAPPLQRRRPLLSQSLSGAAAAFATITDYHFFLVL

SEQ ID NO: 124251 - protein, 168 aa, Oryza sativa
  unsure (1)..(168): unsure at all Xaa locations
  Clone ID: PAT_MRT4530_27008C.1.pep
FGTSPRGRFVNPFLEGLVRVVSRITLILDDLDIIDVARDYNLTPLFTDLLQMNGLDTVQIVSATALENLSRQSKLLARIVPAPNPGFGFSIFPCLSQKSVATGACRVHVGICSARESFCLLEGKAVEKLVACLDHNNEKVVEAALAALSTLLEDGVDIEQXVMVLCDA

SEQ ID NO: 124252 - protein, 420 aa, Oryza sativa
  Clone ID: PAT_MRT4530_27009C.1.pep
MAATLLSRAAAAAAVSLRGARSHHILSSSLPKETLLPPPLLILLATTIASLLAVGGRVGWARAAEEGAGFGCRASVPAALGGVGSFGIAARCNATSSSAVSEATNALPRTEPVVSAEWLHANLKDPDVKVLDASWYMPAEQRNPLQEYQVAHIPGALFFDVDGISDRTSSVNKNSFRQHQKLPHMLPSEKAFSAAVSSLGIYNKDGIVVYDGKGLFSAARVWWMFRVFGHDKVWVLDGGLPQWRASGYDVESSASSDAILKASAAREAIEKVYQGQLVGPSTFEAKLQPHLIWNLDQVKENIDAKTHQLIDARGKPRFDGAVPEPRKGIRSGHVPGSKCVPFPQLLDSSQKLLPPEELRKRFEQEGISLDQPLVSSCGTGVTACILALGLHRLGKTDVPVYDGSWTEWGAHPDTPVATAA

SEQ ID NO: 124253 - protein, 205 aa, Oryza sativa
  Clone ID: PAT_MRT4530_2700C.1.pep
MHGAAARTAARARQSNNEEFTPTTKQSNQTAEAAVEEVVGDVVPIALGGLGADGGLLQGLVVDELVPELRLELLVARLADVVEDAAGAEHDGEVLELHLRALLEARPPRLESRERVDGDAPEVAHPLVEGVDGAARRGEQERSGQREVEASSLRSRACRRSRRRRPCPHACAPPRRACCRPRRRLRPRPRACAPPLPLRVPRLPP

SEQ ID NO: 124254 - protein, 40 aa, Oryza sativa
  Clone ID: PAT_MRT4530_27010C.1.pep
LTRTAGAGWLIFMARRERFRPSLSFGNAPGEKLLDFCGRI

SEQ ID NO: 124255 - protein, 103 aa, Oryza sativa
  unsure (1)..(103): unsure at all Xaa locations
  Clone ID: PAT_MRT4530_27011C.1.pep
RPLVRPRVRSLVRFQSPVVELRNCQVMQQQCCQQLRMIAQHFYWQAISSVQVIVQQLLLQQFARAYFDHSXAQAQAMLALNMPAICGVYQDYNTCFCGILTRG

SEQ ID NO: 124256 - protein, 128 aa, Oryza sativa
  Clone ID: PAT_MRT4530_27012C.1.pep
SILISTFFLSSVLVNYGNKLTTHYPHTNTQTITMHLSIYTTLLIPTLAAAGRLGGIDMNRACRDQYGGSWSAYVSLQGGGCNAWRCAYNGGEATPRSIDTPRACVNQYGGGAYALCYNGEYDWSCFRD

SEQ ID NO: 124257 - protein, 48 aa, Oryza sativa
  Clone ID: PAT_MRT4530_27013C.1.pep
LLLVKEKQVSLISYISFSFVNEVVYRFRIRTRKILLIDILAFMQIKTW

SEQ ID NO: 124258 - protein, 47 aa, Oryza sativa
  Clone ID: PAT_MRT4530_27014C.1.pep
MAKLKEVPEVWGRTVIDIEMARGGPTMKEGYGVRFRGLSILVALIWH

SEQ ID NO: 124259 - protein, 70 aa, Oryza sativa
  Clone ID: PAT_MRT4530_27015C.1.pep
EWMRHGALGAIKEQVVEQDQWSTFVHVAQDILCYVPLVIYFVCTDSSELRFKGGSLSVGLVYQKDKYHVS

SEQ ID NO: 124260 - protein, 58 aa, Oryza sativa
  Clone ID: PAT_MRT4530_27016C.1.pep
REPSLKRLQLFKRPQTIFKNIGFWGEIPRINQPGGVTNQEGKVSSKRGGFALKDLPGG

SEQ ID NO: 124261 - protein, 424 aa, Oryza sativa
  Clone ID: PAT_MRT4530_27017C.1.pep
MTQTNQAIEVDGDRLSPPPPAASPAVSAVLENDDLVGEILLRLAFPTTLVRAALACRRWLRVASDPSFLRRFRELHPPRLLGFYVTSLKIPRAHPLFVPMPPPARPPELDPVVLRGGNFSLAYEGYTTSIYQCRNGSILLFKERHDRRELKYAVHRPLQHPERGLLAIPFSSTHDDDDDVEPDLGFDDENVWGFHFGEDGGSQLYRLSVMFTPRGATSAWFYAFRDGGWHVHTKATAQLPGLPPESAGFVVVRDKAYLAATSSSVLVLDLKSSSLYTIQLPDGVEFPPVMMWYNDRSHDVLFGRASDDSGVYIADLKEPQLRIWLLKHGSTGWTLVDTICLRSMCANLHINCVGGDSRVVYMDYVGDDAEFLFLKTDECALYLDVKSRQLHKVYEVTEKDEILFSIMPFMMIWPPIFPVRKEIS

SEQ ID NO: 124262 - protein, 956 aa, Oryza sativa
  Clone ID: PAT_MRT4530_27018C.1.pep
MAETAITTVLAKVAELVAWEAAVLLEVGDDVRLLRDKLEWLHTFIRDADRRRRRRDDEFVAVWVRQTRDVAFEAEDALDDFLHRAARRHRQATPLAAMLLPSCAAAAAAWPPRCAGQVALRHGLSGRIRQIRKRLDEISANRAAYNIEHTPSPAWATHPSSAAATALAAWDDFEEYTVGFDKYSNMLKEQLIDDAVTGRAIVSIVGESSIGKTTLGRKVYQSPEVRNHFEIRTWTVLPPKCRPADVLRDIYRQASSQLRRSPSQQSADDGCGADAAVAACRSSGKDVGNLLFRNLTGRRYIVVVDGSIAASDWNSLRASLPDEGNGSRVVLITDMAGLEVVTYAAGPTMNSPIKLERLSPENTYEVFRRRVFGRGGDCPRQHRSRYYQKIFQITRGLPLSIVVLAGVLRSKEPPAEWDEVMSQLATAREPSSSSSKNGNSGRIMSLAFDDLPHHLKSCFLYFAAMRESATVDAQRLVRLWVAEGFVRPRRGSTMEEVGQGYLKELISRCMVQLVDKDEFGVVQTVVVHDRLHAFAQDEAQEASFIESHDSTDVLAPATVRRLAVQNSSERYVHLSNALPKLRSVVCDLVDGRNGGGGGGKCIHCTDLGFLHASKFLRVIDIHGLELKKLPNEIGSMIHIRYLGLQCGQLEKLPPSVSNLVNLQSLILKGRNAGHVLDVTAAFWRITTLRHVVAPFALPKVLGDLHSLQTLHGVQHLCWDTRGGGGGGGNPLGTSTNLRSLELSGLLAKHAAALTAALESLDLLVHLMLDGESLPSTVFTIPSLRRLQSLKLRGSMDSPEGPGGDDDDDNESADDGVVRYIRPNLTRLSMWSTMVGQKFVDMLGELPSLAELTLMVAAFDGERLEFRDGGFRSLQKLKLGLPELEEWTVKAGAMASLARLTLFGCLKMRMLPEALAGIPELEEVVLYRMPIMVERIKKHGGEDHHKVKHVPVIQTIW

SEQ ID NO: 124263 - protein, 46 aa, Oryza sativa
  Clone ID: PAT_MRT4530_27019C.1.pep
LNQYHQSDIICVGAFFSDHMIPGTIYYSKICDRPETQSNFKSICLI

SEQ ID NO: 124264 - protein, 53 aa, Oryza sativa
  Clone ID: PAT_MRT4530_2701C.1.pep
EPSRRGRQEMMGFRGRLSLRPGILGMQSKGLERGLATQAVQIWQGINHVCVNN

SEQ ID NO: 124265 - protein, 80 aa, Oryza sativa
  Clone ID: PAT_MRT4530_27020C.1.pep
MERVEDPDLEDPNPDVGELFSHYDGLYFRGALAGAGFSVQWSSPPSRMAGRGGASNQGRLAQYLLELPEDLNFVFLAFGT

SEQ ID NO: 124266 - protein, 763 aa, Oryza sativa
  Clone ID: PAT_MRT4530_27021C.1.pep
MSRLQVWVRDAEVLRTALLEAGIVTGPTSILQVDAGDGFEIEPVNRTGGSEMEAETSVNEQATSVGEKDIDAEVLRAALLKAGIVAGPTSILQVDAGDGLEIEPATTTEGSEMEGVQSQPVVPFVGFGRKVSSCKRSNVTKDYNRYEFACYSERTSKEQNAKSSIGSRSRKCNSIRKTDCKARMVVVKRAEKWVVTIVDLDHNHPPLSPNSLRFLESHRNVSDEDYELIELRHNNNIPTRRIMSVLSDLYGTMRNIPFTKKDVSNLRTSMRKRTTANGDMAETIKYFQELQAEDPSFFYSMELDSDNTVGSLFWVDGASKEAYKKFGDCIVFDTTYCTNKYNLPFAPIIGVSNHGQTVLFGCVFLKNEKVETFEWVFETFLKAMDGKEPQCIMTDQDKTMEIAIAKVLPRTIHRRCMWHVHRNASTNLGVLLNGKEGFETDLKSCIDNSLNEEEFDASWDAMIDRHELCGNKYMQHLYDNRKKWVPCFFMDYFFPFMSTSQRSESMNKLFKDFVHPADSIRNFIFQYEKLAQSCLDRDDNQRFITVQTDPKMWSGYPMEEQDSKFYTRAMFEEFQEMLYRATKYKTINGPEPGSYFVQLILDDDNKKFLVHYDINNETYSCACKKFQRDKIAVRQAVKRKSQVIAASSKKKKLDDTSCLDCDDPTRWGHRILDFEKAKSKVEVTVSGEVRYQAHYTKCKLPRRARSSCSLRRRRWCSGRSSASLPLPTRTTSANLVVGIPMAVPSFASDYTIDLFVPLVEFVI

SEQ ID NO: 124267 - protein, 57 aa, Oryza sativa
  Clone ID: PAT_MRT4530_27022C.1.pep
FIFHSFHDNTSVNQWPPTLLKIPFELSDYKLKRLISHTNTIMMLNSTNHDDIIILIN

SEQ ID NO: 124268 - protein, 85 aa, Oryza sativa
  Clone ID: PAT_MRT4530_27023C.1.pep
MSRDELVHLREEPGGRSGGLAGGDEVVVAVSQPGRLRWRRLRQGGHLAQVLEEEGVAAGGHRGVVHAQGGPGVADVALVSHHVPF

SEQ ID NO: 124269 - protein, 68 aa, Oryza sativa
  Clone ID: PAT_MRT4530_27024C.1.pep
FLLAKKSFTTLTWSNKQWRHGDQKNQVSMGGSTSSWCLPPGGNLIPLPPPGGKGKEYHPHLRNPPPGL

SEQ ID NO: 124270 - protein, 242 aa, Oryza sativa
  unsure (1)..(242): unsure at all Xaa locations
  Clone ID: PAT_MRT4530_27025C.1.pep
XXNISPPIPILFVTRSVGEQKEADPVVRRCRGAGSTGRRRWREVPLPKPEEDGDEEDGDRVGSADGSSRRSASVSRSLSLLGWRLGFGGGGLGRYWVVWPMAHSMFSRSASSSSFSMATRASGANNNHSAGEGLAAGAAGIKSGCDEQGTGILHGSTRVRFDLPICDFIYLMYLRISIRGIREKWKKQTSSVTYAGTPVSGSLISRSIIFLMLECNELIKFWGFIGSEWDAGVSDRGEPTIE

SEQ ID NO: 124271 - protein, 385 aa, Oryza sativa
  Clone ID: PAT_MRT4530_27026C.1.pep
MAGPSVWKGLGVAGSTSIVISDDEKKEIQQDVEDLEEEEERPGWLPDGWIMEVYQGDDGTIYRYYTSPISGLTFTMKSEVLQYLFSGMDERFLESKNCAADNQLINNSVYVSPTMTYMQMTHEWLPKGWIIEVRAGGKNMNKMYKFYVYPPAGVRLFSKEDVLLYINKSEITGFDTNGECDTRTKDNILANVEFNPHSLPEGWVKEVVFRKTKTGVIRKDPYFTDPVNNYSFRTRKSAMLYVQTGKVPKRAFIQRTSVHDLYSFEKSADLHESLKKRLDFAARTNRKSRRSLKSKNSSLTEKSLSDEESSYKSEDGDSSDDLSDSSSEVKKNKGKLEKTTCKTKKSVSFNTAKRPVGRPSKRSTEEMPRDVEIKQESASSEEYWC

SEQ ID NO: 124272 - protein, 71 aa, Oryza sativa
  unsure (1)..(71): unsure at all Xaa locations
  Clone ID: PAT_MRT4530_27027C.1.pep
CSARILLFVIVWLLDLDGMLVVPLFSVSCVIGVGASNLSLRLLRLDLNLGLIVAXCQRCLVLLLACMFCGS

SEQ ID NO: 124273 - protein, 860 aa, Oryza sativa
  Clone ID: PAT_MRT4530_27028C.1.pep
MALDPADDPLLADCKYKLNHFRIKELKDVLHQLGLPKQGRKQELVDKIIAVLSDQQEQDSRLNGLPNKKMVGKETVAKIVDDTFAKMNGSTNAVPASRNQTDSGHIVKPKRKSDDSAQLDVKVRCPCGYSMANDSMIKCEGPQCNTQQHVGCVIISEKPADSVPPELPPHFYCDMCRITRADPFWVTVNHPVLPVSITPCKVASDGSYAVQYFEKTFPLSRANWEMLQKDEYDLQVWCILFNDSVPFRMQWPLHSDIQINGIPIRVVNRQPTQQLGVNGRDDGPVLTAYVREGSNKIVLSRSDSRTFCLGVRIAKRRSVEQLVGYGQNSVDSLSIYNTSWYLGGTWQLLRFRNPVLFIKGPLNFHSIQVLSLVPKEQDGENFDNALARVRRCVGGGTEADNADSDSDIEVVADSVSVNLRCPMTGSRIKIAGRFKPCVHMGCFDLEAFVELNQRSRKWQCPICLKNYSLDNIIIDPYFNRITALVQSCGDDVSEIDVKPDGSWRVKGGAELKGLAQWHLPDGTLCMPTDTRSKPNIRIVKQEIKEEPLSEETGGRLKLGIRRNNNGQWEINKRLDSNNGQNGYIEDENCVVSASNTDDENSKNGIYNPEPGQFDQLTSNIYDLDSSPMDAHFPPAPTEQDVIVLSDSDDDNVMVLSPGDVNFSSAHDNGNAFPPNPPEASGICGEQPRGAGPDVTSFLDGFDDLELPFWESSSSQDAAGTQVTDNQCEMQNFIVNHQFLHEPILGVNLGGTAASNTLECEHDGALQACQSSDQDGDQNQTCHDGHSGDLTNLSIISTQDSLTNGKNASQKRTNCEDGTAGLDGSVVRSANGLRGEMPPLGQEQDRTVRQKLILTIESDSD

SEQ ID NO: 124274 - protein, 206 aa, Oryza sativa
  Clone ID: PAT_MRT4530_27029C.1.pep
MARFVIISVVVVAAFAAAAVVEARVGPIDVAPTNLITNPLGAIIDNGRKITGAVVDECAWTCDHVAAGNKKMCNTLRKLPGVSSPKELLTAAVKLSMRKAKAARARFEAAARAAEKGTPMESILDTCKEGYDSTVSALQEVQRCIDANDSKASLITKMSAATTFTGDCGNAYEERELEPSLALKATKNNVNRVVTGALAIAAKLKL

SEQ ID NO: 124275 - protein, 229 aa, Oryza sativa
  unsure (1)..(229): unsure at all Xaa locations
  Clone ID: PAT_MRT4530_2702C.1.pep
TRVMKALIDLEALQATGDLSPXRRSIQFFLDNLLSQTPDQQQTLAAIGEDLFAISQDQPFRFPSTFTFVIRAFSTLEGIGYILDPDFSFVKVAAPYAQELLDLKQRRTSAPELVREIRKQANSARDSTISMPYRIQRIEXFVGQLESGDLKLRVRVLESERAARKANVLQMATMYTAIGGTLLNVGVTLSSQGNQIVANGSFVGAGIFLALLIRSMQRVKKLDKFETMI

SEQ ID NO: 124276 - protein, 45 aa, Oryza sativa
  Clone ID: PAT_MRT4530_27030C.1.pep
MAQGGRHWERLGRSSLRSYAARATTGTFNSLSMTCGPSCVYDIWV

SEQ ID NO: 124277 - protein, 76 aa, Oryza sativa
  Clone ID: PAT_MRT4530_27031C.1.pep
MGCGCQMIGEETSQHRDTAESDTHHEVPSSRVLQETCNYIRSLHQEVDDLSERLSELLATSDMSSAQAAIIRSLLM

SEQ ID NO: 124278 - protein, 92 aa, Oryza sativa
  Clone ID: PAT_MRT4530_27032C.1.pep
MNLITTNLPLQLGWQRRPPNPPARGRTPASRRRRRRSSCTAGRRRRRSPPPPSSASWAPAGTSPPPPVICTPPLSASSPPPPPPPRRRAVAG

SEQ ID NO: 124279 - protein, 36 aa, Oryza sativa
  Clone ID: PAT_MRT4530_27033C.1.pep
RPQCRVHRCISGLISHVCPRPSQYSSNSLCSDLLVS

SEQ ID NO: 124280 - protein, 55 aa, Oryza sativa
  Clone ID: PAT_MRT4530_27034C.1.pep
MVRLTMAPGALATTGLATVVFASFFDVDFWLPCDNFLPSVLEMYEARLPQLSPLA

SEQ ID NO: 124281 - protein, 60 aa, Oryza sativa
  Clone ID: PAT_MRT4530_27035C.1.pep
CCQGEGLAPYGGFLVSCARPMCSNTLLTEPLRSILSTCSSSLKTRLADAESVWRAGRNGD

SEQ ID NO: 124282 - protein, 76 aa, Oryza sativa
  Clone ID: PAT_MRT4530_27036C.1.pep
IVFNYFLFIFIKHKPLVFVPHYIIRINLWHHQTLIASAVISPFRQHWKDVEITAFQQTLGASLLGDYNSHPASNRF

SEQ ID NO: 124283 - protein, 293 aa, Oryza sativa
  unsure (1)..(293): unsure at all Xaa locations
  Clone ID: PAT_MRT4530_27037C.1.pep
SGAQMQAPSPGQAAAGXGGFGQIHRSGSGSRLAAVGQLPQYAAAAARMYGSQVNFSGGGGQVGQQQQQQLAARAAMLSQGQIGMLQGQGNAASAAHYGLQSQMMAQPRQKGMVQGAQFNTANAAQALQGMQSMGVMGGMRGNGTIPYNQQRFAHAQAQLRPQQTSQQGTLSPXGCGSRLDKNSIDCCIKSTATWIVDKWADWDKMSLPQKTAAGSMVKTNAIIAGITCFSTTISASTKDAINTSTSTAVRIESTPNRTNPTTASSSQYXLLQQQHILQQLQQQQQSPRISASG

SEQ ID NO: 124284 - protein, 175 aa, Oryza sativa
  Clone ID: PAT_MRT4530_27038C.1.pep
MAVLTGARFGKRTSGCDSRLPRLLLHRLHHRPRAQHQHADSHGDGDRRLWRRDEQATGSGGDDDDDDGARDLPATHGGEGDDDAPAGAGDPPGQTAPSRHHHQLPAVPPQPSAGPIAEVAVIVEAVRIAALRRLLGCSGATPPPAPVQANCDVEMGLPGGESSASQPAMKPQPGS

SEQ ID NO: 124285 - protein, 182 aa, Oryza sativa
  Clone ID: PAT_MRT4530_27039C.1.pep
MGGGGGARVWRGESGTAAARGKQAAAEVALAAVIARRGDGSSKGGVRPEAAASGGRETREEGGDVGRTRERRGVGAGGAEESGSKIVGDVMYGDENVEELTDGEEDARDQSASEGLRGENLAPLPVLATATPSDAIHLLEGVAFGALILTPLQGNSPGENLRFVRIGRCRRSIGITFLKDSF

SEQ ID NO: 124286 - protein, 84 aa, Oryza sativa
  Clone ID: PAT_MRT4530_2703C.1.pep
TFIICYSNIYLAIYSIQYLSAPNMPHCLFSHHLDQVRPIASHDSLLQKSIQTSRSGTMIFGCSSCYFGLTYPMDSQILFKNWYL

SEQ ID NO: 124287 - protein, 79 aa, Oryza sativa
  unsure (1)..(79): unsure at all Xaa locations
  Clone ID: PAT_MRT4530_27040C.1.pep
LLALCKHACQRVSYMILSRVCPVXYAVGSCVQIVVVVXTSVLLSRTQFSPNNSVGTGVALSGVFQPSPLKRIESTSEAG

SEQ ID NO: 124288 - protein, 60 aa, Oryza sativa
  unsure (1)..(60): unsure at all Xaa locations
  Clone ID: PAT_MRT4530_27041C.1.pep
PDFKKWLGAMKSEIQXMDDNQVWNLVDPPNGVKAIECKWVFKKKTDVDGNVHIYKARLVA

SEQ ID NO: 124289 - protein, 310 aa, Oryza sativa
  Clone ID: PAT_MRT4530_27042C.1.pep
LPPWGDVVGVRRERRSDDRRPATRRWRHGRREGRRQPSAVATANRPAWDGKRKGRQRRVVVDKDEEDGVDVSPSLSHRGRSWARVAAVEGIAASVLERHHGVAVVAAFLPSRRHRQADADAFLLPRRHRPADQLGRCGRPPLLLVGEHGEEADAAALLPSPPPPPPCSPEPTPTHSSRLDADAGLPVPPCHRHRVPPASPPDLDLGGAHRPPRASAGRACGSSSAAAPPLRRFFPVGRADPLLHRVGDAAASALLSAFGNTGGAMTSAASAAGSFLPHSLGADRVSDNIKSMFPSSSTASGATSVRHDEY

SEQ ID NO: 124290 - protein, 99 aa, Oryza sativa
  unsure (1)..(99): unsure at all Xaa locations
  Clone ID: PAT_MRT4530_27043C.1.pep
VEENRHQIRRXINRTMSRIRLMHEWAKNSELTRXIRPKFTSLYKGATEEATCRVWTRWAXPMVRPNLPWHRWMQGFDGRLGLIPNDGWRVLPTIPTITT

SEQ ID NO: 124291 - protein, 262 aa, Oryza sativa
  Clone ID: PAT_MRT4530_27044C.1.pep
MALEGKPGFITMYAITCCKCEKWRTIPTKEEFEVIRENYPAKPWFCSKKRDCSCEHPEDIQYDTSRIWAIDRPNIPKPPPKTERLLIMRNDLSKMDAYYVLPNGKRAKGKPDIDRFLKENPEYAATLPFSNAQAKKGCKAKKSLGDSRWHGPSHAPSSSTPSRSARPGGTRWTPARSAPSRCAAIATSSCTEGTPPSAARSAATSRCTSTPPARGRPRAPGGSSSSRGSGAGTRPRRRRPCPGRRGCPWRAVDELHTLGRRA

SEQ ID NO: 124292 - protein, 382 aa, Oryza sativa
  Clone ID: PAT_MRT4530_27045C.1.pep
MTLQIRLEFRTSMALEGKPGFITMYAITCCKCEKWRTIPTKEEFEVIRENYPAKPWFCSKKRDCSCEHPEDIQYDTSRIWAIDRPNIPKPPPKTERLLIMRNDLSKMDAYYVLPNGKRAKGKPDIDRFLKENPEYAATLPLSSFNFSTPKIVKETVSDSAKWVMAKSEREEQCMQLDAKEVPSSSSKKRVCKMRVKLGKCPEHNLQGRCTLHITRKRGSSTDSIGMYAVQCCECHKWRKVPTKDEFETIRENFTEEPWHCSRRPDCSCEDPADIEYDSSRIWVLDKPNIPKPPAGTERLVIMRGDLSKMDTYYVMPNGKRVRCTAEVDKFLEANPQYKDRFSVESFSFTTPKIVEETVSHNSVWKSGKAKKQDKINALSNNN

SEQ ID NO: 124293 - protein, 347 aa, Oryza sativa
  Clone ID: PAT_MRT4530_27046C.1.pep
AFLGDSLAGRLGGIVAASVGYQVGMLLLTVSAAMPVFRPPPCSGACGSGACDEAAPWQLAVLYAALLLNALGAGGYRPCVVAFGADQFDESEAAERARTWGFFNWYYFCNGASQLVAVTAVVYVQDNVGWGWGLGGGGGGEDQTVKLISKPREGWMGSAGEGTTAVTAEAGEPTGRWRETISSTLAGSPERRASTVPSRRLRTHPARPRERRCLLRRRRWRGRGGRGVGRRRGHGEPEAAAEETCPAKRNLECGGRCCLLGGGGLAGEALGGVDGVGGGGEDGGDGGGAGADGEVAGHHLVDPGGVAGEEGLHGAVAAVAAPWGWAGLAAGWRRRPWRGGRRRRSAG

SEQ ID NO: 124294 - protein, 187 aa, Oryza sativa
  unsure (1)..(187): unsure at all Xaa locations
  Clone ID: PAT_MRT4530_27047C.1.pep
MGDTTAVMAATGEAAAAXGAARGLPCRPPPTRPTRQRNGGDDTAAGDTASASSEASASVPPSSTARRVRPPGRVKRALAAASKSGVETVRXGEAVVRKAGGTERGGAVPDDDDDDGDMFEEEEDACSSSLAAASSDLLLESGHHHHRQLTAHPSMANPRIAAALAATPAVVSSPSLSLFVFLTWICR

SEQ ID NO: 124295 - protein, 627 aa, Oryza sativa
  Clone ID: PAT_MRT4530_27048C.1.pep
MAEEEEAKKSKMRKKGGFRTMPFIFANEVAEKLAVLGFTTNMLMYLTRQLHMPLAKAATTLTNFGGVSAMTPLIGAFLADSLVGRFWTIAAASLIYQVVRIHIHARTHAPRTPPRRAELTGAFVFAWQGMLLLTVSAAMPVFRPPPCSGAGGAGACDEAAPWQLAVLYAALLLNALGAGGYRPCVVAFGADQFDESEAAERARTWGFFNWYYFCNGASQLVAVTAVVYVQDNVGWGWGLGVPTFCMAVSVVAFVAGYPLYRRLHPSGSPFTRLAQVVVAAVRKRRVPTDADDAAALYENDDMDAPISLYGKLVHTEQLSFFDRAAIVTDGDLTTDTSNGKPSLSPIPKPWRLSTVHRVEELKSLLRMGPIWAAGILVITAYSQQHTFALQQASTMDRRLAPGLSSFQIPAGSMTVFTLLAMLTTLLAYDRVLVPLARRVTGLDRGISYLHRMGVGFAISVAATLVAGFVERHRRESAAAAGTTDAGTSPLSAYWLVPQYALHGMAEAFNSVGHLEFMYDQSPESMRSMATALFWLSISLGSYVSTMLISAVHRWSAGADGSNWLPDNINRGRLDYFYWIVALLQVLNLAYYAICARCYLFKPLQLREVDDDAKPQIELQEKASPLSH

SEQ ID NO: 124296 - protein, 296 aa, Oryza sativa
  Clone ID: PAT_MRT4530_27049C.1.pep
MAASGGGNGVVVVFDFDKTIIDCDSDNWVVDALGATARFDDLLCRLPWNSAIDAMMGELHAEGRTVEEVAASLRAAPLSPRVAAAVETARALGCELRVLSDANAFFVGAVLDHHGLAGCFSAVDTNPAAVDADGRLRILPYHGLPGHGCPLATCPPNMCKGKVMERIIDELSCGCGGALAARRRRVVYVGDGRGDYCPSLKLTEMDYVMPRKGYPVWDLIAGGDRAAVRADVREWADFEDLEAVLLGIVAECLTSEHDDADDDGGEAAPPAECRALPATLASGQEAILPKAVHVPN

SEQ ID NO: 124297 - protein, 58 aa, Oryza sativa
  Clone ID: PAT_MRT4530_2704C.1.pep
GNGCRLPVINTRCHGCLFFIYSALVICFICLYSLFTFRLALLFCSGIVRGMDSHQGFQ

SEQ ID NO: 124298 - protein, 117 aa, Oryza sativa
  Clone ID: PAT_MRT4530_27050C.1.pep
MATPAADATSSSPTPSPPPQETPARKAVRVVVKGRVQGVGFRDWTAETAESLGLAGWVRNRRDGTVEALLSGDPAKVDEMVSRHLPVGSPASAVTAVVPSPADPIHPSLGFEINFTV

SEQ ID NO: 124299 - protein, 78 aa, Oryza sativa
  Clone ID: PAT_MRT4530_27051C.1.pep
MVEEAEEAVAATWVVQSTTPAQSSVDMGRLVVALPLAVPSLWLEEAPSPLHHAGAPNPDLLEGTVVLLELSCRLSDAR

SEQ ID NO: 124300 - protein, 129 aa, Oryza sativa
  unsure (1)..(129): unsure at all Xaa locations
  Clone ID: PAT_MRT4530_27052C.1.pep
MGFASCVAVCLAFAVLLPWHATATSPTGTIQRETKQQILASIPPHWQENPVLFLTSPSGKYTAYFLRSQTAPGAGGLGADFCYVEVLDTSDPGAEGRSVWDSESLAVSTVNTCSLVFSXKGLEVFDGSN

SEQ ID NO: 124301 - protein, 127 aa, Oryza sativa
  Clone ID: PAT_MRT4530_27053C.1.pep
MAGRPAPAPRPHRLPLALALQSPLPLLPATSHPSATGGGSAHVADTSVPGRIKEDSAATASAKSASSGEDVAAKREGDKTAIAAAKSSRRKKEQQQQQQQQAMPWVKLLSRSSQGWKLNLGLLDTEL

SEQ ID NO: 124302 - protein, 130 aa, Oryza sativa
  Clone ID: PAT_MRT4530_27054C.1.pep
AHIMDEQENIKIKSSKCWNPIWPPATLLTSNGRQIYIQPPFLAREYLIESSQSPLSNGSSLIAKFHVVLLQSQGVASPILGLWACNFVWDPGPSGAHVENKVDLHRQDQQPTERCIDRKGTTQHLLSSTH

SEQ ID NO: 124303 - protein, 64 aa, Oryza sativa
  Clone ID: PAT_MRT4530_27055C.1.pep
NPADNSKRMAAAKGAFINLTWHPLRLPWLSLEELAYLPMTFGPQRSIGGGSRRGGVGAGGHGLR

SEQ ID NO: 124304 - protein, 124 aa, Oryza sativa
  Clone ID: PAT_MRT4530_27056C.1.pep
LLLWSVRVAPLGCSSLARAPALALGARYCVLPSGASFPGVGAPGGMLVSYVVLPSVGACRLRLVLPPFLSLPLLAFRSRRRPGVASVRLCPCWGASVGPRAALAGGALCVAVCALSVCVCVVVR

SEQ ID NO: 124305 - protein, 793 aa, Oryza sativa
  Clone ID: PAT_MRT4530_27057C.1.pep
MLPDGGADDEERWLAEGIAGVQQNAFYMHRALDSNNLKDALKYSAQMLSELRTSRLSPHKYYDLYMRAFDEMRKLEMFFREETRRGSCSVVDLYELVQHAGNVLPRLYLLCTVGSVYIKSKEAPAKDVLKDLVEMCRGIQHPLRGLFLRSYLSQISRDKLPDIGSEYEGDADSINDAVEFVLQNFIEMNKLWVRMQHQGPVREKEKRGKERNELRDLVGKNLHVLSQIEGVDLDMYKETVLPRILEQVVNCKDELAQFYLMDCIIQVFPDEYHLQTLETLLSAFPQLQPNVDIKTVLSQLMDRLSSYAAASPEVLPEFLQVEAFAKFSNAIGKVIEAQVDMPVVGAVTLYVSLLTFTLRVHPDRLDYVDQVLGACVKKLSGNAKLEDSRATKQIVALLSAPLEKYSNIVTALELSNYPRVMDYLDNSTTKVMALVIIQSIMKNTTCISTSDKIEALFDLIKGLIKDMDGAQNDELDDEDFKEEQNSVARLIHMLHNDDHEEMLKILCTVQKHILQGGPKRLPFTVPSLVFSALKLVRRLQGQDGDVIGEEVPATPKKIFQILHQTIEALSCVPSPELALRLYLQCAEAANDCDLEPVAYEFFTQAFILYEEEIADSKAQITAIHLIIGTLQRMNIFGVENRDTLTHKTTGYSAKLLKKPDQCRAVYACSHLFWTDDQDGIMDGERVLLCLKRALRIANAAQQMANVTRGSSGSVALFIEILNKYLYFFEKGIPEITNTVIQDLIELIRTEKQSENTVADPSTEAFFASTLRYIEFQKQKGGSIGEKYEQIKTT

SEQ ID NO: 124306 - protein, 138 aa, Oryza sativa
  Clone ID: PAT_MRT4530_27058C.1.pep
MAMACRTLELTLLSASDLRGVNLVSKMEVYAVVYLAGDPRARQRVATDRAGGRNPSWKGKDATVRLAVPASGAGSGALQARRAGSRWLDDGVPGGGSGGVQGAPPPQPPLYGYRQLPPIPQPVPPMGAVEGGGVRAGR

SEQ ID NO: 124307 - protein, 246 aa, Oryza sativa
  unsure (1)..(246): unsure at all Xaa locations
  Clone ID: PAT_MRT4530_27059C.1.pep
MAMACRTLELTLLSASDLRGVNLVSKMEVYAVVYLAGDPRARQRVATDRAGGRNPSWKGKDATVRLAVPGLGARSGAVRVLLRAERARLRRERDVGEVXLPLQDISPAPGRPTAGAVAFYPVRKVGSSRTTHGVLNLSYKLGGVVHLDPAAAAAAACSCKPAAPAAGGSTMAYLAAAAAAYRVRRRRSRRCTATASCRRYRSRCRLWARWRAAACAPAGEAATGKNGVLQNMNAKLYSVLNKYINM

SEQ ID NO: 124308 - protein, 49 aa, Oryza sativa
  Clone ID: PAT_MRT4530_2705C.1.pep
MTGKKQSDVELNDFQKYACPFLHGKLTVGNDHCSFIGVIVNIKLPVVYA

SEQ ID NO: 124309 - protein, 688 aa, Oryza sativa
  Clone ID: PAT_MRT4530_27060C.1.pep
MAQHTAGGTEDGSAVERKRGEKRGKGGGVVINIKADNISGAAEEIIHFLMGSNKGDVIHFDGWGGLGASAVLKAIATRLKSSASLLGEAATVMKAGMDKIIHVDCSLWQNTRAVQKAIAIDLNLPQHVIALFDQWDEKDDFDGVHQVARGPIQHVKEEILYNLRDRGFLVIFHNGSGRYIDLKDCGILVAGLLGKRVLWTSRGRFSLHSNDIREVHERKLAESNVSIYADLSSDSILNSVRHLLQVEAEEVAFYSGVLEPDMSTKLVMECILYKALRGDDYGINWGTNAANYWVCDGIIKDATNGDRSAWEIAEALHSAMHLEDWHQVWAVNIRDAFGLSSKEWRHTNRWISTTHQYVATVKVPPQATSFFVTEAGSLIDKSSSMILRGDMFGHSNRSRLRVLHLSQCTFSFSSPPFLGCSNLRFLLLDHCKDKDIDDQMAAHLDEEDEHQQSKMGHHNRTCFEELWVLDISYTEWYWLLSEEMMDQMVHLHELNVKGIKNATWISHLGPGHVARSNSCRPRNLGKLRVTCCEITNQASSFVEFPDLSTSSIKTIALDGCVELEKLAHNFLPLLLESFIFVSNVAAKIKIISFQGCTQLKSLLLRGLLENLVEMDMSHTAIKMLDLTAMQAPRLNKLILLGCEKLRAILWPREWKKLELYVLHIDTTDARWVGEDKSSKKEAASGDTS

SEQ ID NO: 124310 - protein, 85 aa, Oryza sativa
  Clone ID: PAT_MRT4530_27061C.1.pep
MWPWISLWFCRWVPAQSVFYHLYNQVSYMSLDEISPLTFSIGNTMKRISVIVASIIIFHTPVQPINALGAAIAILGTFIYSQAKQ

SEQ ID NO: 124311 - protein, 96 aa, Oryza sativa
  unsure (1)..(96): unsure at all Xaa locations
  Clone ID: PAT_MRT4530_27062C.1.pep
LFYFFFYLILFXYYFYLYFIIFYLFYFFLFXIIYFIFKFIFIFLYXFINLFIYFYYIIIYFVIFFIFNFFYIIFFHFNIYYYYXFYFNIYIFYLLY

SEQ ID NO: 124312 - protein, 227 aa, Oryza sativa
  Clone ID: PAT_MRT4530_27063C.1.pep
MAADSLDMSLDDLITNKYKRRSRPDPAPSARRFHSRAATRAAAAPYHAITFQAPPTAYTHPTPAAPVETGTKLHISNLDYAVSNEDIKELFSEVGDVKRYSINYDKSGRSKGTAEVVFSRKSDALAAVKRYNNVQLDGKPMKLELIGINIEPPPPAMFGFAAPAGYFDFPPKRGGRGWPRGRGGFGGRGRGHVGRGRGRGDRGSRKISAEDLDADLDKYHAEGMQMS

SEQ ID NO: 124313 - protein, 278 aa, Oryza sativa
  Clone ID: PAT_MRT4530_27064C.1.pep
TRPATPRPMAGSNPPPKPWERAGTSSGPAPFKPPSGGSTSDIVEASGTAKPGEVVSAAESNVASNVNSTISRPVPPRPWQQQGYGNSYGGYGSSMYSSLGGFGGPYSSGGLYGNNMYSSYGGGYGGMYGSSGMYGGSMYNSGMGGPYGGYGMGMGAYNQGPNSFGPPAPPPGFWMSFLRVMHGVVNFCGRVAFLFSQNTQAFHMFISALLQLCDRTGMLYGELARFVLRLLGIKTKAKKGGVQGAETSSFEGPGHHFAEAPKANNSWDSVWTDDGSGK

SEQ ID NO: 124314 - protein, 427 aa, Oryza sativa
  Clone ID: PAT_MRT4530_27065C.1.pep
MRKEKIPHQAPFAIQAAQLLGRAIGAGLFAITPAGERGMCCKAIKLEGGYIKIKRSTFAVVIVFTVMLIALIIALMRYMSKKSKADETIDSTRSSQDNKVHGEVINRWSGLYKFSKGEIEKAINYANSKICLGSGSAGQVYQGVLPSGQLVAIKHIHKSAMSGSFMREVEGLSKVRHPNLVCLFGYCDDGGDQYLVYEYCANGNLAQNLLRSDSVLSWPARVKILRDCASVLRFLHTHPDGCIVHRDIKLTNILLTESMEPKLSDFGLAKMLQMEETKVFTDVRGTIGYMDPEYITHSKLTCASDIYSFGVVALQLLSGRKVIELDTVARDSLTKKARDVVSGKKPLDEFIDPRVRDEVNIEDFVLILKIAVLCVAHSSVGRPTIKDVFEEMDKALTNTDSKVGRAREEINPSSTIQYQYATGLNIV

SEQ ID NO: 124315 - protein, 78 aa, Oryza sativa
  Clone ID: PAT_MRT4530_27066C.1.pep
KSNHPKLFMEAAFLVKCLDYRIHNIYLAKPSSSERFYNHNSDAIGSNHLKLHRQISADGNAESRLELNKDAIGVYQVK

SEQ ID NO: 124316 - protein, 93 aa, Oryza sativa
  Clone ID: PAT_MRT4530_27067C.1.pep
MAVLIRKLVLSLIVMVMVFLVVSGTAAARPLVGQEWTGEDTAGDDSVVVRFLRQLYLHKLAGPGIEIFLLKRSCGVEISVDNPAAVYRKAYIK

SEQ ID NO: 124317 - protein, 47 aa, Oryza sativa
  Clone ID: PAT_MRT4530_27068C.1.pep
WRLVTLSGSRFGVSLLLGLCVGDVGVWVVVYFFYFPDINQADTADRH

SEQ ID NO: 124318 - protein, 92 aa, Oryza sativa
  Clone ID: PAT_MRT4530_27069C.1.pep
EKINKKNKYNTYFYIGRRLWLELPFNTTAVVNHIGKNSPMGGLVIINPTLFLPTVLPTLLWSPACLICAHYLFWVYPLFVHPPVESLLAFHH

SEQ ID NO: 124319 - protein, 185 aa, Oryza sativa
  unsure (1)..(185): unsure at all Xaa locations
  Clone ID: PAT_MRT4530_2706C.1.pep
PRVRRHFAYEERENAKLRRLSPRRNRLHGVVVGLKIRVGARWPADDDIEASPRPAFPGMSATGRGGPXRILVGGRRRGAVSLRAVLARRIHVGEASTSTRRGGSASVRGAAARRGGSTSVRGAADARRRASGRGGLSGTAGARRKMEDLRSFVGVGFVLGAHLFLSTRGIPGIGLLFCIVLLETV

SEQ ID NO: 124320 - protein, 1109 aa, Oryza sativa
  Clone ID: PAT_MRT4530_27070C.1.pep
MAGRGGRDPRRGYDGGYGYPRGGGGQGGTNRGRDGQRGGGRNGPRGGRFPGGRGVEPRRGGDVLGGGQGGGRGTTAGAGGLVRGGSELAVGAELRRRVPTCHVNDFPELGIGGTPVLVRRWRPRDHRDQHDHQSQRHHHRHHHHQRQRHHHHHQRQQRRGSRTRDPRVRRGPLRIPYGEDEKEEPPATPIASSNKNKREEPPTKHRPMARPPGGGGPLSKGEVKLLVNHFSVDYPKESTFFHYEIRIKLGDGPNRKLSKAELLTVKNELFEHESLQELSSAVAYDGERNLYTCAELPEDCIVPVSKFRVKDSSRTYIVSVKLKKPLPLSQLLEQRPGPRDVMQGLDVIVREASSFGKIVLGQGFYPQSGSEAISDSNIVALKGTQQSLKCTQKGLILCVDYSVLPCWKAGSVLDLVKTMKFMEYPLLEDQLKKLNNALKGLCVTVSHRKTEEKYTVKGLTDKPADQITFKDSKSGQTTKLIEYYKETYKKEIEHPMLPCLDLSKSKSKQNYVPIEFCNIPEGERYPVARLDDKKSDNKGEQEKPSTKTTLRKISIKVASSRKEEILDLVGNAQDGPCRGKIAQRFRISLDAAMMEVTGRILAPPTLELGTGTSRGQTFKFTIHQDDCQWNWKLKKYDKRVVAHGGTLNCWGVVDFSEGDLESKFIDKVVRKCSALGMVMTRKPCYEHVSNMEVLSDPKSLRDALIEAKRAAEEEDKKLQLLFCPMLNRCHGYKTLKLMCETELGIQTQCFLSTAAKLDEKRQDQYITNLALKINGKIGGSNMQLDPDSIPVVSAKDFMFIGADVNHPPPGNVSKDIPSIAAVVASVDKGASKYVTRIRAQYHRCEMIQNLGDICKELIGAYEKVNKKKPDSIIYFRDGVSDGQFDMVLNEELADMENKIMVGDYPKITVIVAKKRHHTRLFPKDRNQRQTKNGNVLPGTVVDTDVVDPTAYDFYLCSHKGEVGTSRPTHYYSLLDEHGFASDDLQKLVYNLCFVFARCTKPVSLATPVYYADLAAYRGRLYYEGMMMLQPAASAASASEAMMPAAQPQAAAAAAAAASPSSSAASSSEGMTASQPQAPAAEAASSSAGAADFRELPPMHGDLLNNMFFL

SEQ ID NO: 124321 - protein, 106 aa, Oryza sativa
  Clone ID: PAT_MRT4530_27071C.1.pep
TLPPPFHLNTNEPASNFYHFFQSCAKPLPFPRKTRGLNFFFPQGSLFLKMDLGFSLKETPPRGGGPKRCIFLFQSPGGPQICFPQENFSKILFFFPKKRGYRGGSP

SEQ ID NO: 124322 - protein, 193 aa, Oryza sativa
  unsure (1)..(193): unsure at all Xaa locations
  Clone ID: PAT_MRT4530_27072C.1.pep
FFFFFFKNSSTLGIICISASTTRLPTRQSXNSSSPKQRXMIPNSPXPVCTHSQSHHHIFPGAHPHHTGXXIPSTYSFGAHPHIFPPHTLHTGGTTTHSHGXAHTPTLIHSHSVPRLHTSISAPNRAALPATXFQXLVIXSWGRHLGAGXSLCAHITSISPXATPLQSAHHTAHDTLHSXGXPSHPLHTHVFPY

SEQ ID NO: 124323 - protein, 716 aa, Oryza sativa
  Clone ID: PAT_MRT4530_27073C.1.pep
MRPLRDYQDGSAQYSSSLATRVQEAWNKWEIQCLVMASFSLQVFLLLSAPFRRRHGSRLLNGSLWVAYLMADYVATYVLGRLSFLLAAAGDTRHQLALFWAPFLLLHLGGQETITAFSMEDNTLWMRRLLDLAAQVTMSVYVVGKQWKGDRLLVAPMVLVFVLGAVKYGERIWALRSAAARAPGSSSIASLAARTYSNIASFITSLADVLPESGRGVMAHYRSMVSISSQDKVSIESILKEASMEFQASLDFFMDVSPSNVSGSYSRYHRIKNALVEIKSSKNGYGMAYKLAEMQVSLIYDYLYTKFGTVRFQTFPISKSKSNPTMAAALQWLVSLGLTSVALVLFARAMAGNTTSSKFKYSRPDVLISYILLVGAIAMEISSIFIALTTSCWAGIAVVKHLHLHVGEWSGKLAQYNMVDACVQERERRRQTAASGAVGKLIRWILAPCDSETPQPHVVVSLEVKKLLLNKVLEIATDVDNNRWDFSRFQGQWALWVANRVNGGDSDPAALGPAHRALSASKIQELDFVSTVVAWHLVTTICLLPGDGPGELTNPSKDLSSYIMYLVAKHGMMVDSNGHIVIARSRMEVQASSQMLDFLDELHEDGFIQELRDGDRQYNSPDMIVRHRSRPALTTARKVCVELLNIPEARDRWELIAAVWTEILCYMALNCGATFHVKHLTTGGEFLTQAKMLLFVIRLPFLMKSPLEGIIMPPFM

SEQ ID NO: 124324 - protein, 135 aa, Oryza sativa
  Clone ID: PAT_MRT4530_27074C.1.pep
MLEASYVDQAQVAAEERATTFLSSQWLASFPFSLPRCYRIELPCRPTTVAFLSSLMRQRRISSSSSRRRDTNHTILSLPPHTPRHILGIRLPAPARSSDHVLALIFDVVGRVCLDLAGCAILGICLPVPRCQRSE

SEQ ID NO: 124325 - protein, 114 aa, Oryza sativa
  Clone ID: PAT_MRT4530_27075C.1.pep
MDVSRRKKWVAWVAAVTIFVVLMLVTPAIPQNEEYHDFADQRRLFLGIPNTLNVISNIPFFFVGVVGLVLCHYKNYFRLNSQGELWSWTLFFAGVTAVAFGSSYYHLKPNDATL

SEQ ID NO: 124326 - protein, 69 aa, Oryza sativa
  Clone ID: PAT_MRT4530_27076C.1.pep
LVPSDNERYKRSGPHGQVIYLSNRAGIIVIRSVSPVALCGTTVKFVLLCGLHNCVFDRHNQARIEHALV

SEQ ID NO: 124327 - protein, 273 aa, Oryza sativa
  Clone ID: PAT_MRT4530_27077C.1.pep
RQRQRQPCRRSSGGPSRSRRRAPRAGAVASRWLARGTRGTRRPPPRRRTRRRPATAASPARPRRPPTRSRPRTGDATASLRRSSRRTSTPPPPPPLPRHRTANRRRRRRRAGRVSLEQGCGQEAQCRRHRRRHPARRRPRSRASSRRCSPRRASQESPRLQRPSLCRRHRRRFRSHRACRRRRRRRRTPRRRSGGPYASAPAPRRRWCGAGWRSWCGASPMWRRTRTAATRAPISSSWRASAAPTATSCRCTARRASRPTAPLYCAESSLLVH

SEQ ID NO: 124328 - protein, 71 aa, Oryza sativa
  Clone ID: PAT_MRT4530_27078C.1.pep
YFGGFCEPSRDLNKVSTMRANCCIGLQSKVHDLRVMMEDWRSYLSLPPSLKRLSALAWRVPQNCSLSWSHQ

SEQ ID NO: 124329 - protein, 100 aa, Oryza sativa
  unsure (1)..(100): unsure at all Xaa locations
  Clone ID: PAT_MRT4530_27079C.1.pep
ETPLPGRARLYLAAFIGHRLPSQTNTNLFCTFCPHSCASGKNFCDGHLSXISRGQTRLTSELFRDRLPEKKLQFVDMSILLILLSPRPGCHRNENFNLAV

SEQ ID NO: 124330 - protein, 66 aa, Oryza sativa
  unsure (1)..(66): unsure at all Xaa locations
  Clone ID: PAT_MRT4530_2707C.1.pep
AWGDGLGLVAEGMVRCSSKRRCTGWFHGVEWGTVGESLVRPLGXLTMVTPXGVITVLGGVVITFPH

SEQ ID NO: 124331 - protein, 400 aa, Oryza sativa
  Clone ID: PAT_MRT4530_27080C.1.pep
MPELPEVEAARRALEAHCVGRRIARCAVADDPKVVVAAAGGRVAFERAMVGRTIVAARRRGKNLWLRLDAPPFPSFQFGMAGAIYIKGVPVTKYKRSVVSSTDEWPSKYSKFFVQLDDGLEFSFTDKRRFARVRLFEDPETVPPISELGPDALFEPMSSDSFADSLSRKKIGIKALLLDQSFISGIGNWIADEVLYQSRTHPLQIASSLSRESCEALHQSIQEVVKYAVEVDADCDCFPVEWLFHHRWGKKPGKVNGQKIEFITAGGRTTAYVPQLQKLTGMQSSKVVIANPEQVAENDDAKEIDTDPEDADNLNTKKRGATSRVARGKQKRDAIGALSRKTRKNGGGKEKPGSDYSEDDGETAEPNKVSTSSKGEKADPVRRSSRTASKPRQVNKLKER

SEQ ID NO: 124332 - protein, 172 aa, Oryza sativa
  Clone ID: PAT_MRT4530_27081C.1.pep
MASFMALAGACRRRPQLLRPSAARRLSFVFLSRPFPPAPAPLLQLIQRQRHRSSSSSSISENGAAAPVTENLQAAAARRRRQSAGGRPAAPRGGRGGGGVRPTPPGNPREAQKGGGVIHAVAPPPAAPTSSKPKPEPPGYPREGGGGNGGVVDDVSPSSTDTSTSSSSSSSS

SEQ ID NO: 124333 - protein, 115 aa, Oryza sativa
  unsure (1)..(115): unsure at all Xaa locations
  Clone ID: PAT_MRT4530_27082C.1.pep
EXNEKWSSDHXPXHGEAIGEGLGXLPLLRSPLVDLPIGVSCRSLLVVELPWLIGWHLTCPRWGNELRYXRLRRLLPLIYPLVPIVAFGXNSSMNKNWFECYXSSQCLDSNSFVHF

SEQ ID NO: 124334 - protein, 92 aa, Oryza sativa
  unsure (1)..(92): unsure at all Xaa locations
  Clone ID: PAT_MRT4530_27083C.1.pep
PFAENNYKVDENRHQTRXXINRMMSRIKLMYEWANNSELTRXTGPKFTSLHMRAKEEATCRFWARSAQPLVRPNPLPPSQRHLIQGSPGRLR

SEQ ID NO: 124335 - protein, 97 aa, Oryza sativa
  unsure (1)..(97): unsure at all Xaa locations
  Clone ID: PAT_MRT4530_27084C.1.pep
MTVVTVGKVGNTHQSSLGSHLSRPGEPWIKWRXRGGGGFGRTKGWADLAQNRQVASSFALICRLVNFGPVHRVNSELLAHSYISLILDIIRLIYYLV

SEQ ID NO: 124336 - protein, 122 aa, Oryza sativa
  Clone ID: PAT_MRT4530_27085C.1.pep
KKNLFRGGGPRFLEQPGGFPWVFRDPTPLVLLGAQGPFFFIPGKGETGGPGGFLGFFPEPFFYVGAAPSRGVLPFCPGMGFVELKFRGGAPKKPRGRNWGDTPTPLGGFPRFFSLLKNRPRF

SEQ ID NO: 124337 - protein, 89 aa, Oryza sativa
  Clone ID: PAT_MRT4530_27086C.1.pep
MVYGYGKSNMPHPNRKRKGTDTQYDYWEELLVMVSGLYALFCVFLVLFIFFDSFKQESNKLELSGKEEKKKLNGENRLSRDIQNLLYIK

SEQ ID NO: 124338 - protein, 50 aa, Oryza sativa
  unsure (1)..(50): unsure at all Xaa locations
  Clone ID: PAT_MRT4530_27087C.1.pep
KRXXPTRKDKKYWTITEDHKKADTSRRRKDLKWLPQQRKNRGRQGTQREA

SEQ ID NO: 124339 - protein, 58 aa, Oryza sativa
  Clone ID: PAT_MRT4530_27088C.1.pep
ILPQFVSVLFLVPFYGLYLNIYIKRTYPVPMTVSTHQVHCCTVSSDNLIPTMNFRSPV

SEQ ID NO: 124340 - protein, 77 aa, Oryza sativa
  Clone ID: PAT_MRT4530_27089C.1.pep
MQRVTKFICVVFVQTKRREKRVYIVMSLVAGNHRSTVDHPHVKFTNYAYEIDSLIRFHYFTTKRVEIWFGLHHKICA

SEQ ID NO: 124341 - protein, 118 aa, Oryza sativa
  Clone ID: PAT_MRT4530_2708C.1.pep
LRWEGGGPLPSAAGGGVQRREEGNLRSRVPRQREAVGQRWPAPNLKVRLGEDSRCGGGAVGRRCDGVGGLEFIQGILSIFSAASGLQTNFTKCLITPIHTLAGRSVLVQSVVSSILVH

SEQ ID NO: 124342 - protein, 107 aa, Oryza sativa
  Clone ID: PAT_MRT4530_27090C.1.pep
KQVRPLGVAVPGERRGKVCSSVSVDLFLQRRHRPDRYSYGQARYRGETVGDVQWFFEMCFFLPSCYSDHRGICLWLVGGYVLEIRISWFWSNQLLRFLHRKNMGIVG

SEQ ID NO: 124343 - protein, 93 aa, Oryza sativa
  Clone ID: PAT_MRT4530_27091C.1.pep
CHILLKTEGYINKTCLRVRARGTARYTCSHILPPLQPIYIASDLRPVMSNLLQNALLGGIAPTPISPFGFRFVSSAPSLLPPDATPTPSQHNP

SEQ ID NO: 124344 - protein, 362 aa, Oryza sativa
  Clone ID: PAT_MRT4530_27092C.1.pep
MGGKMGKDVAAGGESNRRPPPPPPMPLGLRLQLIGLSAAIDAVERRDGTVNRALYSVLVEHLMSVRADPSPDAATGAVRSFDFTIDAARGLWARVFAPAAAAQAAAPMPVMVYYHGGGFALFSPAVAPFDGVCRRLCGDVGVVVVSVNYRLAPEHRYPAAYDDGVDALRFLDGNGIPGLDGDVVPVDLASCFLAGESAGGNIVHQVANRWAATWQPTAKNLRLAGMIPVQPYFGGEERTPSELALDGVAPVVNLRRSDFSWKAFLPVGADRDHPAAHVTDENAELAEAFPPAMVVIGGFDPLQDWQRRYVDVLRRKGKAVEVAEFPDAFHGFYGFPELADAGKVLQDIKVFVQSNRAARATA

SEQ ID NO: 124345 - protein, 128 aa, Oryza sativa
  Clone ID: PAT_MRT4530_27093C.1.pep
VSPPHARPSAASSSATTSAAAWRSKLPPTAASTPRSSSASPTGSTSTAARRMIDVSSRHTAAAHASTRACWDRSRRWPRAMAFSSSAASTGMRAPAAAALANFVRSRLDHLSCSSVTCSPGTRRRLLP

SEQ ID NO: 124346 - protein, 385 aa, Oryza sativa
  Clone ID: PAT_MRT4530_27094C.1.pep
MEKMLLLYCSSVAMQHERQIHARLFKFGLEHDTSVCNALVDLYSKSSSRLLDLLHTFHAVDKPNVVSWTALIAGLACHGRDEEAFLAFSQMRLSGVLPNSFTVSTLLKGSSSSLAFLHARKIHGYILKTSFESLDAAVGNSLVDVYVRFARMDDAWAVATTMAFIRDRFTYTSLARGLNQMGLQQRTLEMFVRMFHEDVDIDGFSIASFLSSAASLASIETGKQLHSCSVKLGLSSDISVSNSLIDMYSKCKCMGDARSVFQSISEPKVVSWNALMSALVSNEYYNEALSAFEDMTLVGAKPDGITFSLMLFACNRSGLVDIGIKYFNSMGNLFGVLPQRSHYTLFLDMLGRSGRLTEAASTIDVIPIQPDLVNVQGSIGILKSL

SEQ ID NO: 124347 - protein, 92 aa, Oryza sativa
  Clone ID: PAT_MRT4530_27095C.1.pep
KWFHGKGVWIPPGKAGPFNQSKCPGCTPKRTRKFPRGAPGCHVLNSLGIGEKAENRFPPTLFPCTTKPGVQAGCCFSFSPCVVPPLVSSFCF

SEQ ID NO: 124348 - protein, 95 aa, Oryza sativa
  unsure (1)..(95): unsure at all Xaa locations
  Clone ID: PAT_MRT4530_27096C.1.pep
LAVSVSHRGVKGTDQLALSIASKAGHVQEELHGAVRVVRGAAGGREAGGLQLRRGRWWSGGGGDVVGPPPPACAAAGGGGGEEEGXAGGRRRRTR

SEQ ID NO: 124349 - protein, 1585 aa, Oryza sativa
  unsure (1)..(1585): unsure at all Xaa locations
  Clone ID: PAT_MRT4530_27097C.1.pep
MFPKCTHESFSQKLYEKFKNHKRFSKPKLSRTAFTIQHYAGEVTYQSDHFLDKNRDYVVVEHQELLNASTCSFVSGLFPSVQEENTKSSKSSIANRFKXAKGQLHDLMETLSSTEPHYIRCIKPNNLLKPATFENANVLHQLRCSGVLEAIRISCAGYPTRKLFRDFLQRFRIIAPDFFKERNDEKVICQKILDKMGLQGYQIGRTKVFLRAGQMAELDARRTEVQNRAARAVQTILACKLHLLLRKQAAALKIQKNVRCYFASKSFSELRSSAITLQTGLRAFGAYNEYIRRKQNKASTDIQTQWRSHRDNSNYLKLKRSVLIYQCAWRIQVAKGKLRKLKMAARDTEALKVEKGKLEEHIEELSSRLCLEKKLRSDLENSKATEISKLQTTLHEMERRVEEARATQERESAKKVVEEALVLEREKIALLTKEVEELKVLLLKEQEEKNATNSAFSIAQERNDDLTKKVEVANENFKQLKDTLKSFEESTKGLETSLMMERQQNEANRREVGEAQQRVEELLRLVADANGKSTSLQTTVQRLEQSLIEKEATWLTERQESETTNKLLIEAHGRNEELLNKIEVAENDISKFRDNIQRFEETATTLETSLLAEKQHSAAIMSQLAETKQGNEELQKKLADVNRTNDILQDSLKRFEENVTTRDALYLAERQEHDETKQSLSKSQERNWELLQKVDEAEKRINKLLENAQRLEKHATARESLLLKTKQSHDSTTKALVEAESRNRELTKSFEDSDRKINLLEDSVNRLEERIAEKDSLLEIERQENNATKDEVTNAQNKIMELVNESQQLQDIRKHLEDNIKRLEEDATTREALLISEKQTHEATKRTLTETQLRNEELINKIQDSDKHALQLELTIERLQENASTMEALLLREREQSNATMKAHSESQERNSQLLKKFEDVDKKIGLLQGAIQRLGEQTTKDTLLLSERKEKDELKKVLSETEYRNEELVIKIEEENKKVEHLQDTITMLKENIAVQAANLEAERQENDRIRKSLVEAQERNDELFKKVSDSEYRAQQLQDTVQKLRQESDAVRKALAESHGRNEDLIRRNDDLLSRNDDLIKKIEDSGQVVAELQAALERIEGKAANLEAENQILRQQAIATPPSTAKSQAAFSKINAFQQRSPENGHILNGNVAYAEKSLTGPAETRPSMVVNQGSILNLINQKDYESGDKMQRAHNEVYQHQQPQDDQQLLLQYITQHLGFSGSKPVAALLLYQCLLHWKSFETAKTSVFDSILQEINSAIEAQHDTRSLAYWLSNLSTLSVLLQLSFKTTRAAISTPHRRRFSYERIFQASQTSNSGLAYFSAQPVDGPSGLQQIDAKYPALLFKQQLVDLIERGFVKIVEHVKEELNLLLEMWLQDLRASHTMKAKISLSSXKQHVANMIAQVFGMKSENLXRSLQLIRASYYGLFGIHTKITQRLEDLRILMSTHXADSGWEALRHIRQAVDFLVISLKPIRTWSEICDDVCRVRDLQQLERIVGMYWDDMNGTNIISAEFTSSMRTMMKEESNNATSFSVLLDDDSSIPFSLEDIAKSMPTIEETTENDLLPFVRENQSFAFILHRRD

SEQ ID NO: 124350 - protein, 86 aa, Oryza sativa
  Clone ID: PAT_MRT4530_27098C.1.pep
HLATFALALHQILLWTKWILHGPKSSLFLSKRVKMIYAVMWETPYQCQHGAMNTTAIAQARPVLPEGWLSSLCIAIQLGLCELDIH

SEQ ID NO: 124351 - protein, 113 aa, Oryza sativa
  unsure (1)..(113): unsure at all Xaa locations
  Clone ID: PAT_MRT4530_27099C.1.pep
MRIGLLLLSTHGGGYGQSMLYRGFNTGRGLGARSYALTKLFMVNQDYWHGWTIXEILQYMGEHNWYRYXEEALIANLALAKMIIXGVFYSVGQWIEHCYQCKPIFDVHRTGML

SEQ ID NO: 124352 - protein, 28 aa, Oryza sativa
  Clone ID: PAT_MRT4530_2709C.1.pep
DRWVITMFYSPLRCNEIHVIRGSGPFCR

SEQ ID NO: 124353 - protein, 519 aa, Oryza sativa
  Clone ID: PAT_MRT4530_270C.1.pep
MTATPAVIGLSAGNRLLSASFGPTDLMPDKVSLGVGGGGGGGGGGGGGDAMSFAAAPATPKLTAVAAHRLKLSPHGRAQVMRALRHHSSAAAALAPPPPPPPPPTPSPASRAAHAHDLESSLEAIVLLQRSMLEKQWELPFDDDNHAMAIGLAEDDDDTSKATVVVARSSVSARQRRMSGRRRGRTKNGAAHFAVSPELIQSRNRIYLRGTVSKELLTHKQVVHLSHKIKDGIWLQQQRSKLKEKLGNEPSYKQLAHSLKISPPELRSRMHESFLAREMLTMSNLRLVISIAQKYDNLGVELADLIQGGLIGLLRGIEKFDASRGFRISTYVYWWIRQGVSRALAENSKTFRLPTYLHERLIAIRGAKYELEDQGIAPTIENIAGSLNISEKKVLNATEAVNKVLSLDQQAFPSLNGLPGETLHSYIEDQNVANDPWHGFEEWYLKEEVNKLLNSTLNERERDIIRLYHGIGKQCHTWEDISRQFGLSRERVRQVGLIAMEKLKHAARRKNLEALLEDY

SEQ ID NO: 124354 - protein, 278 aa, Oryza sativa
  Clone ID: PAT_MRT4530_27100C.1.pep
MRAEHALCNHAVHPQVRQQPCLAPALVFEGAMMERAEDLRLSLSLSSPLIAPRTHHVAMLFHAPPEKRFLEMPLLPAAKRSEVVAAEEERAGLRGGGGSDEEDGGCGIDGSRKKLRLSKDQSAVLEDSFREHPTLNPRQKATLAQQLGLRPRQVEVWFQNRRARTKLKQTEVDCEFLKRCCETLTEENRRLQKEVQELRALKLVSPHLYMNMSPPTTLTMCPSCERVSNTNNNSSAAAAADRRGIRTTTAAGGGSVVDTAADGGILCHRPIAVRPQQS

SEQ ID NO: 124355 - protein, 330 aa, Oryza sativa
  Clone ID: PAT_MRT4530_27101C.1.pep
MAVSDHHCGGGGRSWRFAVACGVLSRCVKAEAAAAANGRHRHHPTMLLMPGADVEPDVREEAAAAAQLKIMYGGRMLVFDDFFPAGGAVVELVRAAARAGQDVRRAGAARRRVGDSRGLDAGLPVVRKVSLQRFVEKRRRMRVYHILYTDKSSHHVPGPGRYRSWQCRIIIAAVAGAGGFVVACGVLSRCVKAEAAAAAANGRRHHHHHHTTMLLMPGADVEPDVREEAAAAAQLKIMYGGRMLVFDDFFPAGGAVVELVRAAARAGRDDDGARARRRPAGGEEGVAAAVRGEEKSQAARGDGAVHTRHSPPMLPARTPGSGRTDDAAFY

SEQ ID NO: 124356 - protein, 141 aa, Oryza sativa
  Clone ID: PAT_MRT4530_27102C.1.pep
MEKELDGESTCAAPCEKKRLIPSCFEWGTVPATKKMKTEEDLEVLLAYPSLGEGKKKKKVVVKRLGKEEVERLLLNRVVPDWNHPIPDEYHRLDRNMYQNSAVTIRQRQDVIRAQFEAKGYVHVLAEADDDSDTDQEMHPL

SEQ ID NO: 124357 - protein, 45 aa, Oryza sativa
  Clone ID: PAT_MRT4530_27103C.1.pep
FLISVRELVTARAQHEYRAAKSDISFPALEWDLQQRRNHSPHATL

SEQ ID NO: 124358 - protein, 100 aa, Oryza sativa
  Clone ID: PAT_MRT4530_27104C.1.pep
DAASSKQEKRTGEGEASRHPGAVSDFCQKNREQAEPAPSKEAGVPRKASGSESLDCCWMADQGDCRVTLGKAEARGSDSFFLKSAQCNRTKPLHSIQFIT

SEQ ID NO: 124359 - protein, 93 aa, Oryza sativa
  Clone ID: PAT_MRT4530_27105C.1.pep
FAIFWVMRCHPRRCGGTCSVLWARPGAGKSGVRLWRVCRACLHRSALAPARAPRPARPHASFPERSIGEVHTLSAACICVLCAGTQKMCVVTC

SEQ ID NO: 124360 - protein, 322 aa, Oryza sativa
  Clone ID: PAT_MRT4530_27106C.1.pep
MGCTTSRQARHDLRHCPSPLALPRCQSFPARCAGDAGVHVVRLTSTTLGSLEVDKGAPRAAEAPPMRRMVPRTPTMTPPNEPEAIDAWALMAGLEEHSPLLVPPFARHSFSFPITAVPPELAAASRKVTPLPLVEKKKASPVARPRKAVLYFTSLRGVRATHEDCCLARAILGGYGVRVDERDVSMHRGFRDELHGLLGLGRGAALAKCWAPAAAPALPSLFVDGELVGNADELKRLHEAGELAARLAGCESAAPGEAAGACEACADVRFVLCGACSGSCKVYVDDGDDDDENPLDGGGGGGFRRCTECNENGIVRCPVCCC

SEQ ID NO: 124361 - protein, 81 aa, Oryza sativa
  Clone ID: PAT_MRT4530_27107C.1.pep
VGFVQACRSIMCPLRLSRSRRQLMPFTGSGLVQCFNVSILILGFLCCMHGTLDHWISQAFATNLAIEKEKRKTNNEIKPKK

SEQ ID NO: 124362 - protein, 263 aa, Oryza sativa
  Clone ID: PAT_MRT4530_27108C.1.pep
MESTHWVSSLVHFLELWVVSPPPILIEVDSLQGETNPYLQIKGTNKEIVSSAASALSLDDSYTTKSYLQIILESLPADENVHTGIHNQQAARLQELVEFIQSQGGSFNSDLSSPTREVSSTDSFMDYITVCSCWILTLPEKDDAKALTIHTFDPNLTSLVLLSALILIRTFRSLMRCDEKNPLELAGGLTCSIMHTTVECLLQSLFLGGYRFLLSFDLLSPMPQFSEWTCIDTSTTWLIGDGKTDGICCVRRNQDPLTYYPLT

SEQ ID NO: 124363 - protein, 45 aa, Oryza sativa
  Clone ID: PAT_MRT4530_27109C.1.pep
MEREQELAVREVVAALRLQTLAEGFVGASSEAGEASSGGKGASRA

SEQ ID NO: 124364 - protein, 77 aa, Oryza sativa
  Clone ID: PAT_MRT4530_2710C.1.pep
DRGRRHDQPQVDGEMGAAIGRYVRERRARVIRLSLESFTVGTLLRTKSAVVRLVCAVVMALLGTRSRRHADYDCGSL

SEQ ID NO: 124365 - protein, 114 aa, Oryza sativa
  Clone ID: PAT_MRT4530_27110C.1.pep
MAPWQASPPVGPVIEGAQPPPPLDDDFDHPDEEERERFVGCGCWSTRAWLLESGAEHDIVVALDVKRVRLFVGQEPCNMAEEEILIWFVPLLAPPTPPSSAAAPPCSRYRGASG

SEQ ID NO: 124366 - protein, 505 aa, Oryza sativa
  Clone ID: PAT_MRT4530_27111C.1.pep
MGTEAVHAAVAAGAGHRRRRVLLLPLPLQGHINPMFHLASVLHARGFAVTVFHLQPAGVNAPDASLHPAFDFVPVPADGDGDGAGGDYLEATLAGILDVNRRCEAPFRERLAALLEEAAPAGGGDVACLVADAHLLTLMDVARRLVVPTLALRTGSAASFRVFAAHRMLRDMGYLPARESELDAPVTVLPPAPYRVRDVMLTAGFGGHAQDQIYELVSRAVEAVRTSSGLILNTFDALEHDELAALRRDLDVPVFDVGPLHKLSPTAPPSSLLRQDRGCLEWLDSQAPASVLYVSFGSIASVSAGELVEAAWGIANSGHPFLWVLRPGLVRGAAAAAALPDGFDAATRGRGAVVSWAPQEEVLAHPATAAFWTHCGWNSTLESVCAGVPMLLRPCFGDQPGNARYAERVWRAGLALDGGGGEMERGKVEAAIRRLMEEDDAAGMRRRAGELKSRAAECITKAGSSCLIIDKLGAARSRADASTWFFLAPVRIKDAGYGTGTFDHG

SEQ ID NO: 124367 - protein, 52 aa, Oryza sativa
  Clone ID: PAT_MRT4530_27112C.1.pep
LIKKKKKKKKKKGRSVIRGSSLTYTSMQRHRFWVESPKVNSLPPVLQHLDWE

SEQ ID NO: 124368 - protein, 720 aa, Oryza sativa
  Clone ID: PAT_MRT4530_27113C.1.pep
MYMGRADAPWLPLLLLCSSCCFCIWPQKQILVAADTDPNDVTVLNTLFTSLNSPGQLKGWQASGGDPCGQSWQGITCSGSSVTAIKLPSLGLSGNLAYNMNTMGSLIEIDMSQNNLGGGQQIQYNLPTNKLERLNLAGNQFTGNLPYSIFSMSNLKYLNLNHNQLQGNITDVFSSLYSLTTLDLSFNSLAGDLPQGFTSLSSLKKLYLQNNQFTGYINVLANLPLDDLNVANNHFTGWIPSQLKKINNLQTDGNSWSNGPAPPPPPYSAPPPPNRPNSPGQNNGGSSSGGSSGIGGGGVAGIIISLLVVGAVVAFFVIRRRKRRAALEEHFEQHQPFTSFPSNEVKDMKPIEESTTIDVESLPSPASFSLKPPPKIERHKSFDDDDLSNKPVLKKTNVAPIKATVYSVADLQMATESFSMDNLVGEGTFGRVYRAQFTGGKVLAVKKLDSTVMPFHSSDDFAELVSDISKLHHPNLNELVGYCMEHGQHLLVYDFHRNGSLHDLLHLSDEYSKPLSWNSRVKIALGSARALEYLHEICSPSIIHKNFKSSNLLLDSEFNPHLSDAGLASFISDAEFQAAQQSAGCTAPEVDMTGQYTLKSDVYSFGVVMLELLTGRRPFDSTRPRSEQSLVRWATPQLHDIDALDRMVDPALKGLYPAKSLSRFADVLALCVQPEPEFRPPMSEVVQALVRLVQRANMTKRMLDGDTSSRRTDDQEQDFI

SEQ ID NO: 124369 - protein, 135 aa, Oryza sativa
  unsure (1)..(135): unsure at all Xaa locations
  Clone ID: PAT_MRT4530_27114C.1.pep
RTNCVLYFISISNIFLYFPEIVSFTHPWPNTHARMHRSPATIWTRGKRRCREEWMRRRREGEKGKPIALPREPRXAPPPPRTGXPRRQLRMRRRRRERDAAVGSYGCAAAAANGEFRRQLWMCRRHRERDTTAAT

SEQ ID NO: 124370 - protein, 441 aa, Oryza sativa
  unsure (1)..(441): unsure at all Xaa locations
  Clone ID: PAT_MRT4530_27115C.1.pep
TVLNTLFTILNSPGQLKGWQASGXSPCGQSWQGITCSGSSVTAXEPHHEANKLPSLGLSGNLAYNMNTMGSLIEIDMSQNNLGGGQQIQYNLPTNKLERLNLAGNQFTGNLPYSIFSMSNLKYLCLNHNQLQGNITDVFSSLYSLTTLDLSFNSLAGDLPQGFTSLSSLKKLYLQNNQFTGYINVLANLPLDDLTTSHIFAFLYRNVAKNHFTGWIPSQLKKINNLQTDGNSWSNGPAPPPPPYSAPPPPNRPNSPGQNNGGSSSGGSSGIGGGGVAGIIISLLVVGAVVAFFVIRRRKRRAALEEHFDQHQPFTSFPSNEVKDMKPIEESTTIDVESLPSPASFSLKPPPKIERHKSFDDDDLSNKPVLKKTNVAPIKATVYSVADLQMATESFSMDNLVGEGTFGRVYRAQFTGGKVLAVKKLDSTGMPFHSSDDFAEL

SEQ ID NO: 124371 - protein, 204 aa, Oryza sativa
  Clone ID: PAT_MRT4530_27116C.1.pep
ARGWDAVDDGDAVDDGDDAADWDTNDDGDDATDWDTDDDGDDATTDWDTDDDGDGADRYINNGAIRFGLPLHCNGLVLLSTMENSSMMLVCNPATREFAELPACTPDYLRIQRVGFYADQPTGKTKVVRYFIRHCNETYTDYSVGCEVLSLGSPAWRPLADPPYLVLNKTSPCILGGIYWIAILPSPPTGSCSTPGKMLRFDVC

SEQ ID NO: 124372 - protein, 189 aa, Oryza sativa
  Clone ID: PAT_MRT4530_27117C.1.pep
MKKASTGWTCQLEGWPSKLKGYKTWYRRMIAAKQSYWKEVGIAQCLALSLAGLKKDEPLLSAASYFWSYTLNTFLFRSFGEAVSVYLLGAKSFAEDFMIWFGRFYNSSNLCANTFFVYGANTKFELPYDLNLGQEDDLASRDNYLAIIAPWFLPTGISRGKKSFSNEFYQLASARRVPGMQLAESFGST

SEQ ID NO: 124373 - protein, 277 aa, Oryza sativa
  Clone ID: PAT_MRT4530_27118C.1.pep
DPRVDPAVRENLSPRRPRALPYLVLPPPMEVEQVLSITSNPKVDSITNGDNVIIIPSVSTEEKEHINGAAETNHVVMITAASMDRTDGDDRTMKEEETDGIAIARSASSNGSRQQDKKRGAFGLFRAMFMSFNGSASIKKRAAAAAATMGYQKKAEAAGGGAAADVERSSSDVASWKNLVDGMRPLRLHGHLEYYPPPSPDRSDGTSMTSSYSSAQDLQELVNGHGKEDEEEEKNSLETEDGGCSPNPIDMQAEEFIAKFYEQFRLQKSDSFNNRAY

SEQ ID NO: 124374 - protein, 135 aa, Oryza sativa
  Clone ID: PAT_MRT4530_27119C.1.pep
MPSGQPSTAQGRAWAVSAARGLARHGPTTLGPGVVDATRPEPAAAGGGKSHNPHHIAATLSDSELNSDEKSGQIALIISKRERTGEYGDRPDDDAAAPGRCCVCQLRVGGAAVARQWPPRGCHHRCCMHRPPGSR

SEQ ID NO: 124375 - protein, 933 aa, Oryza sativa
  Clone ID: PAT_MRT4530_2711C.1.pep
MQGTTTTKVGRNGDHADAGVEGPGTTRATDGRGGATVAARKVGDMRRMSCVEAKDSLTIVALQSLVTVERSVRGDLEEHIPKPSYPNTLYIRFTGIPRRLWRASVNPGTSQGVSTSTMLVWTQVGEIVFPVYTTVSISTGPSMTGSENAVVTTLGDSMSKDPPAEVENGTSTTSEPEKDPCAAKSCPSDENHEPARTTSEATRCADKEEGVTVISDRFVGVIDIDPHEPTSTRANAEAENQVATPAQHIEAINAIPRETPYDPVLNDDLARWTERLRESVANLSNAFEEAAAGAQPEQPPAGVANGEPPEQRTSPRQATPPPHGTSDLRDHLNGRREARHARDNKNRSRHRVSSRRRENEERGGHPSENRDRDNRHSRHERDDREQRMPGDTGQREVEDISMAKEDEEKTVFITPFGVFCYVKMPFGLITAGNTFQRTVQGALNDQLGNNIEAYADDIVVKTKTSDSLMDHLRETFDNLRRYRLMLNPEKCTFGVPSGKLLGFLVFGRGIEANPEKIKAIENMKSPTRLKEVQKLTGCMAALSSNHDIKMLRHYFQAHRVTVVSSFPLGEVVRNKDVVGRIPKWVVELSQFDVHFVPRTAIKSQVPADFVADWTMPENRSDSQTDSETWTMAFDGALNSEGAGAGFILTSPSGDQFKHAIHLNFRATNNTAECEGLLARIRAAASLGVKRLIVKEDSELVANQVHKDYKCSSPELSKYLAEVRKLEKRFDGIEVRHTYRKDNIEPDDLTRRASKREPLEPGTFLDVLTKPSVKEANDEDSVVVPDISSGATDAERAVADIETTDDWRIPLIKFLGSDKLPEDDTEAEKITRQAKIYYMIGNDLYKKAPNGGGHKFLFVAFDKFTKWIEATPTGEIKADNAIKFIKGIFCRYGLPHCIITDNGSQFISADFKDYCIGLGVKICFASVSHPQSNG

SEQ ID NO: 124376 - protein, 450 aa, Oryza sativa
  Clone ID: PAT_MRT4530_27120C.1.pep
MDWSGLPGDLLRLFSGRLHDPLDFLRFRAVCRAWRAATAAAAASPPPFLPWLLARPAPINPTAGPGPSLSFYSLSSAALRSVAAPSATCSLLGHTNSHLLFSDHGPLLLLVNPLTGADLPLPPSPFDAFSPITQGYYLPGPDSPVVLYDTRRIFFHHPAGGGGGWTTVPVVDLVAENMYHAGKVFVCNDRGHLTIFDAATLAVLGDAAPPPPPPVTLHRDAFKCSSFVPSGDDLLCVIRYFRRKNTEQAGELLEDCRALEVHRLEIAGEKSRWVQMRSIGDRMLFVGLYQGFSLRAADFAGLEGNCVYFFKMDRASRSFIYRFSMEDGQIEELPGPSMHACTWSKNSEQAGELLEDCCALEVHRLEIAGEKSRWVQMRSIRDRMLFVGLYQGFSLRAADFAGLEGNCVYFFKMDRASRSFIYRFRMEDGQIEELPGPSMHACTWFVPSLS

SEQ ID NO: 124377 - protein, 54 aa, Oryza sativa
  Clone ID: PAT_MRT4530_27121C.1.pep
MGAYTRNIFALFALIDVTASAATAITTMQDFPPTLAMVTMGPCKQNMMGGWEWV

SEQ ID NO: 124378 - protein, 67 aa, Oryza sativa
  Clone ID: PAT_MRT4530_27122C.1.pep
STTVVNLTLINLPGLTKVAVEGQPDSIVQDIENMVRLFIEKALINREWREYNLIMSKLWSAQPVSDC

SEQ ID NO: 124379 - protein, 98 aa, Oryza sativa
  Clone ID: PAT_MRT4530_27123C.1.pep
AGDHLSQPYDVLCAQPIRCDSLTSCRCYERARALLPTSILSRSTISRLSSTLEHEPLCSIQCSANLFSLMNSGQHWICHQVPSCHRSRAIVHFRPRLS

SEQ ID NO: 124380 - protein, 637 aa, Oryza sativa
  Clone ID: PAT_MRT4530_27124C.1.pep
EESLSSIIYNYKHGFSGFAAMLTEEQAEQLAELPEVISVQRSRRYKTTTTRSWDFLGLNYQNPSELLRRSNYGEDIIIGVVDTGIWPESRSFRDEGYGPVPARWKGVCQVGEGWGSNNCSRKIIGARFYHAGVDEDDLKIDYLSPRDVNGHGTHTASTAAGSVVEAVSFHGLAAGTARGGAPRARIAVYKSVWGRGGAGSGNSATVLAAIDDAIHDGVDVLSLSLGTLENSFGALHAVQKGITVVYAATNFGPAPQVVRNTAPWVITVAASKIDRSFPTVITLGDKRQIVGQSMYNEGKNSSGSTFKLLVDGGLCTKNDLNGTDVKGRVVLCISLGIPPLMLFPVALKNVLDAGGSGLIFAQYTTDILGITKNCNGTACVLVDLESANLIGSYISEASSPMAKIEPARTITGEGVLAPKVAAFSSRGPSVDYPDIIKPDVAAPGSNILAAMKDGYKLESGTSMATPHVAGVVALLKALHPDWSPAAIKSAIVTTEGVPRKIADPFDYGGGNINPNRAADPGLIYDIDPSDYNKFFGCIIKTSVSCNATTLPGYHLNLPSIALPDLRNPTTVSRTVTNVGEVNAVYHAEIQSPPGVKMVVEPSVLVFDAANKVHTFKSGLPFKISMQMLHNLGQPFPQ

SEQ ID NO: 124381 - protein, 1301 aa, Oryza sativa
  Clone ID: PAT_MRT4530_27125C.1.pep
MEVHSCQHRLVSLLLLCFWMLFIRAHGSRKLYIAYLGDRKHARPDDVVASHHDTLSSVLGSKDESLSSIIYNYKHGFSGFAAMLTAEQAEQLAELPEVISVQRTRRYRTATTRSWDFLGLDYQKPSELLRRSNHGQEIIIGIIDTGIWPESRSFSDEGYGPVPARWKGVCQVGEGWGSNNCSRKIIGARFYHAGVDEDDLKIDYLSPRDANGHGTHTASTAAGSVVEAVSFHGLAAGTARGGAPRARIAVYKSVWGRGGAGSGNSATVLAAIDDAMHDGVDVLSLSLEVQENSFGALHAVQKGITVVYAAGNSGPVPQVVGNTAPWVITVAASKIDRSFPTVITLGDKTQIVGQSMYSEGKNSSGSTFKLLVDGGLCTDNDLNGTDIKGRVVLCTSLGIPPLMLFPVALKNVLDAGGSGLIFAQYTTDILDVTKNCNGTACVLVDLDTAQLISSYISGTSSPVAKIEPPRTVTGEGILAPKVAAFSSRGPSVDYPDIIKPDVAAPGSNILAAVKDGYKLESGTSMATPHVAGIVALLKALHPDWSPAAIKSAVVTTASVTDERGMPILAEGVPRKIADPFDYGSGNINPNRAADPGLIYDIDPSDYNKFFGCIIKTSVSCNATMLPRYHLNLPSIAVPDLRDPTTVSRTVTNVGEVNAVYHAEIQCPPGVKMVVEPSVLVFDAANKVHTFKLYIAYLGDVKHSHPDDVIASHHDMLTTVLGSKEDSLASIIHNYKHGFSGFAVMLTEDQAKQLAEFPEVLSVEPSKTYTTATTRSWDMLGLNYRMPTELLQRTNYGEEIIIGIVDTGIWPESRSFSDEGYGPVPARWKGVCQVGEGWGSNNCSRKIIGARFYHAGVDEDDLKIDYLSPRDANGHGTHTASTAAGSVVEAVSFHGLGEGAARGGAPRARIAVYKSMWGSGSGAGSGSTATVLAAIDDAIHDGVDVLSLSLGTLENSFGAQHAVQKGITVVYAAMNLGPAPQVVQNTAPWVITVAASKIDRSFPTVITLGDKRQIVGQSLYSQGKNSSLSGFRRLVVGVGGSSPIVKIDPARTVTGNEIMAPKVADFSSRGPSTDYPEIIKPDIAAPGFNILAAVKGTYAFASGTSMATPHVAGVVALLKALHPSWSPAALKSAIVTTASVTDERGMPILAEGLPRKIADPFDYGGGHINPNRAADPGLIYDIDPSDYNKFFGCTVKPYVRCNATSLPGYYLNLPSISVPDLRYPVVVSRTVTNVAEVDAVYHAAIESPPGVKMDVEPPVLVFNAANKVHTFQQTCIMDRAKVANLVGWWPREVKGQRRLAIL

SEQ ID NO: 124382 - protein, 1176 aa, Oryza sativa
  Clone ID: PAT_MRT4530_27126C.1.pep
MPGVAAETAVASASGSGIWSRRRDEITLDRLQKFWNGLPPQARQELLKLDKQTLIEQARKNLYCSRCNGLLLESFMQIVMYGKTLQRDASDINRLNTTGETRIRQGEQEDPSVHPWGGLVATKDGILTLLDCFVNAKSLRVLQNVFDNARAREREREMLYPDACGGSGRGWISQRLASYSRGYGTRETCALHTARLSCDTLVDFWSALSEETRLSLLRMKEEDFMERLMRRFESKRFCRDCRRNVIREFKELKELKRMRREPRCTSWFCVADTDFQCEVFEDAVIIDWRQTLSEADGSYHHFEWAIGTDEGQSDVFGFEDVGMNVQVHRDGINLDQFEDYFITLRAWKLDGTYTELCVKAHALKGQSCVHHRLVVGNGFVTITKGESIRSFFEHAEEAEEEDEEDAMDRDGNDLDGDGLHPQKHAKSPELAREFLLDAAAVIFKEQVEKAFREGTARQNAHSIFVSLALELLEERVHVACKEIITLEKQNKLLEEEEKEKQDEQERRMRRRTKEREKKHRRKERLKEKERDKGKEILGLKSSDDNSCSTLRNSTSTNDESTNTPDSRDSASEEEDNSTVVDLCSPDTFVDQTACREISVQNNMDYCNTLTEFARTNSSDLFTSGQSKSSRWNLRLRKDFPQDQSSCCYDECGDENGSIGDFQWQSKERTRHSARSCNSVFTTNNRTRDRHNYISFSCDPRDDYVINDSCSSSSTGSGRETKMARKTGVERPRVQYRRCYPLDNFIVSKESRTGNTQQKNGAPKQVWEPMDSQKKNLLDNKNNGSGAVCNVDPTKLVEQDSSECPNFDAGHEPLSQSSERSRDICKSETDQPCENNEKNQATSCGGTIMVDKQDCYSTKDEGSGHDEELMMNSTSSDGLSSCTSEADRESSTSSVTSLSAQHQESSSSDSEESPERVNSIEEAPSTKTVSRSLLEACAGKGFREYQPKAMHRPHNDRLGFNIPPFQDQLLHHQSMHVPTHSSATMGLHNHPWAAPASGYMQYAQPSHFYSNPLGFGVPGKQSPDFPVQYSNVHHFPAPAFSYAPPEPIRKTTPSFRVMHTSPPYRNGLHQSQTVGHPHGDPTLERHPSQPKPLDLKDAPGENKSSPEGNASFSLFQFNLPIAPPAPPSSKDDTSGESATRTPLAQVQVQPCSREQTDVKEYNLFCSKNGSMFSFISR

SEQ ID NO: 124383 - protein, 80 aa, Oryza sativa
  Clone ID: PAT_MRT4530_27127C.1.pep
SSQGGKCVVDALGDKGDGLQDGVVEDLGEDGAEVQEEPPRCTNFHDQVDYAVQHALINQFPMHHQFSRRQQLRLRHQLRH

SEQ ID NO: 124384 - protein, 91 aa, Oryza sativa
  Clone ID: PAT_MRT4530_27128C.1.pep
TRIALMPAVAARSPVLVLWGDRDPFTPIDGPVGRYFSALPSELPNVTLHMLEGVGHCPHDDRPDLVHAKLLPWLDTLPSTTALTPVSSPAA

SEQ ID NO: 124385 - protein, 98 aa, Oryza sativa
  Clone ID: PAT_MRT4530_27129C.1.pep
AQYANRLSPRVGRFINAAGTTGFPTGKRAVSATQLMLGLFGTAPAPAPPLLELEPSQSVLGPVWHSSSSSSTPPGAGAQPNSFSSTKTGSGAGWSSLT

SEQ ID NO: 124386 - protein, 65 aa, Oryza sativa
  unsure (1)..(65): unsure at all Xaa locations
  Clone ID: PAT_MRT4530_2712C.1.pep
ANTLLQYTHHYYHQACMYTLHSPMSYSHVSSIVNLTSQVKKSKNSRKHGKRTQESXSRYLHHKNK

SEQ ID NO: 124387 - protein, 321 aa, Oryza sativa
  Clone ID: PAT_MRT4530_27130C.1.pep
MGTITAAKAAAAAAVFQSPCSPAPAASFPARSVRPDRRRAVSLSVSGVRTHVAAVEQAVVQDAIAQSEAPVVVVTGASRGIGKAIALAFGKAGCKVLVNYARSSTDAEEVCKEIEGFGGQAITFRGDVSNEADVDSMIKAAVDTWGTIDVLVNNAGITRDTLLLRMKKSQWQDVVDLNLTGVFLCTQAATKVMMKKKKGRVINIASVVGLTGNLGQVNYAAAKAAVIGLTKTTAREFASRNITVNAVAPGFISSDMTSQLGEEIEKKNLITIPLGRYGEPEEVADLVEFLALSPGGSYITGQVSYSRVTIQVLTIDGGMVM

SEQ ID NO: 124388 - protein, 48 aa, Oryza sativa
  Clone ID: PAT_MRT4530_27131C.1.pep
MAGDEIETANSGEKGWVDGLPEDLAMPTQASAMTSGDGNGDAAWLRIE

SEQ ID NO: 124389 - protein, 208 aa, Oryza sativa
  Clone ID: PAT_MRT4530_27132C.1.pep
MEGVVVRRVIPSDNSCLFNAVGYVMEHNRNKASELRQVIAAAVASDPAKYSEVFLGKPNEAYCAWILDSEKWGGAIELSILSEYYGREIAAYDIQTTRCDLYGQEKNYTERTMLIYDGLHYDALAMSPFEGAPEEFDQTIFPVDHKWSIGPVEGLALNFVKDEKRKRSYTDTANFTLRCGVCQIGVIGQKEAVEHAQATGHVNFQEYK

SEQ ID NO: 124390 - protein, 334 aa, Oryza sativa
  Clone ID: PAT_MRT4530_27133C.1.pep
MADASSRTDTSIVVDNDDKNHQLENGHSGAVMASNSSDRSDRSDKLMDQKTIRRLAQNREAARKSRLRKKAYVQQLESSKLKLAQLEQELQKARQQGIFISSSGDQTHAMSGNGALTFDLEYTRWLEEQNKQINELRTAVNAHASDSDLRLIVDGIMAHYDEVFKVKGVAAKADVFHILSGMWKTPAERCFLWLGGFRPSELLKLLANHLEPLTEQQLLGLNNLQESSQQAEDALSQGMEALQQSLADTLAGSLGSSGSSGNVANYMGQMAMAMGKLGTLENFLCQADNLRQQTLHQMQRILTIRQASRALLAIHDYFSRLRALSSLWLARPRE

SEQ ID NO: 124391 - protein, 75 aa, Oryza sativa
  unsure (1)..(75): unsure at all Xaa locations
  Clone ID: PAT_MRT4530_27134C.1.pep
GQAPKWWFFRGGXFXNEKGVDGPXVFWPPLRWXRKNFRGKEAPKGGXVGKEKGLFFPPPKTNLPLPPMVPGNPLV

SEQ ID NO: 124392 - protein, 48 aa, Oryza sativa
  Clone ID: PAT_MRT4530_27135C.1.pep
TARLTYYAGKMYYFSSVCCVMFVCCRLNAVWVTKFDGYEILSSVLLEY

SEQ ID NO: 124393 - protein, 534 aa, Oryza sativa
  unsure (1)..(534): unsure at all Xaa locations
  Clone ID: PAT_MRT4530_27136C.1.pep
MTAPAPASGGGCXDFQQSVRLKYVKLGYHYLITNGVYLLLTPLIALVAVHLSTLTAGDVAGLWSHLRFNLVSVVACTTLLVFLSTVRFLTRPRPVYLVDFACYKPPPERRCSRDAFMRCSRLAGCFTAASLDFQRRIVERSGLGDDTYLPAAVLREPPNPSMAEARREAEAVMFGAVDDLLAKTGVSAKEIGVLVVNCSLFNPTPSLSAMVVNHYKLRGNIVSYNLGGMXCSAGLLAIDLAKDLLQVHRNSYALVISMENITLNWYSGNDRSMLVSNCLFRMGGAAILLSNRWSERRRSKYELVHTVRTHKGGDDKCFGCVTQEEDGEGNVGVALSKDLMAVAGDALKTNITTLGPLVLPLSEQLLFMATLVAKKLLKMKNVKPYIPDFKLAFEHFCVHAGGRAVLDEIEKNLSLGEWQMEPSRMTLYRFEKHDLVRSLVHSNYLILPLFTMFGNTSSSSLWYELAYSEAKGRVRRRDRVWQIAFGSGFKCNSAVWRALRSVDPEEEALKKNPWMDEIDRFPVVVPRVSRISTD

SEQ ID NO: 124394 - protein, 89 aa, Oryza sativa
  Clone ID: PAT_MRT4530_27137C.1.pep
CFLGRAILMMTTDALSPPSGPFPDNAEIHKATLLAVNYAILFWGYHSVLEAILLDNGDLFGNCSWYSEKLVVERLIVQIITNLQDELEK

SEQ ID NO: 124395 - protein, 93 aa, Oryza sativa
  Clone ID: PAT_MRT4530_27138C.1.pep
GVRKIKLLISPPGINRPPSELSCLLTSRSRPLITRRGRCIQLLIDLPTAARRDGGGGEDATLQIRTHVLVDPGTIPDVTLREEAMEGHEGKLC

SEQ ID NO: 124396 - protein, 103 aa, Oryza sativa
  Clone ID: PAT_MRT4530_27139C.1.pep
MDGEGAPARRAPAASYYECTFCKRGFTNAQALGGHMNIHRKDRSAGGKSQGGGQHHEGGGSGSGGGGGQQHGRDVHLGLTLGRNEEERDGVDLELRLGHAHYP

SEQ ID NO: 124397 - protein, 833 aa, Oryza sativa
  unsure (1)..(833): unsure at all Xaa locations
  Clone ID: PAT_MRT4530_2713C.1.pep
MLVWTQVGEIVFPIYTTTPISTGPPMIGNENAVATNQGDSMSNNPPAETKNGTSTTSKLEKDSDTAKPCLSDMNREPTKMTSEATRSWCPIHKTRKHTLQTCWVFLNVRAEIRACKERGIQRVSPTRDVYCPIHKTKNHDLSSCKVFLGAMKALSPKSYVPIRDNGKEQGATPTSDRFVGVIDIDPHEPSVLHLLEDYGSSTTSVPREVLAIDDVGTSAHANAETGKQSTTPAQHIGAVQAILRETPYDPVLNDDLEHWTERLRESVTNLSNAFEEAATAGHQEQPPPGDANGEDPXTGDLRDQINGRREARRTRDNXPRRTHDRRQPTAPNAGCRAFGRSLRNVRWPERFRPRAIEKYDGSTDPEEFLQVYSTVLYAAGADDNTLANYLPTALKGSTRSWLMHLPPYSISSWADLWQQFVANFQGTYKRHAIEDDLHALTQNSGESLREYVRRFNECRNTIPEITDASVIRAFKSGVRDRYTTQELATRRITTTRRLFEIVERCAHTDDALRRKNDKPKTGGEKKPATDASESSKKKNRKNGKRKAQAEVLAAEYANPPKRPDPQSSDTKKAWCPIHKTDIHSLEDCLVFKKSLEKHIAFEKGKYRLPHRIITDNGSQFISANFQDYCIGLGVKICFASVSHPQSNGQVERANGIVLQGMKTRVYDRLMSHDKKWVEELPSVLWAVRTTPTTSNKETPFFLVYGSEAMLPGELRHQSTQVQKYSDGNQEEQRDIDVNLLEEHRERLAVRAASYQQALRRYHEKRIRARILSIGDYVLRRVQSQAGRNKLSPKWEGPYTITQVLRPGAFKIADGDGHELANSWNIDQLRKFYV

SEQ ID NO: 124398 - protein, 39 aa, Oryza sativa
  Clone ID: PAT_MRT4530_27140C.1.pep
HGSFGQSRQMNNVSTNSPRSGSNFISSIVGRGIVLLTKR

SEQ ID NO: 124399 - protein, 93 aa, Oryza sativa
  Clone ID: PAT_MRT4530_27141C.1.pep
LAAVASIPPRYSVLGSAGLSTATTPPLWRALLWTRPPPNSSSARISSSVPRAGASALLLPGLPSAPTKCLSLLLQQQHNDNQRVKCGDGKVRN

SEQ ID NO: 124400 - protein, 49 aa, Oryza sativa
  Clone ID: PAT_MRT4530_27142C.1.pep
TPNKLKYPIREKIGELANKKKKARSLNQTCPCFFPWEREQTSSCRKKSP

SEQ ID NO: 124401 - protein, 144 aa, Oryza sativa
  Clone ID: PAT_MRT4530_27143C.1.pep
SRPQGNQGCNGGWPSSALNYIKGNGITTESAYPYVARDQACKTQGGAYRINGFGSYSGCNGITSQLNNSPVSVTVDATNWSPYRSGIFSNCAASINHAVLAVGVVGGAWKIKNSWGTGWGEGGYIRLNGGNTCGVCNYAGVVPN

SEQ ID NO: 124402 - protein, 147 aa, Oryza sativa
  unsure (1)..(147): unsure at all Xaa locations
  Clone ID: PAT_MRT4530_27144C.1.pep
MEGQSPEPMVETSQDKFNETVHRALFDQSGVLMHTLQDVIKKIVPEIVAQRNQLGGQIEELHQYGHGEEYQYNDDLADRIAKMIEEQFGIKPKEHTFVYRLPYPEWFDRVPLPHRYKVLDFSKFSGQDDMSTMEHQXFLAQCGEASV

SEQ ID NO: 124403 - protein, 115 aa, Oryza sativa
  unsure (1)..(115): unsure at all Xaa locations
  Clone ID: PAT_MRT4530_27145C.1.pep
TSLSQPNLRKSVQADITQVHDRRNMGILQRCRASKKKRCEKKKRKLLKEVSPGPGSHLGRGPQSLXSXKRKXAVRDAVXHVGSSSRSRLRLDSAFKPVKVAARLXRRGPXRGAXD

SEQ ID NO: 124404 - protein, 927 aa, Oryza sativa
  Clone ID: PAT_MRT4530_27146C.1.pep
MADQLVIGSVKGVLDTLLGRISTVLADKARLLGRVRRDMQFIKDEMEMMDAFLLLLLKQQASTLDRHHYNKCAPWIKQAVELAHDCQDCVEQYAQCVAAGRPPSKGLLSHFQRVSRLVRNLSVCHRLASRIQDIKVRLSEVNDRRKTYDICPRFDTLSQLWEQDDDGEHGDETAWRRSFAFAEPPANLKKSTVNELIRWLMEDQSAGPRLIPIVGVGVEAGKIIAERVYQDSSVAILFDCKAWITVNGAQSHVQILKDILCQVVLPLNKFRSEMDGWNEEELVEKIRCYLRGKIFLVILHDVRDKLIWDHIKLAFPDDCPAGSAIIVTTDNDDKVAQTFSPYKTFNPDSSGHVLNFFLSRAISLLKHEREGWLRKILPCMLIYLEPQIYFMKMLLRFLYYNESGSSSQVYDALGNRGSLHDYWPKKMVELCYFDMPNKYRSCMLYLSIFPPGYKIRRTSLVRRWIVEGLITDGQEMNALEQADNCFDSLVGRLLLCPSDIDASGKVKTCTVLDLVHDVITDLVSGGYDTTFVVTVLAPRELARHLSIRFSTKLHISLSEPIDDILTFLKSLPSSSLLCLLKVLDLDSCKGLKRRHLKNICGIYSLKYLSLRDTDVTELPKEMEKLIHLETLDIRQTNVSVFPRKSLVLPRLKHLLSGHTVCPSEDIVRQQESFSAVHIPHRIGKMRNMEILSHIEVSHGGKELTAVSQLLKLRKLGVVFHDADKDGSDCLLHVIGTLHKCLRSLSVQIRSSSADDGSKGFDMSMMDATLPRFLESLTISGIRSGLPLWIEHLHKLTKVTLRDTSLTESAIHVLGKLVGLRYLRLRHRSYIPGNLTISGREFRNLQFLLIENSDIVSIRFDEGAAPRLERLVWRFTIMDSLVGIDHLLSFRELQLHGDCDTEKIGVILHDISAHPNDPSLKHIPAAGN

SEQ ID NO: 124405 - protein, 113 aa, Oryza sativa
  Clone ID: PAT_MRT4530_27147C.1.pep
KAKPDYALGQGPRARQRLARHPKAKKRAKQKPNIPLVAGLLFVRPHMPENPGRQQIKSRKDTHVLFKRGTNLGQKQNHLDGEGPLILLWDWDAQNLANTSGGPQFSGDRNYGL

SEQ ID NO: 124406 - protein, 115 aa, Oryza sativa
  unsure (1)..(115): unsure at all Xaa locations
  Clone ID: PAT_MRT4530_27148C.1.pep
IPFTLRYILHIGTAYPRAYGYFLRTLRKSFTESTDGKSPTRTRLGHQCIVXGLLSPSSICKPPDLRYKRDPXREDLRHRISEPTQPSQPTKSEPASSRIVGDLVEPTRPRSRRIC

SEQ ID NO: 124407 - protein, 351 aa, Oryza sativa
  Clone ID: PAT_MRT4530_27149C.1.pep
MAAVASPALRLRPRPRTAAPSPPRCRLSSSAYSYSKARHALRRYGNHDGRFHIKRITSFAAMDKQESITSPTTDALPVEETDNSTEDSPASGSSSYFTERGNGKSGFISFQGSSYQMKSVESVPHPGKEASRLVWFVGPTILVAFLVLPSLYLRKVLSAVFEDSLLTDFLILFFTEALFYGGVAIFVLLIDKVWRPLQQVAPKSYIWSKSRFFRISSVTTMVLSLMIPLLTMGMVWPWTGPAASATLAPYLVGLVVQFAFEQYARHRKSPSWPVIPIIFKIYRLHQLNRAAQLVTALTFSVRGTEATNQTLAIMNSLGALLTVLQILGVICVWSLSSFLMRFLPSSDIPDP

SEQ ID NO: 124408 - protein, 194 aa, Oryza sativa
  Clone ID: PAT_MRT4530_2714C.1.pep
MSSYMEAAAAARAAEAKTEGLLRGACALLAAAAALLVGLNTQTETVLFIRKKATVKDVQALWVLAMAAAAAAGYHLLQLLRCFYLSRFADGKPCRHRRAIAWLCFLLDKGCAYITFATTVAAAQACVVALYGTHALQWTKLCNIYTRFCEQVAGSLVCAMLAAVGTALLSVVSARNLFRLYPSMLSPPPSSFVG

SEQ ID NO: 124409 - protein, 153 aa, Oryza sativa
  Clone ID: PAT_MRT4530_27150C.1.pep
GKKKKGLQPNFFHLPTPGPKESKLKGVQKGPPPKKAPFPEGTPLGGPWPKGGFIPPQKLNKPVFTKGGKPPPKTRKPMGGPIAQNPIKKPPKQKGFALPGEKQNLTGYPNFSPPTRALGGPSLFLGETKFSKKNPPPPGEPGNFSRGGQPLVN

SEQ ID NO: 124410 - protein, 306 aa, Oryza sativa
  Clone ID: PAT_MRT4530_27151C.1.pep
MAASYYNNPPPPHSSYAAPPPPPPPPPGTSLYASYRHHAYPPHPPPPPAYVGAYYDHAAEPLPPRDELRTLFIAGLPGDAKAREVYNLFRDFPGYVSSHLRTSGKSSQAYAFAVFADQPSALAAMSATNGRIFDLENNCTLHVDLAKSNSRSKRSRTDDVPSYSSEKKARNPRGFPDSGAGSNIHMSGMGNSSHSLNGYPSAQSYTNFEPAAFSKDPSAFAPQNNPPCPTLFVANLGPTCSEQELIDVFSSCAGFIKVKMQNKFGAPVAFVDFKVSSYYVGLLWRAICLLKSVVNLQIMDAHFTFR

SEQ ID NO: 124411 - protein, 58 aa, Oryza sativa
  Clone ID: PAT_MRT4530_27152C.1.pep
YPPAVIAGGVRTQRLDRKSCDKRTLATLLIYHVFSSPFDQYNHFYLVVCIRHTIQLII

SEQ ID NO: 124412 - protein, 105 aa, Oryza sativa
  Clone ID: PAT_MRT4530_27153C.1.pep
ILDGSDETNLSETAPTGKNFRSGVGEKRARLSTTHCTQQVIPEDELDNRTSRPTQLHHAHPRHRCLGKGRAILQIKQLPTPACGKHGTVDRRNDRNLCDKQSTQA

SEQ ID NO: 124413 - protein, 365 aa, Oryza sativa
  unsure (1)..(365): unsure at all Xaa locations
  Clone ID: PAT_MRT4530_27154C.1.pep
MAVTAWRQKGIRQRREGRRRWSNGPAAATVVPRQRRPPPLHLTTAANLTESCLALAFKPLTFQLNRTNQGTQTIIVDIQIHVLQKYKRLQMQRKSGRLHSIGILDGSDETNLSETAQTGKNFRSGVGEKRARLSTTHCTQQVIPEEEVLGSPLVRRGESGSWTTGHPGXPNSITPTLATGAXERVELYFRSSSYPLPLVVSXGKSPRVSRAGAPTGGPHGSKXTKGAGPPWTGTTRVVHPRSTGPTVQISPEADRTVRRRRGTARLGTKPAXPAMASGGGAWPPTAATGGARRRQTARKAAADGRSGGTAKGGGARGKGRKGRGRESSPEGVAATGAENEGGGDXPAMPRRGRAVATPREGEERS

SEQ ID NO: 124414 - protein, 577 aa, Oryza sativa
  Clone ID: PAT_MRT4530_27155C.1.pep
MPLSAASINRASYQVLLLLAAAAVSTTGGDGNTAPGNATATATTGGDDTEMYICYLCTGRNPILIRRCPIYWDYCHLNCFDDAPSTAAAADDVAAVPVASPAAPARRVGGVPRETLEDEECYVMKLYENGSYVIVTTLGCSQTASCLLSCGGGDLAADGEEALAAAHPAGAVGVSPPVAAATGDPADVYMLAQALFLGRHFRRALHILNSSKLLRDLRFRFLAAKCLEELKEWHQCLIILGDAKIDEHGNVVDQDDGSDIYFDKDAEDHEINIKAAICFLRGKAYEALDNCDLARQWYKAAVKADPLCYEALECLVDNYMLTCEEESELLSSLKFGKEDGWLSAFYSCLIRKHEKEYIVEAKFKEFERESCSISSLSSGLTLKNNIDVLACKAEYYHQSGEYQKCFELTSALLERDPFHLKCTLVHLAAAMELGHSNDLYILACNLVKDYPQNCGSICRALSWFAVGCYYYCIKKYDQARRYFGKATGLDGTFPPAWIGTGIAYAAQEEGDQAMAAFRTAARLFPGCHLPTLYMGMQYLRMHNFKLAEQFFTQAKSICPSDPLIYNEMGVVAYNMKE

SEQ ID NO: 124415 - protein, 125 aa, Oryza sativa
  Clone ID: PAT_MRT4530_27156C.1.pep
VPLYPQDTASTSWGDSTPQAILDGSDETNFDKTAPTRKIFSSGVGEMRVRLSTTHCTHPIILEEELDNRTPRPTQLHHAHPRHRCLGKSRAILQTEQLPTPACGKHETADRRNGRNLRDKQSTQA

SEQ ID NO: 124416 - protein, 180 aa, Oryza sativa
  unsure (1)..(180): unsure at all Xaa locations
  Clone ID: PAT_MRT4530_27157C.1.pep
NIGRSGRITPVLQLDPVHVDDRRIARVSLGSLQRXGADDVRPGDQLTIALAGLTIPGFERVVWRAQQRPTIEAPNXPSYHSLSCWPPAPACGQQFLARLPWLSGKQGLGLPHLGTGAWRRLVEAGEVSDLLGWVDMDXERVQRIPGFGPRKADNLIAAFQLARERXFRWLAASLFPQEGD

SEQ ID NO: 124417 - protein, 740 aa, Oryza sativa
  Clone ID: PAT_MRT4530_27158C.1.pep
MPLSAASINRASYQVLLLLAAAAVSTTGGDGNTAPGNATATATTGGDDTEMYICYLCTGRNPILIRRCPIYWDYCHLNCFDDAPSTAAAADDVAAVPVASPAAPARRVGGVPRETLEDEECYVMKLYENGSYVIVTTLGCSQTASCLLSCGGGDLAADGEEALAAAHPAGAVGVSPPWRMWDTKFGFPPAAPPTTAAAAQKNPKRRREAEAEGEVAAEMREEAVERLRGVVRDSVGKHLYASAIFLADKVAAATGDPADVYMLAQALFLGRHFRRALHILNSSKLLRDLRFRFLAAKCLEELKEWHQCLIILGDAKIDEHGNVVDQDDGSDIYFDKDAEDHEINIKAAICFLRGKAYEALDNCDLARQWYKAAVKADPLCYEALECLVDNYMLTCEEESELLSSLKFGKEDGWLSAFYSCLIRKHEKEYIVEAKFKEFERESCSISSLSSGLTLKNNIDVLACKAEYYHQSGEYQKCFELTSALLERDPFHLKCTLVHLAAAMELGHSNDLYILACNLVKDYPQNCGSICRALSWFAVGCYYYCIKKYDQARRYFGKATGLDGTFPPAWIGTGIAYAAQEEGDQAMAAFRTAARLFPGCHLPTLYMGMQYLRMHNFKLAEQFFTQAKSICPSDPLIYNEMGVVAYNMKEYQKAVQWFELTLEHTSSSLNEMWEPTLVNLGHALRKLKKYQKAISYYEKALTFQTKSLSAFAGLAYTYHLMAMYHVHRAEVLQILTKEPGR

SEQ ID NO: 124418 - protein, 65 aa, Oryza sativa
  unsure (1)..(65): unsure at all Xaa locations
  Clone ID: PAT_MRT4530_27159C.1.pep
LNSHVSETKLKAAGAVSXLRTINVDYELESGGSLSPYKQXLIRDGYSGTLDMIEVSLVALPTEYA

SEQ ID NO: 124419 - protein, 689 aa, Oryza sativa
  Clone ID: PAT_MRT4530_2715C.1.pep
MVAAGDQRRGGAAAERGEGRGKRRRRSMAHPGTTRTAETTTGAEEGGGAVRIDEDGGAPTVGGRNEGVDEVDGNAAKPKEVTPSREEVRSDDGGEPELGGDGGERGRRRGHESDGERCILESFWDATECEQSFQELKSRLISAPILILPDPKKGFQVYCDASKLGLGCVLMQDGKVIAYASRQLRPHEKNYPTHDLELAAVVHALKIWRHYLFGTRTEVYTDHKSIKYIFTQPDLNMRQRRWLELIKDYDMGIHYHPGKANVVADALSRKGYCNATEGRQLPLELCKEFERLNLGIVGRGFVAALEAKPTLIDQVREAQINDHDIQEIKKNMRRGKAIGFLEDEQGTIWLGERICVPDNKDLKDAILKEAHDTLYSIHPEYVAVCDVCQRVKAEHQKPAGLLQPLKIPEWKWEEIGMDFISGLPRTSSGHVSIWVIVDRLTKVAHFIPVKTTYSGSRLAELYMARIVCLHGVPKKIVSDRGSQFTSNFWKKLQEEMGSKLNFSTAYHPQTDGQTERVNQILEDMLRACALDFGGSWDKNLPYAEFSYNNSYQASLQMAPYEALYGRKCRTPLLWDQTGERQVFGTDILREAEEKPCAAAVPVVAVAREGRHRGRQVVAILVRSFAVAEDCRRTVAAVDPIFSAPSTSTPSPIPTFPESPFSQEKILKSSKASKASHTDPKQPFEHVDPI

SEQ ID NO: 124420 - protein, 388 aa, Oryza sativa
  Clone ID: PAT_MRT4530_27160C.1.pep
MVGVDKSFTELLQLIGDLLPAGHVLPETTYQVKKVVCPLGLEVQKIHACRNDCILYRGDYADLESCPVCKEPRYKGGDNDVDADDDIGGPIVKKRKVPIKVAWYFPIIPRIKRMFANKKHAKMMRWHHEERKKDGMIRHPADGSQWRKIDRKYKKHFSHKIRNIRFDLSTDGMNPFGDMSSRHSTWPVALVIYNLPSWLCMKRKYIMMPLLIQGPKQPGNDIDVYFRPLVDDLKLLWHRGVQMWDAYKREYFTLRAMLFFTIQDYPCAGNTSGQTVKGGCACLQCMRDTASRWLRYSEKTVYMRHRRFLPADHQYHSNTREFDGTVELEDDVRHAIDVMHVEKNVCESLIGILLNIPGRTKDTLKARRDLADMNIRSELHPQECPNGR

SEQ ID NO: 124421 - protein, 45 aa, Oryza sativa
  Clone ID: PAT_MRT4530_27161C.1.pep
KNTDISYIVHKTTISQLKKNMKITQHFSVQIVGKPTNHFSTKIAR

SEQ ID NO: 124422 - protein, 923 aa, Oryza sativa
  Clone ID: PAT_MRT4530_27162C.1.pep
MIIMFDGVTRTADQILEKYLSNSDRPYYQGGQSIYFDGWKGFGTSAILADIAELARRKKSMDYEIVLHVDCSVWESRRTLQRMIAKELNLGGSTMALFDKQDEDDDFSGIEKSSRAEIDEVAKLIFQAVKDRSCLLIVHNGSDDEIDFLRFGVPVLERRNTVLWTFRGRFRLEPAIKDKVKNADLFLSIDQEGCGIIEGDSAWEIADRLYHRMRLEYLPTRHNHDFWFPQYFGSQIQARDYRWVSVMPRNSDENLKFILIDGCLNKDADLTGEWYHEQNGKQWEFLQSLWVLDIRDTNWDWILSPSKVVLMVELRELYLKATGRSWHDQIFLDMSCLSKLQMLRVIDSSTYMKAAVHDSFQHMMNLELLDLSGNTTLHVLPNLSGASKLKVLILDGCVGLEVVEPNTLPRSLESFSFDGFGPASRSEEEEEEEEARPNTYINQEHTCVISNISLEGCEQLKSLFLRGLPNLKELNLSGTRIQALDLEAMQVQQLERLFLLGCANLTRVKWIDPSNPPLKLLCIDTRGKAARAMDGVCQGSHLFTQQEHEAHPSTHVVATDARFLRGFRAGGYGNTIAFGRYVPSQHFHLHISDTVNDKPVLPRAKEKDASSRDGLIPGFPYLDVIDKVFNNDGEDGCSVPYCKHPVPLDCHIEIAEGGSNLEIEQDLYGMGSLIYNTQSLHIHDNSSISIGNLGVKGNKQFKNLRWCHVTRCLKMHTVFFCDDDWRYGNFFPSLETLWVSHLVQARCIWSTGLRFWKPIARTTPAALSKLRCIHLHSCPRLRHVLPWSLPTMESLETIHITYCGELTQIFPKPGSCWTERTEFPSLRRIHLQDLPMLQDICERAMSAPMLETIKLRGCWGIKRLPAIHAGRPRDKPPAVVDCEKDVWDKLEWNGDGMEASRSLFSPRHSRYYKKDLPRGSVLR

SEQ ID NO: 124423 - protein, 346 aa, Oryza sativa
  Clone ID: PAT_MRT4530_27163C.1.pep
MQTEARVGMAAATMDSGAAAAAARRYSTQQQQQQPPPPQLHHHQPQLGTVPHLLAGGVAGAVSKTCTAPLARLTILFQVQGMHSDVATMRKTSIWREASRIVYEEGFRAFWKGNLVTIAHRLPYSSISFYTYERYKNLLQMIPGLDRNGGFGADVGVRLIGGGLSGITAASMTYPLDLVRTRLAAQTNTAYYRGISHALYAICRDEGVKGLYKGLGATLLGVGPSIAISFCVYETLRSHWQIERPYDSPVLISLACGSLSGIASSTITFPLDLVRRRMQLEGAAGRARVYQTGLFGTFGHIVRTESLRGLYRGILPEYCKVVPSVGIVFMTYETLKSILTELASDD

SEQ ID NO: 124424 - protein, 39 aa, Oryza sativa
  Clone ID: PAT_MRT4530_27164C.1.pep
RVRCFLPAQALTFFAKVALKHSSVGRFFPSPRNRSTCDK

SEQ ID NO: 124425 - protein, 82 aa, Oryza sativa
  unsure (1)..(82): unsure at all Xaa locations
  Clone ID: PAT_MRT4530_27165C.1.pep
LFALPRCHPPXPXAPPRWSRSPTTPNPPPPPPPPXTASTWPCWSASXSALPXPXRPRTXPSRPXSPASAPASSPPSPASXLP

SEQ ID NO: 124426 - protein, 418 aa, Oryza sativa
  Clone ID: PAT_MRT4530_27166C.1.pep
MEVDSGRNGTGHGQIAGPDEEIPAGGDAKRSREEGGRNTTTTCQEDEDEDNDYYNDDSNFLDSYRTTWATNYGKNDGSSFEDEIKVTEVMGNLEWPLRVYGIVAVRDSLDHKRNVLFRRDRDDCQTLTSPQASITFNDSSLTLTGPSRAVVLINPVMFEVDLKVITHNNSGLPLSESEEDDKVLSYNAFFYDGVAHMNNTGFARRSVESTEHSTMEFVFAHLIFAVEATIAVRVIEGSTDFRARLTARTAGIDEDVVLLDSGDGKVAVVNDDDDSGPLVVLQRRVVVVEEKGSLILGVEAAEIGSEEIVTRQVDIRPRHALRSRCGFNLGFCRMSVMIACFIGDSYVSSIGGHLAPSSLFSVELKHCAGATSSTGTGTASGSAPAQACGSCCAPSGRAIAISRHLVLALCKGNTGFKD

SEQ ID NO: 124427 - protein, 257 aa, Oryza sativa
  Clone ID: PAT_MRT4530_27167C.1.pep
MGRKIKVKKKKASSKKAEASSSRVPSAPAKVWQPGVDTLEEGEELQFDPQAYNYLRGFNIGWPCLSFDVVRDQLGLVRSEFPHTLYGVAGTQAERATWNYIGIFKICNINGKKREPIPASAIDGDSDMDSESSSDEEDEAVNEDTMPILHLKKVAHAGCVNRIRSMNQEPHICATWGDTGHVQVWDFSSFLNSLAESGAVAHNEDDRIHNHVPVKIFGSHKDEGYAIDWSPLVTGRLVSGDCNKCIHLWEPTSNSWN

SEQ ID NO: 124428 - protein, 218 aa, Oryza sativa
  unsure (1)..(218): unsure at all Xaa locations
  Clone ID: PAT_MRT4530_27168C.1.pep
GDXGRAAVGGWEGXRALTGXDRRAEGTGRXVVGRRGXGVXXVPDPXXRATYXGPPTSVSAAPXXRRPSAALPXXPXSLPPRAXDAXATSXXSSDPXXRRXIHPLYIFCSXRQLTSFXPXXTAPRXXHAASAFRXCTXERRRRAHHFAXGGGSVPCGGGGIPYPFPCLRVXAGCSARVPGSSCXLSCNXRAGXSLLLLLFFVFLTFHGVHHVTPSVDGF

SEQ ID NO: 124429 - protein, 107 aa, Oryza sativa
  Clone ID: PAT_MRT4530_27169C.1.pep
AVLEILVGISMTHVCIIHLEWRVRGTDMNKCGDSLASRNIKALPLVVGGHLYLVFAVCILCNGRMEQSAKSVLQAVVANTACCCFANSQYQNNSFNTKSTLFFCPFL

SEQ ID NO: 124430 - protein, 481 aa, Oryza sativa
  unsure (1)..(481): unsure at all Xaa locations
  Clone ID: PAT_MRT4530_2716C.1.pep
MLATAFQLLQNWNNPAGATNVQVSTVQRQFEKKLGLIQCTDQKRVVFATHQLVGPALEWWDSYEASRPEGHTITWDEFSAVFKTSHVPVGMITLRKREFRYLKQEDLTVTEYLHEFHRLAHYAPEDVETDEDKQEKFLQGLKDEIAVQLLLEEYEDFEKLVDKAIQLESEHNRMKNCKRRIVSIPVFPCGNQRQRTEPLQITGSSVAHQEFPHQEDGHNADNNISNTNDDDTTNNHASCPISDHLNQACNVNIIHQGVDDSINDGTQXDSEKDSNGDSNYGTTDANPHPEPPRGRITPPRRRPSLSPAPGASSRLSLLARAPSGRAVAFPDITAACSPPACPPFRVETPGGVSPPATGGIVATHRLQPPLPRRSGAGRPRHLLPRRHRVDLHPGLPSVSSGDRRRPRRPLHPCRRRRPFGRPFVLPGLSARCATTTSGIAAARSPLASPSLHPNTTGVRRRLHRSSSPARRLAAPPPSSAS

SEQ ID NO: 124431 - protein, 85 aa, Oryza sativa
  Clone ID: PAT_MRT4530_27170C.1.pep
RSIFWHKFMTAGSNQTEIATAAWCNLFIGNLLYAIRPNKEGSSFNLLVQDLGTTCKYFVDIRHMCSCMANGSKCIHVLCICMEKR

SEQ ID NO: 124432 - protein, 69 aa, Oryza sativa
  Clone ID: PAT_MRT4530_27171C.1.pep
RKRSGRGLWPCLTRSSDDKMGPKCYSLFFFFFFSFFFVWLFSKRNCRGLEHEKPLLTWLPISPLQIPNF

SEQ ID NO: 124433 - protein, 60 aa, Oryza sativa
  Clone ID: PAT_MRT4530_27172C.1.pep
YFSFRTKVIKCNSHHRGELESSTVTVGFSFVTTDRLISSLALPLSPLKEINKLIKTETHS

SEQ ID NO: 124434 - protein, 474 aa, Oryza sativa
  Clone ID: PAT_MRT4530_27173C.1.pep
MMLDRRWRGTILLLICLVCNASGTYVGANTIPSPENSPSEFAKIVQSKQTKHARVFIGGGDHRSLRSLANTGEEVILTVPNDQLEHMAEFPEEAELWVAANVARFLPATRITHVVAGDDVVARSPGNAYFLLPAMANLHAALAASRLDGRVKVSSAVSGAALQAPPAWAAAAVAGGLLRFLNATGAPLFLKTRPSESTDTMVDAAYGAMRALGFPGGAIPVIAAPVETEEFGGGATTVVYHSYLLQASGGVGGGERRSLATSAGMFCVALQNADAAALQAGLNWACGPGQADCAAIQPGGACYKQNNLPALASYAYNDYYQKMASTGATCSFNGTATTTTADPSSGSCVFTGRRLEHERAGSQPSDDALPTGGPHAAGRHQPTDRLSPPAAGTTPPAGGFTPPAGGFGTPPLGGFGTPPSGFGPPGSFNGSGSSFGPSSAFSPYGGAGHRDGGASGARLAAAALAVLLLSVDLM

SEQ ID NO: 124435 - protein, 190 aa, Oryza sativa
  Clone ID: PAT_MRT4530_27174C.1.pep
LVDPRAAGPCDMVSEQRSQNLATKSCHLAGAPVAACRRRAIFSSSRHQSSSSGCSSFCHRLSSFSCVKAAAAVWDSLRRAVALAAAAAAAAIASSSCRRRPSRWLPRPVIHPSSSASPRPLPRLVVNRRRPRRLSQICSSSHFAAARRRPRISLCRCGLRPSRCLAHFTTIAVTVAALFIAAGNALLHHR

SEQ ID NO: 124436 - protein, 85 aa, Oryza sativa
  unsure (1)..(85): unsure at all Xaa locations
  Clone ID: PAT_MRT4530_27175C.1.pep
METRVLALAPWLLQVPLQLATAYDVIHRSLQAIHAPSSXPACMVSPVLTTGDHLQARKNWINNPNGPLPYKGCDHLLYQYNPKGA

SEQ ID NO: 124437 - protein, 95 aa, Oryza sativa
  Clone ID: PAT_MRT4530_27176C.1.pep
MGTQGEEFAGGSHEQYFFANDGTPSGKAIDLRRGAAEQRKVVNQLQGKEYKIDLVAIAIPPAAASAAAVVPLPPCLHPFLLTPRAASGCRRHRHE

SEQ ID NO: 124438 - protein, 867 aa, Oryza sativa
  Clone ID: PAT_MRT4530_27177C.1.pep
MPPTLALLLFLALSAVAAVGGAGDVRRVLHEPLFPIEWTPPPSTASPSPPSPDFSSDPSTPATPVDNGGPALLPPPPPNTVAADVSSSRSGPDPRARGGGGVSPQRPASGRLPRRRGGPGGTPKAAIVVASAAAAAVLALLAFAAAFLLTGRLARHPAAAAAQAHKPPGHAHAGAGSVAGAHADVAGCSTAVSPYRKVRPERARRGMCRDVDTVPSPELRPLPPLRRGASALTQGSSDEDAAYYTPGQRSAGSGGGGGGEGGGTWSEASASSPRTTTASRRSLPSLTSDFFPTTPAAAPVPAPAAAAPPPAPPAPRSRRTPPRTRFSAGSGAEMNKQMASPPSNPPPAPPPPPPPPSRFNNTTPKPPPPPPPPEPPTGPVSARRLLRPLPAEGPSIVIPRAPAMAVTKDNDATAATMSVRTRGEAAGDEPRPKLKPLHWDKVRTSSDRDMVWDRLKLDEDMIEVLFMNNSTAVAPRMDNPKKVGMPQFKQEERVLDPKKAQNIAILLRALNVTLEEVTDALLDGNAECLGAELLETLVKMAPTKEEELKLRDFTGDLSKLGSAERFLKAVLDIPFAFKRVDVMLYRANFENEVNYLRKSFQTLEAACDDLKGSRLFLKLLEAVLRTGNRMNVGTNRGEAKAFKLDTLLKLADVKGADGKTTLLHFVVQEIVRSEDAKSEKAPENHITNIAKVEQLRRQGLKVVSGLSTELGNVKRAATMDFDVLHGYVSKLEAGLGKIKSVLQLEKQCSQGVNFFATMREFLKEAEQEIEQVRHDEKAALGRVKEITEYFHGNAVKEEAHPLRIFMVVRDFLSMLDHVCREVSQQDRTFVGSARSFRISAANALPILNMQGQKGGRESSSDGDSPSM

SEQ ID NO: 124439 - protein, 656 aa, Oryza sativa
  unsure (1)..(656): unsure at all Xaa locations
  Clone ID: PAT_MRT4530_27178C.1.pep
APLKHVNVLQNKVLRLVAGQEAPAGTDLVPPLRFLLLGKTGIKKSATVYSIFDEPKVATNALAPATERIRRIDGTIKGIRVTVIDTPGLLPHYHRQRKNRKILHAVKRFIKRSPPDIVLYFERLDHINSRYCEYPLLKLITDILGSSMWFNTVLVMTHCSSSPPEGPDGYPLEYDSYARYCKNVVQRHIQVAASNTQMENPVVLVDNHPMCRRNTKGERVLPNGKVWVSELLLLCGATKLLAEANSLLKFQDSFLLSQANTRLPSLPHLLSSLLKPNPSSRSEDVGIDMTEVSDDEDESDQLPPFRVLKKSEYEKLSKEQRSAYLDELDYRETLYLKKQWKEGIRRQKLVEAQNVDASNAVGDDYEESVSPEVVHMSDMKXPSSFDSDYPVHRYRYLITDDMVFRPVLDPQGWDHDIGFDGINFEVSQDLEKNTTASIAGQMRKDKEDLYIQSECSVSYSGKNGRSLIGSMNMQTANKDLVCTVNGDARFHNLPWNTTGGGISITKFGSKYFTGAKLEDSITVGRRVQLVGNAGRMVGCGQVAHGGGLEMTFRGKDYPVREESITVAATALSFEKETVISTNLQSDFRMGRGSKVSVSANLNSRNLGRFCVKTSTSDHSEIALVAAVTLFQFFLRRRTASTDKGEQQFEFDTYSDE

SEQ ID NO: 124440 - protein, 71 aa, Oryza sativa
  Clone ID: PAT_MRT4530_27179C.1.pep
HSSWAPAHLRAHFGGNQLLDGSISLPPLLPKVSTHDLPSVSLALHHSTSGFARSAYSHLSGPDRRVNSNLQ

SEQ ID NO: 124441 - protein, 571 aa, Oryza sativa
  Clone ID: PAT_MRT4530_2717C.1.pep
MDEAAAGQRASPLLAKGKQNSMMQRLWLYRSRFGFYYSWVWGYRISCFRSTQSHCGVYADVWPSVRMMDQAMVKNHRVYWKNRSHRLKLNNLAGEHHQSFWGTVFITVGAFLPSAPALCNTESCSSMNGTQHLVYFSGLYLTAIGCGGVRSALLPLGADQFNNDSSLDIQKRRNFFSLFYICVIFGVITSGTIVVWIQENVSWAIGYGVATACIALALIGFLVGTPIFRRHEPHGSPVRSVFQVIVASFRNLALELPADSSLLYEVRRKNTQKSEPKLAHTDDFSWFNSLDNQLANPSFCLRFLDKAAIMSDLSLDQDSCTSPWRICTVTQVEELKILIRLLPIWATGIFFCVGISQMHTTFIQQGTVMNTKIGSLSIPAASLYSFEVICVTFWVFLVNKVIIPVTRACFANGAEMTQLQRIGIGRFLMIFAMAIAAFLEMKRLESVQGGDQPLSIAWQLPQYFVIAGAECFTIITQLEFFHGQAPDSMKSMLTAFALLTTALGNYFSSAIITLIARVTGTWHSPGWIPDDLNKGHLDYYYWCLAAISAVNFVVYIYFASKYKLKKAVIQV

SEQ ID NO: 124442 - protein, 65 aa, Oryza sativa
  Clone ID: PAT_MRT4530_27180C.1.pep
NTTFPLGQFYFPPNFLTVIPRPKSFKVSSPTPKTDQHFVGGDTNTFFNFSGIPYIRPPLLQRSFM

SEQ ID NO: 124443 - protein, 37 aa, Oryza sativa
  Clone ID: PAT_MRT4530_27181C.1.pep
AKFLIAQQAPIVLFCSSSRREDWFGSGTRNKMCLAKN

SEQ ID NO: 124444 - protein, 84 aa, Oryza sativa
  Clone ID: PAT_MRT4530_27182C.1.pep
MRIWQRCPYPLAETAVTAVPRADATVVALPCAPQTRIRRQEQARVNAGSNKALPRVDPVTEGQWRRGDDGGLATVDYVDNVVTI

SEQ ID NO: 124445 - protein, 130 aa, Oryza sativa
  unsure (1)..(130): unsure at all Xaa locations
  Clone ID: PAT_MRT4530_27183C.1.pep
AQRHAPPPAPRAGAVAVVSPSPLSPTPPXAIASPTPLCHRSRAPSPAXAPRPSVAGPPSPSRRPPPSGRPAPFPXPNPAPARSPGADPKPPNAISPPPSRPRQDHKWRSRGPGTEAHGPAGRTLSRELST

SEQ ID NO: 124446 - protein, 47 aa, Oryza sativa
  Clone ID: PAT_MRT4530_27184C.1.pep
NWIIIIGLSIFHYILEIQLLRRKLCVYDVNRYRMIFKKGMPCTGSCA

SEQ ID NO: 124447 - protein, 922 aa, Oryza sativa
  unsure (1)..(922): unsure at all Xaa locations
  Clone ID: PAT_MRT4530_27185C.1.pep
MARRARDDDDDDEVEEEDEEEAYDLEDEEEEEDDEDDYEAEARGGGKASRSSSSRGGGGGGGGGRKRSREDNFIDDSAIEDDEEDDDDDDGGGRPKKKGGGGGVRGFFDEEAQVDEDEEEEDDGEGEDDFINDAGADLPDEDVVRGSRHRSIPMRDEEEDIDEIERQVRERYARSTHIEYGEEAAEVEQQALLPSVKDPKLWMVKCAIGHERETAICLMQKFIDRSDLQIKSVVALDHLKNYIYVEAEKEAHVKEACKGLRNIYASAKITLVPIKEMADVLSVESKSVDLSRDAWVRMKLGIYKGDLAKVVDVDNVRQRVTVKLIPRIDLQALASKLEGREAVKKQALVPPPHLVGQPMTPGNVGMDIMSPIIGGEGEGNWLLPDVLVNVLRAGDDGPGVVREVLADGSCRVALGSSGNGEIVTVLPTELEVIRPKKSDKIKIMNGNFRGYSGKLIGIDGSDGIVKLDDTYEKTYLKKKTTGITRIGDYELHDLVLLDNLSFGVIIRVETEAFQVLKGVPDRPEVVLVKLREIKSKIDRRTSAKDRSNNMISSKDVVRVVEGACKGMDTSDPRLGALRSPASILQSPGRLPPRGPHMNCINFFRPNFLAPFACNIDFSFKAVGGRFGGGGRGGRGHDALVGKCIKIKSGPYKGYRGRVKEVTGVLVRVELDSLMKIVTVKRDDIADTPTVATPFREPRYPLGGETPMHPSRTPLHPYQTPMRDPXRDNWEEGNPATWGSSPAYQPGTPPARPYEAPTPGSGXNAPSPYVPSTPVGQPMTPNSASYLPGTPGGQPMTPGNVGMDIMSPIIGGEGEGNWLLPDVLVNVLRAGDDGPGVVREVLADGSCRVALGSSGNGEIVTVLPTELEVIRPKKSDKIKIMNGNFRGYSGKLIGIDGSDGIVKLDDTYEVKILDMVILAKLAS

SEQ ID NO: 124448 - protein, 92 aa, Oryza sativa
  Clone ID: PAT_MRT4530_27186C.1.pep
VFRPLHLFQLRLPLPLGGGGFHFFYQFLSQPRLENVSPKKFPVAAGATSQRLRCVLDHPLIPHFTKELCNSLCNVFFPIDPGVVLAVPLAFP

SEQ ID NO: 124449 - protein, 369 aa, Oryza sativa
  Clone ID: PAT_MRT4530_27187C.1.pep
TEAFQVLKGVPDRPEVVLVKLREIKSKIDRRTSAKDRSNNMISSKDVVRVVEGACKGKQGPVEHIHKGILFIYDRHHLEHAGFICAKAQSCLLVGGSAGGRRGNGMDTSDPRLGALRSPASILQSPGRLPPRGPHMNFGGRFGGGGRGVRGHDALVGKCIKIKSGPYKGYRGRVKEVTGVLVRVELDSLMKIVTVKRDDIADTPTVATPFREPRYPLGGETPMHPSRTPLHPYQTPMRDPGATPIHDGMRTPMRRGWAPMSPPRDNWEEGNPATWGSSPAYQPGTPPARPYEAPTPGSGWANTPGVSYNDAPTPRESNYGNAPSPYVPSTPVGQPMTPNSASDLPGTPGGQPMTSGNGGMDIMSPIISG

SEQ ID NO: 124450 - protein, 80 aa, Oryza sativa
  Clone ID: PAT_MRT4530_27188C.1.pep
AAQGLGELIDVPSEKTLNEVGVPITGTLMQILGDRFPPQVKSDILSTLTMIISKGGLALKTLLAQLETTFVKCLQDNNRS

SEQ ID NO: 124451 - protein, 51 aa, Oryza sativa
  Clone ID: PAT_MRT4530_27189C.1.pep
MTTNLKEQSLQRLLKEAAAAATAVDPEGGGYDLQWWRLLPKWPQGEEYGGS

SEQ ID NO: 124452 - protein, 263 aa, Oryza sativa
  unsure (1)..(263): unsure at all Xaa locations
  Clone ID: PAT_MRT4530_2718C.1.pep
FPTHPSHRQEYRPNPTYGRNPRDSRGEERADRVHGSGAHAAASRSTVDRVHAAHTGRRRGLAGTADGRRRARAPMVAGGGHRHGGAAAERGEGRGKRNGRSTAHPGSTATAETATGAEKGGGAARVDEDGGVPAVGDRNGEVDEVGEVAANPKKATPKREKVRGDDGGGPELGGDGGERXGRRRELDSDGERERRVAETVEGGTGSVYIGSGGGERGRMRGNRPRKIRPPLMRRRXLGGNFPNXIRGRERGKSGGKGRGNRGE

SEQ ID NO: 124453 - protein, 222 aa, Oryza sativa
  Clone ID: PAT_MRT4530_27190C.1.pep
MLGNKLVVIIGATGTGKTRLSIEIAKAIGGEVVNADKMQIYDGLDITTNKVSLQDRCGISHHLIASIPRNAGDFPVSFFRSAAKTTINCIARRGHTPIVVGGSNSLIHGLLVDNFDSSIVDPFGQLEVSYRPTPRSQCCFLWVHVNEVILNEYLKHRVDDMVDAGLVEEIEEYFDTLSVNGHVPYVGLGKTIGVPELSEYFTGRVSCSDALSMMKTNTQILA

SEQ ID NO: 124454 - protein, 72 aa, Oryza sativa
  Clone ID: PAT_MRT4530_27191C.1.pep
NNTCFLPFSHFLKNSVNCNDKIGKKSQNIFYCHLTIQTTLCRFVHYLPYSSTNTFTHSFILSFIMERSRLSR

SEQ ID NO: 124455 - protein, 435 aa, Oryza sativa
  Clone ID: PAT_MRT4530_27192C.1.pep
MDIETDGRFGNKRVHHRLGPANGAASSSTSGKVCIHWRAGRCNRFPCPYLHSELPEATAKRPSQSGGGGNVWRNPHSGGGGGRGAGGAGGPNKWGRGPGGADGGPRHKVPDRPCRYFLAGDCSYGEKCRYPHSYSMSDSITMLTPLQGHEKVVTGIALPAGSDKLYSGSKDGTVRMWDCQTGQCAGVINMGREIGCMISEGPWLFVGIPDAVKVWNMQTQAEMNLTGPTGQVYALAVGNELLFAATQDGRILAWRFSAATNGFEPAASLVGHQLAVVSLVVGAMRLYSASMDKTIRVWDLATLQCIQTLSDHTGVVMSVLCWDQFLLSCSLDQTIKVWAATESGSLEVPYTHKEEHGALALSGMPDAQSKPVLLCSLNDNTVRLYDLPSFSDRGRIFSKQEIRAIQVGPSGLFFTGDGTGELKVWQWVIDGSQTK

SEQ ID NO: 124456 - protein, 79 aa, Oryza sativa
  Clone ID: PAT_MRT4530_27193C.1.pep
MEQSPAMKFPFIFTDESNRALVGQRASLNWSWRLSYGGRILSIFPGQFKQEEKRAKFKRNLQKLAAIFIVRDLFLPSLP

SEQ ID NO: 124457 - protein, 96 aa, Oryza sativa
  Clone ID: PAT_MRT4530_27194C.1.pep
MWSGLGQAATVGAPSRRRRPSPRFRSSRVVLEDEEVPAIVVVVAGLSWTATTVVVMASVVVAGTTVGGVDEAWRGGEASRHWLRPFSIGLGVTGSH

SEQ ID NO: 124458 - protein, 48 aa, Oryza sativa
  Clone ID: PAT_MRT4530_27195C.1.pep
IKPVFYHLIKHLVLSAPMGVSTKKFLLCNVPRLFPVKLTNRVFGGFPP

SEQ ID NO: 124459 - protein, 179 aa, Oryza sativa
  unsure (1)..(179): unsure at all Xaa locations
  Clone ID: PAT_MRT4530_27196C.1.pep
NLGQYSSRSAYRVLFFGRTRFQHAPIWKSFAPPRCRYFLWLVALNRCWTADHLXSRGLPHPDRCPLCDQGPETIDHLLVACPESRQLWWIALSVIGHAECLPLNERSFHGWLCDSRKKLTKDHRRGFDTIATLAAWTIWKERNNRVFNQESRTXPEITRAMSGEADLWRMARVAIPVMV

SEQ ID NO: 124460 - protein, 159 aa, Oryza sativa
  Clone ID: PAT_MRT4530_27197C.1.pep
MVVRAFEEAADILKEEEAVVAGRMETARAGTSVGARSGLGITVRTKEEENGASLTTPPPVAATIVVAEGDTSKQEIMQDPKDMLSKVNPMAKEIRDLEDVTTVLLTSVVCNHIGPVSFTVFARYLEVLGDRIIYTIDQVKGKGLNLFTGGRQREKRRYG

SEQ ID NO: 124461 - protein, 147 aa, Oryza sativa
  Clone ID: PAT_MRT4530_27198C.1.pep
MPFSLLLFTGAVAGVAMLVLPWWCAVGEDDDTYIDGVVDDSYDSDSWYTDYSDEDDDDVGGDNKDGLTPDQLRRLPWFAYCGGGGRSCSICLEEMRDGERCRRPGRCRHAFHAACVDEWLTTRRTCPCCRELVLVPPAARLAAPTYR

SEQ ID NO: 124462 - protein, 58 aa, Oryza sativa
  Clone ID: PAT_MRT4530_27199C.1.pep
LLVSTPEWHHCRYIVFKIVSPEDANIDLSRKTSGTQERAAIIVGPKSKISYSGCSSQA

SEQ ID NO: 124463 - protein, 78 aa, Oryza sativa
  Clone ID: PAT_MRT4530_2719C.1.pep
SYLTPRREWFVHMLCAVCHVMLLGRSRPWLVVPKTVYFSIGKRQRTEPHWCFSSRFMPDLVCLSYAQNGLAQFIAYLL

SEQ ID NO: 124464 - protein, 69 aa, Oryza sativa
  Clone ID: PAT_MRT4530_271C.1.pep
HLTRKSFRGGKRKTLSLSLSQPFSPSLFFFFLAPPCYSPSHHPLIRPAISPPSMHHITVGVCRCHYQRG

SEQ ID NO: 124465 - protein, 91 aa, Oryza sativa
  unsure (1)..(91): unsure at all Xaa locations
  Clone ID: PAT_MRT4530_27200C.1.pep
SANSLDIVGTVYCRFNCQKLKLPEGCGHEYQMHYGSIGXGGATLGYAQAGKDKRGIACIGNGSFHVTAQEVSTMLYWGQKSIIFSHQPMKG

SEQ ID NO: 124466 - protein, 73 aa, Oryza sativa
  Clone ID: PAT_MRT4530_27201C.1.pep
RTAYRNIIHKDVLIAIAQCTTSVHVAEKRARKKKALKGSDVTATKEKCLPLLKSTIGGPAVYIQCPILIRSEC

SEQ ID NO: 124467 - protein, 56 aa, Oryza sativa
  Clone ID: PAT_MRT4530_27202C.1.pep
MARLLLCLVACLPHFLALVATPKTSRDEQRKRLKEQTIGDISVAGTELNGGHSGLQ

SEQ ID NO: 124468 - protein, 70 aa, Oryza sativa
  unsure (1)..(70): unsure at all Xaa locations
  Clone ID: PAT_MRT4530_27203C.1.pep
RIAYDGKRIFIFMDRHENDGDVVKRGFYPHPRGEPPYKHQNAGEAXKTLTAQTKASDHNRALHGVDAKNE

SEQ ID NO: 124469 - protein, 177 aa, Oryza sativa
  Clone ID: PAT_MRT4530_27204C.1.pep
MAVAAVARCGPPTRAADGAKTANGGAVKVMAAASQWTTFLVPLRPARVDLLPGNAGCRPSWLDLPALVYDGTKFCNGVVLGTIGVVLSSNVLSHWNKNDMAERIRREGASVKVLKEVTKTRKVPVLEVPLALTKIKKANLETSSFFETLRGTEFPVRTWMRIFVKVRNRCMIACKSS

SEQ ID NO: 124470 - protein, 58 aa, Oryza sativa
  Clone ID: PAT_MRT4530_27205C.1.pep
PTRPPTRSPTRAATDSALCSGSRRYHCIYVSMYMSNLMLIEIIFVDYVFYLRVIPISN

SEQ ID NO: 124471 - protein, 67 aa, Oryza sativa
  Clone ID: PAT_MRT4530_27206C.1.pep
EKTLPLGASPPVGFSPNDKKFGSITKLFWFLTPPRNIVAPRSFIAPQGFFQPFLAHEVAFIKKRFGS

SEQ ID NO: 124472 - protein, 54 aa, Oryza sativa
  Clone ID: PAT_MRT4530_27207C.1.pep
ASVKVLKEVTKTRKVPVLEVPLALTKIKKANLETSLFFETLRRTEFPVKTWMRI

SEQ ID NO: 124473 - protein, 40 aa, Oryza sativa
  Clone ID: PAT_MRT4530_27208C.1.pep
MALAALDRHPEGTQLPATRGQSDQPIPTGQTDRDTPVITP

SEQ ID NO: 124474 - protein, 60 aa, Oryza sativa
  Clone ID: PAT_MRT4530_27209C.1.pep
GGGTKQRAQIKPWKLQVPKCNYGMGMIIYSHTRHSVNFLLGLEAGWMLFGEFLLNTCLCF

SEQ ID NO: 124475 - protein, 83 aa, Oryza sativa
  Clone ID: PAT_MRT4530_2720C.1.pep
WSPPATTGAAERRPRERRGEGSERAVFGSPRVDGDDGNGGRSGGRRRRGSGRRGRRCSGGRRAKRRGGRGRRGRGEADGGLNL

SEQ ID NO: 124476 - protein, 68 aa, Oryza sativa
  Clone ID: PAT_MRT4530_27210C.1.pep
MDSKANVQGIRPTNPAWISLSAGILVNGDGGVVDGKGEAHASCMVAAADGKGARMLEFACCRSGPLRD

SEQ ID NO: 124477 - protein, 110 aa, Oryza sativa
  Clone ID: PAT_MRT4530_27211C.1.pep
MASSSSSSSSKALLVFALLLAAAFVASAEQTHDDGDNPPESPDHEDPPPSPEYYDPPPSPDYYDPPHSPDYYDPPPSPDYYDPPPSPYYGGGGGYGKPPPPPPCCPCKGV

SEQ ID NO: 124478 - protein, 67 aa, Oryza sativa
  unsure (1)..(67): unsure at all Xaa locations
  Clone ID: PAT_MRT4530_27212C.1.pep
NFQSRGIDHLVIPTRDYMFAPSLVDISRAVDFIHRNASCGRMTYIHCKAGRGRSTTIVXCNLVVLIT

SEQ ID NO: 124479 - protein, 85 aa, Oryza sativa
  Clone ID: PAT_MRT4530_27213C.1.pep
VSPLRRGDPGHNPFSPNPPGCRSFAFFFPCRRSWELVVLNNLLRLPYGCPKKFKSPFRGPCFFPKKKKKKKKKKKKKKPKKKKKQ

SEQ ID NO: 124480 - protein, 51 aa, Oryza sativa
  Clone ID: PAT_MRT4530_27214C.1.pep
MVDQIGSGNLMFGVVNKRKNGFLWLESLKVTGGDTLAITVPVTKVLEIKPE

SEQ ID NO: 124481 - protein, 365 aa, Oryza sativa
  unsure (1)..(365): unsure at all Xaa locations
  Clone ID: PAT_MRT4530_27215C.1.pep
IKLILATFEKLSSLKINFHKSELFCFGQAKKCHEQYSNIFGCKLGDFHVIYLGITMYFRKLSNKDWLTIEQXFRKKLSSWKGKHMFVGGRLVLINSVLSSLVMFMISCFEIPKGXLQKNDYYRSHFFWQGDEHKKXKYRLTRWEIICQSKYQGELGVHNLQIQNQCFLSKWLFKLINKXRCVTRYFGKEIFCTKSITQVKRKXGDSHFLSGLMKVKSSFLNMGFWVINNGEHVRXWDDKXLGNSSLKDKYPSLYSIVRKKNTSIARVMSAXFNVSFMRALVGQNLIRWHNLCASIVHVNLTEEDDIFRWNPRQSGQFSVRSMYLALINNGYIDRNKFIWKLKLPLKIKIFMWLKNLDFLVALELV

SEQ ID NO: 124482 - protein, 137 aa, Oryza sativa
  unsure (1)..(137): unsure at all Xaa locations
  Clone ID: PAT_MRT4530_27216C.1.pep
KGKKKEERGLAPCLFGXKKEGERAMRQXGGGALPPFLGSMRVEWRDRVDDDGDDGGAVWKGAATGRQARAQARQALTAAATGRCVIFVRQQESKYATKSSDLSTRYLPFVLFIYVAIVLDFKESTCVYCAGIGHITV

SEQ ID NO: 124483 - protein, 208 aa, Oryza sativa
  Clone ID: PAT_MRT4530_27217C.1.pep
MARGKVQLRRIENPVHRQVTFCKRRAGLLKKARELSILCEADIGIIIFSAHGKLYDLATTGTMEELIERYKSASGEQANACGDQRMDPKQEAMVLKQEINLLQKGLRYIYGNRANEHMTVEELNALERYLEIWMYNIRSAKEGMLKAANEILQEKIVEQNGLIDVGMMVADQQNGHFSTVPLLEEITNPLTILSGYSTCRGSEMGYSF

SEQ ID NO: 124484 - protein, 135 aa, Oryza sativa
  unsure (1)..(135): unsure at all Xaa locations
  Clone ID: PAT_MRT4530_27218C.1.pep
EKRVIXFMGKXRENXXXXTGFXXXKXGKYLGDVLKRDLILANPNXVTRPNILXGEEETTDSXAIFQKGEGXRXCWQWXXRXXPKGFCLRXLXXRRGLKXXLIKVKXAXXVXHXXQKQTHRSSVLVFXRANPAAKG

SEQ ID NO: 124485 - protein, 91 aa, Oryza sativa
  Clone ID: PAT_MRT4530_27219C.1.pep
MAMARGRKERAPRGYVPILIGGQGEERERILVRTEQLKQPHFLALLDLAVQEFGYEQRGILCIPCTTKAFRSIVGAATPTAAAVAGGEIKS

SEQ ID NO: 124486 - protein, 224 aa, Oryza sativa
  Clone ID: PAT_MRT4530_2721C.1.pep
MKNIFALHWRSYENINCCVLMQDGKVVAYASRQLRPHEKNYPTHDLELAAVVHALKIWRHYLFGTRTEVYTDHKSLKYIFTQPDLNMRQRRWLELIKDYDMRIHYHPGKANVVADALSRKGYCNATEGRQLPLELCKEFERLNLGIVSRGFVAALEAKPTLIDQVREAQINDPDIQEIKKNMRRGKAIGFLEDEQGTVWLGERICVPDVTPGISIQNSKRLHVC

SEQ ID NO: 124487 - protein, 224 aa, Oryza sativa
  Clone ID: PAT_MRT4530_27220C.1.pep
MARGKVQLRRIENPVHRQVTFCKRRAGLLKKARELSILCEADIGIIIFSAHGKLYDLATTGTMEELIERYKSASGEQANACGDQRMDPKQEAMVLKQEINLLQKGLRYIYGNRANEHMTVEELNALERYLEIWMYNIRSAKMQIMIQEIQALKSKEGMLKAANEILQEKIVEQNGLIDVGMMVADQQNGHFSTVPLLEEITNPLTILSGYSTCRGSENGLFLLT

SEQ ID NO: 124488 - protein, 81 aa, Oryza sativa
  unsure (1)..(81): unsure at all Xaa locations
  Clone ID: PAT_MRT4530_27221C.1.pep
SVSGDGTSTDVACPDRRCPTQLSPQIGGLVRIVNGAXRGSNARLLSVDTERFCAKVQVEKGLYDGKVLKAIEYEDICKIFH

SEQ ID NO: 124489 - protein, 147 aa, Oryza sativa
  unsure (1)..(147): unsure at all Xaa locations
  Clone ID: PAT_MRT4530_27222C.1.pep
MGGIRFRIPPPILSLSAPTSPVISATSLATSASPFTSCRAPPPLEPPPRRAIAAVVLTESARTSAATRLPQKPTGVPFSSHAGEFVPPLRLRSSMASAVVIFPTRSSSPPLVPPLSALAIAFGRRRXLCAIRRRLPSPAVARRRRSP

SEQ ID NO: 124490 - protein, 389 aa, Oryza sativa
  Clone ID: PAT_MRT4530_27223C.1.pep
ATPHIVLSRVYPSTDDLHTMQTPEGGHLTSTVARQVGEFWCFKISTRWVQKMDSPITSYSTTSAIGGIQPNRSALSGGSGPSSSQASSWPRHYGFFDERYFNYFGPRRSNPARIHPACIYEGDRDTPIPDPRPVDRSDFSLPKTSSSGDRDTPTPSSRPEDCSDLSPPENSSSGDRDMPTPGSRPVDCSDLLPPKNSSSGDRDTSTLGSRLVDCSDLSPPENSSSGDRDTSTPSSRPVDCSDLSPPKISSFGDRDTPIPGSRPPENSSSGDRDTSTPGSRPVDCSDLSPPKSSSSGGSSHRSRECRPSITLDSLQVVERSLTTIAPTLEIEPIDPLRHSDKPPRDLREFWLGTPRADKVLSDSESRTTMKIPFNVVQDSMSLRSYTGID

SEQ ID NO: 124491 - protein, 101 aa, Oryza sativa
  Clone ID: PAT_MRT4530_27224C.1.pep
RPHGAVTASTSPPTTMLHTTTNLTLTPTQNPGAAAYPLTPSTTVLKRATAEGEAKGKDGSGGQAQGAKKNKERATRAKLTEDLLLSDDGLGLRLRYYTKVL

SEQ ID NO: 124492 - protein, 38 aa, Oryza sativa
  unsure (1)..(38): unsure at all Xaa locations
  Clone ID: PAT_MRT4530_27225C.1.pep
FALWGNGVHYCCKNMTVILDYLHVHNINLYLIXHTLNP

SEQ ID NO: 124493 - protein, 84 aa, Oryza sativa
  Clone ID: PAT_MRT4530_27226C.1.pep
MVPVTLVLPCRRLASPAGKARMTTSLMFPWRASCGLMISQNWRHKQSRSQCSSMGDVGFTMEACERGGRIEIPHRDFFTDRWTR

SEQ ID NO: 124494 - protein, 62 aa, Oryza sativa
  Clone ID: PAT_MRT4530_27227C.1.pep
PGGGRPRPRDVLPAPGARVGPPADPRDGERPYGLRPVQPAAPWFFWLPPVWGGHGLPSLGIN

SEQ ID NO: 124495 - protein, 66 aa, Oryza sativa
  Clone ID: PAT_MRT4530_27228C.1.pep
MSIESRVLPNFERGRCGINRAKETVIECGMGTAGKQMHPCGRGARARRLISLPPTELEQSFGPIAA

SEQ ID NO: 124496 - protein, 246 aa, Oryza sativa
  Clone ID: PAT_MRT4530_27229C.1.pep
MGEELYESDVLWPDHQSPHDVVPPTATATATAPTPARRGQQQITRHCSTASSRPVDIPRAAQRWSGGDQGDDCGGGTMVPPHVMVSRRRSTEEGDQAFSLRTGTGRARRDLSHLRNSVLRMTGNYHMKKCRLKSPGPVFAPDTNQEGSERKDKCCRIIKNHIFQLRIEITFMICHLSWGNPEKGDVKTSEYQLMKYPHQHHHQLSPMMQMINLDNNSFQSNHSIDVNKELAYQLQNVPTNISEVMD

SEQ ID NO: 124497 - protein, 127 aa, Oryza sativa
  Clone ID: PAT_MRT4530_2722C.1.pep
LYKKAPNGVLLKCVSFDDGKHLLLDIHEGIRTIPTRTREATSTGEIKADSAIKFIKEIFYRYGLPHRIITDNGSQFISANFQDYCIRLGVKICFASVSHPQSNGQVKRANGIVHTDNVQQGDTLLPH

SEQ ID NO: 124498 - protein, 196 aa, Oryza sativa
  unsure (1)..(196): unsure at all Xaa locations
  Clone ID: PAT_MRT4530_27230C.1.pep
SRQRWCASGTVPDPDRFHRPSQQLGALHLPQVRESRHDRGCHLLLSSTCCSSSGASADSIKGRTDLLQRTRISVVRRVIETRVLLLPHYTNGASLVYIIQGRGITGPTFPGCPETYQQQFQQSGQAQLTESQSQSHKFKDEHHKIHRFRQGDVIALAAGVAHWCYNDGEXPVVAIYVTDIKXGDNQLDLTEDSVAE

SEQ ID NO: 124499 - protein, 82 aa, Oryza sativa
  Clone ID: PAT_MRT4530_27231C.1.pep
PSDRRCTVTDLCGGPRCNIEDFRCIFLQKKSQALLSPSPPLYSSTFDPLLSATSPLSPPTCADVTAGSLLFDPPSYGDVGGF

SEQ ID NO: 124500 - protein, 81 aa, Oryza sativa
  Clone ID: PAT_MRT4530_27232C.1.pep
MPPLPHRRHCRRSAITASPLPWAAAATESIRLAIIPSEHGQLADPTSFFDAVDAKIGVAVEQLFDRLERRPDAIVANTYLT

SEQ ID NO: 124501 - protein, 544 aa, Oryza sativa
  Clone ID: PAT_MRT4530_27233C.1.pep
MASAEAECAAAAVGGGGRAEIDTSAPFESVREAVDRFGGSAAWSSHLIRRMFAPPNPKEQSEESKQPVDIKEQAAQLEHDLIIKEKETLDVLKELESTKKIIADLKQRIQKESNETSPSAVKSDDQSEIPITESEEQKPENVNIDMDMEGLDEHPQPLSGSVLLELEQAKANLNRTTGDLAAVRAAIELLHNSIAKEKLLLERSREKLSSNTALASSLEDELDQTTQKLQTLKDLQARREDPSDIFIEIKKMASEVQQLRGMANASKSEAMMLAAEIEQTKASIGTAEIRCIAAKKMEEAARAAEALALAEIKALLSSESSSECGSSVCDGVTLSAEEYFTLCSKAQEADENSRKKVEEAMLQVDVANSSETDSVKKLDDARLEVEECKRALQEALKRVEAANRGKLAVDEILRRWKSENGHKRRSIGGSPKFKNAAQRRKDSHSMDIISDASTNSCKQTLSIGQILSMKLMGPEGYDKTIWDDKTSEMPNVSLGQILNRGRVLSREETAVRKRVSGKRKKFALTGLSVLLAKQAKNKKKRESL

SEQ ID NO: 124502 - protein, 229 aa, Oryza sativa
  unsure (1)..(229): unsure at all Xaa locations
  Clone ID: PAT_MRT4530_27234C.1.pep
LSFFFFFSLSLSYTPSLPLARAHPRSFPPSPXPXRTAPSTLARPPHPKSLPPTPAXPSLTXXXTLSPAPAPSTPRPSLRPLHSLTPPYYSPTRAPTPLASLPHAHPLRTPPPRDSHTHSTHPRHPLPHTHFPWVALLMGFQQSYILDFPRFLPNGRTVGVAMPTEWALLLSFKANTFRTWGGAFAVIAQHPHLHSHTAILHLDWDADNQPRGGVLCGTLQHAPPGLREE

SEQ ID NO: 124503 - protein, 143 aa, Oryza sativa
  unsure (1)..(143): unsure at all Xaa locations
  Clone ID: PAT_MRT4530_27235C.1.pep
SRTNPRRLDHSLRSIPRCRRWTSHPPPRSVCILPLSAARGIPAASPAPPDSPRPTQSTAGPAAPSSLRAHPPSSQPYEFPPRSTAGPPHSLXASSRLPAARHRIXCPCRRRGGSPFRQSPIRDGRMQSASIQGLPSPSSIRGI

SEQ ID NO: 124504 - protein, 320 aa, Oryza sativa
  unsure (1)..(320): unsure at all Xaa locations
  Clone ID: PAT_MRT4530_27236C.1.pep
MSCLQLCKAFAAKESRREEVRRPASSRLNQMGASLSPISTKPTLTRQLPLGRSSALVWGKKSKAEYYPLYSASHTGRGGLTSAREGAPTCGPHLAVAQGAGPPWTRTTRVVHRRSTGPTAQIGPGPIGRCGXGGLARLSSAQSRPTGHGVRRRRTRXTGDGKRRREWRRRMVHRSTVAAEGDGKRAESGGASGEKWEGGRRGAPHRRAATGAGMKVAATTWRRGGADGRRRHLRRERRGVRGLEETRGEKNGRPELKGMEGLTDVQGNRSSRXGSGDWRRRAAGGGGERRRGGERRELSRSHGRERRERKGEEEGTGNVL

SEQ ID NO: 124505 - protein, 526 aa, Oryza sativa
  Clone ID: PAT_MRT4530_27237C.1.pep
MAHDAKMEDASHGYVYLAMAVVALLGVLLTKRSRKATAQRLPPGPWQLPVIGSLHHLAGKLPHHAMRDLARRHGPVMMLRLGEVPTLVVSSPEAAQEVMRTHDAVFATRALSATVRAATMGGRDIAFAPYGDRWRQLRKIAATQLLSARRVASFRAIREEEVATMLRAVAAAAADGRAVEMRAALCVVVADSTARAMVGESCQERDAFLREIDRSMELVSGFNPEDLWPSSRLAGRLSGAVRKIEASLHTVLGILDRIIQKRLQEKIGGAGAAAASEDILDVLLRIHKDGGAGGLQVPLDMDDITLVITDLFSGGGETVATLLVWAMAELIRNPMAMQKATAEVRRAFALPGVVSEGEGALGELRYLHLVIRETFRLHPPGPLLLPRECSEPCQVLGYDVPRGTQVLVNVWAIGRDERCWPAAAGGGSPEEFWPERFEDGAEAVDLRGNNFELLPFGAGRRMCPGVAFALANIELTLASLLFHFDWEVPGMADPAKLDMAEALGITARRKGDLLLRPVLRMPVPGV

SEQ ID NO: 124506 - protein, 97 aa, Oryza sativa
  Clone ID: PAT_MRT4530_27238C.1.pep
MGRDGNFPIGGGDPPDTHPYGDRDGDGDGDRAGFPPQVGRVRGPHICGAGGVGCLLLLASSASCSSLRCQPLPPHAASHLILLPCAANLFLLAPLVT

SEQ ID NO: 124507 - protein, 174 aa, Oryza sativa
  Clone ID: PAT_MRT4530_27239C.1.pep
LYNQIETMVRYYKIPVLLIEFSQDKSFSFQSASEIGDDVSPTNIISKLSLLVLHFPRLRIVWSRSLHATADIFLSLKTNQDEPDESKAMRVGVPSEDGVVENDVRAENYNTSAIEFLRRLPGVTDSNYRRIMEECNSLAELALLPVERLSELMGTQKGARMLKEFLDAKCPTML

SEQ ID NO: 124508 - protein, 58 aa, Oryza sativa
  unsure (1)..(58): unsure at all Xaa locations
  Clone ID: PAT_MRT4530_2723C.1.pep
FXQVGFVYRVNHRSPGYYEGGYWTMWKLPMFGCTDSTQVLXELEDAMKAYPDALVRII

SEQ ID NO: 124509 - protein, 72 aa, Oryza sativa
  Clone ID: PAT_MRT4530_27240C.1.pep
IIFIDDFTGSHHTTRNQPRSVAIFTTHPALSLSTTGPCMFPFVAIGYIAFFFHAQHPHSASSTAFQFNASTL

SEQ ID NO: 124510 - protein, 164 aa, Oryza sativa
  Clone ID: PAT_MRT4530_27241C.1.pep
RVGCSISLGLVFAGAAERFHSRTVLITGATGFIAKLLVEKILRLQPAVKRLYLLVRAADQVSANRRVESEIMQLPIFQPLREKYQTHFSSWFWDKVFPLAGDVSLKNFGIGDARLAEDIRKETNIIVHMAATVNFAERYDTALAINTMGVKHMIDFASKCTNLE

SEQ ID NO: 124511 - protein, 142 aa, Oryza sativa
  unsure (1)..(142): unsure at all Xaa locations
  Clone ID: PAT_MRT4530_27242C.1.pep
QLWLPKIGPLGLSXPKKVGEDIAKAXTGDWKGLRVTVKLTIQNRQAXVSVVPTASSLIIRALKEPPRDRKKEKNIKHNKSVALDEIIEIARTMKFKSFSKDLAGVVKEILGTAYSVGCQVDGKSPREITDAINAGEIDIPEE

SEQ ID NO: 124512 - protein, 349 aa, Oryza sativa
  unsure (1)..(349): unsure at all Xaa locations
  Clone ID: PAT_MRT4530_27243C.1.pep
MATDDGTGLACRATRPGQTTARCAGLPSPYMRLCPLITRQRWAAPKVTAGSARRYVADQPSFSSTLLDAIYKSMDEQPGHGGGATGVEAVAAAAKKQHEAALHYGNYYKPSLAGSYRARAPGPHATTSSSSECSSYGGFSSSEAESSHHRRLRPIRTTVPGGAPGPAPYHQLTAYQATGSAAAAAISQRHWLLLSLLGXLFPMERWAAPKVTAGSARXTSPTSRLSPPRCSTRYTSRWTSTRGQAKRTVRFLDSDRESLASSTVVDRLRVPVEAVQQMLLQRMEMESDEDDGREXSDASSDLFELENFAAIAPAGAAYRDELPVYETTRVALNRAIGHGYGHGRSARVV

SEQ ID NO: 124513 - protein, 54 aa, Oryza sativa
  Clone ID: PAT_MRT4530_27244C.1.pep
KQATLVQNSLTFIYSFLAINAVHELQVRLQCELCNVVACGMALVECGYTISCNM

SEQ ID NO: 124514 - protein, 113 aa, Oryza sativa
  unsure (1)..(113): unsure at all Xaa locations
  Clone ID: PAT_MRT4530_27245C.1.pep
MAGRRPEHTYPDDWSTKDQFMTRWSFSVRSCYTLFCDPPHTKCLGFSEAARDAHYLRWLLTASILSTELQXTKIMHNLGNYTVPXQVYMFMMDLXDRNDRLFYKLLMTPSRSC

SEQ ID NO: 124515 - protein, 108 aa, Oryza sativa
  Clone ID: PAT_MRT4530_27246C.1.pep
MAMAAVSAVGLVRHRGRSSKAGVSLLSSPLPQPSPWGPTNRGRRTKPSIAASGDGGGGAGICGGGGDRYCELNDVRIELDLREEVRLCFWLLLSSSARPSSAIPSSVD

SEQ ID NO: 124516 - protein, 134 aa, Oryza sativa
  Clone ID: PAT_MRT4530_27247C.1.pep
LSSKIITHFIGVLKDIIGSNPLFQRALYEFFHRIIISIFFIYFSYKPKRFPEQAVYRGFYLLDFAWPGFDQWWRAADVGITHHDGEREQAWVFSSAAKKNKTKFILIEKKWHCNNLPLVENKILTKPLLRVTLQ

SEQ ID NO: 124517 - protein, 48 aa, Oryza sativa
  Clone ID: PAT_MRT4530_27248C.1.pep
FSRIIGEDLAMGKFTILRMVPGNATFCNVKLDTFRSIIIGYSFFDGVT

SEQ ID NO: 124518 - protein, 632 aa, Oryza sativa
  Clone ID: PAT_MRT4530_27249C.1.pep
MDGSAELEAAERVVMRWDSTSASDEPMLFDGARAEAERFLRAVDDLRRLAPPSPAAVGSPRRLSSGSSSVSAGGGGGAATAVQVAMARLEDEFRHVLSSRALDLEIEALADLGGSLSISSDRSNSASSAELQVVDEDDSVSSLVGRRSSYRSLPSIREIDLLPDDAVSDLRAIASRMAAAGYGRECAQVYASVRKPAVDASLRRLGVERLSIGDVQRLEWKALEAKIRRWIRAARAAVRGVFASERRLCFLIFHDLPISNITVTAAAPATHDTPFAEAVKGAALQLFGFAEAISIGRRSPEKLFKIIDLHDALSDLLPDVSDIFAASKVAESIYVQAAEIRSRLADAVRGILSEFENAVLRDPPKTAVPGGTVHPLTRYVMNYSSLISDYKVTLSELIVSRPSASARLAAEGNELAPSLAELDLPEPDNQTPLAAHIIWIIVVLEHNLEGKASLYRDTALSHLFLMNNVYYIVHKVKDSPDLWNLIGDDYLKRLTGKFTMAATNYQRSAWLKILNCLRDEGLHVSGGFSSGISKSALRERFRSFNAAFEEAHRVQSGWCVPDTQLREELRISISEKLVPAYRSFLGRFRHHIENGKHPELYIKYSAEDLEIAVNDFFEGVPPSPHIRRRSHS

SEQ ID NO: 124519 - protein, 523 aa, Oryza sativa
  Clone ID: PAT_MRT4530_2724C.1.pep
MPGGGAMVAASGAGRPEYPGGLTMFVSMACLVAATGGLIFGYDIGVSGGVTSMDPFLSRFFPSVYRAQSAAAAAAGGNQYCRFDSQLLTMFTSSLYLAALASSLGAATVTRVAGRKWSMFAGGLVFLAGCALNGAAANVAMLIVGRVLLGVGIGFANQSVPVYLSEMAPARMRGMLNNGFQMMITTGVLAANLINYGTARIAGGWGWRLSLALAAVPAAVMTAGALFLPETPNSLLERGRRGEARRMLQRVRGEGVDMEDEYNDLVAAGEASHAVASPWRDILRRRNRPPLVMAVAIPLFQQLTGINVIMFYAPVLFRTLGFGGGASLMSAVITGGVNMAATLVSVLAVDRVGRRALFLEGGAQMVASQAAVGALIGARLGWSGTAAIPAGYAAAVVAAMCVYVAAFAWSWGPLAWLVPSEVMPLEVRPAGQSITVAVNMAMTFAVAQAFLPLLCRLRFVLFFFFAGWVAAMTAFVALFVPETKGVPIEDMAAVWSDHWYWKRFVDGDGDGARRRGDIEMGHK

SEQ ID NO: 124520 - protein, 435 aa, Oryza sativa
  Clone ID: PAT_MRT4530_27250C.1.pep
MTLPRQCAAACRTGGGGGGVVRCRAVAAAGGAVAVRDAVVAPVARRGAARKTAETVAGMWREVQGCGDWEGMLEPAPHPVLRGEVARYGELVGACYKAFDLDPASRRYLNCKYGRERMLEEVGMGGAGYEVTRYIYAAADVSVPTMEPSTSGRGRWIGYVAVSTDEMSRRLGRRDVLVSFRGTVTPAEWMANLMSSLEAARLDPCDPRPDVKVESGFLSLYTSADKTCRFGGAGSCREQLLREVSRLVAAYSGGGEDVSVTLAGHSMGSALALLSAYDLAELGLNRAAPVTVFSFGGPRVGNAAFKARCDELGVKALRVTNVHDPITKLPGVFLNEATAGVLRPWRHSCYTHVGVELPLDFFKVGDLASVHDLATYISLLRGADKKQPAAAAADAGGVLAKVMDFVGRRRGGGALPWHDAAMIQMGGLVQTLGLI

SEQ ID NO: 124521 - protein, 672 aa, Oryza sativa
  Clone ID: PAT_MRT4530_27251C.1.pep
MGYTHEIVVFTHFFYGDFALPTTKFFRGILEFYGINIYHLNPNSIVHIANFVHLFEAFLGIRPHFALIRRIFFLKPQPNKNKPCIVGGSSFQLHGTLCQKYFTLPLKTSNKGWHASWFYIQNPDPALPEYSCCPHKYQDIWNSLPMGEESAQALELLDRLLKLKEQGLQGEQITQHFIKCRLALIKEWSRTAFEYDGKNDQNQEDPDSIEYKIMKERMYKVFSYGIVLSFSHLLLVVPYNAFNPPPVGCSREEEEDIQRPMPKIRRSFRKPSYIDPTGKGTDPAANSETAGEEKTGSTDATKADTSKEKPPTGSQSATGEADADNELPTGNQSASAETSTNQEPLTGNQPGEGTEDPQRPHWDEDKDIPETEEHASSPPLNQNTDAGPEASTFDKVEGPAWPPPKIITGPMIGDEEEILRIKSTEDSQAPILGIVINKKKEYEEVALLTKTLNQATRLVNRIHHRNEAKTATLERLVPHLDTLEETRAKLHATKEEARRTEHALRDQIAELQDANFELSVSSKVQAAKISELERRIKVLENDKAALSKERDLAVKEFEDHKGKTKAQFNFLINKVEVAEKARDEVANTTTPIIQAMYLSSSGTSSLDVVEIFNKLRTAPDVYFKNIKEARNMGASMALAMTKSLYPKIDVDAIDGFAARTSEEDALYLINDA

SEQ ID NO: 124522 - protein, 735 aa, Oryza sativa
  unsure (1)..(735): unsure at all Xaa locations
  Clone ID: PAT_MRT4530_27252C.1.pep
MGYTHEIVVFTHFFYGDFALPTTKFFRGILEFYGINIYHLNPNSIVHIANFVHLFEAFLGIRPHFALIRRIFFLKPQPNKNKPCIVGGSSFQLRGTLCQKYFTLPFKTSNKGWHASWFYIQNLDPALPEYSCCPHKYQDIWNSLPMGEESAQALELLDRLLKLKEQGLQGEQITQHFIKCRLALIKEWSRTAFEYDGKNDPNREDPDSIEYKIMKERMYKVFSYGIVLSFSHLLLVVPYNAFNPPPAENALMKSDPPTAQRRSPWRQQSQATGGPKIQLDARGSTAGPTGQTGSRKRKMILSDDDDSDHESAGKQPKRAAPAKKKKTSXRPMPKIQRSFRNXGEEKTGSTDATEADTSKEKPPTGSQSATGEADADNEPPTGNQSASAETSTNQEPLTGNQPGEGTEDPQQPHWDEDKDIPETEEHASSPPLNQNIDAGPEASTFDKVEGPAWPPPKIITGPMIGDEEEILRIKSTEDSQAPILVKWWDDEMQPQGIVINKKKEYEEVALLTKTLNQATRLVNRIHHRNEAKTATLERLVPHLDTLEETRAKLHATKEEARRTEHTLRDQIAELQDANFEFSVSSKVQAAKISELERRIKVLENDKAALSKERDLAVKEFEDHKGKTKAQFNFLINKVEVAEKARDEVANTTTPIIQAMYLSSSGTSSLDVVEIFNKLRTAPDVYFKNIKEARNMGASMALAMTKSLYPKIDVDAIDGFAARTSEEDALYLINDA

SEQ ID NO: 124523 - protein, 215 aa, Oryza sativa
  unsure (1)..(215): unsure at all Xaa locations
  Clone ID: PAT_MRT4530_27253C.1.pep
MGASMALAMTKSLYPKIDVDAIDGFAARTSEEDALYLINDASTSLALFLTIKPSSSGLFLKTFLVPIILCLEGGSTKVQTLFLSKFSSKIWYXVYKGAQLVFKSAYHPHARGHIERVNQIXMLRACTFMYGSAXEICLPFAEFTYNNSYQFXMAPYKDLYGKKGVHIFQMKAMLAPTYNDPYKIQDRRGKVAYKLELPDELINLHLVFHESQLRK

SEQ ID NO: 124524 - protein, 161 aa, Oryza sativa
  Clone ID: PAT_MRT4530_27254C.1.pep
WSTETRGTDSRLSLKFDLPSYPQTLEELEMEFKREAMELAIARDKEEDEENYKHRESLSEMRENHMKRVTAMRSMHSRKWDEFLEQSFKRHQQAHPTSYAQTSYPDYDQRATQFAATGPPNDSKSEYPYITDSYSAPKPHAAYSEFEHERHDDFGRTYGRY

SEQ ID NO: 124525 - protein, 87 aa, Oryza sativa
  unsure (1)..(87): unsure at all Xaa locations
  Clone ID: PAT_MRT4530_27255C.1.pep
QDFSRIQCSADTPARSSAGITFFRRRISSTDLAVXGEDEDDNEEATGGHGRGVLPEVAVEASPEAAATAAGPAVAPPQKIRIVFGWA

SEQ ID NO: 124526 - protein, 168 aa, Oryza sativa
  unsure (1)..(168): unsure at all Xaa locations
  Clone ID: PAT_MRT4530_27256C.1.pep
PTRPIPSVGDIDVGNNAAMVKKDMYADSSKDSGSAELSSARVKEETHRGHRRAASAHADIGSWTMLCPNESESSADLPYDDKHQEPLLKIVKTCALTSALQSKPRTKXKGGSVKWAAVDQQDVEETIPLSSQMGQGSDRCFERSKSCVSTCDESTYNKKLYGCLGALH

SEQ ID NO: 124527 - protein, 402 aa, Oryza sativa
  Clone ID: PAT_MRT4530_27257C.1.pep
MVKVTCQANDQALVGFGYTQDNGKYSVSITGLPLSSTYGADSCKVELHSAPGGSDCNVPIELNLSGLSVYSKSNEEVVLQANQPSATTAACWHIIDNTICELLSIPATSKSAVISISDEAPEVADTPARSSAGITFFRRRISSTDLAVSKQHDPPTNEKENLYIADSYDFFPNAAAELVTSSNGLQGHTGEDEDDNEEATGGHGRGVLPEVAVEASPEAAATAAGPAVAPPQKIRIVFGKGLLVFPARVHNEPHGHVAWSDFQYIVDDYGDIFFQVPDSENILEDDAANNPVTVLIGMDGPIIGETSVVTSDFSDYMDVENFIDMPENDSKIDTEITDILIEWGMPATMRAIHPIYFAKCLTKAVHDKHREKMDSPSNGVSIVGYLIHKIFKMQKICNLLQL

SEQ ID NO: 124528 - protein, 63 aa, Oryza sativa
  Clone ID: PAT_MRT4530_27258C.1.pep
MNKQGSRKDANARKWKTTGNTICPSQPATELFHKRVSRSLPSWLTVYTLTIHAAGGDSKEMAN

SEQ ID NO: 124529 - protein, 50 aa, Oryza sativa
  Clone ID: PAT_MRT4530_27259C.1.pep
NPTTIFLAFLVTLPSCNIPLPPRFNIFLKIWRAIKGGKSIQLLLNLSCRI

SEQ ID NO: 124530 - protein, 731 aa, Oryza sativa
  unsure (1)..(731): unsure at all Xaa locations
  Clone ID: PAT_MRT4530_2725C.1.pep
ISISPNPRRAPQPLSGIGQTGHTIPVRPPYLPGQTGHAELVRPPVXTGQTGRAMPVRPPLVRPLSKCEFWLSEVKFLGHVISAKGVAVDPETVTAVTDWKQPKTVTQVRSFLGLAGYYRRFIENFSKIARPMTQLLKKEEKFVWSPQCEKAFQTLKEKLVSSPVLILPDTRKDFMEGHVVAYASRQLRPHEGNYPTHDFELAAVVHALKIWRHYLIGNCCEIYTDHKSLKYIFTQSDLNLRQRRWLELIKDYDVRIHYHPGKANVVADALSRKSRCNTLGVRGIPPELHQQMEALNLSMVGRGFLATLEAKPTLLDQIREAQKNDPDMHGILKNMKQEFVALCDVCQRVKAEHQRPAGLLQPLQVPEWKWDEIGMDFITGLPKTQDGYDSIWVVVDRLTKVARFIPVKTTYGGNKLAELYFARIVSLHGVPKKIVSDRGSQFTSHFWKKLQEELGTRLNFSTAYHPQTDGQTERLNQILEDMLRACVLDFGKAWDKSLPYAEFSYNNSYQASIQMAPYEALYGRKCRTPLLWDQVGESQVFGTDIMREAEAKVRTIRDNLKVARSRQKSYADNRCRNLEFAVDDFVYLRVTPLWGVHRFQMKGKLAARFVGPFRIISRREEVAYQLELPASLGNVHDVFHVSQLKKCLRVPSEQADSEHIEVREDLTYVERPVTILDTMERRTRNRVIHFCKVQWSNHAEEEATWEREDELKAAHPDLFASSSEYRGRDSV

SEQ ID NO: 124531 - protein, 492 aa, Oryza sativa
  Clone ID: PAT_MRT4530_27260C.1.pep
MGSCARVHALAVAWAVAALLSRATPAGALAANWGTRALHPLPGDVTVRLLRDNGFDKVKLFEADPSALRALGHTGIQVMVGLPNELLAPVSSSVAAAEQWVLHNVSSYISKLGVDIRAVAVGNEPFLKSYKGKFEAATLPAVQNVQAALVKAGLARQVRVTVPLNADVYESLDGRPSAGDFRPDIAGLMVGLVRFLLDNGGFLTINIYPFLSLQADPNFPADYAYFPSPGSPPSQASVQDGGVLYTNVFDANYDTLISALEKHGLGAIAVVVGEIGWPTDGDKSANAANAQRFNQGLFDRILAGKGTPRRPQMPDVYVFALLDEDAKSIDPGSFERHWGVFNYDGSRKYNLRLAGGRSIAPARGVRYLSRQWCVLRPDASPADPAIGGAVGYACQYADCTSLGAGSSCGGLDARGNVSYAFNQFFQAANQMKGSCNFNNLSMITTSDPSQGTCRFQIEIDTGRHDLAVASSASAAATSVAAVLLLALLGLVI

SEQ ID NO: 124532 - protein, 323 aa, Oryza sativa
  unsure (1)..(323): unsure at all Xaa locations
  Clone ID: PAT_MRT4530_27261C.1.pep
MQHGPQASFLTAPTLSLLCFLSISVPVKQDEATFAISCIAIDGCSFTELIIVYPWSLPSVAIPCPIIALHYRYASAIGKCGGIPEPMPLMVARRGGTYPHSSVPQSTGGATTMVLQTERRKVNGKLGPYFRTSRGLRQGDPWSPFLFNLVGDALSVILEEAVRNGVLGGIVPHLVEGGLSHMQYADDTILFTTIEEGDILALKFLLFCFEEMPGMKINYQKSEVYVLGVEKEEELRIADILNCKVGEMSFVYLGLSMGVDKLKKKDLIPAMQKARKRLESWHSGHLSFGGXEIRINSCLTSIPLYYMGFFYLPGYFHKKMDSL

SEQ ID NO: 124533 - protein, 165 aa, Oryza sativa
  unsure (1)..(165): unsure at all Xaa locations
  Clone ID: PAT_MRT4530_27262C.1.pep
PRLADTCSASASVASRSPTPRRAARCRSAARRCGSPARRRTGRMRRRPSPGRSTTSARRTPPVGGRXDSGTPERQRGEEARHRLPPPPGCRRRGRRRSRTPRGGGSRRWSLGARRCGRSRVAPAGPAARCLSWPTQGARERRPSSGSGGGGRRPHRRDQGGGGAA

SEQ ID NO: 124534 - protein, 141 aa, Oryza sativa
  Clone ID: PAT_MRT4530_27263C.1.pep
MVCRKDPLVACQTPTVQLEIHKGDDAFNGQNFGLDVIFDESMDNNKEDEVTMTYARYCSARDHVRSGKKNKEICHPCFFKFDQVVPIHKNEIKSHISNKHNTDGFLCPSSGCTVRACTLGDIGLHHLFCHEKKNGWWTYYL

SEQ ID NO: 124535 - protein, 186 aa, Oryza sativa
  unsure (1)..(186): unsure at all Xaa locations
  Clone ID: PAT_MRT4530_27264C.1.pep
MDRNAGSFVAMRRLSGGSSCHDPSPNTYAEVVAGSTAWIGRGFSCVCAQRRDSDQRISFDLSPAQECCLQRLQNRIEVPYDGSNGEHQEALKTLWHVSFPGTELLGLVSDQWKEMGWQGKDPSTDFRGGGFISLENLLYXFAKNYTKSFQELLCKQNGDRALWEYPFAVAGVDITFMLIQMLDLQA

SEQ ID NO: 124536 - protein, 361 aa, Oryza sativa
  unsure (1)..(361): unsure at all Xaa locations
  Clone ID: PAT_MRT4530_27265C.1.pep
IVLPPSPMPPCLLPMLEAKESIPPPFSASTSPCPIPPHPHPSSPPTXSAYFHFPPLPFRSSSPPPPPPLLPPPLPSAPAIAASPHPXAPPQPPSPPLLSSPPVPATTTPXPSPPPAPPTPSPLPARHPSLSLLPPPPAPSHTPTPPPLPPHPQYQHKHLLVAESARNRRPCAAPPRPPRAAPPTAAYARRLRPAXPAASPPSAARTDPASPSTASPFLKSQSQPLPPPSPVSSSPDLRWPPATPPGTRRSPAAAPPPPPTPTPRTSAAPPASPSTTAPAAARSCPAHHRRTRTRGSSSPLSAAAASAPPPPCSPSPASXTPPPPSPASPPCSGCSPWRPPPSPCRPARRRPRPARLAGPPP

SEQ ID NO: 124537 - protein, 82 aa, Oryza sativa
  Clone ID: PAT_MRT4530_27266C.1.pep
PGAATTHWLQSPPSPHGLEWDQVALHNSPTITVSLGLEPLSCALLEKHALLGLLRLPTRNILTKLCQEVGLWVHEHVVLLPL

SEQ ID NO: 124538 - protein, 1497 aa, Oryza sativa
  Clone ID: PAT_MRT4530_27267C.1.pep
MDISRANEGYTSCGPVVEMSWHRADVLLLGAQSCLPVPEVPAVGGVGSVLLCMARMGWKLCHVFHPYTVVMAGSINRRGLDLTGFVLELRGMCVVLGYPHGVDYQGKQLPEQEGDDAEPHAAWEVTAVILTGSPERTSLAVTAGGDSFSAACQNAALLAIGTLHQCYPDELQHSPYRYHPRRGGARDYATFRDASSEDDATIMHLARMVEAYDAARIDFHHMVRRGLVENNMKILELRQENLQLKKDLDTVEAQLCQLKIAQGEMVTTRRSAATGEGSHPEGSNHNKHGSPPPPPSPPPPPPPDTNSILTQILAQQANMMAAFLHHIQNPPQHNAPPPPPPPQHSKLAEFLRIRPPTFSSSNNPVDALDWLHAVGKKLDTVQCNDEEKVIFAAHQLQGPASLWWDHFQATQPKGQPITWARFTAAFRRTHVPAGVMALKKREFRELKQGNRSVMEYLHEFNNLARYTPEDVREDEEKQEKFLAGMDPELSVRLVSGDYPDFQRLVDKSIRLEAKHKELESHKRRLANFRNQQGANQRPSQGRKDAQGQQRLCFNCFEPGHFVDKCPKPRRQQGQAPPRPNNGGKDVIRGRVNHVTAEDVLTTPDVIVGTFLIHSIPATILFDSGASHSFISVPFMGRNQLGVERLRNPLLITTPGGVMTAKYYSPAVPIEIQGIPFPLDLILLDTNNLDVILGMNWLAQFQGVVDCARRTVTLYRGPEQPVVFFAPSTSVGSSELHQIGLSEIPIVREFGDVFPEELPGMLPKREIEFRIDLAPGTTPLYKRPYRMAANELAEKDKTKRMCVDYRALNEVTIKNKYPLPRIDDLFDQLKAATIFSKINLRSGYHQLRIREEDIPKTAFTTRYGLYEFTVMSFGLTNAPTLDKFVVVFIDDILVYSQSEEDHQQHLRLVLGKLREHQLYAKFSKCEFWLSEVKFLGHVISAKGVAVDPETVTAVTDWKQPKTVTQVRSFLGLAGYYRRFIENFSKIARPMTQLLKKEEKFVWSPQCEKAFQTLKEKLANVVADALSRKSRCNTLGVCGIPPELNQQMEALNLSIVGRGFLATLEAKPTLLDQIREAQKNDPDMHGLLKNMKQGKAAGFTEDEHGILWNGNRVCVPDDRELKQLILQEAHESPYSIHPGCTKMYLDLKEKYWWGGYDSIWVVVDRLTKVARFIPVKTTYGGNKLAELYFARIVSLHGIPKKIVSDRGSQFTSHFWKKLQEELGTRLNFSTAYHPQTDGQTERLNQILEDMLRACVLDFRKTWDKSLPYAEFSYNNSYQASIQMAPYEALYGRKCRTPLLWDQVGESQVFGTDILREAEAKVRTIRDNLKVAQSRQKSYADNRRRNLEFTVDDFVYLRVTPLRGVHRFQTKGKLAPRFMGPFRIIARRGEVAYQLELPASLGNVHDVFHVSQLKKCLRVPSEQADSEQIEVREDLTYVERPVKILDTMERRTRNRVIRFCKVQWSNHAEEEATWEREDELKAAHPDLFASSSESRGRDSV

SEQ ID NO: 124539 - protein, 455 aa, Oryza sativa
  unsure (1)..(455): unsure at all Xaa locations
  Clone ID: PAT_MRT4530_27268C.1.pep
MARMSWKLCHVFRPYAVVFXMAGSINRRGLDLTGFVLELRGMXTAVILTGSPERTSLAVTAGGDSFSAACQNAALLAICTLHQRYPDELQHSPYRYHPRRGGARDYATFRDASSEYDATIMHLARMVEAYDAARIDFHQMVRRGLVENNMKILELRQENLQLKKDLDTVEAQLCQLKIAQGEMVTTRRSAATGEGSHPEGSNHNNHGRPPPPPPLPPPPPPDTNSILTQILAQQANMMAAFLHHIQNPPQHNAPPPPPPPQHSKLAEFLRIRPPTFSSSNNPVDALDWLHAVGKKLDTVRCNNEEKVIFAAHQLQGPASLWWDHFQATQPEGQPITWARFTAAFRRTHVPAGVMALKRREFRELKQGNRSVMEYLHEFNNLARYAPEDVREDEEKQEKFLAGMDPELSVRLVSGDYPDFQRLVDKSIRLEAKHKELESHKRRLANFRNQQGANQR

SEQ ID NO: 124540 - protein, 1469 aa, Oryza sativa
  Clone ID: PAT_MRT4530_27269C.1.pep
MVMPMVTTRRSANTGDGNQPEGSNHNNHGSPPPPPPPPPPPPPDTNAILTQILAQQANMMTAFLHHLQNPPQQNAPPPPPQHSKLAEFLRIRPPTFSSSNNPVDVLDWLHAVGKKLDTVQCSDEEKVIFAAHQLQGPASLWWDHFQATQPEGQPITWARFTAAFRRTHVPAGVMALKKREFRELKQGNRSVMEYLHEFNNLARYAPEDVREDEERQKKFLAGMDPELSVRLVSGDYPDFQRLVDKSIRLEAKHKELESHKRRLANFRNQQGANQRIRYTNPYPGGSSSQQQQQPRSAPRPQFVVRVPQPQQQQSQQGTCAPRPPTPAAQSGQGRRDVQGPQRLCFNCFEPGHFADKCPKPRRQQGQAPPRSNNGGKDVIRGRVNHVTAEDVLTTPDVIVELHQIGLSEIPIVREFGDVFPEELPGMPPKREIEFRIDLAPGTTPRYKRPYRMAANELAEVKKQLEELKEKGYIRPSTSPWGAPVIFVEKKDKTKRMCVDYRALNEVTIKNKYPLPRIDDLFDQLKGATVFSKIDLHSGYHQLRIREEDIPKTAFTTRYGLYEFTVMSFGLTNAPAFFMNLMNKVFMEYLDKFVVVFIDDILEKYWWVSMKREIAEFVALCDVCQRVKAEHQRPAGLLQPLQVPEWKWDEIGMDFITGLPKTQGGYDSIWVVVDRLTKVARFIPMKTTYGGNKLAELYFARIVSLHGVPKKIVSDRGSQFTSHFWKKLQEELGTRLNFSTAYHPQTDGQTERLNQILEDMLRACVLDIGKTWDKSLPYAEFSYNNSYQASIQMAPYEALYGCKCRTPLLWDQVGESQVFGTDILREAEAKADLEQIEVREDLTYVERPVKILDTMERRTRNRGRGRTASCRCAGVVAFGRTERLPRGARLSAARALRTMIITSSEFTPEDAARIPKLQVLGQALLLIAFGSGENRREEQVLFDVVDIPYNYNAILGRATLNQFEAISHHNYLKLKIPGPAGVIVVKGLQPSATSKGDLAIINRAVHNVEAELHSRPKHAPKPTPHSKIVKVQIDDADPAKLISLGDGMGEQEAEGILAVLKKNIDIFAWSPDEVGVVSTDLIMHQLAIKPDAKPRKQKLCKMSADRQEAAKAEVQKLLRAGVIQEIDHPEWLANPVLVRKSNGKWRMCVDFTDLNKACPKDDFPLPRIDQLVDSTAGYELMSFLDAYSSYHQIHMNPPDIPKTAFITLLGIFCHLRMPFGLRNAGATFARLVYKETFDNLRAAGIKLNPEKCVFGIRAGKLLGFLVSERGIEANPEKIDAIQQMKPPSSVHEVQKLAGRITALSRFLPKVAERGLPFFKTLRGMGKFSWTPECQAAFDELKQYLQSPPALISPTLGSELLLYLAASPVAVSAALVQETEFGQKPVYFVSEALQGAKARYIEMEKLAYALVMASRKLKHYFQAHKVIVPSQYPLGEILRGKEISGRLSKWAAELSPFDLHFVARTAVKSQA

SEQ ID NO: 124541 - protein, 395 aa, Oryza sativa
  unsure (1)..(395): unsure at all Xaa locations
  Clone ID: PAT_MRT4530_2726C.1.pep
HAKGATSVPVPTSNGNPSVNGPMLTRQPNGVVANIKTEPTTLPPMVSAPAFSHVTPVANGVSQGLSSVQSPSPSLISQETNLANDSVQEHKPLINPIQQSIRPGGPANVSILNNLSQHRSVATIISGGMPGIPMSGTGQSIGSQQVVQNTAFGSNTPITGNSNIAVSSSLGGIQSNIGISGPPVTQGGSMGSTQLGQGGINTNQNMISSLGTTTVSSAPAMMPTPGXAQQAGVNSLGVTNSSAMNMPIVQHPNAQQQQQQQQQQQQQQPPPKYVKIWEGTLSGQRQGQPVFICKLEGYRSGTASETLAADWPETMQIVRLIAQEHMNNKQYVGKADFLVFRTLNQHGFLGQLQEKKLCAVIQLPSQTLLLSVSDKAGRLIGMLFPGDMVVFNRGP

SEQ ID NO: 124542 - protein, 141 aa, Oryza sativa
  Clone ID: PAT_MRT4530_27270C.1.pep
MVAWIREQSSMERKWKKQQRKKIKCGEPHMEGDFLPSATIIIMDGGRRAAASPPRTDQIVRLCFVPATPGTSGHVPFSNWLDFQIHCLKNQKLNQVQTRPKGASGSSTENPRTLVTNPLAQRKPIKKQTKNGESTDKAPNS

SEQ ID NO: 124543 - protein, 605 aa, Oryza sativa
  Clone ID: PAT_MRT4530_27271C.1.pep
MEVDEVGGSMDISRTNEGYSSCGPMAGSINRRGLDLTGFVLELRGMCVVLGYPHGVDYQGKPLPEQEGDDAEPHAAWEVTAVILSGSPERTSLAVTAGGDSFSAACQNAALLAIGTLQQRYPDELQHSPYRYHPRRGGARDYATFGDASSEDDATIMHLARMVEAYDAARIDFHQMVRRGMVENNMKILELRQENLQLKKDLDALEAQLCQLRIAQGEVCRPKRRRVCRSQKITARKSTSRPELIRQSLAWTCFVETPRAEPVLVLSLFAGSVWGFQMVTTRRTAATGEGSQPEGSNLNDHGSPPPPPPPPPPPPPDTNAILTQILVQQANMMAAFLYHIQNPPQHNAPPPPPPPQHSKLAEFLRIRPPTFSSTNNPVDALDWLHAVGKKLDTVQCNDEEKVIFATHQLQGPASLWWDHFQATQPEGQPITWARFTAAFQRTHVPAGVMALKKREFRELKQGNRSVMEYLHEFNNLARYAPEDVREDEEKQEKFLVGMDPELSVRLVSGDYPDFQRLVDKSIRLEAKHKELESHKRHLANFRNQQRANQRVRYTNPYPGGSSSQQQQQQQPRSAPRPQFVVRVPQPQQQQSQQGTRAPRPPTPAV

SEQ ID NO: 124544 - protein, 521 aa, Oryza sativa
  Clone ID: PAT_MRT4530_27272C.1.pep
MDISRTNEGYTGCGPMAGSINRRGLDLTGFVLELRGMCVVLGYPHGVDYQGKQLPEQEGDDAESHAAWEVTAVILTGSPERTSLAVTTGGDSFSAACQNAALLAIGTLHQRYPDELQHSPYRYHPRRGGARDYATFRDASSEDDATIMHLARMVEAYDAARIDFHHMVRRGMVENNMKILELRQENLQLKKDLDALEAQLCQLKVAQGEMVTTRRTAATGDGNQPEGSNPNIQGGPPLPPPPPPPPPPDTNPILTQILAQQANMMAAFLHHIQNPPQHNAPPPPPPPQHSKLAEFLRIRPPTFSSSNNPVDALDWLHAVGKKLDTVQCNDEEKVIFATHQLQGPASLWWDHFQATQPEGQPITWARFTAAFRRTHVPARVMALKKREFRELKQGNRSVMEYLHEFNNLARYAPEDVREDEEKQEKFLAGMDPELSVRLVSGDYPDFQRLVDKSIRLEAKHKELESHKRHLANFLNQQGANQRVRYTNPYPGGSLSRPEFLSKIPNAYMCVNPRPGISRGTQ

SEQ ID NO: 124545 - protein, 177 aa, Oryza sativa
  Clone ID: PAT_MRT4530_27273C.1.pep
MSLSSSSNSLPYSTDQGGYSTHDTLVLLGIGFFATAVSVLMIVLCECLCCRRRRRGGGTVVYVAARPFFLGGGGLSASAVATLPSFVYRREEWAEAAPRGDGSGSGRGGGGGWAQCAVCLSIVQEGETVRQLPACKHLFHVGCIDMWLHSHSTCPLCRASVEPLGKETPLKDQAPPV

SEQ ID NO: 124546 - protein, 239 aa, Oryza sativa
  Clone ID: PAT_MRT4530_27274C.1.pep
MNLSGRDNYQGKQLPEQEGDDAEPHAAWEVTAVILTGSPERTSLAVTAGGDSFSAACQNAALLAIGTLHQRYPDELQHSPYCYHPRRGGARDYATFRDASSKDDATIMHLARMVEAYDAARIDFHQMVRRGLVENSMKILELRQENLQLKKDLDAVEAQLRQLKIAQGEVCRPKRHRVCRSLKITARKSTSGPELVRQSLSTIIAFSKIIIRVLQTFHAKACRVAKTKTVKGEKIKNMA

SEQ ID NO: 124547 - protein, 567 aa, Oryza sativa
  Clone ID: PAT_MRT4530_27275C.1.pep
MATNAAAPPCPCYDTPEGVDILGRYDPEFAAILTRDALAFVAGLQREFRGAVRYAMERRREAQRRYDAGELPRFDPATRPVREAGGWACAPVPPAIADRTVEITGPAEPRKMVINALNSGAKVFMADFEDALSPTWENLMRGQVNLRDAVAGTITYRDAARGREYRLGDRPATLFVRPRGWHLPEAHVLVDGEPAIGCLVDFGLYFFHSHAAFRSGQGAGFGPFFYLPKMEHSREARIWKGVFERAEKEAGIGRGSIRATVLVETLPAVFQMEEILHELRDHSAGLNCGRWDYIFSYVKTFRARPDRLLPDRALVGMAQHFMRSYSHLLIQTCHRRGVHAMGGMAAQIPIKDDAAANEAALELVRKDKLREVRAGHDGTWAAHPGLIPAIREVFEGHLGGRPNQIDAAAGDAARAGVAVTEEDLLQPPRGARTVEGLRHNTRVGVQYVAAWLSGSGSVPLYNLMEDAATAEISRVQNWQWLRHGAVLDAGGVEVRATPELLARVVEVEMARVEAEVGAERFRRGRYAEAGRIFSRQCTAPELDDFLTLDAYNLIVVHHPGASSPCKL

SEQ ID NO: 124548 - protein, 171 aa, Oryza sativa
  Clone ID: PAT_MRT4530_27276C.1.pep
MAGSVSRRGLDLTGFVLELRGMCVVLGYSHGVDYQGRTLPEQEGDDAEPHAAWEVTVVILTGSPERTSLAVTAGGDSFSAACQSAALFAMGTLHQRYPDELQHSPYRYHPCREGARDYATFRDASSEDDTTIMHLARRRRRRHGSIDFHQMVPRGVVGRARAVRESINNTK

SEQ ID NO: 124549 - protein, 238 aa, Oryza sativa
  Clone ID: PAT_MRT4530_27277C.1.pep
EGERSERAHINTMSRSSMAAVFLVVLIAINVVCLSPQGATAAPEGELHKLNLELPPPLPPGKEPSTEAYRFTQQVCDFGTSTFTEQMIGARCYDVLIPYGESFKGNQVKATQVATIILVTKIQALTSEAYAIRDMGIRDENINNCGSFFAIGETFSDTTNSTLYALERLTAAGEGKRSKEDLETVHKWTKNLETQYDETASKCKLGDLFKYGDKKVPTVWVIDLLTTTAIRLLNAIKP

SEQ ID NO: 124550 - protein, 243 aa, Oryza sativa
  Clone ID: PAT_MRT4530_27278C.1.pep
MSWHRAGVLLLGAQSCLPVRGVPAVGGVGSVLLSMARMGWKLCHVFRPYTVVMAGSINHRGLDLTGFVLELRGMCVVLGYPHGVDYQGKQLSKQEGDDAEPHAAWEVTAVILTGSPERTSLAVTAGGDSFSAACQNAALLTIGTLHQRYPDELQHSPYRYHPRRGGARDYATFRDASSEDDATIMHLARIVEAYDVARIDFHQMVRRGLVENNMKILELRQENLQLKKDLDAGEAQLCQLKIA

SEQ ID NO: 124551 - protein, 493 aa, Oryza sativa
  Clone ID: PAT_MRT4530_27279C.1.pep
MADKTLREFAAPSTGNVAIGPQINMGDVDFDLKSSLIMMAQACPFCGEPNEDANAHLQQFLEICITYTIKGIKGVSPDAVRLRLFLFFLLGKTKQWFMPTVLCQHLGQMLYGIPLENFYNGLTPMSRDHLDAAAEGSFFSKVVRGAVDLIEKMVSNMGWSEERLQTHQRGMCFVKETELLAAKLDLLMKRLDDHDKRPQGTIKALDSHVTCEMAGSINRHGLHLTGFVLELRGMCVVLGYLHGVDYQGKQLPEQEGDDAEPHAAWEVTAVILTGSPERISLAVTAGGDSFSAACQNAALLAIGTLHQRYPDELQHSPYRYHPRRGGARDYATFRDASSEDDATIMHLARMVEAYDAAHIDFHQMMRRGLVENNMKILELRQENLQLKKDLDAVEAQLRQLKIAQGEVCRPKRRRVCHSLKITARKSTSRPELVRQSLAWTCFVETPRAEPAPVVPQEEGASGVGSTEDALLLTFRPGSSQHAPPPPSLEHDLC

SEQ ID NO: 124552 - protein, 293 aa, Oryza sativa
  unsure (1)..(293): unsure at all Xaa locations
  Clone ID: PAT_MRT4530_2727C.1.pep
PSFVHHATRRGNDNDERARRRQTGXNGDERRGDGFGGDPWTKARRGRHEAXRRGGEDEDDDGXAAATGTGEGATRAAGSGCTETGTTRNTPQRXTXRRRRRETTSRARMNGTSTTRTIGDDDDGPRRGLDGGETMPRTTLPLRCRRWWWXGRPMHGEEGRAAEQLRXGGRRGSRRRSGETEGRPGWRAMRRRRGRXTATSADALARRPGQPEEMPPRRKEKPARATVFRRSSGEAEVMPGMRAASWSRGRWWRRRPALRGRGRGGRRRRSGGDATGRRRGRVSGDFPAKRRVA

SEQ ID NO: 124553 - protein, 102 aa, Oryza sativa
  Clone ID: PAT_MRT4530_27280C.1.pep
TCVIILRACNMHSIEPVNSIWHPSFPLWPRHRGLWPSIIFRRNRLKVIVLWYPTLHNRIPYISPFSRDSSAIFATSSLVGCVPELSASPLLPRAGALEGLKK

SEQ ID NO: 124554 - protein, 256 aa, Oryza sativa
  Clone ID: PAT_MRT4530_27281C.1.pep
MAWQQPMDGSHASGSKAAAAVADGPGTQRTQYPYVTGSSIIALKYKDGVIMASDTGASYGSTLRYKSVERIKAVGKHSLIGASGEFSDFQEILRYLDELTLSDHMWDDGNSLGPKEVHSYLTRVMYNRRNKFDPLWNSLVIGGVKKGPKGEEKYLGMVNMIGTHFEENHIATGFGNHMAIPILRTEWREDMTFEEAVKLVEKCLLVLLYRDRSSINKFQIAKITTEGATIYPPYSLKTYWGFAAFENPAQGAVGSW

SEQ ID NO: 124555 - protein, 68 aa, Oryza sativa
  Clone ID: PAT_MRT4530_27282C.1.pep
WIPGLQLISLSLILAVAPPLQLPLLPVEMTGANHHRTPGGYILSPLMSKLFLPYIILMMMFCVVFSLV

SEQ ID NO: 124556 - protein, 583 aa, Oryza sativa
  Clone ID: PAT_MRT4530_27283C.1.pep
MAAASAVASSSSSPALEPHPDLSPVFSSPSAASSSSSSSRDEGARGVSCEGGGGDDVFDLDAPWVAAAEAESRLEEAVTAAAAARVGLCCTEEKGKGKGEKEEDEIRNNRQRQEDEIYIHYDLNDGAEVCAKLSSANEKNPKDGRCCVGIEGHGDEPEDFSYTCNFEYLPPLVLTCLLPLSYPSKEPPYFTVTVKWMDGPNVSQLCKMLDTIWAELPGQEVVYRWVESLRNSSRSYLWFDGKITLGPDTPMQKGDNRAISRSLSLESVIPSMLSYSSKKRYQAFLEDLHMCMICLSQSKGSNFIRLPCQHLFCVKCLGTLCRMHVKEGSVFQLVCPDTKCNASIPPYVLKRLLTEDEFERWDRLTLEKALDSMSDVVYCPRCVIGCLEDEDNNAQCPKCSFFFCSFCKEPCHPRRQCLTPEEKLQRRQASGRMSEREVAQEILNIKALYNDVRLCPKCRMAISKTAGCNKMVCGNCGQFFCFRCGKAIKGYDHFSECKLFAPRDISAWERQMEEQYGNHVRLSLRPVGGTIRCPKCRERNFKDDEKYIFCWACRANYCTMCRREVQDKRGHFGSPECVGLEDF

SEQ ID NO: 124557 - protein, 106 aa, Oryza sativa
  Clone ID: PAT_MRT4530_27284C.1.pep
NLIGSQRCFSGYPAQGVVPFPCIVQQLVFVEGVPIRDPPFPFWGIALGWILFLRGFFLAALPGGFLGKFLSPPRAKKGTLFGETGSHQSKFGGPYYFRTPIPFLKM

SEQ ID NO: 124558 - protein, 47 aa, Oryza sativa
  Clone ID: PAT_MRT4530_27285C.1.pep
GVYEFCKYVSNLDRPETHRYIDMFYAFKSLSLTSTVPMAVDEESASK

SEQ ID NO: 124559 - protein, 485 aa, Oryza sativa
  unsure (1)..(485): unsure at all Xaa locations
  Clone ID: PAT_MRT4530_27286C.1.pep
MADYPRTHRGESMEGFVAELANMTLVAGYLEAPEYIVIEPXSGELPHRVRLEVHSILGTPLVIMVVETSGGIAEHACQEASYLVMTRIXEKFAFIFDGTAYRYRPNRSAGGTTSTFSSASSDNDTTSGHIRTVMRALDKMHVDLHRASKTLNDRKLVQIARLQGRPVPRRARIRTMPRKRSTTLVLLKLASKDVPATFAPIAVPAVDPVPTPFRACSPLPMLSTAEATVVCDAXSGSCQSPVATTIPCAYGMVLNKKXKMVNTRTNRFRNNTNEEHQSGTSVXSGSGAMPENPTLAQATAGQTRMMTAMMNQMQQQYHQMMQHMMQQQQXTQQNNGTSLSKLPGFIRVRPPTFSSTTNPMETSNWLYTIEKKLNLLXCTNQVKVAYATHXLQGLALAWWDNYMVTRSAGTEXWDEFXACFRESXVPDGIVAQKKRDFRSLHQGNKTVTEYLHEFNHLAHYAPEDVCTDAERQEKFIAGLDDELTI

SEQ ID NO: 124560 - protein, 185 aa, Oryza sativa
  unsure (1)..(185): unsure at all Xaa locations
  Clone ID: PAT_MRT4530_27287C.1.pep
WGGGDGEPAPALVTTTTRSGGGEFFSSPPRIHHRXEAVNGETRIRRRRRRLLSPXRAPAPGPPPPPPPSTRAPASGPPPPPSPSFHPPAPAPAPPPPSLHEPARLLAPSVRCHRNSPLRQPPLPPPPSASSERRRRRPNNAAAASRRPIGACSPSRRSVEKRREEKREERRRGEEKRELTGGSYM

SEQ ID NO: 124561 - protein, 95 aa, Oryza sativa
  Clone ID: PAT_MRT4530_27288C.1.pep
DCLCGRYLAELLAERQKLAPFVQVLPFCTRLLNQEILRASSLPPNHNFVDPERIEHGSPLRLPGLPVNGQPMDLEGWSGMQTENMKVLQASSMGW

SEQ ID NO: 124562 - protein, 50 aa, Oryza sativa
  Clone ID: PAT_MRT4530_27289C.1.pep
MATPHQLNGPTNRVGCRWHWLRAVDRQASTLLERACSGRQFSHWLTLSLP

SEQ ID NO: 124563 - protein, 97 aa, Oryza sativa
  Clone ID: PAT_MRT4530_2728C.1.pep
MPARRRGARAVGVGAGWRPQRRHLGGGQRHGGGVVVVEEVPRGGIQSIAIVQGVLQCWRVEMVADMEVTRRRGVDNDDGDDGEVEGEDKAWVPTMPS

SEQ ID NO: 124564 - protein, 122 aa, Oryza sativa
  Clone ID: PAT_MRT4530_27290C.1.pep
MASSFNDDDTATLSGVVEWGGAGKPARRWRAKPAGGRVAKPAAWSGRVGVTRTTSSSSPSSSIFVPPSLATSTAADRVGSRAGPCLRAAPTLLRTISPDGEPRATHGWPTAAPPHRAGAARR

SEQ ID NO: 124565 - protein, 56 aa, Oryza sativa
  Clone ID: PAT_MRT4530_27291C.1.pep
EVKLYQSHSILKRIPAIARHNEHFLSRKQKGYSTGLRGVKSGTLSICVAETGNRAQ

SEQ ID NO: 124566 - protein, 226 aa, Oryza sativa
  unsure (1)..(226): unsure at all Xaa locations
  Clone ID: PAT_MRT4530_27292C.1.pep
MRGSDPDRGGGEPDISKLFCHYNALYFHDSLGTCAVSWATDEDPLPNREVGGCEYYLXGGGCIILLSRSLYEHHTDLDLKNALLYEMIHAYMCIKDSNDTDAWDGPKFQKLMNTINLNSVADPHRPLGGYSITVFHEIRKKFYIHKCESCGDLIKSTKIKGPSQDDCIEAMGANDLCDSLICHWHWHKKRCTGSYHRVQGSSSGCVEGSKALSVEAPDCKVEESRP

SEQ ID NO: 124567 - protein, 44 aa, Oryza sativa
  Clone ID: PAT_MRT4530_27293C.1.pep
MDHGMVLGIAEHINHVYVGQDVLMAWESIAGDGLGVGLGIRRCP

SEQ ID NO: 124568 - protein, 69 aa, Oryza sativa
  Clone ID: PAT_MRT4530_27294C.1.pep
LDIAGHPVWGGATRHARSPPAAIPCRRGRRRRRQRTGAVTAAVAGDGRGGGGGWARRRRVTPRTSPERN

SEQ ID NO: 124569 - protein, 69 aa, Oryza sativa
  Clone ID: PAT_MRT4530_27295C.1.pep
GLTSPQTKKDQTRDRRMPRTHKCDSTDNLRPTTEPVTQHPTSQHIKTYDTHISNLKLEEQDNNNNILLI

SEQ ID NO: 124570 - protein, 145 aa, Oryza sativa
  Clone ID: PAT_MRT4530_27296C.1.pep
MGRGRGRGRKLTNGRSHEDKGSSGEEVVPARKRRGRPQKRIVDKVVDQAEAKNLTEGDDGDADYQQGEGEDGGAKPKVSRTEKSSAGKGNKRNRLPKEEESSNLDLEENSSSTRSSNDESTRSNGFRQNGSRRKSTPRRAAEAGI

SEQ ID NO: 124571 - protein, 118 aa, Oryza sativa
  Clone ID: PAT_MRT4530_27297C.1.pep
GAGEKAMAMKEEVAEETGEGGAAADKAPNGDHTTAPKLDTSELRKRTTYPAHKAEIKETPRFHDVSIPTANGYKNQRATHRHQHRRGLPKRGAPDRSHHNHPHLPDRRGERRAHKPDG

SEQ ID NO: 124572 - protein, 96 aa, Oryza sativa
  unsure (1)..(96): unsure at all Xaa locations
  Clone ID: PAT_MRT4530_27298C.1.pep
PRIHYKGSKSTGGAPXSRSSTDCSFDSVREGERIKSMQAXASAGKKKDETIEHLQPTTVEDVRKEIENMGLSKREHSNEASMVEIIHRKSHTGPTY

SEQ ID NO: 124573 - protein, 51 aa, Oryza sativa
  Clone ID: PAT_MRT4530_27299C.1.pep
MLYWRKTGDIEVLSAPFQDVGCHTNPPLRRELAPAARFPLLLLLPCAPQVR

SEQ ID NO: 124574 - protein, 80 aa, Oryza sativa
  Clone ID: PAT_MRT4530_2729C.1.pep
MSRSGQPPDLKKYMDKKLQIKLNANRVVIGTLRGFDQFMNLVVDNTVEVNGNEKNDIGMVVIRGNSVVMIEALEPVPKPQ

SEQ ID NO: 124575 - protein, 140 aa, Oryza sativa
  Clone ID: PAT_MRT4530_272C.1.pep
MASRVVVLLVVAAACVLGAADAKLGRLVVTGVVPCNTGSLIDIATSPAFPNADVELRCAGKLVAGATTNSNGSFAMEADLTSGLAMLIGGCKLVVDTPLIKCDANLPAAGSLVSYLQGPLTRLLGGIFRLFPAGFSFHAH

SEQ ID NO: 124576 - protein, 72 aa, Oryza sativa
  Clone ID: PAT_MRT4530_27300C.1.pep
LFISHLFHHIQILTHPQNYQPKKFLTNSFKQTSVKNLFFSHFPLKLSLKTTISPNSLFFFTTNNFFNPVTYN

SEQ ID NO: 124577 - protein, 112 aa, Oryza sativa
  unsure (1)..(112): unsure at all Xaa locations
  Clone ID: PAT_MRT4530_27301C.1.pep
RKKREKKDNIGRREEKEKKKKKIERKKLIEEEGRKEEXKEGKRKDKKKEGVEKRKNKRIREAKWQPPRGSPTSPPILCGVAIHLLIRRDTAWSHRRGSREHRTRGTNREIRT

SEQ ID NO: 124578 - protein, 364 aa, Oryza sativa
  Clone ID: PAT_MRT4530_27302C.1.pep
MADTSPLHRIIGAAMWDAEPLLGRLVILAHAAFLDAGFVSTGAANDDGAQSSVRLPRQVGATASALSLRYTAPQLLHRHRQDAAAAAAATVALRVCAHGRRHVVFYVCVRFANPWLDTYWICLDAPAAAALLAGGLDDTARALARRERGARLAALWSALADRLCRRVLVDLCAKNGVPVEPEHELMSLPDDVKVAILARLAAGEDLARVECTCVGLNLLVAEHDSTLWKPMYTKLRSQLRRRLRFLGVSYGEPTAVSWKARYVAVRRRRVPAAHDVFMGEILLPVMTEWMRVPWIRRYPFVPPPPPESPEEEETVVPRRRRRRRAMPRDAGHGRAAPGHGGDKKQWRGAGAVHSPSSGFRWKHR

SEQ ID NO: 124579 - protein, 74 aa, Oryza sativa
  Clone ID: PAT_MRT4530_27303C.1.pep
MRQRSSTGIGHAAAEEEGREGSSLEKAPAASPHCFVGEHITGEDMQHHGHRRPALAWGVTTEDAVAGIEPQHGA

SEQ ID NO: 124580 - protein, 71 aa, Oryza sativa
  Clone ID: PAT_MRT4530_27305C.1.pep
MGMNLRTEQGKLTHLCFSTNRPMYKQRSRLIRSQVWRHLIQIALSRVEAGRNTSVRDKMKVCRSKRTGSSE

SEQ ID NO: 124581 - protein, 87 aa, Oryza sativa
  Clone ID: PAT_MRT4530_27306C.1.pep
MAMKTKDSQKEKKRKHLKNHRVYQISCALCYGPQVKHQGKVLQEHFICLFRALICSPLILSLVKKAFLSSNFSMNQKIKAMKILPPV

SEQ ID NO: 124582 - protein, 177 aa, Oryza sativa
  unsure (1)..(177): unsure at all Xaa locations
  Clone ID: PAT_MRT4530_27307C.1.pep
ATETRLNHKHGVEPWSSGRRTPEATGEGPRPRLRRLDDVLPGGVVDEGGSRGRDVVKLPLTAPSRRQAILLAACCSLSDGAAAPLRRALAAAPPCAWHPRRASLRAVLGGRHASLPRAPTGPPPRLPARARLHRLRRALARGSCPALPPPXAACNPAIAFGVEIGSSGHGLGICLFH

SEQ ID NO: 124583 - protein, 207 aa, Oryza sativa
  Clone ID: PAT_MRT4530_27308C.1.pep
ILITYDCNIAQDQGPLYWVATETRLNHKHGVKPWSSGRRTPEATGEGPRPRLRRLDDVLPGGVVDEGGSSGRDVVKLPLTAPSRRQASCSLLAGSLADGAAAPLRRALAAGPPAAAPPCAWQPRRASLRAGRGGRHASLPRAPADPPPRLPARARLHRLRRALARGSCPALPPPLVACAAATACNLAIAFGVEIGSSGQGLGICLFH

SEQ ID NO: 124584 - protein, 450 aa, Oryza sativa
  unsure (1)..(450): unsure at all Xaa locations
  Clone ID: PAT_MRT4530_27309C.1.pep
MEDVDERVDLHQGEAALQAAEKPFYDILGQSWEATEKPFYDILGKAYPSSSKETAINGDSQADYPDNGSSSYHEQACSGSFVSDLLGSQDAHSITTDWSSEFDRLALQFRRGVEEAKRFIPNIEKLVDDPEKNGLYACKQTTETTEQKGKHENKIRNHPHDPHVEHIELMEARNSKHMAISTSETIRDEMFDSILLCNRQLPGEVANLRGMMAKEASDNPKKFQSKGYGKGQRKPHSSKKKQKEAIDLSVLLIQCAQAIASNNHPFASELLRKIRHHALPDGDGSQRLANCFADGLEARLAGTGSQXRLANEEGGPPKLRITGXASRWETVQIEDLNIDKDEVFILGVVNGLYSSPFFLTRFREVLFHYSSLFDMLDNNVPRNHEARILVEKDLFGNDALNAVACEGAERIERPESYKQWQMRILRAGFKQRPGWKGRIIQALSTWKVET

SEQ ID NO: 124585 - protein, 61 aa, Oryza sativa
  Clone ID: PAT_MRT4530_2730C.1.pep
TKNSTAGYYSYLSPNNKIKSINYFAVSLIHATLVFFITIQNLPLQQLYSLLPTYPLQNPVT

SEQ ID NO: 124586 - protein, 56 aa, Oryza sativa
  unsure (1)..(56): unsure at all Xaa locations
  Clone ID: PAT_MRT4530_27310C.1.pep
RMYGRSRYAETGCPCSESVRSLDALLXPYRPRRRPSPQPRRRWVIRAEFGXGSGTR

SEQ ID NO: 124587 - protein, 1363 aa, Oryza sativa
  Clone ID: PAT_MRT4530_27311C.1.pep
MVIELPFDNQYTTTETEQPHDGSSCSSQQQLSLYNYSPSDPQLFSQPTTGSRTYLSGAVTIPGICNDKSNLGQQQFQIDAALSLGYQRIRSSDALCYISRVLMEDVDERVDLHQGEAALQAAEKPFYDILGQVYPPSLNRLALHSANEPDTPDESSSRNNYHNRYHSSHSSFNMLQPLPTPLSPYSYGRSLFLPNQHLVSTAWTSTFGIPGFQIRRGAEEAKRFVPIIDKLVIDLDTDRGLSISKMTTKAKVGDKKRYAIFELTDQRHSPYTTDLDILEGRNSKRYAITYCEIIRNDMFDRVLLCYGVENFAEASNLRKIMTKQARKNSLNGQTRGSAQRKLRGMKQLKKDVVDLRNLLIHCAQAVAADDRISASELVKKIRQHSSPDGDSNQRLAFYLVDGLEARLAGIGSQVYRKLMASRTSAESLLKAYSLYLSACPFERASFAYANQTILDASKGQQPRKVHIVHFGICTGFQWPSLIQRLANEEGGPPKLRITGIDMPQPGFHPCEIIEETGKRLADYANLFKVPFQYQGIASRWETVQIEDLNIDKDEVLIVNCMFRMKNLGDEMVSMNSARDRVLKIMRMMNPRVFILGIVNGSYSSPFFITRFKEVLFHYSSLFDMIDANVPRDNEARKMIEGGLFGQEALNIIACEGAERTERPESYKQWQARCLKAGFKQLPVDPATLKEIINMKKGIYHEDFVADEDGAWLLQGWKGRVIYAISTWKPNESYLDQCLPEFGGYPCQKYDLHSRILMEEDIDEKISIKKGQDALQATEKPFYDILGKAYPSSSKETAINGDSQADYPDNGSSSYHEQACSGSFVSDLLGSQDAHSITTDWSSEFDRLALQFRRGVEEAKRFIPNIEKLVDDPEKNGLYACKQTTETTEQKGKHENKIRNHPHDPHVEHIELMEARNSKHMAISTSETIRDEMFDSILLCNRQLPGEVANLRGMMAKEASDNPKKFQSKGYGKGQRKPHSSKKKQKEAIDLSVLLIQCAQAIASNNHPFASELLRKIRHHALPDGDGSQRLANCFADGLEARLAGTGSQMYEKLMAKQTSTRDMLKAYHLYFVACPFEMVTYYFSNKTIIDALEGKTTLHIVDFGILFGFQWPCLIQRLAKREGGPPKLRITGVDVPQPGFRPHERIEETGKRLAEYANMFNVPFQYHGIASRWETICIEDLSIDKDEVLIINCMSRMRKLGDETENIDSARDRVLHMMKRMNPQVFILGVVNGLYSSPFFLTRFREVLFHYSSLFDMLDNNVPRNHEARILVEKDLFGNDALNAVACEGAERIERPESYKQWQMRILRAGFKQRPVNQAILNRSVHYKEFYHEDFVIDEDSGWLLQGWKGRIIQALSTWKVET

SEQ ID NO: 124588 - protein, 54 aa, Oryza sativa
  Clone ID: PAT_MRT4530_27312C.1.pep
RGLKGWKNYMGGNHFGGLDLPSLITRGYLPLPGDLPFKFLVPGIKVGDLKGKGY

SEQ ID NO: 124589 - protein, 128 aa, Oryza sativa
  unsure (1)..(128): unsure at all Xaa locations
  Clone ID: PAT_MRT4530_27313C.1.pep
TANGATDGGCRRRESDGLREDLRNKMGEVREGERDHRGXERRPKGVAMAELTGAWDGRGSGDGRRRSGDGQGASRDGECGGVDGEVWRGGLRWLAAAGERKSGGGGGCTLLERKRAQGSSVKWGKRER

SEQ ID NO: 124590 - protein, 66 aa, Oryza sativa
  Clone ID: PAT_MRT4530_27314C.1.pep
FFFFLNSDFSVVLFRRFYPSIPSSSNFASAKNGHQFCCVANHSSEFTWIKLIRLRFASGGLAVSPI

SEQ ID NO: 124591 - protein, 181 aa, Oryza sativa
  Clone ID: PAT_MRT4530_27315C.1.pep
MAKPKTRGRRSAPAPPPPPTPPPPPAPPANVIDLTSSPDASTTKGGGSGNRTKRAPPSLLDIELDGIEMWTPGQKRRLDEDCCILSADPLSPDVVAATAAAAANDDVAVVAERGKVACRDYPHPRSACAKFPFGTTPHDDHCEQCFCYVCDVPAPCSSWKGEKGHCHASDKDKKWKSVRLL

SEQ ID NO: 124592 - protein, 175 aa, Oryza sativa
  Clone ID: PAT_MRT4530_27316C.1.pep
MAFLRKVGNLVRQSAGSGSPLFQAVRCMSSSKLFIGGISYGTDDQSLKEAFANYGEVIEARVIVDRTTGRSRGFGFVTYTSTDEAAAAITGMDGKDLQGRIVRVSYAHDRGSRAGGYGGGGYGGQGTYGGGGGYGGGGYGGQDAYGGRGVGGYSEGGRGYGGRGYRDGNITGGIT

SEQ ID NO: 124593 - protein, 59 aa, Oryza sativa
  Clone ID: PAT_MRT4530_27317C.1.pep
RKKLCTFRRANPRPSCAPHDDSVRIILNHLQHSTKLQLHKSQLQSLIHPKYTLHTIHLH

SEQ ID NO: 124594 - protein, 109 aa, Oryza sativa
  unsure (1)..(109): unsure at all Xaa locations
  Clone ID: PAT_MRT4530_27318C.1.pep
MRRWCAAXGLGLGRRLLSSSVSGPXHRPLPAHXXPXPRPLPXXXXHHXLTXXLGLXXXXXXXMQWQTQQVXHXXXKDRSXXXXTXXXFKXKKYKXKXVXXMKFXXRVMN

SEQ ID NO: 124595 - protein, 67 aa, Oryza sativa
  unsure (1)..(67): unsure at all Xaa locations
  Clone ID: PAT_MRT4530_27319C.1.pep
HXIVGXGVXLFVXWAPLLPICGXLGXGXFEFWEFXFXXDDAFVXHXXIFLXPVXLMLATAWFXXKXK

SEQ ID NO: 124596 - protein, 1002 aa, Oryza sativa
  Clone ID: PAT_MRT4530_2731C.1.pep
MMFTEGLDESAISWIKQGTGSPAPPPPRSPLAERLPAGQIAAPRSPALYGRGCSGVGVGVGGGVGNGLFSPKSLPPVRTTARHSGLLGRHHHSVLLAAADSEEEDGEEGEESVASWGVPDDCYYGNFSDTLEEEEEDGACSSGDSSLLRRAMDRGGVAFDDEVTSQLSRRGGGGGLVRGQSKENLRVEVRAASAFAGKCSSGNNTVDSTSHEHYFGEQKFQAIGTPSAPPIAGDGVEAIFDTVAETKGGLERAGVSSVADILAQDVHEPELPTRSNVQEDGVHVPYVESNLLAQMPSFTAKIQSFLLHPKHKSQDDGKSIYDKDGSCNMKGRKLVKQIEIEEMFTCTLELQSSCKDNQRDSISPQYLKPGTGESQLFYLESQGDSILVEVQDNNRVVIGRAKIQVSSITDTHLCINFSVSSDNQGAAKMLQGGPAVDTIVYDMVLEAAMRAQNFNSKMLHVSGSWKWLLDEFSDYYGVSDAYRKLRYLSYILNVATPTKDCLELAYELLLPVMKARDDRTLTRQERSILLDCEDRIKSLLAVVFENYKSLDENSPTGLSDLFGPISDCAAPALAPAVQIFSVLHDILSNEAQNILRNYLQTAAAKRCRRHMIETDEFMSSNNDSLLTDPMAISAAYLKMKTICINISREIQADIKIHNQNILPSSIDLPNIAASLYSTELCKRLKGFLSASPPSRPLEHVAELLIATADFERDLDSWQVRPVHGGVVSRDLFHGYIMVWIEDTRLQLLDNCRADKAIADVEREIMKALEKQYMETLLPLRDGIPKILEKQVQRLTRRQSISPYVVPNQLGTFMNTVKRMLDVLHCRVEDSLKSWAAYLTITNGNAVFGEQMNSITVMLRKKYKKYLQAIVEKLVSNAQANRTTRLKRILEETRESEGESDIRERMQALRVHLSDSIYNLHEVFSSRIFVAICRGFWDRLGQIVLRFLESRKENRIWYRGSDYALGILDDVFASEMQKHLGNSLQDRDLDPPQSVVDARSILC

SEQ ID NO: 124597 - protein, 69 aa, Oryza sativa
  Clone ID: PAT_MRT4530_27320C.1.pep
TDASADAWADAWADAWAHTAAAAAVAHTRATKTMATATALSLSGGRGRSYGVRYPDAETRHFWSAVPRS

SEQ ID NO: 124598 - protein, 219 aa, Oryza sativa
  Clone ID: PAT_MRT4530_27321C.1.pep
KMLLELHCLAFETQTMSIHVCPRPPHFEHIMLPVPPQPRHLTFTMIPWLSNMESTYKPEPAQVAHSTAPLVSQLMQGGFFPTFFFSKSKPAGEIVEEGSERGGHLTLAETAREAGRADANHPGNGRDPRPRRGAAEAGGARSLAETSMRSGADEDDIAFDADLGVVGEVGDDYKEEEDDEEEEMGGGWQPDGPAHRSRRHSRSSFCHRRHFSSYRPPPL

SEQ ID NO: 124599 - protein, 169 aa, Oryza sativa
  unsure (1)..(169): unsure at all Xaa locations
  Clone ID: PAT_MRT4530_27322C.1.pep
RGGNDVGVQRPCACVVGERWVPELEEGEGAPATASSPGAASPGAGSPLPPRSHRRRPPPPLPPLPPHCAPPPPPPPMXSAGPPPGSPSSTSPAXATPSPSPTSPSSPPPMPTPSLLSGRRPPARRRGAPPPGGVAPPAACPSPRGAAPPAAAAARGPPPKRLPRPLCCR

SEQ ID NO: 124600 - protein, 51 aa, Oryza sativa
  Clone ID: PAT_MRT4530_27323C.1.pep
MVHIAPRHEVFDTGPRRVSVSEKDSQPEEGDQESQDRPRLPFSLNERKLLA

SEQ ID NO: 124601 - protein, 141 aa, Oryza sativa
  Clone ID: PAT_MRT4530_27324C.1.pep
LYILYYTVLLSLLTMQQIIICNANSTVISGTRGSHPGIFRHRSLPGVTQLSLISGSRHSAAWRQSMGLISCIRMGCKLVHPLHKSHYHTHHAARASDNSVNSPGVASMQWQLNSTIQLRFAASLPAFPSRAQPVCAQLPFQ

SEQ ID NO: 124602 - protein, 521 aa, Oryza sativa
  Clone ID: PAT_MRT4530_27325C.1.pep
MPSAFHSLLLPAIRNPKPSRRRGRGRGGSKRPKKTTKSKNRLADAAAGDATAFHLKTSARAGPGGAGSGRRGDGGCLVQPLGNLLLLGGGGNLRDAGLGALRPLPDDVLLDVLGLLAARDLARLSAASRALYVVASHDPLWRALVLDELGGDFAFSGSWRATYIAAASGGRAHLPPRGLEIRGFYSDYLFQSWLCANMEMRPEWLHRDTIDRRRGMSVEQFVSEFEEPNRPVLLEGCLESWPALQKWTREHLLKVSAGKEFAVGPVSMTLDRYLQYADNVQEERPLYLFDAKFTEKVPEMGRDYEVPAYFREDLFGVLGEERPDHRWVIIGPAGSGSSFHVDPNSTSAWNAVIKGAKKWVMFPPEVVPPGVHPSADGAEVTSPVSIMEWFMNFYGACKTWEKRPVECICRAGEVVFVPNGWWHLVINLEESIAITQNYVSRRNLLNVLDFLKRPNASELVSGTTDRVNLHDKFRNAIDMTYPGMIKQLELEAQQKAAARKKKVSFWESAVDANTGGFKFSF

SEQ ID NO: 124603 - protein, 456 aa, Oryza sativa
  Clone ID: PAT_MRT4530_27326C.1.pep
MPVKKNVLVPAAAATSRPAVGPPRPGNDLPTTGRLAQSREKIPCSSEFTRYTMTPTKKQTLAHEGLVAAVNEAIGSSQKRGRRQILCQTSCFVTERGGGHFNVQALPPQAYYPVCRTGRVEDPVQCSAQYTNILSRRSAHIGSTVGSCSSIAVNSERPTDHENSPRAATPEPTDDGSTRLDGNAALPCGGASTWHMAGSSNRTRNRDPRAAGASRAAIRLILRDRAPNAIDEMFKRAKSTILLDNHGQPPTGAKKTFLPTVINQCCNNHEMHDGVSDDRGGWMDEEDFAAPYCYERFSSDESALEFKTRVRSTRFLHTLSNQRKQESRYATLSKEKEARGYIDKIRIRVGLERVSERRVIAATCHSATCHRKKNSTICRGDERRMPIQFIACYCTCSYNIDRLRFFGDYPMNERFLTEECNLRILRYVGKVREASTNMVHTLERLVVIRSLFRFSH

SEQ ID NO: 124604 - protein, 159 aa, Oryza sativa
  Clone ID: PAT_MRT4530_27327C.1.pep
FTPSTRWWSLCSTSLRLLLRLRSNRIPPRSPTSFLLRRSSSSSSSFIQDNKTKRKASDGAGGAVTGEVPGRRRHHDGRRCPPARLHDLPQQALFLLLHRRRRFLRSILLLLQADVGPRASSDLTNSFCCCNIIFFSNFCQATLPSAAAAAAIRSMYYYY

SEQ ID NO: 124605 - protein, 198 aa, Oryza sativa
  unsure (1)..(198): unsure at all Xaa locations
  Clone ID: PAT_MRT4530_27328C.1.pep
MSSSTSPPSTSTAEYVELSPHRLKLXFSALDWFFFFSQSSIPLLLQHLAHQIDVPSIADNLQLFLGPIGNLDPTEFINGETNRILFRFANPDLSQWKGTFKSWPSAEITWPAWFKRMRASKLDHWLEIGISQALALTAANMARNEPMMIAAAYFWSTAMYAFLFSQGPMTPTLLDIIMITGLDITSSANLSSLDIQIT

SEQ ID NO: 124606 - protein, 743 aa, Oryza sativa
  Clone ID: PAT_MRT4530_27329C.1.pep
MAGRNYHGYGGGGGGGMSMVVASTPGQELALTNCAYVSSADIRRFPNALALVGDAFVFTLRAHDAVSAGSIALNAIQRRQTKVSAGDSITVSSFAPPDDFKLALLTLELEYTKARTNRNEELDAVVLAQQLRRRFLDQVMTSGQRVPFEFCGTNYIFTVNQALLDGQENSTPLDRGFLSSDTYIIFEAAPNSGIKVVNQKEAASSKLFKHKEFNLEKLGIGGLSAEFTDIFRRAFASRVFPPHVVNKLGIKHVKGILLYGPPGTGKTLMARQIGKLLNGNEPKIVNGPEVLSKFVGETEKNVRDLFADAENDQKTRGDQSDLHVIIFDEIDAICKSRGSTRDGTGVHDSIVNQLLTKIDGVEALNNVLLIGMTNRKDLLDEALLRPGRLEVHIEINLPDENGRLQILQIHTNKMKESSFLSPNVNLQELAARTKNYSGAELEGVVKSAVSYALNRQISMDDLTKPLDEESIKVTMDDFVNALHEITPAFGASTDDLERCRLRGMVDCGKAHRHLYERGMLLVEQVKVSKGSPLVTCLLEGPAGSGKSALAATVGIDSDFAYVKIISAETMIGFSESSKCAQICKVFEDAYKSQFGIIILDDIERLLEYVAIGPRFSNIISQTLLVLLKRVPPKGKNLLVIGTTSEVGFLESIGMCDVFSVTYHVPKLKKEDATKVLRHLNVFDEADIDAAAEALDDMPIKKLYTLVEMAAQGPSGGSAEAVYGGEEKIDINHFFSILSDIIRY

SEQ ID NO: 124607 - protein, 51 aa, Oryza sativa
  Clone ID: PAT_MRT4530_2732C.1.pep
MPPNRRATRARAPWWPTGQSPPLSAPAAPAPLSEPEDPQCEDFEDQAQDLE

SEQ ID NO: 124608 - protein, 243 aa, Oryza sativa
  Clone ID: PAT_MRT4530_27330C.1.pep
MAWNGRFGEDGEEERSLELSLALPGYFSSSGLQGNTSTAADGAKGNDGFKASKKMLKFAPKFSAIRSRPAAPVVGWPPVRSFRRNLASSSSSSKPPRGGRDAAAAATGGKVARFVKVNMDGVPIGRKVDLAAHGGYGELSAAVDRLFRGLLAAQRDPTMATAAAAAAAGESCTGEEEAIAGLLDGGSGEYTLVYEDDEGDQMLVGDVPWNMFIAAARRLRVLRSSDLNASTIRAGSRKRAAAE

SEQ ID NO: 124609 - protein, 114 aa, Oryza sativa
  unsure (1)..(114): unsure at all Xaa locations
  Clone ID: PAT_MRT4530_27331C.1.pep
ALENPITAEERTARQQIVYQAKQMGRRSISNAKTFAVMGLIFSAAECVIEKARAKHDTTNSAVAGCVTGGALAAKGGPKATCVGCQXFATFSVSNQEVDSASKTTFSHFKTFTH

SEQ ID NO: 124610 - protein, 1283 aa, Oryza sativa
  unsure (1)..(1283): unsure at all Xaa locations
  Clone ID: PAT_MRT4530_27332C.1.pep
WGGSEKVEDNWGQSGKGRGQWWNSGRGRGRWWNNERGKGRENKPDQTKFCQTHGPGGHSTEECYXKYEGARDQRGQNAIEAPQVMKIEAIEEVPKRVINAITGGSSLGVESKRQRKAYVRQVNHVGTSYQSNPPVYSKTVISFGPEDAEGILFPHQDPLVVSVEIAQCEVQRVLIDGGSSADVLFYDAFKKMQIREDRLTNAGVPLQGFGGQQVHAIGKISLQVVFGKGTNVRKEEILFDVVDMPYQYNAILGRSTINIFEAIIHHNYICMKLPGPRGVITGEYIKIQKPIPEGKTKKVQLDEHDPGKFILIGENLEKHVEEEILKVVKENMAVFAWSPDELQGVDRSLIEHNLAIKSGYKPKKQKLRRMSTDRQQAAKIELEKLLKAKVIREVMHPEWLANPVLVKKANGKWRMCIDFTDLNKACPKDDFPLPRIDQLVDATAGCELMSFLDAYSGYHQVFMVKEDEEKTSFITPFGTYCFIRMPFGLKNVGATFARLIGKVLAKQLGRNVEAYVDDIVVKSKQAFTHGKDLQEIFENLRKCSVKLNPEKCVFGVRAGKLLGFLVSKRGIEANPDKIAAIHQMEPPKNTREVQRLTGRMASLSRFLSKSAEKGLPFFKTLRGANTFEWTAECQQAFDDLKKYLHEMPTLASPPKGQPLLMYVAATPATVSAVLVQEEENRQVPVYFVSEALQGPKTRYSEVEKLIYAIVMASRKLRHYFLSHDITIPSAYPIGEVLTNKEVAGRIAKWAMELLPFDLKYILRTAIKSQVLADFVAEWTPNEVEQQEEVEKPWIVFSDGACNAAGAGAAAIVKTPMKQTLKYSVQLAFPSTNNTAEYEGVLLAMRKARALGARRLIVKTDSKLVAGHFSKSFEAKEETMAKYLEEARLNEKHFLGITVKAITREENGEADELAKAAATGQPLENSFFDIITQPSYEKKEVACIQREGDWREPILKYLVSAQLPEKEEEAKRIQLTSKKYKVVEGQLYKSGVTAPLLKCVTREDGMKMVVEIHEGLCGAHQAPRSVASKVIRQGIYWPTIMKDTEKYIKTCKACQKFGPMTKAPPKELQPIPPVWPFYRWGIDIVGPLPRAKGDLRFVIVAIEYFSRWIEAEAVARITSAAVQKFVWKNIICRFGIPKQIVCDNGKKFESGKFQDMCKGLNLQINFASVGHPQTNGAVERANGKIMEAIKKRLEGSAKGKWPEDLLSVLWTLRTTVVRSTGMTPFRLVYGDEAMTPSEVGAHSPRMIFDQKDEEGREITLEMLDEIRVEALEKMASYTEGTKSY

SEQ ID NO: 124611 - protein, 601 aa, Oryza sativa
  Clone ID: PAT_MRT4530_27333C.1.pep
MALPLRLLGRLAGGGGGGGRRLPRPLAVLHHHHLSASDPSPTTRAPLLPSPPRLPPLLVPFAAVPARSFSWYPRSPPPAGPAAAEKAPEEDVRAEGEGAYLHDAGGADFGEVVATSAASADAAGVAAAGDGGSASGFAVSSLIDILDGFHNLTGIPWWITISLSTVAMRLLILPVLITQIKKAAKIGKLLPELPPPFPPPLSGRSFRDQFSLYQKKRRELGCPSFLWNWAYFSIQFPCFILWMSTIRTMCLSNHPGLDNVCTRKPCEQSMGGILWFHNLTEFPHGSSGLVFPTLVAGLHYLNIQIAFHGTHTKHYPGIFGVLAKYYRVYLEILTIPLFLIGYVIPQITIQGSLVYWTTNGLITVAQQLSLKNDAVKKVLGLPDTRAHQKFPRVGHKMMQERPLEDAHMHTNLTSTNNETANNIMEGKVSASSSPEELLEQALQHLETGNQDQAIPLIRTAIEKDSSLYVALIGMGQTLFSNRLFPEATVCFEHAIPKIEEQDPLLVLACYGAGLSRMRQGDSKMAIENLQRLAELKEPEKPINKKCYYQGLVALGSILINEGRKSEAVKFVQRAVAYDPNCEIYLKECDDTTEDKPKSAEH

SEQ ID NO: 124612 - protein, 1312 aa, Oryza sativa
  unsure (1)..(1312): unsure at all Xaa locations
  Clone ID: PAT_MRT4530_27334C.1.pep
WGGSEKVEDNWGQSGKGRGQWWNSGRGRGRWWNNERGKGRENKPDQTKFCQTHGPGGHSTEECYXKYEGARDQRGQNAIEAPQVMKIEAIEEVPKRVINAITGGSSLGVESKRQRKAYVRQVNHVGTSYQSNPPVYSKTVISFGPEDAEGILFPHQDPLVVSVEIAQCEVQRVLIDGGSSADVLFYDAFKKMQIREDRLTNAGVPLQGFGGQQVHAIGKISLQVVFGKGTNVRKEEILFDVVDMPYQYNAILGRSTINIFEAIIHHNYICMKLPGPRGVITVRGEQLAARKYELQGTPSVKGVHVVDQKQGEYIKIQKPIPEGKTKKVQLDEHDPGKFILIGENLEKHVEEEILKVVKENMAVFAWSPDELQGVDRSLIEHNLAIKSGYKPKKQKLRRMSTDRQQAAKIELEKLLKAKVIREVMHPEWLANPVLVKKANGKWRMCIDFTDLNKACPKDDFPLPRIDQLVDATAGCELMSFLDAYSGYHQVFMVKEDEEKTSFITPFGTYCFIRMPFGLKNVGATFARLIGKVLAKQLGRNVEAYVDDIVVKSKQAFTHGKDLQEIFENLRKCSVKLNPEKCVFGVRAGKLLGFLVSKRGIEANPDKIAAIHQMEPPKNTREVQRLTGRMASLSRFLSKSAEKGLPFFKTLRGANTFEWTAECQQAFDDLKKYLHEMPTLASPPKGQPLLMYVAATPATVSAVLVQEEENRQVPVYFVSEALQGPKTRYSEVEKLIYAIVMASRKLRHYFLSHDITIPSAYPIGEVLTNKEVAGRIAKWAMELLPFDLKYILRTAIKSQVLADFVAEWTPNEVEQQEEVEKPWIVFSDGACNAAGAGAAAIVKTPMKQTLKYSVQLAFPSTNNTAEYEGVLLAMRKARALGARRLIVKTDSKLVAGHFSKSFEAKEETMAKYLEEARLNEKHFLGITVKAITREENGEADELAKAAATGQPLENSFFDIITQPSYEKKEVACIQREGDWREPILKYLVSAQLPEKEEEAKRIQLTSKKYKVVEGQLYKSGVTAPLLKCVTREDGMKMVVEIHEGLCGAHQAPRSVASKVIRQGIYWPTIMKDTEKYIKTCKACQKFGPMTKAPPKELQPIPPVWPFYRWGIDIVGPLPRAKGDLRFVIVAIEYFSRWIEAEAVARITSAAVQKFVWKNIICRFGIPKQIVCDNGKKFESGKFQDMCKGLNLQINFASVGHPQTNGAVERANGKIMEAIKKRLEGSAKGKWPEDLLSVLWTLRTTVVRSTGMTPFRLVYGDEAMTPSEVGAHSPRMIFDQKDEEGREITLEMLDEIRVEALEKMASYTEGTKSY

SEQ ID NO: 124613 - protein, 59 aa, Oryza sativa
  unsure (1)..(59): unsure at all Xaa locations
  Clone ID: PAT_MRT4530_27335C.1.pep
HERPWWLSPARSERVGDQVHETXTANGEVQNSPFSAGPIGNLPPAHGPIHFTQYLTTPH

SEQ ID NO: 124614 - protein, 59 aa, Oryza sativa
  Clone ID: PAT_MRT4530_27336C.1.pep
MAPPTRPSFSSSLPVPRLDTASSDEELIVKAFFKSEKVHPGQVIEYFDLLGVTIISPDS

SEQ ID NO: 124615 - protein, 73 aa, Oryza sativa
  Clone ID: PAT_MRT4530_27337C.1.pep
PAGKYWGKITQKRVKTEGKAFLNQSWKGEKLSEGTRGGAPSTEVQTLPRVGYFINILGYEPQGPGLPASSKRG

SEQ ID NO: 124616 - protein, 217 aa, Oryza sativa
  Clone ID: PAT_MRT4530_27338C.1.pep
MDSSSSSSSTQAQSQPDFDYLFKLLLIGDSGVGKSSLLLRFTSDSFEDLSPTIGVDFKVKMVNTGGKKLKLAIWDTAGQERFRTLTSSYYRGAQGIIMVYDVTRRETFTNLSDIWAKEIDLYSTNQDCIKMLVGNKVDKESERAVTKKEGIEFAREYGCLFLECSAKTKVNVEQCFEELVLKILDTPSLLADASSGAKKNIFKQKPPEADAAASSCC

SEQ ID NO: 124617 - protein, 158 aa, Oryza sativa
  Clone ID: PAT_MRT4530_27339C.1.pep
SEDVDLEAIAAQTHGFVGADMAQLCSEAALGCIREQMDIIDIEDQEIDAEILASMAVRQEHFTTALKMVNPSVLRSTTVSVPNVKWEDIGGLEDVKKQLIEMVQWPFEHPEIFLKYGQKPSRGVLFFGPPGCGKTLLAKAVASESTANFISIKGPELL

SEQ ID NO: 124618 - protein, 131 aa, Oryza sativa
  Clone ID: PAT_MRT4530_2733C.1.pep
YPVIVPGNSKIEIQSRVRNLTVYAIKIPGSVAYNAMLLYSEGQQEKCLAVRRRSEHAHTLYEILRNCSHRNIIQPMGVWEEMETNLAFIVFPCSDGVVTSIPKEALFDVEDATNAESYTFGFSDQGCRIFR

SEQ ID NO: 124619 - protein, 133 aa, Oryza sativa
  Clone ID: PAT_MRT4530_27340C.1.pep
TTLSACLASTGISAGKRLSEAGITDVLILEATDHVGGRMHKQNFAGINVEIGANWVEGVNGEKMNPIWPIVNSTLKLRNFRSDYDYLSQNVYKEEYVRVYIYLYDYIWIIWIGLIKRLHIYDMIDDVLTDSNS

SEQ ID NO: 124620 - protein, 70 aa, Oryza sativa
  Clone ID: PAT_MRT4530_27341C.1.pep
MEHSIHELHNDSSGADSGFKPSMTKLAAEGKKTQGEEKDAGTTVRQRSRLRSYVIGLIQLALLAVCHVYF

SEQ ID NO: 124621 - protein, 66 aa, Oryza sativa
  Clone ID: PAT_MRT4530_27342C.1.pep
VFSATMPSWIRKITSKYLKDPIIIDLVGDEDQKLPEGISLYSIASEHYGKPSILGPLIKVSTLLNV

SEQ ID NO: 124622 - protein, 845 aa, Oryza sativa
  unsure (1)..(845): unsure at all Xaa locations
  Clone ID: PAT_MRT4530_27343C.1.pep
MRVEVSGDDHEFAMLLCTHMKYPDRCKLLDNMLDISISRVEVNEITMITGGLEIWRIENFKPVPIPASSYGKFFMGDSYIILKTTALKNGSLRHDIHYWIGKDTSQDESGTAAILTVELDAALGGRAVQYREIQGNETDKFLSYFRPCIMPQPGGVASGFKHVEVPFARSSLNHDDIFILDTKSKIFQFNGSNSSIQERAKALEVVQYIKDTFHEGKCEVAAVDCGVELFVWMGRTTSLQERKSASEAAEKLLSDDNRTKTHVIKVIEGFETVMFKSKFKEWPQTPDLKLSSEDGRGKVAALLKRQGLNVKGLMKAAPAKEEPQACIDCTGSLQVWRINDKDKILLPSADQSKFYTGDCYIFQYMYPGDDKEECLIGSWFGKKSIEEDRVTAISLASKMVESAKFQAVQTRLYEGKEPIQFFVIFQSFQVFKGGLSSGYKKFIAENGIDDDTYLEDGLALFRIQGSGPENMQAIQVDAAASSLNSSYSYILHDGNTVFTWTGNLTTSLDQEVVERQLDIIKEEKGLTHRTWQMTWSHCSSSFLIYICSSILPTTPIGVHEGNLKIKEIYHFTQDDLMTEDVFILDCHSDIFVWVGQQVDVKVRLQALDIGEKFVKLDFLMENLSSDTPIFVIMEGSEPTFFTRFFTWDSAKSLMHGNSYQRKLSIVKGGGSPALDKPKRRTPTYSGRSTVQDKSQRSRSMSFSPERVRVRGRSPAFTALAANFESANSRNLSTPPPVVKKLYPKSATPDSSSAPYTSSATASLTGSFDRPKSVKDGSELEKPKQEEDXKVGIITLTNRVDSLTFNEDLRENEPXEDEGLPVYPYDRLITTAADPVTEIDVTRREG

SEQ ID NO: 124623 - protein, 198 aa, Oryza sativa
  Clone ID: PAT_MRT4530_27344C.1.pep
KFVKLDFLMENLSSDTPIFVIMEGSEPTFFTRFFTWDSAKSLMHGNSYQRKLSIVKGGGSPALDTTVFCLSFVCTIMEPPIYNISSCKSVVYGSELEKPKQEEDAKEGINTMTSRVESLTINEDVKENEPEDDEGLPVYPYDRLITTAADPVTEIDVTRRETYLSSAEFKDKFGMTKEAFSKLPKWKQNRMKIALQLF

SEQ ID NO: 124624 - protein, 274 aa, Oryza sativa
  Clone ID: PAT_MRT4530_27345C.1.pep
MAVQAQYPSSLLFHDRGEPERTKEMDLPRPQMFAGVSPEVYFPSGGASGINRRNKRSREAIAMAPPPAKEELVNLFTLQPQQSTSFVNMAQLHNRVSASPSRAPAALVSTGLRLALDEQQQQQQQQQESKRLKALCYSSSPMPFVSFSDELAGQMKRQDEELDRFIKEQGEQLRRAMADRVRRHNRALLVAAERSAARRLREKALEAEREARRGAELEERLARLRSEAAAWQAKALSEQAAAVSLHAQLQQARRSRVSLEGPKLRVPSFSPLLR

SEQ ID NO: 124625 - protein, 95 aa, Oryza sativa
  unsure (1)..(95): unsure at all Xaa locations
  Clone ID: PAT_MRT4530_27346C.1.pep
MSVSMKDLDPAFRGAGQKEGLEIWRIENFKPVPIPASSYGKFFMGDSYIILKTTALKNGSLRHDIHYWIGKDTSQDESGTAAILTXELDAALGGR

SEQ ID NO: 124626 - protein, 518 aa, Oryza sativa
  unsure (1)..(518): unsure at all Xaa locations
  Clone ID: PAT_MRT4530_27347C.1.pep
CVVHVKEVPFARSSLNHDDIFILDTKSKIFQFNGSNSSIQERAKALEVVQYIKDTFHEGKCEVAAVEDGRLMADAEAGEFWGFFGGFAPLPRRAPEDNEKYEETVFKLLCFNQGKLEPINYESLLHELLKTNKCYLLDCGVELFVWMGRTTSLQERKSASEAAEKLLSDDNRTKTHVIKVIEGFETVMFKSKFKEWPQTPDLKLSSEDGRGKVAALLKRQGLNVKGLMKAAPAKEEPQAYIDCTGSLQVWRINDKDKILLPSADQSKFYTGDCYIFQYMYPGDDXEECLIGSWFGKKXIHASGVTAILLASKMVESAKFQAVQTRLYEGKEPIQFFVIFQSFQVFKGGLSSGYKKFIAENGIDDDTYLEDGLALFRIQGSGPENMQAIQVDAAASSLNSSYSYILHDGNTVFTWTGNLTTSLDQEVVERQLDIIKPNSQSRSQKEGSETDQFWSLLGGKSEYPSQKIGRANESDPHLFSCILPKGNLKIKEIYHFTQDDLMTEDVFILDCHSDIFVWV

SEQ ID NO: 124627 - protein, 221 aa, Oryza sativa
  unsure (1)..(221): unsure at all Xaa locations
  Clone ID: PAT_MRT4530_27348C.1.pep
AVQRGHINDRAATXERRSVELLAIRSCDFVSAAAGIGPRHRSGGEELKATDRRLRPRRLVLVGSATRTPPPRRRFLRADRRRVSYSSVSIRQPWQSIILISSCAGSSLALLLVVCARNVMASVSSVTRMCAHVRLSESVMSATMVPSRGGVSSVGGSASQMPTTARSALSRKRTEMDVPRLSILEAPRPISSMNERSMVLRRDDQEVGFVWSISSLCFQSH

SEQ ID NO: 124628 - protein, 319 aa, Oryza sativa
  Clone ID: PAT_MRT4530_27349C.1.pep
MAASELGIRSCSLEDLDGMSGSRKTHSSWTTSCTVQHSGYGLQVKSDAPKQLSNATITTMDRFCFEMALKELLYEEIDTDDDGMDDIDGAQEEDEVALQSDDCSVDYIADGLRELDMENYDDEDGVIKDLCSGSSDLYYPSNDMDPYLKNKNNGLVSILEEMEDGHPYLYPYDEIVLLGIPLCVPWSDCGLMDGQKDEKIQDWKPETLYLIGIDWNKEYTNILASASADKTVKIWDVAAGKCVTTLEHHDAKVKLWDISSNQPSVIASLNPKVGAIFSISFSKDNPFLLAVGGQKGNLKVWNTLTEPLVANKIGKHGSS

SEQ ID NO: 124629 - protein, 114 aa, Oryza sativa
  Clone ID: PAT_MRT4530_2734C.1.pep
MDLAGVSKGRPAPTRGPHIQGHRRGTKPARPSQGAAAACGHRRQQLATWNGGGPAGEKEKEEGGGSPRGAATERSAAEGDDGGDSAVSNEGGGAAGVRGSAANAVEAVAWLVGG

SEQ ID NO: 124630 - protein, 48 aa, Oryza sativa
  unsure (1)..(48): unsure at all Xaa locations
  Clone ID: PAT_MRT4530_27350C.1.pep
ASGRPTRQFRVRAPCRTEYALXCASVMIPPTKRLSGRKVDSSGRRTCG

SEQ ID NO: 124631 - protein, 1179 aa, Oryza sativa
  Clone ID: PAT_MRT4530_27351C.1.pep
MPSPWAVLLLDLKWPADNVIMNFIYLGVGAGLVSALQVSCWTITGERQAARIRALYLKAILRQDIAFFDKEMNTGQLVERMSGDAFLIQDAIGEKAGKCIQLLSTFFGGFIIAFVRGWLLALVMLSSIPPVAVAGAIMSRLMVKLTIRMQAKYGDAGIVVEQTIGAIRTVVAFNGEKKAINTYNKFIKKAYESALQQGVINGLGLGSIISVFFSSYGLAVWYGSRLIVERGYNGGIVINVIMAIMISAMSLGHATSSITALAGGQGAAYRLFRTIERQPDIDACCTTGDIFEDVKGDVELKNVYFSYPSRPEHLVFDGFSLQVPSGTRMALVGESGSGKSTVISLVERFYDPQSGEVLIDGVDIRRINLGSIRRKIGLVSQEPVLFAGTIRENITYGKEDPTLEEINRAIELANAAKFIDKLPNGLETMVGERGIQLSGGQKQRIAIARVIIKNPRILLLDEATSALDMESERVVQEALNKVMLERTTIIVAHRLSTVKNADMISVLQHGKLVEQGSHEELMKKPEGSYCKLIHLQETRQEAVAPNDDPDMIIRNDFDSRIINSKTRSQNISFRKSTSKSSSFGHSGTHPFTSTCDLSDPMEVHDDQHIKETTDKMSNCQEKASILRLFSLNKPEAFVLALGSITAAMHGVIFPVFGILVSSAIKMFYEPRSELLKNSRLLGSMFPVLGISTFLLIPTEYFLFGLAGGKLVERIRSLTFKSVMYQEISWFDKPENSSGSIGARLSTDALNVKRLVGDNLALNFQTLSTIISGFTIAMVANWKLALIITVVVPLVGFQAYAQMMFLKGFNKNAKSMFEDATQVATEAVGGIRTITSFCAEQKVMNAYEKKCASPIIQGIRDGVVGALGFGFSFLVFYFAYALCFYVGAKFVHQGTATFAEVFRVFFVLVLGINEISRTSAIGSESRRVNESVVSVFKILDRKSKIDSSNDEGVVIASVRGDIEFQNTAALVGESGSGKSTVISLLERFYEPDAGRILFDGVELETLKVSWLRLQIGLVAQEPVLFNDTIRANIAYGKQGDASEEEIIAAAEAANAHQFISGLPDGYNTIVGERGIQLSGGQKQRVAIARAVIKDPKVLLLDEATSALDSESERVVQEALDREVVGRTTVVVAHRLSTIKGADIIGVLENGTIVEKGRHEELMQIKGGIYSSLVELSSSSM

SEQ ID NO: 124632 - protein, 114 aa, Oryza sativa
  unsure (1)..(114): unsure at all Xaa locations
  Clone ID: PAT_MRT4530_27352C.1.pep
MAKSSPFSIHASPYILRPRGLWLREVWSKGLMXTANKPLTGKGEIGASAETVQTMWYGMWRPLSTDAPAETYIIHANKACCWAFPLWAYYCTAWXMGICRFAYPCNTWRFITGG

SEQ ID NO: 124633 - protein, 151 aa, Oryza sativa
  Clone ID: PAT_MRT4530_27353C.1.pep
IQVFSPASELSSLCLVVDGRRCRTAVAAGGRRSWHGARRQTAAAGYLFFSIRARRPAGRGRQAGEEDVGRPATGGSRDDVGAGRPRAPRRHHPHPPRPPAPALPRRRPPSPFHVSPWMTTAATSLSPSAPSASASSTHAASLHRLSKCGHG

SEQ ID NO: 124634 - protein, 49 aa, Oryza sativa
  Clone ID: PAT_MRT4530_27354C.1.pep
KHHPSLPPAGSGREGEESHRRPHRPPSSLLRPDLRGRGRGATAAAPCAP

SEQ ID NO: 124635 - protein, 139 aa, Oryza sativa
  unsure (1)..(139): unsure at all Xaa locations
  Clone ID: PAT_MRT4530_27355C.1.pep
LLQTESPNSTHQSGAKEAEGEVLSFSVILNLAAGRSDDDLRQRRLSRVPNHFSFDHLPFCASQPPERNHADDALEHAPERRRFNHRRRLAILDHLGASRCAKNLTSTYSLKRLKNPSRRHQEHGERIXFFPGADLNPPP

SEQ ID NO: 124636 - protein, 48 aa, Oryza sativa
  Clone ID: PAT_MRT4530_27356C.1.pep
HASISSRPSRPTPHISLELKKPRERSSASPSSSTSPPVVVTMTFANAD

SEQ ID NO: 124637 - protein, 523 aa, Oryza sativa
  Clone ID: PAT_MRT4530_27357C.1.pep
MAPIAPATWGSGEEKRDRRDGIQTESRPLNGRARTGEVEEVGGDVGASAGHGVGTEWADDVGGWSRRRRREVRDDPTGLAKMRKDAKECDGVEVQVKQRKTIEVQDKKKKLGRRRNKTARNIIFDHNHAAQDGFRFYTSCLPLHGPPTREGTVVLQLLHGRDGGGRLFKIHCRRRITEEQDGGNELGFSLREAEKTKSARKQESFWQTDFKWIPKIPLNRYTSDSAYPKERREIAIGKSWVHCARQFLDFNLNSLMTVELHAVLSMALRLYGFHTEIDQMRTTTIPTSEVAIDDMSSFKQKSGATVRVTDKDPMSPSSTWRPTDLRYKRDPPGGPKASNLITNTSTTTYEAGAYRSQVAGYPPSTLAHGRPQNSAVRTKSRLGQPNHVFALPLPGPALSPFCRMTESPNSAHHSRAEEAEGEVLSLSVILNLAAGRSGDDLRQRRLGRGHLYPSERDHADGALEHALEHRRFNHRRRLAILDHLGASRCAKNLTSTYSSKRLKNPSPRHLEHGERIFSSPAPI

SEQ ID NO: 124638 - protein, 98 aa, Oryza sativa
  Clone ID: PAT_MRT4530_27358C.1.pep
MMVAWRKESLCIYGGGGGGHQWGTRVGPVVAVDHGIRAVGLFITSLVVGLSLDWRTGFSGGGVRGIGAWAVSGVDGGLFQPGFTSGFVVVRRWPDGAL

SEQ ID NO: 124639 - protein, 143 aa, Oryza sativa
  unsure (1)..(143): unsure at all Xaa locations
  Clone ID: PAT_MRT4530_27359C.1.pep
QSPGSSSMPPSPAEWRSSSSRWNLGEXTRRMDTLDMQMGEIKYNLEEHIAQTQEXQQNTNAQFTNINNLMQQQHDDLQAYFRFHGFNPXIKDSEXKAKLGGDVSRPTEVTCIITYFPFHMHVYFSNCIGCFIFKNDKLWKFLT

SEQ ID NO: 124640 - protein, 298 aa, Oryza sativa
  Clone ID: PAT_MRT4530_2735C.1.pep
MKKCPSELNFEAFFHGERGEDDADAAADQKPGGGPHPPPFAMFSAADLSSFGFADSVTSTITGVIPNHIWPQSQSLNARHPAVYTIESQSSICAAASPTSATTLNMKESQTLGGTSGSDSDSESLLDIEGGPCEQSTNPLDVKRMRRMVSNRESARRSRKRKQAHLADLETQVDQLRGENASLFKQLTDANQQFTTAVTDNRILKSDVEALRVKVKMAEDMVARGALSCGLGHLGGLSPALNPRQGACRVPDVLTGLDYAGDDPFTGLSPPEQVQMPGGGEVGDAWGWDNHSNGAMSK

SEQ ID NO: 124641 - protein, 74 aa, Oryza sativa
  Clone ID: PAT_MRT4530_27360C.1.pep
RSGEPRNNHQDQFFLMKFRSSNPRSHPNNQHPKKQSLGNPLKKSIRGKGGSEEYLGVRRDDGILLSVPQLSIYL

SEQ ID NO: 124642 - protein, 260 aa, Oryza sativa
  Clone ID: PAT_MRT4530_27361C.1.pep
METTAAKKLPPGFRFRPTDEELVVHYLRRRALGSPLPPAVDIPDVRLLAHDPSDLLPPGWSEQERYFFTCKEAKYVKGRRANRATGAGYWKATGKEKPVAVSVAAAPRSQAAAVVVGMKRSLVFYRGKPPTGKKTDWVMHEYRLAGAGLAPCRRAATADHPARPAEGWVLCRVFRKKGSAAASTASPTADADDDDATTERADDAAAGVRFIDFFARADARRRRAASPVSSSCVTDASAEHCREQETTSRNGGAAAGDASD

SEQ ID NO: 124643 - protein, 94 aa, Oryza sativa
  Clone ID: PAT_MRT4530_27362C.1.pep
SHAPCHASAIVSLVFCAMRCACVLLCDLGMTRHSTGLVSHASRCVHISVSSLLSHVHGLVLRSEARILRPVAWRGPGRPSLVGIYCASQPPAVR

SEQ ID NO: 124644 - protein, 528 aa, Oryza sativa
  Clone ID: PAT_MRT4530_27363C.1.pep
MQPQFNGGKRSRAAPDNGGDGEGQPAEGDAKADSSSGAAAVAVVAAAAAAVAEDGYSWRKYGQKQVKHSEYPRSYYKCTHASCAVKKKVERSHEGHVTEIIYKGTHNHPKPAASRRPPVHPPPPSPATTTTTPLPPGDAQADHAPDGGGGSTPVGAGQAGAEWHNGGVVGGEGLVDATSSPSVPGELCESTASMQVHEGAAAAQLGESPEGVDVTSAVSDEVDRDDKATHVLPLAAAAADGESDELERKRRKLDSCATMDMSTASRAVREPRVVIQTTSEVDILDDGYRWRKYGQKVVKGNPNPRSYYKCTHPGCLVRKHVERASHDLKSVITTYEGKHNHEVPAARNSGHPAGSASPGGGAGSSSQPHGVGVGGRRPEVPSVQESLMRLGGGCGAAPFPPHFGLHLPPPPPRDPLAPMSNFPYSLGHAPSPALRGLPPPPPPPPSASALAVAGLGGVVEGLKYPMLAPPSVHSLLRHRQGGGMEAVVVPKAEVKQEAMRPAAAVAGAGRGAAVYQQAMSRVSLGNQL

SEQ ID NO: 124645 - protein, 31 aa, Oryza sativa
  Clone ID: PAT_MRT4530_27364C.1.pep
SSYSFYTARLVSTNGLELKHACSGYSTPPAA

SEQ ID NO: 124646 - protein, 117 aa, Oryza sativa
  Clone ID: PAT_MRT4530_27365C.1.pep
RRSYYKCTTVGCPVRKHVERASHDTRAVITTYEGKHNHDVPVGRGGGGGRAPAPAPPTSGAIRPSAVAAAQQGPYTLEMLPNPAGLYGGYGAGAGGAAFPRTKDERRDDLFVESLLC

SEQ ID NO: 124647 - protein, 339 aa, Oryza sativa
  Clone ID: PAT_MRT4530_27366C.1.pep
MASSTGGLDHGFTFTPPPFITSFTELLSGGGGDLLGAGGEERSPRGFSRGGARVGGGVPKFKSAQPPSLPLSPPPVSPSSYFAIPPGLSPTELLDSPVLLSSSHILASPTTGAIPAQRYDWKASADLIASQQDDSRGDFSFHTNSDAMAAQPASFPSFKEQEQQVVESSKNGGAAASSNKSGGGGNNKLEDGYNWRKYGQKQVKGSENPRSYYKCTYNGCSMKKKVERSLADGRITQIVYKGAHNHPKPLSTRRNASSCATAAACADDLAAPGAGADQYSAATPENSSVTFGDDEADNASHRSEGDEPEAKRWKEDADNEGSSGGMGGGAGGKPVREPR

SEQ ID NO: 124648 - protein, 122 aa, Oryza sativa
  Clone ID: PAT_MRT4530_27367C.1.pep
PNSMFNSQRYFLCSLHCIACVLIFGALLMQCQIAFERNPYGTRFCAHYSHNKIVNFDSVMTTPAFFLPSLQFAYRSFVEPQEVDEIVQLSTHANLVRGWIQPPHVVWAHTGQIAHATESLFR

SEQ ID NO: 124649 - protein, 129 aa, Oryza sativa
  Clone ID: PAT_MRT4530_27368C.1.pep
MGDNSITKEDGEKKWKDVVEMSRRQAAPLRRLLPGSPPPPVARARSASVACCRVHLHHPPPGRGLPPPLAVGFISVTRRPDEVRLRHRLPGTPPPPTTQARSASTAGCLPPPLTYARESRGESQDWVEG

SEQ ID NO: 124650 - protein, 36 aa, Oryza sativa
  Clone ID: PAT_MRT4530_27369C.1.pep
TPGRAWKALWSTVTEARRLLAGRRQADSFSVCILHK

SEQ ID NO: 124651 - protein, 190 aa, Oryza sativa
  Clone ID: PAT_MRT4530_2736C.1.pep
MSPFYCCLAAVLSLASASPAAASISVSAAAEPPANSLLPAEQFLRAHNEARAAVGVPPLAWNATIALDAQRYAGELRASCEARPVWAWGTDGLYGRNLYRGSGPRVRAGADASAHWAEGARWYDRDGDSCAAPPGRCCGEYTQMVWRATTQIGCARWLCRCLGDTCPLVLDTVAVCEYYPPGNIAGQRPY

SEQ ID NO: 124652 - protein, 129 aa, Oryza sativa
  Clone ID: PAT_MRT4530_27370C.1.pep
LRRAPRLVLLPPSLDSLHPQPLLYSYCQRHQGSAGMAVRQCDAIAGASLHHRCHRCPLSTERRPPLGSSPLSPDVDGCVRPSLRASPASLFAARCRSGTLEVLFTSSWPWLDGLALVVMASPAHAQEEG

SEQ ID NO: 124653 - protein, 311 aa, Oryza sativa
  unsure (1)..(311): unsure at all Xaa locations
  Clone ID: PAT_MRT4530_27371C.1.pep
MGAGVSGLFGLGGDEGETSAAVGGAAAAGLGDLPELCAAEVLLRLDAPEICRLARLNHAFRGAAGXADFVWEAKLPENYRYLMSFVEGGGGGDDGRQLRRRRWRPAGKKEIYARLARPVPFDGGSKEFWLEKSKGRVCMALSSKSLVITGIDDRRYWQHIPTAESRFYSVAYLQQIWWFEVVGEIDFSFPVGTYSLYFRIHLGKFYKRFGRRVCSTEHVHGWDKKPVRFQLSTSDGQHSLSQCSLGEPGSWVLYHAGDFVVSKPDQTIKLKFSMAQIDCTHTKGGLCVDSAFIYPKGFQQERMVRSQKCRC

SEQ ID NO: 124654 - protein, 40 aa, Oryza sativa
  Clone ID: PAT_MRT4530_27372C.1.pep
LIVRSCTLSPIVARGSSRQIAFWICSCVPSLMIPLEQRDY

SEQ ID NO: 124655 - protein, 47 aa, Oryza sativa
  Clone ID: PAT_MRT4530_27373C.1.pep
TCSLETSTHPYSQDGGPRLTHASFHVVRLSLSLIHKRRVSWPSANFA

SEQ ID NO: 124656 - protein, 205 aa, Oryza sativa
  Clone ID: PAT_MRT4530_27374C.1.pep
MSQSSRRTSVCDRISALPDELLHHVMTFLTAKEAVQTCVLSRRWQNVWASVGYLNVDSCNFITVKHFKKFVDNLLLQRSCALLDMFCIHTSYDSSDDSLDYSDIHPWVCHALRCNVKTLGILNYCDGKLLSVDGYPVPFTFLHLKSVYLCKFSIDNRFVEKLFSGCPELLHLELRHCAIKATMFCSATLKILTITAADRTQDDPE

SEQ ID NO: 124657 - protein, 123 aa, Oryza sativa
  Clone ID: PAT_MRT4530_27375C.1.pep
MDAVVSWASRRLRPRAARLRVARHVYRRGRGGARLKELIVETSAHVVLGAVARGGGGSGEHVCVVAPQQVHVPAVPLRCQAARRATGVAHGTRPAQQWRQWRCRRREGGEVGLPLRSPSAEPF

SEQ ID NO: 124658 - protein, 182 aa, Oryza sativa
  Clone ID: PAT_MRT4530_27376C.1.pep
MHLDPILPLPRPRMLSVLYHVLSTVPAYHPSVGPMLNELCLGLKSNDLAQALVGVYAKEVHVRLACLTAIKCIPSHSVQRDLQVSTSLWIAAHDPEKVVAELAEELWDRFGFDVFTDYSGIFDALSHKNYNVRAAAAEALAAALDENLDKMQDFHPGGGDVPRPDPPPPPPRRRCRRRRRGE

SEQ ID NO: 124659 - protein, 108 aa, Oryza sativa
  Clone ID: PAT_MRT4530_27377C.1.pep
SCETEDASWAARSRRRRRPPRHRCRRRRRNRHHLSRRRPRPPGTAPSRLRLRRPLPPSSSPPPPRPRRRRAAAPGRRPAAAPAPAIPAAPPPPPACTSGETSTRAWRR

SEQ ID NO: 124660 - protein, 89 aa, Oryza sativa
  Clone ID: PAT_MRT4530_27378C.1.pep
PRVRPRVRQVVRPRVRGIEVAIENKNAEQQNIRGSENGTKGPSNFLVKKAEAETAKERDLNQADTEDAKKVDAQDAVAIEQKNTKDTRK

SEQ ID NO: 124661 - protein, 466 aa, Oryza sativa
  Clone ID: PAT_MRT4530_27379C.1.pep
MAETVDDKVSYFQAVTGISDHDLCTEILAAHNWDLQLAVSSITANPSSPDPAPSAPLPPLAPREADLVAPHLPPPPQQQQQQQQPGIAWKLVTLPFYVVSGGVGLIAGSIRLGAWVAGGVLSRSLSILGLAQGGGGGGDRLLELPPSAAEAADFVAEFEREFGAGRGPHFVAEGFADALQRAQREYKLLFVYLHSPDHPDTPAFCGGCLCAEPVAAFIDENFVAWGGSIRRTEGFKMSNSLNASRFPFCAVVMASTNQRIVLLRQIEGPKSPEEMITTLQGAVEECSASLVAARIDAEERLNNQRLREEQDAAYRAALEADQARERQRREEQEKREREAAEAERKRKEEEEAQERAAQEAAEKEAALARRRQEKAMALGAEPEKGPDVTRVLIRFPTGERKERRFNSSTTITSLYDYVDSLDCLKAEKYSLVSNFPRVTYGPEKLSQTLEEAGLHPQASLFIEIEQ

SEQ ID NO: 124662 - protein, 400 aa, Oryza sativa
  Clone ID: PAT_MRT4530_2737C.1.pep
MGSTALGGGAPARLGLAPKDGVFGSNLKQCGGFMLKTTPKVGSSSVRVRASVASSPQKQHSPKTSGVKSGEEIVRLLANHPQFRIKVMTADRKAGEQFGSVFPHLITQDLPNLVAVKDADFSNVDAVFCCLPHGTTQEIIKGLPQELKIVDLSADFRLRDINEYAEWYGHSHRAPELQQEAVYGLTEVLRNEIRNARLVANPGCYPTSIQLPLVPLIKAKLIKVSNIIIDAKSGVSGAGRGAKEANLYTEIAEGIHAYGIKGHRHVPEIEQGLSEAAESKVTISFTPNLICMKRGMQSTMFVEMAPGVTANDLYQHLKSTYEGEEFVKLLNGSSVPHTRHVVGSNYCFMNVFEDRIPGRAIIISVIDNLVKGASGQAVQNLNLMMGLPENTGLQYQPLFP

SEQ ID NO: 124663 - protein, 216 aa, Oryza sativa
  unsure (1)..(216): unsure at all Xaa locations
  Clone ID: PAT_MRT4530_27380C.1.pep
REGKAKKKKIRGGEEGKKKRGRKKVKKRQRERKENTKKEEERKEKGGEKKKKRQWQKTKKWDGKKQRKKNKNGTKEIKQSERKEQRRKKKKKRKRLRSAKEKTKKGSEKKXKKQKEGGKDTKKKRRNAANRRRKEGKKKKRKKSSKSDRKTQVAQKKKKRKTRXRRTTKRKRHTEKKGKTNDKNKTMGRTKNADAGMTRDKNPISSDTSNAESYSH

SEQ ID NO: 124664 - protein, 71 aa, Oryza sativa
  Clone ID: PAT_MRT4530_27381C.1.pep
GRRSHVSKPSLVGAGSAGDRLSALPDGLLHAILSSLSTRQAVQTCVLSERWRDLWWFGYQCSSSCFPAPGH

SEQ ID NO: 124665 - protein, 87 aa, Oryza sativa
  unsure (1)..(87): unsure at all Xaa locations
  Clone ID: PAT_MRT4530_27382C.1.pep
RSYEFWHIYEAQAWIHHPGHESIKNPKHLIMCNTGGSRXLPHLADAXVSYTMVCLKHSCYDPKDFSRNLSHFPSVLRRCHGSSRDLF

SEQ ID NO: 124666 - protein, 353 aa, Oryza sativa
  unsure (1)..(353): unsure at all Xaa locations
  Clone ID: PAT_MRT4530_27383C.1.pep
AKTRRRISTSGISTASPLRCLRILSGETKALSLISPGTDSRRKATQLLTGSPKEGLTGGVALGFGGGARRAVDAGAAGPRAASWLAVDCARASGSGGRRLTGVSPTRSMLRWRQRAAFVAATRAGERRKTRPAGKWTAGGGRLHRKHNAAIQSRGSSPVQGGPREGXANGLDPSKRGRRRRIAAAHAGGEKRGKRRRGDEDSIQGGGSISGVQGVHFRRRMGWKSTEEGRRXTAASGSGRQRRRGHAGRRRGXRQRLRVFKRLAELQREPRRGESEREKRNRRKALPSRAGSDGRSTARGELSGLGPGKGKKSYGRERFWGRKPTXVVMGARLAVVLGASVGKERKRMGKTEA

SEQ ID NO: 124667 - protein, 185 aa, Oryza sativa
  Clone ID: PAT_MRT4530_27384C.1.pep
MEQERGARGEYDNEVGVLRKFGPWGGKGGSAYDIEVPPHRLYSVTICSGEIIDSLAFSYIGPNGQSITIGPWGGNPGPSPYTIQLGPSEFLLEVSGTIGRFANSRSNVITSLTLVTNEDRYGHFGTERGDPFCTTLQTNCSIVGFFARASRYMHAIGVYVNTNQLNLAVSRRRFRTDNLGNANQK

SEQ ID NO: 124668 - protein, 65 aa, Oryza sativa
  Clone ID: PAT_MRT4530_27385C.1.pep
WKFYSVGTCRYHANHVNCCMQYFILSDRHQGTRQHPTTIPTSLVLDTITNTYLSFTYSLLQPSAL

SEQ ID NO: 124669 - protein, 454 aa, Oryza sativa
  Clone ID: PAT_MRT4530_27386C.1.pep
MGGGRVRFNVGGQVFETTTTTLANAGRESMLGALLDSSWNLAPTAGGGGGGGGGGGGGGVAEYFIDRNPACFAVLLDLLRTGSLHVPPQLPEKLLYREALYYGLLDHVRAARWGAFDGDRLRLAASVPGRAPGDGTAIRAAPDGGCCVAHGGAVHVYNWMLDERRPVSLDHSQVNDVAYLDEATLLIAARERLGKCDGGMAAFSAVSGDLRHRFRVAHDRQAKSFTAGALAFDQDSSIFASCKGRLNEYGIGVWDRATGEQADFFYEPPGCALGDADKLQWLDATNALMVATLFPKTDNCFIGLLDFRDKNVAWSWSDAGMAASLDDKRVLHAIAMEDERSVCVINQYDDLGFLDLRSNAGGVRWSSRSKFMNRKVPSEESCYPKLATHGGQLFSSMNDSISVFSGPECVLTSTLRRSHGGAICDFSIGGDRLFALHNEENVFDVWETPPPPII

SEQ ID NO: 124670 - protein, 113 aa, Oryza sativa
  Clone ID: PAT_MRT4530_27387C.1.pep
NSRIKYSLSLSLLQESNTPSLQARGQLNPQTFWGTHKLLQASRSAAEAAAAAGTETAAPPQLAGRRPALPASGRRRREPRRGRGDRSSTRGGARRPCVVPAEAEEGEGGIDGS

SEQ ID NO: 124671 - protein, 82 aa, Oryza sativa
  Clone ID: PAT_MRT4530_27388C.1.pep
APPRESRPGKALPGSPTAPVPARDPPVRPHNPPPYAQTQAAPRGSPGPSPRAPLDPPRRPLLPPTSRVTPGPAPKTPRLAPP

SEQ ID NO: 124672 - protein, 57 aa, Oryza sativa
  unsure (1)..(57): unsure at all Xaa locations
  Clone ID: PAT_MRT4530_27389C.1.pep
LKVKELKNGPLPMFSMLGFFVQAIVPGKGPIXNLFDHVPDPFPNNAWANPPNFVPGK

SEQ ID NO: 124673 - protein, 513 aa, Oryza sativa
  Clone ID: PAT_MRT4530_2738C.1.pep
MKNDDDVESPLLAAAADADHHDVDNSHPAAGSSFALACAVAASLTSIIYGYNRGVMSGAQKFVQLDLGVSDAEIEVLIGATSIYSLVGSLAAGWACDRAGRRRTIALSAAMFLAGSAATAAASGYAALMAGQLVAGVACGFGLVVAPVYIAEIAPPSSRGFLASIPEIAGNSGILLSYIADFALAGLPMSLNWRLMIGIGAVPPLFLAAAALLAMPETPRWLVLHGHHDDARQVLVRTTGGDAALAERRLQEIVSSVKESATKQQLSSAAAAGGGGASTGVWRDILVRPTPAVRRVLFAILGLQFFQQASGVAAMVLYAPRVFNHVGVTSERAVLGATVLLGATKTASIVVPLFLADRLGRRPMLLSSAGGMAVSLLVLGFSLRVSSSSGSGSEWWAAATSVAAAAAFMATFSLGFGPVIWMYGSEILPLRLRAQGTGIGTAANRVMSAAVGMSFISLYEAAGMAGTFYLFAACSAAAWVFVYACLPETKGRSLEEMEALFDAAHPSSPPPAS

SEQ ID NO: 124674 - protein, 267 aa, Oryza sativa
  unsure (1)..(267): unsure at all Xaa locations
  Clone ID: PAT_MRT4530_27390C.1.pep
MSQRTTSQATSSCPHPPPPLPPLSPQLPSISLSPLLSPLSARQRTTAAVPSARGPTSPPSPPPPHGFXPSTPPPPPPTPRXPPPFPTSSPSPPPPATAPVSPSLAAADVARASPSPPRKDEGAARRPSPDSGSSRGTRAPPPPRSSGWRTRPRWARPGGSDRNRRGPRARASRRRARWSCFAAAPPPRPRPSGPEPPPPRPRPSEPQLRRSRRVSRARALRRGRQFQFAARRRPGQPLRRPRGVRRVSQSGDNPFYSQYSPLPPCFV

SEQ ID NO: 124675 - protein, 84 aa, Oryza sativa
  unsure (1)..(84): unsure at all Xaa locations
  Clone ID: PAT_MRT4530_27391C.1.pep
VPHPNYRVHPHIPPHVRRNTGGENKEGGEVYRXSDVRCQKNEMRKCFHLSEGDNARFFCADIHEYDQMLPEDYTDYRMIETKEL

SEQ ID NO: 124676 - protein, 167 aa, Oryza sativa
  Clone ID: PAT_MRT4530_27392C.1.pep
MCPVTKGDLRVDDLIPNHALRCIIQAWCVANHCRGVERIPTPRVPVTLAQAGEVLSLGEVEAAARAGDAARCGAAVREVGRLARESDRDRWCLASSGAASALAAAVASFAAASLVLVMPLDEKAIMAIGSSTASVALLANVAKHDDLQRRLQAVVIIREIVVLSSCC

SEQ ID NO: 124677 - protein, 257 aa, Oryza sativa
  Clone ID: PAT_MRT4530_27393C.1.pep
MVMVLLPPPATASRRELPNFRGFGVGLPPTSATVKTGIELPDCAAAATVLLPPPFTASRGASWWRLPASCGGGTVDGDLTSVSAGDRAWWTVVDHHDDLVLYDVYWGSRLFVCNPATRRWAMLPPPWPEPEHEPSASPAPNTAIVCCVAAALAASGYAAVCPRPPATVSYVAAWDFDTNLGGSRNWVLKLGSELSRFGIHSVIRSKVSVSFGGNTSSSTSRGLSAAIVQSGTPRVPLTPDATTAWLRTHQTYQQLIC

SEQ ID NO: 124678 - protein, 429 aa, Oryza sativa
  Clone ID: PAT_MRT4530_27394C.1.pep
MKKPQNKITLKLAGANLAADESETVSKMYGQHGELVLSALPGSQVDLVAAHRPPVVDKGHPETYVEVCVCGCEHRNPNLTVTVRAGRASSASRLELQVDADAARSCPDERNRVLIARRRRATALAPSSRAMASIVRRAPVSRLEPQVDADAARSSPDEQRRVPSPSPAPAPRGRRVVGEAAGLACDARRTGIGVPAAAPAPARRGVIGGAGARLAAAAVVVLLRRNIATATHVTHSVRDRRSSGPLGRGRGGGAAAKQDHRALRRDALARGPRRLRSDPPGRAHRGRVLQPEERGGGGARVPRELPESGDGRRAAPSSFLGGEGEARATSAAARDGDTGAVAGGGGDGEEVGNGGGFEGLAVAEAELMVIKPWGGGGDAKTKGNTATISLGDANAAVSSSTRFYNSGNDCCDAALCSAASELDAVANFL

SEQ ID NO: 124679 - protein, 266 aa, Oryza sativa
  unsure (1)..(266): unsure at all Xaa locations
  Clone ID: PAT_MRT4530_27395C.1.pep
WPPTTACPSSPTTSSAASSTSSPPGRPRPPACSRGGGARSGAPPAPSTSPCASSTTMSPATTRPSHPAATPSSAPPRRRLRPPPPAPASPGSPSTRPDDGGATTSTPTPSASPPCRRRHSGCSTSPSATSATASSLCRTLASRSRVSTRCACGSAPASSTPRRRSPPCTSSPSTSSSTYTSTTTGSTAASSPXNRASSSAARRPPSSPWNSAALVATSTPTSTAASASTPRSCAPSGTRGIPGDSTSSEPSSSASSATSSASSWKQ

SEQ ID NO: 124680 - protein, 477 aa, Oryza sativa
  Clone ID: PAT_MRT4530_27396C.1.pep
MRERRGGHRQTRGAPEAHARLPRHAPPAGGHGRGGRGQEGPIAIAAGHGRGHRGGGHGGPASPRHHLRGRGQAGPNSADHAASRGRGRRSGDATSASSRHGGGHADHAVRDVRRGGNVSTQQHHHRGRGQASPSSADHAASRGRGRCGGDANSSSPRVAGQASRFADHAASPGRGCGRWGWDSPLFVGGGARGVGVDLGLQARDGGTPNDGGHGAARGSERCGPPSASDQDSVPFVGTGARGVGVDLELQARGGRRPPRADRHREVWVPVLTTANANLDLFFHGGDEGEAVAAAAHAPRPPARGGGGDQDAAVAGAADAPRPPAIGGGAVGREPGRRRIRRERNARRAALNDGGAEAPARAAAGVPAEADADLSPTNKKLQSLYSSLLKEKELIQELLQGLRGVEECARAQAESPNRETIRSIVSTVLSHLASYDRVDAEATELRAQLQHPVPRPPELDGHPRDSLPPSVTRRLSRD

SEQ ID NO: 124681 - protein, 60 aa, Oryza sativa
  Clone ID: PAT_MRT4530_27397C.1.pep
GQDMMSPPHSKPMSCLPCIECRNPNVSLFLSVIRSVWIGIPSSVDWVASQQNHPPIRSAI

SEQ ID NO: 124682 - protein, 1054 aa, Oryza sativa
  Clone ID: PAT_MRT4530_27398C.1.pep
MDQDPRLTERAGGIFTMLPLKGMLVVQRFPDVFAEDLPRMPPDRDIEFIIDLIPGTAPISKRPYRMPVNELEELKKQIRELQEKGFVCPSSSPWGAPVLFVKKKDGSMRMCVDYRSLNEVTIKNKYPLPRIDDLFDQLKGAKVFSKIDLRSGYHQLKIRTGDIPKTAFSTRYGLYEFTVMSFGLTNAPAYFMNLMNKVFMDYLDKFVVVFIDDILIYSKDEEEHAEHLRLVLEKLRKHKLYAKFSKCEFWLKELAFLGHVISAGGVAVDPAKVEAVTEWKAPKSVTEIRSFLGLAGYYRRFIEGFSKIARPMTQLLKKEKKFVWSEQCQESFEQLKEKLTSAPILVLPDIRKDFVIYCDASRQGLGGVLMQDGKVVAYASRQLRPHEENYPTHDLELAAVVHALKIWRHYLIGNHCDIYTDHKSLKYIFTQSDLNLRQRRWLELIKDYDLEVHYHPGKANVVADALSRKSHCNHLRMEGMVPELKEEIAQLNLHIVPCGQINTLDIQPLLRTQMEEAQKDNEEVRETDGQTERTNQVLEDMLRACALDFSKDWERCLPYAEFSYNNSFQASLKMSPNETLFGRRCRTPLMWSETGERAVFGPDIIQEAEEKVRLIRDRLKVAQSRQKSYADTRRRNLEFKEGDYVYLKVSPMRGTKRFKLPENIADVHPVFHVSQLKKCLRVPEEQAPLEEIHISNDLTYPEHPIRILDEAEKRIRSKVWCMYKVQWSNHTEDEATWESEEFLRTEYPHLFENCSSFFPLSLSPPSPRVAASRREPPRAVAIVASRRAPSPSSPAAAPPSPSPSHRRGRAVTVASRPAPRVHPIAASRRAPPLPRRRRRYPVAACVPSPLPRRAPSRRLAPRARHLAPHAALLPRAPCRRCYRAAPPVPSPRAVTVRPSRHRCRSSRPAPCCAASSSHRRVEPRAAPPRRRHEAAAPLPSSLFPIISSPFPYIIPPLLPLFPSILTSSPLPTLPRRRLHAAVPPSSRRHAAVIVPPRRHLRSRRAVAPEPPRRASPPCTAVAVVAATAATEAGDEASEDPYAYYQEGDEDDGAQ

SEQ ID NO: 124683 - protein, 73 aa, Oryza sativa
  Clone ID: PAT_MRT4530_27399C.1.pep
GVYLHGTNHQLITLNILFGRVINIATAKVSCSLIPNSPAPLSSRRGDWMSCIQVGPMLGDNLNRLLFAHYLHR

SEQ ID NO: 124684 - protein, 114 aa, Oryza sativa
  Clone ID: PAT_MRT4530_2739C.1.pep
NPYTIMNPTRLTYYRMSPRFKTWKTKQQKRENCDILANAQQHARNRGVKSHEITRVFTHTALNELKVKAPLAATNQILRKTNNYSIHKQEIAAKQSFPSQSRHKMNESARIPTT

SEQ ID NO: 124685 - protein, 36 aa, Oryza sativa
  Clone ID: PAT_MRT4530_273C.1.pep
KNLIDRYIYLHRLPDGPITIEVTCGTSTPNKVDNDA

SEQ ID NO: 124686 - protein, 1579 aa, Oryza sativa
  Clone ID: PAT_MRT4530_27400C.1.pep
MGVPRSEGYVIELHQLMRRLRYPRFPIYRVRQCGPVWEVLVEVLTRVPSESDYSFPTRHCHDLPETAMQDAAWEAFLQLSSIHRAELAIDDFYEEALLEIDDQQRRVGELETEVTDLTVQQLQLEEEHQAWGSEINLLKAQLQVHGDQFQQLSDQYNDRRGMMDTLEEQLRESQEHVSQLEEQLRAATVNTTGASTSTAVGRDRYFFLTPPYPPAFHALLGELGSSMETPIQVDSETEGTDTEPEIEPDITDPSEDETPVPRITFIGGPRTLSTAHKSTRPPGKKPKPDPEATTSEPWGLSNEETQAPDLTTLAGVMAAQTQLLQAIANNQGNRGGSSFGEFMRTKPPTFATADEPMEAEDWLRIIEKKLTLVRVREADKVIFAANQLEEAREEDAGEPNWEEFTTAFRNNFVPAADHDNFYSLINKVVRMENDRKVVEHNRKRRFAMNRLSQAAPQRPKGTTSSVWRPTVVTTNRLAASSNFHRPVTIQNRAPAPNQAATGSVRPGSCFNCGEYGHFANKCPHPKKTPVRTGANTTAIHGTTTPAAGRGLFKTPQTNRTATGFGRGQVNHVRAEEAQEDQGVLMGMFSINSTPVKVLFDSGASHSFISLKASQQHKLTRVKLRQPMLVHSPGGEIAVDTACIDVPIRLRDVVFPSNLMVLIPQTLYVVLGMDWLTKHRGVIDCRRREVTLTTPWGSDMRATMDQDPRLAERAEGIFTMLPMKGMPVVQRFPDVFLEDLPGMPLDRDIEFIIDLIPGTAPISKRPYRMPVNELEELKKQIRELQEKGFVRPSSSPWGAPVLFVRKKDGSMRMCVDYRSLNEVTIKNKYPLPRIDDLFDQLKGAKVFSKIDLRSGYHQLKIRTENIPKTAFSTRYGLYEFTVMSFGLTNAPAYFMNLMNKVFMDYLDKFVVVFIDDILIYSKDEEEHAEHLRLVLEKLRKHKLYAKFGKCEFWLKEVAFLGHVISAGGVAVDPAKVEAVTEWKAPKSVTEIRSFLGLAGYYRRKDFVIYCDASRQGLGGVLMQDGKVVAYALRQLRPHEENYPTHDLELAAVVHALKIWRHYLIGNHCDIYIDHKSLKYIFTQSDLNLRQRRWLELIKDYDLEVHYHPGKANVVADALSRKSHCNHLRMEGMAPELKEEIAQLNLHIVPHGQINTLDIQPLLRTQIEEAQKDNEEIQEVKERLAAGFAKEFSTDEKDVLWYKKRIYVPERGGLRGLILKEAHESAYSLHPGNTKMYQDLKEGYWWPNMKRDVAEYVALCDVCQKTATGYDSIWVIVDRLTKTARFIPVKTNYSGAKLAELYMTRIVYLHGVPKRIVSDRGTQFTSHFWEKVHETLGSYLAFSTAYHPQTDGQTERTNQVLEDMLRACALDFSKDWERCLPYAEFSYNNSFQASLKMSPNEALFGRRCRTPLMWSETCERAVFGPDIIKEAKEKVRLIRDRLKVAQSRQKSYADTRKRNLEFKEGDYVYLKVSPIRGTKRFKVKGKLAPRYVGPFQITARRGEVAYQLQLPENIADVHLVFHVSQLKKCLRVPEEQAPLEEIHISNDLTYPEHPVRILDEAEKRTRNKVWRMYKVQWSNHT

SEQ ID NO: 124687 - protein, 414 aa, Oryza sativa
  unsure (1)..(414): unsure at all Xaa locations
  Clone ID: PAT_MRT4530_27401C.1.pep
MEKPGDDEKLTVPLLEPKPATYKHQEDDDAEEDEVGSVRRRVVEENKKLWVVAGPSICARFSSFGVTVISQAFIGHIGATELAAYALVSTVLMRFSNGILLGMASALETLCGQSYGAKQYHMLGIYLQRSWLVLFCCAVILLPVYIFTTPLLIALGQDPEISAVAGTISLWYIPVMFSYIWAFTLQMYLQAQSKNMIVTYLAFLNLGIHLFLSWLLTVKFQLGLAGVMGSXCLELWYNTILVLLTGYMKNAECGAKFAIFNVVTTSFLIGFVLFVLFLFFRGSLAYIFTESKAVADEVADLAPLLAFSILLNSVQPVLSGVAIGSGWQSVVAYVNVTSYYFIGIPLGAILGYVLGFQAKGIWIGMLLGTLVQTLVLLFITLRTDWKKQVEITRERLNRWYMDENGRSQNSIGNA

SEQ ID NO: 124688 - protein, 261 aa, Oryza sativa
  Clone ID: PAT_MRT4530_27402C.1.pep
MMCIVVYLDYFLLINNHAEKVMICLAYVPWQALLHAYLHGRPKARMELGLLLEPGPGASNADLAAADMSKVLQVKITAEQAEMASLVDKPFTNKPFGLFSGEFARRHGFHLLGTTSTWLLDAVLLLSRHLLAAFLSSSLTTAAAFLSSSLTTAAVEAVQTSLSWARKVAGSMGLRIQLAHTNTNGPSVCSCSATAVSRSQLETSMPRRWMVAWDCGWALGASSLESAAVVPTTRSGSNVDARMLRRNEGGRRGRKKNKGLE

SEQ ID NO: 124689 - protein, 757 aa, Oryza sativa
  Clone ID: PAT_MRT4530_27403C.1.pep
MTTTAAGGATLCAAREEQELLATRLNVNGIRPPHCAAESILIYLTAPGLSMMPMRVMASDSIASVKLRVQTSKGFVVRKQKLVFDGRELARNDSRIMDYGVSHGNVLHLVIRISDLRLITVQTVHGNKFRFRVEPGRTVGYVKQQIAKNSTHDDDHHSLVLQGEVLDDAHLIHDVCRTDGAVIHLLVHRSAKLAARPVDRDFEVSIVARNRNAAADAAQPTLHLQRDFAIEPVIVNPKAALPPVIENLVGAVLAGMEKGNAPIMSSEGTGGAYFMQDASGQEHVAVFKPVDEEPMAANNPRGLPPSPTGEGLKKGTRVGEGAIREVAAYILDHPPGGRRSFAGHHGSATVGFAGVAPTALVRCMHRSFKQPAASEQGPPLFKVGSLQAFVKNSGSCEDMGPRAFPVHEVHKICVLDIRLANADRHAGNILTCRDEQGHGLTLVPIDHGYCLPESFEDCTFEWLYWPQCREPFSEETVEYIRSLDAEEDIAILRFHGWEMPAKCERVLRVTTMLLKKGVDSGLAAFDMGSILCRETLTKESVIEEIIREVEDDVGDEAAFLQSVSQSMDRRLGELSKKKKSNLLSIKNLPSRPRSLFDVCCGLNEDEDDAACLTRSSWLSLRPAAGAYVAVAPVVLAAARGALVASRRATTTLVVSGRCRCRRPGVTARGEEKKEYAKRQKYPPIHGTASIHSAVPRGTEAQLLDWARRTARIRYCTGSRTIKKLFPVCIPPLCNNIVSYKGKASDGWLRAWPLSRTP

SEQ ID NO: 124690 - protein, 1221 aa, Oryza sativa
  Clone ID: PAT_MRT4530_27404C.1.pep
MASRRRATTSNDETQTPDLTTLAGVMATQTQLLQAIANNQGNRGRSSFGEFMRTKPPTFATAEEPMDAEDWLRIIEKKLTLVRVREADKVIFAANQLEGPAGDWWDTYKEAREEDAVEPNWEEFTTAFRDNFVPAAVMRMKNNEFRRLQQGNTTVQEYLNRFTQLARYATRDLADEEEKIDKFIEGLNDELRGPMIGQDHDSFQSLINKVVRLENDRKVVEHNRKRRLAMNRSPQTAPQRPKGTTSSAWRPTVVTTSRPAASSNFHRPVTIQNRAPAPNQAATGSVRPGSCFNCGEYGHFANKCPHPNKTPICTGANATAIHGTATPAVGRGLFRTPQTNRTATGFGRGQVNHVRAEEAQEDQGVLMEDLPGMPPDRDIEFIIDLIPGTAPISKRPYRMPVNELEELKKQIRELQEKGFVRPSSSPWGAPVLFVKKKDGSMRMCVDYRSLNEVTIKNKYPLPRIDDLFDQLKGAKVFSKIDLRSGYHQLKIRTGDIPKTAFSTRYGLYEFTVMSFGLTNAPAYFMNLMNKVFMDYLDKFVVVFIDDILIYSKDEEEHAEHLRLVLEKLRKHKLYAKFSKCEFWLKEVAFLGHVISAGGVAVDPAKVEAVTEWKAPKSVTEIRSFLGLARYYRRFIEGFSKIARPMTQLLKKEKKFVWSEQCQESFEQLKEKLTSAPILVLPDIRKDFVIYCDASRQGLGGVLMQDGKVVAYASRQLRPHEENYPTHDLELAAVVHALKIWRHYLIGNHCDIYTDHKSLKYIFTQSDLNLRQRRWLELIKDYDLEVHYHPGKANVVADALSRKSHCNYLRMEGMVPELREEIAQLNLPRGQINTLDIQSLLRTQIEEAQKDNEEIREVKERLAAGRAKEFSTDEKDVLWYKKRIYVPEQGGLRGLILKEAHESAYSLHPGSTKMYQDLKEGYWWPNMKRDVAEYVALCDVCQKVKAEHQRPAGLLQPLRIPEWKWDETDGQTERTNQVLEDMLRACALDFSKDWERCLPYAEFSYNNSFQASLKMSPNEALFGRRCRTPLMWSETGEQAVFGPDIIQEAEEKVRLIRDRLKVAQSRQKSYADTRRRNLEFKEGDYVYLKVSPMRGTKRFKVKGKLAPRYVGPFQIIARRGEVAYQLQLPENIADVHPVFHVSQLKKCLRVPEEQAPLEEIHISNDLTYPEHPIRILDEAEKRTRSKVWRMYKVQWSNHTEDEATWESEEFLRTEYPHLFENW

SEQ ID NO: 124691 - protein, 1138 aa, Oryza sativa
  Clone ID: PAT_MRT4530_27405C.1.pep
MASRRRASTSNDETQTPDLTTLAGVMATQTQLLQAIANNQGNHEGSSFGEFMSTKPPTFTTTDEPMEAEDWLRIIEKKLTLIRVREADKVIFAVNQLEGPAGDWWDTYKEAREEDAGEPTWEEFTAAFRENFVPAAVMRMKKNEFRRLRQGNTTVQEYLNRFTQLARYAIGDLANEEEKIDKFIEGLNDELRGPMIGQDHESFQSLINKVVRLENDQRTVEHNRKRRLAMNRPPQGVPQRLKGATSSGWKPPIVATNRPAAPSNFNRPVAIQNRTPTPTLAAPGAKKNVDCFNCEEYGHYANNCPHPRKTPVRTSANAMTVRGTTIPIAGRGLFKTPQTNRTATRFGRGQVNHVRAEEAQEDQGILMDYRSLNEVTIKNKYPLPRIDDLFDQLKGAKVFSKIDLRSGYHQLKIRTGDIPKTTFSTRYGLYEFTVMSFGLTNAPAYFMNLMNKVFMDYLDKFVVVFIDDILIYSKDEEEHVEHLRLVLEKLRKHKLYAKFSKCEFWLKEVAFLGHVISAGGVAVDPAKVEAVTKWKAPKSVTEIRSFLGLAGYYRRFIEGFSKIARPMTQLLKKEKKFVWSEQCQESFEQLKEKLTSAPILVLPDIRKDFVIYCDASRQGLGGVLMQDRKVVAYASRQLRPHEENYPTHDLELAAVVHALKIWRHYLIGNHCDIYTDHKSLKYIFTQSDLNLRLRRWLELIKDYDLEVHYHPGKANVVADALSRKSHCHHLRTEGMDVQRNFQPMKKVFYGTKRGSMYPNRDLKEGYWWPNMKRDVTEYVALCDVCQMVKAEHQRPAGERAVFGPDIIKEAEEKLPENIADVHPVFHVSQLKKCLRVPEEQAPLEEIHISNDLTYPEHPVRILDEVEKRTRAKVWHMYKVQLSNHTEDKATWESEEFLKTEYPHLFEDRPNPPPTLPRAWPPRAPRCRSIASSPAPPSRRRPSPRVIAVAVAVALSRAPCRRCCAVAVGRPIAARPSGHRLAPRAPRAARPSRRRLAPRTLPRRSPVIVASPSPSRRAPRRAARPSPSPPATPRTACRVAMRPPTPPPRPYRTRPLPFSTPHPSSPFPPPLLLLHAPPPSCRRAAAFVRRAVASKPPRRARCGAERCRLAPPPPTGTDGKIGWYLGKASTVPGQLKTEP

SEQ ID NO: 124692 - protein, 185 aa, Oryza sativa
  unsure (1)..(185): unsure at all Xaa locations
  Clone ID: PAT_MRT4530_27406C.1.pep
MAPELKEEIAQLNLHIVPRGQINTLDIHPLLRTQIEEAQKDNEVIQEVKERMAAGRAKEFSIDEKETLCXESAYSLHPGSTKMYQDLKEGYWWPXMKRDIAEYVALCDVCQKVKAEHQRPAAYHPQTDGQTERTNQVLEDMLRACALDFSKDWEKCLPYAELFYDNSFQASLKMSPNEALFGRRC

SEQ ID NO: 124693 - protein, 1252 aa, Oryza sativa
  Clone ID: PAT_MRT4530_27407C.1.pep
MASRRRASTSNEETQTPDLNTLARVMTTQTQLLQAIANNQGNRGGSSFGEFMRTKPPTFATAEEPMDAEDWLRIIEKKLTLVRVREADKVIFAANQLEGPAGDWWDTYKEAREEDAGEPSWEEFTIAFRDNFVPTAVMRMKKNEFRRLRQGNTSIQEYLNRFTQLARYATGDLADEEEKIDKFIEGLNDELRGPMIGQDHDSFQSLINKVVRLENDRKVVEHNRKRRLAMNRPPQAAPQRPKGTTSSVWKPAVVTTNCPSAPSNFHRPVTTQNRAPAPNQAATGSVRPGSCFNYGEYGHFANKCPHPNKTPIRTGANATAIHGTATPAAGRGLFRTPQTNRTSTGFGPGQTLDVILGMDWLTKNRGVINCRRREVTLTTPWGSDMRATMDQDPRLTEHAGGIFTMLPLKGMPVVQRFPDVFPQDLPGMPPDRDIEFIIDLILGTAPISKRPYRMPVNELEELKKQIRELQEKGFVRPSLSPWGAPVLFVKKKDGSMRMCVDYRSLNEVTIKNKYPLPRIDDLFDQLKGAKVFSKIDLRSGYHQLKIRTGDIPKTAFSTRYGLYEFTVMSFGLTNAPAYFMNLMNKVFMDYLDKFVVVFIDDILIYSKDEEEHAEHLRLVLEKLRKHKLYAKFSKCEFWLKEVTFLGHVISAGGVAVDPAKVEAATEWKAPKSVTEIRSFLGLAGYYRRFIEGFSKIARPMTQLLKKEKKFVLSEQCQESFEQLKEKLTSAPILVLPDNRKDFVIYCDASRQGLGGVLMQDGKVVAYASRQLRPHEENYPTHDLELAAVVHALKIWRHYLIGNHCDIYTDHKSLKYIFTQSDLNLRQRMEGMAPELKEDIAQLNLHIVPRGQINTLDIQPLLRTQIEEAQKDNEEIQEVKERLATGFAKEFSTDEKDVLWYKKMIYVPEQGGLRGLILKEAHESAYSLHPGSMKMYQDLKEGYWWPNMKRDVAEYVALCDVCQKVKAEHQRPAGLLQPLRIPEWKWDEIGMDFIVGLPKTATGYDSIWVIVDRLTKTARFIPVKTNYSGAKLAELYMTRIVCLHGVPKRIISDRGTQFTSHFWEKTGERAVFGPDIIKEAEEKVRLIRDHLKVAQSRQKSYADTRRRNLEFKEEDYVYLKVSTMRGTKRFKVKGKLAPRYVGPFQIMARRGEVAYQLQLPENIADVHLVFHVSQLKKCLRVPKEQAPLEEIHNSNDLTYPEHPVRILDEAEKRTRTKVWHMYKVQWSNHTEDEATWESEEFLKTEYPHLFENR

SEQ ID NO: 124694 - protein, 48 aa, Oryza sativa
  Clone ID: PAT_MRT4530_27408C.1.pep
GSPSPWGSATLGELQAYADERGPRPTTGLGPDHTVPGSPRVLPDTHPA

SEQ ID NO: 124695 - protein, 306 aa, Oryza sativa
  Clone ID: PAT_MRT4530_27409C.1.pep
MGGVEKIGHLQDLIREHKFDFLGILETIKHDFSAEMLQKLSVGRGMVWKWMPATGRSGGILVGIDSEKLNIIGEVIGRYFIRLKLSNVDNKKVWDLMIVYGAAQVEQKADFLTELAKEVYSQSHPLMVGGDFNILRKESEKNKSGGYTKWSFIFNAIIEQANLREIQMGGRQFTWCNNQESPTLEKLDRVFINIDWEVAHPLTSVRPLVRAMSDHNPMLMETGQFLQPHKLFRFEQSWFLREDLVSIVSEVWNSSYNGSNLERWQKRMKHMRKKLKGWNKNWEGEYNRRKKFILDKIDAIDIQAET

SEQ ID NO: 124696 - protein, 106 aa, Oryza sativa
  Clone ID: PAT_MRT4530_2740C.1.pep
RGRGRRKKTPARRRRRRSGRRRKQKRRRRLRRGKPKKRRTSGTWRISLILSPSHAHPTTSSTRCPRKSVPEKINLLPSLIVLWNVAGSYTRDASRTTWTRTRTITN

SEQ ID NO: 124697 - protein, 169 aa, Oryza sativa
  unsure (1)..(169): unsure at all Xaa locations
  Clone ID: PAT_MRT4530_27410C.1.pep
KLKKCLRVPEEQAPLEEXHISKDLTYPEHPIRILDEAEKRTKSKVWRMYKVQWSNHTEDEATAPRRPFHRLAPSPFGRRVAAAAPRAPRPAAPRRRHIAESSPAPRHPAPLLYPLHHAAASTPPRRRIELPRRRHDATAPRRALAVPHSPPPSQSPCAAAVAATVRRRH

SEQ ID NO: 124698 - protein, 1602 aa, Oryza sativa
  unsure (1)..(1602): unsure at all Xaa locations
  Clone ID: PAT_MRT4530_27411C.1.pep
MADSDSPATWELSLPQSEGYVIVLHQMLRRLRYPGFPSYRVRQCGPVWEARVEIHPRVPSELDYSFQTRHHRDLPETAMQDAAREAFLRLSSIHRAELVSTEFAHHPFREEGNSVCTVQNTPCCYNPIVTRLSRWAEAVDDYYEEALLEIDDHQRRMGELETEVTDLTAQQLQLEEEHQAWGSEIDSLKAQLQVHGDQYQQLSDQYNDRRGMMDTLEEQLRESQEHVSQLEEQLRAAKISTTGASTSTAAGRDRYFFLTPPYPPAFHALLGEASMLATESAPYLVDPTAAQPPVPELVHTPLVPTPSPQLGSGLETPIQIDSETEETDTEPEIEPDITDPSEDEAPVPRITFLGGPRTLSTARKSTRPPGKRPKPDPEATTSEPWGLRVIEKKLTLVRVREADKVIFAANQLEGPAGDWWDTYKEAREXDHESFQSLINKVVRLENDQRTXEHNRKRRLAMSRPPQTVPQRLKGATPSGWKPPVVVTNRPAAPSNFNRPVALQNRTPTPTLAAPGAKKNVDCFNCGEYGHYANNCPHPRKTPVRTGANAMTVRGTTTPTVGRGLFKTPQSNRTTTGFGRGQVNHVRAEEAQEDQGVLMGMFSINSTPVKVLFDSGASHSFISLKASQKHNLTLVGLRKPMIVHSPGGEITVSHACIDVPILLRDVVFPSNLMVLIPQTLDVILGMDWLAKHTGVIDCRRREVTLTTPWGSDMRATMDQDPRLTERAGGIFTMLPLKGMPVVQRFPDVFPEDLPGMPPDRDIEFIIDLIPGTTPISKRPYRMPVNELEELKKQIRELQEKGFVRPSSSPWGAPVLFVKKKDGSMRICVDYRSLNEVTIKNKYPLPRIDDLFDQLKGAKVFSTIDLRSGYHQLKIRTEDIPKTAFSTRYGLYEFTVMSFGLTNAPAYFMNLMNKVFMDYLDKFVVVFIDDILIYSKDEEEHAEHLRLVLQKLRKHKLYKKFSKCEFWLKEVAFLGHVISAGGVAVDPAKVEAVTEWKAPKSVTEIRSFLGLAGYYRRFIEGFSKIARPMTQLLKKEKKFVWSEQCQESFEQLKEKLTSAPILVLPDIRKDFVIYCDASRQGLGGVLMQDGKVVAYASRQLRPHEENYPTHDLELAAVVHALKIWRHYLIGNHCDIYTDHKSLKYIFTQSDLNLRQRRWLELIKDYDLEVHYHPGKANVVADALSRKSHYNHLRMEGMVPELREEIAQLNLHIVPHGRINTLDIQPLLRTQIEEAQKDNEEVREVKERLAAGRAKEFSTDGKDVLWYKKRIYVPEQGGLRGLILKEAHESAYSLHPGSTKMYQDLKEGYWWPNMKRDVAEYVALCDVCQKVKAEHQRPAGLLQPLRIPEWKWDEIGMDFIVGLPKTATGYDSIWVIVDRLNKTARFIPVKTNYSSAKLAELYMTRIVCLHGIPKKIISDRGTQFTSHFWEKVHEALGSYLAFSTAYHPQTDGQTERTNQTGERAVFGPDIIQEAEEKVRLIRDRLKVAQSRQKSYADTRRRNLEFKEGDYVYLKVSPMRGTKRFKVKGKLAPRYVGPFQIIARRGEVAYQLQLPEYIADVHPVFHVSQLKKCLRVPEEQAPLEEIHISNDLTYPEHPIRILDEAD

SEQ ID NO: 124699 - protein, 105 aa, Oryza sativa
  Clone ID: PAT_MRT4530_27412C.1.pep
SGSTSQIQRFSHLLSVFFNWWHNVCYQCNLYRDFYICIALWIISAFQRVLNRLFFSSLHARGGNLLGMVAPLAIVLEEGNKRMHQRELKYEELYGKNELAREESW

SEQ ID NO: 124700 - protein, 55 aa, Oryza sativa
  Clone ID: PAT_MRT4530_27413C.1.pep
WERIGSNKQMYTFTLHTMHSILPKPNHQRIIRQSIRCLTELLLGMWRIMSEATEF

SEQ ID NO: 124701 - protein, 132 aa, Oryza sativa
  Clone ID: PAT_MRT4530_27414C.1.pep
EEFWIQQLHEIPGVMPPQQLKGRKRRGRGRRRSESDHPPASASSKLLQPSEKRGNHSLRAILDGSPAPPHPKSSAAEGSRGLSGEEEREGELRASIRSGGGSQVRRACSGGRIAGGRRRERERRRRWRGGIN

SEQ ID NO: 124702 - protein, 180 aa, Oryza sativa
  Clone ID: PAT_MRT4530_27415C.1.pep
SFWAYLGWKSDSPRPAIFAMSNPTTKAECTPEDVFKYVGDNAVFASGSPFSNVTLGNGRQGYANQANNMYLFPGIGLGALLSGARHITDGMLQSAAECLASYITDDEIRKGILFPSISSIRHITARVGAAVVRAAVDEDLAEGRCDVDARDLKSMTEADTVDFVARKMWYPIYSPLVNDK

SEQ ID NO: 124703 - protein, 83 aa, Oryza sativa
  Clone ID: PAT_MRT4530_27416C.1.pep
GQMEYISCVFTIIWFSSFTQQCCYFYCCFPPWKKHGSSREVFICFSCDQLICRFGSKVCFRNQVMKKKTIWLGMSIGWFIQVS

SEQ ID NO: 124704 - protein, 100 aa, Oryza sativa
  Clone ID: PAT_MRT4530_27417C.1.pep
KHQKNKLAVGGLAKGQTNNRFTTPYRIFLGGLNPKKGGREPPLHFKREKKPKGCHTGLCRGGFSTFKRKALFEPTHSRRPHQQGHIIGSRIENPSFILGG

SEQ ID NO: 124705 - protein, 166 aa, Oryza sativa
  Clone ID: PAT_MRT4530_27418C.1.pep
MRRMLPKKCYLLGLQKLTLILDHNHEALARLASCLLNSSPNLKDLEIMDPLDIRYSDHLAAEFWEKHITAGCILNHLSVVAFYMRETLFEGYPRTSLCQFLVMNARALKRMSIKYHCSLYETEHVATVLEAVQSELHLWPGASPDVLLELSEVDCIRSIYEVWRIQ

SEQ ID NO: 124706 - protein, 41 aa, Oryza sativa
  Clone ID: PAT_MRT4530_27419C.1.pep
MPRLLPGTGRASSLSSSLLLLLLLGAAMAAARRAAFMLTKT

SEQ ID NO: 124707 - protein, 203 aa, Oryza sativa
  Clone ID: PAT_MRT4530_2741C.1.pep
MHDRSLAAATALCSGIKESTLASAAATATKDLKQSGSRYFGRDLRRRGGETGCFAAWNELVTGDLDWRAAARSVVPSDSVFPEVELAEDDAVVCSRVTPDGGGEVVAWCKIRRGGDVSAATIWNLRCEPLKTGNRQSGHGTTVQLVGGNHFLHNIEERSDEEIALLESYAPVKTNILIKAIYTIRCTTRQRSVPSSASTLPYP

SEQ ID NO: 124708 - protein, 306 aa, Oryza sativa
  Clone ID: PAT_MRT4530_27420C.1.pep
MAATAGALAVLQLASIVAAAVLLSSPPAAAAEPSVDFIDVVACSQSQVDSIGCDASVYLSGANSEQGMPPNANSLQPRALQLVEDIRAKVHAACGPTVSCTDISALATRAAVVLSGGPTYPVPLGQLDSLAPAPLRLVNQLPGPGTSSVQALIDLFGSRGMGDAADLVALSGGHTVGKSKCAFVRPVDDAFSRKMAANCSANPNTKQDLDVVTPITFDNGYYIALTRKQGVFTSDMALILDPQTAAIVRRFAQDKAAFFTQFVTSIVKLSKVPRPGGNKGEIRRNCFKTNSGARLVDVVEGFAASA

SEQ ID NO: 124709 - protein, 113 aa, Oryza sativa
  unsure (1)..(113): unsure at all Xaa locations
  Clone ID: PAT_MRT4530_27421C.1.pep
LKGGGKKLKKIKTPGKTVFSRTFFLFYRPPKPTRTPAGFGGFAHGPRGGGDPPGGAVLEPPLPNNGKPAEGHGXPPPGAPPLPGRAPPPRGGTRAPPRGTMGPPKNPGPGPPW

SEQ ID NO: 124710 - protein, 552 aa, Oryza sativa
  Clone ID: PAT_MRT4530_27422C.1.pep
MVAAALDAMAGTRWGRWLGLVTAVWVQCISGNNYTFSNYSHSIKTLMGLTQLQLNGLSVAKDVGKAFGLLAGLASDRVPTWLLLAVGSLEGLLGYGAQWLVVSRAVAPLPYWQMCVFLCLGGNSTTWMNTAVLVTCIRNFRRSRGPVSGLLKGYVGLSTAIFTDVCSALFADDPASFLVMLAVVPAAVCAVAMVFLREGEVGGGGADGREEEEEDGWCFAAINTLAVAIALYLLAADLTGVGGGGGVVSAVFVAVLLVLLASPAAVPAHVAWKSWMKTRKLANADVEEAEECASAPLLVAKATAAAAAEARGPGEKPVLGEEHTIAQALMSLDFWLMFASFLMGVGTGLAVMNNLGQMGVAMGYSDVSLFVSMTSIWGFFGRIASGTISEHFIKTRAIPRPLWNAASQILMAVGYVVMAVGMPGSLFVGSVVVGICYGVRLAVTVPTASELFGLKYYGLIYNILILNLPLGSFLFSGLLAGLLYDAQATKVPGGGNTCVGAHCYRLVFVVMAIACVVGFGLDVLLCFRTKRVYAKIHESKRQSRSAVVQRVS

SEQ ID NO: 124711 - protein, 105 aa, Oryza sativa
  Clone ID: PAT_MRT4530_27423C.1.pep
PDQFSHLLDQKTKIIGYSPTKIMRRISYMVMYGSCPSSERDARSRILADAERPTAISCWTSSAFGDGVGAEEVTEFFLPIQQRRGADGGSPACVRSEEMPSPCSH

SEQ ID NO: 124712 - protein, 60 aa, Oryza sativa
  Clone ID: PAT_MRT4530_27424C.1.pep
SSSSSLCSTTLTTSLPILPKPLIPVLILPMASGDARTTSQRLEIRAPREASGSRYGARPA

SEQ ID NO: 124713 - protein, 505 aa, Oryza sativa
  unsure (1)..(505): unsure at all Xaa locations
  Clone ID: PAT_MRT4530_27425C.1.pep
CPSADCRKDKMFDSRVDVHAHLIRRGFMNGHTCWVKHGEQESVDDVAGVGISSAQNQEDXDDHDMFVHSPLGGEMVDVDHDMLQDMLRDVENLPYNERDFMKFTRLISDSETPLYVGCQEKYTKLSATLDLMKLKASSGRTDKSXTDLLGIFKAMLLEKNTLPMTTYEAKQVLCPLRLEVRRIHACPNDYILYLKQYADLDACPVCKTSXYKRKKSVDKGKNSKRGGPAKVVXILPIIDCFNIIFANPKEAELIRWHAIEIRNKGMLRYPADSIQXRNIDKKYLEFIADPKNMRICLCTNGMNPFGDMSSSHSTWLVLIANYNLPPWLCFKXRKYIMLCLLIQGPKQSSNDIDVFLEHVIDDQEILWKKGVETWDAYGQEYFKLQVLLFCTINEYFVLGNLSGQTVKGKKACSDCMEDTRSRWLKKSRKIDYMGYRRWLPLRHAFRRKKKNFKXKRELQSAANNLSGDKVHDMVKDITNEFGKKRKGIPNAYTLRRPTRMLRPRR

SEQ ID NO: 124714 - protein, 145 aa, Oryza sativa
  Clone ID: PAT_MRT4530_27426C.1.pep
MPCSLMKGASDYCNIYVVAKGKSVNVRLAKCGVAALPLLPTRSPLASERCSLFAARLSDGTIRRRRCRAPPRCRTGRWPPPALQSERKTTHNLHSVSVEKEKKETPGADQISDLKIPNLMYTGYNVCKHSKKEQKHEENNEQHHW

SEQ ID NO: 124715 - protein, 100 aa, Oryza sativa
  Clone ID: PAT_MRT4530_27427C.1.pep
LFVQAQPEPVAVSTGLHHNINGSLQWSNRVNAQIANPANLPPPPPPPADSNGVGAAAPQRRRLELATARRGGNALPGSGLPLSDPSPLLLFFLLAGRANL

SEQ ID NO: 124716 - protein, 244 aa, Oryza sativa
  unsure (1)..(244): unsure at all Xaa locations
  Clone ID: PAT_MRT4530_27428C.1.pep
MLTSAMTSSPTAAWQLTLAGVRRRCSCGLRRKRRAGRGRRRLGDPDGGLPERQQXPERRRCTAGLPSAAAAHDLTRNRHYKRWRAKARVAADRGGPGGPFIGARGRRRRPTAAGEGEGKLRVREEKRIRIELESYDFQTKLDEDSKTEKEEGIPGIITPLLIRLDREKSGRIWKEAAAACARLGHGCGGRRKTTLTGGPHLSEGERRESGGSARRADLGRARLQAKERERGVLGRLSAQSQKRT

SEQ ID NO: 124717 - protein, 89 aa, Oryza sativa
  Clone ID: PAT_MRT4530_27429C.1.pep
LTRPGAISGDSTSHHPHVPPFKGNKGLTLSPKVLPTKTFFFHRTQNKKKAWARNKPPPRGNRGGKGSPTSPLQGGLEIPGGPRAGAPKR

SEQ ID NO: 124718 - protein, 93 aa, Oryza sativa
  Clone ID: PAT_MRT4530_2742C.1.pep
VRIRSLLSPENCRMYVVYYNTDLNYGSIAQDVITVYNVTTLISDENFSCIYNLLSLFFVIFFSPTVPQKHQTLNCYSDQQLFNTCRTYAGNQV

SEQ ID NO: 124719 - protein, 67 aa, Oryza sativa
  Clone ID: PAT_MRT4530_27430C.1.pep
VAVGTSSHAKASFCLGGCMPLYRNLNQFGIIWSTVCVRLLMDGCLCYCAFSASGKSSIISSLKKKEE

SEQ ID NO: 124720 - protein, 154 aa, Oryza sativa
  Clone ID: PAT_MRT4530_27431C.1.pep
MSPAWKHHGRKQKLSLPDGWKIEKKKYRYRTDKFYREESTGKLCRSIPEVKRYLEQNSVANLKPPLDMDGSTSSTAPVESTISCLGRQNLMKPKATSFSDEHISQDNNKSSGGHRNDGQREMVQLESAQEKKPVKKMNKFNLKELPESMDDDYL

SEQ ID NO: 124721 - protein, 140 aa, Oryza sativa
  Clone ID: PAT_MRT4530_27432C.1.pep
LGPVLCLPLWAIPPPPVFAPVHEPVQWVCGAPVPPVGPPLGPVPRVPIDHFPGYAPPILSPNGVYGPPISLPGFLPHGPVFPPPRPVLSWLCWRAPSSGPGPGGFPFPPPVGGFPWGLPPPLQSCSWSLRFLGGGPPLFI

SEQ ID NO: 124722 - protein, 63 aa, Oryza sativa
  Clone ID: PAT_MRT4530_27433C.1.pep
IHPLTHAFKSMLAGNNFHNTHSKSEFNKIHLFFFSPPNSLTFYTCILPKKKKKKLEGNFFHCP

SEQ ID NO: 124723 - protein, 713 aa, Oryza sativa
  unsure (1)..(713): unsure at all Xaa locations
  Clone ID: PAT_MRT4530_27434C.1.pep
YRSPEVLLGYPYTTAIDMWSFGCIVAELYIGLPLFPGASEYDVLCRMIEILGGQPPDDLLREARFAXKYVRTFSRQILDALVVMKDAGIIHCDLKPENILITPNVKTAAGVKVIDFGSACLEVDNHQMICYGRLKILGDFLSKLEVFILRESKKPKVGRWYFPRGRLDKLIYTYPWKNSSVNGENLPETEKTDRLALVDFLRGLVEFDPNKRWSPLQASYHPFITGEAFTGPYEPIQETPRIPVGRVAAVDHNPGGGHWLAAGLSPQVGSINRGLPFNNAFAPKIPFSYGSSCGSFGSHGSFNDNVGLASSYGSYDVNSVNMYHSPLGPSGFNLHSQAGGTFLGSSPDIRRRSYLYHGGGIRLSPGCPGPMSLGASPSQFTPPNSQMQIPSTATGKYGSTSPARSSHGSLGKAAAVGQYNRRRNLGHPPISMPPHEYTSQLTQGHHGDGTISNHFDGYARGHSGYPQSALPNPGHFSWRPHTCAGSGLSTDTSNHGSFPPSRYGGFPPTHSSNVSADTLASTSSIPDPADWDPNYSEESLLQEDTSLSDALSDLHLKDASGQTNQSSRLAHIQSHAIANSNSLSMNQRGDRLFHASTLTESSASTGHVTYDGYHNANYSQLNFQSRHGQPFQRRKAWSLFYSRRTAVFLCRKGFWKDFLVWIWRNAIQLVALVVCICNSWLHCLRAVDFAVCCIPLIDPFAMLRLIELYGMGL

SEQ ID NO: 124724 - protein, 34 aa, Oryza sativa
  Clone ID: PAT_MRT4530_27435C.1.pep
MEKINGVGNLVGDRQEWRLGMTCLTGEASEKYAV

SEQ ID NO: 124725 - protein, 87 aa, Oryza sativa
  unsure (1)..(87): unsure at all Xaa locations
  Clone ID: PAT_MRT4530_27436C.1.pep
VIKEMLGXGTFGQVAKCWDGETNSYVAVKVIKNQPAFYQQAIMEVSLLSMLNEKYDPDDQHHIVRMLDFFLYQNHLCIAFEMLGHNL

SEQ ID NO: 124726 - protein, 122 aa, Oryza sativa
  Clone ID: PAT_MRT4530_27437C.1.pep
LIIVHAFLKEVTALFHASTLTESSASTGHVTYDGYHNANYSQLNFQSRHGQPFQRYNHMTASYLRPMGNHHNGQPVWPNYGMAEPPPATMADGMPWGGRPGHSFTAGGLPSSFAGKDFGRIF

SEQ ID NO: 124727 - protein, 51 aa, Oryza sativa
  Clone ID: PAT_MRT4530_27438C.1.pep
LNNIKPTLYNIPCCIGPTILNNHTRLYRSISKPGIYHSKPGANQIITNYSI

SEQ ID NO: 124728 - protein, 93 aa, Oryza sativa
  Clone ID: PAT_MRT4530_27439C.1.pep
MSSGLVGGKEISGDSEKSFVGGGKWSACCMCRRGRAPVRDVALAFAVVREPVKAEEEDETDRGPSMGEITKVCKRLGMAKPEFRDGGCHLRDV

SEQ ID NO: 124729 - protein, 158 aa, Oryza sativa
  unsure (1)..(158): unsure at all Xaa locations
  Clone ID: PAT_MRT4530_2743C.1.pep
MSAMAMSSLNPNAAPFIPAAFRRVEDFSPEWWELVKTTAWFRDHWFRQXQMYEDAAAEEDHHPPAIPSRFDDDLAALLPDDSLDLLDMVDTDDLFYTPDPPVHHKPTTTPTLDADVLRALSLNSPRLGGAGMVRHAEKPAQFVAAKGGAARHVIHQPR

SEQ ID NO: 124730 - protein, 214 aa, Oryza sativa
  unsure (1)..(214): unsure at all Xaa locations
  Clone ID: PAT_MRT4530_27440C.1.pep
CLLPIPQALRWSSSPREHVAFLMMWLQKFLFCGPSCGPTSNWQHLVXALVDKKQLPLGKYLLVALYQTLGSASAKTVVDTVIGTGGPWWLFQVCLNLHTIKVSKRSALTEARFPSADDPTEDDDGNKVSTSRCMSFGEAASYAGSQLSAELFSDRFGNFCDGYPRDSRIWFAYDHSENFELPANFRFDKINHEVLTAAISPCILPVGIHQGRNI

SEQ ID NO: 124731 - protein, 61 aa, Oryza sativa
  unsure (1)..(61): unsure at all Xaa locations
  Clone ID: PAT_MRT4530_27441C.1.pep
CSFXXALFXASXXRLPXAXLCXVGXSASSXXXLLPSXXVFLXXXPXAXXLWSXRXAXFXFS

SEQ ID NO: 124732 - protein, 100 aa, Oryza sativa
  Clone ID: PAT_MRT4530_27442C.1.pep
MSRPHASACSLGLKGGAERLPTPRFRACPAGVRRNVALPPVSVRRHSSPLGGYTGVYYGSHGRRSTAMCPCLASVPGAHARISSCVAHRDADILPPFQNV

SEQ ID NO: 124733 - protein, 120 aa, Oryza sativa
  unsure (1)..(120): unsure at all Xaa locations
  Clone ID: PAT_MRT4530_27443C.1.pep
MASYHQQQGGSTFMAIPTINFXGDDEWWEYIPCPFCYIEVEVHFLCDHLQEEHCFDMKNAIGDTVCPICADNLDKDTDEHFRVQHSHLLKRRKSSSFSCKPSSGGADKGSYEEDSYFEAP

SEQ ID NO: 124734 - protein, 185 aa, Oryza sativa
  Clone ID: PAT_MRT4530_27444C.1.pep
MAVVELLPLRHCLRAVAADMLPSPEVDLKPPLSIRATNGMAPPATWQPGEGDVRGPSGGEDVVGFIRLPPDPPRSPAERELSPSQICLELQSGGRIGARRRLGVASTGARRRLGAAATGARAQLGVAAIRCEGGEAAAPQPRRMDLAGPSLLCPVPSPLGPLRPAPWLHLPVGKGGEEREGGDEE

SEQ ID NO: 124735 - protein, 208 aa, Oryza sativa
  Clone ID: PAT_MRT4530_27445C.1.pep
MASYHQQQGGSTFMAIPTINFTLRWRFISDDEWWEYIPCPFCYIEVEVHFLCDHLQEEHCFDMKNAVCPICADNLDKDTDEHFRVQHSHLLKRRKSSSFSCKPSSAAADKGSYEEDSYFEAPSHCMGRPAPDSSPDPLLSQFICCSLAPPVDSPRRSEADAEGHGSSSSDDQKRREQGVMDDASKEELEERLQRIEFVKQMLMTTIAY

SEQ ID NO: 124736 - protein, 216 aa, Oryza sativa
  Clone ID: PAT_MRT4530_27446C.1.pep
GLSAPYERASHIHERPVVNRLWAAGCHPFGPFSNSSKISQILQDVALRTTIYAQVDAALHKIRDTSEFVQSFASEHLKTPLGEPVKGKQNKSNTELWVEKFYKKVTTMPEPFPHELVERLEEYLDRLEGQLVDLSSLLYDHRLVDAYQNSSDILQSTIFTQQYVERVLSAERDKMKCCTIEYNHPKQSSQAFVYGGILLAGFLVYSLVIFFSSPVR

SEQ ID NO: 124737 - protein, 129 aa, Oryza sativa
  Clone ID: PAT_MRT4530_27447C.1.pep
MASEKEAALAAVPNDNPTIFDKIIKKEIPSTVVFDDEKVLAFRDINPQAPTHIVIIPKVKDGLTGLSKAEERHVEILGYLLYVAKVVAKQEGLEDGYRIVINDGPSGCQSVYHIHVHLLGGRQMNWPPG

SEQ ID NO: 124738 - protein, 292 aa, Oryza sativa
  Clone ID: PAT_MRT4530_27448C.1.pep
MSVSAAVAAASTSRTLVLARHRSPPASRVAATSRGRPFSSGPHPLAVSPATRAPAMATDGAAAAAAAGSKKKKEVLIFDAEEDLAVSLAKYTAELSAKLAAERGAFTVVLSGGSLIKNIRKLAEPPYLDSVDWSKWHVFWVDERVVPKDHEDSNYKLALDGFLSKVPIPTGQVYAINDALSAEGAADDYETCLKQLVKNGVIAMSQSTGFPRFDVMLLGMGPDGHIASLFPGHPLVNENKKWVTYIKDSPNPPPENISFTFWGISFGSYASQQGQCSRTNEVHAWILFKLSS

SEQ ID NO: 124739 - protein, 73 aa, Oryza sativa
  Clone ID: PAT_MRT4530_27449C.1.pep
MHMVGEDSIWHTMEVLCAFGMRSRIWKESEFGIIGYVKFVSYTRRFPMGIRTSSMSLVRGFRLPTSCINREGA

SEQ ID NO: 124740 - protein, 35 aa, Oryza sativa
  Clone ID: PAT_MRT4530_2744C.1.pep
EVRIERYRIKRFFLVIFLMFHLKFLNVVKVWICAG

SEQ ID NO: 124741 - protein, 291 aa, Oryza sativa
  Clone ID: PAT_MRT4530_27450C.1.pep
MATDGAAAAAAAGSKKKKEVLIFDAEEDLAVSLAKYTAELSAKLAAERGAFTVVLSGGSLIKNIRKLAEPPYLDSVDWSKWHVFWVDERVVPKDHEDSNYKLALDGFLSKCTRSVTKTLVLLIQFTEPLLLSVPIPTGQVYAINDALSAEGAADDYETCLKQLVKNGVIAMSQSTGFPRFDVMLLGMGPDGHIASLFPGHPLVNENKKWVTYIKDSPKPPPERITFTFPVINSSAYVAMVVTGAGKAGAVQKALSDKQTSSDLLPVEMAVLQDGEFTWFTDKPAVSMLQNK

SEQ ID NO: 124742 - protein, 157 aa, Oryza sativa
  Clone ID: PAT_MRT4530_27451C.1.pep
MTSAVTQRRRGGRGRRRDGDHDGGLPERRRQLERQRRTAGAAATTAARGYTVLGRYGRRETKARVATGSGGLGDPFIGTRRRRRRPTATGDEKERLGFGGERSIRIELESTDFQMKLADDSIREKIEWIARIISPLSIRPEMERSDGIWKETAARLG

SEQ ID NO: 124743 - protein, 1023 aa, Oryza sativa
  Clone ID: PAT_MRT4530_27452C.1.pep
MINSEGKAEDALVARLEKHTGPVCGLEFSELTPNRLASGAEQGELCIWDLKNPSEPVVFPPLKSVGSSAQAEISYLTWNPKFQHILATASSNGMTVVWDLRNQKPLTSFSDSNRTKCSVLQWNPDMSTQLIVASDDDNSPSLRVWDVRKTISPVREFVGHSKGVIAMSWCPYDSSYLLTCSKDNRTICWDTVSGEIMSELPASSNGNFDIHWYRKIPGVVAASSFDVKIGIYNLEFSGLYAAGDSAIGAPARPRAPAPKWLKCPTGASFGFGGKLVSFHQAAPTQGAQVTTSEVHVHNLVIEQSLVSRSTEFEAAIQNGDKSSLRALCDKKAQESLSDEERETWGFLRVMFEDGDAARTKLLAHLGFNPPQEQTSSSTDELNRTLADTLNLDHGAPTDTSDSQFMVDNGEDFFNNPQPSEASLAEESISTNGQQIEQEMPVNVEPSDLSVDKSIQHALVVGDYKGAVNLCLAANRMADALVIAHAGGSALWESTRNQYLKNTVSPYLKVVSAMVGNDLMSFVSTWPLNAWKETLALLCTFARKEEWNVLCDTLASRLLGVGDTLAATLCYICAGNIDKAVEIWSRDLKSEDGGKTYVDLLQDLMEKTITLALATGHKSFSASLSKLVENYAELLASQGLLKTAMEYLKLLGSDEHSHELAILRDRIAFSTEENHAASTSVHAGSINSSAYPTIQPSYSTPDPSQNLYQGTSQYAVPSNQYQDYQQQSNTAYGTYNSTYSQQPTQMFVPSNTTPVISQPNATPAPVPQQPVKAFTPTNLPGLKNPEQYQQPTLGSQLYAGANPPYTSGQSTPYQGVPPTTYHQPRPPTQFQTVPTAPPAVSSATVPGTTPSQMFPGPVANNPTSRFMPSNNPGFVQRPGLSPVQPSSPTQAQGQPQPVVAPPAPPATVQTADTSKVSAELKPVIATLTRLFDETSKAMGGSQVKKREIEDNSRKIGTLFAKLNSGDISPNVSSKLIQLCSALDSGDFATAMHLQVLLTTSDWDECNFWLAALKRMIKTRQNFRM

SEQ ID NO: 124744 - protein, 76 aa, Oryza sativa
  Clone ID: PAT_MRT4530_27453C.1.pep
QAAPATNSLATSPSTPRPHRRPLALPAAAAHHAAKASVTASCHRRALSRITAAARLPLSVATRRPATLRLTHVDEP

SEQ ID NO: 124745 - protein, 53 aa, Oryza sativa
  Clone ID: PAT_MRT4530_27454C.1.pep
CCLTCLLALLGLKEDTPFMLEEEKWVSEEWKRTHSPWASLSLRLKTLTFSLVP

SEQ ID NO: 124746 - protein, 117 aa, Oryza sativa
  Clone ID: PAT_MRT4530_27455C.1.pep
PFPGLSLLRFTSPRRLCPPSILPTFWPLPYCFLLSPTLTIEKASFLSFSFRLFLRYFPVCLIFCPFYSADVFLILAFLFFACVYTHYPFFPIVSSASPFFPSLSSFVNSFFFIFLFL

SEQ ID NO: 124747 - protein, 67 aa, Oryza sativa
  Clone ID: PAT_MRT4530_27456C.1.pep
DDPQPSCLASAAPSHSRPPQSAGGDIRRPKCCQTQRREVASSCSCLPLIHPAFSPGTCIAPHSSHKG

SEQ ID NO: 124748 - protein, 326 aa, Oryza sativa
  Clone ID: PAT_MRT4530_27457C.1.pep
MKRKTRNKIILTTLLVSAAAILIGGTVALILTAGTWKVKMKESREKICDKGWECSGSKYCCNDTITDFFKVYQFENLFSKRNSPVAHAVGFWDYQSFITAAALFEPLGFCTTGGKQMQMMELCAFLGHVGSKTSCGFGVATGGPTAWGLCYNHEMSPKEDYCDKTNLQYPCVEGAEYYGRGAIPVFWNYNYGAAGDGIHEDLLHHPEYLEQNATMAFMAAMWRWMTPMKKKQPSAHDVFVGNWKPTKNDTLAKRLPGFGATMNVLYGDQICGKGYIDDMNVIISHYQYYLDLMGVGREHSGDNRDCAEQAAFNPSYKKPDDQQQQS

SEQ ID NO: 124749 - protein, 99 aa, Oryza sativa
  Clone ID: PAT_MRT4530_27458C.1.pep
LTPPHTPPPTPLRRAALPHRRRGRGRRRPRRYSRSPTRPLFPNVAVTMDITARAALPWRRSDRGRRRPRRSSSAPLLSLFARRCGPARLIADQPAPHPH

SEQ ID NO: 124750 - protein, 223 aa, Oryza sativa
  Clone ID: PAT_MRT4530_27459C.1.pep
LQVALLQLMHLIWCWTSNWARLAFACECARNQKKGIGIQWSWWMRLKWFAITRTNWFDKYLWQDKLGQCSLAGKAGREWKFLGNSITSMGGHQMHGLQYIGHVLWDLWGSDANKGVAFRLDDDVRASITDFLGQIRSDMIDHHWLSELRENGVDIDELPYMIVEDKNSFVHVMFLNTASFGFIYAHSVMVWHVATCYCELAEQEKQDAMLNQSTEDTAAEAGC

SEQ ID NO: 124751 - protein, 69 aa, Oryza sativa
  Clone ID: PAT_MRT4530_2745C.1.pep
KLKKKGGKIAAFWCCIPCSSKAASVQFQVHHLKCVRKKKAKIESDVESCVLMILLPPLLMLDILRWQAV

SEQ ID NO: 124752 - protein, 706 aa, Oryza sativa
  Clone ID: PAT_MRT4530_27460C.1.pep
MALVDMVHGLNSPKLRLIRIEVLVFLGVVGLFVLLILGSYRRRSSCEAVKMTIWVAYAASIPMVSYTLGLMQSSPYKNSLFSVWAIILFIFLGSADSFSAYSLLDNDDWKRFYLKQLIESFWVGWLVVSSGGSDFQYILWVIYCIVILKSGTRVASFKLASRSSMLSKSTKWVADYMSYEHLRPAGDGVQRRDAVDMQGYHYVVAGEDEQNPRVEPPEYHLRYNDDDRAKLVTVQDIWNCNGSLLSGGNGGRLKDVCLSMALSKMLNRRFAGFQVLAESNLHKTRDFLFGGLLHGDRCVERTFRVIEVELAFVHDYFYTKYFLIYSSHHLFVTLSFAMVPTCGWLAYKLFQHFLRVPDEDELKFLVNANHRNYDALFTSVTAIAIALLEGLQVYIYLASAWSKVAMISKYVTTDSWNSSVLFSKLIGCITSLRYFRSWEDKLGQYTLLKSFDYKSMNILYHATFSLVNKTKKGRKEDKRVRLSMDVKKTVIETLKKNRGLGQLGNCVISLHANEVYYQLSWSCTTLPTTTHIIMAWHIATTLCEVEDEDQHGIDSTTTTTNQHVACSLSRYCAYLVAFAPELLPDHSFVSESIFDALVEEARELLKGKKTMQQRKEALRSQDHGDNRLLVVGGRLANNLIEIEHPGDRWKVLCDFWAEMMLYIAPSNDAKAHLETLPRGGEFITHLWALLAHGGILERPTGPAQNV

SEQ ID NO: 124753 - protein, 324 aa, Oryza sativa
  Clone ID: PAT_MRT4530_27461C.1.pep
MRNPPGRHLLRVATRAVRSSSALGSGGGGGGASTSATSPVAASSSSGGRPRTRSGGRLLRATSPPPPSAIAAAACWESRTMRREGEEEWEEVVAGAEEAVHGAPVPVAEEEEEYRVVFWSPPTGDEVRAAFTSIEELPFAFRVFGDPFRAHSYETEEQSALSTSVHSSSGNSSGSDDWIEPAAYALNSTALLTREHRNVLDAFRLLQKDPNVQKMVMSLSCDRAVWDAVMNNEAVQEFRRSFQDDKEAAGRKGNPGGPAGVLKWILGNTQAKIMEFMNNIMKIVNMLFHSDDDEAKPDLYTDAVKVSFMLSVFIFIVVAIARIK

SEQ ID NO: 124754 - protein, 70 aa, Oryza sativa
  Clone ID: PAT_MRT4530_27462C.1.pep
LGNHELSYKTCTHGLQNLASPHFEIPRLKTVFKSTRKFNEIRLKGSLNIEIYYDKIMIPTQAIKLLSLTN

SEQ ID NO: 124755 - protein, 59 aa, Oryza sativa
  Clone ID: PAT_MRT4530_27463C.1.pep
FFFKKGERVLYNSSFGRTPKVRRHSSKPIGHSGLFLLSSGQHKFQLGAANQTTATPPPG

SEQ ID NO: 124756 - protein, 117 aa, Oryza sativa
  unsure (1)..(117): unsure at all Xaa locations
  Clone ID: PAT_MRT4530_27464C.1.pep
LAKGVADGYFXLVWHRLEEGSETSLAQRGAADGSGGRLGVRGAAGGDGGRLGARGAAGDGGGDLGVRRSYWWLWRGLRRTKAGRRXAPMQGSHMLAELEWWWSIGAPPMDLQVVSSG

SEQ ID NO: 124757 - protein, 218 aa, Oryza sativa
  unsure (1)..(218): unsure at all Xaa locations
  Clone ID: PAT_MRT4530_27465C.1.pep
TGKRERRRTGRGKGERKGGEDDGKRDPNGGERRKNTRKEETKRKGTGGNRGAGRGNEGXRQTGGEAQRRRRARRXVSQGGGMAAAAKRAWQRRRRGGGEAGRRSVGSEAGRKGGSGGEASATAEVHAGDGMRTTTDRDDQLARPDAHRHDALSAVELLAAARLREDSGLPILLDDLRSAAAAVAAALTRARLAVALAAATAPPLCLAAVAPPPCSPCA

SEQ ID NO: 124758 - protein, 126 aa, Oryza sativa
  Clone ID: PAT_MRT4530_27466C.1.pep
MSSMLSAFSQWFVNPRRNPLARLHMQAISSRLRKYGLRYDDLYDPKHDLDIKEALERLPREVVDARHQRLKRAMDLSMKHQYLSENDQAQQTPFRGYLSDMMDLVKKERLEREELGALPLHQRTLP

SEQ ID NO: 124759 - protein, 34 aa, Oryza sativa
  Clone ID: PAT_MRT4530_27467C.1.pep
KGHRQSVVLVYMSYKLFAHWTLEWTCKQQWIKSP

SEQ ID NO: 124760 - protein, 111 aa, Oryza sativa
  Clone ID: PAT_MRT4530_27468C.1.pep
MESLNCYFEGVVEGSNFYTKGTLDDLDGKLGQGFMSADDLEEVDIGLGDRPRSTFIRYWPYQQPPRRCKADIYDAIKAEITRLYDAGFIRPCRYAELVSNIVLVIKKEWQA

SEQ ID NO: 124761 - protein, 37 aa, Oryza sativa
  Clone ID: PAT_MRT4530_27469C.1.pep
SIASSGYHSCAPVRAPSLCSSSLGNKFDPLFICLISH

SEQ ID NO: 124762 - protein, 154 aa, Oryza sativa
  Clone ID: PAT_MRT4530_2746C.1.pep
MSAMAMSSLNPNAAPFIPAAFRRVEDFSPEWWELVKTTAWFRDHWFRQHQMYEDAAAEEDHHRQVFDDDLAALLPDDSLDLLDMVDTDDLFYTPDPPVHHKPTTTPTLDADVLRALSLNSPRLGGAGMVRHAEKAAQFVAAKGGAARHVIHQPR

SEQ ID NO: 124763 - protein, 66 aa, Oryza sativa
  Clone ID: PAT_MRT4530_27470C.1.pep
MQPRVECQVPPERKNKSRSRKGGDALNCIDHSDRLYRPWDFKADADSKPMTTPGLPNFTVNTHVGA

SEQ ID NO: 124764 - protein, 92 aa, Oryza sativa
  unsure (1)..(92): unsure at all Xaa locations
  Clone ID: PAT_MRT4530_27471C.1.pep
FFFFWQNAXFSXWVKHARGTTEGVVVGKMTWPYTALVNHGLLGKQDKFSQDLPNLATVQTQSPGMVSNKLGQAWKLKSKLISHLILVTSGDF

SEQ ID NO: 124765 - protein, 169 aa, Oryza sativa
  Clone ID: PAT_MRT4530_27472C.1.pep
MVTYLNLAPEEEGDGGALPNLNGGEADMEEDGRLAAGQGDNLDQVEWQAHVHALHVFDLNLHPFDLNFEVTEEEEQIHLDGDDALQLELEALENYLQDYGVYADAVNVVFDVEELPNSHEVQHANGNERSQSRDLTNIERRAIYARLLEKSMNGKLEKDTTNTVSMKFN

SEQ ID NO: 124766 - protein, 505 aa, Oryza sativa
  Clone ID: PAT_MRT4530_27473C.1.pep
MVTDLNLPPEEEGDGGALPNLNGGEADMEEDGRLAAGQGDNLDQVEWQAHVHALHVFDLNLHPFDLNFEATEEEEQIHLAYDHQHMEHDLHVNAHVYEEQQQVEDGDDALQLELEALENYLQDYGVYADAVNVVFDVEELPNSHEVQHANGNERSQSRDLKNMESMNEKLEKDTTSIVAREFHVSIRTVQRIWKKAKVCREQGIAVNVDSRKHGSSGRKKVEVDLSLIAAIPLQQKSNIRSLAQALGVPKSTLHRWFKEGLIRRHSNSLKPYLKEANKKERLRWCVSMLDPSTLPNSPKFIEMENIIHIDEKWFNGSKKEKTFYLYPDEEEPYFTVHNKNAIDKVMFLAAVANPRFDDEGNCTFDGKICIWPFVRKEPAQRRSRNRERGTLVTKPIKVDRNTIRSFMISKVLPAIRACWPREDAGKTIWIQQDNARTHLPINDEQFAVAVAQTGLDIRLVNQPPNSPDMNCLDLGFFASLQSLTYNRTSRNMDELIENVHKEYRD

SEQ ID NO: 124767 - protein, 201 aa, Oryza sativa
  Clone ID: PAT_MRT4530_27474C.1.pep
MTDCRKEEGNQGWLLEAPGGHRKDGDAAPCFCDYGPLRWNMEMRLDLLERGLQELSIKYSRAKSRARMQIWWPFEVSNVAGGRIGFQHMEDLILMSSCWYMMKGRAILQAQPLATLACGTHADIGEEHQQSLNEIPAAWFLAGRHLATARPRWPGDLAILEAGQAAESNEAVDQEEEHMLLSRREAPCAEENVYKSPSAEE

SEQ ID NO: 124768 - protein, 326 aa, Oryza sativa
  Clone ID: PAT_MRT4530_27475C.1.pep
MKFKAFFTDDGIALLDKRFLPAMDKVGRLCHVYLTPTHAMLLHNLLGPTGTGPDGGGPQCVAQFAKDLLFREYSVSSRNGNRVAFAVDVALLHRALRSALAVHAQSPAAGDASAAIQVKLVNKLPAGSRSASPFLTFETKGARSAVVQDVPISRPLSRSDVERLQAALDSAQELPQTLVQVPDLPQLQSLVDRLKNVGDLLTVAVTQYGDLHLHVATSLVTVGSEFRKLRILGVRATAPVGDQNLSASTRTNMAIERGEALSVQVNMKHLAKSLQCHLAKPDCTFYGISPGGACLTVIFQYFIPGTRLTDKSISFYCRLPVLDPGS

SEQ ID NO: 124769 - protein, 52 aa, Oryza sativa
  Clone ID: PAT_MRT4530_27476C.1.pep
MTMTYPKRNERKEKKKYKPNTRPDCITGLLLATRASTLPQSSFLLKYKVLDQ

SEQ ID NO: 124770 - protein, 178 aa, Oryza sativa
  unsure (1)..(178): unsure at all Xaa locations
  Clone ID: PAT_MRT4530_27477C.1.pep
MASAPMISAWRRWQWHCLRRSARALLSSSQGCCTARSTTQAWVMAPSLRACLVQLQLLYITPGVESGVEVDLAEKFRLPLLPRGGFDFWRGATMAIIGVTTMDFXSLGIGDKIGNNGPLNTRIQXFQQLMPSICVSSCKSYLSKSSFVLSDFDGNDYTTQFFDGYKPKQAAAQSPTIT

SEQ ID NO: 124771 - protein, 230 aa, Oryza sativa
  Clone ID: PAT_MRT4530_27478C.1.pep
GKACEPSSPSPPDSTTVTRTKFFSTAGWRDRSRVEIEPAPMAQPRYLPHIFSNEAENYIATTAVDSVFLVEVDIRHFHVPDDQPRYKQMCKNMYASISNRVLPKTPPENETGGPSKASKTNQSDGPSASRGKGKKKGPSTTTSKEMESSTSELAPETEPKQKPQPEPKQGLTTNITQGTRQRQATGFVIARRANIIKILTCAHIIEDVYTKDKHEVTLQELNAAFTFDVQ

SEQ ID NO: 124772 - protein, 30 aa, Oryza sativa
  Clone ID: PAT_MRT4530_27479C.1.pep
LMMTYRLLTPDSCRDTKYGKSSFQHYTDLL

SEQ ID NO: 124773 - protein, 122 aa, Oryza sativa
  Clone ID: PAT_MRT4530_2747C.1.pep
MLVPLIERWIHGAGGSSLALPWPRSPVSSGRQASSTKATSKTAASSSTRLLPPLCCYPSRSQLAMEQLHDHIEQIIPHDHNHKSQTGRSSQRMAPMTAAGIPTHRSFAATPNAEALGSLQGA

SEQ ID NO: 124774 - protein, 163 aa, Oryza sativa
  Clone ID: PAT_MRT4530_27480C.1.pep
MFVPHPPHPCRRLHATSPPPPAQGVGLPRQGGWNRKGGRIWRGAPDPASCHRHTIGAGSGAEGARPASSPRRRHLVHPAADVVTFDAGGQAVALFAQRPTLSQELAGVVGSDLAALGRMPCWRRPCGGRAVFGGLLGWRRGGGGRGAGVVAHRWRLPAVSPLP

SEQ ID NO: 124775 - protein, 106 aa, Oryza sativa
  Clone ID: PAT_MRT4530_27481C.1.pep
FFFFFFFFFGFFFFFFCVSPLFFFFFPTTGNKSRELKMAPVWRLPMNFPIAHGGGTILPNGKGPSLKSRGGLSVKKGPPFSKEGGGGCHSKGGGGKTLFVPLPSKG

SEQ ID NO: 124776 - protein, 328 aa, Oryza sativa
  Clone ID: PAT_MRT4530_27482C.1.pep
MGRGGDVDGAAGALRRFVREAGGCAVVDGGLATELEAHGADLHDELWSASCLVSAPHLIRKVHLDYLDAGANIITSASYQATIQGFQARGLSRERSEALLRRSVHIAQEARAIFAEGWSKGPYANHRSSPRRPVLVAASIGSYGAYLADGSEYTGDYGISVTKETLKSFHRRRLQVLADAGPDLIAFETIPNKLEAQASGDPITECAAVADACARVGAVGVNCTAPRLVHGLILSIRKVTSKPVVVYPNSGETYVAETKEWVESEGGASETDFVSCVGKWRQAGAALVGGCCRTSPATVRAISWALRESDDAVGGDGDRDDFPAVAVL

SEQ ID NO: 124777 - protein, 378 aa, Oryza sativa
  Clone ID: PAT_MRT4530_27483C.1.pep
MQKVLMKDVFCMEGGQGESSYIKNSQVQSRNLQMMLPTLKEILDKVQLPRRPGKHLLTAADLGCSCGHNTLIVADAIVEHMTRKLRSCIFDDQDDGDAADPEFCFYFSDLPSNDFNTLFHLLPQHATAAAGDGSERRYFAAAVPGSFHDRLFPKRSINVFTSTFSLHWLSQVPEGVADKRSAAYNKDKVFVHGASQATGAAYRRQFQSDMARFLRCRATELKAGGVMFLVCLGRPSLHACPTNQGRVQLLYGAMFEESWGDLVEEGTIGRETMGSFNVPVYAATLEEFGEAVGADGLFEINRLELVITSPLAVDDPIRDRRAVANYVRSLLGPLVDAHVGRAVADEIFVRMQRRAEARAEELVDEMRFPHIVCSLSLA

SEQ ID NO: 124778 - protein, 1001 aa, Oryza sativa
  Clone ID: PAT_MRT4530_27484C.1.pep
MGLTCDTQTAKLAIILLAFILLCHGIGNVDCRGNRADQLSLLDFKKGITNDPYGALATWNTSTHFCRWQGVKCTSTGPWRVMALNLSSQSLTGQIRSSLGNLSFLNILDLGDNNLLGSLPRLGNLKQLQALYLYKNNLTGIIPDELTNCSSLTYIDLSGNALTGALPPNLGSLSNLAYLYLSANKLTGTIPQALGNITTLVEIYLDTNRFEGGIPDKLWQLPNLTILALGQNMLSGDIPFNFSSLSLQLLSLEYNMFGKVLPQNISDMVPNLQILRLDYNMFQGQIPSSLGNALQLTEISMANNYFTGQIPSSFGKLSKLSYISLENNSLEASDGQGWEFLHALRNCSNLELLSLAQNQLQGEIPNSIGDLPLKLQQLVLSENKLSGEVPASIGNLQGLFRLSLDLNNLTGKIDEWVPKLTKLQKLLLHRNNFSGSIPSSIAELPRLSTLSLAYNAFDGPIPSSLGNLSGLQKLYLSHNNLEGVIPPELSYLKQLINLSLSENKLTGEIPGTLSQCKDLANIQMGNNFLTGNIPVTFGDLKSLGVLNLSHNSLSGTIPTTLNDLPVMSKLDLSYNRLQGKIPMTGIFANPTVVSVQGNIGLCGGVMDLRMPPCQVVSQRRKTQYYLIRVLIPIFGFMSLILVVYFLLLEKMKPREKYISSQSFGENFLKVSYNDLAQATRNFSEANLIGKGSYGTVYRGKLKECKLEVAVKVFDLEMRGAERSFISECEALRSIQHRNLLPIITACSTVDSTGNVFKALVYEYMPNGNLDTWIHDKEGGKAPGRLGLRQTISICVNIADALDYLHHECGRTTIHCDLKPSNILLADDMNALLGDFGIARFYIDSWSTSTGSNSTVGVKGTIGYIPPEYAGGGHPSTSGDVYSFGIVILELITGKRPTDPMFKDGLDIISFVESNFPHQIFQVIDARLAEKSMDSNQTNMTLENAVHQCLISLLQLALSCTRKLPSDRMNMKQIANKMHSIKTTYVGLEAKKYGPACNEQDA

SEQ ID NO: 124779 - protein, 111 aa, Oryza sativa
  Clone ID: PAT_MRT4530_27485C.1.pep
ITVLSLHTYVEYAGGGHPSTSGDVYSFGIVILELITGKRPTDPMFKDGLDIISFVESNFPHQIFQVIDARLAEKSMDSNQTNMTLENAVHQCLISLLQLALSCTRKLPSDR

SEQ ID NO: 124780 - protein, 111 aa, Oryza sativa
  unsure (1)..(111): unsure at all Xaa locations
  Clone ID: PAT_MRT4530_27486C.1.pep
VLESPWMDARVTENRTIXISCDRSDWALVAGQTGVLYAVRPAQPAAAYPMFKLKGSGGIYFKGLSLGLPGFGGLTGPTGGQNDGNRTYTGGNRAVKPLGAMLTTSQSGGIP

SEQ ID NO: 124781 - protein, 54 aa, Oryza sativa
  Clone ID: PAT_MRT4530_27487C.1.pep
SPQDSAHGEMYGPREPMSYAFFLMGGVTASSFCFTLSWLIKAPFSSLGFPRSHR

SEQ ID NO: 124782 - protein, 38 aa, Oryza sativa
  Clone ID: PAT_MRT4530_27488C.1.pep
EYLFFLDDSIKILYTGKYITLVFFCGPTKNTSVIYLPV

SEQ ID NO: 124783 - protein, 201 aa, Oryza sativa
  Clone ID: PAT_MRT4530_27489C.1.pep
IQFNWRARVNICIGVAKGLAFLHDGVRPHIVHRDIKASNILLDKDLTPKISDFGLAKLLPSDASHVSTRVAGTLGYLAPEYAIRGQVTRKSDVYSFGVLLVEIVSGRCNTDTKLPYEDQILLEKTWKCYDQGCLEKAIDSSMVDDVDVDEACRFLKVGLLCTQDISKRRPTMSMVISMLTGEMEVDKEKITKPDVIRGFQG

SEQ ID NO: 124784 - protein, 757 aa, Oryza sativa
  Clone ID: PAT_MRT4530_2748C.1.pep
MAMARRSASRLLSSFRPFSLLLQPLDDAPSLSAAAAAASARRGMFSASALRARDEKEVARWRESMDRMRNIGISAHIDSGKTTLTERVLYYTGRIHEIHEVRGRDGVGAKMDSMDLEREKGITIQSAATYCTWNGYQVNIIDTPGHVDFTIEVERALRVLDGAILLLCSVGGVPSQSITVDRQMRRYEIPRVAFFNKLGRMGADPWKVLNQARSKLRHHNAAVQVPIGLEEEFEGLVDLVELKAYKFEGGSGQNVVRICVPSNMQDLVMEKRRELIEVVSEVDDQLAEAFLNDEPIQANQLKAAIRRATVARKFIPVYMGSAFKNKGVQPLLDGVLDYLPCPMEVETYALDQNKSEEKVLLAGTPAEPLVALAFKLEEGRFGQLTYLRIYDGVIRKGDFIYNVNTGKKIKVPRLVRMHSNEMEDIQEAHAGQIVAVFGVDCASGDTFTDGSVKYTMTSMNVPEPVMSLAVSPISKDSGGQFSKALNRFQKEDPTFRVGLDPESGETIISGMGELHLDIYVERIRREYKVDAKVGKPRVNFRETITQRAEFDYLHKKQSGGQGQYGRVCGYIEPLPSESDGKFEFDNMIIGQAIPSNFIPAIEKGFKEACNSGSLIGHPVENIRIVLTDGASHAVDSSELAFKLASIYAFRQCYAAARPVILEPVMKVELKVPTEFQGTVTGDMNKRKGIIVGNDQEGDDTVVVCHVPLNNMFGYSTALRSMTQGKGEFSMEYLEHNTVSQDVQMQLVNTYKASRGTE

SEQ ID NO: 124785 - protein, 451 aa, Oryza sativa
  Clone ID: PAT_MRT4530_27490C.1.pep
MGAWGMGYNPLFCITMKANDVPPVPEDTLLLLIDPVWVGNGHDVDAYTKMTRKRSRTGQQQSDPYNEVFSGAENITRYSYKELAKATLNFDQSNKIGEGGFGPVYKGTLKDGTDVAVKLLSLQSRQGVKEFLNELMAISDISHENLVKLHGCCVEGRHRILVYNYLENNSLAHTLLGSRQSNIQFNWRARVNICIGVAKGLAFLHDGVRPHIVHRDIKASNILLDKDLTPKISDFGLAKLLPSDASHVSTRVAGTLGYLAPEYAIRGQVTRKSDVYSFGVLLVEIVSGRCNTDTKLPYEDQILLEKYHKCHDSHVLFRDKSCYNFGFCHPTTWKCYDQGCLEKAIDSSMVDDVDVDEACRFLKVGLLCTQDISKRRPTMSMVISMLTGEMEVDKEKISKPDVIRDFRDLKLRSKATSSSSLLTSIMARSTPSSSQETTRTSITVTAISDRD

SEQ ID NO: 124786 - protein, 205 aa, Oryza sativa
  Clone ID: PAT_MRT4530_27491C.1.pep
MAEALVCLQAVQLASELGVSKLLIMTSFFQKENGITLKSQNPTKAEQLGMEQASESCLPPLPISLEPKTSTASKATEPYIQNSIPSVGCTICKSNLKITKATACLSIQELRSLVSWFHWLWHRNPIGPKLPSAPKFPSTSRPQRGGRSAYVKNRNKMQEQHSRCFIQGTEAAEVTPLMEPYMLLLSANAESGNMTRVNNLAVWQF

SEQ ID NO: 124787 - protein, 217 aa, Oryza sativa
  Clone ID: PAT_MRT4530_27492C.1.pep
MGSLMAGWNSPVLGDEKKVRLMRNRSLTREEVDAFWRRQQRKQPPSSSTSSEPNATTSPLASPRAAANVVSPLASPRAAGDISPLAASPGRAQQEMSSSRCTLALRRLERMNSMPSPLARTVMTRADDHPYQSYSHSEPPSPAAPHAGDHRHQRSSFAADHDDDDDDVASTSSECWWTRSSWAFLNETPSPEQQMFGKSQTYACVQFHVSRVVTGNA

SEQ ID NO: 124788 - protein, 77 aa, Oryza sativa
  unsure (1)..(77): unsure at all Xaa locations
  Clone ID: PAT_MRT4530_27493C.1.pep
YKRGGENSHKDDEETQEMWQKKREHQEKXEETRDQPGSSWRDPMTTGNKARKGETKPPKLKTREPNKTYTQRAMKPA

SEQ ID NO: 124789 - protein, 286 aa, Oryza sativa
  Clone ID: PAT_MRT4530_27494C.1.pep
MSKRLAAALLVLCACATRARGADDYTAFVYAGCSQARYDAGTQYAADVDTALSALTNSAGYTAYANYTSPSAASGTGLVGVYQCRSDLPAAICGGCVRSAATKLASLCNSAAGAGVQLRACFVRYGNDSFLGRQDTTVLFKKCGGEGGSDTGVVAMRDAALGALVAAAAPAGDGSYRAGAAGYVQAMSQCVGDLGAKACTDCVSAASSQLKAGCGYASAGEVYLGKCYARFWSNAGTGDNNGGGISGGGGGIGGGGNGISGGGGAVGGGNGYAYGFVPHTYSDHVT

SEQ ID NO: 124790 - protein, 81 aa, Oryza sativa
  Clone ID: PAT_MRT4530_27495C.1.pep
YCSSPAAVTRITKLFCFRTKPAATILIPKPCCKDCITHAVLQQKGYRSSPSQDTFNAKMYPEPKATNLDMTTESVYGRKRS

SEQ ID NO: 124791 - protein, 72 aa, Oryza sativa
  Clone ID: PAT_MRT4530_27496C.1.pep
SGKISGGGGRRRGRGSEGSDKARLYSRDPARAAKYNCNFDLYQSPAANWRDMLYLRMAPDPPPAGDLPEYCR

SEQ ID NO: 124792 - protein, 169 aa, Oryza sativa
  unsure (1)..(169): unsure at all Xaa locations
  Clone ID: PAT_MRT4530_27497C.1.pep
IPTPCGDACKPSLSLAWTSRPFCSPTLALPAAFYSPGLARPLHSLRLDVEPEGAADGRALGGVDATKKAAAGLKGTAQREGVGNLTXEDQRTTTENVRVTGLTTGLHGCHQHQYGDTTRGCIXTGPQSNPCNXTHCAPVDESRHAGELVNIVINAQSVAEGTHCVKRIL

SEQ ID NO: 124793 - protein, 358 aa, Oryza sativa
  Clone ID: PAT_MRT4530_27498C.1.pep
MGMPLLLLLLILVAAGPQAGRAAKPIPNLQLMTKEGGSSRIIQDDIIKAINKHPNAGWTAARNPYFANYTTAQFKHILGVKPTPHSVLNDVPVKTYPRSLMLPKEFDARSAWSQCNTIGTILDQGHCGSCWAFGAVECLQDRFCIHFNMNISLSVNDLVACCGFMCGDGCDGGYPIMAWRYFVRNGVVTDECDPYFDQVGCKHPGCEPAYPTPVCEKKCKVQNQVWLEKKHFSVNAYRVNSDPHDIMAEVYQNGPVEVAFTVYEDFAHYKSGVYKHITGGMMGGHAVKLIGWGTTDAGEDYWLLANQWNRGWGDDGYFKIIRGTNECGIEEDVVAGMPSTKNMVRNYDSAFGVGTAIV

SEQ ID NO: 124794 - protein, 1487 aa, Oryza sativa
  Clone ID: PAT_MRT4530_27499C.1.pep
MDDAAERRRRQQQQQQPGAAHPARRKVVEEPFDPSPPPAAAVAPPSSRLVGAIVEKGFSSGAAAAAPSSAPSPTVLPFPVARHRSHGPHWKPAARDAAMAEGEGEEEEGMDVDETDYQPVAAAAGPVKRKEKKGMDFSRWREFVADDAPPKRRQAKPLQPKKQTAQKIDTGVVAATTGGTAQEKRSGGIGMQLEVGNGKEELGGAALMSDVAPRKPMKQVDARDDVRNVELRGEGMESDNGEPSLTAEINAENMARLAGMSAGEIAEAQAEILNRMDPAFVEMLKRRGKEKSGSRKDGGKGKGGGISGPGKISKAMPGEWLSAGEHSGHTWKAWSERVERIRSCRFTLEGDILGFQSCQEQQHVFWYPLHVNLAFPLTGKKAHVETVGERDFLRTEGDPAAVGYTINEAVALSRSMVPGQRVLALQLLALILNRALQNLHKTDLIDNFKESNDDDKFNDWQAVWAYAIGPEPELVLSLRMSLDDNHDSVVLTCAKVINAMLSYEMNEMYFDVLEKVVDQGKDICTAPVFRSKPDQNGGFLEGGFWKYNTKPSNILPHYGENDEEEGDEKHTIQDDVVVSGQDVAAGLVRMGILPRICFLLEMDPHPILEDNLVSILLGLARHSPQSADAILNCPRLVQSVVKLLVKQGSMEIHSSQIKGVNLLKVLSKYNRQTCFNFVNTGVFHQAMWHCPSMFQKLSESNVVAEFSSIATESYLVLGALAQRLPLLHSVEQLSKQDMGLSGIQVETWSWSHAVPMVDLALSWLCLNDIPYVCLLISGQSKNILEGSYFALVISSVLGMLDSILERISPDSTHDGKSYCLPWIPDFVPKIGLGVITNGFFNFLDDNAVELEQHTSFHGSSLVQGLFHLRSQGNVDTSLCSISCFQRLLQLSCSIDRVIQNATTNCTEHLKESKTGIAGRILEQGICNFWRNNLLDMLTSLLPMISSQWSILQNIEMFGRGGPAPGVGFGWGAYGGGFWSLNFLLAQLDSHFVLELMKILSTGPEGLVTVNKSVNPIVQEGNNVTDSVAITSERISSVLSVSLMAGPGQISTLEKAFDILFHPSVLKFLKSSVLDSHMKLAKAFEWDITEDEYLHFSSVLNSHFRSRWLVIKKKHSDEFTRNNNGTNVPKIPETLETIQEETELAEAVNPPCSVLAVEWAHQRLPLPVHWILSAVCCIDDPKANLSTSYAVDVSKAGLFFLLGLEAISAAPCLHAPLVWKMHALSASIRSSMDLLLEDRSRDIFHALQELYGLHLDRLCQKYDSAHSVKKEGSASVDEEKVTRTEVLRFQEKIHANYTTFVESLIEQFAAVSYGDALFGRQVAIYLHRSVEPTIRLAAWNALSNAYVLELLPPLDKCVGDVQGYLEPLEDDEGILESYAKSWTSGALDKAFQRDAMSFTVARHHLSGFVFQCSGSGKVRNKLVKSLIRCYGQKRHHEDMLKGFVLQGIAQDSQRNDEVSRRFEIMKDACEMNSSLLAEVRRLKTSIDR

SEQ ID NO: 124795 - protein, 275 aa, Oryza sativa
  Clone ID: PAT_MRT4530_2749C.1.pep
MTNLFPDTPATISFHPAHRPGHKLKLVRTGGQKFKCDGCMEHGDGPRYRCERETCNFDLHTCCALAPATREHRLFPGCTFVLLPEPPPPTAAGERRICDACGEGVHARGLVYHCSGRGDGGLGLDLHPTCASLPARFAVGGGRVFELRKEASRRCAECGEMRCGGGRRFWFYRSYSYADGDGEALYLHVACLKRMQTQYGAAADVRSVQVMSSPVMEGVLRSLPPARRRATAAGGGGGLDRFLTIVAGVIRAIIGVIFGDPTFLIELAVGAILNS

SEQ ID NO: 124796 - protein, 99 aa, Oryza sativa
  Clone ID: PAT_MRT4530_274C.1.pep
MVIIAITISAATYTYSPKPDFPISVTHCPPSPSVLALRSVCPERGLERQKDGPNRERSIPGYCVQIANLGSPGGGARRSSSAAAVCGAGAWPVDGREGW

SEQ ID NO: 124797 - protein, 124 aa, Oryza sativa
  Clone ID: PAT_MRT4530_27500C.1.pep
MASGAYGSREGLTARPAASSSSSEISLQIDPITADLDDHIVGLRGQVRKLRGVAQEIQTEAKYQNDFISQLQMTLTKAQAGVKNNMRRINKKIIQNGSNHLFHVILFALVCFFLVYLVSKFSRR

SEQ ID NO: 124798 - protein, 71 aa, Oryza sativa
  Clone ID: PAT_MRT4530_27501C.1.pep
MMKRFVLPLMMAVLMLLVVSGSARPLGGDKWVGAATSGDHPLIQFLKQLYLQQLPSRPSCTSNDPNIPPPP

SEQ ID NO: 124799 - protein, 103 aa, Oryza sativa
  Clone ID: PAT_MRT4530_27502C.1.pep
AVDWPRWRLGGAAQRRQQRQPRLRAAATLARNVKAVALVRRSCSAAEAAANLVGSSRRRAASMEASSTMTGDRCSPPTVSTGIPSDATTLLANPCRPTPPKPP

SEQ ID NO: 124800 - protein, 119 aa, Oryza sativa
  unsure (1)..(119): unsure at all Xaa locations
  Clone ID: PAT_MRT4530_27503C.1.pep
SGGTILGRAGFSTLRRSSACGGHSDGRRWQILGRRARXGTTTAGGGDPPPSPQRRGGRGGSAASGSAAPRRFGAIDDGGRQGRXSGDGVRWGXASGGGLGFGXFRFFFVCRIYFHMRPV

SEQ ID NO: 124801 - protein, 79 aa, Oryza sativa
  Clone ID: PAT_MRT4530_27504C.1.pep
QLYLIANVIIHAYACENDWLMVTLNFFDKCLEVRADLNQLTQKTKGRSVYPTALYIDIWSYLIDRGLSTNPRIVMGAAI

SEQ ID NO: 124802 - protein, 81 aa, Oryza sativa
  Clone ID: PAT_MRT4530_27505C.1.pep
NSREFAFLTNQEMHLQKLPNFNRKIGSYSESPDKEKPRMECRSIILGSKSERLRKDVSTKFRHSGTDQHPSREREKSDAHS

SEQ ID NO: 124803 - protein, 115 aa, Oryza sativa
  unsure (1)..(115): unsure at all Xaa locations
  Clone ID: PAT_MRT4530_27506C.1.pep
MGATSKTMHPQPTMTWPDVSKGWGGADMRAPLDRGTRERERGRLACGTHRAAAHGGRRSNRRAGPTGQRHKGGGKRRAAGRSGLGLQAGRRYGXGRRRQAASDGGGRPGRRRFRL

SEQ ID NO: 124804 - protein, 80 aa, Oryza sativa
  Clone ID: PAT_MRT4530_27507C.1.pep
GDGPGRKRVRAEGARAPVPLPSTSPRRRAALRREQPRGALPARGGGGTSSSGTSGPRDQSHEPRTGLRTANHDVYQIVRI

SEQ ID NO: 124805 - protein, 44 aa, Oryza sativa
  Clone ID: PAT_MRT4530_27508C.1.pep
MCYHCQASSHPTKQLRLHLLENEESWTLAASKNGTQEAKASPNS

SEQ ID NO: 124806 - protein, 270 aa, Oryza sativa
  Clone ID: PAT_MRT4530_27509C.1.pep
MGRGRIEIKRIENTTSRQVTFCKRRNGLLKKAYELSVLCDAEVALIVFSSRGRLYEYSNNNNVKATIDRYKKAHACGSTSGAPLIEVNAQQYYQQESAKLRHQIQMLQNTNKHLVGDNVSNLSLKELKQLESRLEKGISKIRARKNELLASEINYMAKREIELQNDNMDLRTKIAEEEQQLQQVTVARSAAMELQAAAAAQQQQQNPFAVAAAQLDMKCFFPLNLFEAAAQVQAVAAQRQQIIPTELNLGYHHHLAIPGATAADAPPPHF

SEQ ID NO: 124807 - protein, 770 aa, Oryza sativa
  Clone ID: PAT_MRT4530_2750C.1.pep
MAMARRSASRLLSSFRPFSLLLQPLDDAPSLSAAAAAASARRGMSSASALRARDEKEVARWRESMDRMRNIGISAHIDSGKTTLTERVLYYTGRIHEIHEVRGRDGVGAKMDSMDLEREKGITIQSAATYCTWNGYQVNIIDTPGHVDFTIEVERALRVLDGAILVLCSVGGVQSQSITVDRQMRRYEIPRVAFINKLDRMGADPWKVLNQIVSGAETPDTQLMARSKLRHHNAAVQVPIGLEEEFEGLVDLVELKAYKFEGGSGQNVVASDVPSNMQDLVMEKRRELIEVVSEVDDQLAEAFLNDEPIQANQLKAAIRRATVARKFIPVYMGSAFKNKGVQPLLDGVLDYLPCPMEVESYALDQNKSEEKVLLAGTPAEPLVALAFKLEEGRFGQLTYLRIYDGVIRKGDFIYNVNTGKKIKVPRLVRMHSNEMEDIQEAHAGQIVAVFGVDCASGDTFTDGSVKYTMTSMNVPEPVMSLAVSPISKDSGGQFSKALNRFQKEDPTFRVGLDPESGETIISGMGELHLDIYVERIRREYKVDAKVGKPRVNFRETITQRAEFDYLHKKQSGGQGQYGRVCGYIEPLPSESDGKFEFDNMIIGQAIPSNFIPAIEKGFKEACNSGSLIGHPVENIRIVLTDGASHAVDSSELAFKLASIYAFRQCYAAARPVILEPVMKVELKVPTEFQGTVTGDMNKRKGIIVGNDQEGDDTVVVCHVPLNNMFGYSTALRSMTQGKGEFSMEYLEHNTVSQDVQMQLVNTYKASRGTE

SEQ ID NO: 124808 - protein, 285 aa, Oryza sativa
  Clone ID: PAT_MRT4530_27510C.1.pep
MGRGRIEIKRIENTTSRQVTFCKRRNGLLKKAYELSVLCDAEVALIVFSSRGRLYEYSNNNNYLKKDYSVLIFLVLCVKATIDRYKKAHACGSTSGAPLIEVNAQQYYQQESAKLRHQIQMLQNTNKHLVGDNVSNLSLKELKQLESRLEKGISKIRARKNELLASEINYMAKREIELQNDNMDLRTKIAEEEQQLQQVTVARSAAMELQAAAAAQQQQQNPFAVAAAQLDMKCFFPLNLFEAAAQVQAVAAQRQQIIPTELNLGYHHHLAIPGAAAADAPPPHF

SEQ ID NO: 124809 - protein, 79 aa, Oryza sativa
  Clone ID: PAT_MRT4530_27511C.1.pep
MEAAPCGRVVPSPLLPFLLPALETEAAPRGRVVPSPLLPFLLPALETEATPRRRVVDGRTRDVRLQVTLRFVMWIGMLL

SEQ ID NO: 124810 - protein, 111 aa, Oryza sativa
  Clone ID: PAT_MRT4530_27512C.1.pep
MAPALVRRTVEEAPVHHAMSHGGGNGDLFCKYEETTGKKKGRTVNGMWSEERWKWEFRRQLSVEDQIDQTDLEGSIVQDFKYHTQVLAQDNELCRRAIKQKTSTIDSKARS

SEQ ID NO: 124811 - protein, 129 aa, Oryza sativa
  unsure (1)..(129): unsure at all Xaa locations
  Clone ID: PAT_MRT4530_27513C.1.pep
SWAGPTPLGEREKKPKKGPQNRLKKFKRPGWFWKTLKKILIFPPKKITRAXISKKKKPILGPPQKGFLGGFLKKGXEVGGTIPKKLVVKRPILFFFGKKKTIVFTLLMEKKAPNVRGKQAGKNLGFVKK

SEQ ID NO: 124812 - protein, 93 aa, Oryza sativa
  Clone ID: PAT_MRT4530_27514C.1.pep
RYPPCRSTSPFCPPPSPQSPPRTSFRDKPFQLEQRRSRRTPPRRLCGCGRAASPPLSRAPSPCRYPPPPPPPRRPSCAGAGSPWLYVRELPSC

SEQ ID NO: 124813 - protein, 67 aa, Oryza sativa
  Clone ID: PAT_MRT4530_27515C.1.pep
MAGGARWRRRPGSVEGGAGRWRRRLGRSAPGGRRHARWGSATWAWRGRTTAAAAGSVATVAGLARED

SEQ ID NO: 124814 - protein, 73 aa, Oryza sativa
  Clone ID: PAT_MRT4530_27516C.1.pep
GVSPAFRSFLLALGAYPGADDVVGMLGGKDAILAGKDGCARRSTKRPFCGCGRLKVQTLYLRGRLGIQRLGEL

SEQ ID NO: 124815 - protein, 132 aa, Oryza sativa
  Clone ID: PAT_MRT4530_27517C.1.pep
FVFFFFLFFFFFFFFFFFFFFFFWGKRKNYQNPAPKETGPTGGNTQGGGPQNKRKGKSGAYYRPKKPLTLQGRDPPPFIIPRFGHKTLRGSWKPALGPNGDKNPKRGGGNLQGFWGWEDPLRGEAQPRGELP

SEQ ID NO: 124816 - protein, 70 aa, Oryza sativa
  Clone ID: PAT_MRT4530_27518C.1.pep
LAAAVAGFQHNAHGNGHPHMSNNRSKLTDFLRSRPPEFSQTVEPVEADDWPEPTNIAWDEFATAFRVAHV

SEQ ID NO: 124817 - protein, 150 aa, Oryza sativa
  unsure (1)..(150): unsure at all Xaa locations
  Clone ID: PAT_MRT4530_27519C.1.pep
DTLMLXAVRRIGIXPVVLVPLHDRANADIIVLGDRPWLLQXARHSLAYSSISFLPASHVTPVSSTDCPSGXLFVSENCLHLVEMVHXKRLNAQKFSIGGTPRKVLYHSXSRTLLVLRXGLTSVSXSSDIVQIDPSNGALLSRFKCEPGEX

SEQ ID NO: 124818 - protein, 57 aa, Oryza sativa
  Clone ID: PAT_MRT4530_2751C.1.pep
HGDAATGVPHWTIELIPPRAGTYKSGGPVHVPTLTFVLMRLIDGGWMVFYLRVSARV

SEQ ID NO: 124819 - protein, 152 aa, Oryza sativa
  Clone ID: PAT_MRT4530_27520C.1.pep
GGAQWPKANLLFYKKKNGLKLAPANTKGAVKKKGETNRFNTKGVGATPKGKIKPQTHGGQNGDKKKGSRVTNPSKKIQHFRGGENPARKQEEAIPWEGGGGGATRGKKGFWRPKLDEEKKHVFGLGTNSPPIKKPPESFGEGHKEESWGGGG

SEQ ID NO: 124820 - protein, 70 aa, Oryza sativa
  Clone ID: PAT_MRT4530_27521C.1.pep
SCPSPPRRSPFRPSRPLPPLSSRRFPLIFIRPPLPFLSTSTSLSPPSFAAAAAAAVSSDHTGERNREIEP

SEQ ID NO: 124821 - protein, 45 aa, Oryza sativa
  Clone ID: PAT_MRT4530_27522C.1.pep
SPGRPKQLPRSLTTRLNHQLMKIMWSTSQFHMQRRTISDTPERRR

SEQ ID NO: 124822 - protein, 678 aa, Oryza sativa
  Clone ID: PAT_MRT4530_27523C.1.pep
KIHTPQNRPVRSSKRRRRTPADASAATRDDPSPWESLHEDLLELIAWRVLAGDGDLLDYVRFRAVCPHWRSSTSCPRGRGIVDRRFHPRRWMLLPEGHGLYPGHGKLRGFVRFFNLSTGAFVRVHLPLFRDHCVLDSVDGILLLQRDHDTAIRLLHPFSCDILDLLPLETILRYVSHKLVDHKCNYLRRIGDASINVIAIQVVSLLMWSAAMVNESFATSGEQQWRASSWYFNQIFSPLAFQGKLYMVRHELTYGEPEILQLDPPELEGMEPWLPPPTLIAKCPANTVNTSDSRFYHLVECDSEVLVIALSAGIHRKISVYRLADFMLGRRTLRVTCIGGNALFIGQRNLCVSSKAFPTVVGDTIVFHHYQQECLRQNAIPDRNAPGSSSSSISRVKSSPAAMASSLPAMASSPRAPAEGCAVAAGAVDGGGHGLRRRAAWWRLARSTAAAAGSGVGRRGGGWHGRRRRPWAPAEGGAVATGAVDGGWLRGGNEEAAMARSCATGSRAPAGSTRRRRSPSATTSAAQAQVGMAGEGSAPIAVGKAASARRWRWPWPPASSSRAGWRKKKSQGHFRPGWHFGEDTLVEDGIPAKPVFIMVVPTQPYPFTFFCSESDLVIQIISKEKKEKRPVGIFEAYAEARKNGKDGEDYCTDRVKGKLEAYFGVVKEKHGASPDLMK

SEQ ID NO: 124823 - protein, 97 aa, Oryza sativa
  Clone ID: PAT_MRT4530_27524C.1.pep
MALKSSSADGKTRSSVQIFIVFSLCCFFYILGAWQRSGFGKGDSIALEMTNSGADCNIVPSLNFETHHAGESSLGGASEAAKVKAFEPCDGRYTDYT

SEQ ID NO: 124824 - protein, 47 aa, Oryza sativa
  unsure (1)..(47): unsure at all Xaa locations
  Clone ID: PAT_MRT4530_27525C.1.pep
FFFFFFFFFFFEIEWXFKPLNXSEFYMMQMKKKNXWNXXXLSXQPXX

SEQ ID NO: 124825 - protein, 76 aa, Oryza sativa
  unsure (1)..(76): unsure at all Xaa locations
  Clone ID: PAT_MRT4530_27526C.1.pep
IRHEKISTTPRRYLLLPSSTPWKSRXAFLRASRDDDXXLXXLQXRRGRRLKLLFSPLIXVXXLGCSLASAXRYSSV

SEQ ID NO: 124826 - protein, 171 aa, Oryza sativa
  unsure (1)..(171): unsure at all Xaa locations
  Clone ID: PAT_MRT4530_27527C.1.pep
MIYSKVHFDLMEYIQYFYMRAXDLLAKEITGRCDPYVLAIRXTTPHFEKSTNPKWNDVFAFSKEQIQFSYVEAIFNDKDFAKDVFTGRVVLNLNEVAKRVAYHSPLVPRWCHLDGDENGETKRRLMLVFXVGTQDNFPEALQSNEXAEIVPRDGQASMGPKVYQTPKLWYI

SEQ ID NO: 124827 - protein, 173 aa, Oryza sativa
  Clone ID: PAT_MRT4530_27528C.1.pep
ARGGPNGTKFAASINNNSFVRPRVALLEAHYQRRYAGVLMANFPTAPPHPFNYTGTPPNNTFVTHGTRVVPLAFNTSVELVLQGTSIQGAESHPLHMHGFNFFVVGQGFGNYDPVNDPANYNLVDPVERNTVSVPTGGWVAVRFLADNPGVWLMHCHFDVHLSWGLSMAWLVN

SEQ ID NO: 124828 - protein, 146 aa, Oryza sativa
  unsure (1)..(146): unsure at all Xaa locations
  Clone ID: PAT_MRT4530_27529C.1.pep
MASNMVEISWLLVKGNSELAATTTLACHHHEQVDYTGWQLCQAGMGYTTYTLSRWRTFENRQRVAPGTLDXHVRRGWCTXVIGIHRSWCTFYVLKHMLMIMYRXERGPXVGNAMSYVLQGCRTWYINRRGASLWGFWNADILNGVC

SEQ ID NO: 124829 - protein, 54 aa, Oryza sativa
  Clone ID: PAT_MRT4530_2752C.1.pep
MQRLSSPLPVSLSRAPAHRRGDLRNFFAASSKAPDTHRSYKWPQNDVSPRFFKD

SEQ ID NO: 124830 - protein, 94 aa, Oryza sativa
  Clone ID: PAT_MRT4530_27530C.1.pep
MPFGGSAREGHAVTLLQHHLIHGVGLAAAGKLVSSFSAAAAAPGAGGLWEPRSVLDHRHIPSPNPPTSALTLSVPLADLAALARPNPKNLSLFP

SEQ ID NO: 124831 - protein, 127 aa, Oryza sativa
  Clone ID: PAT_MRT4530_27532C.1.pep
MRRPPPTPDPHTSGQGKATVAGSGQGLAAVTPHCLPRAHAGCCRRIQPPPPLAVTPLPEFVAVTIVITRCRRDRPPPLLPSPPCSSRLGLASPEPAAPAPGCSRLPPLLPERVTAPVCRSEDERRLE

SEQ ID NO: 124832 - protein, 637 aa, Oryza sativa
  Clone ID: PAT_MRT4530_27533C.1.pep
MAAAADGLPPGVRFDPADDELVSRYLLRRLRKQPIPLHGVIHEADPLGAPPWMLLADHGRGGDEAFFFAEARAKNVKGKRQKRTVEGGGFWQGQRVCVDGERLSVPGGDGGGEVGGGLEIEWRKYMLSFFAEGERGSSGWVMHEYAITAPDDLASWPIRLYRVRFSGHGKKRKREPERLGARVHDDDVDGGQRAAPRRAVTETALFVQPSAVDCAESAGQSFSGAIEPVFHDLPDMMPEQADAGDTTETTAAVVNLTDAMSEQPVLPLAADGDDQSSYGVIDPAFRDLADLIVLPPEPDDGGMERATPCTPMSETALFEQQGPPGNADCADHQSSYGVIDPAFCEQADAGEAETTVSAAVVNQNYSMALCDFNFPEVLSYVDFTAGMEPSWQQRWPPMSESAPFEQQEPPLAPVAMVDLPPGNADCADHQSCSGVIDPAFRDLPDMTVLPPEQADTGGGAETTTAMVSLTDKLKYSSSMDGEAAQAWCDFDFPESTDEALSYIDFTAGAHTDNDGGVSETAMFEQLGSPPQHDPLPMDADGADQSSSGPLIDTVFRDHAEPIVLPLEQADTGGGAAAAVNLMDKQKYSSSMDGEAVPAWCDSDFPESIDEVLSYIDVSTDDTSCIDFSMDDLFDLAD

SEQ ID NO: 124833 - protein, 295 aa, Oryza sativa
  unsure (1)..(295): unsure at all Xaa locations
  Clone ID: PAT_MRT4530_27534C.1.pep
MYFRHSISNSPPTSPPPPXAGDAQPLAVDAHPLPLPEPPSPAEAHPRPPPXPPPTATRPPRPDRGTAQPPPPPSSHRQIRLIAIEPSPDPPHHRRRNFLRTPPQLPPPSSRTSPLPPSTRWRRPGSARSVPLRRRSLPSXVAPPRIYSLHAPPPPSPLYPPTRLHRRGSAPSEPLRRRRYRPPRAGTAGRPLRAPPPLPLSTSRCRHGPALSASLRCRRPSRPPRSPLVDAGRAPPCRRPPPPLRSSSKRTLSAAAVPSDELLHRPVRSPPPPNPAPLHTLPPLLASFPPFPPKP

SEQ ID NO: 124834 - protein, 363 aa, Oryza sativa
  Clone ID: PAT_MRT4530_27535C.1.pep
MAAAADGLPPGVRFDPADDELVSRYLLRRLRKQPIPLHGVIHEADPLGAPPWMLLAAHGRGGDEAFFFAEARAKNVRGKRQKRTVEGGGFWQGQRVCIDGERLRVPGDGGGGEVGGELEIEWRKYMLSFFAEGERGSSGWVMHEYAITAPADLASSPIRLYRVRFSGHGKKRKREPERLGARVHDDDVDGGERAAPRRAVAETALFVQQSSAVDCAESADQSFSGVIEPVFHDLPDMMPEQADAGDTAETTAAVVNLTDAMTEQPVLPLAADGDDQSSYGVIDPAFRDLADLMQADTGGGAAAAVKLMDKQKYSSSSMDGEEAPAWCDSDFPESIDEVLSYVDFSTDGASCDFSMDELFDLAD

SEQ ID NO: 124835 - protein, 104 aa, Oryza sativa
  unsure (1)..(104): unsure at all Xaa locations
  Clone ID: PAT_MRT4530_27536C.1.pep
PRVRTIEGMKKFXTLSYMAQVIVKDLLKQIEYMLRSKWVPCLELSKDGFIYRENHRSHGYYYGMYWTMWKLSMYGCPDATEVLKELEEANKAYPDAFVRIIGLH

SEQ ID NO: 124836 - protein, 137 aa, Oryza sativa
  Clone ID: PAT_MRT4530_27537C.1.pep
MTLNRKTGLELTAGSRAATGSLMTGKEAGEDSSADADADDIERGDGADCNNMIRASSICDKLTTRPTSSLSNWSLVKQSACRASAIRHHSHRRRRFSFRRSGPHPPPLQLVLPRRPGRPKRRERNKERREEEERVPH

SEQ ID NO: 124837 - protein, 94 aa, Oryza sativa
  unsure (1)..(94): unsure at all Xaa locations
  Clone ID: PAT_MRT4530_27538C.1.pep
SHAAPDGRVTXVVAAIQLRRPVAAAIEAVGAPMVAVVXSARLLGAAGNSGGRFKVRSLHVGGVQPXRCPVGGGAGGAALEDPSLRTRACDVIAL

SEQ ID NO: 124838 - protein, 73 aa, Oryza sativa
  unsure (1)..(73): unsure at all Xaa locations
  Clone ID: PAT_MRT4530_27539C.1.pep
GVGLIKKKKKKKKKKKKKKKKKKKKKKKKKKKKKKKKKXPKKKKKXKXKRGGLLKKKNFKTRGVKAKFFFIGA

SEQ ID NO: 124839 - protein, 1216 aa, Oryza sativa
  unsure (1)..(1216): unsure at all Xaa locations
  Clone ID: PAT_MRT4530_2753C.1.pep
MSTTDFDEMGSKDGFSNNKLLDDFGCGEIQLVQVHLPTRSGPSSSLTTWSIEIIQASRYAAYQKMSDHMMSNEYTIRPPRNLRELRLGTPRADKALFDPSETKDHWYTSGQSKTIRIAVPAYLLIAIYANETILCHPLLSPALAYLLHGLLSMSYTHLATIHQRSSIVRLKMPRFKPEYLFGIEGFVQELRTMSFTIGFETAPLYAQIPHDRDEEKCRVMVTLNSDREDIPSMMFEARGGSYPYACQEAARIAIGELRDRYNDLLADTEYRCHPRQPQGSDRASYVDPEGIENDATIRHLVEMLWAMDESRAEVVSAAQAREDWNRGKICKLEDKVDRLEKELAELKGEAPPQKARVHLTARKRALFVPCYQLVPKVRRTTCLMVNTRSNGNGPNNNNNNNGENPTLAQVLAQQAQLMNMMMQQLQNQQNQGNNHAPPQNKXTAEPITWLEFTAAFRKTRVPSGVVSLKKKEFRALTQGSCSVTEYMHEFNRLARYAPEDVRTDEERQENFLEGLNDELSYPLMTGDYSDFQKLVDKAIRQEDKYNRMEQKKLRIAQFKAQQGNSQRPCLTMGPQVVSQGGSSSVVCPQRQFYNNNAGNNNRNQAPRPVATPVQHPPVKREQGNKPGVCFNYGEPGHYSDKYLKPRRVKIVPVQNNSNAPASKARVNHVAAVEAKGAPDVILGMFPVNSVPATVLFHSGATHSFLSMSFVGNHGMEIEDLRCPLMVSTPSNQALSSQRSPSVRIEIQGMDWLARYKGVIDCANRKETLTSNDGQVVTVHALPSEPLRSSLNQITLEEIPIVRDYLDVFPDDLPGMPPKRDIEFRIDLVPGTTPIHKRPYRMATNELAEVKRQVDDLLQKGYIRPSSSPWGAPLKGATVFSKIDLRSRYHQSRIKKEDIPKTAFTTRYGLFESGGVVVDPSNAESVTNWKQPKTVLEIRSFLGLAGYYRRFIENFSKIAKPMTRLLQKDVKYKLSEECEQSFQELKSHIISAPIMILPDPKKGFQVYCDASKLGLGCVLMQDGKVVAYASCQLRPHEMNYPTHDLELAAVVHALKIWRHYLFADALSRKGYCNATEGRQLPWELCKEFERLNLGIVSRDFVAALEAKPTLIDQVRKAQTNDPDIQDLKKYMRRGKTIGYLEDEQGTIWLGERICVPDNKELKDTILKEAHDTLYSIHPGSTKMYQDLKEKFWWAIMKREIAEYVAVCDVCQRVKAEH

SEQ ID NO: 124840 - protein, 63 aa, Oryza sativa
  Clone ID: PAT_MRT4530_27540C.1.pep
PTASITAFPYVDEWEFYLMTTTIETRRYLCSRKNFPHASIVVNLRYEEEKEKKRKWISLPNPI

SEQ ID NO: 124841 - protein, 49 aa, Oryza sativa
  Clone ID: PAT_MRT4530_27541C.1.pep
MTDREQPSMEFVQWADELCGAEGCSAEGRYAKTCPAMVQIWCQREQLRV

SEQ ID NO: 124842 - protein, 127 aa, Oryza sativa
  Clone ID: PAT_MRT4530_27542C.1.pep
KSESTSQLERRIAKAKDIYASGVQCMNQLANTLHQRSIAHSEQMGLNILSHATRAANFLAVMVSEAEQVSNDVFKSISELKELLAFSADQQEVMFKRDLVSAQVMSKTSIDFFEDIRGHASRLIEHM

SEQ ID NO: 124843 - protein, 659 aa, Oryza sativa
  unsure (1)..(659): unsure at all Xaa locations
  Clone ID: PAT_MRT4530_27543C.1.pep
MESGQPNSAAAADKTQNSSVPPVEGVAGGGTSYGWVDGGLQASSLGNGAIDPTKIHSADLLHVWSMPSTANVSQQEAPRPLEHVNLLAARNERESFQIALRPKVSWATSGIAGSVQVQCTDLCSSAGDXTLVVGQSVTLRRVVPMLGVPDALVPIDPLNSQINLLPGETSAIWVSLNVPCGQQPGLYEGEIFISAVRAEAESRGESLTKSERYQLYKELRNCIDITEPRDYSSSEEMVQRLTSASTTLRRMLALPSFQDCQENNGLGDMMDEDIMNNVAVRLKLSLTVWDFTLPLTPSLPAVFGISETVIEDRFCLEHGTKGWYDALDHHFRWLLQYRISPFFCRWGDSMRILAYTCPWPADHPKAKEYYSDPRLAAYAVPYAPILSSTDAAKNSLRREVEILKSEAHWSKSYFYLWDEPLNMEQYDVICSISNELRSYASDVRILTTYYCGPSGSELAPSTFEAFVKVPNVLRPHTQIFCTSEWVLGTREDLVKDIVAELRPDLGEEWWTYVCMGPSDPQPNWHLGMRGTQHRAVMWRVWKEGGTGFLYWGTNCYEKAMIPSAEICFRRGLPPGDGVLFYPGEVFSSSHEPVASTRLERILSGMQDIEYLKLYSSRYGREEGLALLEKTGVYLGPDRYALDHGPIDVMRGEVYRTCRS

SEQ ID NO: 124844 - protein, 801 aa, Oryza sativa
  Clone ID: PAT_MRT4530_27545C.1.pep
MSSALEVEGSGSPGVEPAATATASRLKRHDSLFGDAEKVSGGKHHGGSAVSWAVTLHLAFQSVGIIYGDIGTSPLYVYSSTFPDGIGHRDDLVGVLSLILYTLIIIPMLKYVFIVLYANDNGDGGTFALYSLISRYAKIRMIPNQQAEDAMVSNYSIEAPSSQLRRAQWVKHKLESSRAAKMALFFLTILGTSMVMGDGTLTPAISVLSAVSGIREKAPNLTQTQVVLISVAILFMLFSVQRFGTDKVGYTFAPIISVWFLLIAGIGLYNLVVHEITILKAFNPWYIVQYFRRNGKKGWVSLGGVVLCVTGTEGMFADLGHFNIRAVQISFNCILFPSVALCYIGQAAYLRKFPENVSDTFYKSIPGKYRDRLNFGPLFWPTFIVAILAAIIASQAMLSGAFAILSKALSLGCLPRVRVIHTSKKYEGQVYIPEVNFMMGLASIIVTIAFRTTTSIGNAYGICVVTTFMVTTHLMTVVMLLIWKKHLVFILLFYCVFGFTEVVYLSSILSKFVDGGYLPFCFAMVLMTMMATWHYVHVRRYWYELDHIVPTAELASLLEENGGVRRVPGVGLLYTELVQGIPPLFPRLVRKIPSVHAVFVFISIKHLPIPHVAAAERFLFRQVGPRARRVFRCVARYGYTDALEEPREFAAFLVDGLKMFIQEESAFAPHQEMIDAAADDDDEAAARPRRSTSSAVHSEEAIQAASSGRTTASSVQLQAGGEPPAAMDVEEEKRLIDREVGRGVVYLMGEANVSAGPNSSILKRIAVNYIYTFLRKNLTEGHRALAIPNDQLLKVGITYEI

SEQ ID NO: 124845 - protein, 260 aa, Oryza sativa
  Clone ID: PAT_MRT4530_27546C.1.pep
MAKKGLVGILYKLRDVHHRAPPTPTSPSSSSSPHCHGRHQLCYPPAPSSWPWPSCRHPRTSSFRWPTAPQQGQADDDAAAAAGSVYRTVNTVYDTSSLEHFNPRRSSLDEASSCIADRSFFANDDEATAMDVVARKNDDVDEATPMTTPQTGKNEAEAAEAAALKGGAVVLTVESEDPYGDFRSSMADMVAAHGLRDWEGLEELLAWYLKLNAKGVHGVIVGAFIDMLVSLASSPIPSQSPSSSCITFEDYSSATMEEES

SEQ ID NO: 124846 - protein, 196 aa, Oryza sativa
  unsure (1)..(196): unsure at all Xaa locations
  Clone ID: PAT_MRT4530_27547C.1.pep
MPPKRGAAPAAAFEYCELCRRNHDQGRRHRYFPAHRAALAAALSRFRSKLLDLRRALRHPSSAARSRLWCPFCSADLVDLDSRFACSNAIYHLASQDHLNGVKAFLQKHGGGMDQVDSFRISEDELAKWEKCCESSSTEQETSTEGLIGPSLGPLKDIRNKSTSKHLDNFAETYIPSSSNTASNVXMPLQSPTNGA

SEQ ID NO: 124847 - protein, 561 aa, Oryza sativa
  Clone ID: PAT_MRT4530_27548C.1.pep
METQPTDGRGAGAGYPRWVILDREAEYLHVNHPCSAAADAKTEAATLSSGGHTVRVSLDLRAPPAASRVCYTCSVPVDPALGPPYMSVAAAHGDSLLVLVSFSYQEGYEHHTDTIDKYLYNAGAAAAADPPRPPSLVHLPAYYNGEETTLPSPLPHDLDEKTTGLLRRGEAEADLVVADLIVKDGGEADAPKEAELLVLRSGEWSVVRAPIVHDDGKAEELSFWETDMVVPVGDRRLCWVDLCRGIILCDMFDDGDETLRPRYFSLPIEPPADDRDRRRCQMSKRRVCVTNGGTVLKLVDVSPRCCCGRRGATQCDHSSGVFVINTWTLHMDGDDDDMAAYWTMDAMVDATELWSLDAYAGVPRINPQFPIVSMDDPDIICFQVPEEHKIGRKMQSWYIMLDTSSKTLMSVCRLDESSSLQLSYGYAYFVSTVSHCFNSSDDGGFNNDVTKPALMIIDDKVATKNNIIANDSLQSSCESSAKNSKVNSPKEILALLQEIPELSRDDLLRAYSLLCYDNNGRRLSSLLGLPMSLRKPWLLMEIKASEACSVCCACRADMQNV

SEQ ID NO: 124848 - protein, 51 aa, Oryza sativa
  Clone ID: PAT_MRT4530_27549C.1.pep
ARDFLQQKYGFQQGSVLSVASGRRLRARGDDVHAVVPTTKPGGLTPWHHPY

SEQ ID NO: 124849 - protein, 1034 aa, Oryza sativa
  unsure (1)..(1034): unsure at all Xaa locations
  Clone ID: PAT_MRT4530_2754C.1.pep
MGKKLDTVQCNDEEKVIFAAHQLQGPASLWWDHYQATQPEGQPITWARFTAAFRRTHVPAGVMALKKREFRELKQGNRSVMEYLHEFNNLARYAPEDVREDEEKQEKFLAGMDPELSVRLVSGDYLDFQRLVDKSIRLEAKHKELESHKRRLTNFRNQQGANQRIRYTNPYPGGSSSQQQQQQQQPRSVPQPQFVDPRALLYPPPPSPSQQGTRAPHPPTPAVQPGQGRRDVQCQQRLCFNCFEPGHFADKCPKPRRQQGQAPPRPNNGXIGLSETLIVSEFGDVFPEELPGMPPKREIEFRIDLARGTTPLYKRPYRMAANELVEVKKQLEELKEKGALNEVTIKNKYPLPRIDDLFDQLKGATVFSKIDLRSGYHQLRIREEDIPKTAFTTRYGLYEFTVMSFGLTNAPAFFMNLMNKVFMEYLDKFVVVFIDDILLSEVKFLGHVISAKGVAVDPETVTAVTDWKQPKTVTQVRSFLGLAGYYRRFIENFSKIARPMTQLLKKEEKIVWSPQCEKAFQTLKEKLEGHVVAYASRQLRPHEGNYPTNDLVLAAVRRWLELIKDYDVGIHYHPGKANVVADALSRKSHCNTLGVRDIPSELNQQMEALNLNIVSHGFLATLEAKPTLLDQIREAQKNDPDMHGILKNMKQEFVALCDVCQRVKAEHQRPAGLLQPLQVPEWKWDEIGMDFITGLPKTQGGYDSIWVVVDRLTKVARFIPVKTTYGGSKLAELYFARIVSLHGVPKKIVSDRGSQFTSHFWKKLQEELGTRLNFSTAYHPQTDGQTERLNQILEDMLRACVLDFGKTWDKSLPYAEFSYNNSYQASIQMAPYEALYGRKCRTPLLWDQVGESQVFGTDILREAEAKVRTIRENLKVAQSRQKSYADNRRRNLEFAVDDFVYLRVTPLRGVRWFQTKGKLAPRFVGPFRIIARRGEVAYQLELPASLGNVHDVFHVSQLKKCLRVPSEQADSEQIEVREDLTYVERLVKILDNMERRTRNRVIRFCKVQWSNHAEEEATWEREDELKAAHPDLFA

SEQ ID NO: 124850 - protein, 126 aa, Oryza sativa
  unsure (1)..(126): unsure at all Xaa locations
  Clone ID: PAT_MRT4530_27550C.1.pep
WRQRRWRAATAAVGVGARRPPPRGGGGGRGIRRVAAVPARILRRRPSTQKSSGGGRPRTDPAAGRPPPAWHXSSPPLPFHPSLDLAEGRGVGGSAARGEHGSXGERRGGRRRIGQNTWETTSVLAD

SEQ ID NO: 124851 - protein, 120 aa, Oryza sativa
  Clone ID: PAT_MRT4530_27551C.1.pep
MHGNHHEARQPNPTTYAVSYCRIRLNRLTLSDSNSVDPSRSRFGLQPILTLFPGRSLSRTPSRFLLHLRFLDYQIWSLHYWHVLPPSPHVATTIIADLHRCPRELTAGVQVLRRQISAEH

SEQ ID NO: 124852 - protein, 106 aa, Oryza sativa
  Clone ID: PAT_MRT4530_27552C.1.pep
GYWSPLADPKSRGIICGLTLDTSEKHLALLYLATIQGIAYGTRHIVEHCNAHGHKIDTLLAWGGLAKNSLYIQEHADITGCPIILPRENESVLLGAAVLGAVVAKK

SEQ ID NO: 124853 - protein, 45 aa, Oryza sativa
  Clone ID: PAT_MRT4530_27553C.1.pep
ERNAIIMMDMDIKLAVSVARLFSGRGVNAQIIFGNYLLTFPGRDK

SEQ ID NO: 124854 - protein, 916 aa, Oryza sativa
  Clone ID: PAT_MRT4530_27554C.1.pep
MAVVDPVMFDNDDEEGPISFKRSSTSVKNRPTPTKQEGSSGNAGPIRSPKAVASNQQKNGLTGVSRPLQQRPQSSSPNPRPLGSGQPNSSKEHSSHNSNSVDKSKLKRPFVEDKSDDSEDDHKPIGLRRKVEDRNLKKPAVGSGTANDSDDDKPLSLKINSTKTPSSSANKAIVLKTTPKIEQPGDDSEDDKPLASRLPTNAALKRGGNVSDDSEDEKPLAARFSKVTGNASASISSSKDKVLSASIKASSSSKMSNNDASTSRNSIKRPIDNNNQTSSALKKARPSDVSASASVKREPKADDNDNVPLSQRLKMGESSKSKPPAKNIVKKSPSSLKKDNKKMKMKMKTKKTMKNSQFSKTMKVPPGSGGGQKWTTLVHSGVIFPPPYKPHGVKMLYNGQPVDLTPEQEEVATMFAVMKDTDYASKQTFIDNFFTDWRKILGKNHVIKKFELCDFTPIYEWHLREKEKKKQMTSEEKKALKEEKLKQEEKYMWAIVDGVKEKVGNFRVEPPGLFRGRGEHPKMGKLKRRIKPSDITINIGKGAPIPECPIPGESWKEVKHDNTVTWLAFWNDPISQKDFKYVFLAASSALKGQSDKEKYEKSRKLKHHVHKIRDTYTKDFRSKDKTKKQIAVATYLIDKLALRAGNEKDEDEAETVGCCTLKVDNVTCVPPNKLQFDFLGKDSIRYFNTVEVELLVYKAIEEFRAGKKPGQDLFDKLDTTRLNAHLKDLMPGLTAKVFRTYNASITLDDILHKETEDGTLLEKIAVYQRANKEVAIICNHQRSVSKSHDSQMTRLNEKIDELKAQRDELKADLSKVRKGKNLGNDKDGKPKRNLAPEAFEKKISQIETKIEKMEMDKKIKEDLKTVALGTSKINYLDPRITVAWCKRHEVPIEKIFNKSLIAKFSWAMDVDPDFRF

SEQ ID NO: 124855 - protein, 115 aa, Oryza sativa
  unsure (1)..(115): unsure at all Xaa locations
  Clone ID: PAT_MRT4530_27555C.1.pep
IPFTLRYTSHIGMVYPRAYGYFLRTLRKSFTESTDGKSPTRTRLGRQCIVXGLISPISTWRPPDLRYKRDPXREYLRHRISELTQPSQPTKSEPARSXNRRDLVEPTRPRSCWIR

SEQ ID NO: 124856 - protein, 84 aa, Oryza sativa
  Clone ID: PAT_MRT4530_27556C.1.pep
RPRVRAARAGRARAVEIDAELGIGRRRRSFSVDFCRNWPMYRRELTDFMATPIVRALTTIFFIWLALPGWLLRVFIFGTFVLPF

SEQ ID NO: 124857 - protein, 979 aa, Oryza sativa
  Clone ID: PAT_MRT4530_27557C.1.pep
MFRRLLLPLRRCFSTSTSSSATPTLYSSGTTPVSILSWGRGASGQLGGGKEERRLYPSPVAHLSLPDPAPVLSPTPGRLPDAAAAGTAAGGVEVGISCGLFHSAVVVDGGAWVWGKGDGGRLGLGDESSAFVPRHNPNLSELRVLALGGIHSAALTASGEVFTWGYGGFGALGHYVYHRELLPRKVNGPWEGKISHIATSGAHTAAITDSGELYTWGRDEGDGRLGLGSGGGPGEAGSLSVPSKVNALPVSVAAVACGGFFTMALTSDGQLWSWGANSNFELGRGSNSSDWRPQLIPSLKNLHVIQVACGGYHSLALTDEGVVLSWGHGGHGQLGHPTLQNHRVPLAIKALSEERIVYIACGGSTSAAISEKGDLYMWGNARDCQLGVPGLPEIQPLPLMLSFARTSFGGQTAHLPKSKSSGYKHFVSISSGLPCFLAIRRQSPGYSSVHTASFSSQHNQLSTDRSGTVMAERELIDKDKLILRGLQFHGFHGVKQEEKTLGQKFVVDVDAWMDLSAAGETDSISDTVSYTDIYRIAKDVVEGPSRNLLEAVAHRIASATLLKFPQISAVRVKVGKPHVALPILFAFLKSSCRRGVFFFTEASSWPETRMPPVNSDGAGPSSGEDGSAAAVKKRNRPKYHRFTQQELQACKPILIPQTVILVLVFVGLIFIPIGLACIAASNKVVELVDRYDTKCVPRNMLRNKVAFIQNSSIDKTCTRVFKVPKDMKKPIYIYYQLDKFYQNHRRYVKSLNDMQLRNPKKVADTQYCSPEATANGRPIVPCGLIAWSLFNDTYSFTRGHGNETLRNGTLIGGGQLNPSKPLSEQEDLIVWMRIAALPTFRKLYGRIDMDLQAGDRVEVTMQNNYNSYSFNGKKSLVLSTAGWLGGKNAFLGRAYAIVGLACFLLALLLALLYFVFPMSVSATAELNPQFFIPFMKCSWILILEYMIQTWLLKEFFNTVSAVQSANLGVPGAPFVKDTT

SEQ ID NO: 124858 - protein, 529 aa, Oryza sativa
  Clone ID: PAT_MRT4530_27558C.1.pep
MGRLTVAAAVAAWAIPLAALVASIVPDPYMEMDFSGSYKIWQAGVLNFLSIFNFPVLLSSYSTKFALIVTSCHILIGNDEIFHVPQVQRYCRGDFLIWDPMITTPPGLYYISLAYVASLFPGAWVTRIAEAFDALCTTALLRSTNVIMAMICGVLVHDLLLCIRPKIGKRKATAFAILVALYPIHWFFTFLYYTDVASLAAVLAMYLFCLKKQFWVSAAFGAFSILLRQTNVIWMIFFAANGAIAHAQYLYVKDNVCYENSELTDKSNKEASHMDNKTTAPGFTEEIWDAIFKLWNSKCEVLIAFIPFAMVLLVFVAFIVWNGGIVLGAKEAHVVSPHFAQFLYFGLVSAAALLPWHFTPTRASDLFHWCRKNKTYSSFAILVALGLSLVAVHLFSIAHPYLLADNRHYTFYIWRKVIQVHWMMKYILTPVYVYSWFSIVNILGKSQTRLWVLSFVLSVALALIPAPLVEFRYYTIPLVILVLHSPVISNVKLLALGFLYAAVDFFTLAMFLFRPFQWQHEPGTQRFIW

SEQ ID NO: 124859 - protein, 66 aa, Oryza sativa
  Clone ID: PAT_MRT4530_27559C.1.pep
FHTWLFHICTQIQIYRRSERLAAFDVCGCWMVGKALGKGRLELPPTGATRLQSDDILDQHTLSSMR

SEQ ID NO: 124860 - protein, 154 aa, Oryza sativa
  Clone ID: PAT_MRT4530_2755C.1.pep
MSGVPPAAAGGDGTGGAPPGAGAGGGAPGAGAANNNINGGNSASQSSGGPFSRCILLLFPLLALSLYCHVRYVPVPDLHDASSMLLSYCNVSVPDIHDAHRKENGAFNTRKRRAFSAASLYVRPCSGMLRPPLSSELGGGGSEEEEGEPRGERE

SEQ ID NO: 124861 - protein, 798 aa, Oryza sativa
  Clone ID: PAT_MRT4530_27560C.1.pep
MALSELPLHHSFRLSSRPHLRLLPLRLLSSRHASSSSSTTAAASSSSSSGGNRAPPAPNPTRGAPWLQKWGPTDPAAPPPPPPAPSPTSSIDRIVHRLRNLGLASDDDEPTAAAATATAPPDGNERLSDLLDRSWARPDQQFAASSFDESVLPWERDEVARGRENEEDGVKRRRVRAPSLAELTIEDEELRRLRRLGMTLRDRITVPKAGVTQAVTEKIHDAWRKSELVRLKFHEDLAHDMKTAHELVERRTGGLIIWRSGSVMVVYRGSNYKRPLKSETLDGNSSAVKGADGTLFIPDASSPTEHDSQGKDVNTQREIAARLNMQNTEDMTEEELEFNQMLDELGPRFVDWWGTGILPVDADLLPQTIPGYKTPFRLLPTGMRLTLTNAELTNLRKLARDLPCHFALGRNRNHQGLAAAIVKLWEKSLVVKIAVKRGIQNTNNKLMSEEIKNLTGGTLLLRNKYYIVIYRGKDFLPTSVAAALAEREELTKDIQNVEEQKRCIPVVHSMDDSLDGHALAGTLAEFQEAQARWGREVTAKEQEEMKEASSRSVKEKLFKRLEHKLSIAQAKIHRAERLLSKIEASMVLANPSDDKEMITDEERSVFRRIGLRLKAYLPVGIRGVFDGVIENMHLHWKHREVVKLITKQKTLPFVEETARLLEYESGGILVAIERVTKGYALIFYRGKNYRRPINIRPRNLLTKAKALKRAVAMQRHEALSQHIAELENNIRQMKLDLGIEVDEEYEEDGSDSENENNEAVSSARYDEDQDDFDESSDEDEYDDYDEDDDDDDDEGVDS

SEQ ID NO: 124862 - protein, 63 aa, Oryza sativa
  unsure (1)..(63): unsure at all Xaa locations
  Clone ID: PAT_MRT4530_27561C.1.pep
TPXXGGGDXFQKRERAQEXYXIRQREKEKLLELKKKLAEQQAHLNKLSEHIDELTKSQGGEQN

SEQ ID NO: 124863 - protein, 104 aa, Oryza sativa
  Clone ID: PAT_MRT4530_27562C.1.pep
LTGPRHHWTLVPYQAQYRRVNCIPVFFPSSLPLFRRQWASAAAAGELATTSGVEWGGGGSERARGRQSEAAPADGAPHGAVALEPEAAEVEATTPTSPSEPSTH

SEQ ID NO: 124864 - protein, 263 aa, Oryza sativa
  Clone ID: PAT_MRT4530_27563C.1.pep
MEPVTAASAAAAASEEQVTRRVASRIIRALQHQLRLLHRAGPEFFVLGATGNVYTVTLAAAPACTCPDPSVPCKHILFVLLRVLGLSLDEACVWRQSLRPCQVARLVAAPTCAEADVVAGPRARERFHQLWSARAAAKAEESRRRRRRDDQAAAAGASGRLDGAACPVCLEEMSPPGAAAAAAMLLTCAMCRNSVHGECFARWKRSRGRRAATCVVCRARWRQPSREQEKEPYINLSAYMNDAGGGDVNMVAADGDDGGLCAG

SEQ ID NO: 124865 - protein, 93 aa, Oryza sativa
  Clone ID: PAT_MRT4530_27564C.1.pep
MASSVAAGEAVVGGSCHDGSGLHDPTWQQGTWGHSGEKEAEVAPAARPKPYPDGGLPDPTQQWSPPVLTSTIMSSIWHGSASIRFCRSLGVGV

SEQ ID NO: 124866 - protein, 34 aa, Oryza sativa
  Clone ID: PAT_MRT4530_27565C.1.pep
FYITGHCINYRGGEFEIFRGYNPSRIQYLLLTLS

SEQ ID NO: 124867 - protein, 95 aa, Oryza sativa
  Clone ID: PAT_MRT4530_27566C.1.pep
VELLSSHSDDEVYLGQRDSPNWTSDLDAMNAFDRFRERLLEVEKNIVAKNDKGSGFKNRTGPVNIPYNLLFPYASGDAEANTGVTGKGIPNSASI

SEQ ID NO: 124868 - protein, 59 aa, Oryza sativa
  Clone ID: PAT_MRT4530_27567C.1.pep
CLSSTDASPLPRPSYSLLMPFSYSGIFILPCSNIGGVIISRDLCFPWPSIVPNFKNPQQ

SEQ ID NO: 124869 - protein, 76 aa, Oryza sativa
  Clone ID: PAT_MRT4530_27568C.1.pep
RRKGGLKMVFFPPGFLHSPSNVTGGPRICWENFIFFRKTPPGYCHVKGKPLPPPNVASPGTKLGGGGFFGPPKFFK

SEQ ID NO: 124870 - protein, 58 aa, Oryza sativa
  Clone ID: PAT_MRT4530_27569C.1.pep
FHSLSGVILGVSLRCARPLMISSLVEFERPSKPAPVAEKVVPAVNQKGSGNYVEFEFF

SEQ ID NO: 124871 - protein, 97 aa, Oryza sativa
  Clone ID: PAT_MRT4530_2756C.1.pep
PLGSSGRGFIKPRPLKMDPLRISSQNPNFSYQEGPLPKFFLKKKKSIFLLKGIPPTKIKIMVNPPPHNLTPKRSVVGNLPVKGFKPFKTYKTPSPKL

SEQ ID NO: 124872 - protein, 122 aa, Oryza sativa
  unsure (1)..(122): unsure at all Xaa locations
  Clone ID: PAT_MRT4530_27570C.1.pep
ARPSSPSLRAPEVDGDQETISSFANSPSLAGDAIPSIVDHLDFRRLVDEGEDHDEDVLQKLVPDIRCDXLPTPVMAVQVTEFFGHRWKXGGGDVAVGVAVHHAAPTADSRGLWRFLEMWSAA

SEQ ID NO: 124873 - protein, 118 aa, Oryza sativa
  Clone ID: PAT_MRT4530_27571C.1.pep
KLGAWNPVLRKWFFLPRRFSTEEYDDVADEERGTNLVIVASEFFHDVQVHRMGELHPTRGFSSLAIIPGRETEIVAIKSEEFKDRIASYITVLDVISGEVLMPEVEIGAEKFEGVEIL

SEQ ID NO: 124874 - protein, 66 aa, Oryza sativa
  unsure (1)..(66): unsure at all Xaa locations
  Clone ID: PAT_MRT4530_27572C.1.pep
QPXXTXGIPXYXAKKGXNXRTXFKXPTTTSSXLEKXYKGXXXXSXXRHTLWXPXGEVKIXWXWEKR

SEQ ID NO: 124875 - protein, 114 aa, Oryza sativa
  unsure (1)..(114): unsure at all Xaa locations
  Clone ID: PAT_MRT4530_27573C.1.pep
TQLPMGNFIVIIDCYTAIDWINNTIIFIIGVGTMHFKRCQAVKFFIAAPLTXFYIVKALFGFIKQSIGYNIVAXFCHPSTVFXFGKSTWDVMAKMIEALGFGVIXFERRLSFRL

SEQ ID NO: 124876 - protein, 226 aa, Oryza sativa
  unsure (1)..(226): unsure at all Xaa locations
  Clone ID: PAT_MRT4530_27574C.1.pep
FSILEIPSNPIPTPNPSPPFPPCASLXPPPPIRSPPSLTKXASPLSPLSPLAGPTSFSPLLLAKTLTTTLRRHRPXPPPLLSSSPPRLPPSPPSFSSPPSSFSGEMPLSFDAQLPLPPSVVPPPPSSVAAPPPXAPPLPLPPPPYSLPYKPRPVRIACPSIPSPCPPTSQVPVDHPHPPPPPPHSPRQPLPKPSPPPSLRPHRRPPPLRTNKPTPLSPPMSSSLIH

SEQ ID NO: 124877 - protein, 543 aa, Oryza sativa
  Clone ID: PAT_MRT4530_27575C.1.pep
MQTCKGNTRTQGEPAPTGGPRTSAAQRGGARWTKSTRGLGCASTTWTAQIGPKPIGWPRGGAARARARHKAGLAEPWRGGGAREKAATRRGKGGGPGGPGERSGGKPAGRPNSGGARPGGRRRRPPARQRARETEEGGKVGEEELTKDAATRDGERRGSSASALLGAKAERRPGGVPRARTGGRRPEGPARGEPSGAKRRLEVVKAVERGGARGDGASEAGRGKGADAGAVNGGGFGLHGGNGAAGVEGEDGAVDEVRTAAAVLGRATAQCGVDGSGGAALLEFAGERRGGEAGSSPGEAESGRQPPVAWAASWGVGGGFGGERWGKTARTWAARSHGRARARGVEESGIIEPLHQCRLCRLGLRGVRPRRGLLHQVLQVGVGDARQRFYPVLFLDYLCSGGGVVLSLPVRSLSVASCPQDPPVLVACRRATRLLQLHVWNLNYWDKASMLVGEVEEPRKTFPKAVFAAVGLVDGTYPIPLLVGMGALSLEMVVEWMGGFFFVVGDQIGGGVCAFESRLPRPCMACGEEGLQYRRIDEETKVV

SEQ ID NO: 124878 - protein, 995 aa, Oryza sativa
  Clone ID: PAT_MRT4530_27576C.1.pep
MANKMKKMRDQLRKIKEGHEAFRLTPDSTPYNEHHRPDPRETTSKVIQSSIIGRDKERKQVVSLLSASDEEDTVILPIYGFGGIGKTALAQLVFNDTQFRGYDHRVWVYVSQVFDLKKIGNTIISQVSNEGNKNEYTRENINGRLCDLLEDKNTLIVLDDLWETNDFHLNELNLMLNTKGKIKVLVTTRNEDVAKKICTHKPYRLNPLDSTMCWNIIKQRSNLEARGDKDQIEQVGWVIAKKCGGIALAAHALGFLLSGMDLVEWRALSNSDIWTEAFSDNSVLPSLKLTYKNMPPYLRLCFAYCAIFPKGHNIAKASLVHQWIALGFIEPSKTFSSVRLGEKYIRQLVGMSFLQRSILHTEQEVFTMHDMVHDVARSVMDEELVFFNDTKISSTTEQKFCHYALLENYSKSSNLSTILPATLRAVHTSNCSKLVLQGDEFSFTKFLRVLDLTDCSIRILPSSIGKLKQLRFLIAPNIGDNVFPKSITLLPKLKYLDLHGSFRISALQGSISKHACLIHLDLSGCSNIRVIQPEALCGLTKLQFLNLSWCSILQILPENIASLTELQYLNLSNCFLLSQLPSHIGSLTELQYLNLSGCQGLVKLPMSFRNLKNLVHLDLSGCSRVQDFKQVFGGLTKLQYLNLSKIFGRTRVGDNWDGYPETISTLNDLEYLNLSRNSRIDYLPRSLGNLKKLQTLDLSYCRSLRSLPHSIELIDSLEFLIVVGCSDQLKEYLRKSQFKNIPISLPHFIVHSISGDSRSNLHMLEDINPVRLEISCLENVKSIEEARGIELSEKQNLSTLTFHWTSRADRLLEDKDVLGELMPPRGLWNLSIQGYDSTTFPTWFVGISHHLPSLVKIELKDLHRCRHLPPLGQLPNLNEVHLQQMDSLTKIDGGFCGGDKGAFRKLKVFTLRDMKQLEEWSTTTHSKGGEDSIEFMFPMLVTLSIELCPMLRLKLCPPMFHSWLISESDKAVDTGLTEALMKIFAEDFMPTDSSE

SEQ ID NO: 124879 - protein, 507 aa, Oryza sativa
  unsure (1)..(507): unsure at all Xaa locations
  Clone ID: PAT_MRT4530_27577C.1.pep
QQLRTAPVSCPPPPPXTPQLSSPTSGRQLPLLPWPPEPPHDAAVSXPPPPPRARALVRGTSPPTSAPFPPTSPLQNRHPHPTVPPTPPAVAAPTPPLPGSIPPPLPYKNNPPAILSLFPNFPALPALSPALPTRAQAPPIAGDPPAGRCRHCRRPRAAPLAPPASPCLAAPRPHSVXPISSPEPPPHRAPSXPPLTDELRPPLLAAPATAKPRPTTVGFAASRGTPAALPPSLETAESPPSSSPRGVLPPPSARAPXPPPSPPCPSXAPPPPFSPPPLVFAAPRPPPRSSXPTPPSPLSSXPSRVGEHLPPPPLPFFFSLCPPAAACVSPSRRAAPPPVSPPXPSGRAPPSGPPLPSSSRAAPPPTPAAPPPSAAPPPPRCEPSPSPSPAPPPASSPPPPPATPPPSPPPPPSSPAPPAPAGRCPPPPARWRARSPRPPAPPPPPPXLSSPPPLLLVVVALPPPAPLPRPLLEAFFSSPGGFQVMPAPPPPPPLVPLPQGSYGSAKP

SEQ ID NO: 124880 - protein, 592 aa, Oryza sativa
  unsure (1)..(592): unsure at all Xaa locations
  Clone ID: PAT_MRT4530_27578C.1.pep
MAAKEAADGARAEGGGSTPRGEDDGGDSAVSNEGGRAAGVPRDAAKPTVAGRGLAVAGAARSGGWSSSVSGGERERGGEVVPAMKWENGAGAEVRKGTAKPVVQAARRGDVDSGGSGRLEGRRRSAALGLAKMHYLMIFNPDRKSGRYSHSGNDCPETREEAMYMGNNAYRPQGGQGWNQPHPYYQGGNNNGNFSNQPSLKDLVFAQAKTTDALSKKLAANDKILDNINVKLDGFASAFQNQLSFNKMIETQLAQLASLVSTNETGRIPGQPDSSVENVKAITTWGGKSTRDPPYPNPAGTNGISKEASSSDSADKEVQPEKTMPQEHCDTRLLSFPQRSRKPSVDEQLARFVEVIQKIHINVPLLDAMQVPTYARYLKDILNNERPLPTTEVVKLTEQCSNVILHKLPEKXDLGCPTINCSIGAQQFEQALCDLGASVSVMPKDVFDKLNFTVLALRRMRLQLADSSVRYLAGIAEDLPVKIQDFFILVDFVVLDMDTEKETPLILGHPFLSTARANIDVGTGSIRFHINGKEEKFEFQPRTEQCSMVRIKYGPNLQNIQVVEVEPPKTDSLVKFMQNFLEKETTMPRNRY

SEQ ID NO: 124881 - protein, 110 aa, Oryza sativa
  unsure (1)..(110): unsure at all Xaa locations
  Clone ID: PAT_MRT4530_27579C.1.pep
VQQTYKHSVPRFFVPEHGTMFTLALVRFPPTATKEIQYLNAKGALTYTDIAGDPVLYGNLXPREISMKDVFRSGDSSKKFKIAEGQWYRYAPXSYVSPAXYHXSLKGFPS

SEQ ID NO: 124882 - protein, 145 aa, Oryza sativa
  Clone ID: PAT_MRT4530_2757C.1.pep
SHRPAQWAPRVSRTRGRGRLTAGPHAAATWRSRGRPRRRGRREAARPRPDGRRRRPPARRSGGRERGGKGERRQWSTAHPGATAATEEAAGVEGGGGAARVDGVDGVPAVGERNGGVDEVGDDAAKPKEAVPRWEVVGEARGGFI

SEQ ID NO: 124883 - protein, 161 aa, Oryza sativa
  unsure (1)..(161): unsure at all Xaa locations
  Clone ID: PAT_MRT4530_27580C.1.pep
YSDSDLAGILNTNKGTYGVFFFLGNMTDMIHHLAIIEKXVVFSSCEAEYITDMTATCHGVWLVRLLAKLRGEEAGAITLNIDNQSIXLTKNHVFYDRSKHIDTRYYYIRECIEEAKVKVEFISSNEQLVDILTKALGYDKFIELRSKIGLVEIKQVDKVYV

SEQ ID NO: 124884 - protein, 89 aa, Oryza sativa
  Clone ID: PAT_MRT4530_27581C.1.pep
FFPKPGAGAGLPPTWALGGSPIDSIWCRGPSPGSFLQGFVSQLCLPFLVFRACCSTRNYLGLLWLKKKKLTKKKKKKKKKKNQKKKKKQ

SEQ ID NO: 124885 - protein, 598 aa, Oryza sativa
  Clone ID: PAT_MRT4530_27582C.1.pep
MGGANDSSPSSKLHTRLRLWEFPDRYVFEPIDGLADLYLSANRSDGSMNLVEELPPRDSSTKPKCQTVYGVIGVLKLSVGSYFLVITGRDCVGSYLGHAIFKVTGLKVLPCSNSRSTSGNQQSKMETEFSELLHAAEKTIGLYFSYDINLTLTLQRLHNLGDEFKSLPLWRQAEPRFLWNSYLLEPLIENKLDQYLLPVIQGSFQNIHAEVGSEKVNVTLIARRCTRRIGTRMWRRGADPEGYAANFVESEQIMESKGFTASYVQVRGSIPFLWVQIVDLTYKPRFDPVRQEEAPRILEQHFHDLQKKYGAVLAVDLVNTHGGEGRLHDRYAKSIEPILSEDIRYVHFDFHRICGHIHFERLSQLYNQIEDYLKKHRYFLLNGKGEKIEEQTGTIRTNCVDCLDRTNVTQSMIGGKILENQLQRIGVLGVNDTISNHPAFDAKYKVLWANHGDSISTQYSGTPALKGDFVRYGKRSTQGILNDLWNSLARYYLNNFADGTKQDAMDLLQGHYIISVSRDMAGPSKAGLLENYASFRLAFALVMGALMFMMMSLRQARNDVRHLVLSLLWAGLCIGITHFVRANGRVFTNRPRFYQSRH

SEQ ID NO: 124886 - protein, 65 aa, Oryza sativa
  unsure (1)..(65): unsure at all Xaa locations
  Clone ID: PAT_MRT4530_27583C.1.pep
MEAAVFAPXPGRHPGTASGGGGGGYRCCTGEDGREQRDLDIQGRGCNEEQDHRLEQEWARSCGSL

SEQ ID NO: 124887 - protein, 83 aa, Oryza sativa
  Clone ID: PAT_MRT4530_27584C.1.pep
TRGLPFQFRACGFLLSAFWFPARGEGKRFCRVLAGGERAAMEAAESLEYELQKEVSNIMIQSYITSMRREFETKLWENQNCIS

SEQ ID NO: 124888 - protein, 139 aa, Oryza sativa
  Clone ID: PAT_MRT4530_27585C.1.pep
GPISPADVGRWRWKKRRDSKFESHHLGVAGERDRGLRGAGGAGVANVARGRWARAAVAGPGGSGWRLGKGLTGGPHLSVPEGVRGAQASGWAVAFGRPSKGTGGGGNGLAAHLGKRRGKKGKRKREKNFQGLNIACARF

SEQ ID NO: 124889 - protein, 141 aa, Oryza sativa
  Clone ID: PAT_MRT4530_27586C.1.pep
MGVGPACQRLGQESSSTFVFFFLPTKREQHGNTARTARPAEGDPMAARGGAEQLWRSPAGDHGAWRRGGERRGMATIAELGLQMERGAPGIVYPRGACRRRNGGRAGTAIGINRMESARGDLPTASPPMAKRRPGWDAEGR

SEQ ID NO: 124890 - protein, 128 aa, Oryza sativa
  unsure (1)..(128): unsure at all Xaa locations
  Clone ID: PAT_MRT4530_27587C.1.pep
GSPGLQVKFICNFGGRFLPRPSDGQLRYVGGERHLIKISRDISWKELICKTSKLIRRAHMIKYHLPGEPMNMLISITCDDDLRNMIDECIVLERTKVLLTVYLFADNDDERHXVHFVLGSSSSTDKEA

SEQ ID NO: 124891 - protein, 43 aa, Oryza sativa
  Clone ID: PAT_MRT4530_27588C.1.pep
FFFHKSSIAKQKFHGPFTLYSDCSTFVIKDFIPIRVLNRMANT

SEQ ID NO: 124892 - protein, 48 aa, Oryza sativa
  Clone ID: PAT_MRT4530_27589C.1.pep
SLDLKVGNREVKKRGDKLRWLAMADQDQLVLIPKRGSGFEHLFNADVD

SEQ ID NO: 124893 - protein, 195 aa, Oryza sativa
  unsure (1)..(195): unsure at all Xaa locations
  Clone ID: PAT_MRT4530_2758C.1.pep
SVKDAGGEDSPVSLNNSSGATEAERAVADIETTDDWRTPLIKFVGSEELPEDDXKHEGICGSHAAGRTLVGKAFREGFFWPTALKDAWPFSCWGLDILGPFPRGQGGXIITDNGSXFINADFQDYCIRLGVKICFASVSHPQSNEQVERANGIVXTPTTSNKETPFFLVYGSEAMSRNIANELPFKQPATNRPFA

SEQ ID NO: 124894 - protein, 523 aa, Oryza sativa
  Clone ID: PAT_MRT4530_27590C.1.pep
MVQHQYVPRKRRAERSLAPAAPAAIFNVEAEEGRAGDVPLHKRVKEELQLQPPPPSLQLWQQMDLFPNKQKKNILIELLALILGDRLKWDMHILDGSSPLGLRLRKSPSLLELIQMKLAMENTKKEDIKSRSLIASERVKASNFAADFLKIGTWECTSQYEGDLVAKCYFAKHKLVWEVLDAGLKRKIEIQWSDIIALKATCPENGIGTLDLVLARPPTFFKETDPQPRKHTLWQVASDFTGGQASIKRRHILQCQSSLLSKNFEKLIQCDQRLNYLSLQPYMIDSPVFRPKTEGSIFENPNKSKSYHGFSYLEGEHESHLSKYIDHVSPCDFPLMSKKDGMKDDIANQQQSFSRPINWGASDVDLQVDVSQELKSPHPNSLSQARSLSIDDLLSHLDDCIVEQKPAGNNPSLPISEASSNELLEKITQQLLSDSHVAPASDEKRVMARVGSLLSLLQKDAVPANLPKFEPNDSGKIGVVEVGISSALDMGIANGTNPPGISRKDSYEELLSNLFNISEDFDD

SEQ ID NO: 124895 - protein, 301 aa, Oryza sativa
  Clone ID: PAT_MRT4530_27591C.1.pep
MSMSLFPGMDLTKMDAPTLTLLGAACCVMLSMHFTVQLVSQHLFYWKNPKEQKAILIIVLMAPLYAINSFVGLLDIKGSKTFFTFLDAVKECYEALAIAKFMALMYSYLNISISKNIVPDEIKGRVLHHSFPVSLFLPRNVRLEHKTLKLLKYWTWQFVVVRPICAILMITLQLLGLYPSWVSWTFTIILNFSVSMALYALVIFYHLFAKELAPHKPLAKFLCIKGIVFFSFWQGFALEVLAAVGIIQSHHFWLDVEHIQEAIQNVLVIIEMVFFSVLQQYAYHVAPYSGADRAKFEKKNE

SEQ ID NO: 124896 - protein, 115 aa, Oryza sativa
  unsure (1)..(115): unsure at all Xaa locations
  Clone ID: PAT_MRT4530_27592C.1.pep
MGRGRGVXPXXGPXSLGYLFCGGETAPXGEGEALFIAEKETTPAPVKKAAVAAAASSSASDKMNEIPAGIQSTQANNYFRAQGQNCGNFLTDRPSTKVHAASGGGSLLGYLFGGK

SEQ ID NO: 124897 - protein, 62 aa, Oryza sativa
  Clone ID: PAT_MRT4530_27593C.1.pep
MSPLSVDYVAACTPLRWHHGEDVGTSFALLDSYHVIGVDLGQRRIGTRLREELRSKAIKDAG

SEQ ID NO: 124898 - protein, 147 aa, Oryza sativa
  unsure (1)..(147): unsure at all Xaa locations
  Clone ID: PAT_MRT4530_27594C.1.pep
GIRRKLCIRPPSGSWRNQNEKFVALKDLPKMRCPFRPVYREMLINGHSYKVFKVAGWLRSHPERTLEDYDLVHSRRLDDMAXRFWRNHQKTDRQEAIFRRRYGIICVSPPSPLRVVYDISDDEPCSPDHSLADRGERGHEGEDVIYL

SEQ ID NO: 124899 - protein, 102 aa, Oryza sativa
  Clone ID: PAT_MRT4530_27595C.1.pep
MAKPNYLDAHTHKEYSEGISLRGPLSVTREEPAHGGQCPQGRDTERWWTGLVVHRPGEDRRGRGALRRQPAFRRRTRRDRCRRGNDSRCGDGECSEDIMYTH

SEQ ID NO: 124900 - protein, 46 aa, Oryza sativa
  Clone ID: PAT_MRT4530_27596C.1.pep
FGTRSGRLGDNCTRVMVWNFELEPPQVNYPIGWLLQRNLDAVVPIT

SEQ ID NO: 124901 - protein, 120 aa, Oryza sativa
  unsure (1)..(120): unsure at all Xaa locations
  Clone ID: PAT_MRT4530_27597C.1.pep
SLQGKRKRRAVRGPEFRKSRHASRVLRRGHVSYPNGSWKEPYWLIYRNMAIIGLKGSRALSRNXIXLSPGVLSVAAIADMTWDFLWRWHGRNIPVPMAMATRVLVGSRCAIDMGAPTLGG

SEQ ID NO: 124902 - protein, 137 aa, Oryza sativa
  Clone ID: PAT_MRT4530_27598C.1.pep
MATGFGEQEEGCDDGDNEGESGGQRPRPCQARSASPPWSPHLAKIAEPSDSFASASSSSSYTSSSLSSSAKSTRRRISLRDLLLSGTANSNSAIAAGAAAAAERSSGFWHLSFWPSSRSKKTTMLALPYSCPFPPPL

SEQ ID NO: 124903 - protein, 44 aa, Oryza sativa
  Clone ID: PAT_MRT4530_27599C.1.pep
GRFFFFFFGWKALAIYKIHYPKDLSRVSILIVGSDTSLVFTLYF

SEQ ID NO: 124904 - protein, 195 aa, Oryza sativa
  unsure (1)..(195): unsure at all Xaa locations
  Clone ID: PAT_MRT4530_2759C.1.pep
YHHATRRGNDNDERARRRRXGEGTTSAAILGRRRDAAGTRLDDAEPRTKTTTGXSGTLDERGRRTRTARRRDERHDDEXRREDDDDDDDRGRRGDDEGSRRQLHGDGDDVERAAANPTTEAAPRDDEPARMNGAAERTSATTRMEAGTGDGGLRTNQRAGRGGGRRGDARETEGRPAKRRWLRRWRRRRHGRTAL

SEQ ID NO: 124905 - protein, 136 aa, Oryza sativa
  Clone ID: PAT_MRT4530_275C.1.pep
MAGEKVQMPTEAAAPSLSPAPVEGKPREAAVGEKRKATEEPAPAESDLLSDASESAAAAATIADDGGKPASEAAVAEDELPYDEWKIQRRALLDRLWEETMSKVKLPDDPNLYYDYSDDPDGLLLDYDSETDIEMD

SEQ ID NO: 124906 - protein, 119 aa, Oryza sativa
  Clone ID: PAT_MRT4530_27600C.1.pep
DAVVDALGRARQFDAAWRLVVEAAADGAATPRTFAVLARRYVAAGMTRQAVRAFDDMEAFVGREPDAAEFTTLLDTLCKYKYPKVAAEVFNKRKYKYEPNEKMYTVLIYGWCKACKLAP

SEQ ID NO: 124907 - protein, 39 aa, Oryza sativa
  Clone ID: PAT_MRT4530_27601C.1.pep
MRAPGYDPNSLCPLGGSIEYFDVDALQPWTCSRLSHIVE

SEQ ID NO: 124908 - protein, 511 aa, Oryza sativa
  Clone ID: PAT_MRT4530_27602C.1.pep
MPRHLPAAAASRRLLCTTTHLLALPPVEPSPAADELARLLLAHHNPFHPAESPLQLLSGGGVSLTGDLLVQLLLRLRGASKLALSLLHAARLHPPPAASSRAADAYDAVVDALGRARQFDAAWRLVVEAAADGAATPRTFAVLARRYVAAGMTRQAVRAFDDMEAFVGREPDAAEFTTLLDTLCKYKYPKVAAEVFNKRKYKYEPNEKMYTVLIYGWCKVNRNDMAQKFLKDMIYHGIEPNIVTYNILLNGICRHASLHPDYRFDRTVRAAEDLLKEMHQRGIEPNVTSYSVILHVYSRAHKPELCLCMFRSMKERGICPTVATYTSVIKCLASCGRLDDAESLLDEMASEGVCPSPATYNCFFKEYRGRKDVNGALQLYNKMKAPGSPATPDIHTYNILLGMFIKLNQHDTVMQVWNDMCESTVGPDLNSYTLLVHGLCDNKKWREACQFFMEMIERGFLPQKITFETLYRGLIQADMLRTWRRLKKRVDEEAAKFGEEFKPYHIKPYKR

SEQ ID NO: 124909 - protein, 240 aa, Oryza sativa
  Clone ID: PAT_MRT4530_27603C.1.pep
MAAAAPSRVSVRAAAPGQTGGFAKIRPQVVVAAAARSAGVSGRRARSVRASLFSPKPATPKDARPAKVQEMFVYEINERDRESPAYLRLSAKQTENALGDLVPFTNKLYSGSLDKRLGISAGICILIQHVPERNGDRYEAIYSFYFGDYGHISVQGPYLTYEESYLAVTGGSGVFEGAYGQVKLNQIVFPFKIFYTFYLKGIPDLPRELLCTPVPPSPTVEPTPAAKATEPHACLNNFTN

SEQ ID NO: 124910 - protein, 68 aa, Oryza sativa
  Clone ID: PAT_MRT4530_27604C.1.pep
INLSYQAPASTPDLGAMPNNSMIPPSEASQLHDAGASPMFLDNTFATTTSFTNLVEPDDSSAGLGMKQ

SEQ ID NO: 124911 - protein, 411 aa, Oryza sativa
  Clone ID: PAT_MRT4530_27605C.1.pep
MRARMHRAPAPPMLPPHLPRLPRLRAIPTKRPTTDAVATNHSHITSVFKVNPPAVVGGGGDDDGDTPVPLPQHLARLPSKHCMSFVPVRSRRHAPWIVGVGGNTGIRDYGPETIVFDTNACKVVSGPKLLSTKLCPILVPMGERIYALAGMPCVTGDINFVPWFEVLDLSMARVIDNASGCCLLDCEWKPLPRPPFFPWDLTPTDYIFPPVDTVKSHVAVGSYILLSITGHGQKGTHMFDTETQQWAKLDDKDLPFIGRAIPLQGTLLFLGSSNTSDEITAYKIDVSVSSVASPSTITAGHMYSLSIVEIQMLTYLEDEEEIVTGCKLISFDYPAGNPGLCSLNWVNNDPHISFDFPQHVGELVTIRAYSNVDYLESTRALVISNQWKQVYSIYDPLRRLSSPCLAGVISL

SEQ ID NO: 124912 - protein, 43 aa, Oryza sativa
  Clone ID: PAT_MRT4530_27606C.1.pep
SSVPGDRIKVKFWVDDQRYLRLTVEYLLQQKLLLENQVVAQLR

SEQ ID NO: 124913 - protein, 244 aa, Oryza sativa
  unsure (1)..(244): unsure at all Xaa locations
  Clone ID: PAT_MRT4530_27607C.1.pep
QRSVRYCLKAGYAVSFLHRRGRAQAASTFLPDDXFLAFLDFDSNSEVQVTESHAPAAKKATADSCMSIEGGKLLXLPFTRXVNEXQLLNMVTPSISSAGPLGMFYLAAAVSDFYVPWDSMAKHKIQSGGGPLDMRLSQVPKMLSVLRNQWAPLAFCISFKLETDSDILIQKADMALNKYKMNIVVANLLATYKEEVIIVTDKERSTIRKMNKDEDLEMQIIKILSQNHSKYICGSTNGCVQSPY

SEQ ID NO: 124914 - protein, 113 aa, Oryza sativa
  unsure (1)..(113): unsure at all Xaa locations
  Clone ID: PAT_MRT4530_27608C.1.pep
RNIIFSPFYKVLMADFFMAXQLTSQIPLLRHMEFAACYFMAASFRTHAYEKCTSSPQYTHLAYVIAFLPYYWRAMQCLRRYLEEGHDINQLANAGKYVSAMVAAAVRFKYAAT

SEQ ID NO: 124915 - protein, 140 aa, Oryza sativa
  unsure (1)..(140): unsure at all Xaa locations
  Clone ID: PAT_MRT4530_27609C.1.pep
DVAWHRXXRKXMXXXLEDGTHLLFIYLFILFIYFYFLFFLFFFFIFFFFFFFFFLFFLGKKRKGRGGPPFIFKGLKKQTPRGKKKNGGNPGGGDRNPRVRGQKKRAQRGPKGPNREKTQGTGPPGEPGKKRKARGGPPLF

SEQ ID NO: 124916 - protein, 40 aa, Oryza sativa
  unsure (1)..(40): unsure at all Xaa locations
  Clone ID: PAT_MRT4530_2760C.1.pep
KILYLFTHIGPYCGFSGCFQQEGNLXHVYLASLVHRVLTP

SEQ ID NO: 124917 - protein, 288 aa, Oryza sativa
  unsure (1)..(288): unsure at all Xaa locations
  Clone ID: PAT_MRT4530_27610C.1.pep
MEDADAPRRLLNDADLDLVDDRERQAYYMLSNREYAHTREYSPKLLKKIGMETDFCAIWKAVGWQRFTVVDEPGDLRPIRGDELIILFAMVRKIKVAPVKCMIRQWLESIRFFAPVECTSLITRIAKGLGVINDQIAYILAACPCIDKNYLVQGHILKHGVDGSLIYFFPGCTNEIPLPNAGYHLYNFHKLTIPLHIIEESRVGGTYRETRNVARKEREGSSSSTPXQMYEAGWEATWDAPGWTQAPRHNIGVSSWTSASEDRWRAPHDIQWXDNQPSRLSSMPPSPS

SEQ ID NO: 124918 - protein, 72 aa, Oryza sativa
  Clone ID: PAT_MRT4530_27611C.1.pep
ILITQNLTLIPIITFLKTEKTIYLIIFSYYKTISLINQLFTFSFFPFYTKSTPSIYITIKISFSSLLPFINY

SEQ ID NO: 124919 - protein, 256 aa, Oryza sativa
  unsure (1)..(256): unsure at all Xaa locations
  Clone ID: PAT_MRT4530_27612C.1.pep
DAFDKSVAHLVKKLGGAAGNGKVQVKHPCLQTGYKEDYICSYCHPLKLDGSPSVGGKTTGKEKQGMAVELIGMPQWNECSALAKLTVNLSEWSNASSVDCNTKPCALPSTFPQPHGQFYAMSGFYVVFKFFNLTADATLIDVLNRGQEFCEKTWKVAKSSVPPQPFIEQYCFRAPYITSLLREGLQIKDNQVIIDSGSITWTLGVALLEAGQVLSTRIDIQGYRILHREINPNILNXLFLISIGLVICAILCVSNS

SEQ ID NO: 124920 - protein, 450 aa, Oryza sativa
  Clone ID: PAT_MRT4530_27613C.1.pep
MTGVVVVSPSGCKGGGGGGGGVGKKRGSGEEERERERQQLSVLEVLLAAVRRSVVACRVEREGGGGWGEEGEAEAEEGDAAAEVGEMEIGWPTDVRHVAHVTFDRFHGFLGLPVEFEVEMPCRVPSASASVFGVSAESMQCTYDGKGNSVPTILLHMQERLYAQGGLKAEGIFRINPENDQEEHVRDQLNKGVVPEDIDVHCLASLIKAWFRELPEGVLDSLSPEQVLQCNSEGEFLELVTLLRPTQAALLNWAVELMADVVEEEELNKMNARNIAMVFAPNMTQMSDPLTALMHAVQVMNFLKTLILRTLRERDDAASGDYTPYSSPASSSQQNDAEYYGSERDMDRSCEMSDMHSEISRSGRQVDFLVRYNTCFDSEQEGVDPLSDVEEGFLRQLEHDLEADKREESAKKQHEISSEIMAVKDVQAELKVEAKAAGNTQKEEGAGSLQ

SEQ ID NO: 124921 - protein, 112 aa, Oryza sativa
  unsure (1)..(112): unsure at all Xaa locations
  Clone ID: PAT_MRT4530_27614C.1.pep
ACRIPHPGPSPPSRRLTSPWPAPPPPPRPRRGRCSAARPAPSASPRPGRGAVPCCPPPPXPRRVPPPPSPCSHALTSRAPLGCAPVLPSAAAAPGHVPPRPSSRIRGRKHML

SEQ ID NO: 124922 - protein, 339 aa, Oryza sativa
  Clone ID: PAT_MRT4530_27615C.1.pep
MAATAGDAAAAAAAACPAYPWPSDGAQRGRKVFMQSDCTACHGMFSSNAGLISDDDSAWEPKVAEIVVVEEAHQPVAAAATLRGGAYYPAPDLTFIAKGLRGNNLYSGGGASEAARMLADAAAACQELKKRALASPGENGFATIPCRIRIAGRGPWIRYHPRQHDAIHNRSSSLSAERGVGPLRCFTVDHTRPLDQVASLLAAALSSESMAATSGDGGAAACPAYPWPNDGVQRGRKVFMQSDCAACHTSLPYAGLSDDGARARAAAVEPKAAEIVVVEEARQPAAETVNGGANSPDLTLITKGLRGNLYATAAPRMLAGAAAACQELKKRAMASPVWL

SEQ ID NO: 124923 - protein, 283 aa, Oryza sativa
  unsure (1)..(283): unsure at all Xaa locations
  Clone ID: PAT_MRT4530_27616C.1.pep
MPCSQRQSGYVHARRLRPRRGRRRLSRSISCSRSSRAWTPRPPSAAPPPASPSAAPSSTRPSAASASPSAPPPTVPASTLPSSSPSPTSSLAWTIHPCSSSRTHSRRPAALLLRSPSPASSSATXRWRRATSSSSSGRDQSASVHSAPFLVSSCASATASPATPPASPCRTSSTTTRRPSSPPAAPAAATSCSSWTRGCKPRRSRRRTASGEPSAPWKNYLTRSHRHSTPIAHWSSAAATPCIGCARKGWAGSPPTSTSSPWTLAPTAVVRRGSSCRRTASVG

SEQ ID NO: 124924 - protein, 60 aa, Oryza sativa
  Clone ID: PAT_MRT4530_27617C.1.pep
RTNLFVLTVHYMRTSQILEQKSLSLTKSKIKGSRFLSTKGGGGDKLGIYMTKTCLKDLVL

SEQ ID NO: 124925 - protein, 59 aa, Oryza sativa
  unsure (1)..(59): unsure at all Xaa locations
  Clone ID: PAT_MRT4530_27618C.1.pep
MDRVQXLVLLGXPILLFCXDLVTLFGPEQXTTPXPXLPPHXSXDAGXXAVXPDXIGXDA

SEQ ID NO: 124926 - protein, 259 aa, Oryza sativa
  unsure (1)..(259): unsure at all Xaa locations
  Clone ID: PAT_MRT4530_27619C.1.pep
MSLLSKLRLVTVDVTGTLIAYKGQLGDYYCMAAKSAGMPCPDYKRMHEGFKAAYTEMTVRHPCFGHASNMPNIDWWKMCVKDSFIRAGYEYDDATFEKIFRRIYSTFGSSAPYSVFPDAQQFLRWLRNNGCTVGIVSNAEYRYKDVVLPALGLNEGSEWDFGVFSGIVGVEKPDRRMYEAALEMAGGVAAAEALHIGDSMRKDYAPARRAGMHALLLDRLPTXEAEGWCASRAAVLPDLRPLPGIASPPPQPHTKMAAR

SEQ ID NO: 124927 - protein, 92 aa, Oryza sativa
  Clone ID: PAT_MRT4530_2761C.1.pep
MTLRWDSPHLPPLPPGVSASWEHGCALTIWGSGCPGPRGQGKRNPTPPSGEIRRRADTSPSGPTSPKVPGHVGDCVCLKPLVMILPVPYHRQ

SEQ ID NO: 124928 - protein, 75 aa, Oryza sativa
  Clone ID: PAT_MRT4530_27620C.1.pep
PPVSFNDSGLQILFSGKTLRGLPEEPPKTAPLGKGFFSNFVFFIFPPQKKGSGFNPHTPPPKAKVVPQNLIKALK

SEQ ID NO: 124929 - protein, 63 aa, Oryza sativa
  unsure (1)..(63): unsure at all Xaa locations
  Clone ID: PAT_MRT4530_27621C.1.pep
RXRPIASEKKKKKKKKKEKGKKKKKKKKKKKKKREKKRGGPKKGGRVLREPGGHPRGCAKRNP

SEQ ID NO: 124930 - protein, 38 aa, Oryza sativa
  Clone ID: PAT_MRT4530_27622C.1.pep
RIKKKKKKKKKKKKKKKKKKKKKKKKKKKGRPFWGALF

SEQ ID NO: 124931 - protein, 645 aa, Oryza sativa
  Clone ID: PAT_MRT4530_27623C.1.pep
MAREAAAPGRTAGKASAPSGHHHAGARGGGGDLWSEIMASGGGGGAARIGVVYGRRRAAQEASRPRGAVDVRGVAAGEKRASFEPSKRTSWNRSLSIRGRESILFAPGTKIQPQQNPCRAQKRPPKPGNRVKRTFGGPPDLKKEKAYFEEVDAFELMEESPSPKNFGTWARGMEQNYIVHDLSAILERWKISKLAKFAASRPLFDIMETPVVPSVRSDCSLHDSCRTPEKDRGSRTNPMRRTIPSGLSDKTSIFTSFSELKIKEEPDDSSIPSLSAEAMTAFAQLLLVCNQSAPITLAEAFSTYWLYSSFNEDVHGNSTPGSIVKLGEGTFGEAFRAGSTVCKVVPFDGTSLVNGETQKKAEEVLEEVLLCLTLNNLRADRGDNVKENSCHGFIETKDFWVCQGPYDPSLICAWEDWDAKCCSENDHPNDFSNEQCYIVFVQADGGRDLEKFALLDYNEACSLLVQVTAALAVAESACEFEHRDLHWGNILLDRDETQDKNHTMGFTLQGKNMCTRTFGLNVSIIDFTLSRINTGDAILFLDLSTDPALFEGPKRDKQAETYRKMKQITNDYWEGSFPKTNVVWLIYLVDIVLQKRYSTFTSKDDRELRAFKKRLAKYDSAKDCLTDSFFSDLLLSDEDAQPSTA

SEQ ID NO: 124932 - protein, 68 aa, Oryza sativa
  Clone ID: PAT_MRT4530_27624C.1.pep
NLMGICTIFPQKRETRPPDRTPLLQSDPGAKEKPPMGRGNPPLGKHPPGQITWGGPATQRRLRRPAVK

SEQ ID NO: 124933 - protein, 105 aa, Oryza sativa
  Clone ID: PAT_MRT4530_27625C.1.pep
MTSPPTKAPPASAAHTWGSGGAQDFAIARVRVHVGRLAHLAVISAVDRRAAMAKARKQQPQGPFAGGAAAGERSFLGFQYHHHHRGGSVAPAYGDDDDLPDLAGS

SEQ ID NO: 124934 - protein, 130 aa, Oryza sativa
  unsure (1)..(130): unsure at all Xaa locations
  Clone ID: PAT_MRT4530_27626C.1.pep
TRKELEDAISKKEXAAYRHVPFYDPGETSQTEQLDSPYLFDSGVLNELSEPGIPELENLAVNIQDLGKGKVDKERQNQTNGQAELGDNFWAELLVEDFTGKEEQSELDGKIDGIDELAQQLGYLSSTSPK

SEQ ID NO: 124935 - protein, 51 aa, Oryza sativa
  Clone ID: PAT_MRT4530_27627C.1.pep
HAPPPKLGFFKRGRLFFFFFYIKQRYRASIYAVKALTQDDPDSKHATHGYD

SEQ ID NO: 124936 - protein, 288 aa, Oryza sativa
  Clone ID: PAT_MRT4530_27628C.1.pep
MVHKANDKWRMCVDFTDLNKECPKDHFHLPLIDQLVDLTALWGPSIVAISYLQPATGNTIPCTPAPPLCRLPRVTRNCYTRSPPMGGASRNSAAATSNHSASPTHCQDSFFLTEVMVAPVRLSPPTENHRTPVIVVDLRAPPNSSDRRPSPCMPREPPTPCIPRLLPQRLPPLVTGILWDPHAIPSYKVRMGRHRVVVREDALKMMTVTRSRQSLRKMTPKSLCCRTVEDETSCRVCQTWGQLGTNARNGVANTARARGSETTNPERRRWQLGDAAAMLEVNEEEPDG

SEQ ID NO: 124937 - protein, 55 aa, Oryza sativa
  Clone ID: PAT_MRT4530_27629C.1.pep
FDYVLSFSSRWHQLLCIHSTQEYVQIYCLDVRCCFDVPKLTDLLPPFYIINLHIV

SEQ ID NO: 124938 - protein, 38 aa, Oryza sativa
  Clone ID: PAT_MRT4530_2762C.1.pep
HASALKSHTYCYRGQLSFDRLSLSNKNTQCEQHLHQQG

SEQ ID NO: 124939 - protein, 69 aa, Oryza sativa
  Clone ID: PAT_MRT4530_27630C.1.pep
PSWNQQWLLARSSGLPSRSTAVPRPGRAPLCIGRAEPAPLPTLMLFAHAPPCVVTIPQTAPWFCGSLRT

SEQ ID NO: 124940 - protein, 38 aa, Oryza sativa
  Clone ID: PAT_MRT4530_27631C.1.pep
LHMHDRIMDTDSIKLGFPINHSRVHNERAPSNYQSMPS

SEQ ID NO: 124941 - protein, 323 aa, Oryza sativa
  Clone ID: PAT_MRT4530_27632C.1.pep
MADEHEWWNSPCSARTGDDEAACSTADADESAVGSTPMSFGHGGQPASLSDAAASSSSSSFLLAGQHMDYWTQDFMGGRAAAAATASFDTLLQLQLQGGDAASRRLLLGDHAAAPPRHLVVPGAPYGGGGGDDTAAPPRGLSPTPYEAADNLQQQQSFPGGHHVVSNTDRLHDHHQDAGSPSPATRSSPGSPAAAKKPRIEAPSPMPTFKVRKEKLGDRITALQQLVSPFGKTDTASVLHEAIEYIKFLHDQVASLSSPYLRCGRPVQLQHQQGSHKVNGNCEGKQLDLRSRGLCLVPVASTYTVASETATEFWHPTFGGTFR

SEQ ID NO: 124942 - protein, 229 aa, Oryza sativa
  Clone ID: PAT_MRT4530_27633C.1.pep
MAAAARATARVGLALLLAVVGVGAQDYDFFFLVLQWPGSYCDTKQSCCYPRSGKPAADFGIHGLWPNRDDGSYPQNCDPDSEFDPSKVSDLLGSMRSEWPTLACPSNDGIRFWAHEWEKHGTCAAAALGDEHGYFEAALRLRSRLPVLAALRDGGVSPDGGYYTLSQIKGAIQRGVGAEPFVECNRDESGNSQLYQLYFCVDAAGERFVDCPASPGGRPCGNRIEFPAF

SEQ ID NO: 124943 - protein, 139 aa, Oryza sativa
  Clone ID: PAT_MRT4530_27634C.1.pep
MALGGRAVPECLPSSSPGRHELRGGVVGELRPVRIRWQGGNSALVGADQRAARPAASSVCCEGRGRDEPRGGAVLSPSRWCHYNLRRAGYVIRVNGVHEANDDRLWDAKHGSGLWDLVEGVRDLTVRLTTIQVHVHGRE

SEQ ID NO: 124944 - protein, 80 aa, Oryza sativa
  Clone ID: PAT_MRT4530_27635C.1.pep
FFSQSMCPLEALMLSVDQIQVHFSITPKGPEKKLLLAGSSAVLNGLLPIFNQILCLKLDHPNTHLCFEKVASRCPHGLGS

SEQ ID NO: 124945 - protein, 86 aa, Oryza sativa
  Clone ID: PAT_MRT4530_27636C.1.pep
LAVSQFHRGWSLFSEQQLGLGIPSLPCRMQVHVRLELLHGQPVEGILILLHVLQAALLQVISNIVSHATDIIYDGIVRLRTSNKWS

SEQ ID NO: 124946 - protein, 113 aa, Oryza sativa
  unsure (1)..(113): unsure at all Xaa locations
  Clone ID: PAT_MRT4530_27637C.1.pep
KSPPDMARPRHGLGTAQXYRASTARVAFRAVPCRPTSPYSCTGPGCAGPSCHAGPTVPGQPSVSVGRPRNDPLVGPGQHGPXPSRAIPCLGRTKISSLGPGRRASGLMAIYRA

SEQ ID NO: 124947 - protein, 442 aa, Oryza sativa
  Clone ID: PAT_MRT4530_27638C.1.pep
MEGGRGGKRWRFATPNLAVAAAGERSIQRYLLQLHACLDENGPRPVIPLSHGDPSSSACFRTAPEAEEAVAAAVRSGDYNGYSSPATSLPARRSAIAEYLSCDLPYKLCTDDIFLTSGGTQAIEIVMSVFGQPGANILLPKPGYPKHEAHAVFHRMEVRLYDLVPERGWEINVEAVEALADENTVAIVITNPNNPCGNVYTYEHLSKIADTASKFGLLVIADEVYGHLVYGSTPFVPMGVFGETVPVLTLGAISKRWVVPGWRFGWIAICDPKGILKETKVVDSLRSFRNLTTGPATFIQGAIPHIMKNTNDEFFRKTLELLKETAEICFGEIKEIKCITCPHKPEGSFFMMVKLDISQLSDICDDIDFCSKLVKEESVVLLPGRALGMENWLRITFALDPPRLKQGLERVKSFCRRHQSHANMLNISASAKVEPHFGMSKS

SEQ ID NO: 124948 - protein, 42 aa, Oryza sativa
  unsure (1)..(42): unsure at all Xaa locations
  Clone ID: PAT_MRT4530_27639C.1.pep
APTRXGLCKERVVAPCFSLASKEPGAMAFGAFLKVFFLSKES

SEQ ID NO: 124949 - protein, 104 aa, Oryza sativa
  Clone ID: PAT_MRT4530_2763C.1.pep
MGQGVRQTASRHLTRDLTDFLKGSGCLGPRGRGKRNPTPPSGEIRRRADTSPSGPTSPKVPGHVGDCVCLKPLTATPLEQRANLGEQIGLARRYGNAASVGERN

SEQ ID NO: 124950 - protein, 205 aa, Oryza sativa
  unsure (1)..(205): unsure at all Xaa locations
  Clone ID: PAT_MRT4530_27640C.1.pep
ADQVVVEGRDGLLGWRDLARCHAGELSVAVVQGNHVLEDQCRVESGPPPLAATCIGVFDGHAGPDAARFACDHLLPNLREAASGPEGVTADAIRDAFLATEEGFLAVVSRMWEAQPDMATVGTCCLVGVVHQRTLFVANLGDSRAVLGKKVGRAGQITAEQLSSEHNANEEDVRQELMAQHPDDPQIGALKHXVWRVKGIIQVSR

SEQ ID NO: 124951 - protein, 977 aa, Oryza sativa
  Clone ID: PAT_MRT4530_27641C.1.pep
MLGALLRLLSACGGVWPTSPAPPARSSSSSSAAAAADQAAAEGRDGLLWWRDLARCHAGELSVAVVQGNHVLEDQCRVESGPPPLAATCIGVFDGHAGPDAARFACDHLLPNLRGEHRPPSPFLPAAAPPETRDLGLIRAEAASGPEGVTADAIRDAFLATEEGFLAVVSRMWEAQPDMATVGTCCLVGVVHQRTLFVANLGDSRAVLGKKVGRAGQITAEQLSSEHNANEEDVRQELMAQHPDDPQIVALKHGVWRVKGIIQVSRSLGDAYLKHSQYNTEQIKPKFRLPEPFSRPILSANPSIIARCLQPSDCFIIFASDGLWEHLSNQQAVEIVHNHQRAGSARRLIKAALHEAARKREMRYSDLMKIDKKFSPQTNRINVHIPEAGTLPRVEGALLRIIIVKYTVGITTCEGSMDSAAASADGGAFLEFVDYAISMLSSSSSGGNGDESPGAGPAPARPPWGWAVAQVLKSCCAYSSGVTAAILLSDLFQSWTEQSKSLTAKRKVELTNLLKTRNRRRRLPNTITIDSIHEKNFLSPKSVLEAVVIDVFVIPGTNIYMLTLGDMWSTSTIDLYLHRRYYNYIGQHDVLKKGREVMLTGCCLRTAMEGSGHARILPTEYMVMLLDEEEDEDAMLLAAQFCMYSFSSMMLDENRNNISYSFYARIEKIESLEPFGSTERKQIVLVDNDDAKIKFVLWGEQVLLANLFSVGSMLALHRPFIANYVHNNHEESQELCLEYGSATQVYLVPIAQQEEQVLLTPTQIRSQGSRLSCVPSDHMASQVTLPRDLHGSVDFSKYPFRVYVSDLHDKMVGVSLFGMVTSVCKASTSGTYFYLEIEDATGVVLMKLNFIGLWSLGRVGVGHMVYMSGLTCTLSSTNKLEVAWTEKEPGSLFVNISLLPALLNSTCLHNLSLLSDLPHSTNRTHICHVRLDHIDVNSLKNENFTVAIANTSQRIEAYIEGEKFLPVWEITRAQKCE

SEQ ID NO: 124952 - protein, 1024 aa, Oryza sativa
  Clone ID: PAT_MRT4530_27642C.1.pep
MLSACGGVWPTSPAPPARSSSSSSAAAAADQAAAEGRDGLLWWRDLARSHAGELSVAVVQGNHVLEDQCRVESGPPPLAATCIGVFDGHAGPDAARFACDHLLPNLRGEHRPPSPFLPAAAPPETRDLGLIRAEAASGPEGVTADAIRDAFLATEEGFLAVVSRMWEAQPDMATVGTCCLVGVVHQRTLFVANLGDSRAVLGKKVGRAGQITAEQLSSEHNANEEDVRQELMAQHPDDPQIVALKHGVWRVKGIIQVSRSLGDAYLKHSQYNTEQIKPKFRLPEPFSRPILSANPSIIARCLQPSDCFIIFASDGLWEHLSNQQAVEIVHNHQRAGSARRLIKAALHEAARKREMRYSDLMKIDKKFSPQTNRINVHIPEAGTLPRVEGALLRIIIVKYTVGITTCEGSMDSAAASADGGAFLEFVDYAISMLSSSSSGGNGDESPGAGPAPARPPWGWAVAQVLKSCCAYSSGVTAAILLSDLFQSWTEQSKSLTAKRKVELTNLLKTRNRRRRLPNTITIDSIHEKNFLSPKSVLEAVVIDVFVIPGTNIYMLTLGDMWSTSTIDLYLHRRYYNYIGQHDVLKKGREVMLTGCCLRTAMEGSGHARILPTEYMVMLLDEEEDEDAMLLAAQFCMYSFSSMMLDENRNNISYSFYARIEKIESLEPFGSTERKQIVLVDNDDAKIKFVLWGEQVLLANLFSVGSMLALHRPFIANYVHNNHEESQELCLEYGSATQVYLVPIAQQEEQVLLTPTQIRSQGSRLSCVPSDHMASQVTLPRDLHGSVDFSKYPFRVYVSDLHDKMVGVSLFGMVTSVCKASTSGTYFYLEIEDATGVVLMKLNFIGLWSLGRVGVGHMVYMSGLTCTLSSTNKLEVAWTEKEPGSLFVNISLLPALLNSTCLHNLSLLSDLPHSTNRTHICHVRLDHIDVNSLKVLLFHNLCGCVVSDQSGGLQCSFYDSEKVFAWCIGQTAVEFLQISPDEYMELPENENFTVAIANTSQRIEAYIEGEKFLPVWEITRAQKCE

SEQ ID NO: 124953 - protein, 55 aa, Oryza sativa
  Clone ID: PAT_MRT4530_27643C.1.pep
FNCLWLRIPLVGAPCQTYCFFQKKKKKKKKKKKKKKKKKKKKKKKKKKKKKKKKK

SEQ ID NO: 124954 - protein, 66 aa, Oryza sativa
  unsure (1)..(66): unsure at all Xaa locations
  Clone ID: PAT_MRT4530_27644C.1.pep
AFLDNDLSKDLFVPFRLPFNDSPEETVVPRRRWRALGLFXTLLHDKVXNVLSNLILNVKYARVVFV

SEQ ID NO: 124955 - protein, 41 aa, Oryza sativa
  Clone ID: PAT_MRT4530_27645C.1.pep
RLLQALSTLFIEPSLNLMTENYSTQPLIVGVLIYRLIRSTT

SEQ ID NO: 124956 - protein, 85 aa, Oryza sativa
  unsure (1)..(85): unsure at all Xaa locations
  Clone ID: PAT_MRT4530_27646C.1.pep
AASYSCSPLLGPSETLNDPNPTQHYPNQSQWMDVVFSQANDDAKYLFDQYNQRPTXRLENRIHVGYYXSQETLFSLPSDASKVVA

SEQ ID NO: 124957 - protein, 90 aa, Oryza sativa
  unsure (1)..(90): unsure at all Xaa locations
  Clone ID: PAT_MRT4530_27647C.1.pep
AAVGRGGFFFFXAEGLWDGCFRFLKTYPMAKFYLSKMGVAHTGSPYRYLXDKNWCRRGNHFCLQRCKHCKLTFPPFYKKKTLGFFYGAPR

SEQ ID NO: 124958 - protein, 110 aa, Oryza sativa
  Clone ID: PAT_MRT4530_27648C.1.pep
GEPGPELRFKTPPKGGGRPNPPELAQEPRLIQPNRGGSYFTNPTRTYKRANTPPPFFLFGGSATQDDWYWERGKGNNPDLGGGAPIGEDHRVGGAPAGGTHLFGGLGDVH

SEQ ID NO: 124959 - protein, 259 aa, Oryza sativa
  Clone ID: PAT_MRT4530_27649C.1.pep
MHGGGARALAAAFVLALLAAAPAASEVVCSGRRYAANSSFDASLQQVARTLPGNASSSPLLFATLAVAGEAYALALCQGGTSAGSCNYCVAQTMRDGEHACAGDADVAMYDDICTVRFSDRDFLAATTNSPEKLVVAGSQSQKLVPSAAGRFYRLVGELLDATADYAVANSTARFATGDVGVGGYFDGEPFSKIYALAQCTPDLTPAQCRACLASAMEEMTRQVFAASSPGGKVIGERCGLRFEVFSFYTVADAWADAW

SEQ ID NO: 124960 - protein, 1243 aa, Oryza sativa
  Clone ID: PAT_MRT4530_2764C.1.pep
MTTAYGAGVYRSEVASVPQYPLYPVYGCPLSTVARQVRELGAQGSTTMTSSFVDNGVNTGPIQGVPTSTMLVWTQVSEIVFPVYTTVPISAGPSMTGNENAVAITSNDPVSKDPPAIAENRTSTSYESEKVPSAAKPCPSDKNHELTRTTSEQFVANFQGTYKRHAIEDDLHTLTQNPGESLRDYVRRFNECRNTIPDITDASVIRAFKTSVRDRYTTQELATRRITTTRRFFEVVDRCAHADDALRRKNDKPKAGGEKKPAKDEPETSEKKSGKSGKRKAQAEVLASEYERPPKHPDLQGNDTKRIWCPIHKLGRHSLEDCLIFKKSLEKQLALEKGKRVRVVEKAAEATTQDSDSAYPDFDLHVSHIFGGVAPKMKCSKQKIEFSDEDHPKVAVILGRYPIVVEPTIRNIKVVRVLIDGSSSINLLFASTLDAKGIPRSKLTPTDQPFHGITPQSSSKPLGKITLPVTFGQMSNFQTEQITFDVVEFDTAYNAIIGRTALAKFMAASHYAYQVLKMPGPKGTITIQGNAKLAVHCDKRSLDMVEHTPSPPATAEPPKKKLALITFLRDNADIFAWQPSDMPGVPKEVIEHKLMVRPDAKPVKQKLRRFAPDRKHAIREELDKLLKVSFIKEVLHPEWLANPVMVRKANGKWRMCVGFTDLNKACPKDHFPLPRIDQLVDSTAGWALSDQLGNNVEAYVDDIVVKTKTDDSLIDDLRETFDNLRRYRLMLNPEKCTFGVPSGKLLGFLVSGRGIEANPEKIKAIENMKSPTRLKEEAEEAFIALKRYLSNPPVLVAPQPNEDLFLYIAATPYSVSTVIVVKRENVQRPVYYVSEALHDAKTRYPQIQKLLYVVIMTSRKLRHYFEAHRVTVVSSFPLGEVMRNKDVVGRIAKWVVELSQFDVHFVPRTAIKSHVLADFVADWTTPENRLDSQTDNETWTMAFDGALNSQGAGAGFILTSPSGDQFKYAIHLNFRATNNTAVCEGLLAGIRAAAALGVKRLIVKGDSELVANQVHKDYKCSSPELSKYLAEVRKLKNRFDGIEVRHVYRKDNIEPDNLARRASRREPLEPGTFLDILTKPSVKEANGEDSLVAPDISSGATEAERAVADIETTDDWRTPLIKFISSDELPKDDAEVEKITRQAKISCIIGNDPYKKAPNRSNGQVERANGIVQQGIKTRVYDRLISHDKKWVEELPSVLWAVRTTPTTSNKETPFFLMYDSEAMLPTELRHQSTRVHKYSDED

SEQ ID NO: 124961 - protein, 54 aa, Oryza sativa
  Clone ID: PAT_MRT4530_27650C.1.pep
LSSLIHTQSMLGIWTGQGGIIDCTHRGAVLRTCIFNCNVYGRLIFEVNCRFFLI

SEQ ID NO: 124962 - protein, 77 aa, Oryza sativa
  Clone ID: PAT_MRT4530_27651C.1.pep
MLSVPPLGAVCPCDSVSPRIGWRIGYAGFSTTPLGDGCHCAVPPPGEKDADKARAETTEGASYKWRMVIAYDGTKFK

SEQ ID NO: 124963 - protein, 487 aa, Oryza sativa
  Clone ID: PAT_MRT4530_27652C.1.pep
MSRVASARVWPFPCWRKRKISPSRLLRSLRHLAAEQGRGRGADLHPTSRAGEGRGILEIMESSSSDVQMSHCAEDLNSESTIEIKIKTLDSQTYNLRVNKRVPVPLLKEKIATVTGILSEQQRLICRGRVLKDDELLSAYHVEDGHTLHLVVRQPGQSATSGNAGNEGTTSNPARRRGPTMTRSIVLEAINVGQGSELSVAQLLQSLLRAPNSTQVSSGPAPSDAPPSEGTHSSTQNDRSANASPANSSEAFAGVTAGAPFSVESGVRLVPHRTVVAVPAGISHPPSMSSSGVGIIYPLFARIQQRAYTNAQVAHSANQIPNPQTSQYHEAGTLGSPVDINAENGTQTSPGEQNGQGPFSQLMDSIPWIASLFSGENSRVNGTNQHAPASAEQVDGRNHGAPEVSGVSDEGLRFASLVRQIMPFISQVESHHQSASAVSSSTPSQYWQAAHGNLNTARAGPSHSRSSHQHNRDPVDGPNSKRQRTSE

SEQ ID NO: 124964 - protein, 215 aa, Oryza sativa
  unsure (1)..(215): unsure at all Xaa locations
  Clone ID: PAT_MRT4530_27653C.1.pep
MAGQSDPHLSIFSPSEVEFVAEDEIVEIVPNIRMEALNMICGDFGPFFPQIASKVPLWLAVALKKRGKCTIRTPDWMTVDRSSLTQVLDAERESPKEFQPLPFHYIEISKLLFDHALHDISEXHTLVRSLIEDIRDVRFHHAETVLNSISGRTHAVKLKNLSAMEVNIVRPFMVRTLQAXFYKHDSPQMIQQADNTGSRPTPVTDRGPRRDLRRR

SEQ ID NO: 124965 - protein, 40 aa, Oryza sativa
  Clone ID: PAT_MRT4530_27654C.1.pep
MAASGCQANRARAAVATGYGEAEASSNMRQGNWNSGSRQI

SEQ ID NO: 124966 - protein, 833 aa, Oryza sativa
  unsure (1)..(833): unsure at all Xaa locations
  Clone ID: PAT_MRT4530_27655C.1.pep
SEGCDSVSGPCKWEGITCSSDGTVTDVLLAAKGLQGHISPLLGNLTGLLHLNLSHNLLNGNLDSIGQLSTLEELRLDNNNMSGELPSAVGNCTNLRYLSLRNNKFVGDLSKVNFTRLNLRIADFSINNFTGTVPESIYSCSNLIALRLAFNKFHGQLSPRMGNLKSMSFFSIADNHLTNITNALQILKSCKNLTAVLIGTNFKGETISKSETIDGFENLRVLTIDSCGLVGQIPTWISKLKKLEVLDLSNNMLSGKIPFWISDLPVLFYLDITNNXLSGVIPPSLMEMRLLTSEQAMAELYPGHLPLMFTLTPNNGAASRQGRGYFQMSGVATTLNFSDNGITGAIPPEIVKLKTLQVLDVSYNNLSGGIPPELSSLTRLQIVNLRWNRLTGTIPQALKELNFLAVFNVAYNDLEGPIPTGGQFDAFPPRDFTGNPKLCGEVISVPCGDRFDATDTTSSKVVGKKALVAIVLGVCVGLVALVVFLGCVVIAFRRVVSNGAVRDGGKCVESTLFDSMSEMYGDSSKDTILFMSEAAGEAASGVTFVDILKATNNFSAGNIIGSGGYGLVFLAELQDGTRLAVKKLNGDMCLVEREFQAEVEALSATRHQNLVPLLGFCIRGRLRLLNYPYMANGSLHDWLHERRAGAGRGAPQRLDWRARLRIARGVLYIHDQCKPQIVHRDIKSSNILLDEAGEARVADFGLARLILPDRTHVTTELVGTLGYIPPEYGQALAATLRGDVYSFGVVLLELLTGRRPVEALPHGQQRELVRWVLQMRSQGRHGEVLDQRLRGKGDEAQMLYVLDLACLCVDSTPLSRPAIQDIVSWLDNVEFIG

SEQ ID NO: 124967 - protein, 256 aa, Oryza sativa
  unsure (1)..(256): unsure at all Xaa locations
  Clone ID: PAT_MRT4530_27656C.1.pep
MTTKTKPGMAERLLLPLSMVLVQLFTIGALLLAKLSFNSGMAPFVPLAYRNLIGTVTMLPFAFWFERQMMKKVNYKVLGWIFFNALFGIVLAMGLHYYGLRATNAGYTVNFLNLVPVVTFIIAAIFRLEKLKLKTRSGMIKVIGTVSYPCXWVVVSLYQGQXLHLWPPLEPALAANPAAASFPSQQHAHRGSLRQLPHYAFFIVQSEQFHLSTSRLLACLMGNCYFTFFFFTYVISLFFYVFLFSFLFSTFSLLLF

SEQ ID NO: 124968 - protein, 44 aa, Oryza sativa
  Clone ID: PAT_MRT4530_27657C.1.pep
IGGMALFPNALEGAILGPLIMTVVMALKNLYTEFVLADSEETSS

SEQ ID NO: 124969 - protein, 240 aa, Oryza sativa
  Clone ID: PAT_MRT4530_27658C.1.pep
WRRKPSFRHRRRRSPPSPTTPYSTSSAASPPPTSSAPPSSATAGAAPPHAASWPRLPHSSATSSTPPTRPSRRTSSRPSPPSTPPPSSPSTPPPPPPRASPSTGPRASPSTTSTSASCSSSRRRSPPALLRRPGGRSRRTPESRSRSTPSGSRAAACTPRGTSTGTSATPAACSSSTLPRSPSPTCWRRPSWGTGTRSFESGRRRRTGGSAWRPWRTRRCSSGCAGRQAGATTAGSCRRG

SEQ ID NO: 124970 - protein, 132 aa, Oryza sativa
  Clone ID: PAT_MRT4530_27659C.1.pep
ATQARKFGCSMEFLDSLSDAPQDLQNLVITARFLTVPRWIRGLNHLAYLQITVCKLTPDDVKLLGSLHRLECLVLGLDFLPKEATLIQGQGFISQEEEEEEEEEEDEEEEENMGIWFRELLRLSVDCPVPWL

SEQ ID NO: 124971 - protein, 811 aa, Oryza sativa
  Clone ID: PAT_MRT4530_2765C.1.pep
MAAEKHDARKTTRIVPDIVSLHDVERTKSEEDTRARTETMITATTTMNAMIANSGCRAILVPDAAMTMTMTEIGAGTTMVYDERIPENPGVILGIELATRWITTTRRLFEIVDRCIHADDALRRKNDKPKTGGEKKPAKDTPESSKKKSSKSGKRKAQAEVLASEYERPPKHPDTQGNVTKRIWCPIHKSDRHSLKDCLVFQKSLEKQLALEKGKRVRVVEKAAEATTQDSDSAHPDSDLHVSHMFGGSTVYSSKREYKKVEREDCSTWQGAAQKMKWSEQKIEFSDEDHPKAAVIPGRYPIVVHKDYKCSSPELSKYLAEVRKLEKRFDGIEVRHVYRKDNIEPDDLARRASRREPLEPSTFLDVLTKPSFHSKHTKLPAQALQTIPLTWPFSCWGLDILGPFPRGQGGYKFLFVAIDKFTKWIEATLTGEIKADNAIKFIKGIFCRYGLPHRIITDNGTQFISADFQDYCIGLGVKICFASVSHPQSNGQVERANGIVLQGIKTRVYDRLMSHDKKWVEELPSVLWDVRITSTTSNKETHFFLVYGSEAMLPTELRYQSTRVQKYSDEDQEEQRNDDVNLLEEHQERVVVRAASYQQALRRYHKKRIRARTLSIDDYILRQIYKDYQEGQCQSIDWKTFSASGAIDFARLSISAGVLRERENPSRMNSRCSCGRRSHYGHGFATTPEVRVEPHLATSECFHGPMLLDFQHSPLEFGDLKLRPPVLDATITIGKRTLKILVHVVLRHIWLERKCRNDYRQLRLPALLDILDIYICTNNNKVPGIKMLKKTKVMTAHTKAVGTDKSFTKHN

SEQ ID NO: 124972 - protein, 54 aa, Oryza sativa
  Clone ID: PAT_MRT4530_27660C.1.pep
MAPSGAPPRLSLCGGNNEQLTTIVTVTVTVMVTVGGTGGWEPMAMTVGGDADKD

SEQ ID NO: 124973 - protein, 62 aa, Oryza sativa
  Clone ID: PAT_MRT4530_27661C.1.pep
GDLNVGRTCTNRRRHLNTMKNGGNSTTDLSTQSGFFVYANALRCSRKGASDAVGDRGDDPGG

SEQ ID NO: 124974 - protein, 347 aa, Oryza sativa
  Clone ID: PAT_MRT4530_27662C.1.pep
MAPAAGDDAVVPRKGAGGGGTTTPPPPPPAQQQQQQPLPPPPPQEQGLRCPRCDSPNTKFCYYNNYSLSQPRHFCKTCRRYWTKGGALRNVPVGGGCRKNKRSRSAAAASRLSLNLPTVEGIGGAAADPAAAAAARLGFLGGGTTMMMSSSTSPLGGAAAAVADFQQGGAVGMLPLPRLQSPAGGGVGHHQYVPFGEWPSGDIAGGNAVNGAAGHGAQQRLATMFLGPPGSASAAAAAAQANDGGGNGAQATASGHAAGGGGGAFMHMAGSVPSMEAAMPSATSWFMDSCSYGLPSPPPPATAAVAATTSSNLNSGGRSSGGDDNATSNCGSAIPAWGDISTFAMLP

SEQ ID NO: 124975 - protein, 46 aa, Oryza sativa
  Clone ID: PAT_MRT4530_27663C.1.pep
MSAYQTTTLLHPPRLQSYRRTLNPNIIAFVGVTKAREEGTTRVGGE

SEQ ID NO: 124976 - protein, 371 aa, Oryza sativa
  Clone ID: PAT_MRT4530_27664C.1.pep
MAPAAGDDAVVPRKGAGGGGTTTPPPPPPAQQQQQQPLPPPPPQEQGLRCPRCDSPNTKFCYYNNYSLSQPRHFCKTCRRYWTKGGALRNVPVGGGCRKNKRSRSAAAASRLSLNLPTVEGIGGAAADPAAAAAARLGFLGGGTTMMMSSSTSPLGGAAAAVADFQQGGAVGMLPLPRLQSPAGGGVGHHQYVPFGEWPSGDIAGGNAVNGGGGHGAVSSTIASSIESLSFINQDLHWKLQQQRLATMFLGPPGSASAAAAAAQANDGGGNGAQATASGHAAGGGGGAFMHMAGSVPSMEAAMPSATSWFMDSCSYGLPSPPPPATAAVAATTSSNLNSGGRSSGGDDNATSNCGSAIPAWGDISTFAMLP

SEQ ID NO: 124977 - protein, 295 aa, Oryza sativa
  unsure (1)..(295): unsure at all Xaa locations
  Clone ID: PAT_MRT4530_27665C.1.pep
MACSPPHHRIRRCPSTSSSHSAAAPPYRRIRRRPIVGSAAAPQPPPRMPPPLLPIAESAAAVLPIAGSVAAALPTTGSIVAESPAIAVAVARAVCRCSRGRAREWDEFVHHIFPDRLDPDLRGIFLSRDQPILLTPQPNTLKSGVXVSHAYTYTESLSPIITITPMLSYSRPVVYLLTSLVHANIQVACFNITRDDQNTATARAIDRPAASAVRTTFVRPACRLRQEFSAARGGCAQDLRSRHARMFGHACVHGAGPQATRTRYALTARSIAVACAGRTSDCEVGDRWAVSRGRM

SEQ ID NO: 124978 - protein, 71 aa, Oryza sativa
  Clone ID: PAT_MRT4530_27666C.1.pep
AKPNPPSWFFWAFGILCFVAPFAKLCLCLGSPGAHPRNHFCCGYLFHRESSSRILSPEIRACPILGNILST

SEQ ID NO: 124979 - protein, 71 aa, Oryza sativa
  Clone ID: PAT_MRT4530_27667C.1.pep
MDCSVVEVRAWTHRDCLECLVFLRDEEADTERMAGGPLNAVYLNNLLCGDYNGAVAIVPAATVAYAEHCLH

SEQ ID NO: 124980 - protein, 131 aa, Oryza sativa
  Clone ID: PAT_MRT4530_27668C.1.pep
MISFLIHLAAAGDDGNTEAEKAEKEVAYLRMHNNRGETALHHAVRAAAAAADNEDDKQLALDCIDQLMAADPQLAAIQHPNEKAASPLYLAISLGEIGIAKHLFDKTEGELSYSGPDGRNVWHAAVSFPQE

SEQ ID NO: 124981 - protein, 69 aa, Oryza sativa
  Clone ID: PAT_MRT4530_27669C.1.pep
YEAGHPAFGGANAVVGDAQFLAFPARVGPPLVASFSLRSNNGKLVSFFFILIPSSLGDKDNPYLLRVLS

SEQ ID NO: 124982 - protein, 1627 aa, Oryza sativa
  unsure (1)..(1627): unsure at all Xaa locations
  Clone ID: PAT_MRT4530_2766C.1.pep
MAEQAKAHDLSPSVSGDDGEPNPRRRARTPPPPPHQSPKQGEALERVEKSAASPVAGDARERQDGERRLLVYGDGSTPQGALQAVGALLRHPPVVPDPESPAQRWLDDVANLVMTAQQRLGAGGRSATTKTFGAATTGSVSSRRRARRAAAVARHSAATPSSAPPTREDQHGEPDARLDIERRRNSRRTPRAAEGASSSRVSPRQGREDQPSVPPVGGVGCRAFVASLRNVRWPPRFRPTITEKYDGSVNPTEFLQVYTTGIEAAGGDDRVMANFFPMALKGQARGWLMNLPPASVHSWEDLCQQFTMNFQGTYPRPGEEADLHAVQRGDDESLRSYIQRFCQVRNTIPCIPAHAVIYAFRGGVRHNRMLEKIASKEPQTTAXLFQLADRVARKEEAWTWNPSGSGVAASAAPGSAAQTGRRDRRRKKXKNLAERTRKWEEDRRQERREGKSPAVPSGNRRREAKQKAPAEDIDGDDDDLGFQEPGATIATVDGGACAHVSRRSFKAMKRELLAAVPIHEATRRARWSEVALTFDQTDHPPCVARGGQIAMVVSPTICNVKLGRVLIDGGAALNILSPAAFDAIKAPGMVLRPSQPIIGVTPGHTWPLGHIDLPVTFGGSANFRTERVNFDVADLSLPYNAVLGRPALVKFMAAVHYAYLQMKMPGPGGPISVHGDLKVALACMEQRADHLAAASKPEGGDERLGPSAPTAPRQRIDTCDDVPEDALVSFLRANADVFAWRPADMPGVPREVIEHRLAVRPGARPVRQKVRRQAPERQAFIREEVARLLEAGFIREVIHPEWLANPVVVPKANGKLRMCIDYTDLNKACPKDPYPLPRIDQIVDSTAGCDLLCFLDAYSGYHQIRMAREDEEKTAFITPVGTYCYTSMPFGLKNVGPTFQPRGIEANPEKIRAIERMRPPSKLRDVQCVTGCMAALSRFISRLGEKALPLFKLLKRSGPFTWTEEAERALTQLKAYLSSPPVLVAPEPNEPLLLYLAATPQVVSAALVVERDEDNPHFAHPRPVLTWPGSEQGGEAPESNGGLRLLTTGVGPLPACQKVLGAPDPQEGPEATVGRPRLSPFDPEANPVLTRPGRKQGEEAPEPNGGLRPLTTGVGPLPACLTTPGAPDPQDGPEATVGRPLLSSSDPEVIGTEDECAPRGHLDEERPRDAAPSEEDRPRRKVQRPVYFVSEALRDAKTRYPQAQKMLYAILMASRKLRHYFQAHRVTVVTSYPLGQILHNREGTGRVVKWAIELSEFDLRFEPRHAIKSQALADFVAEWTPAPETVSIPEASTDPSQLPHTAHWVMQFDGSLSLQGAGAGVMLTSPNGDVLRYLVRLDFRATNNMAEYEGLLAGLRVAAGLGIRRLLVLGDSQLVVNQVCKEYRCSDPQMDAYVRQRAPGGFEYLYVAIDKFTKWPEAYPVVKIDKHSALKFIKGISARFGVPNRIITDNGTQFTSELFGDYCEDMGIKLCFASPAHPRSNGQVERANAEILKGLKTKTFNILKKHGDSWIEELPAVLWANRTTPSRATGETSFFLVYGAEAVLPSELTLRSPRATMYCEADQDQLRRDDLDYLEERRRRAALRAARYQQSLRRYHQRHVRARSLCVDDLVLRRVQTRAGLSKLSPT

SEQ ID NO: 124983 - protein, 79 aa, Oryza sativa
  Clone ID: PAT_MRT4530_27670C.1.pep
PSGGGRCQFFSPRKGPKKERNWGPPEKNTKRPSGEANEMFQCFSFRKWGSFPWILLIGGIYCQFAPLPQDFFFIFCFFN

SEQ ID NO: 124984 - protein, 59 aa, Oryza sativa
  Clone ID: PAT_MRT4530_27671C.1.pep
MACKVFLRLRAHKKTESLSMVMEIPGLYTEGSSTRGDAGFTCKDGRRAASTSYSDSTRR

SEQ ID NO: 124985 - protein, 27 aa, Oryza sativa
  Clone ID: PAT_MRT4530_27672C.1.pep
FIICAIDYWKLGAFKSNCLEYVWCSTM

SEQ ID NO: 124986 - protein, 208 aa, Oryza sativa
  Clone ID: PAT_MRT4530_27673C.1.pep
MAHGRVQRMQCWVVVACVVASVSTTASAFVFKAGGTGEWRVPDQQASGNVSAYNQWAEHTRFRVGDAIAFSYQPGNDSVLLVDKSSYDACNTNTPIDTFADGNTVFTFTRSGPYYFISGNKDNCNRNEKLIVVVMGERAANGTAPAPALAPSAGTTSPNSPPSPPPPPSGIEISPTPEQSINAAARPRAAGIAGAAGLAIGTLFYALV

SEQ ID NO: 124987 - protein, 122 aa, Oryza sativa
  Clone ID: PAT_MRT4530_27674C.1.pep
FAPPYKEYVLAPPNEGASPQRKYPSVSTVPSGGDVKLFGIFVKPANSAGTSRVLSNQAVQEKTMSPPIKDKVDNVGLFDLTNLLNVDLFNYPTKVPAIFYVKKQCPFYGLWGGAIGEIVFSV

SEQ ID NO: 124988 - protein, 68 aa, Oryza sativa
  Clone ID: PAT_MRT4530_27675C.1.pep
QHQHTVTSTAQQSQCPPSRPPSATPEKEESIGYPGSKTCPFRWLKVGMGPPPGLPRGSGWTQGSKKLE

SEQ ID NO: 124989 - protein, 37 aa, Oryza sativa
  Clone ID: PAT_MRT4530_27676C.1.pep
IIKDQLFTRRNFLVIIAHRISLCNNSIAQVIKPPYSS

SEQ ID NO: 124990 - protein, 72 aa, Oryza sativa
  Clone ID: PAT_MRT4530_27677C.1.pep
MANMQVRDGVVVALAVEEPVAVRDGDVATGSCGNASERVRGGASGWVDLWTKNEREREEAAGDFDFSAVFSG

SEQ ID NO: 124991 - protein, 86 aa, Oryza sativa
  Clone ID: PAT_MRT4530_27678C.1.pep
MNLGVQSYNVKLRIAVKLHIVVTQGYRYSNGKFKEDQNLLRSNFQMRRLVVVCLTTVASPWVLATFKLKRRIGLIGIGVADPTKSY

SEQ ID NO: 124992 - protein, 62 aa, Oryza sativa
  Clone ID: PAT_MRT4530_27679C.1.pep
KIFHENHIIFQSIYRCVVHIKNISSGRTEITCLIILKHIGHFGHHKPGLKFCGECTMLYGNK

SEQ ID NO: 124993 - protein, 97 aa, Oryza sativa
  Clone ID: PAT_MRT4530_2767C.1.pep
MMASYADVGAPIHVGWVRLRDGGAKLGSFDHLELDFLSGGGGLSAGSSSGLGRWEIAGEERGIGPPKTQLFQGGSGGGGGGRWQVVRRTGSSSSRGQ

SEQ ID NO: 124994 - protein, 79 aa, Oryza sativa
  Clone ID: PAT_MRT4530_27680C.1.pep
DPLASGGGGGGYRHGPYHQHGHLGRGEGADYVHSSKVLESFFVSQPGGVGILGGGGGVKRPSGALQILPYSRFTDYPEG

SEQ ID NO: 124995 - protein, 260 aa, Oryza sativa
  Clone ID: PAT_MRT4530_27681C.1.pep
MALFLRRGAALAARSIRAAAASSASTSVHRLPSVGSLAGARELAPTKLFLLEARRGFAKGKKSKDDGRGDTVQDAPDIGPTVKSAATQQMEAAVVALSRELSKLRTGRASPGMLDHIMVETTGVKVALNRLAVVSVLDAHTLSVMPYDPSSMKSIEHAIISSPLGINPTPDGNRIIANIPPLTKENIQALCKVVTKSAEDFKQSIRRARQKALDTIKKSASGMPKDDVKRLEKEVEELTKKFIKSADDMCKAKEKEISGN

SEQ ID NO: 124996 - protein, 64 aa, Oryza sativa
  unsure (1)..(64): unsure at all Xaa locations
  Clone ID: PAT_MRT4530_27682C.1.pep
WFFEPXGFLFFFFFFFFFQGRNFSETKGVHHPPLSSPSLIKSSQNNLFFPPGGSILGGDKKAGP

SEQ ID NO: 124997 - protein, 101 aa, Oryza sativa
  Clone ID: PAT_MRT4530_27683C.1.pep
RRQYALFFTVGDPNNVFEGSLVVEAFPGRESPRVAPKLVGPGGPPKRPVFPFRAPAGGTRVVFFSSFFSPRSEAMSSLFGPVIYNFPFVSVRARRPAAKPG

SEQ ID NO: 124998 - protein, 112 aa, Oryza sativa
  Clone ID: PAT_MRT4530_27684C.1.pep
CPPNPKATEVTARATTHVHPSLYSTKPTRPRPTLCARAVKRHVPSICTVVLQPRPYCPWHSSHPGRRRVDGDGVPGLSAIRRRPPALAHAVLREPHAGRVETLLALVIRPLP

SEQ ID NO: 124999 - protein, 95 aa, Oryza sativa
  Clone ID: PAT_MRT4530_27685C.1.pep
MWRPWRTASVRTCIEEEKLEEVDDSDIRLPAGQEMKEEHGWAVRGGPWLWASFHAESATLTVQRLRSSEVGQAWQDSVRRSSRRRGKEELTGGDK

SEQ ID NO: 125000 - protein, 33 aa, Oryza sativa
  Clone ID: PAT_MRT4530_27687C.1.pep
NLKSGSTATNINPHSYSTNQNINTIYFNYQTIY

SEQ ID NO: 125001 - protein, 157 aa, Oryza sativa
  Clone ID: PAT_MRT4530_27688C.1.pep
MEAKIGRLVGAIGAFFSGGDNVPWCGRDIIAGVEREVAEAATEEHKNVSIMRLSWALVHSRNTDDVNRGIAMLQASLGGSKSPLEAREKLYLLAVGHYRNGDYPRSRQLLEHCLEIQPGWGQALSLKKTVEDKIAKGIATTAVGLLVGIAAAVARKN

SEQ ID NO: 125002 - protein, 119 aa, Oryza sativa
  Clone ID: PAT_MRT4530_27689C.1.pep
MPAFNTAPFLPHPIAMQPHHAALLPLPTREPASYAGEVRYGREVARSGQGTPYPEALPPHRRPDQHRLNLVIPVDSASPSTLPLSSPPVANPQPSTTAAVAARDQIEVVGSDTATSGRK

SEQ ID NO: 125003 - protein, 122 aa, Oryza sativa
  Clone ID: PAT_MRT4530_2768C.1.pep
SRRRGRSPPPPPPPGRSASSGRSRRPASAPPPATPPAASPSSRGTRCSRRPIPRRRACTPPPPATTPTPPCAPPRTRRGRAGASSAAARPPRRTPPSPPVSSSSTPFARGVAFASLRIGRKA

SEQ ID NO: 125004 - protein, 497 aa, Oryza sativa
  unsure (1)..(497): unsure at all Xaa locations
  Clone ID: PAT_MRT4530_27690C.1.pep
NLHNNNLCGSVPVREGNKTGPSSSEVAGSSCCDEDEADLSCLMPTAARRASAAAAVTARSSSSSSAGPATSATSSSGRSRGAPPASWRPAPCSTPPSXSAAPWRAPTTPTSARSSTSRRPAPSRPRGSPPPPTSRRPTSSSTRSSRASPSPPPSASAPSPATGTPPSPPTTSSSPTAPGPPPRATRSCSSSRRRTTATPPPSTPARSAAASRRPPHASSXPSTTSAPSTPSCRPRRAGASPPAGGAPAPGECRRPRPASSQPCRRCSSTATSTGCSSQPPPATSRSGESYRSPSAPSSSGRSLPTTSSSTRSSRASPSPPPSDSAPSPATGTPPSPPTTSSSPTAPGPPPRAATRSFSSSRRRNPAEPAAPPPSTPARSAAARRRPPPASSSPSTASAPSTPSRRPGRAGASPSSPTAASRGITSSTCPPAITSRPTSSPACHRCSSTATSTGCSSQPPPATGRSGGSCRSPSAPSSSATFLKSKDPNDGSEKGCRN

SEQ ID NO: 125005 - protein, 301 aa, Oryza sativa
  Clone ID: PAT_MRT4530_27691C.1.pep
MTANHASGTSGTTEATRSTQAKLQATWLPSGYTNTVTTRTHERLPTHHATRRGTTTTNGRGGDGSGTTEANGEGTTSAVILGRRRDAAGATLDDAEPRTKTTTGRQQLHGCKDGVEHAAAMPTTVVAQRDNEPARRNGRPKEGMATSDGDDDDEHRRGSSGGEARPRATLLLRCRPAHWRGDRGGWRRWSGDNTTGCQRGRDSDGLRAKRRPRRGRRGGCDGERWCCHGEKREEASLLSTGFGAMAKPVPVCRGFRRIIFARAAFCRELHLAKVVLPPVTAFARTASLLSFAPHLRHEPVA

SEQ ID NO: 125006 - protein, 51 aa, Oryza sativa
  Clone ID: PAT_MRT4530_27692C.1.pep
HCDAGLGTGTVVRVNGAYGHIALLLGRVVVLRGYTVLATIQDSYGRARTLH

SEQ ID NO: 125007 - protein, 68 aa, Oryza sativa
  unsure (1)..(68): unsure at all Xaa locations
  Clone ID: PAT_MRT4530_27693C.1.pep
NCGXQDPQEKKDXQGLFNNVIEETASKLVESRKSKVKALVGAFEHSDLAPGRQTRVYTTCWQFTTFIS

SEQ ID NO: 125008 - protein, 54 aa, Oryza sativa
  Clone ID: PAT_MRT4530_27694C.1.pep
FNGAGLLASYLEEAPLFYESYCNQYIGSTGGSISQGSNHRLCCTSSEQMFIWFD

SEQ ID NO: 125009 - protein, 85 aa, Oryza sativa
  Clone ID: PAT_MRT4530_27695C.1.pep
MADEGTVAAAEEGDGNSKGLGSGGYGGCRTETRSVKKTTAMVDEGAAAATKDEGGVCRQPCGRGQQRWRQTRTATQWSATAAMAE

SEQ ID NO: 125010 - protein, 461 aa, Oryza sativa
  Clone ID: PAT_MRT4530_27696C.1.pep
MGDVVTAPQRHNIGTRETLFAVCWHETDAVSQHRPSSGKTGLLTSSRGRGSAGKRAPPVSGTRAPVHRGPRPPRRSTVGPREPTARIDPKPIGRPWGGAAGHGHGLGRPDRAMARGNVTTGGDGAGSGGAREGGAAKGTDRPGRAGQRQPAGRAHGAAATHRPEDHQRRAAATRGGDACTEAAAHGARRERRRKPGCSPRGDAGERRPTEGGEMAAAREKWCARRRCSGGGEGRWSRGRGRARHSDADDTNGTARRPIGLQGGEAGSSPREVETIQRHGGGIEGRSGGGSVPFFSGEVGEEGEDEGGDRAHVCAGEGGRAGGAATWAYRAAMAVAGPSWRKGKELTCGAGSHMSAGERRAGGGFVDFQGRGGKWANGPFHHHVVLAAHLPLGSSSITPTVTQPTPCHLVAVHLTRRPDPNLRRTPATDPTSIEAAPATSSSALLNVTDFLRVPPMSDRHHC

SEQ ID NO: 125011 - protein, 71 aa, Oryza sativa
  unsure (1)..(71): unsure at all Xaa locations
  Clone ID: PAT_MRT4530_27697C.1.pep
MPPPPRSRSSCWGAPGWPRRRASARRRRTPARSGAXPPRRRRRRRRRRRARRIHRLRLRRDGQEAREGRRE

SEQ ID NO: 125012 - protein, 227 aa, Oryza sativa
  Clone ID: PAT_MRT4530_27698C.1.pep
GAVEGRTHNPEKCDRENNTAKLTEILNDQGLNSRSSIYKKNGGAELLRSSFSSPFPASQKQGRERKKARPFLKKNSKHGAIFDVHCTCTGLCHTPGFLSISPQPQPMDPASPAAAAAAPPPPRWSLHRNEPACVVGEQRHDGEATRGLPSSCFDCAAAAACFVGVVIITAGASGELVTESFPVGEAWRMCRNFPDGDFFCTEIFFIVIGLFSCSSIAAGATIFGMPS

SEQ ID NO: 125013 - protein, 710 aa, Oryza sativa
  unsure (1)..(710): unsure at all Xaa locations
  Clone ID: PAT_MRT4530_27699C.1.pep
MVDCKGLGGYCGDHGYPISTRRWFHRPGEKRRKKKKKKNKKKPKQHYTPPPPPPNYEVFPTMEPDDPDWMRQSVMYAEAALEHYNAALVVEGGGGGVVNELVRAIISGVIITCRADYGHVNFIARAAASGGGTLRQEERLFFAEVRNDGEGWIPTCLRSLDDEADRVGGLAAGDDPPVGRLDLLYSPDRTFTCGFYNISPNASTFSIWFSNSSEKTVVWSANPLHPVYTWESKFELKSDGGMLLKDYNGQVVWTNNVSSSNAEQVQAKLLNTGNLIVKSKGDTILWESFAFPTDTLLPTQNITARIKLISTNRLLAPGRFSFHFDDQYLLSLFYDEKDLSLIYWPDPTQNIWEKHRKPFNSTANGAVDSQGHFLGSDDANFTAADLGPRIMRRLTLDYDGNLMVTNHFRRYTYRELVTATRRFQDAIGRGASGVVYKGVLKDKRAVAVKKLLDINQGEEEFKHELSVIGRIYHMNLVRVWGFCSDDPHRILVSEYVENGSLDKILFDSQESQALLEWEQRFKIALGVAKGLAYLHHECLEWVIHCDIKPENILLDENLEPKIADFGLAKLLHRGGSNLNVSRIQGTRGYLAPEWVSSLPITAKVDVYSFGVVLLELLKGARVSDLETNKDEEVEMVLGRIIRMLAENLTSDGDEQSWIADFIDARLNTRFNNLQARVMMELAVSCLEEDRXRRPTMESVVEMLVSVDEAG

SEQ ID NO: 125014 - protein, 67 aa, Oryza sativa
  Clone ID: PAT_MRT4530_2769C.1.pep
HTYDWTMRKLSMFGCTDATQVLKELVEANKAYPDAFGRMIVYHIVLQVQLISLMDYKPAGCEECGGN

SEQ ID NO: 125015 - protein, 69 aa, Oryza sativa
  Clone ID: PAT_MRT4530_276C.1.pep
PTKLSFIYYRSTRTQRNTAVSIPICMMLSSSRFLHLCSPCMIHTRDKSRFSSKGYSRTMPFMSSTVTTN

SEQ ID NO: 125016 - protein, 179 aa, Oryza sativa
  Clone ID: PAT_MRT4530_27700C.1.pep
SNHVHRHRCAPVEIHTTKPPPPSHSSQMGNPPKMTMQCICRTAHPIFALTAGGRSTNVSYLHLLYTIFHLRYSERSCCTHLLEPKIETGGTNIAGPCHAVAFSCVSDCNGQAASVIRRTAASGTWAFGLPLALQLRRRFCKQTSAFPPRTCAVRPCNFRRGERQRHEELAPREKNGPAL

SEQ ID NO: 125017 - protein, 103 aa, Oryza sativa
  Clone ID: PAT_MRT4530_27701C.1.pep
MDRVNRLAAQRAVVIFSMSSCCMCHTVTRLFCELGVNPTVVELDEDPRGKEMEKALARLLGRSPAVPAVFIGGRLVGSTDKVMSLHLSGNLVPLLRNAGALWV

SEQ ID NO: 125018 - protein, 112 aa, Oryza sativa
  unsure (1)..(112): unsure at all Xaa locations
  Clone ID: PAT_MRT4530_27702C.1.pep
FLTANKGFIEVSTDXVSRRCIGLQVLHPIGFYCITLLFFCXYHQLIVFIFLFTSRVRIYIRIIADSSKPYRYRLDQTDWHARISPTFGLALELSRSPMLVCVFRINTPQQVF

SEQ ID NO: 125019 - protein, 435 aa, Oryza sativa
  Clone ID: PAT_MRT4530_27703C.1.pep
MAGSRFGSFKSEKGDPAATAAQRRDPYEVLGVGRNATDQEIKSAFRRMALKYHPDKNGDDPVASDMFQEVTFSYNILSDPDKRRQYDTSGFEAIEADSQELELDLSSLNTVNTVFAALFSKLGVPIKTTVSATVLEEALNGSVMVSQLQLGNSVHRKVEKQSAHFYSVDITEKEAKMGLVCRVKSTDRSKFKLLYFELEENGGLSLALQEDSVKTGKVTSAGMYFLGFPVYRFEQNNLCQLLKTVRIPLNSTLHSGDNFFRSVNYTIEVVCGESFPAEKEKLQSVEAKILTKRAELSKFETEYREPLVLTKRAELSKFETEYREVLAKFTEMTSRYTQEMQAIDNLLKERNEIHASYTNNSPLKRSSSRSKAKSPSKFSKGEEDNNQRKEKKVKDQPTGGCRSADEDSNEKKTKERFPRKKWLNIPFKIDRRKPC

SEQ ID NO: 125020 - protein, 82 aa, Oryza sativa
  unsure (1)..(82): unsure at all Xaa locations
  Clone ID: PAT_MRT4530_27704C.1.pep
AQFLWFYLPFGSXVVLLQITNIHIHKEPTIQQQAPAYDSTRPSCFCCGIQNAWLTTWLDHQCKSADQLALYFTIVPHSYLGP

SEQ ID NO: 125021 - protein, 63 aa, Oryza sativa
  Clone ID: PAT_MRT4530_27705C.1.pep
GPMEYQRRGTYIWTYPYVWTGAKTCFNYPSIVNKLGDGRLHGKFVLGFWGTRSSNPPVWIRPK

SEQ ID NO: 125022 - protein, 225 aa, Oryza sativa
  Clone ID: PAT_MRT4530_27706C.1.pep
MAARSSLPSFCLHQIRSDSRRGAPPSIRASSTGAANDGGRNDDVDGKEEEEKSEVGRKVMVVADGGSDEARTALQWALSHSVRPCDTVVLLDVVKSGGDGGGKNGDDPSRGCQHLETMRSICQAKRPEVRVELSLVEGKERGPAIVEAARKQGVSLLVMGQKKRSITWRLLVMWMTGGKGGGGRGTAEYCVQNAACMALAVRRKSRRGGGYLITTRRQRDFWLLA

SEQ ID NO: 125023 - protein, 71 aa, Oryza sativa
  Clone ID: PAT_MRT4530_27707C.1.pep
IFRLTRAAQTIFFLSIPCGIISIWKRHFFSEISFYKYHLCCGWEIHLLQYITKFHIEDGESHSFPSIPYNG

SEQ ID NO: 125024 - protein, 68 aa, Oryza sativa
  unsure (1)..(68): unsure at all Xaa locations
  Clone ID: PAT_MRT4530_27708C.1.pep
MVVHLHPNHAAASPSPCGTSPTSPPASTSARRRRRPPRRPTPRRRSRAXAARRRRRRPPPPPSRRRRS

SEQ ID NO: 125025 - protein, 88 aa, Oryza sativa
  Clone ID: PAT_MRT4530_27709C.1.pep
HSNSVLSKKATMFMFCFQAMVFMKVISSPLPGATGFNKYVPKFGGQLISYAALSDPEMGFDQITPYVLFLVSPILLVAFVAFKKSFQL

SEQ ID NO: 125026 - protein, 118 aa, Oryza sativa
  unsure (1)..(118): unsure at all Xaa locations
  Clone ID: PAT_MRT4530_2770C.1.pep
TPPGATCVAAFASLPRPHAAPRAPARARARAPSSRRVRRPDPAHAPPPFEPPSPAPPRATARRSRTDLVNSPPXPLSRPRPQPPPKSQCLSPLAPAVPSPRRCRCGARVVSQIHARGW

SEQ ID NO: 125027 - protein, 96 aa, Oryza sativa
  Clone ID: PAT_MRT4530_27710C.1.pep
LQVLLHPAQLYGFDRVSGPKTVPPPCADSPVVPVDTVSSKASGFQNDQRNHRRYTRARITVQPVTFQFRPQIVPNDVICNILKNYLKSISTFDVPV

SEQ ID NO: 125028 - protein, 89 aa, Oryza sativa
  Clone ID: PAT_MRT4530_27711C.1.pep
MAMTVESLGGGFCSPMIKPQFEKGSVPPRVGLAIKPSTHGCLSTEHTVADSNIIGVILDLVEQPPWTSKAEVPETCSPDRWCTPASGME

SEQ ID NO: 125029 - protein, 82 aa, Oryza sativa
  Clone ID: PAT_MRT4530_27712C.1.pep
MDQEIWEPSVEGNTLAQVLDIATKEVKAHMQPRPIDPSIWEVDTATGLDGEDHQIGRACARNGRATSYQMENGRILYGGGHP

SEQ ID NO: 125030 - protein, 65 aa, Oryza sativa
  Clone ID: PAT_MRT4530_27713C.1.pep
MLYKRSTDRIAIAPDLARAWILLSEETLTDRRPQNEYDQCYLCVLQLRGDSTIVVAPGLAGSEGI

SEQ ID NO: 125031 - protein, 117 aa, Oryza sativa
  unsure (1)..(117): unsure at all Xaa locations
  Clone ID: PAT_MRT4530_27714C.1.pep
SIFAPPAGLGSIREEKPPPLXRGAGSSFLSVKRLVELPCPIPEGTASLGGLPLGAFPTGFRGDTPGRQIRQCPPLDWGLFLEGPQGVLAFQRSLPPRGPSPVKLAVLEPCSCPSPEP

SEQ ID NO: 125032 - protein, 636 aa, Oryza sativa
  Clone ID: PAT_MRT4530_27715C.1.pep
MRRLPKSLLLASLSKPFLRRNREPLPLLRPPPRPLPRVLPFAARTLAAPAAPPPEAAPAAQSDGFALLEAAQLREAADDHQEALALAIKALEPLQASHGGWSLPVARTLRLAGAAASRLGRLTDSLDSLNAAADIIDSLEAGDAEVAAVGAAVHEQLARTKTAMGRRWDAASDLMRAMELKAVFLEKGSLELGNAYKDVAEAYRGVLACDKALPLCLEALEIARNHFGGDSQEVAKVRQLLATIYAGSGRNEEALEQYEIVRMVYERLGLDVELSLAETDVAMVLVLLGRSEEAMDVLKRVINRAGKESEERALAFVAMANILCIQDRKADSKRCLEIAREILDTKISVSPLQVAQVYAEMSMLYETMIEFEVALCLMKKTLVFLDGVSEMQHIQGSISARMGWLLLKTERVDEAVPYLQSAIEKLKNCFGPLHFGLGFAYKHLGDAYLAMNQSESAIKYFTIAKDIINATYGPKHEDTIDTIQSIANAYGVMGSYKQAMDYQEQVIDAYESCGPGAFEELREAQRLRLTDLLPLKNVSRGGHGGRWAEPRRTVEATGSAEEDTRGGGRRRSRGGWRPVGRAEEDGGGNGGDDWLERPAFMSCAADHRLPPCRPPAPPPHLRGAWRGSRSASATGR

SEQ ID NO: 125033 - protein, 92 aa, Oryza sativa
  Clone ID: PAT_MRT4530_27716C.1.pep
HCCPPHAPPPLLCRRAPPSSSGLVPHAAAPRLAAAPPSATPPLGFPATPLLPLPPPPPPPPPPPLPPPPGLSRTPRRRRALPRLAAALVACL

SEQ ID NO: 125034 - protein, 223 aa, Oryza sativa
  unsure (1)..(223): unsure at all Xaa locations
  Clone ID: PAT_MRT4530_27717C.1.pep
MMSAKLLRSMSVRRLLGQQRNSVEFYRKSQAWNSTASFSDVDEKNRKGGDAEDDFTHSRPDHVFRGVHRAIICGKVGQVPVQKILRNGHTVTVFTVGTGGMFDQRTVGAENLPMPAQWHRISVHNEQLGAFAVQKLVEDSAVYVEGDIETRVYXDRINDQVKNIXXICVRRDGKILMSGDSNVGKLEELREGYSCEGDQKAPGKWNVLFAAPRSGFCYLSSKI

SEQ ID NO: 125035 - protein, 271 aa, Oryza sativa
  Clone ID: PAT_MRT4530_27718C.1.pep
MVMILKLSKQQFQTFLRLRVIESNAPNLSSLSFSGNVKLSLGDPLQVKRLSMIHPKVVCYARAELPSVMPNLETLAIYSNDEVSQEHMKHESVLGDSSPLRQMPEHRHCYLKSVKMTGFSSAKNLIELTCYILKNAVSLECLTLDTLYERAYAGEAHRAVRAVTTYIQDKVPDTVKFTVQSYFLTPTTGEGSGEKGRRGERVRSGATGGGGGDVRPHGFPQDDGRNPRPLFTLQNPGGPAEASMEASATWFCKSFCGSLDFSNLRAVFSLV

SEQ ID NO: 125036 - protein, 922 aa, Oryza sativa
  Clone ID: PAT_MRT4530_27719C.1.pep
MEEPNVGGGAAAVVAPEGADPAGGGGGGPGAPASPWRKTTPPPVAGEAVVMGAKSWPALEEARQKVAAAEAAARPGAGNAGGGGEPAKGAQAQQPSPPPPQSQAPNRTHKFDGHGNPNKNNQAYHRNGPKRRSPAANGTPSYPAAMPYHQHPGQPFYYPVIPSPVILHEYPYPPFAVPVPSHDPHAGKSGYENSMPAYVPVDQAGGNEGNRPVPPQPRGDLHAWRPPVGARPQPGLEGRGHFNHNWQNPQMFGTRENTSVPQGAGPRAFMRPMAHLPHTLGYINGPPYPGPMPPMYYYMPAVPMEPMRGPPRFVQNQPPPHPVLSPELRAKILTQVEYYFSDSNLDHDNFLKSLMDEHGWVPISKVADFNRLKKMTTDIQLIVEALANSSLLEVQDGNMRRRSDWSKWVSLSGTSLPSPSSTSMDNTTGECNKDAYSEDEKKPHPRSVDCVGMGASDEPSHDTLSSSVTSLNKGLSNISIDNKPKSISACSLNSQKHEAAFRTGDVKVQKVNTKIKVPDSQRERGFCNDFISDSPSFSGDQSTFLLDEELELEHAELSHDLYSHKRVDDEEDDFYVDDQDVNRLIIVTQDGPQAFSKEEISRINEGLYYYENHAYNQRSSQAGTIDIDSKPAGGSKGNPINIVNNGIEDSGQPIPRRRHNRGNRKAQSSHKQRFFPGNFANNTNNRSHYGGVSESPPSNSIGYFYGSTPENHRSSRLSSSPHGIPTGSSPVGSVPKSFPPFQHPSHQLLEKNKFQQQRYNKFKNRCIAERKKLGIGCSEEMNSLYRFWSYYLRDNFNDDMYKHFKKFALDDAAANYRYGLECLFRFYSYGLEKNFQRNVYEDFEQLTLEFHHKGDLYGLEKYWAFHHFRNQDSSPIIKHPELERLLKEEFRTIEDFKARKAAEKETGSSTAAAAGHNKADAK

SEQ ID NO: 125037 - protein, 57 aa, Oryza sativa
  Clone ID: PAT_MRT4530_2771C.1.pep
SEKYQPYNLIIIIIISWNVFTHPITIEHHKKCPDIFSSNQVRNHTENCSVSRHKFLA

SEQ ID NO: 125038 - protein, 317 aa, Oryza sativa
  Clone ID: PAT_MRT4530_27720C.1.pep
MTTVQAPRAASAGGGGACGQREEASSALREEASRRRERRRAGDDRIWWAPAREVASLCRTFLLSKKPKLGLESPLRELPVLRFSSSTSNLDACIRIRLRLRLRLRRELAAAPAMSIFEYNGSAVVAMVGKNCFAIASDRRLGVQLQTVATDFQRVFKIHDKLYIGLSGLATDAQTLYQRLVFRHKLYQLREERDMKPQTFASLVSALLYEKRFGPYFCQPVIAGLGEDNEPFICTMDCIGAKELAKDFVVSGTASESLYGACESMYKPNMEPEELFETISQALQSSVDRDCLSGWGGFVLLVTPTEVKECVIKGRMD

SEQ ID NO: 125039 - protein, 204 aa, Oryza sativa
  unsure (1)..(204): unsure at all Xaa locations
  Clone ID: PAT_MRT4530_27721C.1.pep
MSIFEYNGSAVVAMGGKNCFAIASDRRLGVQLQTVATDFQRVFKIHDKLYIGLSGLATDAQTLYQRLVFRHKLYQLREERDMKPQAFASLVSALLYEKRFGPYFCQPVIAGLGDNDEPFICTMDCIGAKELAKDFVVSGTASESLYGACEFMYKPSMEPEELFETISQALQSSVDRDCLSGWXGFVLLVTPTEVKECVIXGRMD

SEQ ID NO: 125040 - protein, 349 aa, Oryza sativa
  unsure (1)..(349): unsure at all Xaa locations
  Clone ID: PAT_MRT4530_27722C.1.pep
MAMMDPHSLGDRRFRVCDRISFGSRPSDVDTSMRYGGSSDDENIDEESPSGIYISPMPYGYGAPLCYDDNKRQLINTRYCLVASKQMVGVFLMVWVRSDIREHVKNLKVSCVGRGLMGYLGNKGSISISMSLHQTSFCFVCTHLTSGQKDGDELRRNADVVEILRKTRFPHVHGVGDEKSPETILDHDRIIWLGDLNYRIALSYRSVKALVEMHNWKQLLEKDQLRAAPWYGRVFXAGKKGRIYFPPTYKYSYNSDRYAGDDMRPNEKRRTPAWCDRILWYGRGLNQLCYVRGESRFSDHRPVYSIFTAEVQIPSQTQFCSFARSTSLMGVDELPYPTYPRSYTDINFY

SEQ ID NO: 125041 - protein, 84 aa, Oryza sativa
  Clone ID: PAT_MRT4530_27723C.1.pep
IETYRFFLKALISKGPNGRLSCTSRGMDHIHVFDTNSNMQHPIYRCNYSICRNRHGWCSYNMQVGTILQPSCRVTTSTKQSYIP

SEQ ID NO: 125042 - protein, 198 aa, Oryza sativa
  Clone ID: PAT_MRT4530_27724C.1.pep
MSEPASPPPAMPEDAAPPQPQPEPAVPAGEEAAPSLERKEELLPVEEKISELDESQSQLMGRLRGLKEDLLNWRSSLDTQVTKYKSELSDIKTALNSEIEQLRSDFQELRTTLKKQQEDVSNSLKNLGLQDATDNDGNKGSGEENASEGVSDTLGNLKLDDTPKNHDESSDANDEKNETIAEDGTVDKTVKAESASDE

SEQ ID NO: 125043 - protein, 157 aa, Oryza sativa
  Clone ID: PAT_MRT4530_27725C.1.pep
MAKKTADKATAATADKATAETATIGLLLSLAAFATRRARGRIHRRQRPGRPDLPPPTTEHPVVSNKEDRVPSETRRHDRKNRSKSGTSMANDDIDGQAEPKRSLTHIAPGAQPCDSTMLASAWNEWSPWCGEADIDKGPAMTCMDNRRSSAKDKPAI

SEQ ID NO: 125044 - protein, 148 aa, Oryza sativa
  Clone ID: PAT_MRT4530_27726C.1.pep
IYNISKMTKTASAAPQNSFSNRSISNPILQCRWVEQRPKLVHAFMDSYFPAESGEPSPYETKPFFPSELTEGDRDFALLSRFGDREASGERLCIGGGDLDLDPDRLLLLDIERERSQCDLSFHTSRRAAAHRTHCCVHTPLPPSADSL

SEQ ID NO: 125045 - protein, 72 aa, Oryza sativa
  unsure (1)..(72): unsure at all Xaa locations
  Clone ID: PAT_MRT4530_27727C.1.pep
GWLGLLQRGVALDSGWXILFNYYNCFTAFNYCLXMLALCKXTALATLWLYPTSYPLFRYDLLSTXGCTQSCS

SEQ ID NO: 125046 - protein, 120 aa, Oryza sativa
  unsure (1)..(120): unsure at all Xaa locations
  Clone ID: PAT_MRT4530_27728C.1.pep
EADYDDYSVTNXSSAALCRSAALILMALLVLRHVLVLTDEDEDDASSMFLLFLLRVTGFLLPFYIMAWAINILQGRRRRQVAAALAATEVAFILQSGQRRGMNFTIAPDSPATPQHEPIP

SEQ ID NO: 125047 - protein, 61 aa, Oryza sativa
  unsure (1)..(61): unsure at all Xaa locations
  Clone ID: PAT_MRT4530_27729C.1.pep
GPKKLPHHISCCVLQKNVVIFCRADDNSLYXPQQAIHFLYLNLCPCICVNLRCLTLCQISV

SEQ ID NO: 125048 - protein, 76 aa, Oryza sativa
  unsure (1)..(76): unsure at all Xaa locations
  Clone ID: PAT_MRT4530_2772C.1.pep
MEANPISGVLXLPLLPLVAAGSRIGGHPPGXAKIQILKHNFRAPHGQPLTGAGMHNAKKGQATTIAVTAITDKIEK

SEQ ID NO: 125049 - protein, 268 aa, Oryza sativa
  unsure (1)..(268): unsure at all Xaa locations
  Clone ID: PAT_MRT4530_27730C.1.pep
IRPSGRPPLRWSLPRTRHGLIRGLTTTTPPKNTRTSINLSPVRLSMRSICPVLGGRXSSKSAIRSVSPSRPSISPAQNHGRSPSRSPSHSRVKAVNKGAXFTHRYSFARQYRSPSPDHSFRYGGRGDRDRHMSYRGSRQRSPPRRYRSSPLRGRASPRYRRRSRSISRSPVYRDRGRGGGRSRSPVRSRSPAGGKLRSHGDRSRSMSRSRSLSGSRSRSPPPIHNRSPLASLSPKRESNAKSRSPSASSEGKKGLVSYGDGSPDSAGK

SEQ ID NO: 125050 - protein, 284 aa, Oryza sativa
  Clone ID: PAT_MRT4530_27731C.1.pep
KAKGREKSVAAAAVFAVKSEVEAPVVRRTRRRVLLRTPKPAPLLKRLFAACRDVFRGPGTVPAPDDVALIRGILDKIGPGDVNLSAEHNFFKATDAAALPHPLAITRTTIYTCTNFSIVIFFLPPTAVIPLHNHPGMTVFSKLLLGSLHIKSYDWAEPAVFAAGSGDRLRLAEVVRDGGFSAPSDTLVLYPAAGGNMHQFTAATPCALLDVLGPPYSEDRDCTYYQDFPYSHCPSDDIAELRRHGGGMDDEQISRMRQLGWLKETAMPKDLEMYEMPYRGPPIL

SEQ ID NO: 125051 - protein, 208 aa, Oryza sativa
  Clone ID: PAT_MRT4530_27732C.1.pep
HGILLTGATSEAPDQERGNPRSPNTSGWLRQGRAGGITELERGKGIPGSQEKIIVDVSKGRPAPTCGPHMSASKGTGARWTRSTAASGARPPCGWPKWGRADPMDQTGHGGDQGEAASRRRSGRGARQRRPGRTATGGSGATRRWHGRWAAKARREREGALTEQHGNGGRQDGGGIPRARTTTRIVRRPAQEEGWPRVDDTWGSDLRN

SEQ ID NO: 125052 - protein, 74 aa, Oryza sativa
  Clone ID: PAT_MRT4530_27733C.1.pep
MGNFLVIFAAFTEEFEVEAVIDLEPALAPLGLPGTVAAWTTASAAAAQPRHLAFSGLGFLCWWGKKERRGRDEK

SEQ ID NO: 125053 - protein, 133 aa, Oryza sativa
  Clone ID: PAT_MRT4530_27734C.1.pep
MASYPAFQVSPEEAAKGKWYIATAATNHMTRDQSVISNLKPVTGRVVGGGNGAGLQVHGSGAVNTETVAIPDVWYVPGINCNLVSVGQLCQLGLEVSIFRGVCTVTRASDGSVVGKAHRSGAVYEVEFLVPVN

SEQ ID NO: 125054 - protein, 740 aa, Oryza sativa
  Clone ID: PAT_MRT4530_27735C.1.pep
MDLDKSTSTSASLKKLQEEGALLGRGTMEREPGGTEPEPVLGRMVAVEDYILCGILPRPSEFLLLVLNFYGLSLLHLNPNSIAFLSIFSHLCEAYIGVEPFLDLFRFYYELRRIESTRVSGCVGFRLWDGLKLRYIPFQCPSSRSKWQARWFYLQIEDSDPIFVVPEEQPDKIPSWTAKPVLTPSLQSFIDAIDDLRVRGLSGYEVAADFIGRRIQPLQARAHPAFDYSGPEDATRVSPRGMNSETVERRVGQLMISGLTTASNVPVPLCEKEKAEREVAINAAASLKEGVSQEASDMAIAAAATTSGSHVPRKGRKFTSVLGSRRKASSPSALDASPPPPRRQRLVTLSEKSARAKAAQDGSGGNSSASPAVASTDVVVVPRSREVTPSGPVSDLVPVRGPPADVLTWGELHVEMGRILEAGARGISREIAEARVAASSANERADKLVHDLAEVREDLQKMRELVAGNERQQRGLENRMSELENNLSEIRGSLRVTYTGLHQLAGECGVATTIPVNPDEFSLMTSLTELATAMEAIPSKHAARIGEEMSNGIYTGVCHVLACVRDVDVEDVQQRGQPELPVIVPALAFEPHVSQDDVDQNLPVETGMATTSLDLESALADQDRRIQYWKTKFEVAELKRTMLDVKKEQAMETLRGRELEGIGKRIDEALKQECRRSSRYAGWHVLACIRDHRPQLHLEFLHEGFSRSWRTRTEIDHLAKSMAPLAEKVFQSMDWRWPSW

SEQ ID NO: 125055 - protein, 420 aa, Oryza sativa
  Clone ID: PAT_MRT4530_27736C.1.pep
MNLKLSLAIDGGGGGDAAAAVAKKSKVVGGGAVVVDGVGSSAICGGDRGSRVRDRMVKKAEEFDHENGMAATSSDGGGRGGAGMDLASPFYQFAHFTANQTIVEAFESGGRRRLHVVDFDVSYGFQWPSLIQSLSDAAAAATSSSSHDDDDNGGGCGDGPVSLRITGFGASADELRETEARLRRFAAGCPNLRFEFEGILNNGSNTRHDCTRIDDDATVVVNLVFPASSREACAATRMAYINSLNPSMVFLIEKHDGGGGLTGGDNTTTGRSASLLPRFAANLRYFAAVFDSLHECLPADSAERLAIERDHLGREIADAVASLDHQHRRRHGGGGGGGDHAAASWNWKAAMEGAGLDGVKLSSRTVSQAKLLLKMKSGCGGGGFRVVEGDGGMAMSLAWRDMALATATLWRRRRRRRRCR

SEQ ID NO: 125056 - protein, 581 aa, Oryza sativa
  unsure (1)..(581): unsure at all Xaa locations
  Clone ID: PAT_MRT4530_27737C.1.pep
MDLDKSTSTSASLKKLQEEGALPGRGTMEREPGGTEPEPVLGRMVAVEDYILCGFLPPPSEFLLLILNFYGLSLLHLNPNSIAFLSIFSHLCEAYIGVEPFLDLFRFYYELRWMGSTRALPLTDVIGPLVDHQAAASLKEGIAQEASDMAITAAVATTSGSHVPRKGRKFTSVLGGRRKASSPSALDASPSPPRRQRLVTLGEKSVRAKTAQDGSRGNSSVSPAVASTDVVLVPRSREGELQVDMGCILEASARGISREIAEARAAAASSANEHADKLACDLAEVHEDLQKMRELVAGNERQRRGLENRMSELENNLSEIRGSSRVTYTGLHQLAGECGVTTTIPVNPDEFSLTTSLAELATAMEAIPSKHAARIGEETSNGIYTGACQILAFIRLAHPELDLQRILDQGATNDVRKGVMEEVGDLGESVLPLFEEDVDVEDVQQRGQPELPVIVPALAFEPHVSQDDVDQNLPVETGLPTTSLDFESVLANEDRRIQYWKTKFEVAELEKTMLEVKKEQAVETLRGREVWFNLYLKSCCTSMTXSVESSEYPVAIPRSRRPDTSRGCMGPAPSSKASTSV

SEQ ID NO: 125057 - protein, 159 aa, Oryza sativa
  unsure (1)..(159): unsure at all Xaa locations
  Clone ID: PAT_MRT4530_27738C.1.pep
VPXXPRXXFKEPRPPGXKAXXGXRGXTRKPPPXWPAAPFDXVSRXXAXVERPASXXQXWCLPPDXAXGXPXPAGVXEXGXVXRETGTKEDVPXFFLWXAPPSGXGIGPLTTSATRRRRRGAASGDDTNAMARHQQQRAATAKELFQRHGSXPPXXXXKH

SEQ ID NO: 125058 - protein, 276 aa, Oryza sativa
  Clone ID: PAT_MRT4530_27739C.1.pep
MEAIPSKHAAMIGEETSNGIYTGACHVLACVRLAHPELDLQWILDQGATNDARKGVMEEVGDLGESVLPLFEEDVDVEDVQQRGQLELPVIVPTLAFEPRVSQDDVDQNLPADTDLESAPADQDHRIQYWKTKFEVAELERTVLEVKKELAVETLRGREVRFNSYLKSCCTSMTRVCRELRVPRGDPEESAAGYISWLNGACTQLEGIDKRIDEALKQECRRSSRYAGGHVLACIRDHRPQLHLEFLHEGFSRSQRTPVEIDHLAKSMAPLAEKVF

SEQ ID NO: 125059 - protein, 123 aa, Oryza sativa
  Clone ID: PAT_MRT4530_2773C.1.pep
MAANLATSAGFSDETSVARRETRLRELRARAAMGGGCEDSSPQGWRDAAEHRLPWKKAAAAAAAKAAAAAGGGGVRGRRCGRDASAKRQSQMAEGVNTLGVSEPSDTWMDGSDFILRGTEENW

SEQ ID NO: 125060 - protein, 242 aa, Oryza sativa
  Clone ID: PAT_MRT4530_27740C.1.pep
MAGGGDVRPGLCVTGPGCPAGILVAIDSLDLAQRQRKEEPAEGAEDLVVGSPSNGDRRGEHWRQRRRRLRRMAVQTTMTMAAAAVAAWMAGQTDFSEDNSRNSGCVDGGLNDNRSGRDDHERQHKRQLRGWRARGGGSYRATMNASYEQRGEGKEEGVKVGSTRVLSNVTAESAWALLVRSTAWPLSRGGTFTARVGPANVDAGAASAAVTTTTAAATANSNSSETLLRIAMWREIDWRVVL

SEQ ID NO: 125061 - protein, 138 aa, Oryza sativa
  Clone ID: PAT_MRT4530_27741C.1.pep
HLAVAPCRAVLRAPPFAPPGPQGRLHHPLVLPPGLPAGAQKGPLHLRCRRGRAQQRQRRPGGGGKATTGKGATNGPRPDPTSFGGRLRPGPQFSFFFIFGFLLFHVGGIICPPRISGPPGKIIIPCGWAPRKQKNCFF

SEQ ID NO: 125062 - protein, 62 aa, Oryza sativa
  Clone ID: PAT_MRT4530_27742C.1.pep
PSIYGSKKNYIMIQTHNRLLGHCDQLVGWRIKESESTADFCQMVNRPGCNWTQLLLVNGPSI

SEQ ID NO: 125063 - protein, 73 aa, Oryza sativa
  unsure (1)..(73): unsure at all Xaa locations
  Clone ID: PAT_MRT4530_27743C.1.pep
QNMXRIXSAHTXYXREKEKPAGIYQTITEXCHILMQSHRISPDITSIKFFAXCDNVRLSTRXDFFRIQFFVPN

SEQ ID NO: 125064 - protein, 40 aa, Oryza sativa
  Clone ID: PAT_MRT4530_27744C.1.pep
LFIHHHHRHTIYTHAYLISSVRWIIHSLQQCILYLSTYSL

SEQ ID NO: 125065 - protein, 137 aa, Oryza sativa
  unsure (1)..(137): unsure at all Xaa locations
  Clone ID: PAT_MRT4530_27745C.1.pep
STRRRNHPPTRAALPQRPGVHNSVLRVDTHKSSHTPIHENPASASATAKSLKAGTQQRQGPHQEPANTTPPPPAGDALGGAPMLVPGDRRVDGHHARVPAVVGGGRRREPRPEEGALLGRAPAPDPASAXSPRXRGS

SEQ ID NO: 125066 - protein, 81 aa, Oryza sativa
  Clone ID: PAT_MRT4530_27746C.1.pep
MATVRSDFGTAFRRWGQSVVECAVVCGPTPRYQALDLIEYRMVTSMTHYRKQGLAAALWCSPARLLANLASMVVATSSKKR

SEQ ID NO: 125067 - protein, 94 aa, Oryza sativa
  Clone ID: PAT_MRT4530_27747C.1.pep
MAAAAGGGGNILHNPQSRYVFMVIVGGGAGHGEGGGGGFGDEDDRELGWRFLSASSELVGKSEVLKHLLEARELVVRLVGRGSAVPGVAASTCE

SEQ ID NO: 125068 - protein, 128 aa, Oryza sativa
  Clone ID: PAT_MRT4530_27748C.1.pep
MATRTDVSTTQDAYGYGHSIYIILHAFCPLFGSLPSRKAPVSCFFLEFNYHVGALSSTPWTNLLCHVLRRLCMTRRYLQVYEDNTFKVPLTNCSIIMGELGFLIVIGINQICVFYSLLMAVYTSKFRL

SEQ ID NO: 125069 - protein, 979 aa, Oryza sativa
  unsure (1)..(979): unsure at all Xaa locations
  Clone ID: PAT_MRT4530_27749C.1.pep
ISDEEEEEGDVCRICRNPGDDEHPLRYPCACSGSIKFVHQDCLLQWLDHSNSRQCEVCKHAFSFSPVYADNAPSRLPFQELIVGVGMKACHVLQFVLRLAFVLSVWLMIIPFITYWIWRLTFVRSLGEAQRLFLSHISAQLILSDCLHGDYIRHLRELGGHDAERDDGGRERHGARAVRRLPGPNNRVPAADGNVDELAEAQGLGAGELLRRNAENVAARLERLEAQVEQMLDGLDDADGAEDVPFDELVGMQGPVFHLVVVVCMYHTSXLAEVTNIVRLCCMFWACENVLARFSCFLIVVVCFPYLXGRIFLYCLSWFFSLAPRLMLTRMMQFTVEATTVSNDDLHKHALIPRDQEGDLGLRFRRHIMRGNQPQSLKINATGLTVMQASGKSSLIKGTAIGSSYLSDLTTLAVGYMFIFCLVFLYMELLLVLSNPXLWSEMSPSVSDRKSKDCCTTKSKGRTAQKKEYTPENXMVSSLPCGYVLLTVNIDELPHTIYCGSDXVMDNELLXTVVHKDGXAVYGSLIVILVFLPVKLAMRVAPSIFPLDITIFDPFTEIPVDVLLFQICIPFAIEHFKPRATIKALLRHWFAAVGWALGLTDFLLPRHEENGGQENWNGRAGRDRVHGGREMVAPQLEQRMIQHVADNLNGRGNANDSNEVAEESDVDDQGDSEYGFVLRIVLLLVLAWMTLLIFNAGMIVIPISLGRLVFEAIPRLPITHGIKYAIDYIRSRRLAFLVQQICKWCSIVVKSSALLSIWIFVIPVLIGLLFELLVIVPMRVPIDESPVFLLYQDWALGLIFLKIWTRLVMLDQMAPLVDESWRTKFERVREDGFSRLRGLWVLHEIIMPIVTKLLTALCVPYVLARGVFPVLGYPLIVNSAVYRFAWLGCLIFSALFFCGKRFHVWFTNLHNSIRDDRYLIGRRLHNFGEDSLHSSEPGTTTASDDDEHEQALIPRDQEGELGLRFRRHIMRGNQPRMAA

SEQ ID NO: 125070 - protein, 373 aa, Oryza sativa
  Clone ID: PAT_MRT4530_2774C.1.pep
MASLPPPAPPAIGGDPLAATIPPSLPSPAPSSSSLNLSPSLLIITALLAFVFFASVSIHFLLRCLARPSHPAPSPLPRASAAAQRATTASAVEAGEATAASAVGRSQGGGGGGGGGGGGDDEKERLVASLPVFTMASALAALPKSSPDCAVCLSPFAPEAELRLLPACRHAFHASCVDAWLRTTPSCPLCRATVSLPHPPLPTAAAAAASNAAQQDPLDSRSSNNSRSFRVEIGSISNRRSSAAADDRRTYSLGSFDYRVDEEVEAVVSRIARPAAAKSTTGSVTPAPGEALAEAAGSRGWLREYVDRLASSASSLSGRWSGRWSARWSQSHHSNRQEDSWRWDPEAAVMSAPRGVDDDEPGFVTLYRWIVGV

SEQ ID NO: 125071 - protein, 86 aa, Oryza sativa
  Clone ID: PAT_MRT4530_27750C.1.pep
TKTQQAFILYVPWRSRCEQMQAKFPCTYRPSKSTDKLPLPAAVCLPCQQRRGKKKDPTPTGTKSSQEMKRNEVWTTSSTNPSYYPT

SEQ ID NO: 125072 - protein, 1208 aa, Oryza sativa
  Clone ID: PAT_MRT4530_27751C.1.pep
MLSMRHTLLQVQHILHSRTHHSRMADVAADRPPAAEQEEARPPSSTAAVAEEDEEEEEGDVCRICRNPGDDEHPLRYPCACSGSIKFVHQDCLLQWLDHSNSRQCEVCKHAFSFSPVYADNAPSRLPFQELIVGVGMKACHVLQFVLRLAFVLSVWLMIIPFITYWIWRLTFVRSLGEAQRLFLSHISAQLILSDCLHGFLLSAIIVLIFLGATSLRDYIRHLRELGGHDAERDDGGRERHGARAVRRLPGPNNRVPAADGNVDELAEAQGLGAGELLRRNAENVAARLERLEAQVEQMLDGLDDADGAEDVPFDELYDIAMLQNFLLLMGQFGSDKYYFLRPTKCVALSSRSSITIVDCEYVWYTESIKQAAPHHLLWRLQLLPPRIPPPLIAGHAAPWLLAAATNLAAPLQVAVAAAAALWVAAVANVQSTAGKIEGSWGAAKIGDREKVLASNAIFLIVVIFVPFSLGRIVLYYLSWFFSSASSPMLARMMPFTETAISLANDTLKSALNAVKNLSADSHNEGVIGHVIEVVTQSLKINATGLTVMQASGKSSLIKGTAIGSSYLSDLTTLAVGYMFIFCLVFLYIGSLALLRQFFAGMKHLMTMVKVAFLLVIELGVFPLIIFDPFTEIPVDVLLFQICIPFAIEHFKPRATIKALLRHWFAAVGWALGLTDFLLPRHEENGGQENWNGRAGRDRVHGGREMVAPQLEQRMIQHVADNLNGRGNANDSNEVAEESDVDDQGDSEYGFVLRIVLLLVLAWMTLLIFNAGMIVIPISLGRLVFEAIPRLPITHGIKCNAAGTRYAIDYIRSRRLAFLVQQICKWCSIVVKSSALLSIWIFVIPVLIGLLFELLVIVPMRVPIDESPVFLLYQDWALGLIFLKIWTRLVMLDQMAPLVDESWRTKFERVREDGFSRLRGLWVLHEIIMPIVTKLLTALCVPYVLARGVFPVLGYPLIVNSAVYRFAWLGCLIFSALFFCGKRFHVWFTNLHNSIRDDRYLIGRRLHNFGEDSLHSSEPGTTTASDDDEHEQALIPRDQEGELGLRKLRDTEFFTRQDPYVCIEYATNKFRTRTCTDGGRNPTFDEKFHIPLIEGLRELTVTVWNSNTLTHDDFIGNGRDKHTHRSRREKHTNRSRSEKHTHRSLKYNHTHQSHRDNHTHRSRRDNHIHRNHMDKLTHHLQKDSPHIHLRPILQLIHQHHIDMAHLVD

SEQ ID NO: 125073 - protein, 301 aa, Oryza sativa
  Clone ID: PAT_MRT4530_27752C.1.pep
MGNVTSSVAARLAFFPPEPPTYELVAEEGGGGGGVVRMTGVSADAGVEVHALPTKGGTRVVAAFWRHPSARLTLLYSHGNAADLGQMLGLFLELRAHLRVNIMSYDYSGYGASTGKPSEYNTYCDIEAVYDCLTKVYGIEPEDLILYGQSVGSGPTLHLASRLEKLRGVVLHSAILSGIRVLYPVKVTLWFDIFKNIDKIKQVDCPVLVIHGTADDIVDFSHGKRLWELAKEKYEPLWVKGGGHCNLETYPEYIRHLRKFINAMEKLSKDKTAKAPQLAPSSSNNNMTEVKHNKCLRFGKR

SEQ ID NO: 125074 - protein, 55 aa, Oryza sativa
  Clone ID: PAT_MRT4530_27753C.1.pep
PLCPTPKNVKIHEKSKKSSYLWKKKKKKKKKKKKKKKNKKKKKKKKKKKKKKKTK

SEQ ID NO: 125075 - protein, 112 aa, Oryza sativa
  Clone ID: PAT_MRT4530_27754C.1.pep
MNEDLHILPVINKRWFVHQQAFRTKYYALAPSSLEPPSPPSLQPCAAAVPVIAVAREDRRRGRQVAAVLVRLFVAAEDRRSTVAAVDPISAAASSSSPSPSVDLPPLLWSPG

SEQ ID NO: 125076 - protein, 253 aa, Oryza sativa
  unsure (1)..(253): unsure at all Xaa locations
  Clone ID: PAT_MRT4530_27755C.1.pep
GVSFLSANWTGRRRQSPPPARSEAADPAPPRPDPAIPHLDLRXRRREGLGWRSGVRAWWRRHVAGGETAGSCGSAGPARARSRRRAVARRGRXRALKRRTVAARRRLGVADPRAEAAVAWPAAQGGSGSSAAAPXAQPGSGGSAARRRAGVVAAAMVVLRELAAVGCLPRCRSAPSPFLELLPFXCGEILGWIEAATRRRGKLRLSKQXHLVLGSSLAKTGEAAGGWWNRGVLGQLSGVVLTVGALWMCRPEA

SEQ ID NO: 125077 - protein, 277 aa, Oryza sativa
  Clone ID: PAT_MRT4530_27756C.1.pep
MTAGGGGRRRRQGGGAQRVGGGEHRAPHRDGGVVAGVGDHDGGVDAVRPRRRRPRRRHGLVQRLPLVQIRGGGGPGVGGAAGGGDLPGGGEEGGGGEGGGAHRQARPGADVLVGRAAARRRRHHLLRPPALLPRRPRRPRRRTAAGRRPLQPARPVLRPGPRVVGLLPSRRDLLLRLRLHQARRQARRRRHAAADDEEEETAVLPSSARQDTSTGTTRVPFAAEGSSAHAAAAAWFTEEAGDSGRGGGGAAGPSHGSPRSRRTGHGGRGGVAADDAS

SEQ ID NO: 125078 - protein, 114 aa, Oryza sativa
  unsure (1)..(114): unsure at all Xaa locations
  Clone ID: PAT_MRT4530_27757C.1.pep
GRVKYGVPPLPVVGPXKVDLTLEGTLSLCRQIPHPAIIGKVGNILGQRKVNISFLRVGRPFPGKQAFMAIGVDKEPPKKTLEPMGPIPGIEEFFFPHLLLTPPPPPPAFGIQVG

SEQ ID NO: 125079 - protein, 82 aa, Oryza sativa
  unsure (1)..(82): unsure at all Xaa locations
  Clone ID: PAT_MRT4530_27758C.1.pep
ARCDSPEEHWPSLSGQWHTPFSGSLTAPCVVVTPTVAVVLSSALAPALFAFLPPSLVSFAPFLRVALVRWLRXGFRWRALRC

SEQ ID NO: 125080 - protein, 171 aa, Oryza sativa
  Clone ID: PAT_MRT4530_27759C.1.pep
RGVGHLDNPLLSSPDREEARNGAPPPHPYAPAELHLPGFVPLQLSQAQILVPYRATSLFLPPAAWRLPPRCTRRLSDTPAPPAAEEKPAEAEAAVATKEPAAAKPPPIGPKRGTKVKILRRESYWYNGTGSVVTVDQDPNTRYPVVVRFAKVNYAGVSTNNYALDEIQEVK

SEQ ID NO: 125081 - protein, 652 aa, Oryza sativa
  unsure (1)..(652): unsure at all Xaa locations
  Clone ID: PAT_MRT4530_2775C.1.pep
GGASVGGVGGAAAAAARAGGAGARQHGSFANNPSLCGPGTTKPCPGAPPFSPPPPYNPPTPVQSPGSSSSTGAIAGGVAAGAALLFAIPAIGFAWYRRRKPQEHFFDVPAEEDPEVHLGQLKRFSLRELQVATDTFSNKNILGRGGFGKGXLSYLHDHCDPKIIHRDVKAANILLDEDFEAVVGDFGLAKLMDYKDTHVTTAVRGTIGHIAPEYLSTGKSSEKTDVFGYGIMLLELITGQRAFDLARLANDDDVMLLDWVKGLLKEKRLEMLVDPDLQSNYIDVEVESLIQVALLCTQGSPTERPKMAEVVRMLEGLHLAQSRWHTFPVMAAAGELANDGGDASPVTPCPLEVAAAMQLLFLFLPRRSPLSSLDCGVVPRQLASACAAEVQRTGGGDEASTAPRQIRRRSAACGVARGGPPAGVMNTLLSKLSKILEDKYTKLKGVRRQIAFFRNELSSMKAALEMLETVEELDPLQKEWRDTVRELAYDIEDCIDPFLVLVDQKQDEQSTFFKGFSYKLKKMKARHEISNEIEELKTRVIEASKRHKRYNFVGLQSSHGTSGIDPRLRALYVEVDELVGIKGPKEHVMEWFAKGRGDVEVKAIRHFVNQWQQIILNGLRVVTEGQDKSKESSSLHKKAQWRELPSLPRNIG

SEQ ID NO: 125082 - protein, 149 aa, Oryza sativa
  Clone ID: PAT_MRT4530_27760C.1.pep
MASTINVASATSRFLLAGGNGGSGGGGASRVSFAANRVGRRRVVVRAEEEAAAPPPPPPPAAEEKPAEAEAAVATKEPAAAKPPPIGPKRGTKVKILRRESYWYNGTGSVVTVDQDPNTRYPVVVRFAKVNYAGVSTNNYALDEIQEVK

SEQ ID NO: 125083 - protein, 264 aa, Oryza sativa
  Clone ID: PAT_MRT4530_27761C.1.pep
MASRFQLILSTFVVIAAVTMLPRPCASIEFHRKLSSWSNGGATWYGAANGAGSDGGACGYQGAVFQAPFSSMIAAGSPSIYKSGLGCGSCYQVKCTGNSACSGNPVTVVLTDECPGGPCLSEPVHFDLSGTAFGAMANPGQADQLRAAGVLQIQYNRVPCNWGGVKLTFVVDVGSNPNYFAVLVKYENGDGDLSGVELMQTGAGAAWTQMQQSWGAVWKLNAGSALQAPFSIRLTSSSGKTLVASNVIPSGWKPGMSYISTVNF

SEQ ID NO: 125084 - protein, 294 aa, Oryza sativa
  Clone ID: PAT_MRT4530_27762C.1.pep
MVVVRAEEEAAAAMASTINVASATSRFLLAGGNGGIDLPCTWAERERDSPSLLPRRPARSDPIRSSPVQIGRKPGMGHPHPHPYAPAELHLPGFVPLQLSQAQILVPYLATSLFLLLAVWLISGRCSRRLSDTDRWLMCWWAFTGLTHIIIEGTFVFAPNFFSNQNPSYFDEVWKEYSKGDSRYVARDPATVTVEGITAVLEGPASLLAVYAIASGKSYSHILQFTVCLGQLYGCLVYFITAYLDGFNFWTSPFYFWAYFIGANSSWVVIPTMIAIRSWKKICAAFQGEKVKTK

SEQ ID NO: 125085 - protein, 123 aa, Oryza sativa
  unsure (1)..(123): unsure at all Xaa locations
  Clone ID: PAT_MRT4530_27763C.1.pep
XITPLKRLXNYXNYPPNRGLPGASRLKIPVSKNRXLRQMTKEARXXRRRRRRSPSVAXCRRHRXRSSAAGCCGCGGRTLPSSNSAVPTRPPXCSRSRSLPLRAAAADAVAEEVRAGXLPLHVE

SEQ ID NO: 125086 - protein, 66 aa, Oryza sativa
  Clone ID: PAT_MRT4530_27764C.1.pep
AQKCSACRINELEIYSVLISFKEELSTCRSLNCKQKSIEKTLCFILGPNLSINGYSSTTSLELDHV

SEQ ID NO: 125087 - protein, 73 aa, Oryza sativa
  Clone ID: PAT_MRT4530_27765C.1.pep
KRMCLAVDAQLVVPALMHLPAYYEYVFLGYFHLIKYLLFDYTLCFGSCFSIIWLLPTCWLPLICHSNISTSGP

SEQ ID NO: 125088 - protein, 68 aa, Oryza sativa
  Clone ID: PAT_MRT4530_27766C.1.pep
MLPRGPYPATTWRGEWAEQEALFSVINERHPNRPSLHLMRRIGQVVVPPRPALCQAEWGQVEDGAGPT

SEQ ID NO: 125089 - protein, 72 aa, Oryza sativa
  Clone ID: PAT_MRT4530_27767C.1.pep
VLSSTNYFILFCSYFFFFRHGQDKKLGSIPSPRRLDAREDRKSGWFVQSRCDNFEGTWRWLELVDQLIDPVF

SEQ ID NO: 125090 - protein, 67 aa, Oryza sativa
  unsure (1)..(67): unsure at all Xaa locations
  Clone ID: PAT_MRT4530_27768C.1.pep
MNQVQHWNRSGFDKELDSKNRVCIGCGGIGWSLHRLRXIGQRTADTADGVGIADSDENGFGAVSRID

SEQ ID NO: 125091 - protein, 326 aa, Oryza sativa
  unsure (1)..(326): unsure at all Xaa locations
  Clone ID: PAT_MRT4530_27769C.1.pep
CAPRAEETKRRRRQDGGDDGDIIVGDPREVGILPPDVGGADERHGGGSGGGGARDAGVAGGAATIGHGGVDGDDTEHCGGGGGGGGEEAAVRGPAQVAGGAAGARQVRERPARLHIASKVADGMAFMHGALRGGDGDGDGANANLSFSSSYEEDEAGGAIAHGNLKASNILFTATMEPCISEYGVTAPPPPSSAPAAALRADVRAYGVLLLELLTGKATAADGAELSRWVTAVIREEWTRAADGAPAAGRHEMHRRRLLAVAAAHHEGGRWHGERHPRGRRHVALLGGMTXSDTDADEHQALDQCVQQCKIPHKTNSNLHAWRVKQ

SEQ ID NO: 125092 - protein, 631 aa, Oryza sativa
  Clone ID: PAT_MRT4530_2776C.1.pep
MAAHRWAVWAVLLLRLLVPAARVLANMEGDALHSLRTNLVDPNNVLQSWDPTLVNPCTWFHVTCNNDNSVIRVDLGNAALSGTLVPQLGQLKNLQYLELYSNNISGTIPSELGNLTNLDRRLNNNSLSGSIPKSLTAITALQVLDLSNNNLSGEVPSTGSFSLFTPISFANNPSLCGPGTTKPCPGAPPFSPPPPYNPPTPVQSPGSSSSTGAIAGGVAAGAALLFAIPAIGFAWYRRRKPQEHFFDVPAEEDPEVHLGQLKRFSLRELQVATDTFSNKNILGRGGFGKVYKGRLADGSLVAVKRLKEERTPGGELQFQTEVEMISMAVHRNLLRLRGFCMTPTERLLVYPYMANGSVASRLRERPPSEPPLDWRTRRRIALGSARGLSYLHDHCDPKIIHRDVKAANILLDEDFEAVVGDFGLAKLMDYKDTHVTTAVRGTIGHIAPEYLSTGNISEKTDVFGYGIMLLELITGQRAFDLARLANDDDVMLLDWVKGLLKEKRLEMLVDPDLQSNYIDVEVESLIQVALLCTQGSPTERPKMAEVVRMLEGDGLAERWEEWQKIEVVRQEVELGPHRNSEWIVDSTDNLHAVELSGPRKNHGIITLASSGKGSELSDDAVGLTGILYLDI

SEQ ID NO: 125093 - protein, 832 aa, Oryza sativa
  Clone ID: PAT_MRT4530_27770C.1.pep
MGLLLDRGSFPPPWIFSIANSLFQLDHPFRLIRPFLIEVLKIFKLEFPQLTPNVLVRVGIFEWMIRSCGGNPRAEDFAYFHSIRRYTKQNSKFGCLNFSPHSKHGCPWPAVLAIRIKWGNKWQSRWFYHQIPANLLADKECPFTFSCKIAKVIVEPPAALTADFLSIRSRMEELVSKFSVRDLVEEFVCLGIQPLTAEWTILLGQVPREAASTLPPFEVDPNTVIPTDIVHPCRKYLSPYTKDEHAKYQSLQNGLRMNRVMSALGLDIPARVHPEIVPDSGKKKKKKKAARKMSSDEDDIEVEENEENTDNDGNDGNEEHVENEENEGNKSGEGSLSSDDDSSDSSSDDSNSSSDEEIASVVPPAQAAPSVLKRKISPSGSLQIVVDSDDEIDKDNTLVDICAINVTPLRADASLATPANAIAPLDVLASVATVVEKNVEADLIIQDVLGGFSERCTKNGRWLMGLPNFSDLGENSHLGSNFCINYLKYRHPLGSVGDELKKILITPELEKEFVEENDLMSSWAALDVSAAQTSTIAWLQCGVSMKALTAICVRRKKSLERIAKLEKDREFLRHEVERVSDEKQVAADLVRKLSSDKKGLIDEKRSFIEENKKLHAHIKILEQSVADHQEVSRERAISADKLKEQLAASEKENKQLELARLNQEEKNSSLLKELEDCRSKLLESCKMVQDAVQKLGANVSLPADNSTLSVLANWVEESSTGLVDGIEPFASRCSKISAEALSASLLSNGCDHFSGLKESITDLLGDESKFAQHRAAIRSVVKAFQVWYWKNRGYEDTLASLWASLASSSHTTQSSSSQPDDGGDAHISDSQV

SEQ ID NO: 125094 - protein, 166 aa, Oryza sativa
  Clone ID: PAT_MRT4530_27771C.1.pep
MEDLAATLMSSFSHRHSAPLYLFYNVASLPKHHAGRGGGGGGGGGGGGFEFATAAGGKQQGGVDDGEDGGGAGVRACSSDLSAAAFADELFREGALLRPLKLPPRLQTPSASAAASAATSPTAASKAASSSRSPFASRRSKHEGFDPFAAALEKGSKDYIKSHDDL

SEQ ID NO: 125095 - protein, 615 aa, Oryza sativa
  Clone ID: PAT_MRT4530_27772C.1.pep
MEKSKVVVFAGRVLAIVALLLACCCMAAAAQGGEGARVRESLIGFLTELAGGDKERARGIGWDASGEPLTHIYVGDNRLSGSLPPSLAELASLHVLNVSRNSFSGEIPAELSKLGLVRFCVNDNRFNGAIPEFELSRFEHFSVANNNLTGPIPDDAGDFGRDSFSGNSDGLCGRPDFPPCPPPPSSGENDGKRRRRARTIVMCLGYVLLGAGVAAFVLYMMCSKRRRRPSGVGGKTAATTETSSSVTPGKSAYSLPMSEERMNATAAAAAAVARATPASLVVLQRSGTAASTVMTLNTAAAAAAEAARKLRFEDLLRSPAELLGRGRFGSAYKVVVPGGAALAVKRVKDAAGAEEEEEFRRRMERVGKARHPAVLPPLAFYCAMQEKLVVYEFLGHGSLAKLLHGSIESSQVALDWPARLHIASKVADGMAFMHGALRGGDGDGDGANANLSFSSSYEEDEAGGAIAHGNLKASNILFTATMEPCISEYGVTAPPPPSSAPAAALRADVRAYGVLLLELLTGKATAADGAELSRWVTAVIREEWTAEVFDRAMLSSAGAGGDTVASEQRMVRLLQVAMRCIDDASSPSPPPTMREVAGMVNAIREEDDMSLSSEA

SEQ ID NO: 125096 - protein, 231 aa, Oryza sativa
  Clone ID: PAT_MRT4530_27773C.1.pep
MSLKLVGGGDYDPRGDWPARLDGDGSAVGEEPHRHRERHVRSETAARDRTRRVRQTDRRRLAREQGGQNEQEAADGEVAEAVAGVEGDEAAPVVPARLHIAAKVADGMAFMHNTLCGGGGGDADDVNENLSFSSSYEEDEASSFCGGAIVHGNLKASNILFTGTMEPCISEYGITTPPSVAAPSSGAAVLRTDVRVYDVLLLELLTGKATAADGAELARWVTAVIREEWTV

SEQ ID NO: 125097 - protein, 94 aa, Oryza sativa
  Clone ID: PAT_MRT4530_27774C.1.pep
NHATYPANLKTHPSDEKKMKKKASNLKIVLCANQKEKSTRCTAASASLPLHFRPHPTTQSSRSTPSMPASVMSIFRALPPLPLFQPLSPSSPLV

SEQ ID NO: 125098 - protein, 432 aa, Oryza sativa
  unsure (1)..(432): unsure at all Xaa locations
  Clone ID: PAT_MRT4530_27775C.1.pep
MASAAEEAKGVEEGGGGASANGGDNPATATASASAAAAASSSSXADDRGLPRSSTMPGGINNVEITNETAGPSNLERSRTERRRQNNPADDPTKQLFDDKISLKKKLEMLNRIATVKDDGTVVVDVPSSLETSTTDGVAYDGYSDVTVEEPLDGADISVRPPMDIVILIVGTRGDVQPFIAIGKRLQDYGHRVRLATHANFKEFVLTAGLEFFPLGGDPKILAEYMVKNKGFLPSGPSEIPIQRKQMKEIIFSLLPACKEPDPDTGIPFKVDAIIANPPAYGHTHVAEALKVPIHIFFTMPWTPTSEFPHPLSRVKQAAGYRFKFNIFKLSYQIVDSMIWLGIRDMINEFRKKKLKLRPVTYLSGAQGSGNDIPHGYIWSPHLVPKPKDWGPKIDVVGFCFLDLASNYVPPEPLIKWLEAGDKPIYVGFGSL

SEQ ID NO: 125099 - protein, 274 aa, Oryza sativa
  Clone ID: PAT_MRT4530_27776C.1.pep
MEKSKVVVFAGRVLAIVALLLACCCMAAAAQGGEGARVRESLIGFLTELAGGDKERARGIGWDASVEPCDGNRTVWPGVGCNGAPAGDGRITAIVLERKGLDGTINAASLCAAAPALRVLSLEGNALRGDLPAAISGCARLTHIYVGDNRLSGSLPPSLAELASLHVLNVSRNSFSGEIPAELSKLGLVRFCVNDNRFNGAIPEFELSRFEHFSVANNNLTGPIPDDAGDFGRDSFLRQLGRPVRPAGLPAVPAPAELRRERWEEEEEGADDRH

SEQ ID NO: 125100 - protein, 287 aa, Oryza sativa
  Clone ID: PAT_MRT4530_27777C.1.pep
MAYKKATAVLDEAARARLRGPFASGAASLRRDQDDDDDDLLVDLVHEFYDDGERGADATARGGVSSSPEPEPTEWKDALREALADATSDAAAARIRAEAERAVRDAVRNGGDVIRKRVVERLRARGFDAGVCRSSWERTGSVPAGSHEYVDVTAAASATGRRARYIVEVNVAGEFEIARPSAEYQDLLLSLPPVLVATPEAFRGVAAAMCAAAAESIRGAGMHLPPWRRARYVQAKWSAPYERVAAAAPPEGARTAPSGGRKRCGMEIGRREMAIGKERLVPFFRGL

SEQ ID NO: 125101 - protein, 121 aa, Oryza sativa
  Clone ID: PAT_MRT4530_27778C.1.pep
MNYDVCFFKELDDVYFEIWQRVTKQKMSFRDAMKEVYELNRFPVRQQKMKYVLEINDCSQWEAEFHTCTACITEEVAEDQVLGLIADAVKKLRDKPRFYDDYIKKKINIAQAIGLITTEEA

SEQ ID NO: 125102 - protein, 546 aa, Oryza sativa
  Clone ID: PAT_MRT4530_27779C.1.pep
MAAQEMEVMMVAMAAEAPVAVEVEAVPAVAGGLNATVPALYVGDLHESVREEHLLEVFGKIGTLTSVRVCRDNATSNSLRYGYVNYLSQADAAIALEKLNHSLILDKPIRVMWSNRDPDARRSGVGNVFVKNLNDLVDNVSLQELFCKFGDILSCKVAKNEDGTSRGYGFVQFALQESADASIQNLNNSHFCGRQLHVATFIKKSERSTNNDDKYTNLYMKNLDDDITEELIKLKFSQYGLVISVKIMKRDDGTSKGFGFVSFQNPESAKRAKESMNGMLLGSKTLYVARAQKKAERKQYLQRLHEEKRNEIITKSNGSNVYIKNINDEVGDDALRERFNEFGNITSAKIMRDEKGISKGFGFVCYNTPEEAKCAMRNTPRQYRNNRGRMNGNMMHFHHTVNYVPHAQPAKEFMSMSRQRFSHAKYIPNDIMANGLAIHHGDSISSMNDAFNNLLATAPPEEQKNMLGNRLYPLVERHHPDLASKITGMLLELGNSEVVMLLYSSNMLSAKIEECVKLLQEVKPKPEDQEALHPGFLLDSAGVNAN

SEQ ID NO: 125103 - protein, 89 aa, Oryza sativa
  Clone ID: PAT_MRT4530_2777C.1.pep
MLTPLPSAGSREGSRIPRGGGRLAAGSVAGTAAACRIPCIHCRHTPPSLSPWAAAVAYTRRPPSALSPRWSFEEEVIEKMKATSDRLVE

SEQ ID NO: 125104 - protein, 96 aa, Oryza sativa
  Clone ID: PAT_MRT4530_27780C.1.pep
RKIGLIPPGLGSQEDGPPQFTTANNPGRKTEIGGKSPGLGERHNRCLEFFWPLKNRVLPGLGKEFFARRGIFTLALHQEPLPHLNNGWQHNHRNRG

SEQ ID NO: 125105 - protein, 219 aa, Oryza sativa
  unsure (1)..(219): unsure at all Xaa locations
  Clone ID: PAT_MRT4530_27781C.1.pep
MEKNVEEANLITQELNDLGLGEDISTDKFRGYLCQLPQERDSPVDISTQLNFDQLDAQNELHELYRVKYYKLEEVLMCFENDGTLDSVDDEVLWEVLKCFDYTFVWYFHPEYCKLAALVDYQRLVIKNYELDGVYFEIWQRVTKQKVAEDEVLGLIAEAVXEAGRVAGGEEVRQPPPPGGGTCDLGIGGDDDTGGRGQHAGARRRRVGDAEADEAAAGV

SEQ ID NO: 125106 - protein, 60 aa, Oryza sativa
  Clone ID: PAT_MRT4530_27782C.1.pep
IFTGPWKMAYPVRRRKVSPWKKFAGFQFLFPGGPTGGQTKQLKEGTTPTAGLFKSPHAFE

SEQ ID NO: 125107 - protein, 483 aa, Oryza sativa
  Clone ID: PAT_MRT4530_27783C.1.pep
MPPKHRGSSRGPPPPSGKNMPAIGASEKKTTPNLRRLAVSTINDIVDVSAGIDSTTPKGRRFAVLGELDDDDDDVMDSCVPGLSGLSGPSQEKAAPHNKQAKKKKTWVPPRRKKSFRFSKALNSPADQDDDTEQDYSVPVAIATECNDATMEKNVEEANLLTQELNELGLGEDISTDKFRGYLRQLPQEQDSPVDTSTQLDFNQLDAQNELHELYRVKYYKSLQQVSGTRSKLDHDEMINQYPFDMSKQLEEVLICFENDGTLDSVDDEVLWEVLKCFDYIFVWYFHPEYCKLAALVDYQRLVIKNDGCMYANWDKYHMYFNTYDVEKQYVKYYGELSKKLKWGRVSNRGLYQAVKIATGFPKITARLAYLGFHEFVSSMNYDVCFFKELDDVYFEIWQRVTKQKMSFRDAMKEVYELNRFPVRQQKMKYVLEINDCSQWEAEFHTCTACITEERDKPRFYDDYIKKKINIAQAIGLITTEEA

SEQ ID NO: 125108 - protein, 86 aa, Oryza sativa
  unsure (1)..(86): unsure at all Xaa locations
  Clone ID: PAT_MRT4530_27784C.1.pep
TSLHLVEXSXARDAHXARYNLDGRDFXGSXIIXXYAKGXPRGPGGXSRXYMXRXPPPGSXRCFXFXIDGHXAXXXKXGDLKNRCLS

SEQ ID NO: 125109 - protein, 91 aa, Oryza sativa
  unsure (1)..(91): unsure at all Xaa locations
  Clone ID: PAT_MRT4530_27785C.1.pep
MKENIMKKSIVRHMKLEIEDDHRVGALYDTMISDEASDDAVGXEFKVYGSRIMGXCDKDXLGYQQGXSVMKXVPLLLYRGTPCSRGYGKLD

SEQ ID NO: 125110 - protein, 153 aa, Oryza sativa
  unsure (1)..(153): unsure at all Xaa locations
  Clone ID: PAT_MRT4530_27786C.1.pep
ALPPPFALWLLYRTDPANGKRLNEGRKKPVSIISPEKAPEQHADDFPKYMCKTKXVFDCYFVMNYWYMRLLVLIFGDYYRSDFGYNXIFXVXIGITADTVYSVRPGCGIRLKXMHVVGENSIWHTREILCAYGMRSRIWRESKFSTIGVCKVF

SEQ ID NO: 125111 - protein, 108 aa, Oryza sativa
  Clone ID: PAT_MRT4530_27787C.1.pep
LPGMSFRVPPVDVSVVGFPVRIEKAASYVAFKSAFKFASEGKLKGFFGFVGEDLVFPAFVGDTRLGFFSPKGGIVFNDNFVKLVAWCANEGGFSTRVFALFPPMAKTP

SEQ ID NO: 125112 - protein, 97 aa, Oryza sativa
  Clone ID: PAT_MRT4530_27788C.1.pep
FISFFSFLAALWHMEFPVQGSDQSHSCDLSLNLTLILILGWGLNLCFSISKMLPSLLCHNRNSKLSFLKLFNLAFYHYKLLIYFSSNASFIKDYINR

SEQ ID NO: 125113 - protein, 198 aa, Oryza sativa
  Clone ID: PAT_MRT4530_27789C.1.pep
EEDILVVCRVVELPPPEYTMQGSPNSSCRILLMARLAGSPRRRRPQAAGAGSAAAANGQQEQRGGVAGGAERRQAADGVEVRSGGEPMSSRLSTLPGWERSGGAGQERRHERRIRGFDGDDDVKAAVRVGGARAAQPCGRVELRRSGCFRLFDYLVPDDVGSLKSDRIHMGFFRILWSQQRELPFIYVSYNMKHSFFH

SEQ ID NO: 125114 - protein, 143 aa, Oryza sativa
  Clone ID: PAT_MRT4530_2778C.1.pep
GVGRRIAAMAAPRWAVWAVLLLRLLVPAARVLANMEGDALHSLRTNLVDPNNVLQSWDPTLVNPCTWFHVTCNNDNSVIRVDLGNAALSGTLVPQLGQLKNLQYLELYSNNISGTIPSELGNLTNLVSLDLYLNNFTGPIPDS

SEQ ID NO: 125115 - protein, 193 aa, Oryza sativa
  Clone ID: PAT_MRT4530_27790C.1.pep
HATHVRVAAAAAHRRRQVEHGGERRRAGVGRRRRGDTAHQHSGIENGDGGVEDDARAAAVAAEAEVARAAVGGAEEEVARAAGGEGGARSCSRQRRRRQRQVAARTTAAMVERWKCRRDRHAEEAQHPAHVTGADGGHRISHQRHPPHPQVEDDNDELGRGGSDRVSEPRSGRAESTTPRGRAAGPSPCAAVH

SEQ ID NO: 125116 - protein, 503 aa, Oryza sativa
  unsure (1)..(503): unsure at all Xaa locations
  Clone ID: PAT_MRT4530_27791C.1.pep
MAPITSLLPKFISLSMLMSSYMASLSPTVKVLHPSLSTGNDGEPVQSRPQLHSILVILPYLVSVKWQKETFPGIEIDTSQPPVVFKTQLYTLTGVPPERQKIMVKGGILKDDADWSTLGVKDGQKLMMIGTADEIVKAPEKGPVFVEDLPEEEQVVALGHSAGLYNLGNTCYMNSTLQCLHSVPELKSALLSYSDNVRGNGVDQASHNLTVATRNTFGELDQSVRPVAPLLFLQTLRKKYPQFAQQQNNVYMQQDAEECWTQLVYTRSQTLTSETRVHCAESGEESLERESVYSLKCHISHDVNHLHEGLKHGLKSELXKASPSLGRTALYTREYLTVQFVRFFWKRESNQKAKILLKVDYPLELDVYDFCSDELKQKFQAHRQMMRDAENAKFGLKAQGKGSSSKENEGSSVSIQVACCEPYFNTFNLKHLTGIYDLIAVLTHKGRSADSGHYVGWVKQDDGKWIEFDDDNPSIRKEEEILKLSGGGDWHMAYICLYKARVI

SEQ ID NO: 125117 - protein, 777 aa, Oryza sativa
  Clone ID: PAT_MRT4530_27792C.1.pep
MVAPRSQSVESPVKRQQDSINGQLARLRKSIYEIVQELVMGQKQTRNVRRALLQDIGYLCYFFGHRQTNDFLLPILPAFLNDRDEQLRAVYFGQIVVVCYFIGSRSVEEYLLPYLEQALSDEMEVVLVKVLDCLTMMCKSGYLRKRAIVGLFGKALPLLCHPVQWVKRSAVRFVVACSESIGPVDTFVYLFPHLKHFLHREPPSLSSETALLSCIKPPVSKLVLYQALEDVHDAGDILLKGDGKKELTVHGGRYPAMVQSGSSIMIEDDSRLRGPKMSNDVSLNIKDFSSASSAYISSAVHGSSSFYDGVPKGIPLYSMQGTALHANLGSDRHGSLSSSVPGIRSFTRPALSLETTWKPRGVLMAHLQEHRLSVNDIAVSTDNTFFVTASDDSSVKIWDTRKLEKDIAFRSRLTYSLGSSRALCTTMLHGTPQVIGGASDGTLHLFSVDCARGVGSVIERYSGIADVKRKDLKEGAILSVVNCSTESFSPTILFSTEHCGIHKWDTRTNAESWSFRSSPEEGYVSALVVGQCGNWFISGSSRGVLTLWDNRFLLPVNSWKYLPATPIEKLGLFIPPPNSISSFGRPVVFVAAGCNEVTLWDAENGSRHQIFRTASTENEAVVPKAPSIHPNTRDETRPANYNYRIEELCDPPPRLPGIRSLLPLPGGDLLTGGTDLKIRYWDQARPEQSFCIAGPSVKGAGNDETYDIRSSSCVQVVQEICRQPTTASRLTHKTQLAMAAADSAGCHRDAILALASVNLSSHRLISGSRDGAVKVWK

SEQ ID NO: 125118 - protein, 51 aa, Oryza sativa
  Clone ID: PAT_MRT4530_27793C.1.pep
YFIKKKKKKKKKKKKKKKKKKKKKKKKKKKENKQKKKKKKKKKKKKRGGPF

SEQ ID NO: 125119 - protein, 1488 aa, Oryza sativa
  Clone ID: PAT_MRT4530_27794C.1.pep
MGNKIAKTTQASATEYYLHDLPSTYNLVLVEVVSRGRFLKSVRCKHDEGLLLVKVYFKRAGEPLDLKEHERRLERIRNAFEGLEGSHVWPFQVWLQTDKAAYLLRQYFYSNLHDRLSTRPFLSKIEKKWLAFQLIHAVEQSHSKGICHGDIKCENVLVTSWNWLYLADFASFKPTYIPDDDPSDFSFFFDTGGRRRCYLAPERFYEHGAETQVAADAPLQRSMDIFSLGCVLAELFLEGQPLFELSQLLAYRRGQYDPIHTLEKVSGIVPCSFCVAQIILVIGPAISYALSFIPSVFLPNSQEIQDTGIRDMVLHMIQLDPKERLSCKNYLQKYESVVFPVYFSKFLHKFFSDIVPLHSDARVEKTQEYFEKMHDIMISGSTLEKIQGSATVPVHNELSGKMGIGGQTVNSPKEYAKSVPVVKINSPAQHKHIVGDLNFLLKELEKDDRTSTKITQDRDRSVTPNVSHANGIQSLQQVCQAGRTESGLMGQNNCVSHLQKISKSNLLALVSSYDAQSDTYNFDIFQQTEYKVSCEGMVLLASLLCSCIRSVKKPELRRASLILLKICSTYIDDDSRLQLVIPYVIAMLSDPAAIVRCAALETLSDVLCLIQDFPISDAKIFPEYILPMLSLLPDDTEESVRVCYASNIYKLALTAYRFLLRSRSIEDARPLDESMVAPRSQSVESPVKRQQDSINGQLARLRKSIYEIVQELVMGQKQTPNVRRALLQDIGYLCYFFGHRQTNDFLLPILPAFLNDRDEQLRAVYFGQIVVVCYFIGSRSVEEYLLPYLEQALSDEMEVVLVKVLDCLTMMCKSGYLRKRAIVGLFGKALPLLCHPVQWVKRSAVRFVVACSESIGPVDTFVYLFPHLKHFLHREPPSLSSETALLSCIKPPVSKLVLYQALEDVHDAGDILLKGDGKKELTVHGGRYPAMVQSGSSIMIEDDSRLRGPKMSNDVSLNIKDFSSASSAYISSAVHGSSSFYDGVPKGIPLYSMQGTALHANLGSDRHGSLSSSVPGIRTRENHFSNMHRDGSISDSMNSSSSIPGDIISNSDNSGSFTRPALSLETSWKPRGVLVAHLQEHRLSVNDIAVSTDNTFFVTASDDSSVKIWDTRKLEKDIAFRSRLTYSLGSSRALCTTMLHGTPQVIVGASDGTLHLFSVDCARGVGSVIERYSGIVDVKRKDLKEGAILSVVNCSTESFSPTILFSTEHCGIHKWDTRTNAESWSFRSSPEEGYVSALVVGQCGNWFISGSSRGVLTLWDNRFLLPVNSWKYLPATPIEKLCLFIPPPNSISSSGRPVVFVAAGCNEVTLWDAENGSRHQIFRTASTENEAVVPKAPSIHPNTRDETRPANYNYRIEELCDPPPRLPGIRSLLPLPGGDLLTGGTDLKIRYWDQARPEQSFCIAGPSVKGAGNDETYDIRSSSCVQVVQEICRQPTTASRLTHKTQLAMAAADSAGCHRDAILALASVNLSSHRLISGSRDGAVKVWK

SEQ ID NO: 125120 - protein, 93 aa, Oryza sativa
  Clone ID: PAT_MRT4530_27795C.1.pep
AVHAVNADKSAAKANTTMGLTYRVLAAKTPLLGHPRQYSAAVRDIDDGDTGRISMSTEQRYGPDRGKDQEPFWAHTQEDLKGESLDDYGWDTT

SEQ ID NO: 125121 - protein, 185 aa, Oryza sativa
  Clone ID: PAT_MRT4530_27796C.1.pep
EYQSSSFIHHIIIMVSQANRGNTTQLIIRVTHHQDTTHQRVSSFLSGWPVAGFIRHQLSPVSNTTTQVPRGNVSHGHTHAGQARQPRVLIVASPGSHGNTIVQGFALYAGVPPMLLDTFTTNMWLMQRVHLQKLSSQMAASCRQQSMPRLCSYQGTAGRTGQHSPAARQGGAAGYIGVAPSWAET

SEQ ID NO: 125122 - protein, 63 aa, Oryza sativa
  Clone ID: PAT_MRT4530_27797C.1.pep
AMQEITYTPSSLLLLTPHFCRELIAIAVCHDLFNESYKRSSSIYWYGTVALKRFYELQHEISA

SEQ ID NO: 125123 - protein, 99 aa, Oryza sativa
  Clone ID: PAT_MRT4530_27798C.1.pep
MLSSVLLDGLNVLRFVLAVFSFGCPCLFPRPSMLQPACSWGLCPLQPWFAGFDSLVQIRSIPCRPRCRASGVLVVFMAFLISPLGSNAAFYLFRRHFCL

SEQ ID NO: 125124 - protein, 85 aa, Oryza sativa
  Clone ID: PAT_MRT4530_27799C.1.pep
MERSSPKPVIALVLFVVCIVSCFEDATAQYSGSSNNGAAATGPMAAGGSCSLAVAAADRFVLLIRDLQLTVADLCPNPVNELEKS

SEQ ID NO: 125125 - protein, 146 aa, Oryza sativa
  Clone ID: PAT_MRT4530_2779C.1.pep
SPAGWSVLRDGYGRVDGVEDAVPGAAEEPEPVIPQRRRHRRPIAADRATSKKPQINLRSLPIRFDLILFFRYKLNPRKIEKTKLPENSYRLPLSDARTRRGFVGGITIYSTQRNQTEERKKERRGFSPSFSFHFPFPFGGSWSAVT

SEQ ID NO: 125126 - protein, 76 aa, Oryza sativa
  unsure (1)..(76): unsure at all Xaa locations
  Clone ID: PAT_MRT4530_277C.1.pep
MPPARDDESPAATGDGYSKKVLQGPYELGRVLGQGAFFKVYRARDARTGXHXAVKAIRKQQQHHHPSCRSPKARAE

SEQ ID NO: 125127 - protein, 54 aa, Oryza sativa
  Clone ID: PAT_MRT4530_27800C.1.pep
MGLTCRAIPWAVRLHETRRTPLASYRTRPDEHARLGVHRVHCSSTSEPGRLSVQ

SEQ ID NO: 125128 - protein, 64 aa, Oryza sativa
  unsure (1)..(64): unsure at all Xaa locations
  Clone ID: PAT_MRT4530_27801C.1.pep
LEKKKAEYAENMKNKVAIVXXEXXEKXXMVEXXRGEEILXAEEMAAXXRAXGHAPXKLIXCFGA

SEQ ID NO: 125129 - protein, 396 aa, Oryza sativa
  Clone ID: PAT_MRT4530_27802C.1.pep
MAQPKAASAAAQLSLAASACIAGAEAAAMVGREGAPAMVAAAAAAAMVVIGHRGKGMNALGSADPRLREVKENSLRSFHAAARVAGVSYVEFDVQTGASTIVQLNLNQMVTKDGYPVIFHDDFIFTEQDGEICGRRVTDLRLDEFLSYGPQKDQSKAGKPLFRKLNDGRVLRWDVQSDDALCTLQEALDGVDRRVGFNVELKFDDDVVFEHAKERPIFFSSFQPDAARIMRKLQDRYPVYFLTKGGTQVFADERRNSLEAAVKLCVAGSLRGIVSEARAVLRQPSAIGRIKEAGLSLLTYGQLNNVPKAVYLQQLMGVDGVIVDLVAEIAAAVSEFAAAAAAAVPVPERDSSSSYMDGGGDVGLLEMTSPAARTTASFSRREDVSFLLRLTPELVQ

SEQ ID NO: 125130 - protein, 128 aa, Oryza sativa
  unsure (1)..(128): unsure at all Xaa locations
  Clone ID: PAT_MRT4530_27803C.1.pep
LLGEGEGKEEKPLVSVEPVLAGIREGKGETTASAGIGARGRHRLLRRGEERXAPREAPRTTRCCCRRLPLVPSDSRSSTMSPMAKCIMQLMWPCPDARKTSTCAATVAAKFVSSRRWVTATVAAGVVA

SEQ ID NO: 125131 - protein, 214 aa, Oryza sativa
  Clone ID: PAT_MRT4530_27804C.1.pep
MSGDETELPLLGEDEGKEEKPLVSVEPVLAGIREGKGETTASVGIGARGRHRLLRRERKHVPTLTASAAATALVPPTTGAEGGIFLCGNEGRRKHRRRVRRSAWRRRPRSARALCGARRGGGTTSPAAYRALFRRSLSPPTTLSLPPSRIVMPPLPQPHQSPFTRLPLVPSDSRSSTMSPMAKCIMQLMWPCPDAGKKSTCAATVAAKFISSRR

SEQ ID NO: 125132 - protein, 349 aa, Oryza sativa
  Clone ID: PAT_MRT4530_27805C.1.pep
MGEAAGDRVLSRLHSVRERIGDSLSAHPNELVAVFTRLVNLGKGMLQAHQIIAEYNNAISEADREKLKDGAFEDVLRSAQEGIVISPWVALAIRPRPGVWEYVRVNVSELAVELLTVPEYLQFKEQLVEEGTNNNFVLELDFEPFNASFPRPSLSKSIGNGVQFLNRHLSSKLFHDKESMYPLLNFLRAHNYKGMTMMLNDRIRSLSALQGALRKAEEHLSGLSADTPYSEFHHRFQELGLEKGWGDCAKRSQETIHLLLDLLEAPDPSTLEKFLGTIPMVFNVVIMSPHGYFAQANVLGYPDTGGQVVYILDQVRAMENEMLLRIKQQGLNITPRILIVTSGDLDATG

SEQ ID NO: 125133 - protein, 230 aa, Oryza sativa
  Clone ID: PAT_MRT4530_27806C.1.pep
MSGDETELPLLGEGEGKEEKPLVSVEPVLAGIREGKGETTASAGIGARGRHRLLRRERKHVPTLTASAAATALVPPTTGAEGGIFLCGNEGRRKHRRRVRRSARRRRPRSARALCGARRGGGTTSPAAYRAPFRRSLSSPTTLSLPPSRMVTPPLPQPHQSPFTRLPLVPSDSRSSTMSPMAKCIMQLMWPCPDARKTSTCAATVAAKFVSSRRWVTATVAAGVVAMAVC

SEQ ID NO: 125134 - protein, 368 aa, Oryza sativa
  Clone ID: PAT_MRT4530_27807C.1.pep
MGRAPCCEKSGLKKGPWTPEEDEKLIAYIKEHGQGNWRTLPKNAGLSRCGKSCRLRWTNYLRPDIKRGRFSFEEEEAIIQLHSILGNKWSAIAARLPGRTDNEIKNYWNTHIRKRLLRMGIDPVTHAPRLDLLDLTSLLKPAAAAAYYPTQADLDTLRALEPLAGYPDLLRLASAILPAATTTGAAAAAAAEQAQLLLPWLLQAQMAQQQQQVTPPPPPPPQAAATEQFLQATSTACHQMPGLVHASPTQQLAQQPQDHMAAATCHRRGAVQHPSYDNQLDYVPALMQMASDASNLQQWSSTVSSSNNHNVNSGVSTPSSSPAAAGQINSSSTTTTTTYGLNASGDVDDAGLLINMHLSELLDVSDYM

SEQ ID NO: 125135 - protein, 324 aa, Oryza sativa
  Clone ID: PAT_MRT4530_27808C.1.pep
MAEGGGGGGGSAASAALKDQGNEQFKAGNYLKAAALYTQAIKLDPDNPTLYSNRAAAFLHLVKLNKALADADTTIKLKPQWEKGHFRKGCVLESMEHYEEAISSFQIALQHNPQNTEVSRKIKRLTQLAREKKRALDVENMRSNVDVAKNLDSLKTELAGKYGDAELGQSIFTFVVNVIESAIKVWHDTGKVDARVNFLLDDQKTDTEKHAPVVNIDKAFDSPHTHSSCFTFLRQYSEESFSKAACMVAPKSAISYPQVWKGQGSRKWKLDQSDGFFVQFESPILRKIWFVPSTTEKGRVLCRSPELLDISIHEVLPRIFKETA

SEQ ID NO: 125136 - protein, 365 aa, Oryza sativa
  Clone ID: PAT_MRT4530_27809C.1.pep
MAEGGGGGGGSAASAALKDQGNEQFKAGNYLKAAALYTQAIKLDPDNPTLYSNRAAAFLHLVKLNKALADADTTIKLKPQWEKGHFRKGCVLESMEHYEEVRVKDNSLLFLNREKDNYLFFIFCYVSFSQAFRIWQAEKIVAISSFQIALQHNPQNTEVSRKIKRLTQLAREKKRALDVENMRSNVDVAKNLDSLKTELAGKYGDAELGQSIFTFVVNVIESAIKVWHDTGKVDARVNFLLDDQKTDTEKHAPVVNIDKAFDSPHTHSSCFTFLRQYSEESFSKAACMVAPKSAISYPQVWKGQGSRKWKLDQSDGFFVQFESPILRKIWFVPSTTEKGRVLCRSPELLDISIHEVLPRIFKETA

SEQ ID NO: 125137 - protein, 1662 aa, Oryza sativa
  unsure (1)..(1662): unsure at all Xaa locations
  Clone ID: PAT_MRT4530_2780C.1.pep
MAMMLVRVSTRVMNTVLSKLSKMLEDKYTKLKGVHSQIAFFRDELSSMKAALEMLESVEELDPLHKDWRDTVRELAYDIEDFIDSFLVLVDHKQDEQSTFFKGFSYKLKKMKACHEISNEIEELKTRVIEASKRHKRYNFIGLVASCTTSDIDPRLPALYVEVDELVGINGPKEHIMEWFAKGIRDVKVKVLSIVGSGGLGITDYTSEDERQLIDRIRDRLKDKRYFVVIDDVWDVEAWKVVSLALFNNRCGSRIVMTTRNAAVASHCSSDGGCVYQMEPLNFADSKMLFCQKAFRSRELYNPHLEKVCDEILAKCGGLPLAIITVSSLLAGKHAKDEWDRMLNDIGCALANNPDAGNMTKILSLSYFELPHHLRTCFLYLCIFPEDYKVNKQRLINRWIAEGFVHEKQGWSTYEVGQNYFNDLINRSLIQPVDLKYGQAKACRVHDIILDFITCKATKENFVTTLDFAEHGHISKFRVRRLCAKNHNEEKVNKSASLNLSHVRSLTIFQHVNGTSLFVFPTLRVLDLSKSGLTENHLESIDKLHHLKYLSLRSTSITKLPTKIEQLHYLQTLDICDTKIQELPLSIAKLECLAHLYVERWTRFPDGLIGKMQSLEELEEFGVSCELGKSLQGFSQLSKLRTLKVHLFWWSDAEECQNYVSALLSSNLHHLYLTGGPLIMEKWYPPSPCIIRKLHIIGCYIRKVPNWMSSLGSLTELQLWIRRMGPNDVEILGAIPSLCFLEVRTLCGINGRIIICGNQGFRSLTYFSLRIKRCGTMLEFEAGSMPKLEHLQVEFRLHGMDCLNGASDFGIQHLSALTKVEIGIWGNICSDGIYDPAQDMDDSITRSVVSLIKATIETLPNCPTSRFQLEYDCGNCLLGETSQEFEGQGPDEAYPHEHKIFSLQELQDATDFFSNNNVLVDLFDSKLYKGRLQDGSLVVVHMDCPTADWSRRTRQFQTQVEMPVHRNLYEDIEHLLSGCYSTERPPSQAPLDWQTRLRIALGSARGLSYLHDHCDPKIIHRDIRAVNIFLNEDFEALVGNFCLAKLEDDMDTDDRTAVRGVVGHIAPEYLSAGILSEKTDVYGYGIMLLELITGKRALYHDGRARDEDIFLLDWVKRLLKEKKLKMLVDPDLRNNYIHVEVKSLIKVALICTQVSPVKRPKMVEVVRMLEGGDGLAQRWEVWWKIEVVRQEVPLTSSFSLSAPNSFANNTSLCGLGTPSAPPLHPPPPYNPGDSFRFTAMQQPLFPPVRCGTYAGRSSRTGAISGGVAAGAALLFNIPAIGFAWWRRRKPQEYFPVVPGVHLGQLKRFSLRELQVATKTFNNKNILGTGGFSKVYKGRLADGSLVAVKRLKEQRTPGGELQFQTEVEMISMALHRNLLRLRGFCMTPTERLLVYPYMANGSVASRLRERPPSEPPLDWQTRRRIAAGSARGLSYLHDHCDPKIIHRDVKAANILLDEDFEAVVGDFGLAKLMDYKDTHVTTAVHGTIGHIAPEYLSTGNSXSEKTDVFGYGIMLLELITXGKRAFDRVLLAEVTVLCNCTGRDDHDLLCLAAVPGSDKFTRLIQEKEQEKWIHPDLQNKYIDAEVESLIQVALLCTQGSPLERPKMAAVVRMLDEGDGLAERWKEWQKIEVVQQDRGAWPVXHGWTVDPNENLHADELSGPR

SEQ ID NO: 125138 - protein, 90 aa, Oryza sativa
  Clone ID: PAT_MRT4530_27810C.1.pep
NAKKGPLFKKILGPVNLKSGRKVFPLKKRRILCLNLKFLPRPRPIFFNWFKLQAWPFRDKRKNLKKKNWGIRPGQFYVCTKKHPFLQPVF

SEQ ID NO: 125139 - protein, 124 aa, Oryza sativa
  Clone ID: PAT_MRT4530_27811C.1.pep
SKRTPRIYRWVDNIKHLEIKNMVIENQEHLIECRPKIKATANFILRAIDQHATMYPGRGQLPVLPPMLSSHAADADQRPSSVVITPMPLSQMRRGRETSFEHCRSRPSIRRWPWTEAASTVARA

SEQ ID NO: 125140 - protein, 103 aa, Oryza sativa
  Clone ID: PAT_MRT4530_27812C.1.pep
HHGGVVIVADPAAALARRKMEAGARGGRERRRSLPACGGWAVASHARRKEAGAQRTRGDGAWGGRKQCLLRRRSSPARGRRKRRWRGPGKLLPPPGLHRGTAL

SEQ ID NO: 125141 - protein, 73 aa, Oryza sativa
  Clone ID: PAT_MRT4530_27813C.1.pep
KLLQSLKGYWGVPCTGLFSAGGVVVPPMLTVSFPRAFCPAFFGFFTFFLALCPCFSLFSLNGGLLLGFCFRVF

SEQ ID NO: 125142 - protein, 196 aa, Oryza sativa
  Clone ID: PAT_MRT4530_27814C.1.pep
MEGDAVLDCDVFSYTDADDANAHFSSSVFASSASDSAMYSYSDEEQLLTTGDGSPSESLSSTAKSSSSPSSSSRRLQRPSLRMQPRGRRASLRERPPRLPARARLRHNQAWEGMKGGAHAMLMVVGEVIKRESFELFCVLELVLATKLRKQEGGGGLARRWRRKEREREIGTVLASPMSGLVRWIKHVATVHIEQA

SEQ ID NO: 125143 - protein, 116 aa, Oryza sativa
  unsure (1)..(116): unsure at all Xaa locations
  Clone ID: PAT_MRT4530_27815C.1.pep
HGLVDSAVRNXPTDRTAIIALPGGIGTLDELFEMMALIQLERVGFTLPVPFLLLNYDFYYSKLLGFLASGEEWGTVAPGEVASLWKVCNGNHEALEYLAQFYNVPLAERNTAYHHS

SEQ ID NO: 125144 - protein, 115 aa, Oryza sativa
  Clone ID: PAT_MRT4530_27816C.1.pep
MSQLKSSSLAALLIFLLAVFTTAAAAAGTECQNDVEVLKTTCYKFVEKDGPKLQPSPDCCTSMKGVNVPCVCTYLGSPGVRDNINMDKVFYVTKQCGIAIPGNCGGEQASLDWPH

SEQ ID NO: 125145 - protein, 177 aa, Oryza sativa
  Clone ID: PAT_MRT4530_27818C.1.pep
FLVMIDAAIASLTNIFEQMKAFDNVFGFLFNSENLKSLDEVDLWSHCKIFAEIFTHENSSDVEINDFYSELKVLQVSLPDSSISVPEILKFVMDADCYPNVSVAYRILLTVPVTVASAERSFSKLKLLKNYLRSTMSQERLNGLAMCSIEKDILDTIDLSTVLDDFASRNARRTFFS

SEQ ID NO: 125146 - protein, 131 aa, Oryza sativa
  Clone ID: PAT_MRT4530_27819C.1.pep
MAGKASIALFLAVNLVVFSLGSACGGHCPTPTPPTPSTPTPTPAAFGKCPRDALKLGVCANVLGLIKAKVGVPPAEPCCPLLEGLVDLEAAVCLCTAIKGNILGINLNLPVDLSLILNYCGKRVPTGFKCF

SEQ ID NO: 125147 - protein, 75 aa, Oryza sativa
  Clone ID: PAT_MRT4530_2781C.1.pep
MATTLSNVWLSTEAGVESDDPWPARRTRRGVCARLGRGGFPTRTARGTVTPPDMSDKMFESINEDKEASAEDTVS

SEQ ID NO: 125148 - protein, 56 aa, Oryza sativa
  Clone ID: PAT_MRT4530_27820C.1.pep
LAWTKEKRPSITNAWMIKEVDWGPNQDLLQVYFYLTTSLLVHIRQEIKFYMSWTRI

SEQ ID NO: 125149 - protein, 152 aa, Oryza sativa
  Clone ID: PAT_MRT4530_27821C.1.pep
MPPPYSHIKVVREEDFRSRIGEDGHYFDLIDFSAIEGFNVPPTMTILRFKEKLTEKFGTPLQCQRLWWWARRQNNTYRVDRPLTTEEENLPVESLISALCFEGDHLQLFLEVLNTNSLPTWSNMDDALVFLKHYDPGKAQLRVVGWLSVKVA

SEQ ID NO: 125150 - protein, 217 aa, Oryza sativa
  Clone ID: PAT_MRT4530_27822C.1.pep
MAGKASIALFLAVNLVVFSLGSACGGHCPTPTPPTPSTPTPTPAAFGKCPRDALKLGVCANVLGLIKAKVGVPPAEPCCPLLEGLVDLEAAVCLCTAIKGNILGINLNLPVDLSLILNYCGKRVPTGFNNNRVEALTAPWHPHSGGAHTNSGSRLLKLEMVDKEGPIGLTGQTDMGWPVRPASARSDRHQLGLTDYGSVGSVSAIPSSIISASRGPV

SEQ ID NO: 125151 - protein, 75 aa, Oryza sativa
  Clone ID: PAT_MRT4530_27823C.1.pep
MWPVRPCYSATARKLAVVALSEGPIGLAGQTGMGRPVRPASARSDHHQLGLTDYGSVGSVSAIPSSIISASRGPV

SEQ ID NO: 125152 - protein, 75 aa, Oryza sativa
  Clone ID: PAT_MRT4530_27824C.1.pep
MWPVRPCYSATARKLAVEVLLEGPIGLAGQTGVEWAVRPASARLDRHRLGLTDYGSVGSVSAIPSSTISASRGPV

SEQ ID NO: 125153 - protein, 567 aa, Oryza sativa
  unsure (1)..(567): unsure at all Xaa locations
  Clone ID: PAT_MRT4530_27825C.1.pep
VTTFVITILGVSLLYQSLCHCLIFXFLKRLDLMYLLIVFLPLLGSSVAGFFGRFLGSEGTAIMTTMCVSFSLILSLIAFYEVALGASACYLRIAPWISLEMFDASWGFVFDSLTVVMLIVVTFISSLVHLYSISYMSEDPHSPRFMCYLSIXTFFMLMLVTGDNFLQLFLGWEGVGLASYLFIHFWFTRLQADKAAIKAMLLNRVGDFGLALGIFGCFTLFQTVGFSTIFACASAPRNEWIFCNMRLNAITLICILLFIGAVGKSAQIGLHTWLPDAMEGPTPVSALIHAATMVTAGVFMIARCSPLFEYSPTALIVITFAGAMTSFLAATTGILQNDLKRVIAYSTCSQLGYMIFACGISNYSVSVFHLINHAFFKALLFLSAGSVIHAMSDEQDMRKMGGXLASSFPLTYAMMLMGSLSLIGFPFLTGFYSKDVILELAYTKYTISGNFAFWLGSVSVLFTSYYSFRLLFLTFLVPTNSFGRDRLRCHDAPIPMAIPLILLALGSLFVGYLAKFWPCTDHPTDHGLNGHCLKGLCYVQGTATLHEVHLAPMGPQRRENTYVRLLC

SEQ ID NO: 125154 - protein, 53 aa, Oryza sativa
  Clone ID: PAT_MRT4530_27826C.1.pep
TVMIINFNNVLGFILTEAYVNLHDIYSDCIHPDVSNLSHTMMHDFYWSLLYYY

SEQ ID NO: 125155 - protein, 133 aa, Oryza sativa
  Clone ID: PAT_MRT4530_27827C.1.pep
MASKAFALFLAVNLVVLGVASACGGSPSCPTPTPSTPTPSTPTPTPSAFGRCPRDALKLGVCANVLGLIKAKVGVPPAEPCCPLLEGLVDLEAAVCLCTAIRGNILGINLNLPIDLSLILNYCGKTVPTGFKC

SEQ ID NO: 125156 - protein, 843 aa, Oryza sativa
  Clone ID: PAT_MRT4530_27828C.1.pep
MAAASIPASSQPFKLILGSSSVARKHILAEMGLEFEVMTADIDEKSIRRENPDELVTILAEAKADAIMSRLNISDYQKEGDRPTLLITSDIADLFLRPAHQLFSSAISVMFSGEEEDDDAEEAAFNIRREELEKVIQRQWEGDEIAMALEEQTRELSKSCSHGGDGSGSEWEIKLSSLTGKRSSFSNLTSTEGEGMSGAERMNRKRRSTARRPCYSATARKLVVVALSEDPIGLAGQTGMGRPRNLGLQSAILTAQVPPVRPALCSGQTAFLRPVRPARARRSDRHYVAGLTALCWSASCAHTGFNVVVVAIESSAPALASPLPPGSVAPLPGKVDGRDDIDPLASLRPARAVTGECDRCARTIDADEEASASPFELDVVSDVVEDDGRETNSDAIRQRTDIWRVCLFLPPPMIRSSKRRRLTPIPSDAGKMSPDWASLDQDLVGLIGGRVLAGDDMRDYVRFRAVCSHWSASTVRPLGRGVTDRRFHPRRWMMLPEGHGLYPGHPDLRGYVRFFNLSTAALVRVHLPLLRDHVIIDSVDGLLLLHRDHDTAIRLLHPFTGDVADLPPLASLLPQMESESRDRSQRSKHSRLMKVCASVTVTSTGTITVMLALEILHRVAYATPGDQRWTLSAWTLKPFVKPVSFQGKLYALQLSSYDIHKVYIYQFNPPCQDNDKGLLHLPLPVKIAECPMDKFLYLLNFAECGSELLLVAYNGVSRSKLLVYRLADLVSGRIEPVTTIGDHALFLDERCLCVSLSNNKEGSKILPSDLSNSIICMHSLQVDPSSLDIFRFEQYDLALNSAYLFSDGDIFHKPPPSPHTLIHHIFTCCNRRYWNKRIMYCSK

SEQ ID NO: 125157 - protein, 237 aa, Oryza sativa
  Clone ID: PAT_MRT4530_27829C.1.pep
MEVVWANDGGQATTSTDLAVRTRHCSASMAEGHGSFLAALRITVIYPAVARRQHGRKQQSDRPDNTALSEGPIGLAGQTDMGWPVRPASARSDRHRLGLTDYGSVGSVSAIPSSIISASRRPREHHSTGILDGTDEAYSSGKPSSDTYPSSGVGKRLTSARRGVAPTCGTHRRTDGPDLPKGRSDGGGSSRPDARARRKPNRRPWRRRRSAHAAAVRMRQRRKATADGDRPAAESGG

SEQ ID NO: 125158 - protein, 345 aa, Oryza sativa
  unsure (1)..(345): unsure at all Xaa locations
  Clone ID: PAT_MRT4530_2782C.1.pep
GETSQEFEGQGPDEAYPRQHKIFSLRELEDATNCFSDSNVLQRGRFDGSMYKGRLGDGSLVAVKKDYISRALSMGYPNIDWRTWHFQTQVEMPVHRNLMRLHGFCITPTKRFLVYPYMSNGTVASQRPPYEPPLDWRTRRRIALGSARGLSYLHDHCDPKIIHRDVKAANISLDEDFEALVGGFGLAKLMDHMDTDEPNAVRGTIGHIAPEYLSTGIISEKTDVFGYGIMLLELITGQRAFDLAGLANDDDVMLLDWVKGLLKEKXLEMLVDPDLQSNYIDVEVESLIQVALLCTQGSPTERPKMAEVVRMLEGDGLAERWEEWQKIEVVRQEVELVGNSHTLFI

SEQ ID NO: 125159 - protein, 82 aa, Oryza sativa
  Clone ID: PAT_MRT4530_27830C.1.pep
SRRRARPRRENGRGDQTRQSPPKGKEVKGPFSFRLGGIPHMMGLVALFHPPPPWSPVITPVVVFSLLRNPLCPKQGSLTPPP

SEQ ID NO: 125160 - protein, 50 aa, Oryza sativa
  Clone ID: PAT_MRT4530_27831C.1.pep
SSSNFRVQGSEPLVSLGVPQVDTHVTSSIANVELRVRTRAWVQPVQFRVG

SEQ ID NO: 125161 - protein, 373 aa, Oryza sativa
  Clone ID: PAT_MRT4530_27832C.1.pep
MEASDLNTHLPPRKRLLAGLRMAAPPCADAPPPALLTADLAARLRHMMASSSSPDDIVQAARSAASTAAQAAAAARATAAEKAAVAAKARAAARAAMEFLDSISRPASSRNGLQLKLKSRKKHVQVKLLYKPNGRLEEGRGGPPTTGDASSKPRRRGRETDEEVARKLHRAMNSSPRISFTGPKRPRTIAAENGGVLDACNGSSPYPPTFEVSTITNGCSLGQSSELPVPFSEHEGLDDDNKDSSGHDTTKSRAIVGNGVGAGNLSAGRKVKIKRKELLLNQHNSKDTQEAKEIKPSIDSIRYDESKQNGAEKRLNQLVDAKDPGDGLAPMKISSVWRFKKFKTSHCSSDSKVLHNVCPSTSAAETSASVKAD

SEQ ID NO: 125162 - protein, 643 aa, Oryza sativa
  Clone ID: PAT_MRT4530_27833C.1.pep
MGKRPPVVVLSSSSDEDEGGGRRAATRGPSARRARTPATAPAPAHAASGPRKKPRRVSSAERGRRRATGAAPSGSLKAEFDMLSEDFSECLNDLGMPEFLILLFLNYSNLFFLSVPALHAGSICQTEELWVDKYKPHSLAELSVHKKKVEDVKKWLDEKLRAPKGTFGGWTLVLTGQAGVGKSATIKAIAAELGVEICEWTAPVPTLWTEHLHANSGLGYISKLEEFENFVEKIRKYSLLSPTNFGSQRKHTIILIDDIPVTSGKVSFARLGKCLTGLIQSTQVPTVISLTQYHKSENNDTAMWNSEDLESLLQSAGAHKISFNPVTVNSIKKILVRICKQEGSDLTDDLVHQIATSSGGDIRHAIMSLQYYCLNPRRLNSALARTAILPGLKSGGSLVPGQDSYGCSSVIPTACGRDETLTLFHALGKFLHNKRETYSEVDVAVDVDSFPMKEKLRRNPLKMDIPEKVLSQAHGKVRTVADFLHENVLDFIDNDAIDDAWSVASYLSEADCLLAGSPISSTRWMVNESYEAENMTQLIAASVAARGILFGNAHVSSSRWHTIRSPRVWQIEQSFRSRKDLILRERYDCSSTSGSRNFSDVVTEFKPFERWISPHNDMPRSNSFNHNIEASSSEEDEDEIEDW

SEQ ID NO: 125163 - protein, 115 aa, Oryza sativa
  unsure (1)..(115): unsure at all Xaa locations
  Clone ID: PAT_MRT4530_27834C.1.pep
RIRGGGGGGGFNPFGEGGQQNPFHXEGGFQGGGGFPGGGFLGGFKFNFGKKVYSLGSGGWKVCLFVLGTLISLPTGFFCRQSIRSIKISMVNKCCFKPHQIFPKGVSFLGIFWGI

SEQ ID NO: 125164 - protein, 230 aa, Oryza sativa
  unsure (1)..(230): unsure at all Xaa locations
  Clone ID: PAT_MRT4530_27835C.1.pep
ICETYFKKXPSSKGFMRVDALSLLLSMANVGPYSDVLVVDMVGGLVVGAVAERLXGTGYVCSTYLGSAASSIDIIRMYNLSSDMTTRIVQAPLSDLCSLQNSVDVSSGLNDSIQGEAQEPTAVPVENTQPSVPQPTDTAVPDEKTQSPKEQSIDIDIPEPLLDEHINQDGNSSLDSKGDEDGNSIGPKSLKAGXAPSPERMKYWSEHGFSSLIVAASXHDVXESLVADLL

SEQ ID NO: 125165 - protein, 286 aa, Oryza sativa
  Clone ID: PAT_MRT4530_27836C.1.pep
MERDEIEGIGKLNSPEKKKEKEKRRRKHKPDEAKEEMVVDAIPKEEENLKSPEKGSPKKKEKRRHKHKHKPKPDGTQAVLKEEEESNSKSKAPAEGEKKRKKKKLVTVKLSDELMGYLRTKEVMAYLARETPRPLPIDPGVAQHMFVDQELRQEIAAQVHENREFDAFVLYQYRTKGYAEIQQEVTDDDDDDDETKTTNGLPAYAGPGGWNGLGQVTQQQQEGCGTLEQAITAHWSSIGLTGSVAVTARDLWAFVVKVAATKRHSCHYLIKKYTRLKTNLWQKPSQ

SEQ ID NO: 125166 - protein, 493 aa, Oryza sativa
  Clone ID: PAT_MRT4530_27837C.1.pep
MAAIPREAWEGCSVLLDINDGDRLAFFRLTPAATVKVGNRTCSLQPLVGRPFGSLFSVGPSGLVPCADAPSSRDDTTQDAADGPSQDETRDNRSLVDNNTAQNLSSDDIEAMKRDGVSGDEIVEALIANSSTFGKKTLFSQEKYKLKKQKKYAPKVLLRRPSTRSICETYFKKSPARTGFMRVDALMFLRVVGLSLLLSMAKVGPYSDVLVVDMVGGLVVGAVAERLGGTGYVCSTYLGSAASSIDIIRMYNLSSDMTTRGNILISLPFRIVQAPLSDLCSLQNSVDVSSGLNDSIQGEAQEPTAVPVENTQPSVPQPTDTAVPDEKTQSPKEQSIDIDIPEPLLDEHINQDGNSSLDSKGDEDGSSIGPKSLKAGKAPSPERMKYWSEHGFSSLIVAAPGHDVESFVADLLPLLSYSAPFAIYHQYLQPLATCMHSLQVSKMALGLQISEPWLREYQVLPSRTHPHMQMNAFGGYILSGIRIHNGDACNGSK

SEQ ID NO: 125167 - protein, 116 aa, Oryza sativa
  Clone ID: PAT_MRT4530_27838C.1.pep
CCASSPPQRQPPTSKPSLRTATEAPTSATPPPPQLTLPPPSRRVSPPQLPPPRSLKPPPSVMPPPKPSPCAAATTATFAPPTERPSPLHAPPLQPHRAPCHILEDGIISFVSTGSK

SEQ ID NO: 125168 - protein, 290 aa, Oryza sativa
  unsure (1)..(290): unsure at all Xaa locations
  Clone ID: PAT_MRT4530_27839C.1.pep
MERDEIEGIGKLNSPEKKKEKEKRRRKHKPDEAKEEMVVDAIPKEEENLKSPEKGSPKKKEKRRHKHKHKPKPDGTQAVLKEEEESNSKSKAPAEGEKKRKKKKLVTVKLSDELMGYLRTKEVMAYLARETPRPLPIDPGVAQHMFVDQELRQEIAAQVHENREFDAFVLYQYRTKGYAEIQQEVTDDDDDDDETKTTNGLPAYAGPGGWNDRLGLGQVTQQQQEGCGTLEQAITAHWSSIGLTGNXCAVKCGVLLKFVVKVAATKRHSCHYLIKKYTRLKTNLWQKPSQ

SEQ ID NO: 125169 - protein, 123 aa, Oryza sativa
  Clone ID: PAT_MRT4530_2783C.1.pep
MAAAAATAASPGRLRRLMGAATDAVLFTSLCAMWVTNAGSVASILARRAGADDRLAPVAAARGATSFSVGGFSVLLPAFVPMFVSRVESLKRIFWHMKFLVHVTTYHHCLIGQNWSQLIHFDV

SEQ ID NO: 125170 - protein, 151 aa, Oryza sativa
  unsure (1)..(151): unsure at all Xaa locations
  Clone ID: PAT_MRT4530_27840C.1.pep
AVTSSTTAGQLPPGRQPRAHPWRQSRASARAAASSLRPAASSGRPGAGPMVWLSPPCALSPPTRRRHGDGAAATRRPXREPAGRPPARLRRSRRSSRRPPLLPAGQLPPGRQARAHPWRRRRAGARALWSHQIAKPSLGSPPPPPPPPRRR

SEQ ID NO: 125171 - protein, 89 aa, Oryza sativa
  unsure (1)..(89): unsure at all Xaa locations
  Clone ID: PAT_MRT4530_27841C.1.pep
HLSANAARVSAPTQPAPPRIXPFASPSPPPSIASTLFDALSPPRAAASPGMTSPGRPAAGATPALPPLLPPAAAPPGWPAPARPPGARP

SEQ ID NO: 125172 - protein, 118 aa, Oryza sativa
  Clone ID: PAT_MRT4530_27842C.1.pep
MEEWRCQGVQPFVSRGFLGGGDGEGSGVAEKPVSDCGPPHSPLSSLSEELDCGARGLEEQQTKVISPCYYRRHAVVGSTVPPRHHELKVEGTADPTQGRESDTFLYATREGLLVAGEG

SEQ ID NO: 125173 - protein, 139 aa, Oryza sativa
  Clone ID: PAT_MRT4530_27843C.1.pep
WEKKNGPRGPKRLPPPPGGLLISFGPWGFRFSHWEVGRWPYPFFGCLVWPSGPPGFCFRLPGCLVFGVVNRFPFGPVLPPLPGWFNPPPFWEKGEVGGVRGAVPGFKVDPKKKKKKKKKKKKKKKKKKKKKNYFNKLPP

SEQ ID NO: 125174 - protein, 83 aa, Oryza sativa
  unsure (1)..(83): unsure at all Xaa locations
  Clone ID: PAT_MRT4530_27844C.1.pep
RVRRRVGFDVDHSCCRCKAISLMLXGIFSELGVPDVGHPMFYVFRGCXEGTCSSRXASLPVLCNXDIHNGRRGVCYYLARSGC

SEQ ID NO: 125175 - protein, 529 aa, Oryza sativa
  unsure (1)..(529): unsure at all Xaa locations
  Clone ID: PAT_MRT4530_27845C.1.pep
MPPLRPANSTSLLNHIRHPPVTELRSHWPAAPRSYIPDPSIQTEFATPQRPRISNTAKTTPPQPKNKSSRNEEEAHIQAAPPTTTTTTIQGRRARARASGSGAGWIWARGGGGGGGGWLVELVTCARAEREISAGYRRRRCRWSLAAALGESGKVVAGGGGRDSLSWWWWIWSDGCTGAGTGGRTRIGAAAAALLAVWQPLLAGGVVVDVVEHVGVGRQRRGNDRLLHAAAVTAATWVSGLQTSFLNLYFLVPERNTTRPARMPTAQMSYPHWRPTLSCTYTSTVIASDGRCCGEEAAGGEGRGGGPAASVAPMEETPPSASSLPPSWHSVAELILEAMREHVEAVEVGGLAMASHQIWRFFDVVSHAGKLYWVDTATGILFCNPFVDELHMEYVPIPRVDLPLEHDGDCHGRGYCAERALASRHCVQLSDGKFRCVDMGXCKRWCYYQGTKVWTLEYAVSFADIWASESYKATGMSEKAPVLALVHPKNPNMVYFFVEVTSLRTTDFYGLYVLAHSLQDESGGAVPRR

SEQ ID NO: 125176 - protein, 158 aa, Oryza sativa
  unsure (1)..(158): unsure at all Xaa locations
  Clone ID: PAT_MRT4530_27846C.1.pep
TRDAPVTHHLMDEDLRTCVLGTQSRAHPMQSCLLRLXEWLKAXHHHDGTGHTCHTPPDTRSGHGRLAAVPSVIWXRPVGDRLLACQVRNMPHLVRRGALALPALKAVRWVLGRAHLTPSMWRTRGRVGAARPISLEEVAATYPRARPPRGGGGAPRGH

SEQ ID NO: 125177 - protein, 107 aa, Oryza sativa
  Clone ID: PAT_MRT4530_27847C.1.pep
MAMYSLIRFKIGLCDSLLPEQSRKSLHLPVKLVHASVCSSCNLSTIRDLIRTAAIELPIVPLTGTCNCFLTTLTRSRACAAALDTHCTLPLAFYGLQLKLERMAEEE

SEQ ID NO: 125178 - protein, 123 aa, Oryza sativa
  Clone ID: PAT_MRT4530_27848C.1.pep
MGDSATGPSYRRERSASSASASASAIRLRLEPKPTHQPNPNPIERRGRGGGGGSAAGKEGDGISRKRGGSDMGCLPCCGAEDVRKKKKRDYPYVPIPEPGGNYGRTKPGPPTPSCFPPTSRNL

SEQ ID NO: 125179 - protein, 596 aa, Oryza sativa
  Clone ID: PAT_MRT4530_27849C.1.pep
MQCSSKMLQVEEALAAVLSAAAASAAARAAEAVPLHDALGLVLAEDVRAPDPLPPFRASIKDGYAVVASDGPGEYPVITESRAGDDALGVVVTPGTVAYVTTGGPIPDGADAVVQVEDTEQLAGAPDGSKRVRILVRPTQGQDIRNVGCDIQKDSVVLKSSEHIGPAEIGLLATVGVTTVKVYRRPTIAVFSTGDELVEPATASLSRGQIRDSNRAMLIAAAIQHKCKVVDLGIAKDTEESLKEHMDAALSSDADIILTSGGVSMGDRDLVKPCLASMGKIHFEKIRMKPGKPLTFAEIVTEDSSKPSKKVLAFGLPGNPVIPADEIGLGRYVAESTGQQASSRLLSMKSANALLEVPLVGQMLEAGTSMQAILISDMTSSPFDKLPTASNPLPSHLFPSAKSVSTDLSQVPASQNTEVKVAILTVSDTVSLGAGPDRSGPRAISVVNSSSEKLGGATVVATAVVPDDVEKIKNILVKWSDIDRVSLILTLGGTGFTPRDVTPEATKSVIEKEAPGLTYVMLQESLKIINMPGNPNAVAECMEALLPALKHALKQIKGDKREKHPRHVPHAEAAPVDQWDRSFRAASSGRGCSCEP

SEQ ID NO: 125180 - protein, 316 aa, Oryza sativa
  Clone ID: PAT_MRT4530_2784C.1.pep
MSSSSENPTVTERGGGKDRRDDDGGEKKEGGGGFMEKVKDFIHDIGEKIEGAVGFGKPTADVSGVHIPHISLHRADLVVDVLIKNPNPVPIPLVDIDYLIESDGRKLVSGLIPDAGTIHAHGEETVKIPISLIYDDIKSTYNDIKPGSIIPYLVRVVLLIDVPIIGRIKLPLEKSGEIPIPYKPDVDVEKIKFHRFSFEETTATLHLKLENKNDFDLGLNMLEYEMWLGDDSVASAELTESATIEKQGITTMQVPFSFRPKDFGSAVWDMIRGRGTGYTIKGKIDVDTPFGNMKLPISKEGGTTRIKKDDDDDDED

SEQ ID NO: 125181 - protein, 495 aa, Oryza sativa
  Clone ID: PAT_MRT4530_27850C.1.pep
PTRPVTTVKVYRRPTIAVFSTGDELVEPATASLSRGQIRDSNRAMLIAAAIQHKCKVVDLGIAKDTEESLKEHMDAALSSDADIILTSGGVSMGDRDLVKPCLASMGKIHFEKIRMKPGKPLTFAEIVTEDSSKPSKKVLAFGLPGNPVSCVVCFNLFVVPAIRSLSGWSNPHLPRVHARLLHPLRGDPHRQEFHRAVIRWVPDDGSGRPGYVAESTGQQASSRLLSMKSANALLEVPLVGQMLEAGTSMQAILISDMTSSPFDKLPTASNPLPSHLFPSAKSVSTDLSQVPASQNTEVKVAILTVSDTVSLGAGPDRSGPRAISVVNSSSEKLGGATVVATAVVPDDVEKIKNILVKWSDIDRVSLILTLGGTGFTPRDVTPEATKSVIEKEAPGLTYVMLQESLKVTPFAMLSRATAGIRGSTLIINMPGNPNAVAECMEALLPALKHALKQIKGDKREKHPRHVPHAEAAPVDQWDRSFRAASSGRGCSCEP

SEQ ID NO: 125182 - protein, 120 aa, Oryza sativa
  unsure (1)..(120): unsure at all Xaa locations
  Clone ID: PAT_MRT4530_27851C.1.pep
XGXXSPXXXLPPXFVLRXSSRXLXXXMXLRSXVXXCXVDXLXLGHRRSXXXQXXFSTXAXXLXFQXVXXRXXXSXXXXXXXXLXXXXXIRXXVQXXXXKXVXGXNXXXXXXXIRXXXAYX

SEQ ID NO: 125183 - protein, 410 aa, Oryza sativa
  Clone ID: PAT_MRT4530_27852C.1.pep
MAKATTMEGRPAKMGFRMPAEWEPHEQCWMGWPERRDNWRELAGPARKVFARTAIAISKFESVTICASAKQYPYVHELMLHQPNIRVVEMSMNDCWFRDIGPTFIVRKGAPGLGITEKNIAGIDWEFNAWGGATDGCYVDWSLDSYVAKKIVEIERIPRFPHTMVLEGGSIHVDGEGTCITTEECLLNPNRNPNMTKLEIENELKDFLGVAKVIWIPHGLYGDDDTNGHVDNLCCFIKPGVVLLSWTDDENDPQYQRSVDALSTLSKSVDAKGRQIEVVKIHVPGPLYMTKEESEGVVKTEHAIPREPGTRLAASYVNFYIANGGIVAPAFGDKWDEEACAVLQKAFPDHEVIFTDPFHFETLSSDAVISVCQRPQLKQAVAVGCYSAMATTSELKTVLGVLTEPVNFRW

SEQ ID NO: 125184 - protein, 82 aa, Oryza sativa
  unsure (1)..(82): unsure at all Xaa locations
  Clone ID: PAT_MRT4530_27853C.1.pep
KASYTKKPGTRLAAXSYVNFYIANGGIVAPAFGDKWDEEACAVLQKAFPDHEVVMVEGAKEXIVLAGGNIHCITQQQPVRPS

SEQ ID NO: 125185 - protein, 65 aa, Oryza sativa
  Clone ID: PAT_MRT4530_27854C.1.pep
IRGGSYSFCSTIRIGRGHVTLVRQIHVGKQGLLKCFQCPWGLPDSLYLNWTLVGKDGKKKKKPYP

SEQ ID NO: 125186 - protein, 223 aa, Oryza sativa
  Clone ID: PAT_MRT4530_27855C.1.pep
MVKFTARRGKSELVAPARATPNERKYLSDIDNQHSLRFYATAVEFFQLCTFDGYKPHDPVKAIRSALAEALVHYYPIAGRLRELPQETTVADLCGNPLGYALDLVRKAKLEVTDEYVKSTVDFLASRKWPSLVVDRTYIVSDITSVGDDKLDFGWGKRMGGGIPMAGDIMSRLISYFTKCKNADGEDCIVVPMYLPSITMDRFAAEISVWSMKQGSKFIVSAL

SEQ ID NO: 125187 - protein, 523 aa, Oryza sativa
  Clone ID: PAT_MRT4530_27856C.1.pep
MTPARVVFICCVVLLAAAAAAASSSTAAGITRADFPPEFIFGAGSSAYQVEGAFAEDGRKPSIWDTFSHSGYSVDGATGDVTADQYHKYKEDVKLLQDMGVDAYRMSISWSRLIPDGRGAVNPKGLEYYNNLIDELLSHGIQPHVTIYHFDFPQALQDEYNGILSPRFVEDFTAYADVCFKNFGDRVKHWSTVNEPNIEPIGGYDQGILPPRRCSFPFGVLSCDNGNSTTEPYIVAHHLLLAHSSAVSLYREKYQATQGGQIGLTLLGWWYEPGTQDPEDVAAAARMNDFHIGWYMHPLVYGDYPPVMRKNVGSRLPSFTAEESKRVLESYDFVGFNHYVAIFVRADLSKLDQSLRDYMGDAAVKYDLPFLKSNNEFPLGLTSDFMTSTPWALKKMLNHLQEKYKNPIVMIHENGAAGQPDPSGGNTYDDDFRSQYLQDYIEATLQSIRNGSNVQGYFVWSFLDVFEYLFGYRLRFGLYGVDFASPERTRYQRHSARWYAGFLRGGELRPAAAALAGGGAYSQ

SEQ ID NO: 125188 - protein, 138 aa, Oryza sativa
  Clone ID: PAT_MRT4530_27857C.1.pep
MTSTPWALKKMLNHLQEKYKNPIVMIHENGAAGQPDPSGGNTYDDDFRSQYLQDYIEATLQSIRNGSNVQGYFVWSFLDVFEYLFGYRLRFGLYGVDFASPERTRYQRHSARWYAGFLRGGELRPAAAALAGGGAYSQ

SEQ ID NO: 125189 - protein, 248 aa, Oryza sativa
  unsure (1)..(248): unsure at all Xaa locations
  Clone ID: PAT_MRT4530_27858C.1.pep
MTPARVVFICCVVLLAAAAAAASSSTAAGITRADFPPEFIFGAGSSAYQNIRDCXVEGAFAEDGRKPSIWDTFSHSGYSVDGATGDVTADQYHKYKEDVKLLQDMGVDAYRMSISWSRLIPDGRGAVNPKGLEYYNNLIDELLXMALQDEYNGILSPRFVEDFTAYADVCFKNFGDRVKHWSTVNEPNIEPIGGYDQGILPPRRCSFPFGVLSCDNGNSTTEPYIVAHHLLLAHSSAVSLYREKVPAT

SEQ ID NO: 125190 - protein, 103 aa, Oryza sativa
  unsure (1)..(103): unsure at all Xaa locations
  Clone ID: PAT_MRT4530_27859C.1.pep
KIHRIKKNKKKRRGIFRKIKKEKKKKEGKKKKKKKKKIKKNKRNKXMKNKXKKYKXKPKKKTKYXKRKNSEKKKDELKTKKKKKTKEKNRKNFNKENKNVKTL

SEQ ID NO: 125191 - protein, 77 aa, Oryza sativa
  unsure (1)..(77): unsure at all Xaa locations
  Clone ID: PAT_MRT4530_2785C.1.pep
WRSSSSRWDLXGEITWRMDTLNVQTGEIQYNLTEHISQTQEXWQQSADAHINNMMQQQHDDLQAYFRFQGFKPYQGP

SEQ ID NO: 125192 - protein, 165 aa, Oryza sativa
  Clone ID: PAT_MRT4530_27860C.1.pep
AATAAVALCVRAWRGWDGESKDVATVAPRRGLAGREWGERGRRRRRATSGPGGEGTRRARTPPPSRTRLHRFSFPNLVWGTHRLLHCSKNPASSPPPVASDTPSPDKKKVAHRSADGVGVGGSPQRGPQRPWNLRTRRSATVAPRPEGSDDAADAAPDRAPLLAM

SEQ ID NO: 125193 - protein, 161 aa, Oryza sativa
  Clone ID: PAT_MRT4530_27861C.1.pep
MGRGGGGNHRAARRFLRRPRGLACPCVHVILGWTRGVEEASPTLRGGQHVDIVHREPASQGQDPPPPGGRLIIFISLWADIKQSFAYDKESCNMAQSIEISLQQQPMTASIADKAPSEPHLPAAKAPKHSMGSSSTPTKKVALDPLTPDKTVIIGAELGDK

SEQ ID NO: 125194 - protein, 61 aa, Oryza sativa
  Clone ID: PAT_MRT4530_27862C.1.pep
EIGKEGHPKRNVLYSFLDSDLHNHDAYRAGTDRILARLGIGQTSGPGKKNLQLLKIIIQCE

SEQ ID NO: 125195 - protein, 364 aa, Oryza sativa
  Clone ID: PAT_MRT4530_27863C.1.pep
MARRDGVGGDGGASAAEQQRRVALRVLLSRAEASSPPPATVEEEAQRGRSGGGNKGLASAALRGLGCTSTAALRAHAPASAVEVASSSERWHGRRRRRKVQERRSARGGGGGGGGGVAPPGPAPAAAGDVWCTCAPGIPFAAEASSVDCVVVARHHHAHHTAAAMGSGRRGEAERRHRERPAAPRARRVTMREHISSSLMDSPPFPDMPLLNADLLPPPPSGRHRHGYRHPHVGAAEEEIMMLRTRLLWGRFGMHDQHQDWRLDVDNMTYEELLDLEDRIGYVSTGLHDDEIARSLRMVKYSAFNPKHFATEVERNCSICQEEFEANEETGRLICGHSYHVQCIKQWLSRKNTCPVCKTVVSKT

SEQ ID NO: 125196 - protein, 49 aa, Oryza sativa
  Clone ID: PAT_MRT4530_27864C.1.pep
QILYFIWIAISENAEEYQVWSNQYSKENYWLIKYLTKAISTNSTRLLPQ

SEQ ID NO: 125197 - protein, 627 aa, Oryza sativa
  unsure (1)..(627): unsure at all Xaa locations
  Clone ID: PAT_MRT4530_27865C.1.pep
MSCGGSCNCGSCGCGGGCGKMYPDLAEKITTTTTTATTVLGVAPEKGHFEVMVGKAAESGEAAHGCSCGSSCKTSEEFTPADGDLRSWTRVGSRRRCIRDAVKPTTVARWVVWEIWKEQNQRIFEHKESTTTYLLTKIIEEAKLWMLAGARRLRELLPHLVQKMYPDLAEKNTTTTSVTMVLGVAPEKGHSEPGFELAAGSGEAGHGCSCGSSCNVDMFPFSGRWQKSGCGLVDREVRRLIASRHSGDGDHHLIAGGHSDAGDHLPTSSLMSQLGRTSWRDIVLSRPAVNAVDQRGEEDQAFKKARTVPRWLQGCCFNCLGLGHQKSACPGSTRCYNCWYSGHIARNCPTSRAARAQPATGSKEVATKPAGGEKPRKEVLEALPPRKKGREEGVAAGDGMASFQICAQQPSRVMKEWRTGDANIRPESGRCTISWTPRMVETEAIFEQKVLLATVLGNQPALSPRDLVAVIVDCGILPAHFRVEVTTPEDYLIVFRSAREKDWVLGKSKQVFFQGAPIAFKSWNRRLLASSTRFQFFTKLSLEGLPQHAWDEEAMAQXSVSWVESWWSLFRRRTRGFSPCSPGSRTRLRCQQRWRWRSQSARGAARRAGNVWRDQSGFQGRLCTSAR

SEQ ID NO: 125198 - protein, 55 aa, Oryza sativa
  Clone ID: PAT_MRT4530_27866C.1.pep
RSNSSVRTCTGHPRGNNFEQSTEQVATYSYNVCSCGGSAHQASRHFERTPSVLRF

SEQ ID NO: 125199 - protein, 112 aa, Oryza sativa
  unsure (1)..(112): unsure at all Xaa locations
  Clone ID: PAT_MRT4530_27867C.1.pep
GEEGEEGGWRVAHLNRSSEYKLIFRTWXYEGLTTKNEQGTSRADISPRIRAPAVTATCCCVPQLRLAGATGACGGGIRLERQACAPSASGGLLWQRRPAVCNLCRCSLFASA

SEQ ID NO: 125200 - protein, 75 aa, Oryza sativa
  unsure (1)..(75): unsure at all Xaa locations
  Clone ID: PAT_MRT4530_27868C.1.pep
DYGGSLHGFSRVNXQLWTCLCVTIVSLCESAFTFCVHFEPPFSSSPALEIALSPRSHPLPRFCSRCHNTGQWICA

SEQ ID NO: 125201 - protein, 43 aa, Oryza sativa
  Clone ID: PAT_MRT4530_27869C.1.pep
KLCHLQINNGAGGIYPFLGCPITFQLVTRILKLFVCRLCGVNK

SEQ ID NO: 125202 - protein, 151 aa, Oryza sativa
  Clone ID: PAT_MRT4530_2786C.1.pep
GIPPLFSPSSPPSTAPPLQVTRGRFRQPLPLPVPPVAAAVDRVPSPLALAGRSALMSSRARRPPLSPPVRSAPRAIWAVGPVDRRWTTRVVPVHGEPPPLEPLTSGARLSAPRLPLALYVARFRFLRRSGVLRNSRRGSSSSRARQVMLVT

SEQ ID NO: 125203 - protein, 58 aa, Oryza sativa
  unsure (1)..(58): unsure at all Xaa locations
  Clone ID: PAT_MRT4530_27870C.1.pep
VNTFLSMRAIXIAHGPRLEGGRVVPSFXRVEICGVIASVLXLEQSPDNGCYYFPDASL

SEQ ID NO: 125204 - protein, 114 aa, Oryza sativa
  unsure (1)..(114): unsure at all Xaa locations
  Clone ID: PAT_MRT4530_27871C.1.pep
MPGVPREVIEHKLMVRPDAKPVKQKLQRFASYRKQAIREELYKLLKAGFTREVLLPKWLANPFMVRKXNEKWRIGVDFTDLNKACPNDYFSLPRIDQLVDSTTSYVQPIGPMGP

SEQ ID NO: 125205 - protein, 40 aa, Oryza sativa
  Clone ID: PAT_MRT4530_27872C.1.pep
HPGGPAPIFPARPHAPPTGEAHALAAEGGTFIIIGGDTSP

SEQ ID NO: 125206 - protein, 100 aa, Oryza sativa
  Clone ID: PAT_MRT4530_27873C.1.pep
RREKKKKKKKKNGIPSSTMEVRSLNLCFLLVLVLLMSPAPTAVAFSPEDCLDDVGWILICTKPTCKFSCWTSRSVNKGRKMQDYWCSDSNTCHCVFCTGD

SEQ ID NO: 125207 - protein, 392 aa, Oryza sativa
  Clone ID: PAT_MRT4530_27874C.1.pep
MAAASNVPPSSSTSSSSPHNTTSTHSTELVKGTHRFTVAGFSLQKRNGAGHFAKSGSFDVGGYSWAVMFYAAGEKEEDQGHVSVFLELQSTGVEKVTVKYTFNISGSSLLSAGWGDFKPSSKCRLGFNKFMEIETVEDVYLMNDCVTIHCAVEVVREKKARATVSRRIAVPPPAICRHLEQLLESKKGSDLTVQVGESKYDVHRAVLAARSPVFRAQFFGPMAAANRRASGGGGRCVRVHDMRPAAFEAVLHFVYTDTLPPVKEEEGFLTNNSASRRHLVNLRDAAAGCSKGEVRVMVREWLAAADRFGLERMRLLCEDALCESIGVANAAATLRLADRHHCALLRALCMEYIASPGMLAAVMATKGFKELKVACPSLLIEILEKVGCCRSE

SEQ ID NO: 125208 - protein, 205 aa, Oryza sativa
  Clone ID: PAT_MRT4530_27875C.1.pep
MGVAMSAWARGGSATSARRQAAMATGGRRGDGGTRGDGDGDGRGEVERRTALLCLKSQLHDPSGALGSWRNDSSVSMCDWHGVTCSTGLPARVDGLDLESENITGQIFPCVANLSFISRIHMPGNQLNGHISPEIGRLTHLRYLNLSVNALSGEIPETLSSCSRLETINLYSNSIEETSPKDRPTMDDVYYDIISIKEKYYALIN

SEQ ID NO: 125209 - protein, 347 aa, Oryza sativa
  Clone ID: PAT_MRT4530_27876C.1.pep
MGSLRRVVHLVTALNGSANLRHIDTSRFFSRRPPPPFSPSSMAVVTEESSLPEPSMSFYPAPAPPESNGDIGVMLFGRARDRLLVTDQSDSAAIYDAGTHALLAETTPLKPKYWPVSVPVGDDIYLFDLYPRVPCGGRHCFEAVTAVDSSSSSYCSRALPPPPFLFAPGYSPKPIESYTVVGGSEVWISTARAGTYAFDTVSCSWSKQADWPMPFAGLAEYVPEHKLWFGLSSSRRDKHPLCAVDLAAAASPETGPELTNVWMELSVPREWIPVEAFLVHLGSSRFFVARFFQELVEVRCDFSQRFDRFAVFTGVELERTSRGELRMIKHKSERYSIAHKVLCHSVL

SEQ ID NO: 125210 - protein, 297 aa, Oryza sativa
  Clone ID: PAT_MRT4530_27877C.1.pep
MGVAMSAWARGGSATSARRQAAMATGGRRGDGGTRGDGDGDGRGEVERRTALLCLKSQLHDPSGALGSWRNDSSVSMCDWHGVTCSTGLPARVDGLDLESENITGQIFPCVANLSFISRIHMPGNQLNGHISPEIGRLTHLRYLNLSVNALSGEIPETLSSCSRLETINLYSNSIEEYGLGCKVSAEGDVYSYGIIVLEMITGKQPTDEIFQDGMDLHNFVESAFPDQISDILDPTITEYCEGEDPNHVVPEILTCAIQMAKLGLMCTETSPKDRPTMDDVYYDIISIKEKYYALIN

SEQ ID NO: 125211 - protein, 551 aa, Oryza sativa
  unsure (1)..(551): unsure at all Xaa locations
  Clone ID: PAT_MRT4530_27878C.1.pep
MAMARATDRHPPRRLPRELSTPTTMAMAMAMRRAAALGARHILAASSTSSSGVLLRRHMSVDAGAAMEKVRAAGLLRTQGLIGGKWVDAYDGKTIEVQNPATGETLANVSCMGSKETSDAIASAHSTFYSWSKLTANERSKALRKWHDLIISHKEELALLMTLEQGKPMKEALVEVTYGASFIEYFAEEAKRXYGDIIPPTLSDRRLLVLKQPVGVVGAVTPWNFPLAMITRKVGPALACGCTVVVKPSEFTPLTALAAADLALQAGIPAGAINVVMGNAPEIGDALLQSTQVRKITFTGSTAVGKKLMAGSANTVKKVSLELGGNAPCIVFDDADIDVAIKGSLAAKFRNSGQTCVCANRILVQEGIYEKFASAFIKAVQSLKVGNGLEESTSQGPLINEAAVQKVEKFINDATSKGANIMLGGKRHSLGMSFYEPTVVGNVSNDMLLFREEVFGPVAPLVPFKTEEDAIRMANDTNAGLAAYIFTKSIPRSWRVSEALEYGLVGVNEGIISTEVAPFGGVKQSGLGREGSKYGMDEYLELKYICMGNLN

SEQ ID NO: 125212 - protein, 54 aa, Oryza sativa
  Clone ID: PAT_MRT4530_27879C.1.pep
IGRFVQMSVDAGAAMEKVRAAGLLRTQGLIGGKWVDAYNGRTMGVQNPPLGGTL

SEQ ID NO: 125213 - protein, 142 aa, Oryza sativa
  Clone ID: PAT_MRT4530_2787C.1.pep
MRERRPLPRAVELSLSGVWELRGAGGEGGSEEEGELLRRSGKGSYTGNGGKRELPWAGSGHLAAPPPLRLALSLLCSASSRLQSPLRPGIVAEKDASTFQIRPKLLAIHACTRFRARRYFDPPMSVVGRATKGDRGAGGGPG

SEQ ID NO: 125214 - protein, 288 aa, Oryza sativa
  Clone ID: PAT_MRT4530_27880C.1.pep
MAPPPPLAALRPAPFPLPRLLPCPASAAARRGAVAFSLQTNVRLLKPNRRSRRSRYPYYDHDEDEDDDEAEFEFEEGEEEEEDGYETDDDLSGLEYPGVLYSNNPRAPIKKPGREKPALKQNWEGRQPKTRDRCDTSKKVDALHAKSKASRSTGLVDIDNEVELKNESISRSLFQKLQEEYDFDDKWLPLIDYLCTFGLKESHFTNMYERHMACFQISQASAEERLEFPLNLCFNRDDVKKVLVRDPQLEEYTPSKFYCYVADISYVAIPSSLLGAFISAVLPYVGWD

SEQ ID NO: 125215 - protein, 293 aa, Oryza sativa
  unsure (1)..(293): unsure at all Xaa locations
  Clone ID: PAT_MRT4530_27881C.1.pep
EFPGRPTRPIPPTLSDRRLLVLKQPVGVVGAVTPWNFPLAMITRKVGPALACGCTVVVKPSEFTPLTALAAADLALQAGIPAGAINVVMGNAPEIGDALLQSTQVRKITFTGSTAVGKKLMAGSANTVKKVSLELGGNAPCIVFDDADIDVAIKGSVSKKKKRLIYHFNIFFCGVLLXLIDILTNIHHHXLHFIFYYDACLSTLLSVQLAAKFRNSGQTCVCANRIMVQEGIYEKFASAFIKAVQSLKVGNGLEESTSQGPLINEAAVQKVEKFINDATSKGAYVSLVVRITF

SEQ ID NO: 125216 - protein, 38 aa, Oryza sativa
  Clone ID: PAT_MRT4530_27882C.1.pep
HMACIAQLGNNLTISKRATMRLCMKPDPFPAPCFALNQ

SEQ ID NO: 125217 - protein, 52 aa, Oryza sativa
  Clone ID: PAT_MRT4530_27883C.1.pep
TSFFFLLLLQQGVNSSSDSSSRKTNGCSRSQSKDEKGCTRMVDVAFCCLLPR

SEQ ID NO: 125218 - protein, 87 aa, Oryza sativa
  Clone ID: PAT_MRT4530_27884C.1.pep
MSHDWNRFQFMWSESNAEYVLMPMGLPLYSQYSFAYCYDFQRLRPMLVHRQVPRFSVLLGEVKWICRLVAGNIDLNLIHINYMLGAC

SEQ ID NO: 125219 - protein, 1862 aa, Oryza sativa
  Clone ID: PAT_MRT4530_27885C.1.pep
MPDIRSAPGRGKSDEDERRPIGSLFKLKRKRRAPGSAEAKGDSNPSVESEAPDGVVPGEMDDTLAIIKRKLRKPKKGKEGGDAVVVGSGAEGELLVEEEDVQGGVNVGDGVAEDKSNLEGVKVEVDEVIGGELKDSGGLGLEDSLSTLFKRSGRKSRQVSVKEEEGVEVAGSHGEEILEKGSGLVSDRVAKGTKRRRRRTKEEMKNAAAKSESAMAHEGSPNRKVGTSLPRKAKAEAKVKISNSNRRSKKSDEKPKASDDVLCHRSLGETIEQDAETRTVLDDGSRNSSDGASHRIEVSACLSNQPCLKPCSGELAEEVSLSAANAATDGVSNEHTYSETLLKERNDDAGCSHGKPPTLAIKSIPGKKPIEMPKKPVRQKDQLLSTDVDNKCVVGSGDTKDVNIENQPAFGIPESHVTGKGLHPHKMATSVKELDVVDVVAPTDFEDMENASKSKRVTRSSRKRKHGDMAYEGDIDWETLMQEQGLFSNLSAALVDYPLKSKDKIKISEVLDNGDGSGVAAVRAGLKAKAVTPIEKIKFKDILKRRGGLQEYLECRNMILSRWCKDVKHILDLAECGVSDVCLDDESPRQTLIRDVYLFLDQNGYINAGIASDKVKTDHESPPEDVEVSKLNESHERKSVSIQDCIVTEAVQDKKAVVKQTDCVLTEASNEESSSAAIHCDAQDLLPPLKSEELIFKEKNQGVLTEVEGGSLHQAEAADIEHSENKHEASDRVESGGYGKKIIVVGAGPAGLTAARHLQRQGFSVTVLEARNRIGGRVYTDRVSLSVPVDLGASIITGVEADIATERRADPSSLICSQLGLELTVLNSACPLYDVVTGDKVPDDLDTDLESEYNGLLDEMAQLFAQNGESAVGLSLEDGLEYALRKNRVTRSEQDDQLRNVSSAGAVDISESASTEKEIAHCGKEDKTDVLSPLERRVMNWHFAHLEYGCAAMLKSVSLPYWNQDDVYGGFGGAHCMIKGGYDTVLESLAKGLDVQLNHVVTEVLYGSEELGASGNSRKFVKISTSNGNEFVGDAVLITVPLGCLKAQTIKFSPSLPDWKLSSIDRLGFGLLNKIVLEFPEVFWDDNVDYFGATAEQTDLRGQCFMFWNLKKTVGVPVLIALLVGKAAIDGQSISSDDHVKNAIVVLRKLFKDASVPDPVASVVTNWGLDPFSRGAYSYVAVGASGRDYDILGRPVSDCLFFAGEATCKEHPDTVGGAILSGLREAVRIIDLVHSGKDYVAEVEALQTYQMQSDSERNEVKDMSNKLDACELSTALCKTSSDASYPLFSKETLLQEMFFSAKTTSGRLHLAKELLKLPPDVLKSFAGSKDGLSTLNSWILDSLGKNATQLLRHCVRLLLLVSTDLLAVRLSGIGRTVKEKVCVHTSRDIRAIARQLVSVWVEVFRKEKASNGGLKLLRRMPSTESSKPRSKDLLSGKPIVRAPNQVSFNPKVASKNARSAGNHSPHTAIKKPENKAAKLEAMTATRSDGSSLRSQKQQHALEPKVDNGLAMSEEEAAAFAAAEAARAAAIAAAQAYASVEAEINAPRELPKIPSFHTFAMRDHYLDESDTRKKVLSDNLVRLECISEIDSRNDKAKNPSVDHANCADVDSSKMTGDNCTQRSYSNENACLINIRDHSTDSGAVDSRFTRAWVDTDTIFIDGVKDPLAIERWQQQAMEADKEFYSRIRIPDEEDSSSQKQTCRSSASQVAESKPASDGQSRGVEHLRQGLINFISTVLMPLYRNKKVDREGYKGIMRKAVTKIIETCTEGEKMMTVHEFLDSKRKNKVRLLSSTCKSRDVHFGIQQVSVRSIGVIKFLDLRIGADTSGLSIHDSCAKPNDYPKFPTAWQGTDYPNSMARISLI

SEQ ID NO: 125220 - protein, 74 aa, Oryza sativa
  Clone ID: PAT_MRT4530_27886C.1.pep
FFFFFSIFPCHHSSQEKKSATSLVGAMVQMDAYTMRIKLLICIIHMYIKYIDTYIHERLIEGETHRALERVVAY

SEQ ID NO: 125221 - protein, 68 aa, Oryza sativa
  unsure (1)..(68): unsure at all Xaa locations
  Clone ID: PAT_MRT4530_27887C.1.pep
SXTYCFPGWFLGSPYXRGAKXIXTPRACLYTFXGYKPXGGTLSYTEQKKXGXEIYMXVSDXKSLAICL

SEQ ID NO: 125222 - protein, 44 aa, Oryza sativa
  Clone ID: PAT_MRT4530_27888C.1.pep
KATPAPVWCPCVSVGWCTTGRCRPFFLDRHHESWKGGRHGWLTG

SEQ ID NO: 125223 - protein, 159 aa, Oryza sativa
  unsure (1)..(159): unsure at all Xaa locations
  Clone ID: PAT_MRT4530_27889C.1.pep
FVSFLFSESFFFSFFLVRQGLVSPYGYXNMYTRGHCNLSIYRSIXLLSAHRHPLYRGFYLSSDGTWYLTRGCIGSVXSPANGXVLRSAGPGESIGYIGVVQGRLVSTGLYCYIILSSADCLHIIIYIGHIANSSKPYRYQLAFAIGWHRLSAVITTSAC

SEQ ID NO: 125224 - protein, 294 aa, Oryza sativa
  unsure (1)..(294): unsure at all Xaa locations
  Clone ID: PAT_MRT4530_2788C.1.pep
MTMTEAAPRDDEPARMNGRPKGRRRRXGWRGQXGDGVPAKQRSSWRRGQRGDVDRRTGDVQEPTGGGEVLDADEEATPTSFGRGGGDAGDEGGVAEPREVVATSAGARETRQWRPEVEQWREHHCFAGEDASPVLSPRNGGLTEGEEVAARPREKTARPDGAPARRERRLEAAGAEEGEGRRRERASGGHRAKRRAGRGGGGGGDVGGGDGATGRRTVEAAQAARYVGPFRIIARRGEVAYQLELPASLGNVHDVFHVSQLKKCRVIRFCMVQWSNHAEEEATWEREDELKAAH

SEQ ID NO: 125225 - protein, 78 aa, Oryza sativa
  Clone ID: PAT_MRT4530_27890C.1.pep
NPFSIIYGQDNVRQLQMISTTVSSKMYLHQNMMQKQVERNNAGLSNLVLIKNIYLDSLYITLLFTFCSLSRQIIFSVP

SEQ ID NO: 125226 - protein, 190 aa, Oryza sativa
  Clone ID: PAT_MRT4530_27891C.1.pep
AELVCQRAFNVVLFGVEVFKFSAIRFGAEQKVGPDVSLYYPFFLIFSSPLSQAMCGNGDGRQWIRGNNEALPRRPLCCLVSYHIGATAPFSHLDAAAARPFFSLSGAREQVASGRPRRCSGQFFGDGSHACGGISRWQKSAMEVTTEEIGDAGWWQLLVGAYHRHSLALHGSPQLGGLWRRSSAQQKAAR

SEQ ID NO: 125227 - protein, 115 aa, Oryza sativa
  Clone ID: PAT_MRT4530_27892C.1.pep
RSRRLSDLRGAAVVLTEVAALAEASGSERSDGGARGGGARGGGGTLGRVAELAEVADGEVTPFAGPRWDEFIRHIFADRLIPNIRGIFLFRDQPIPLTPKPNTSKSWFTTSYPCN

SEQ ID NO: 125228 - protein, 363 aa, Oryza sativa
  Clone ID: PAT_MRT4530_27893C.1.pep
MRTPDRGEARTRLSPPYAPNLALPLTPEEQLQMTEEQIELLPHWNLQHLTIEYYLGQSCPSWLRPDCLKMLTSLKLSYCKNIQSISFFDPLFPDSEDSKNICHLEVLDIQHCPNINWQGLVALPSSLRKIILGNFGHSTDHFVSCFCGLALLKCLQIQCEFLMSIPLQVCKNNLQALEDLHIYQCSSLTSIYVSEASSRHPVGVFSSLSSVTISLCNALLSLDEFLMPAYMPVVKTILVESCRQLALLPIDELHRFSCLEVLRIESCPNLNTRRIMTLPSSLRKLSLLGCPSIEFIDNSHLASSVTLKGLNLKLVSCPDLISIVGAISISEIQSGYIHDCPKLMEMTQPFTRGRYWYVLRNHT

SEQ ID NO: 125229 - protein, 149 aa, Oryza sativa
  unsure (1)..(149): unsure at all Xaa locations
  Clone ID: PAT_MRT4530_27894C.1.pep
LPDPCQGLQDSNVLSGVIRGPLEMVSLKAXVPGARNMLGGDNPSQMQVXFTNQVPKEYPPKDDVCLDNLVGSFSVFPCCLFVGLDFPSFLSYVTLVLDRLGWPLHEIPVHYILPLPFFRQHQVGMELIPFLVLKKKKKKKKTPKIKKPQ

SEQ ID NO: 125230 - protein, 289 aa, Oryza sativa
  unsure (1)..(289): unsure at all Xaa locations
  Clone ID: PAT_MRT4530_27895C.1.pep
LFLKRKRVLLRQRLGFAVDRVHGGGSRKRTAEIXLSTTDGQDLTVYDRSTTDGTDDIGDDVITGGGSGAQARRRTTARRHERRTPTRRGRRGELTGDQRRSGGDLRLDDDGSAPATYGDDGGVDEIDDGLQRRRPERRRRMAGAAAATAATAAHGCTVLGRYRRRQAMARVATGARRRRRRPTATGDAMEGLGFGGERSIRIELESTDFQTELAIDSKRKKVEEIPGIISPLLISPEKERRGGPHLSAGGRARAGGARLRANLGRGGERERFGPTFGPKPKERFLKLFP

SEQ ID NO: 125231 - protein, 48 aa, Oryza sativa
  Clone ID: PAT_MRT4530_27896C.1.pep
TLLDRGKKPWKFHMRQRSFNLHPFGAFLTLISFHHCLHAFGELQVCRE

SEQ ID NO: 125232 - protein, 299 aa, Oryza sativa
  Clone ID: PAT_MRT4530_27897C.1.pep
MALLLSTSVLLVLCLLPVDPAAPPVAAIPHRRSGRHDVPFGRHAAFGPFATRGRAATRSTSLPDWSHFDAELGPLERYFGSDGELNVKERLLYLFPMLDRAPKDAGVSCGELEAWLRRQAADRLDAVARRELKRHDKDGDGVVTLREYLAVDHDQHIGTDNCNFSVSVCTVFVDASPRFKHVICSPQRHPTTRRRKGEHSADDDTSCAEAEKKFRELDSNNEGYLTVEEARPVIQSLISGEFSYAKSHAKLLMKADDNKDNKLSLEEMLNHYLSFYNIVYMDDHYDYDDIGNNIHDELR

SEQ ID NO: 125233 - protein, 376 aa, Oryza sativa
  Clone ID: PAT_MRT4530_27898C.1.pep
MALLLSTSVLLVLCLLPVDPAAPPVAAIPHRRSGRHDVPFGRHAAFGPFATEVELLLHGGGAVPDIRTCRDTLDRLPDWSHFDAELGPLERYFGSDGELNVKDRLLYLFPMLDRAPKDGGVSCGELEAWLRRQAADRLDAVARRELKRHDKDGDGVVTLREYLAVDHDQHIGTDNCNFSVSVCTVFVDASPRFKHVICSPQRHPTTRRRKGDWTDTEHGEPGWWLHKFISADRDHSGAMDFIELNDGMDHDRDGKLSLDEFISQFHMIDHNSIVEHSADDDTSCAEAEKKFRELDSNNDGYLTVEEARPVIQSLISGEFSYAKSHAKLLMKADDNKDNKLSLEEMLNHYLSFYNIVYMDDHYDYDDIGNNIHDELR

SEQ ID NO: 125234 - protein, 80 aa, Oryza sativa
  Clone ID: PAT_MRT4530_27899C.1.pep
GREPTYGALLSCVTLYHAKFRCLPAFSKNVKPAIKALVHRDLSSIPGTALRIIQQSSSSCEHLPQILLSFDADRRPQRLR

SEQ ID NO: 125235 - protein, 74 aa, Oryza sativa
  Clone ID: PAT_MRT4530_2789C.1.pep
YLPYWPRMFSSAVRLASTLFVELNEFSGGQIHCKTQLLSLNYMLSRTQNSMANVSGKQYIIWNHSFWVKKKKKK

SEQ ID NO: 125236 - protein, 114 aa, Oryza sativa
  unsure (1)..(114): unsure at all Xaa locations
  Clone ID: PAT_MRT4530_278C.1.pep
NRHLRQRASSRGGRLPEAVAAAAAPSPPPDPAGREAASSRGRWLPEAAAAAAAPSPPLDPAEGEAASSCGRRLPGXRQLRHTTAAAAAVPQQRISXGRRPEATQGRRTKVLECS

SEQ ID NO: 125237 - protein, 50 aa, Oryza sativa
  Clone ID: PAT_MRT4530_27900C.1.pep
KKLFLMFNIGNSNVCTFCWSHLNTRLSIQTIAKNYEIVALPLKVKFRFCG

SEQ ID NO: 125238 - protein, 68 aa, Oryza sativa
  unsure (1)..(68): unsure at all Xaa locations
  Clone ID: PAT_MRT4530_27901C.1.pep
XKVHCFEGKCNLEFLAHGRLTTLYFLMKLRNSHLQVVYLLLLRDAVHYSLVRVLFPLIDEAMETVAFS

SEQ ID NO: 125239 - protein, 87 aa, Oryza sativa
  unsure (1)..(87): unsure at all Xaa locations
  Clone ID: PAT_MRT4530_27902C.1.pep
XISAKPKKRXDSRSHIHPAFGYQTLTSKVDWKTKMQLHLSPNXXXXQKGVGXCMTQXCXSFDCXSLGQSIPGIFRASGGPMEXPHWX

SEQ ID NO: 125240 - protein, 443 aa, Oryza sativa
  unsure (1)..(443): unsure at all Xaa locations
  Clone ID: PAT_MRT4530_27903C.1.pep
FDNDCQQCLVLTVADMNRDEPVLSAAAYFXSNTLNAFLFNQGPITPTLLDIVMIMDLDITSSANPVSMNTKGKFSYKTRSIGGWIGFITQNMGTGSVTPKEHTAFLMMWLEKFLFCGPSCGPTTNWQHIAKALVDKKQFPLGKYLLGSLYQTLNSASAKIAVDSVIGTGGPWWLLQVWLNLHTIKVAKRPTLSEADFPSINEPTVVGEGNEITSRRCMSFGEATSTYNGSELSAELFLNWYGNFYDGFPKDSKIWFAYEHAENFELPANFRFDEISHERFEKSREVFTAAISPCILPVGIHQDRNIQVSYEFYHPMSTARQLEIGQLSIGLYFVDKIQTRGEITSALMMDRLLNIPGPPLGSMDNIVLALMRSSTFNRWWAEWKKHLFHQSASIYLTNMFXEMVPQTTESSPPHTSQSGETICYVVLPLSCASNPFKSLHLYK

SEQ ID NO: 125241 - protein, 143 aa, Oryza sativa
  Clone ID: PAT_MRT4530_27904C.1.pep
KKRAENNATGKKRPHLQRDGFSIILQKPPKRPGIYSSGKISNFVGGGNRKTAPPIFGGFPKGKPGGFKRGSCGHPGLNMGVKKPKGPFFNGGEPGIRGFGGNPFSSREGLCTHSDWKGFGNFRSGSIRLGGYKASPDVPRTDQ

SEQ ID NO: 125242 - protein, 208 aa, Oryza sativa
  Clone ID: PAT_MRT4530_27905C.1.pep
QNCLMGKKLAVLAGDFLLSKAFSTAAVSLDNAEGHNIKVIPFFSLQVILLLATAVNNLVTGEFMQMRITPIQRCSMDYYLQKSYYKTAALISNSCKAVAVLAGQTAEVATLAYQYGKHLGIAYQLIDDILDFTGTSASLGKGSLSDIHQALAYLARSKGIERTRLLAAEHAKLAADAIDALPESKDGSVLISRQALKDLTEKLIKRTK

SEQ ID NO: 125243 - protein, 561 aa, Oryza sativa
  Clone ID: PAT_MRT4530_27906C.1.pep
MRVGKAKRRLDLSTRRGTDEGGRTNCWKTATSAPSLARATAVRVLATDPDPSGVACVRCDVNGERVRAWSCGAKTCGMGAGRKLKTHRRNQRWADKAYKKSHFGNEWKKPFAGSSHAKGIVLEKIGIEAKQPNSAICKCARVQLVKNGKKIAAFVPNDGCLNFIKENEVAYVDGIYGIKVLVDALSSSRLRGRDGSGGDHGDATAAAAASREVAPPPRPRDVYHRPFTARDDDELLRLHYRLGDRWKEIGRAVYGRTSRVMKHRWRELRRGGFLAAAARKELAALDMADDMVETSEVEEPADQSLPSLELQRSTLADTLASSFGSCSLATDHVMDPLAGSLALGKYQFFTIIKIEDVFTGTLVRHPWLPRLVKENGFRHWSRVARIMPRRSARLCRDRWCHHLARDVYHRPFTARDDDELLRLHYRLGDCWKKIGHAVYGRTSRVMNHRWRELRRSGFLAAAARTEQKLDMADDMVESEVEESDQSLPTTRKSIIATGRKGSLQAGQPSACKPTTVKIADLRRRGGRPPAKIIFAGGRWLVRSACEKKNRPPTKKNFRLRR

SEQ ID NO: 125244 - protein, 84 aa, Oryza sativa
  unsure (1)..(84): unsure at all Xaa locations
  Clone ID: PAT_MRT4530_27907C.1.pep
RPXVRGAPGNKVSFFFPRALTKGGGPSGAQMFSPHLFRPQGESGPKTLLVLERGFKGGGLLGPPVFRGPEAPSKGPFSPEKPWF

SEQ ID NO: 125245 - protein, 59 aa, Oryza sativa
  Clone ID: PAT_MRT4530_27908C.1.pep
GGDGGEAGAGVHRGEAGRRGTDRQHLEDNISRRRGRGRRRCSSERFPRRRLVARKRSSL

SEQ ID NO: 125246 - protein, 86 aa, Oryza sativa
  unsure (1)..(86): unsure at all Xaa locations
  Clone ID: PAT_MRT4530_27909C.1.pep
SPPPPPIPPPAAAATRSPSPLSPDLAEGRVRPPSPEAATASHPAAXPSSEATTASHPAASLPPLHAAAAVRPPSGHAGWEGRSGEE

SEQ ID NO: 125247 - protein, 160 aa, Oryza sativa
  Clone ID: PAT_MRT4530_2790C.1.pep
LMSHDKKWVEELPSVLWAVRTTPTTSNKETFFFLVYGSEAMLPTELRHQTSYQQALCRYHEKRIRARTLSIGDYVLRRVQSQAGRNKLSPKWEGPYTITQVLRPGAFKIADSDGRELANSWNIDQLRHGNYQEGQRQSIDWKTFSVSGAIDFARPSISTG

SEQ ID NO: 125248 - protein, 78 aa, Oryza sativa
  unsure (1)..(78): unsure at all Xaa locations
  Clone ID: PAT_MRT4530_27910C.1.pep
RPLGRRGXKKKKKKKKKKKKKKKKKKKKKKKKKKKKKKKKKKKKKKKKKKKRGAVFKKNKIYLPVLPKLKIFFLGPLK

SEQ ID NO: 125249 - protein, 366 aa, Oryza sativa
  Clone ID: PAT_MRT4530_27911C.1.pep
MEPRSSPATVAAVHSTAGEPTSSPSAAADGAEVVPSRRRCRALHRWREPPNSTAVTAMIATMNTMARYGNKYGNDSVPPVNPSANPNLELCKAFPFLSVSCLPLYQYIIFKFQKLLEILLRYYCEFYRHVHTMERIVEYVTMMTRDHSTSAKELKMTVSVLIKGNGPNTINGLDHLPGDITDSGTIDLMALYLTKKYENLTKKRNEDLAKLKKEKEDMEKEIRGLRERIKELEEQVISSSSSGKSLTNNAAENIMEGINKQILGAEQYKMENRDLKRQNKELSKQNKELMEQSKELMELPALRKKHEELTKRYESLTKKRNEDLAKLRKEKEDQQVDFKKEKEDLEREIRQLKEEIKQLECCCVIL

SEQ ID NO: 125250 - protein, 59 aa, Oryza sativa
  Clone ID: PAT_MRT4530_27912C.1.pep
VQVTSSVLCPGNFYGGLPSVFCLQKNHLVIGLFSFWQPNKIQHSSEGHSIVLEWNAALS

SEQ ID NO: 125251 - protein, 51 aa, Oryza sativa
  Clone ID: PAT_MRT4530_27913C.1.pep
LYLIRLALLLLGLTHSTIHAHIYFFLGVLVRTPNRHQWVTVEGETPTTVLA

SEQ ID NO: 125252 - protein, 737 aa, Oryza sativa
  Clone ID: PAT_MRT4530_27914C.1.pep
MVSSNMFYRRKRSWRAGDLLDFDDGSPPEYAWRRKLSSHANRLKEFNVTFREAIKMMKLGLRLWSYIREEASHGRKAPIDPFTRESDKPSASQGVPLGGMGKSNDDGISSWDWKLRGDRSTYHALFPRAWTVYDGEPDPELKVSCRQISPFIPHNYQESSLPTSVFVYTIVNTACENQNVNVTVLPAFGLSGESSVTAREMWGTLSQDGCFDRDNFSAGPSMPSSLGDTVCAAVCASTWVEPHGRCTVVFSLAWSSPKVKFKKGNAYYRRYTKFYGTSPRYKVTLFNELYFLVAGGTVWIDSASLMADADEMMNSRLSEDNDLPLHHSSRNSAVPLIGFSPHIIDDRENVGKFLYLEGIEYFMWCTYDVHFYASFALLELFPKIELSIQRDFATAVLREDKSRVRFLADGTWGTRKVIGAVAHDLGAHDPWHELNAYNIHDTSRWKDLNPKFVLQVYRDFAATGDMSFGKDVWPAVCTAMEYMEQFDHDDDGMIENDGFPDQTYDAWTVRGVSAYCGCLWLAALQTAAALARTLGHHDYAERCMLKFAKAKPVFEAKLWNGSYFNYDSGTSYNSRSIHADQLAGQWYTASSGLPPLFDEGRIKCTLQKIFDYNVMRVKGGRMGAVNGMHPNGKAFTTAEGIFTAGWSEEGYGYWFQTPEAWTIDGHYRSLIYMRPLAIWAMQYALSPPRTILEAPKVNTMDRTSYISPSTLQFLQDSVRKMTPKNSCFGSSSSNCEC

SEQ ID NO: 125253 - protein, 63 aa, Oryza sativa
  Clone ID: PAT_MRT4530_27915C.1.pep
MAAGGNLEEARSSGTRRMRPNVCSSASSFHYRCLRHCGHYLKAWGCEHVEVVGGVTLDLWGES

SEQ ID NO: 125254 - protein, 95 aa, Oryza sativa
  unsure (1)..(95): unsure at all Xaa locations
  Clone ID: PAT_MRT4530_27916C.1.pep
FFFFFFLTGXNAVDQXXTXXWXVXXLPXXXXXXLTVRXXTILVXFIEIKAXLLXXELLLHKPXTWASHXPXXQIXXGXXXWRIXPLXXPXXPXNV

SEQ ID NO: 125255 - protein, 62 aa, Oryza sativa
  Clone ID: PAT_MRT4530_27917C.1.pep
SRLAIDIALHSKMILSLRNWHLINNTFFRRLQDKDELRQSMGMPSVQAELRSFPLHCTASYR

SEQ ID NO: 125256 - protein, 53 aa, Oryza sativa
  Clone ID: PAT_MRT4530_27918C.1.pep
ADEAIWTGDPRKVIAQRMILAAVKANSNDRNQTRLSNCKSDKHLRILYSCQYI

SEQ ID NO: 125257 - protein, 323 aa, Oryza sativa
  Clone ID: PAT_MRT4530_27919C.1.pep
MDETLADESAAGGGEAAAAEPAQESQQETLEEVLSRHRKEKSKLQDKETSLKKAAAKGSKAEQKAKKKQVEEEISRLSAELEAKHAAELATFGYKSSGSSEKGNMDTLVKAIAGVSVTSNADSAKPSKGARRREKKAKEEAAREQRIQEEQNNLVSDRMIENEKLEKKLEPMGLTIQEIKPDGHCLYRAVENQLSLYSRETTQYNYQELRQMTANYMKEHAADFLPFFLSEGKVESGPDPLESFKRYCEEVESTAAWGGQLELGALTHCLKKRIVVYSGSFPDVEMGKEYKLDSGGKDGPSIRLSYHRHAYGLGEHYNSVVPA

SEQ ID NO: 125258 - protein, 54 aa, Oryza sativa
  Clone ID: PAT_MRT4530_2791C.1.pep
MPGCCNVVNQHGADEGAMDCVITAGNNAPDKGSDGKTCSQQGLGQWAYLGFLYG

SEQ ID NO: 125259 - protein, 73 aa, Oryza sativa
  unsure (1)..(73): unsure at all Xaa locations
  Clone ID: PAT_MRT4530_27920C.1.pep
VHLKWWLYACSPRVGSAGDVVGIPTASVACLGYMLCXCAGCXCSSHVSSSRASLFERLYLFLXTLTVSPRTRV

SEQ ID NO: 125260 - protein, 36 aa, Oryza sativa
  Clone ID: PAT_MRT4530_27921C.1.pep
PNRLASEGGGIFDRGSFTLTAVSIAEREGYRAHLGG

SEQ ID NO: 125261 - protein, 205 aa, Oryza sativa
  Clone ID: PAT_MRT4530_27922C.1.pep
MGEGGGILGEAAYLETAAQAVVVLDPGGGGGEAVAKRSRQSAVVGDPGVGKVRIGEVGEVDGRTAERTTGGEGGGGGGGGEGEAAMERVEMAAERAAEMAADRSRRRRWRWRWRWMAAVERVSAAAVVQAGVGKVGGEGERQRGRQWRGRGGGGEVEAAVERVAERAERAADLAAARTAVERSRRRWRGGRQRGRERRGGGRESE

SEQ ID NO: 125262 - protein, 170 aa, Oryza sativa
  Clone ID: PAT_MRT4530_27923C.1.pep
MGEGGGILGEAAYLETAAQAVVVLDPGGGGGEAVAKRSRRSAVVGDPGVGEVRVGEVGEVDGRTAERTTGGEGGGGGGGGEGGGEDGRDGGREGSGDGGGEGRGEVEAATVEMSAERAAARRVWMAAERSRRRRWRWRWRWMAAVERVSAAAVVQAGVGGEVEAAVERRA

SEQ ID NO: 125263 - protein, 214 aa, Oryza sativa
  Clone ID: PAT_MRT4530_27924C.1.pep
MQFIHRKKGGMGEGGGILGEAAYLETAAQAVVVLDPSGGGGEAVAKRSRRSAVVGDPGVGEVRVGEVGEVDGRTAERTTGGEGGGGGGGGDGGGEDGRDGGREGSGDGGGEGGGEVEAATVEMAVERTAAVERVSEEAAVEKEAARAAERAEMAAERAAARRVWMAAEMAAERSRRRRWRWRWRWMAAVERVSAAAVVQAGVGGEVEAAVERRA

SEQ ID NO: 125264 - protein, 226 aa, Oryza sativa
  unsure (1)..(226): unsure at all Xaa locations
  Clone ID: PAT_MRT4530_27925C.1.pep
MVREATERKRSLSRSTARRRRRPRLHSAQPSSASSDPVEEKWRRGAPPSAVATWNVLTTKFSNLSIGDEDXSKRNSRDRSFRKXARIGRSPNRLRSGSAESESDKVXRLSRFRQCNSFGQKSVAKTYGILEFVRDKSRVXQRHTLIKSIGTLTNLKAXFWTCTEVKQIFQASVCFSHQHAERQAQEQERLWREQQERERATKEAEDRRFIFLRPIMLRNMRRYSMD

SEQ ID NO: 125265 - protein, 150 aa, Oryza sativa
  Clone ID: PAT_MRT4530_27926C.1.pep
MGEGGGILGEAAYLETAAQAVVVLDPGGGGGEAVAKRSRRSAVVGDPGVGEVRVGEVGEVDGRTAERTTGGEGGGGGSGGEGGDGGREGSRDGGGEGGGEVEAATAEMAVERTAEMAAERAAEMAAERAEERLRRRRWRWRWRGRRRSRE

SEQ ID NO: 125266 - protein, 77 aa, Oryza sativa
  unsure (1)..(77): unsure at all Xaa locations
  Clone ID: PAT_MRT4530_27927C.1.pep
EKDLNLXVRERPAXWYAATTTMGLINCGVVRGDDEDIAADEEEGRSCWGWCSXXATACXXLXHHGXASYPLHFSSNR

SEQ ID NO: 125267 - protein, 101 aa, Oryza sativa
  unsure (1)..(101): unsure at all Xaa locations
  Clone ID: PAT_MRT4530_27928C.1.pep
STLTQPDNVYRVTLSELAQSATLSDSNSADPDRSRFGLRPILALFPERSISWIPLRFYLHLRYLNXLNLVVNTXPSSDGARWGSTPSLLLDRVGRRGRRLR

SEQ ID NO: 125268 - protein, 195 aa, Oryza sativa
  unsure (1)..(195): unsure at all Xaa locations
  Clone ID: PAT_MRT4530_27929C.1.pep
MQFIHRKKGGMGEGGGILGEAAYLETAAQAVVVLDPGGGGGEAVAKRSRRSAVVGDPGVGEVRVGEVGEVDGRTAERTTGGEGGGGGGGGDGGGEDGRDGGGEGGGGVEAATVEMAVERTAAVERVSEEAAVEKEAARAAERAEMAAERAAARRVWMAAXRWRWIWMAAVERVSAAAVVQAGVGGEVEAAVERRA

SEQ ID NO: 125269 - protein, 183 aa, Oryza sativa
  Clone ID: PAT_MRT4530_2792C.1.pep
LRARAADGRAPRGSHSARPRAAQPAQPAGGGARAPMVAGGGHRHGGAAAERGEGKGEKKRRSTAHPRSTATTKKAAGAEEGGGAARVDGVDGVPAVGERNGGVDEVSEDAAKPKEAAPRWEVVRGDDGGGPELDGDGGERERRRELNSGEEEGRREAETDGCRVPKRLRHPLPPAAPAAPPAP

SEQ ID NO: 125270 - protein, 190 aa, Oryza sativa
  unsure (1)..(190): unsure at all Xaa locations
  Clone ID: PAT_MRT4530_27930C.1.pep
MGEGGGILGEAAYLETAAQAVVVLDPGGGGGEAVVKRSRRSAVVGDPGVGEVRVGEVGEVDGRTAERTTGGEGGGGDGGGDGGGEDGGDGGREGSGDGGGEGGGEVEAATVEMAVERTAAVERVSEEAAVEKEAARAAERAEMAAERAAARRAAEMAXRWRWRWRWMVAVERVSAAAVVQAGVGKVGGEG

SEQ ID NO: 125271 - protein, 70 aa, Oryza sativa
  Clone ID: PAT_MRT4530_27931C.1.pep
KRAGYWGSFFLCKLLSGLIERSGGWTIVLEKVKLVGGEFTCELVVCVWRAMIVVIILCVLCADVMFKIHQ

SEQ ID NO: 125272 - protein, 43 aa, Oryza sativa
  Clone ID: PAT_MRT4530_27932C.1.pep
PLPNPHNGIIDSTPHEKRERNAPKPEWLCTCGLPLVFSAFRHL

SEQ ID NO: 125273 - protein, 72 aa, Oryza sativa
  Clone ID: PAT_MRT4530_27933C.1.pep
MVREATSVATQSPREGASALPGRARPPPQPPGRRRLRIFVTLRRDAALQLQRIVGRFLQIGPREAYGPIHDT

SEQ ID NO: 125274 - protein, 365 aa, Oryza sativa
  Clone ID: PAT_MRT4530_27934C.1.pep
MALLRAAAAADLLRRHRRAPLPLLLSALSPPPPTTPESCPDGPSPVAPYFAPPPPPLCRRRRSWPPPPPPPRVSSSSYVGRGILLPATFSIYSPLSTSSSASPDGSPDEDSSPPHPSPAAAPPSSWVDRWLPQAARPYAMLARLDKPIGTWLLAWPCFWSISMAAMPGELPDMRMLALFGCGAVLLRGAGCTVNDLLDRDIDNKVERTKSRPFASGILTPTQGVGFLGLQLLLGLGILLQLNNYSRILGASSLFLVFSYPLMKRFTFWPQAYLGLTFNWGALLGWAAIKESLDPAIILPLYTAGICWTLVYDTIYAHQDKEDDLKVGVKSTALRFGDLTKHWISGFGVACIGSLALSGYSADLGW

SEQ ID NO: 125275 - protein, 127 aa, Oryza sativa
  Clone ID: PAT_MRT4530_27935C.1.pep
TWWREVSPTPSASLTGYAAPDAALPLPSPSPLRPALASPPPCTRARELHRGPAIASPPFSFTPRSLLHPRAPATDAVASPPRIALPPPSPMHQPRCVASASRFAFPLPALAPGRIAFLVTAPSRLSR

SEQ ID NO: 125276 - protein, 68 aa, Oryza sativa
  Clone ID: PAT_MRT4530_27936C.1.pep
SQRVRLAQGGPTIKGPEGMRRNILNRQSLAVCPDGFVSADGRSQTWKLGRVIWILWTYKSTHTPMPDV

SEQ ID NO: 125277 - protein, 113 aa, Oryza sativa
  Clone ID: PAT_MRT4530_27937C.1.pep
MTLAAILLLVLALVAPPLAAAAVLDDGGGGHRPPFHMCGMVQGRFAPNSSYEANLRRVAATLPAMVANGSSSSSSGVDVLVGERPDQISTSAFCGANSSAAPEYSDCGACVET

SEQ ID NO: 125278 - protein, 69 aa, Oryza sativa
  unsure (1)..(69): unsure at all Xaa locations
  Clone ID: PAT_MRT4530_27938C.1.pep
PLPTLCRRWCPPPLPPMPPPPMHHTPTPSPPRSQSAPGSAPPARPPPSTTSSPXPPAPPLPASSRRCPS

SEQ ID NO: 125279 - protein, 55 aa, Oryza sativa
  unsure (1)..(55): unsure at all Xaa locations
  Clone ID: PAT_MRT4530_27939C.1.pep
DLCAXEXHIYPXGXDVCYVXXXXRVQSFVSXXLFXSWVGALEERSRIACVYVQDL

SEQ ID NO: 125280 - protein, 97 aa, Oryza sativa
  Clone ID: PAT_MRT4530_2793C.1.pep
MINFYPLERPFSLPPPRLGLLGGGTSPKVSGSPYNLFCKDISIKVKTCIFEACVVLMDGSYMDMLIVRSFCTFQENLLQLISCLNIKVNSFTSGSSL

SEQ ID NO: 125281 - protein, 87 aa, Oryza sativa
  Clone ID: PAT_MRT4530_27940C.1.pep
MARRGFFKGKNPHATNDETGDVTRPRRVYSLTSWARGLDFQVPSRLRGEDNHGLGMAKARAAFAPGRNRSSSPKEDHGCDLKSRREV

SEQ ID NO: 125282 - protein, 150 aa, Oryza sativa
  unsure (1)..(150): unsure at all Xaa locations
  Clone ID: PAT_MRT4530_27941C.1.pep
WGGTRGGTFPAPPNGKGRRTPARSGTRGSPAGAGESPPKKKKQRGKATAGFRLPPAQRPRQECRQNEKKTPARFGKPMPRVFRRXGGKVEARTGSTAIRRSRGRCPPVGRKTGPAPAATRSTAAPERSSAATAEREEHGASTIPTARATG

SEQ ID NO: 125283 - protein, 61 aa, Oryza sativa
  Clone ID: PAT_MRT4530_27942C.1.pep
IIFKSPKLHLDVGNKMVCPPDNVPNCKSVVIMFMPKKSRCLVWANFFVLHAQIWSCPKLNV

SEQ ID NO: 125284 - protein, 1001 aa, Oryza sativa
  Clone ID: PAT_MRT4530_27943C.1.pep
MENQPVLFSAVFILYVSFLGPFCASSGEESFVYSGFASTGAANLTLDGSAMVTTTGLLQLTDSMPNIQGHAFYPTPLRFKKQSNGIVQSFSVAFMFGIISPYSDASTDGMAFVVAPNKGFPDAKAAQFLGLLNISSDNSTSNHMFAVEIDTAQNTELDDIDGYHVGIDINSLHSKKSQHIGFYNDQHGGLLKNLTLTGSNCKPVQVWVDYDGETTQINVTLAPIKVTKPTRPLLSVPFNLSTVLTDQAYIGFSAATGPLTSHYYVLGWSFAMNAPAPPIEISRLPRLPCPGDNRLQKILQILLPIVAVALIFIVVMILVRRQQRYAELREDWEVEFGPHRFSYKDLFNATEGFKSKHILGVGGFGKVYKGVLRTSKLEVAVKKVSHGSNQGMKEFISEVVSIGHLRHRNLVQLLGYCRRKGELLLVYDYMPNGSLDKYLYGEDNKPVLNWAQRMQIIKDVASGLFYLHEKWDKVVIHRDIKASNVLLDSEMNARLGDFGLARLYEHGTNPQTTHLVGTMGFIAPELARTGKASPLTDVFAFGTFLLEVTCGRWPISNSAHHGRKMLVDWVLQHWHQGSLPETVDPKLHGIYNVDEACLVLTLGLMCSHPIPGARPIMRQVMQYLDGDAPLPEFTPATLNSSLLAIMHNEGVDPYVAQYPWLSPDRPTLLLSTHPSWTQVVADQRFLKTDSKTKGPEAENLTPTSVNLISEVQNKDFHQNKWHSQQEGKTQPKKDSFDRSLVGCSDAVDQFVYSGFTGSNLTLDGGARVTPSGLLELTNGMVRLKGHAFHPTPLHLHESPNGTVQSFSISFVFAILCDYPDSCGHGLAFFIAPSKNFASAFWTQYLGLFNNKNNGDPNNHIFAIELDTVQNDDLQDISNNHIGININSLYSMKSRDAGFYDDKSGDFKNLTLISQKAMQVWVNYDREITQINVTMAPLNVEKPVKPLLSTTYNLSTVLTDSAYIGFSSSTGTVSGKHYVLGWSFGMNSPAPSIDIAKLPRLG

SEQ ID NO: 125285 - protein, 80 aa, Oryza sativa
  Clone ID: PAT_MRT4530_27944C.1.pep
ILLNSNKNHHLGAPWWPSGLRILPCHCCSRGLCCDTGSTPTQEFPHAAAAAKKKFLFDSTAYVSAQNMKQPATHQDQYCL

SEQ ID NO: 125286 - protein, 151 aa, Oryza sativa
  Clone ID: PAT_MRT4530_27945C.1.pep
ASSKVRVLERLKIHNHTLMQAETHSGRPHQIRIHLAYIGHTVVDDPLYDIERKAKFDEPEPTSTADSFAYDGGYERPLQPVPGDCGYHLHAHWLSLWHPTTKGGTGKMNNIEFGCYSVPDSYNSFQSQELGLNSYIEDDQNHSSSATYPTD

SEQ ID NO: 125287 - protein, 66 aa, Oryza sativa
  Clone ID: PAT_MRT4530_27946C.1.pep
TGIPRHAEQHIQASQTLNPTHATSTTGSHRSQLPSLHFPSVGHTQHTTCGHCTVSAHALHGIPCPA

SEQ ID NO: 125288 - protein, 262 aa, Oryza sativa
  unsure (1)..(262): unsure at all Xaa locations
  Clone ID: PAT_MRT4530_27947C.1.pep
MAPLAAGLPWRAGMLPPLLLARFQMTSGKIRYVQTTSETEPNSSRHGXGKKIDHSSSRXNEESHILKSLFDAQGXHSAINHDAIMHANDDQKLXPIGSHDSFFWLLVRLVRAGAAETPSSVFLKFKSTLNRXGLFSSSQPSETSNSRAKVCKLLGRMHLEHLLHIRYKEKDDLGXASNHTPSLSXKGHASSSSTRNIIMQPQVLIYQXCTFRLQPAQQALTRHFKNSIMSKDMLLFKNLLKEIAMLQRCKNDATWMLKPYYQ

SEQ ID NO: 125289 - protein, 225 aa, Oryza sativa
  Clone ID: PAT_MRT4530_27948C.1.pep
MSYGLFFFRIPCLDEFGSVSEVVCTYLILPLVIWNLAETVVRIHALPLPIAVGVGASGVAMEWNQIELINRHATETTPEIHILLELRRRVRSLLLAAGAGIGEAAASGEEEATSLGIEPKLLQAQFTREQRGRRRAPAATGEPATRSGACAVTAMVVGKVSAGSSFWAPRRRELGERMLQRMEHRCVVGWLLRRRYRVDGGDAAAELVLTDRVEGPKDWTWWWMR

SEQ ID NO: 125290 - protein, 54 aa, Oryza sativa
  Clone ID: PAT_MRT4530_27949C.1.pep
MGDFHRQMKAVAGGNNKGFMSIYATTQSNTTAQSTQAPATTGAAARCDAAQSSK

SEQ ID NO: 125291 - protein, 95 aa, Oryza sativa
  Clone ID: PAT_MRT4530_2794C.1.pep
MRGSKSVRGCETQAGQQCGGPLSFHRWKRTGNVRPELSLKPRRPNYATWNGRAIYGTANPGPQPYGNVHTTLMPPLGLQARAAELGWRWWDALAI

SEQ ID NO: 125292 - protein, 46 aa, Oryza sativa
  unsure (1)..(46): unsure at all Xaa locations
  Clone ID: PAT_MRT4530_27950C.1.pep
SSCXRQNLVKILXWVRLKERAQSADGNLIQKSPSSKRNHGDHDMAA

SEQ ID NO: 125293 - protein, 70 aa, Oryza sativa
  Clone ID: PAT_MRT4530_27951C.1.pep
PECECGLLLGIVCNPAKGWGHPQAWLPSKDQTLLGPGGMASLSWILRLHVVNSCPDDSNSRVNGLARPGS

SEQ ID NO: 125294 - protein, 75 aa, Oryza sativa
  Clone ID: PAT_MRT4530_27952C.1.pep
MNEKDNVRVGSIQTTLFQHFGDDASPKIRRLVKAMLATKQGALEVRVALPRNGMLISGCQTDKTSMGATTPEGIP

SEQ ID NO: 125295 - protein, 85 aa, Oryza sativa
  Clone ID: PAT_MRT4530_27953C.1.pep
MGVRVTGPAGSPLVAAVLASLEEAAAGGGYELVGTAAAREQSTRPHLARNPFGKIAAFAEDGELALVDAVGGHVDGSRSHARVTS

SEQ ID NO: 125296 - protein, 269 aa, Oryza sativa
  unsure (1)..(269): unsure at all Xaa locations
  Clone ID: PAT_MRT4530_27954C.1.pep
SQVSHHLLLQNRDQNIVEAMGLIVDVKARLXDMRDNGWALLFNQVKNFCEANGIGVPNMDDLIGVNGKSARWKHKVTYLHYYRVDIFNVALDVIMGDINHRFHXVSFYLLVCMSYLNPSNSFSKFDMHKFVRFVEIYAVDFMTVDCLMLRNQLQTFILNIRRCVEFNDCHDLAKIAEKMVQSRKNMTFPLVYXLIGFTLILPVATASVERFFSAMRIIKTDLRNKIAHYWWCITMRKRYLDAFLYFVVHLRKSIFPRRPKYLYFYRQNS

SEQ ID NO: 125297 - protein, 446 aa, Oryza sativa
  Clone ID: PAT_MRT4530_27955C.1.pep
MARKLFVLVLIMCSTTALITCTNGGAGDGGEGLHMKLTHVDAKGNYTAEELVRRAVAAGKQRLAFLDAAMAGGGDGGGVGAPVRWATLQYVAEYLIGDPPQRAEALIDTGSDLVWTQCSTCLRKVCARQALPYYNSSASSTFAPVPCAARICAANDDIIHFCDLAAGCSVIAGYGAGVVAGTLGTEAFAFQSGTAELAFGCVTFTRIVQGALHGASGLIGLGRGRLSLVSQTGATKFSYCLTPYFHNNGATGHLFVGASASLGGHGDVMTTQFVKGPKGSPFYYLPLIGLTVGETRLPIPATVFDLREVAPGLFSGGVIIDSGSPFTSLVHDAYDALASELAARLNGSLVAPPPDADDGALCVARRDVGRVVPAVVFHFRGGADMAVPAESYWAPVDKAAACMAIASAGPYRRQSVIGNYQQQNMRVLYDLANGDFSFQPADCSAL

SEQ ID NO: 125298 - protein, 97 aa, Oryza sativa
  Clone ID: PAT_MRT4530_27956C.1.pep
MAVAGRSPFTQDLVAGALTRFEWRGGKQQRLGPTLSGPEEEVVAMGSRRRMSSMTEESCGVLARRRHGASEEGETARVEDEMQAARLRAWRRHEEER

SEQ ID NO: 125299 - protein, 783 aa, Oryza sativa
  Clone ID: PAT_MRT4530_27957C.1.pep
MVDAAAAAAECGELDGTDAMAYGDDRTPRDGMVFKSYEEVLNFYKRYALRTGFGVCVKKSSFTKAGLCRRLVLVCNKWGDGKEDACYQARPTAKTNCQATVVARLWSDGLLHLMDVNLEHNHALNPSAARFLRCYKTLPSGMSKDLVVRAARGECSTSGDIEVPIFDDWGRLKIGEDDVAAINGFFADMQAKQANFFYLMDFYGEGHLRSVFWADSRSRAAYQYFNDAVWIDTTCLRNRFDTPLVLFLGVNHHGELVLLGCGLFSDESTESFLWLLKSWLTCMKGWPPNAIVTDDCAAIKAAVREVFPNARHRISDWHVLRSISEKLGESAQFEGMKTELETVIYDSLKDDEFEARWNNLISRFGLQDNEWITFLYENRHFWVPAFLKDTFWAGLSTVNHHESPNAFFEDSINPETKLVTFLSSYVNLLQNKYKMEEDDDLESLSRSRVLVSKFPMEEQLSRLYTFKMFTKLQNELNATMNCEVQLDDSTSSIVVIDLAESSGEMVNKKYEVVHCMETDRMECNCGLFQFSGIVCRHTLSVLKCQHVFDIPPCYVLNRWRNDFKQLHALDNPWKDLVTSNHIERYDYVSLQCLRLVEIGASSDEKHQHALKLIRDIRRTLLDDNLCRELEQKLTPSERAINGDSHMQAGSSEGGPAKKRRGRPPKKSKDTNVESVSNQYAHKDSLLVSSDVSQKDAFHSSSTASNLGTHVRTNGVVDLMEEVNPNELSFDSRYGVQSSHPHHYGNQLHPSNTMQVFIRHTEGKNSFSRKQTQGRHSPLDVEQI

SEQ ID NO: 125300 - protein, 143 aa, Oryza sativa
  Clone ID: PAT_MRT4530_27958C.1.pep
AVHARTQLPRPWRGEGGREEEHNEGSWGSGWSGYGSARRGCPNAKLSWQDPWPPRENPRLVDSPKALAAGWSERVGKSTGRNQESGRGLRSLQKPPWTAPASSRECACERRLVVAELAKPDCGGEAAMPPIPSLWIRVFFFWL

SEQ ID NO: 125301 - protein, 146 aa, Oryza sativa
  Clone ID: PAT_MRT4530_27959C.1.pep
YHRTLVRRMLFILLLQPQILVLMSGQMVLLTLWKKLIQMSYLLIAVMGCSLATHTIMAISCIQATLCSLAKLHQQQSTLESSGCTRIYFRTIKCLMADGHDSNQILGSDGAISGFHQTYRRKELFLKKTNSREAFPSGCRADLTSE

SEQ ID NO: 125302 - protein, 119 aa, Oryza sativa
  Clone ID: PAT_MRT4530_2795C.1.pep
MEVDEVGGRWTFSRANEGYTSCGPVVEMSWHRAGVLLLGAQSCLPVPGVPAVGGIGSRRRLGGGDGSNGARSSANGDARTQTEGTKTERTTRRTHREEADEDGDDLASTTVVFPSDGDG

SEQ ID NO: 125303 - protein, 76 aa, Oryza sativa
  Clone ID: PAT_MRT4530_27960C.1.pep
MAGRWRAEVAAATSTPPLASGWLAEVAAASGERGGGELPSARSDARGASGEVAGSCLAEAAAAQLGGGSGRTLPMR

SEQ ID NO: 125304 - protein, 78 aa, Oryza sativa
  Clone ID: PAT_MRT4530_27961C.1.pep
MGDGTGDEVQGGEVKPQEVELGCGPWVAAQWLRIGSSHQRRPSSHHELPLPTGGAPPCASPPAARLLKKLKKEVKMDM

SEQ ID NO: 125305 - protein, 213 aa, Oryza sativa
  Clone ID: PAT_MRT4530_27962C.1.pep
MAAHHGSSRKTKAEQWLFGGRWRRTVKETKHPVASEAKPPAPTFPTAIQKDGDICLEKSRVHLPGLGQREIIDIAPGRKSMPEVEINMKEVREIIDIVPGRKSMPEVEINMKEVVSVLGVKVMAADMSPFMQLHAFRCAKRSHDSLDKFSSRQLAHDVKKEFDKVYGPTWHCIVGTSYGSFVTHARGCFLYFSMDKIIVMLFKTKIRKVLASS

SEQ ID NO: 125306 - protein, 312 aa, Oryza sativa
  Clone ID: PAT_MRT4530_27963C.1.pep
MEARLYAEFRATARARLMPAVTLAESCKKFGYHPPAPPFEIINHPDLFERAWGWDTILPFSVARTFSRYKEYLVDYYNRNQKKPNAAAAADLTGDDDSLTALANKCAEMEGHLMFLLKCRAGVFTENVEIKISRTSDRITKRARETTTNALESEFPAAAVAFKCITKEAELMCAMLIHAAEDHPYWFVLCNKVRLYALRFMAYKEPEYILAAAAMMGITREANLTCELVKERHKDKNGREFFSIFIRTRTLASMYYILKEYSAVGKPTRDNTAGKLISDESDVKTCPGKDVVENDILDDWIVISPKKAETIG

SEQ ID NO: 125307 - protein, 77 aa, Oryza sativa
  Clone ID: PAT_MRT4530_27964C.1.pep
CATRTDGTGSKTDVPEVVTATQDAWSKVEDKYAVTVICVASLVWLWTDIGAIKVIYRLSLLPGVLELVGIRYTGRVT

SEQ ID NO: 125308 - protein, 658 aa, Oryza sativa
  Clone ID: PAT_MRT4530_27965C.1.pep
MGNSIYRFLCGLCSPSPEYQPHGAHPAVAALGRDIQQFEATSQVPDGLSRHVVSSKKAQANWYKKLIVTWKKARPTPRTPEEAARLVVTTLKNHQKADVEGFLVFYGLPIPNAAASTPAPHTAHVPKPQGCKFELHTLPVDAKAVADGDTITVYIDTADPRESGNVPREIQKAAAERTRARAARDYQKADGLQKMIADAGYRQVPNARGEEVLAKKYRIRLRGIDAPESAMPYGKEAKEALLKMVQGKSLKVYVYDEDRYGRCVGDIYCDGVFVQEQMLKKGCAWHYTAYDQRPELAKWEKQAQSGRKGLWAASRPQKPWEWRRDKRNGRPSSVRTPRTRDPRRAGAASASRRLPLACAGGEREELAAWAPGGWLASSSSRARSADRNGVVHHGLGCLVVASAAVLVGNACHGLFPQKKVSSHGFNWIMSLTPKPQGVKYELHTLPVDSKAVTDGDTITVHVVTADHPGSLNVPQEVQRTAADRAEALMTKNYQRADELQKIILDAGQVTDSRGGQVLMKKYRIRLRGIDAPETSMPYGREAKEELTMLVQGKRLKISVYGNDRYSRLVGDVDCNGVFVQEHMLKKGLAWHYIAYDQRPELARALFGTAPAPAPPLLELELSQTVSAPPKLGVELGGALSQNALTLQSSSPEARAMVL

SEQ ID NO: 125309 - protein, 190 aa, Oryza sativa
  Clone ID: PAT_MRT4530_27966C.1.pep
MGRRGLSLRSSLGGRGQRRDLSGGTPAVGTISGTDEAGRSRSGPFAAKSGKGGTGSATSGSRRRPWWIWGGESNLPRLEWDEIDSTVAKPARLEAEGDPIGLRSRQEMQRVLAAPTVWGNKDWGRREILFELAKSLFCLLRPGKSPSYVEKLEERDSPFSEARDDLGSPRLTILRRRSLYVSTLLLGRNA

SEQ ID NO: 125310 - protein, 108 aa, Oryza sativa
  unsure (1)..(108): unsure at all Xaa locations
  Clone ID: PAT_MRT4530_27967C.1.pep
MASSGVGGVPGSPCGACKFLRRKCAAECVFAPYFCAEDGAAQFAAIHKVFGASNAAXLLQQVAPGDRSEVAATVTYEAQARLRDPVYGCVAHIFALQQQLATLQVQVA

SEQ ID NO: 125311 - protein, 342 aa, Oryza sativa
  Clone ID: PAT_MRT4530_27968C.1.pep
MANVALLSAASPSTSSAAPRLRHVARRRPSRRSACPRSAASRLSIMAALGEDPIRQWILTEGKATKITGVSSIGGGCINSAQCYKTDASSFFVKTNGRIGPSMFEGEALGLKAMYDTNSIRVPLPYKVGSLPTGGSFIIMEFIEFGCSRGDQSALGRKLAEMHKAAKSDKGYGFYVDNTIGSTPQINTWTADWIEFYSKHRLGFQLELITQRFGDSAIYDKGQRLIENMHPLFEGAVMEPCLLHGDLWSGNISSDTNGEPVILDPACYYGHNEAEFGMSWCAGFGGEFYSSYFEVMPKQPGFEKRRDLYLLYHYLNHYNLFGSGYRSSAMSIIDDYLRMLKA

SEQ ID NO: 125312 - protein, 208 aa, Oryza sativa
  Clone ID: PAT_MRT4530_27969C.1.pep
MANVALLSAASPYTYSAAPRLRHVVAVGRLAGPTAPEARPPGSPSTSAGSGEEMRTPVFEMNRICTNLPVAALGEDPIRQWILTEGKATKITGVSSIGGGCINSAQCYKTDASSFFVKTNGRIGPSMFEGEALGLKAMYDTNSIRVPFHTRLVKVGSLPTGGSFIIMEFIEFGCSRGDQSALGRKLAEMHKAAKSDKGYGFYVDNTIG

SEQ ID NO: 125313 - protein, 61 aa, Oryza sativa
  Clone ID: PAT_MRT4530_2796C.1.pep
HNTEGGTLRSRSERRSCVVAGTAYRATPSPRGTGDLRDHLNGRREARRTQGNGSRSRHHIP

SEQ ID NO: 125314 - protein, 39 aa, Oryza sativa
  Clone ID: PAT_MRT4530_27970C.1.pep
MAVGDDGPTVRGGHRRTASNGELSKIGKKAPQGHSLPPT

SEQ ID NO: 125315 - protein, 189 aa, Oryza sativa
  Clone ID: PAT_MRT4530_27971C.1.pep
MVDNKFVALSFIVMLGIGLANASSTSNGNGTGWGEGGGSIDGAGGGSGSGTGSSVSIVNEGGSVHGSGGGGGGGGNGGGRYSGSGHGSGSGRGSSSSQVGPDPYRGSSNAGGTGGGEGGGRADGYYGSSGYGSGSGTGVGSSASMNGDFPGGVFSNANAFGRGGGNGYSQNGGSGSGKGSGSAYGNGEP

SEQ ID NO: 125316 - protein, 166 aa, Oryza sativa
  unsure (1)..(166): unsure at all Xaa locations
  Clone ID: PAT_MRT4530_27972C.1.pep
INSQGNLPILSQAVCTIPLGTWVPKIGDPNGRPLAMLRPNTSLSAALNLLVQAGVSSIPIVDDNDSLLDTYSRSDITALAKDKVYTHIRLDEMTIHQALQLGQDANXPFGFFNGQRCQMCLRSDTLLKVMERLANPGVRRVFIVEAGSKRVEGIISLSDIFKFLLS

SEQ ID NO: 125317 - protein, 368 aa, Oryza sativa
  Clone ID: PAT_MRT4530_27973C.1.pep
MALSDRSRESLLPSFLYSTAGARPYTAGGGGAAFRLPAAAAPGGVGGGAPIEIQAPREKIEMYSPAFYAACTAGGIASCGLTHMAVTPLDLVKCNMQIDPAKYKSITSGFGILAKEQGVRGFFRGWVPTLLGYSAQGACKFGFYEFFKKYYSDIAGPEYAQKYKTLIYLAGSASAEVIADVALCPFEAVKVRVQTQPGFARGLGDGLPKFIKSEGALGLYKGIVPLWGRQIPYTMMKFASFETIVEQIYKHAVPVPKSECSKSFQLGISFAGGYIAGVFCAIVSHPADNLVSFLNNAKGATVGDAVKKLGLWGLFTRGLPLRIVMIGTLTGAQWGIYDAFKVMVGLPTTGGVTPAPSTSDAGLKAVSA

SEQ ID NO: 125318 - protein, 55 aa, Oryza sativa
  Clone ID: PAT_MRT4530_27974C.1.pep
PSKAQDVGVGLGLIGHHLRTPKRQHGRCSTDASRRVPRLGEGGVNGIRIRIWSVR

SEQ ID NO: 125319 - protein, 123 aa, Oryza sativa
  Clone ID: PAT_MRT4530_27975C.1.pep
MAKQSLVLTLIMLEPQVDKETRADVIKAGRGAGKRAPPVSGSGRAVHGGSGPRTGEERRATRRPNRWPGGSSRPVRAGLGANRPQRPWRATGRRTLRERAQKGARCYGSAANTVVFRATGALR

SEQ ID NO: 125320 - protein, 480 aa, Oryza sativa
  Clone ID: PAT_MRT4530_27976C.1.pep
MAVTVARDVEAGGLDASTSGAADEKPSWFTPKRLLVMFCLINMLNYVDRGAIASNGVNGSRQSCTGGTCTSGSGIQHNPFRLIGVGLLVWTIATAGCGCSFDFWSITICRIIVSVLNIRLYSSGKQSTSSGIQKTAWLAMFYMCIPTGIAVGYVYGGLVGNSLHWRAAFWGESILMLPFVILGFVIKPLELKGFNHSVKTKEYGEMLNPERQDETKQGASIGVDGLAETLPHKFSISSFGKKVLTEIKHFMKDMKELLQEKVYVINVLGYISYNFVIGAYSYWGPKAGQDIYNMASADIMFGGITIVCGIFGTLSGGFILDKIDSTISNAFKLLSGATFLGAIFCFGAFCFKSLYGFIPFFSVGELLVFATQAPVNYVCLHCVKPSLRPLSMAMSTVAIHIFGDVPSSPLVGLLQDKIHNWRSTALTLTSILFIAAIFWFIGIFVRSVDRFNEQSEHDVPAVERSNLRPLLDENEEARAS

SEQ ID NO: 125321 - protein, 447 aa, Oryza sativa
  Clone ID: PAT_MRT4530_27977C.1.pep
MPPQEPAPAANGAAPAPAPAAAAAAAGGKRRKRGRWAAAAGVGALLVALLAVAVSSRSFPAASSSSRGGDCGCPGTRKYTGMVEDCCCDYETVDAINEEVLHPILQELVTLPFFRYFKVKLWCDCPFWPDDGMCRLRDCSVCECPENEFPEPFKKPYSGLSPDSMICQEGKPQATVDRTLDAKVFKGWIETDNPWTYDDETDNVAEKNIISAEMTYVNLQLNPERYTGYTGDSARRIWDSVYKENCPKYPSEEMCQEKKALYKLISGLHSSISVHIAYDYLLDESANLAADYLEQAEYNTGNPEEDLKTQSLVKQLLYNPKLRSACPLPFDEAKLWQGENGPELKQEIQKQFRNISAIMDCVGCEKCRLWGKLQVLGLGTALKILFSVDGENHLNQSLQLQRNEVIALVNLLNRLSESVNFVHEKGPSIEDVIKQQSSSTVKPVFPI

SEQ ID NO: 125322 - protein, 73 aa, Oryza sativa
  Clone ID: PAT_MRT4530_27978C.1.pep
SLTKEVPLPNTTIYIENCNCLDLKVLYIFCLGSAKFSSKLHPSTYIIVLVWIKVVNTSQFNACRNHMLKNERV

SEQ ID NO: 125323 - protein, 175 aa, Oryza sativa
  Clone ID: PAT_MRT4530_27979C.1.pep
GRVGVNLQLNPERYTGYTGDSARRMWDSVYKENCPKYPSEEMCQEKKALYKLISGLHSSISVHIAYDYLLDESANLWGHNLPLLYDRVLKYPERVQNLYFTYLFVLRAVTKAADYLEQAEYNTGNPEEDLKTQSLVKQLLYNPKLRSACPLPFDEAKLWQGENGPELKQEIQKQF

SEQ ID NO: 125324 - protein, 156 aa, Oryza sativa
  Clone ID: PAT_MRT4530_2797C.1.pep
CRRARGYKEGYSTFHRNNRCFMAYDIRRFAETTAASWPMLWTFRYSTFRRKNRCFLAYDIRRFAETTAASWPMLSTLRYSMFHRNNRCFMAYDIRRFAERTVASWPMLWTLRYSTFRRNNRCFVAYDIRRFAETTAASWPMNSPSAFHSVAPASLT

SEQ ID NO: 125325 - protein, 100 aa, Oryza sativa
  unsure (1)..(100): unsure at all Xaa locations
  Clone ID: PAT_MRT4530_27980C.1.pep
RECRCAAIRRMVRSYKESMPMPLEQGWSLSLSEYYGGKGLSSKQGYYGKGSSKKGYYGEKQKKPGMTRVRLTRARQYGAKLPSMCRVEPQKXRIFAAGQY

SEQ ID NO: 125326 - protein, 690 aa, Oryza sativa
  Clone ID: PAT_MRT4530_27981C.1.pep
MRYIFSFVLHLCCGMDEAPAPLGSSASHQESEGDQCQLQADRSHASASNDSSSKASDQMANRSVQTRIDTTAPIDSVKGAANKFGGSLDLRERRKQAQDELDKVQEKVSECLKRSQEAEAGRAQAVKELGGANGVIDELTLGLEKAQAEEARARQDAEIAELRLRETQQGVSESTAAKAELAVARDRHANAVADLQSVTAELEILRMEQPVAAAKADAAAARARRMVSSSQEAVKVVEELTAELVALKKELDASHHAHDEAEEKRMRLAQVLEQDKDQWQLVLEVSEQEVKKLRNSLIAAADLEYKVEAASEQLAALRAELFAHAVEGTIGEEAAAATASFWAKLDKTKKELEDVKATVDKAKDEAKCLRVAAASLSADLEKQKAELAALRRRDGVSATSIPSLEEELSRLTAALTAAQEARAKERSVETKLGALLEEARREAAQAKANAQSAQEEVSKARQEAILAKAAVDAMEARLEAAKRETLAATTSAEMAAASAAALQQEDENARRRRETGVGEGSVTLTMEEYDELSRRARETEEIAGKRVTEAVKLIKEAKDAEVRSLEKMAQLAKQVEQRRQALEAATMEVEEAEFSKLAAERELRQWRAEHEHQRRLTGEGMASPRTGLAEISVFDGGEGRGNPHILSPRGGYMPRTEMAAAEVEAGAKQRPTFFPRMVMFLARKRAQNWK

SEQ ID NO: 125327 - protein, 101 aa, Oryza sativa
  unsure (1)..(101): unsure at all Xaa locations
  Clone ID: PAT_MRT4530_27982C.1.pep
KNELEEKMLLXLPQKKWADGLIFKSFYPHSKTNEQPVQEMLNPAPKYNKPVPEEDYLPPXKPAIAHVGRQDPKKPLEKHVPNLRGANIVQPPGTMPDPGGF

SEQ ID NO: 125328 - protein, 229 aa, Oryza sativa
  unsure (1)..(229): unsure at all Xaa locations
  Clone ID: PAT_MRT4530_27983C.1.pep
LAPVRVGHSSKVFGYISALDLQKKKKXNKNKNPSSRRAPIPCARRPPPPALRRPPPSXRALASTGRAPPTSHRSSPAARHPLPSAGRAPPSASRPPAARRPSPAELCRLGSAPPGGRTRRPPSVARRRRAPPIFLPREDGEGERTXEEVDRGSSVVFSCKYTKILKGSRSFGVEWSCGAAKIXAPHPCSINLWSSSANSALKNEGSEPFGTAPALGKLELGAGAVPNGA

SEQ ID NO: 125329 - protein, 67 aa, Oryza sativa
  unsure (1)..(67): unsure at all Xaa locations
  Clone ID: PAT_MRT4530_27984C.1.pep
MSSRRLCTRRSGGGYDPSHPSVTRGRAVSGGGRRWVPLENRLLLSFREKARVEAQXKWSGIPLLWRV

SEQ ID NO: 125330 - protein, 49 aa, Oryza sativa
  Clone ID: PAT_MRT4530_27985C.1.pep
SKKNQSVPFVRFGSSDSQEFLQLEQSSNNQKLIQRVPLLLFFVMGRRNG

SEQ ID NO: 125331 - protein, 58 aa, Oryza sativa
  Clone ID: PAT_MRT4530_27986C.1.pep
MMVRGSHPLIPAGVGLPALVKARLPFFGVIGAQKSAAPGRTHKKGPHGSLVEEFILRH

SEQ ID NO: 125332 - protein, 50 aa, Oryza sativa
  Clone ID: PAT_MRT4530_27987C.1.pep
CRTRTEVAERPVARQELLADVKGRGSGDLLSRSPVHAGERDGVVYERRRG

SEQ ID NO: 125333 - protein, 58 aa, Oryza sativa
  Clone ID: PAT_MRT4530_27988C.1.pep
KKIHLVLASIIFFLEEVIPWVHTRHASCVYIKGTRSEFPKRAPNNKCRRSHLHFPKNV

SEQ ID NO: 125334 - protein, 61 aa, Oryza sativa
  Clone ID: PAT_MRT4530_27989C.1.pep
MPPSSTVAGGNMDGQGLAGLIMVMHWPREDMELEETGALEGPEPLSALRFVLDQPRSRRGM

SEQ ID NO: 125335 - protein, 142 aa, Oryza sativa
  unsure (1)..(142): unsure at all Xaa locations
  Clone ID: PAT_MRT4530_2798C.1.pep
PEXPRVEPNAXXADXXGRTAVRRFHSXSCIITFKAXXPRFKVVNEAMDKTVCSTGVGLRRVTSFTYWYHIHFHVVRKREAPNEKCMCCTXXHSENITLTSIGIATCARKRVPFLPCFSQLDGSSRMHYRYLNEKKAQRLKHN

SEQ ID NO: 125336 - protein, 93 aa, Oryza sativa
  Clone ID: PAT_MRT4530_27990C.1.pep
MAPAHGRRLASKGGSGNHALPSARSGGRAGAVRGPPPTSTARRPPRRYLIFPFSPHPERSIHSPSPQAIPRFPFAIRTQLPSKIRFPNHCSVA

SEQ ID NO: 125337 - protein, 73 aa, Oryza sativa
  unsure (1)..(73): unsure at all Xaa locations
  Clone ID: PAT_MRT4530_27991C.1.pep
PPPRPPXPPPSPRPPPPPSLPRRPPPSPPPPPAPPSPPPPSAPRPHAQPDPIDPLTASRTYRTATQPQDTYAG

SEQ ID NO: 125338 - protein, 265 aa, Oryza sativa
  unsure (1)..(265): unsure at all Xaa locations
  Clone ID: PAT_MRT4530_27992C.1.pep
TLKMMQIVESHKAVNRMSQSALAACMXPLLLRPLLXLLQAAAAANHAQAIVIIMLEEYDQIFDDLEDGSYSSDAYTESEDGDFDKEYSTDNDGPEEDDSYDSGEDNIEEDMDDDTEHSSGGSECDNNIKTSVSDDKVKSNNSGTASNGNDQGLQPPKKAARTGHGAVREDTCQIESNDTSNRKQELYESNGSTDQIEKLNVRSSSARAKFMEKSSSSRNKSKKTLWGRTSARKDLSAEEIDYCSDDETLIEKLENSKTDLQSKIT

SEQ ID NO: 125339 - protein, 515 aa, Oryza sativa
  Clone ID: PAT_MRT4530_27993C.1.pep
MKKIKNAPPRGNEPIVTLGGIDLNNSGSVVVKEDKKLLTVLFPDGRDGRTFTLKAETTEELNEWRSALENALAQAPVVANTVGQNPIFSTDIAEPAEAPAEQSDNKSIIGRPAEFALVDADGSPAFLEKALKFIEDYGVKVEGILRQSADVEEVKRRVRDYEKGKNEFSPEEDAHVIGDCIKDLEDGSYSSDAYTESEDGDFDKEYSTDNDGPEEDDSYDSGEDNIEEDMDDDTEHSSGGSECDNNIKTSVSDDKVKSNNSGTASNGNDQGLQPPKKAARTGHGAARKDLSAEEIDYCSDDETLIEKLENSKTDLQSKITKEAKENSILQASLERRKVELHKRRLALEKEVENLRDQLQKERNLRVSLESGLMNLRRGQASFPSTIDNKTKADLEEVATAEADILNLKQKGSDLRGQLNNQAQRMLISKGEIVKDGQDPLASKWNLAQKQYSNNPLLGRLGSRTEDSGAPSALAKLTNRLNFLKERRAILASEMQNLDLARPPGPPAPAPKRNST

SEQ ID NO: 125340 - protein, 151 aa, Oryza sativa
  unsure (1)..(151): unsure at all Xaa locations
  Clone ID: PAT_MRT4530_27994C.1.pep
SKARRSRGKYRLRPRWSSRRRLITSPPPPRSSAAAASAEEATGSDGLRERKQKGXKKEEDESAGERSYTSEQLEVVRQVKKHTRDYYQILGLEKDCTVEDVRKAYRKLCLKVHADKNKAXGAEDAFKAVYKALQCLXYAESRKRYDLGXSD

SEQ ID NO: 125341 - protein, 110 aa, Oryza sativa
  Clone ID: PAT_MRT4530_27995C.1.pep
SGFPGRPTRPVSDDKVKSNNSGTASNGNDQGLQPPKKAARTGHGAVREDTCQIESNDPSNRKQELYESNGSTDQIEKLNVRSSSARAKFMEKSSSSRNKSKKTLWGRTSV

SEQ ID NO: 125342 - protein, 55 aa, Oryza sativa
  Clone ID: PAT_MRT4530_27996C.1.pep
HPNLAICPFPLQKYKPFLGPQNFSEEHTTNSTRAIQNFYKLIFLLPPYAQIFRNR

SEQ ID NO: 125343 - protein, 380 aa, Oryza sativa
  Clone ID: PAT_MRT4530_27997C.1.pep
MEGNKDDAVKCLRIGKAAADAGDSARAVKFLSKAKRLDPSLPIDHLLDPLLNQDDPPSSSASSSSPQAPPPPPPRSSAAAASAEEATGSDGLRERKQKGKKKEEDESAGERSYTSEQLEVVRQVKKHTRDYYQILGLEKDCTVEDVRKAYRKLSLKVHPDKNKAPGAEDAFKAVSKAFQCLSDAESRKRYDLVGSDEPVTYNRRAASTARAYNGFYEDEFDPDEIFRNFFFGGMAPATTRQFGQFGTFHFRTGGMHHGHGAQNSGGSTLRMLIQLLPVLLLLLLNFLPSSEPVYSLSRSYPYEHKFQTTRGVTYYVKLPNFEEQYPHQSTERATLERHVERDYFSILSQNCRVEVQRRHWGLSYETPHCDMLRKFEATAQ

SEQ ID NO: 125344 - protein, 142 aa, Oryza sativa
  Clone ID: PAT_MRT4530_27998C.1.pep
MKKIKNAPPRGNEPIVTLGGIDLNNSGSVVVKEDKKLLTVLFPDGRDGRTFTLKANPIVSIAADNKSIIGRPAEFALVDADGSPAFLEKALKFIEDYGVKVEGILRQSADVEEVKRRVRDYEKGKNEFSPEEDAHVIGDCIK

SEQ ID NO: 125345 - protein, 919 aa, Oryza sativa
  Clone ID: PAT_MRT4530_27999C.1.pep
MSASEFRIPYQQVSSSQTAENAGQYKICRCGEGDPNTSETGDSSPTSCPNCQVLKSGHLLLSSKGIGWTTWKKRWFILTRASLVFFRSDPNTYSFAYYLDMKSDNANTKAIGCQCSHVEEDKHDYNNFNAPVRGNEPVVTLGGIDLNNTGSVVVKEDRKLLTVLFPDSRDGRTFTLKAETTEELNEWKSALENALAQAPAVANAVGQNPIFSTDIAEPAEAPAEQPDDKSVIGRPAEFALVDADGSPSFLEKALKFIEDYGVKVEGILRQSADVEEVKRRVQDYEKGKNEFSPEEDAHVIGDCIKNYKRIKMFDCTGTDKTKRLDAMSKVIYEVFPEPNQQLLQRILKMMQIVGSHKAVNRMSPSALAACMAPLLLRPLLLGECEIDSDFSMAGDGSFQLLQAAAAANHAQAIVIIMLEEYDEIFDDLEDGSCSSDAYTDSEDGDVDKEYSTDNDVDGSYDSGEDNIEEDMEDDTEYSSGGSECDDKVKRNNSGKASNGNDKGFQPPKKAARTEHGVLREDTNQISSVPPVENTSQMESNDPSHRKKLHESNGSTDQIEKSNVRASSSRAKFMEKSSSRNKSKKTLLGRASARRDLSADETDFCSDDETLIEKLENNKTDLQSKITKEVKENSILQASLGRRKEELHERRLALEKEVENLRDQLQKERNLRASLESGLMNLRRGQVSFPSTIDSKTKADLEEVATAEADILNLKQKVSDLRGQLNNNVQMSSTSLCDSCNKRLLSTDKLFEDEQNTSPSNVGPNSMSDMASATDMADIEQSRKQTTQHSSSSIDKPTLHKHQKSIASNEQSSTISQRAQRILSSKGGIMKDGQDGSFTSKWNLAQKQYSNNPLLGRLGSNAYSSTRTEESGAVPFALAKLTNRLNFLKERRAILASEMQNLNLARPPGPTAPAPKKDST

SEQ ID NO: 125346 - protein, 220 aa, Oryza sativa
  unsure (1)..(220): unsure at all Xaa locations
  Clone ID: PAT_MRT4530_2799C.1.pep
PXTGHFQMGWFATVSDWIDSLGCGFSSRQHSTGVPYRSAAQGMHRRAIVXGTQGKGGTAQRKQPPASQGAVQQDSSHRTAQGGRGGTARGGQWEQWERAGSNRCNTVQQCTAHQVRQVHRQQDVHGQDSTAKVAACSEQAQHHWARHQWCQEVCKEQQPQSGQGQLAEVHWPAAAAEAGKPARWTLAGGVLEAGGGVGEAQLGGASSRGSQAYVRVHATS

SEQ ID NO: 125347 - protein, 78 aa, Oryza sativa
  Clone ID: PAT_MRT4530_279C.1.pep
FILKLSISFFPFGHHKSGHAIISCLAHWNRFPYFSSAPLKLSHEMNFLKCNHHSFKRLPWFLNYTWSSNSLACSKDHR

SEQ ID NO: 125348 - protein, 124 aa, Oryza sativa
  Clone ID: PAT_MRT4530_27C.1.pep
TTSNDQTKFQFPYPLIPFNLFLDHQQHLGAVHRTTQPSHNFHGDIFHSPLGTGDTNNAIPQFLTSHNTHTQGSHSAIPPHWFFQHGHHLRHAVGSAPGNSGTGHRARAYPAFPIVEVDIRQLWG

SEQ ID NO: 125349 - protein, 115 aa, Oryza sativa
  Clone ID: PAT_MRT4530_28000C.1.pep
SETQSWDGFASSLLPDGNGFKTSTVRLGADVIVFSCTQDNRRLTRSIGLLSYTFLTKTGCNDILVPVADYEFDASSHTLKKIMDRGEKHFSSNLSTLLKWIPACYETELPKESNL

SEQ ID NO: 125350 - protein, 432 aa, Oryza sativa
  Clone ID: PAT_MRT4530_28001C.1.pep
WANWEFHVGFDMRAGTVISLASVHDADADAGGARRRRQVLYRGFVSEIFVPYMDPVEEWYYRTFLDAGEYGLGLWAFPLQPGGDCPANAAYLDGHYSGQDGRPVEARNMICVFERYSGDVAWRHTEAGFPNQLITEVRPDVSLVARMVVSAGNYDYILDWEFKTSGSIKLVVSLTGLLEVKATAYAHADEVAQDAHGTLVAENTIAVYHDHYVTYHLDLDVDGTNNSFVKNIVTAVVRDADADAAADTPRRSYWTVRREVAEREADGQVDLGGGAPADLVFVNPGKKTRMGNEVGYRVVPGGAMAASVLADDDFPQRRAAYCKKQVRVTPYSRSEKWASGLYADQSTGGDGLAAWSERDRAIRGEDIVLWYTVGLHHVPYQEDFPVMPTLSGGLELRPSNFFERNPLLTTMPIGHGRPLVNCSCAGGDSISR

SEQ ID NO: 125351 - protein, 71 aa, Oryza sativa
  unsure (1)..(71): unsure at all Xaa locations
  Clone ID: PAT_MRT4530_28002C.1.pep
NSVLGLKTKRIRFGXNTQRISLFLEGKERGDREEQNPSINRKNPGRIWAETAAQNGGSAACAAAAGGRGWT

SEQ ID NO: 125352 - protein, 130 aa, Oryza sativa
  Clone ID: PAT_MRT4530_28003C.1.pep
MGGDDGGDAVSPGDGAVTVAGGEAVLPGGSTGVPGGGVEVLSGGGARVPSGDTAALAGGEAALPGGGAGVPRRRRAAPRRRCGGSKRRCSGPQRRRGAPRRRCSGPQLRCGAPRWRHGSSRQRRIGPRLK

SEQ ID NO: 125353 - protein, 180 aa, Oryza sativa
  Clone ID: PAT_MRT4530_28004C.1.pep
MELVRDTVSGDSEILGMGQPAIGIDLEFTFLGEKAALSAPRLLFRGGSEPGTTLKRGELVDTTPYPDVSPCTLALNHSHWPPAPRPHLPRRRRWLAVDHRDGKERERDRESGDDPAMSGGIWHPRAATGGNEREGERRAAVDAGDGRGERWRRREGEATLWHGIVGGLAGRDRINQGNCL

SEQ ID NO: 125354 - protein, 56 aa, Oryza sativa
  Clone ID: PAT_MRT4530_28005C.1.pep
FGGTTGGRNYNKNIILRLSKPNLLYDGMLFTLDNRQACFFSLVRQYAVLCIVTGKI

SEQ ID NO: 125355 - protein, 40 aa, Oryza sativa
  Clone ID: PAT_MRT4530_28006C.1.pep
WSTHRVIEKAKPKVCISKVLEKIHVMKYMMNQVCSQGKIN

SEQ ID NO: 125356 - protein, 145 aa, Oryza sativa
  unsure (1)..(145): unsure at all Xaa locations
  Clone ID: PAT_MRT4530_28007C.1.pep
SPLLSQACWRGSGTRWCRWEREQRTPFAVTSLLTLVGAAGSSGAVRGSGERGRGERRIQPRRRSSLLHRHQARQRPPAGERSFPFPFFHPNGTITCPFVPXHAAAPLRPPPLLACRTSVATAPSPSHSGRHHSSPPLHRRHHSIP

SEQ ID NO: 125357 - protein, 239 aa, Oryza sativa
  Clone ID: PAT_MRT4530_28008C.1.pep
MADESNISVEDNPAEEINTTRESWESEFEDFHIPEMTVAEGTLYVTITSKLLVSEVMKKLRGSDPIYEVRRIGRGHVASAVVHISKSTSSLELDTIRVDGDMDTEISNAEEKVAASLLAHLKKERKVVVVDDNYMECAYYRKDCRKLRRFISKVVEKRDSAMHACSAFKRGWQITLDYMTSTEDTCNQICNSYFGLNNGNNVSGTAASILLDVFHLGEWIGETAFAGTADLQDTTERML

SEQ ID NO: 125358 - protein, 519 aa, Oryza sativa
  Clone ID: PAT_MRT4530_28009C.1.pep
MEDKLLLLLALAVSVLVAVVISKLVSYATKPRLNLPPGPWTLPVIGSIHHLVGSHPIHRSMRALAEKHGRDLMQVWLGELPAVVVSSPEAARDVLRSQDLAFADRYVSTTIAAIYLGGRDLAFAPYGERWRQLRKLCTQRLLTAARVRSFRCVREEEVARLVRDLAASAAAGEAVDLTARVAELVNDVVVRCCIGGRRSRYRDEFLDALRTALDQTTWLTVADVFPSSKLARMLGTAPRKALASRKKMERILEQIIQERKQIKERSTGAGAGADDEAAAAGNECFLDVLLRLQKEGDTPIPITNETMMLLLHNMFSAGSETSSTTLNWTMAELIKSPRVMAKVHDEVRQAFQGKNTITDDDVAKLSYLKMVTKESLRMHCPVPLLGPRRCRETCKVMGYDVPKGTIVFVNAWAICRDSKYWKSAEEFKPERFENISIDYNGNNFEFLPFGSGRRICPGITLGMANVEFPLASLLYHFDWKLPNQMEPEEIDMREAPGLVGPKRTSLYLHPVTRVAPSSV

SEQ ID NO: 125359 - protein, 538 aa, Oryza sativa
  Clone ID: PAT_MRT4530_2800C.1.pep
MSWQRVGALLLGGSVLPACPGCPGRRGIGSVLLFMARMGWELCHVFRPYTVVMDNTGNKGYGNDGSDDSRTQANGNEKSINETSPELIQIVVNQTNMLATAFQLLQNRNNPAGATNVQVPTVQQQCKLSEFLKTGPPTFAMAVDPMEASDWLRTIEKKLGLIQCTDQERVGFATHQLVGPASEWWDSYEASRPEGHTITWNEFSSVFKRSHVPAGMITLRKREFRYLKQGDLTVTEYLHEFYRLAHYAPEDVETDEDKQEKFLQGLKDELAVQLLLEDYEDFEKLVDKAMQLESEHNRMTNCKRRIVNIPVFPGGNQRQRTEPLQITGSSVAHQEFPPQEDGRNTDNNTSNTNDDDTTNNHGSCPISDHSNKACNVSSIHQDVNDSINVGTQNDNLSNFDTEKDSNGDSNYGTTDANVSKDSQPPIPTPSQNDRPQMDSSVKKTLICYNCKEPGHYSRDCLQPRQSRPPHYRQFTRSRHPNRIVVTGANAVPVDAKDMNYEKSGTEVPSSSATIQSKSARGATREKSGEEKIPSATGD

SEQ ID NO: 125360 - protein, 209 aa, Oryza sativa
  Clone ID: PAT_MRT4530_28010C.1.pep
MDIAARLSAIPQEIADIENTKLELEQMLGVLGEPLFLAFVDPAVIIQDDIVLVQNQIRILENRKKALLEEQQSLIVMAAHHGSKEEEVFLAGVNPENRAQLLDYMELDISLLGDVMLRAKSIYWTRYNVDIGKTFHRLQSICDLYNRYRKQVNRWSRHLGCGDLSRLSEYLMGIVIFVPVAVLAWFPFVSEFQTRLLFNQAFSRGLQSC

SEQ ID NO: 125361 - protein, 76 aa, Oryza sativa
  unsure (1)..(76): unsure at all Xaa locations
  Clone ID: PAT_MRT4530_28011C.1.pep
QSATLACHALLDCDAXPLTELGRNLHKERLAVYRWHASFICSGNTMPIVLVDWCFGEIMRGSLRVVLVLARRQPCH

SEQ ID NO: 125362 - protein, 61 aa, Oryza sativa
  Clone ID: PAT_MRT4530_28012C.1.pep
NLNAPQKCCKLPFHATLLGMAPCKKEEKGIDSNRMKSKYPFVENHQVILALVYKIWHLTIS

SEQ ID NO: 125363 - protein, 436 aa, Oryza sativa
  Clone ID: PAT_MRT4530_28013C.1.pep
MDDPAVQPAIGGRTSSHPVLRSTLTPESDGIVEISMLEPCSADAIALPLSSIPTIEPMEDASMGSAEPMEDASIGSATTIAPTENLYKLRVHWAAVFRDSFTADMTSTQRSEGMNNVFKKRFRRKLSLSKLLEECDKCAMSLRDNELDADYKSRHSTPVTYIRDLPMLKTAAELYTRRLYSEFEEHFKEQFSFSCKFLKSEGSIMTYKVYCASMLSESLISMRFSSFRIFNINEVFILPTQYVLNRWTKYAKRGFYFEKKQISDNETLRTHAARISRKATSVAQYQKELLDDMEKAIDKLDLEADNSLSKIHTKTYEVSESSNGCVGDILKGKVSIRVPQVIKGPKNKRSKTVLLKKKGKKGNAAKKKGEDPKKSTDNGEMIQDPDELIGSFDANIDDNMHEDFSTMVAPPIHGEYTSLLFGLDQDAMAARKLHFD

SEQ ID NO: 125364 - protein, 60 aa, Oryza sativa
  Clone ID: PAT_MRT4530_28014C.1.pep
NPAIGDRVHLFITLIHLILQITTILYLINHHPNFSNSSINQQKDDLYSFHTLPTRFLSQN

SEQ ID NO: 125365 - protein, 81 aa, Oryza sativa
  Clone ID: PAT_MRT4530_28015C.1.pep
TVAPVKLAGPQANKGLQGIKLIRWSSERVVIHALYKPCQLSCRAFVLCERTATGRAHFRQGRTAEYCDSRPASSVRLSRME

SEQ ID NO: 125366 - protein, 67 aa, Oryza sativa
  Clone ID: PAT_MRT4530_28016C.1.pep
LRIVLQNLNRYLRNHIISSQLRVKLVSGALNCTKLRVKLGSGTLNCTKRNLVVILNYVPSCLSTLKD

SEQ ID NO: 125367 - protein, 345 aa, Oryza sativa
  Clone ID: PAT_MRT4530_28017C.1.pep
MAGGDLRSLVAVCAAVTAAMWCARFAARRLRPGLPRLAAFVPVLAVLPFLPLAFRALHPRAISGFFLAWLAEFKLLLLASGQGPLDPSLPLPAFVAIATFPVRQRDPTKNAAGSGLGPVTSAVMAALLAAIVSLYRYKERMNPYALLVLYSLHVYLALELVLACAAAAVRAVMGMDLEPQFDRPYLSAHLRDFWGRRWNLSVPAVLRPCVSHPVRARVGEGAAGFAAGVLAAFFVSGVMHELMFYYITLRPPTGEATAFFTLHGALAVAEGWWAAREGWPRPPRPVATALTLALVMSTGFWLFFPPITRAGADKVVIAESEAVVAFVRDTGIWAAASVHSALSLL

SEQ ID NO: 125368 - protein, 463 aa, Oryza sativa
  Clone ID: PAT_MRT4530_28018C.1.pep
MARFQETKARNDQGPVADHVGHQNLMENLTDPLDSSGMDMMDEARIPKARKPYTITKQREKWTEDEHKLFLEALQLHGRAWRRIQEHIGTKTAVQIRSHAQKFFSKVIKESSGDNCNSLGAASSIQIPPPRPKRKPVHPYPRNLGSTASKNVPALKQLEKPQLQVQSLYDQDNGSPTSVLTVPQIRADTLGSESGGSPTSTIDIEERCPTPSIATAELAMELPPTNDEEVKGNGDHEEVTCDRSGVPVLRLFGKRVMVNDLHQMSAPDAGNLQTVADMEVDASAETPTSGTGKFSSHGAAEANTWNPWLTNTQQFLYYLPNGQIFSVHSALPCFTYHNEGVTCTQFSNPQVVASDQQHQHQTSEAVDYKGIQREGSWTESNTSSSSVPETATHNSETTESYRNGNRNEDEMVPSPDSRKCVSPGSNCRRGFVPYKRCVADSEALLKSQAPQEEADGEMTRLCL

SEQ ID NO: 125369 - protein, 112 aa, Oryza sativa
  Clone ID: PAT_MRT4530_28019C.1.pep
MGKRGEGRWPHGVGGVARRRARRGDVTTTRRGRAQGARRSNSAAAATARGSRARRGSGGTGLGGAARHGARGDDGDGSAVAAVRGARRWNGGAATRRKRRRRQHGVRGGQAR

SEQ ID NO: 125370 - protein, 631 aa, Oryza sativa
  Clone ID: PAT_MRT4530_2801C.1.pep
MARCLEQAARLDTNRRAPHVSGSRGRHTVDRVHRGLGCAVDQDHGRSTGGTPNRQGRGEAGWLASQTAADDGGATRHRTREAAEGEKGRRREHSPCAKVARATGGGGGPTAYRGREVEDGDLGSAVEGPSLEIAELRRRGPRPKEARNVDARPPELEGDDGARVARALQRFYVQVGLPLDVEVIIPLHPLRGQSWQVEVNQDEEVDGLPKLVMPKGAKVLTLVQAETEARKMVGDVSITEYSQLLTRKAAGRANRVHDGDLPSREKPSKADGDEGTSKKRKREQAKSAPQKRKAPASTDSDADDEDTVDDQYDEEEGEDEEEAKVAVEPAANEPADNRTETHGYTPTPSPDHVVTGVESNSSPLRRKDLHRAKALVSIAAGKVVKGGPVKKTSKKKGFVDVACVFSDDESSDETSTSAAGWSQDLSTAPDAATDTGEAGGSAAAGTSGSADRVVKAAARLFGSPPHSPPTSPLAIQNGKKAAVETSASEYSLTAPCFVPWDFETRVDLTPFIEGVSHLVSPAGSPSLFTELNEFNEGCTAVKSLAVWIPAAHCSTERTVRARLDSFKSRLRAKDEELGRKGLEMENLANTLKETKTENKQLQVELEKGSERRPRSSASRLSLKKNEISPPP

SEQ ID NO: 125371 - protein, 47 aa, Oryza sativa
  Clone ID: PAT_MRT4530_28020C.1.pep
LITKNIAQPAHNRGHDYSNSFTLARDVPLDHNHPLNNQRHGLRSDPH

SEQ ID NO: 125372 - protein, 433 aa, Oryza sativa
  Clone ID: PAT_MRT4530_28021C.1.pep
MFDLHQELTTDHEPPVVELTTDAEYAQEQPRLVRFFGTTIVLSLGLLHAACSLHWAHRPLPRGVGTAAFGATAVLCLAVGAVSLLLSWSAAARMTATKALPTRRVERRLLNRLCAAVHASSALLMLAPVGLLVLVADKAYAFAVVVPLGPVGASLFPVVRNGARFGFAWGAAQYEAHEHDLRRYFGLAAGVTVPTYVALLSHAVSDHFRPAGSAQRRHHDLGGVDAVECLLLYASTAGLALMLLATSPPALCFRHTRAVVVNHFLGVLADALLALVGLAALVATAEIAGGLAALAPTTNVIAACAIFAKEHEDEPDRRGQDDTKDHLCSSSSSRQPVAPLVVNSLAFGTVMLSYSALDGGRAFSWPEKACLVAVASLLVGNLSQMALQRRAVRTDSVVTTALSLFDKVNKVTLLIAALGCMAVLATHKITASH

SEQ ID NO: 125373 - protein, 66 aa, Oryza sativa
  Clone ID: PAT_MRT4530_28022C.1.pep
FEENKIRGGAIFMYLFAASCAFFFLLRVRGFFLLVRGSFKELARVSLALDIASAVGPLVIKDFFFF

SEQ ID NO: 125374 - protein, 48 aa, Oryza sativa
  Clone ID: PAT_MRT4530_28023C.1.pep
VGETPTLPYRTGMAEPSATRAFLLERAINTTLGSGLSFQRRRYYTQRM

SEQ ID NO: 125375 - protein, 130 aa, Oryza sativa
  unsure (1)..(130): unsure at all Xaa locations
  Clone ID: PAT_MRT4530_28024C.1.pep
MVIIEPAPIGTSKXLRFGRAAVAIGNPVMGYEHTXLTTGVISGXGREIPSPNGSPISXAIQTDAAINSGNSGGPPRCDSYGHVIGVNTATFTRKGTGISSGVNFAIPIDTVVQSVPNLIXVYGTSVTNRF

SEQ ID NO: 125376 - protein, 1037 aa, Oryza sativa
  Clone ID: PAT_MRT4530_28025C.1.pep
MSNKQIFQVYHGPGNVRYGPTGVDLSDFIVSKRGIDRPDERSVSSIKGWLMRGLRVDPQTSDITINVIVSRATEGFYWELMPVQNSRVWRWYVENALQRGWPLGMVPFVHPKDPGVQMNMDDGEGPSAEVNETSVEEVNAREDRGVVAPVGIQPGGVADEGETVGAIVDEMEREDSDNERVEEGDSSDDETDINPAEWASEDFSGLVVSEEDSVIWEYKENEVIQGAIYSRAEDMKEAVKHFVVSLHREFWVAKSNRSQYEVRCVKEKDGCPWRVHAYKGKWKDYWTVSVVTKHTCFLPGVQKYHRNITCAFVASEMYAHVIDNLTYEPRSIIRHIEETYKYTISYAKAWRAKQKIIEMRFGTYEASYDNLPRLLGVIEERNPGSSYAVKKFPSIEHPGKSVLQRAFLALHACKMAFVNSRPVLCIDETFLTGKYRGQILTAIGVDGNNQVLPMAFAFVESENTDSWYRFLKLVKTKVVGMRPNVCLIHDRNAGILRAIEELQFGSMERGYPGEWEDVQSKWCMRHMGANFFKQFKNKELMNMFKRLCIQNQEKKFNELWKRLDELTAKCSDQRAAAPSTAVADPPQALGPLPTDSPTLVRRTGVEIRKFSQWILHEPKKKWAKAYDTGGARYGIMTTNLAEVYNWVMRGVRGLPLVGIVEFILHGTCRYFRNRFQAVLPSMPNNSILFGTFMQKKLEELRKKAMKHQALVQDKAGRGIYRKRVKQECVLKADDTCHCSCAKPKLLHRPCTHVIAAAAECGIPDAVYVSQYFSKQAIYHTWSDEIYGFGIAGEFTETNDEVLNIRDPSKLRGKAGRRKTRRIRNDMDELEAGRVKRCSKCDERGHTYKHCPKDKEKPNDIARADAAVQRPPVPTGPCPVAHVPRPTPPPHGGFTQFAMTQAAHFSQAAGSASQAAASTSHSVQFWQYIGTSSQAAGTSSQGPPLDHAGTSSDHLVPSTLLFDITDFDFASGSTEDVIGPSQLGGAPPVQTQDQAQATPPPDTRATRAVLPDRFTYSQDHVRAQARRTKHGRGTGQGQ

SEQ ID NO: 125377 - protein, 369 aa, Oryza sativa
  Clone ID: PAT_MRT4530_28026C.1.pep
MSPAVGRGNPPSRSASSSTIVAETATGYHLLKINGYSLTKATTPTGSFLPSSPFTVGGHRWNIKYYPNGDDVKTADYISFFLVLEEEETNMGLTVQAKFKFSFANQVKKQPSLKYRPIKTFNLEDSCGWGYVEFIKRVDLEKSDDLRDDSFTIRCDIVVVREIRTEETTEILPVESFVPVPPSDMDQQFGDLLETEKGADVVFEVGGQTFAAHRCVLAARSPVFRAALYGSMKEGDTDGVVHIEDMEAQVFKLLLRFVYTDSLPEMETEEDVVCQHLLVTADRYDLHRLKLMCENRLCKYIGVSTVSNILALADQHHCDGLKKACFSFLGSPANLSAVVASDGFKHLSRSCPSLMEELVVMLALPPSHA

SEQ ID NO: 125378 - protein, 840 aa, Oryza sativa
  Clone ID: PAT_MRT4530_28027C.1.pep
MSNKHTFQVYHGPGNVRYGPTRVDLSEFIVTPRGIDRPAERSVPSIKGWLMRGLRVDPQTNDITIYIVVSRATESFYWELMPVRNSRMWRWYVENALQRGWPLAMVPFVHLKDPSAQMNMDDSEGPSAEVKETSVEEVNAPEEGGVVAPVGIQPSGVADEEETISGIVDEMEREDSDNERVEEDDSSDDEDPDINPAEWASEDFSGLVISEEDSVRWEHKENEVIQGAIYTRAEDMKEAVKHFAVSLHREFCIAKSNRSQYEVRCVKEKDECPWRVHAYKGKWKDYWTVSVITKHTCFLPGVQKYHKNITCAFVASEMYVHVIDNLTYEPKSIIRHIKETFKYTISYAKVWRAKQKIIEMRFRTYETSYGNLPRLLGVIQQRNPGSSYTVKKFPSIEHPGKSVLQRTFLALHACKMAFVYYPPVLCIDGTFLTGKYQGQILTAIGVDGNNQLLPLAFAFVESENTDSWHAGMLRAIEELQFGSMDRGYPGEWEDVQSRGYAIRTKRKKFNELWKRLDELAAKCSDQRAAGPAPAVPDPPQTLGPLPTDSPTLVRRTGVEIRKFSQWILHEPKEKWAKAYDTGGARYGIMATNLAEVYNWVMRGVRGLPLVGIVEFILHGTCRYFRDRFQAVLPYMPNNNILFGTFMQKKLEEWRKKAMKHRALVQGTQQHRFEILCQDKAGTGIYRKRVKQECVLKADGTCHCSCAKPKLLHRPCTHVIAAASECGIPDGVYVSQYSTSACFAQFTTTQATHFSQATGSASQAVASTSHSAQFWQYTGTSSQAADTSSRGPPLDHAGTSSKYRVASALLFDMCDFDFQVTTEDVIGPSQLGGAPPVQTQD

SEQ ID NO: 125379 - protein, 384 aa, Oryza sativa
  Clone ID: PAT_MRT4530_28028C.1.pep
MERVEAAGGRVINWNGYRILGVLATSRSIGDYYLKPYVIAEPEVTVMDRTDKDEFLILASDGLWDVVSNDVACKIARNCLSGRAASKYPESVSGSTAADAAALLVELAISRGSKDNISVVVVELRRLRSRTTASKENGLHSRAIESTYRVHRAIVPGGWLSRPAGRQAWEKRDTGAGVQTNMDDGEVPSAEVNETSVEEVNAREDGGVVAPVGIQPGGVADEGETVGAIVDEMEREDSDNERVEEGDSSDDETDINPAEWASEDFSGLIVSEEDSVRWEYKESEVIQGAIYSRAEDMKEASRWCMRHMGANFFKQFKNKELMNMFKRLCNQNQEKKFNELWKSFARHLAHTTNGTPKLVRPPTSSSRGLPSPFIVVFLRAGHPR

SEQ ID NO: 125380 - protein, 66 aa, Oryza sativa
  Clone ID: PAT_MRT4530_28029C.1.pep
MRHMGANFFKQFKNKELMNMFKRRKRVKQECVLKADGTCHCSCAKPKLLHRPCTHVIAAAAECGIP

SEQ ID NO: 125381 - protein, 190 aa, Oryza sativa
  unsure (1)..(190): unsure at all Xaa locations
  Clone ID: PAT_MRT4530_2802C.1.pep
GGRVSDSEDSDQVSSDDEDEMERKACSRCGEIGHVASSCATICVHCEEDHPPDRCPTSRITCFFCEGTDHVPKDLPGQRNQNEKRKCRVREDICCFNCQGMXRIVIHASRSSPIARVATAPTPASALPQPQPSPQQGIVVDGKSCVSPRPTPGQAKGNQPPEGDTKQKTVIRFKQQSEGSFSCGPARRPR

SEQ ID NO: 125382 - protein, 132 aa, Oryza sativa
  Clone ID: PAT_MRT4530_28030C.1.pep
MSTAAKEEAAASAPAPAMGGEEAAARAAQKRYEGLLTVRAKAVKGKGAWYWAHLEPVLIPAADTGMPPKAVKLRCGLCSAVFSASNPSRTASEHLKRGTCPNFSAPPPGADAASGSSGSQHQQQTPQAALQA

SEQ ID NO: 125383 - protein, 1033 aa, Oryza sativa
  unsure (1)..(1033): unsure at all Xaa locations
  Clone ID: PAT_MRT4530_28031C.1.pep
MTAASAVGGSGISGVGSTQIRQCGGEGLHHIARDCKRPRSPGSSSDSQGDHRRVLPRHASPSDATPSASRASTPEGSPVAALAPSPPRLGAPARMVLAAPTVPVVPVAAAEAAPTVVQVAAAAAALPLSPWWVVERSEQIDDEEGQLRRINNLSTKKIAEIAPAAHLWGGKLTWQTGEERATNMDDGEGPSAEVNETSVEEVNAREDGGVVAPVGIQPGGVADEGETVGAIVDEMEREDSDNERVEEGDSSDDETDINPAEWASEDFSGLIVSEEDSVRWEYKENEVIQGAIYSRAEDMKEAKYHRNITCAFVASEXFGSMERGYPGVWEDVQSRXAPSTAVADPPQALGPLPTDSPTLVRRTGLEIRKFSQWILHEPKEKWAKASDTGGARYGIMTTNLAEVYNWVMRGVRGLPLVGIVEFILHGTCRYFRDRFQAVLPSMPNNSILFGAFMQKKLEELRKKAMKHRALVQGTQQHRFEILCQDKAGRGIYRKRVKQECVLKDNGTCHCSCAKPKLLHRPCTHVIAAAAECGIPDTIYVSQYFSKQAIYHTWSGEIYGFGIAGKFTETNDEVLNIPDPSKLRGKAGRRRTRRIRNDMDESEAGXGLSGSAADGARPTXKALPPLDHGAQLGTFRARTCGELLTVHDSFVERLREAGLLPMCRLVEAAAGDADPARRWTVDRSLVAALVDRWRPETHTFHLPCGEVEQLQADADEYSYSRCLEAYLLWLFGWVMFCGGHGHAVDKGLVHYARSIADAAVGEVPQWSWGSALLAALYRALCESCTKTDPSATFGGCPLFLSIWAAERIAIGHPEVDQHAYEESLYEERPEVDYPTMGTLWCRRQRRWAHVQVRRSYPEFVMEFDRLLTTDVVWEPYSAAATQARAPLGFRAPFSTPPSSARPSVVPPTGFAQFAMTQAAHFSQAAWSASQAAGTSSQGPPLDHAGTSSDPFLSSTVLFDITDFDFASGSTEDVIGPSQLGGAPPVQTQDQAQATPLRDTRATRAVPPDRFTYSQDHVRAQARRTKRGRGAGQGQ

SEQ ID NO: 125384 - protein, 167 aa, Oryza sativa
  Clone ID: PAT_MRT4530_28032C.1.pep
HASGFAGFMRKARHNFRLDEVGIRRQLNMVARIIKYKDFHLYRHLEMLQAEDCFFVYRMVVVMFRRELTFEQTLCLWEVMWADQAANRAGIAKSSLGKLRLGAPPTDDLLLYAIAASVLQKRKLIIESYSSMDEIIRECNSMAGQLDIWKLLDDAHDLVTTLHGRIE

SEQ ID NO: 125385 - protein, 612 aa, Oryza sativa
  Clone ID: PAT_MRT4530_28033C.1.pep
MSNKQIFQVYHGPRNVCYGPTGVDLSDFIVSERGIDRPAERSVPSIKGWLMRGLRVDPQTSDITINVIVSRATEGFYWELMPVQNSRVWRWYLENALQRGWPLALVPFVHPKDPGVQMNMDDGEGPSAEVNETSVEEVNAREDGGVVAPVGIQPGGVADEGETVGAIVDEMEREDSDNERVKEGDSSDDETDINPAEWAMSLHKEFRVAKSNRSQYEVRCVKEKDGCPWRVHAYKGKWKDYWTVSVVTKHTCFLPGVQKYHRNITCAFVASEMYAHVIDNLTYEPRLREAGLLPMCRLVEAAAGDADPARRWTVDRSLVAALVDRWRPETHTFHLPCGEVAPTLQDVSYLLGLPLAGDAVGPVTTAVDWQDDLTARFALVQRAPHLPLEPLAHHRNTGPTKRWLLQFTVEQLQAEADEYSYSRCLEAYLLWLFGWVMFCGGHGHAVDKGLVHYARSIADAATTLLGQTQLYSGHPYRLVPVQLRKFLGRLLLRTEGFVHRSAPCLPRLGLLLCPPQAAHFSQAAGSASQAAGTSSQGPPLDHAGTSSDPFLSSTVLFDITDFDFASDSTEDVIGPSQLGGAPPVQTQVQAQATPPRDTRATRAVPPDRFTYS

SEQ ID NO: 125386 - protein, 883 aa, Oryza sativa
  unsure (1)..(883): unsure at all Xaa locations
  Clone ID: PAT_MRT4530_28034C.1.pep
MRFGTYEASYDNLPRLLGVIEGRNPGSSYAVKKFPSIEHPGKSVLQRVFLALHACKMAFVNCRPVLCIDGTFLTGKYRGQILTAIGVDGNNQVLLLAFAFVESENTDSWYWFLKLVKTKVISMRPNVCLIHDRHAGILRAIEELQFGSMERGYPGEWEDVQSRWCMRHMGANFFKQFKNKELMNMFKRLCNQNQEKKFNEFWKRLDELTAKCSDQRAAAPSTAVADPPQALGPLPMDSPTLVRRTGVEIRKFSQWILHEPKEKWAKAYDTSGARYGIMTTNLAEVYNWVMRGVHGLPLVGIVEFILHGTCRYFRDRFQAVLPSMLNNSILFGTFMQKKLEELRIKAMKHRALVQGTQQHRFEILCQDKAGRGIYRKRVKQECVLKADGTCHCSCAKPKLLHRPCTHVIAVATKCGIPDAVYVSQYFSKQAVYHTWSGKIYGFGIAGEFTETNDEGAQLGTFQARTCGDLLTVHDSFVERLREAGLLPMCRLVEDDAGNADPARRWNVDRSLLADLVDRWRPETHTFHLPCGEVEQLQAEADEYSYSRCLEAYLLCLFGWVIFCGAERIAIGRPEVDQHAYEESLCAERPEVDYPTMGTLWCRRQVKRSYPEFVMEFDRLQPTDVVWEPYSATATQARVPLGMSTLCTRDQAYWMTTVPMVFDICVEPHAPFRVMRQFGFRQPFPVPFPTTVPAAVHRYSRKGQQSAGNWPAKLVTFVEDWLLATEEVVDHEGEPHTEEAYQGYLRWYQPRTRTRVTFAPLEQQAHVASTRELYARHRDQDFARAVDDINRVVVDGSMTIQRLGAGIPXDIARADTAVQRLPVPTGPRPAAHVPRPSPPPHGGFRAPFSTPPSSARPSVVPPTGSSFHKAYNIGSKVLCLSKYS

SEQ ID NO: 125387 - protein, 87 aa, Oryza sativa
  Clone ID: PAT_MRT4530_28035C.1.pep
RPGDHIPVGHFVEHLPGVAREPAPEREVGKGGGQDGEDQQTELEKHRVEWHNVCRQAHWVRVSQGAVEYVGVHGSITGVLRGRTRPL

SEQ ID NO: 125388 - protein, 669 aa, Oryza sativa
  Clone ID: PAT_MRT4530_28036C.1.pep
MELGRPGCPVDRLPDSPRHERGAARCLLGTGANPKGFNTQNSLEIWAKFLGVTILHEPKEKWAKAYDTGGASYGIMTTNLAEVYNWVMHGVRGLPLVGIVEFILHGTCRYFRDRFQAILPSMPNNSILFGTFMQKKLEELRKKAMKHRALVQGTQQQRFEILCQDKAGRGIYRKRVKQECVLKANGTCHCSCAKPKLLHRPCTHVIAAAAECGIPDAVYVSQYFSKQAIYHTWSSEIYGFGIAGEFTETNDEVLNIPDPSKLRGKARRRRTRRIRNDMDESDAGRVKHCSKCDERGHTYKHCPKDKEKPNAAEAGLSGSAVDGARPTDGTSGYTSVVGPGDRSPTPVSPYCGTGGSDWDVPGTDVRLREAGLLPMCRLVEAAAGDVDPARRWTVDRSLLAALVDRWRPETHTFHLPCGEVAPTLQDISYLLGLPLAGDAVRPVTTGVDWQDDLTARFALVQRAPHLPLEPLAHHRNTGPTKRWLLQFTVEQLQAEADEYSYSRCLEAYLLWLFGWVMFCGGHGHGYKSYRLSSMARRRGVEDPNWRSDPCVYLLPPWCQRPLCLCGDRCQLMASRNPDIRGRHFFRCPNYDREVLRSIKPTTLGRRFFVCLNILDDDFMEPPRRCQYREWIDTRRVLTPPSHVVQLELPEQYRVTKARFERGEGSSRRG

SEQ ID NO: 125389 - protein, 354 aa, Oryza sativa
  Clone ID: PAT_MRT4530_28037C.1.pep
LAKLVKTGALCCVAARPHGTKSNLASRDCSMDPNEPCWRMNSSFSPPMSRRWDCRNPSDGLPHRIHDAPPYVSSLSSHSKGSRSAFGSDQYLNHQHSVSDGALSYFGSPADSLQAPRWTPSLQRFDLGEFSTPAGSRPDTSGYPQSSERQLTAVSSFSSASPFSESSQLASSSKPPYLHLPRNHLGRRSFMSKPVYPLVFRNPVSEAEASGMPEASNIGRTTPSDDSPVWRRSLASPELKFHNALSEFRKVEASPEPNTSSRREGFRWSNASSYDFGYDGDAIDISDHISVESQRSPTSSVRFLKCGLCERFLRQKSPWTSNRIVQNSDMPVAAVLPCRHVFHADCLEESTPKS

SEQ ID NO: 125390 - protein, 699 aa, Oryza sativa
  unsure (1)..(699): unsure at all Xaa locations
  Clone ID: PAT_MRT4530_28038C.1.pep
MKFEMARQDTPQLLDPAIDHRHQSHLTAVQGAQLGTFRARTCGXREAGLLPMCRLVEAAAGDADPARRWTVDRSLLAALVDRWRPETHTFHLPCGEVAPTLQDVSYLLGLPLAGDAVGPVTMAVDWQDDLTARFALVQRAPHLPLEPLAHHRNTGPTKRWLLQFTLFGWVMFCGGHGHAVDKGLVHYARSIADVAVGEVPQWSWGSALLAALYRALCESCTKTDPSATFGWCPLFLSIWAAERIAIGRPEVDQHTYEESLYEERPEVDYPTMGTLWCRRQRRWAHVQVRRSYPEFVMEFDRLLPTDVVWEPYSAAATQARAPLGLSTLCTRDQAYWMTMVPMVFDICVEPHAPFRVMRQFGFRQPFPVPFPTTVPAAVHRYSRKGQHSAGDWPAKLATFVEDWLLATEEVMDYEGEPHTEESYQAYLRWYQPRTRTRVTFAPLEQQPHVASTRDLYARHRDQDFARAVDDINRVVVDGSTTIQRLGAGIPVPVEEHLTTYTRMVESMRSFLRVLTCRADDVARADAAVQRPPVPTGPRPAAHVPRPTPPPHGGFHAPFSTPPSSARPSVVPPTGFAQFAMTQAAHFSQAAGSASQAAGTSSQGPPLDHAGTSSDRLLSSTVLFDITDFDFASGSTEDVIGPSQLGGAPPVQTQDQAQATPSRDTRATRAVPPDRFTYSQDHVRAQARRTKRGRGAGQGQ

SEQ ID NO: 125391 - protein, 95 aa, Oryza sativa
  Clone ID: PAT_MRT4530_28039C.1.pep
RSTNVSYKIHSLHLFQKNFGHNLSSKLRHYPALYWQVRALAPLSLSLSLSHTHWHTKLEKRAHNALLLTHTRWHTKLEKRAHNAMQELRMSAYIW

SEQ ID NO: 125392 - protein, 1702 aa, Oryza sativa
  unsure (1)..(1702): unsure at all Xaa locations
  Clone ID: PAT_MRT4530_2803C.1.pep
MAEQAKVRNLSPSVSGDDGEPNPRRRARTPPPPPRQSPRREEALERIEGSATSTSTGDGEERRDGERRLLVYGDDSTPQGAVQAAGALLRHPPVVPDPESPAQRWLDDMANLVMMARQRLGVGGRSSATKTYGAATTGSVSSRRRARRAAAIARHSAATPSSAPPTREDQRGGPGARIGIERRRNGRRAAHATEGASSSGVSPQHGRGDQPSVPPVGGVGCRAFMASLRNVRWPPRFRPTITEKYDGSVNPAEFLQVYTTGIEAAGGDDRVMANFFPMALKGQARGWLMNLPPASVHSWEDLCQQFTMNFQGTYPRPGEEADLHAVQRRDDESLRSYIQRFSQVRNTIPCIPAHAVIYAFRGGVRHNRMLEKIASKEPQTTAELFQLADRVARKEEAWTWNPSGSGVAASAAPGSAARTGRRDRRRKKRSAHSDDEGHVLAVEGALRATRKGRPASDKKKEAGAPGRERPTGKWCSVHNTSLHDLADCRAVKSLAERTRKWEEERRQERREGKSPAVPSGNQRSEAKQKAPAEDIDDGDDDLGFQEPGATIATVDGGACAHVSRWSLKAMKRELLAAAPTHEATRRARWSEVALTFDQTDHPPCVARGGQIAMVVSPTVCNVKLGRVLIDGRGGAALNILSPAAFDAIKAPGMVLRPSQPIIGVTPGHTWPLGHIDLLVTFGGSANFRTERVNFDVADLSLPYNAVLGRPALVKFMAAVHYAYLQMKMPGPGGPISVHGDLKVALACMEQRADHLAAAAKPEGGDERLATSVPAAPRQRMITCDEVPEDALVSFLRANADVFAWRPADMPGVPREVIEHRLAVRPGARPIRQKVRRQVPERQAFIREEVARLLEAGFIREVIHPEWLANPVVVPKANGKLRICIDYTDLNKACPKDPYPLPRIDQIVDSTAGCDLLCFLDAYSGYHQIRMAREDEEKTAFITPIGTYCYTTMPFGLKNAGPTFQRTTRISLGSQIGRNAEAYVDDLVVKTRNQETLLSDLAETFESLRSTRIKLNPDKCVFGVPAGKLLGFLVSARGIEANPEKIRAIERMRPPSKLRDVQCVTGCMAALSRFISRLGEKALPLFKLLKRSGPFTWTEEAERALTQLKAYLSSPPVLVAPEPDEPLLLYLAATPQVVSAALVVERDEDNPHSAHPHPMLAWPGREQGGEAPEPNGGPRPPTTGVGPLPACPTTPGAPDPQDGPEATVGRPRLSSSDPEVVGTEDECAPRGRLDEERPWDVAPGEEDRPHRKAHRVTVVTSYPLGQILHNREGTGRVVKWAIELSEFDLHFEPRHAIKSQALADFVAEWTPAPEPVSVPEASSGPSQPPHTAHWVMQFDGSLSLQGAGAGVTLTSPSGDILRYLVRLDFRATNNMAKYEGLLAGLRVAAGLGIRRLLVLGDSQLVVNXDKTLPEDREGSERVQRISKRYVLXRAPGGFEYLYVAIDKFTKWPEAYPVVKIDKHSALKFIKGITARFGVPNRIITYNGTQFTSELFGDYCEDMGIKLCFASPAHPRSNGQVERANAEILRGLKTKTFNILKKHGDSWIEELPAVLWANRTTPSRATGEMLFFLVYGAEAVLPSELTLRSPRTTMYCEADQDQLRRDDLDYLEERRRRAALRAARYQQSLRRYHQRHVRARSLCVDDLVLRRVQTRAGLSKLSPMWEGPYRVIGVPWPGSVRLATGDGTELPNPWNIEHLRRFYP

SEQ ID NO: 125393 - protein, 67 aa, Oryza sativa
  Clone ID: PAT_MRT4530_28040C.1.pep
GWEKLASYNNLGFLLILDRNIQFVFVGETILICCTHAEHIHSITEIKLSVRIYFQWSQCAVILRFEM

SEQ ID NO: 125394 - protein, 336 aa, Oryza sativa
  unsure (1)..(336): unsure at all Xaa locations
  Clone ID: PAT_MRT4530_28041C.1.pep
RYEFFEYLKNHSQSASRILKYKALKYVVFDDDLYYPTIDGVLLKVVMCESTMLKDCFIYYKGCQDCQRFXNLXRAPASAMNPIIKPWXWIKAIPLKKVDSKDAIEYVKEHIIYRFGIPQTITTYQGYIFVSDEFIQFAKTNGQAKASNKSLIKLVXRKIAEQPKKWHTILAKSLWSYRMACHGSIQVPLYQLVYGHEDVLPWETNISSRRIILQDRLTTDDYHNLMVEEPEDLVXARLCGMEKVKGDKERIVRHYNKXVVPKSFVEEKLVWKMILLIGIRDNNFEKWSPNWEGTFGIHKYVLKGAYMLKGLDEEVFGKTLNGKFLKKYYPSVCVNS

SEQ ID NO: 125395 - protein, 345 aa, Oryza sativa
  Clone ID: PAT_MRT4530_28042C.1.pep
PCPILNVSKNRNQHLKSLAIALPTTGAILVLVSAIVVILLHQRKFKQRQNRQATSLVIEEQYQRVSYYALSRGSNEFSEANLLGKGRYGSVFRCTLDDESALVAVKVFDLQQSGSSKSFEAECEALRRVRHRCLIKIITCCSSIGPQGQEFKALVFEFMPNGSLDGWIHPKSSNLTPSNTLSLSQRLNIAVDIFDALDYLHNHCQPPIIHCDLKPSNILLSEDKSAKVGDFGISRILPKSSTKTLQSSKSSIGIRGSIGYIAPDIADPTIWLHEEENVADVKNESIKTRIIQQCLVSVLRLGISCSKQQPRERMMLAEAVSEMHATRDEYLRSWMVGHEEHSTVS

SEQ ID NO: 125396 - protein, 127 aa, Oryza sativa
  Clone ID: PAT_MRT4530_28043C.1.pep
QPPPPPPPPPPPQPPPPPQQPPPPPPPPPPPHPPPPWPPCPPTTATPYAAVYMPVVSTTVPDIDVDTFFFLDEGGGGFIGFFFLRRSPSWTPELWPQRKTANETVNEQTTTMHNAMNHGRPRPVAVA

SEQ ID NO: 125397 - protein, 1020 aa, Oryza sativa
  Clone ID: PAT_MRT4530_28044C.1.pep
MAIRRMRLALSLLCVLMTIGTGTASDEPALLALKAGLSGSSSSALASWNTSASFCGWEGVTCSHRWPTRVAALDLPSSNLTGTLPPAVGNLTFLRRLNLSSNQLHGEIPPAVGRLRRLLVLDMDHNSISGVIPANLSSCISLTILRIQSNPQLGGRIPPELGNTLPRLKKLQLRKNSLTGKIPASLANLSSLQHLSLSYNKLEGLIPPGLGDIAGLRYLFLNANNLSGELPLSLYNLSSLMMLQVGNNMLHGSIPSDIGRMLPGIQVFGLDVNRFTGVIPHSLSNLSTLTDLYLSDNKFTGFVPPNLGSQLQEFVLANNSFSGQLPRPIGNLSTTLQMLNLDNNNISGSIPEDIGNLVGLSFLDLGFNSILSGVIPESIGKLTNLVEISLYNTSLSGLIPASVGNLTNLNRIYAFYCNLEGPIPPSLGDLKKLFVLDLSYNHLNGSIPKEIFELQSLSWFLDLSYNSLSGPLPSEVGSLVNLNGMDLSGNQLSGQIPDSIGNCEVMEALYLEENSFEGGIPQSLSNLKGLTILNLTMNKLSGRIPNTIARIPNLQQLFLAHNNFSGPIPATLQNLTTLWQLDVSFNKLQGEVPVKGVFRNLTFASVVGNNLCGGIPQLHLAPCPILNVSKNRNQHLKSLAIALPTTGAILVLVSAIVVILLHQRKFKQRQNRQATSLVIEEQYQRVSYYALSRGSNEFSEANLLGKGRYGSVFRCTLDDESALVAVKVFDLQQSGSSKSFEAECEALRRVRHRCLIKIITCCSSIGPQGQEFKALVFEFMPNGSLDGWIHPKSSNLTPSNTLSLSQRLNIAVDIFDALDYLHNHCQPPIIHCDLKPSNILLSEDKSAKVGDFGISRILPKSSTKTLQSSKSSIGIRGSIGYIAPEYGEGSTITRAGDTYSLGILLLEMFTGRSPTDDIFRDSMDLHKFVAASFLHQPLDIADPTIWLHEEENVADVKNESIKTRIIQQCLVSVLRLGISCSKQQPRERMMLAEAVSEMHATRDEYLRSWMVGHEEHSTVS

SEQ ID NO: 125398 - protein, 168 aa, Oryza sativa
  Clone ID: PAT_MRT4530_28045C.1.pep
MQYNREVPFVQVIKAIDKKRRAFLWTEHPYWDGLKAPAEQTIFDMFEASTFFMPGDGESILFLLLSGIGDRLVWRWMSDQRYSVRSVYQAFFYGQHFFALALLDGNLLQKCGIDGHLACPFCDQELETANHILLDCVFTRQDWWSSSRACLPEHLYANFDSLVLLFSW

SEQ ID NO: 125399 - protein, 144 aa, Oryza sativa
  unsure (1)..(144): unsure at all Xaa locations
  Clone ID: PAT_MRT4530_28046C.1.pep
YWDGLKAPAEQTIFDMFEASTFFMPGDGESILXFWFEQWIDDRSVASLVRDLLFGVPXAFEAHAQLLLACLANNSWVSDIRGALTVHVISXFLLIWDVVLHIQLLSGIGDRLVWRWMSDQRYSVRSVYQAFFYGQHFFACVDLL

SEQ ID NO: 125400 - protein, 78 aa, Oryza sativa
  Clone ID: PAT_MRT4530_28047C.1.pep
QMTNWWPRCYFITSTLAKICSPYADGVLFCQKIQKIFVGFDYHYSLCKVAYYYVESKFPKSTRDFSGHLSNIVYYKLN

SEQ ID NO: 125401 - protein, 133 aa, Oryza sativa
  unsure (1)..(133): unsure at all Xaa locations
  Clone ID: PAT_MRT4530_28048C.1.pep
TAGKEKHPSXAAHRRRPTARRRYDRAREEEKRKGEEAPVLTEXTRRREVDGVAGGEEEMVRSFGSSVSSLFPRSSCSTEGWTGKGRKRRSGWWRRXAPMRFRPPVRGGRSCDGGGTRRERRGGHGERRGRGRR

SEQ ID NO: 125402 - protein, 47 aa, Oryza sativa
  Clone ID: PAT_MRT4530_28049C.1.pep
RLLPQPTPASPTSSSTPSAASSFAPLSSSSLAPLASSFPLPSSSSLP

SEQ ID NO: 125403 - protein, 487 aa, Oryza sativa
  Clone ID: PAT_MRT4530_2804C.1.pep
MDNTGNKGYGNDGSDDSRTQANGNEKSINKTSPELIQIVVNQTNMLATAFQLLQNWNNPAGATNVQVPTVQQQCKLSEFLKTEPPTFAIAVDPMEASDWLRTVEKKLGLIQCTDQERVGFATHQLVGPASEWWDSYEASRPEGHTITWNEFSSVFKRSHVPAGMVTLRKREFRYLKQGDLTVTEYLHEFYRLARYAPEDVETDEDKQEKFLQGLKDELAVQLLLEDYEDFEKLVDKAVQLESEHNRMTNCKRRIVNIPVIPCGNQRQRTEPLQITGSSVVHQEFLPQEDGRNADNNTSNTNDDDTTNNHGSCPIHDHLDQACNVNIIHQDIDDSINEGTQNDNPSNFDSEKDSNGDSNNGTTDANVSKDFQPPIPTPSQNDRSQTDNSAKKTLICYNCKEPVDNLSEVDSEDMNHEKFWNGSITELPQPSLSQPKGAPWTKSGEEKIPSATGGQAKQFRKVKICWKFVKTQRKKSDKKRRPPNLSSC

SEQ ID NO: 125404 - protein, 140 aa, Oryza sativa
  Clone ID: PAT_MRT4530_28050C.1.pep
VDHASADAWADAWASLDNYSILGRLVGEDAFVRIAPAVAGVADVSTAHYLFRALVGSEKGLSLDIGTTYLGELLKVHHGRQTHKSGDHFLSDEQVLCIGSSRKRPVLKWEENTAWPGHLTLTNKALYFEAIGLASTNKPF

SEQ ID NO: 125405 - protein, 170 aa, Oryza sativa
  Clone ID: PAT_MRT4530_28051C.1.pep
EPGAPVGSWAACSISEAAYGALDHPVNALEDSPLMNLQEVLKCHKGTKSAVHTGLLFLSKYLKKYRYGFEYASLEVKDHLERVDFSDLVDTETMKIKRLRLGFIVRELIDQYNALRKKLNNMIPSVCISYRYFRNYMLCMILYMWKLFHQLPPCLPYLKKKQQVTEVVGV

SEQ ID NO: 125406 - protein, 121 aa, Oryza sativa
  Clone ID: PAT_MRT4530_28052C.1.pep
HLAKVAEGTVSPRSPPAACGFQQSPRFAPPPPSGAAPRSIPFPSREQPTPAEVPAASATSPGEASVLTLILFLISLCGLYYPLRLTPFSFFFSDFVSLSFSSRSASNFLELDLTRVRVAVC

SEQ ID NO: 125407 - protein, 41 aa, Oryza sativa
  Clone ID: PAT_MRT4530_28053C.1.pep
KLNTQAYFSIQIESDLKEPCAMAFCRLYYLIAIMDNLFPII

SEQ ID NO: 125408 - protein, 147 aa, Oryza sativa
  Clone ID: PAT_MRT4530_28054C.1.pep
ARPGMAASLTELAAVDVEYKRVPCEYRHRSLSVRVDERSRGPNELTISFLYQGGQTDIVAVDVAQVGSSSWKFMTREHGPSWSMANAPPGPLQMRLVVTGGYDGKWVWADREVLPRRWRAGEVYDTGVQITDIAQEGCFPCDTHEWK

SEQ ID NO: 125409 - protein, 289 aa, Oryza sativa
  Clone ID: PAT_MRT4530_28055C.1.pep
MAVSVRCCFGSSSLSHHARLLLVIVALLAPRLASGCDRCVRRSRAAYYTSSLTLTAGSCGYGTAAATFNGGGFLAAAGPALYRGGVGCGACYQVRCKDKKLCSNAGARVVVTDRARTNRTGLVLSSPAFAAMARPGMAASLTELAAVDVEYKRVPCEYRHRSLSVRVDERSRGPNELTISFLYQGGQTDIVAVDVAQNLTIVCWELQVGSSSWKFMTREHGPSWSMANAPPGPLQMRLVVTGGYDGKWVWADREVLPRRWRAGEVYDTGVQITDIAQEGCFPCDTHEWK

SEQ ID NO: 125410 - protein, 101 aa, Oryza sativa
  Clone ID: PAT_MRT4530_28056C.1.pep
MDGEATSLMISPEIRDAVTKVAVFVLVQALVYLILRSSSSVFSKDGKLRSSMSFRSMRSMSVRRFLAPLSDVPVGTDEPWPSPSSSPSPTLSRRWASRRED

SEQ ID NO: 125411 - protein, 65 aa, Oryza sativa
  unsure (1)..(65): unsure at all Xaa locations
  Clone ID: PAT_MRT4530_28057C.1.pep
QNHPAPGKSDSYKAIDKNKNFGPXNVHQLIFFTTKPRPWLIKTRLLDHHRFIVPPCSIYPKGKKS

SEQ ID NO: 125412 - protein, 84 aa, Oryza sativa
  Clone ID: PAT_MRT4530_28058C.1.pep
MQAWADAIDISTNAFRDFSPNNFQTKMQQMDFRNDPISRLYESSELNAALETMVKAERGGMAWVQVRLVHAKIESFDVMKKLEV

SEQ ID NO: 125413 - protein, 58 aa, Oryza sativa
  Clone ID: PAT_MRT4530_28059C.1.pep
METKFKDNKLKGMFNGRKSKQAQEGIESSSADLESGEDNDKGKNIFGVCFMAHGESDS

SEQ ID NO: 125414 - protein, 1795 aa, Oryza sativa
  Clone ID: PAT_MRT4530_2805C.1.pep
MAERAVAHSLSPNASGDDGEQNPRRRARTPPSPSRRNLGRGEALGEVERSATSPPAGDGGGRRDGARRRLAYGDGGTPQGTLQAAGALLRHPPVVPDPETPARRWLDDVADLVMTAQQRLGAGGRSSATEASGAAAAGSMSSRRRTRRAAAVTRRSSAIPSSTPPTQEDVRGGTDARLDIERRCDARRAAHATEGASSSGAPLRSGHGGRPPVSPVGGAGCRAFVASLRNVRWLPRFRPTITEKYDGSVNPAKFLQIYTTGIEAAGGDDRVMANFFPMALKAPAAPGSAARSGRRDRRRKKGSARSDDEGHVLAVEGASRAPRKGRPASDKKKEAGAPSRERPTGKWCTVHNTSLHDLADCRAVKSLAERTRKWEEEKRQERCEGKTPAAPAGNRRGEAKQKATAEDIDDGDDDLGFQEPEATVATVDGGACAHASRRSLKAMKRELLAAAPTHEATRRARWSEVALTFDQTDHPPCVARGGQIAMVVSPTVCNVKLGRVLIDGGAALNILSPLAFDAIKAPGMVLRPSQPIIGVTPGNTWPLGHIDLPVTFGGSANFRMEWVDFDVADLSLPYNAVLGRPALVKFMAAVHYAYLQMKMPGPGGPITVHGDLKVALACMEQRADHLAAASKPTGGDERLSTSVPAAPRQRMVTCDEVPEDALVSFLRANADVFAWRPADMPGVPREVIEHRLAVRPGARPVRQKVRRQAPERQAFIREKVAQLLEAGFIREVIHPEWLANPVVVPKANGKLRMCIDYTDLNKACPKDPYPLPRIDQIVDSTAGCDLLCFLDAYSGYHQIRMAREDEEKTAFITPIGIYCYTTMPFGLKNAGPTFQRTTRISLGSQIGRNVEAYVDELVVKTRNQETLLSDLAETFESLRSACIKLNPDKCVFGVPAGKLPGFLVSARGIEANPEKIRAIERMRPPSKLRDVQCVTGCMAALSRFISRLGEKALPLFKLLKRSGPFTWTEEAERAFTQLKAYLSSPPVLVAPEPDEPLLLYLAATPQVVSAALVVERDEDNPHSAHPHPVSTRPGREQGGEAPEPNGGPRPPTAGAGPPPACPTVPGAPDPQDGPGATAGRLCLSPSDPEVVGTEAECAPRGLSDEERPGDAAPGEEDRPRRKAHRVTVVTSYPLGQILHNRKGTGRVVRWAIELSEFDLRFEPRHAIKSQALADFVAEWTPAPEPVSAPEASSGPSQLPHTAYWVMQFDGSLSLQGAGAGVTLTSPSGDVLRYLVRLDFRATNNMAEYEGLLAGLRVAAGLGIRRLLVLGDSQLVANQVCKEYQCSDPQMDAYVRQVRRMERHFDGIELRHVPRRDNAVADELSRLASSRAQTPPGAFEERLAQPSARPDPLGETDAPGRPPRPVGVLASGPEGSAPSSPRLIAWITEIQAYLADKTLPEDREGSERVRRISKRYVLVEGTLYRHAANGVLLKCIPREQGVELLADVHEGECGAHSASRTLVGKAFRQGFYWPTAVNNAVDLVRRCRACQFHARQTHQLAQALQTIPLSWLFAVWGLNILGPFRRAPGGFEYLYVAVDKFTKWPEAYPVIKIDKHSALKFIRGITARFGVPNRIITDNGTQFTSELFGDYCEDMGIKLCFASPAHPRSNGQVERANAEILKGLKTKTFNILKKHGDLWIEELPAVLWANRTTPSRATGETPFFLVYGAEAVLPSELTLRSPRVSMYCEADQDQLRRDDLDYLEERRRRAALRAARYQQSLRCYHQRHVRARSLCVDDLVLRRVQMRAGLSKLSPMWEGPYRVIGVPRPGSVRLVTGDGTELPNPWNIEHLRRFYP

SEQ ID NO: 125415 - protein, 394 aa, Oryza sativa
  unsure (1)..(394): unsure at all Xaa locations
  Clone ID: PAT_MRT4530_28060C.1.pep
NPTIAMYTGNFDSSKFLSFYELTFEATHGDENTKAKVIHLVLDGFARSWXLNLPPSSIYSWEQSRGVPITNFRGTXKDKKNXKELFGIWQKPSXSACEFVRRFSYARCXVQNTIVTSVINADSTRLRTRPITEKIMRKEKKMLDYLFRITEDYAXGKEDTKHRSEIQAKYDRATRQDGSLXTKIVAPVNPPRXTLPQLSWKKFQNDKGKQVMTVKEVQASRMNFHARKXANRLPPRXKKCSIDKYCLXHDKFTHSMDKCRNLQQLSQGXVSSPEPPMGXEGDQPREPEQSSRADMPKDSHQRGKKTYMTXAMIHIAANPKTKVPQYCNTPISFDPEDAKGIFVAHQDPCVITTGIFGCEVPXVLVEGGSSMDITFFDMYCKMGLATTQTRPNVF

SEQ ID NO: 125416 - protein, 92 aa, Oryza sativa
  unsure (1)..(92): unsure at all Xaa locations
  Clone ID: PAT_MRT4530_28061C.1.pep
PPPPPPPRGFCGKDPHSFPAFASASAPPPYSRSPLFQRGKCLEPKKDCFLVVLLWGLMHIFKLIFDTXYGGPHLIYLLNGGAPLKKKKKTAA

SEQ ID NO: 125417 - protein, 327 aa, Oryza sativa
  Clone ID: PAT_MRT4530_28062C.1.pep
MREVLLLGSLVVLALLSLFPCCSCLSQGAEEEEDDGEVRLMGLAGEAAGSPGSGGGFSANGKFSYGYASSPGKRSSMEDFYDTRIDGVDGETVGLFGVFDGHGGARAAEFVKQNLFTNLIKHPKLFSDTKSAIAETYTSTDSELLKAETSHNRDAGSTASTAILVGDRLLVANVGDSRAVICRGGDAIAVSRDHKPDQSDERQRIEDAGGFVMWAGTWRVGGVLAVSRAFGDKLLKQYVVADPEIKEEVVDSSLEFLILASDGLWDVVTNEEAVAMVKPILDSEQAAKKLLQEASQRGSADNITCLVVRFLEQENHLPERPTNDQAS

SEQ ID NO: 125418 - protein, 118 aa, Oryza sativa
  Clone ID: PAT_MRT4530_28063C.1.pep
MSRALPSALAGALHSQLSLLLPLLMVVFGLGSKQRWVRKKRRGDGTGGASAAVGENCVGKGRIEKDLWANARECRAPPVATEPRGAGTFQLTGASLTVEPAWTGDWYDDRDGRVYVLP

SEQ ID NO: 125419 - protein, 240 aa, Oryza sativa
  unsure (1)..(240): unsure at all Xaa locations
  Clone ID: PAT_MRT4530_28064C.1.pep
TSSMGLITKNIVRPAHNRGHGYSNSFTLARDVPLYPQDTASTSCPPCVAILESTRIEDXDNTPCTTQPTTVNRSWIIITPSITRGMDSPATPTDFSPILSLAPRNEPCYTKALDGYDDGKRRHDGGHXGHQREEKISTVLTGTYMATGDEXQRPVMSFEGRRDRDDGGGNFTANTGGERVAGVALTLAKPREVTGLTGDGRGDGARRLERRPEVEREGARGEAARVREKFGKKKGNGRGD

SEQ ID NO: 125420 - protein, 1118 aa, Oryza sativa
  unsure (1)..(1118): unsure at all Xaa locations
  Clone ID: PAT_MRT4530_28065C.1.pep
MKFDLPLLNYDTRFSLRQVKMRGILAQTHDYDEALDNFGKRRAEWTAEEIRKDQKALALIQLHLHNDILQECLIEKTSAELWLKLESICMSKDLTSKMQMKMKLFTLKMKEEDSVITHMAEFKKIVADLVSMEVKYDDEDLGLLLLCSLPNSYANFRDTILLSRDELTLKEVYDALQNKEKMKIMVQNDGSSSSKGEALHVRGRTENRTSNEKNYDRRGRSKSKPPGNKKFCVYCKLKNHNIDECKKVQAKERKNKKDGKVSVASAAASDDDSGDCLVVFAGCVAGHDEWILDSACSFHICTKRNWFSSYKPVQKGDVVRMGDDNPCAIVGIGSVQIKTDDGMTRTLKNVRYIPGMSRNLISLSTLDAEGYKYSGSDGVLKVSKGSLVCLKGDLNSAKLYVLRGCTLTGSDSAAAAVTNDEPSKTNLWHMRLGHMSHLGMTELMKRNLLKGCTSSKIKFCEHCIFGKHKRVQFNTSVHTTKGTLDYVHADLWGPSKKPSLGGARYMLTVIDDYSRKVWPYFLKHKDDTFTAFKNWKVMIERQTERKVKLLRTDNGGEFCSHAFNDYCRQEGIVRHHTIPHTPQQNGVAERMNRTIISRARCMLSHARMNKRFWAEAASTACYLINRSPSIPLNKKTPIEVWSGMPADYSQLKVFGCTAYAHVDNGKLEPRAVKCLFLGYGSGVKGYKLWNPETGKTFMSRSVVFNESVMFTNSLPSEHVPEKELQRMHMQVEHVDDDTGVQVEPVHEQDDHNNDVADDDAHDDVQQTPPILQLEEELPIAQRKSKRTTKPPKRLIEECNLSYYALSCAEQVENVHEPATYKEAVRCGDSENWISAMHEEMQSLEKNSTWEAVPLPKKKKTMSCKWIFKRKEGLSSSEPPKYKASFKRSKYDSCVYIKHVNGSPIYLLLYVDDMLIAAKSKIEITKLKKLLSSEFDMKDLGSAKKILDLSYAMSLVSRYMSNPGKEHWRAVQCIFRYLRGTTCACXSLEELIRALLDMCFYYAGALDRRRSLTGYVSTIGSCAXCKELIWLKGLYAELSGVESCISLHCDSQSAIYLTKDQMFHERTKHIDIKYHFVRDVIEEGKLKVEFVGVVPNSLQDIGRASDEAERRPKPEAWAC

SEQ ID NO: 125421 - protein, 44 aa, Oryza sativa
  Clone ID: PAT_MRT4530_28066C.1.pep
FASSLIACYQLLPAPPNPSDPPEGVSGGSSNVATSKNIKWSCLI

SEQ ID NO: 125422 - protein, 88 aa, Oryza sativa
  Clone ID: PAT_MRT4530_28067C.1.pep
MSCDTHSREEDAEKYAKANAHKASRISAQASSSAGGDNCGGRTMAWRVNQWSMKKSSRWRLWRNVVWTVAHVMEEGVAVGVERVVHEA

SEQ ID NO: 125423 - protein, 1350 aa, Oryza sativa
  Clone ID: PAT_MRT4530_28068C.1.pep
MKFDLPLLNYDTRFSLWQVKMRGILAQTHDYDEALDNFGKRRAEWTAEEIRKDQKALALIQLHLHNDILQECLTEKTSAELWLKLESICMSKDLTSKMQMKMKLFTLKMKEEDSVITHMAEFKKIVADLVSMEVKYDDEDLGLLLLCSLPNSYANFRDTILLSRDELTLKEVYDALQNKEKMKIMVQNDGSSSSKGEALHVRGRTENRTSNEKNYDRRGRSKSKPPGNKKFCVYCKLKNHNIDECKKVQAKERKNKKDGKVSVASAAASDDDSGDCLVVFAGCVAGHDEWILDSACSFHICTKRNWFSSYKPVQKGDVVRMGDDNPCAIVGIGSVQIKTDDGMTRTLKNVRYIPGMSRNLISLSTLDAEGYKYSGSDGVLKVSKGSLVCLKGDLNSAKLYVLRGCTLTGSDSAAAAVTNDEPSKTNLWHMRLGHMSHLGMTELMKRNLLKGCTSSKIKFCEHCIFGKHKRVQFNTSVHTTKGTLDYVHADLWGPSKKPSLGGARYMLTIIDDYSRKVWPYFLKHKDDTFTAFKNWKVMIERQTERKVKLLRTDNGGEFCSHAFNDYCRQEGIVRHHTIPHTPQQNGVAERMNRTIISRARCMLSHARMNKRFWAEAASTACYLINRSPSIPLNKKTPIEVWSGTPADYSQLKVFGCTAYAHVDNGKLEPRAVKCLFLGYGSGVKGYKLWNPETGKTFMSRSVVFNESVMFTNSLPSEHVPEKELQRMHMQVEHVDDDTGVQVEPVHEQDDHNNDVADDDAHDDVQQTPPILQLEEELPIAQRKSKRTTKPPKRLIEECNLSYYALSCAEQVENVHEPATYKEAVRCGDSENWISAMHEEMQSLEKNSTWEVVPLPKKKKTISCKWIFKRKEGLSSSEPPKYKARLVARGYSQIPGVDYNDVFSPVVKHSSIRTFLSIVASHDLELEQLDVKTAFLHGELEEDIYMDQPEGFIVPGKEKYVCKLKRSLYGLKQSPRQWNKRFDSFMLSHSFKRSKYDSCVYIKHVNGSPIYLLLYVDDMLIAAKSKIEITKLKKLLSSEFDMKDLGSAKKILVMEISRDRKSGLLFLSQHNYIKKVLQRFNMQNAKAVSTPIAPHFKLSAAQCPSTDAEIEYMSRVPYSSAVGSLMYAMVCSRPDLSYAMSLVSRYMSNPGKEHWRVVQWIFRYLRGTTYSCLKFGRTDKGLIGYVDSDYAADLDRRRSLTGYVFTIGSCAVSWRATLQSVVALSTTEAEYMAICEACKELIWLKGLYAELSGVESCISLHCDSQSAIYLTKDQMFHERTKHIDIKYHFVRDVIEEDDWLIYDTRRICLKVEFVGVVPNSLQDIGRASDEAERRPKPELKGFSTLNRVSPL

SEQ ID NO: 125424 - protein, 230 aa, Oryza sativa
  unsure (1)..(230): unsure at all Xaa locations
  Clone ID: PAT_MRT4530_28069C.1.pep
RTRGRTRGRTRGRTRGRTRGRTRGWMGDPCFPSQFKWDGVECRNTSDNIPRIISIDLSNSNLHGVISSNFTLLTALEYLNLSGNQLNGPIPDSLCKLNEGSLVFSYGSNGDVCNKTNLPGSKKRAAILAISIAAPVLVVVSLLIAYLIWRAKGKSNISIPGSEKYHXDRLQKXENRHFTYDELKKLTDNFQQFIXEGGFGCVYHGYLEDNTEVAVKIRFEKSSHGFNEFL

SEQ ID NO: 125425 - protein, 34 aa, Oryza sativa
  Clone ID: PAT_MRT4530_2806C.1.pep
LTGIITLKSALDCINNSNRFSAYIINITLDCISS

SEQ ID NO: 125426 - protein, 521 aa, Oryza sativa
  unsure (1)..(521): unsure at all Xaa locations
  Clone ID: PAT_MRT4530_28070C.1.pep
METRRPLHPLLLFFSPWLLLLLLLVVQGVRSLQFTRDDFPDGFTFGAGTAAFQYEGAAAEDGRTPSIWDTYAHSWRNPGGETGDVACDGYHKYKEDVMLMNETGLEAYRFTISWSRLIPSGRGAVNPKGLQFYNSMINELVKAGIQIHAVLYHIDLPQSLQDEYGGWVSPKVVDDFAAYADVCFREFGDRVAHWTTSIEPNVMAQSGYDDGYLPPNRCSYPFGRSNCTLGNSTVEPYLFIHHTLLAHASAVRLYREKHQAAQKGVVGMNIYSMWFYPLTESTEDIAATERVKDFMYGWILHPLVFGDYPETMKKAAGSRLPLFSDYESELVTNAFDFIGLNHYTSNYVSDNSNAVKAPLQDVTDDISSLFWDCNMVLLXLLRQFLPGTSLDPRGLELALEYLQEKYGNXPVLYPGXNGSGSNATLDDVGRIDCLTQYIAATLRSIRNGANVKGYCVWSFMDQYEMFGDYKAHFGIVAVDFGSEELTRQPRRSARWYSDFLKNNAVIKVDDGPVSTAFHAQL

SEQ ID NO: 125427 - protein, 1311 aa, Oryza sativa
  unsure (1)..(1311): unsure at all Xaa locations
  Clone ID: PAT_MRT4530_28071C.1.pep
MGDAAIQASLEALTATIKSLQASVEANSQAIQLLNNQCTGSTSGRTSSGEHTQDRPPRFQKLDFPWYDGKTDPLAFINRCESYFYQQHVMEEEKVWMASYNLEDGAQMWFIQVQREEGTPSWRRFTELLHLRYEPPLHSNPLGELAACKRTGSVVEYQDRFEALLPRAGHLTEAQKVQLFTAALQPPLSLDVEIHNPNSLAHAMSLARKLELRAQCAAPPVRQQRDRLPPPAPRLALPAPNAQPPTAIVEGRPVKCLSQTKMEERRRLGLYYNCNENFGRGHNKRXMQLHIKISDTTLLALLDSGSTNNFISEDAAARTAMTLHRRARMKVTVANGERVPCLSVLWQAXVVINGDTFTADLFVLPLAGYDVVLGTNWLASLGPILWDFASRTMSFWRSDRQVRWQGVAGQETTSLHTTTAGDNLLDALLFAFADVFSEPQGLPPPRSRDHSIVLSPGAQPVAVRPYRQPTRRGVSASTTALNAITVKDAFPIPVVDELLDKLHGAKFFTKLDLRSGYHQVQMNPADVAKTAFRTHDGLYEFLVMPFGLCKAPATFQALMNDVLRPFLHRFVLVFFDDILIYSVTWADHLRHLRAVLDTLQQHWLFVKRSKCAFGVSSISYLGHIITESCVAMDPAKVQAVRDWPQPRSVQAVRGFLGLTGYYRKFVRDYGTIAAPLIALLKKEGFLWNDDATTAFQALKTAITSASVLVLPDFTKPFVVECDTSSHGFGTVLIQDKHPVAYFSRPVAPRHRSLAAYERELIGLVHAIRHWRPYLWGRRFLVRTDHYSLKFLLDQRLAKIPQHHWVGKLLGFDFTVEYKPGALNTVADALSRRDTDDGMILAISAPRFDYVERLWQAQDTDPAIRALGDEIQAGTRAAPWSLIDGMVAFDARLYIPPSSPLLLELLTAIHDDGHEGVQRTIHRIRRDFHIPNVRRMVQDYIKACATCQRYKSEHLHPAGLLMPLPVPMAVWANIGLDFVEALPRVGWKSVILTVVDRFSKYCHFIPLAHPYTAESVAQAFFTDIVRLHGVPQSMVSDRDPVFTSLFWRELMRLMGTKLHMMTAFHPQSDGQTEAANRVIVMYLRCFTGDQPRQWIHWLPWAEYTYNTAYQTSLRDTPFCVVYGRDPPTIRSYEPGETRMAAVARNMEDRDKILADIRYRLEQAQAVQKAFYDRHHRDVSYQVSDWVWLRLRHREPASLPQVTKGKLKPRFFGPYQVNELINNLAVRLALPPRTRLHDVFHVSLLKKFVGMPPDARPPLLAIHNGAAIPEPERATRMRLARGVRQVLIEWKGEPATSATWEDVDTFMDRYPAF

SEQ ID NO: 125428 - protein, 156 aa, Oryza sativa
  Clone ID: PAT_MRT4530_28072C.1.pep
MGNREDGHTGSVVGVRRSGGPAIRAAPIGIAPALLLLARVACRRQDARPPPPLARLPPAASSPTIHGPHLPGRLPPWPPPPLARPATRLRRRPRHSPARPPPSLGYTPAAAFCQLGCPAAAVSHAERRGEESCGSRQKREGERMEKSVERSREKEE

SEQ ID NO: 125429 - protein, 46 aa, Oryza sativa
  Clone ID: PAT_MRT4530_28073C.1.pep
MASRARVRSYLYSRGIDYPVDGPGYSFGHFDSTDSMFTFDSSKRMF

SEQ ID NO: 125430 - protein, 81 aa, Oryza sativa
  unsure (1)..(81): unsure at all Xaa locations
  Clone ID: PAT_MRT4530_28074C.1.pep
MQPPSPSSPTMLLDPGWEGRQPDLEGGSAAADLRPPXHRPPSSVVRPAPPATTGLPPPPFGRIWEGGEASHTGGAPSPPRH

SEQ ID NO: 125431 - protein, 531 aa, Oryza sativa
  Clone ID: PAT_MRT4530_28075C.1.pep
MAAASSAHYFGLGEPQMQQQQQQPPLQNNAAAPVAATPPPKKKRNQPGNPSKFVCEVCNKGFQREQNLQLHRRGHNLPWKLKQKNPKETRRRVYLCPEPSCVHHDPSRALGDLTGIKKHYSRKHGEKKWKCDKCNKRYAVQSDWKAHSKTCGTREYRCDCGTLFSRRDSFITHRAFCDALAQESGRIMPPMGAALYAAAGAGMAIGGLTGMAASHQLQPFQDHSSAITTAANAAAQFDHLMATSSAAAGSPAFRAAQPTSSSSSPFYLGGGGDDGQAHTSLLHGKPAFHGLMQLPEQQGSNGGGLLNLSYFSGGNGGHHHHHQEGRLVFPDQFNGVAAGNGARAGSGEHGNSGNNADSGSIFSGNMMGGGGGFSSLYSSSDQTVPPPQMSATALLQKAAQMGATTSSGGAGSVNSLLRGLGSGGGGGALNGKPAGAAGFIMSGESSSRSTASQTAENESQLRELMMNTLSATGGGTGAGTVFVGGGFPGVDDGKLSTRDFLGVSGGAPGLQLRHGGAAGMGMAGSLDQEMK

SEQ ID NO: 125432 - protein, 500 aa, Oryza sativa
  Clone ID: PAT_MRT4530_28076C.1.pep
MGKKGKWFGAVKKVFSPESKEKKEERLRRKLAASNPNPPDLTPSASLEVNVSVPPPPPPPPVQQIEEVKVPEVEQEQSKHVTVEAVPEAVPVPAQTSSLPPGVSREEQATIKIQTAFRGYLLSENSSWLFISSAAFIYHCVGANITKARRALRALRGLVRLKSLVEGNSVKRQAASTLRCMQTLARVQSQIRSRRLKMSEENQALQRQLLLKQELESLRMGEQWDDSTQSKEQIEASLISRQEAAVRRERALAYAFSHQWKSTSRSVNPMFVDPNNPQWGWSWLERWMAAKPWEGRAGTDKESNLDRASAKSASLNLGEGEITKAFNRRGSKPDKSSPTTPKLTRPASRQSPSTPSAKVSPIFAKKKSATPKNGLSQVDDDAKSVFSVQSERPRRHSIATSTVRDDESLASSPSVPSYMAPTKSARAKLRLQGSAVTDGAETPPEKVASVGSVKKKLSFQAGMAPPSPMRRHSGPPKVEVVKDIAEPPQPEALVINGGSK

SEQ ID NO: 125433 - protein, 93 aa, Oryza sativa
  unsure (1)..(93): unsure at all Xaa locations
  Clone ID: PAT_MRT4530_28077C.1.pep
XAATGVARLGVLXEPFLAXGFPNRRTHCENDIXSXSTFSRFLXADGXRPPRPGPPHHHRRSHHLTNQNLRTRSNRIENPSNERATRXSVLISR

SEQ ID NO: 125434 - protein, 113 aa, Oryza sativa
  Clone ID: PAT_MRT4530_28078C.1.pep
MAQAGLQMQSLIVVKQGEESVLGSGPRSSRDRPSQVALDRDKDKVAASSSSLVSGTPPLRVDLNKVREAKRYAVFQAQHEGCLGSYKSFDSSFGNYLVPVIPSNDFFVQITNK

SEQ ID NO: 125435 - protein, 483 aa, Oryza sativa
  Clone ID: PAT_MRT4530_28079C.1.pep
MAEERESFESQWAPSDVTEENLKEMVAHEQGLQGEQITRHFIKSRLAPIKERSHTAFEFDGKNDPNREDLESLEFRIMKERMYKIFSNAIVVSYSHLLPVVPYNAFNPPPPEFSLMKSDPPLAQRRSPRRQTGQANGGPKIQPTTQPSDPKSTQQSGSRKRKLVLSDDEGDNARKASGKEATGKQPKQANPKKKTSSHPIPKIRKSSRKPSDIDPSRKDFELTSTEIGPTIETGPTDQDRPSSNQPATDNPQGIVINKQKEDEEVSLLAKTLNQATHLVNRIHLRNEAKTATLEKLVPHLGTLEATRAQLHETKELARKTEHDLRDRIAKLQDSNFELSGSSKDRKIKSRAQFDVLVNKIKKLEGSRDEVANAATPLIQAMFFNINGPSSFDTVEIFDKLRAALDTYFKNIKEAESMGESMALAMTKSLYPKIDIDVIDGFADGKKAADKIAADVIERFQDTDLRPTGSDDLDDEKLSGIDIV

SEQ ID NO: 125436 - protein, 1924 aa, Oryza sativa
  Clone ID: PAT_MRT4530_2807C.1.pep
MAEQAKVRNLSPSVSGDDGEPNPRRRARTPPPPPRQSPRREEALERIEGSATSTSTGDGEERRDGERRLLVYGDDSTPQGAVQAAGALLRHPPVVPDPESPAQRWLDDMANLVMMARQRLGVGGRSSATKTYGAATTGSVSSRRRARRAAAIARHSAATPSSAPPTREDQRGGPGARIGIERRRNGRRAAHATEGASSSGVSPQHGRGDQPSVPPVGGVGCRAFMASLRNVRWPPRFRPTITEKYDGSVNPAEFLQVYTTGIEAAGGDDRVMANFFPMALKGQARGWLMNLPPASVHSWEDLCQQFTMNFQGTYPRPGEEADLHAVQRRDDESLRSYIQRFSQVRNTIPCIPAHAVIYAFRGGVRHNRMLEKIASKEPQTTAELFQLADRVARKEEAWTWNPSGSGVAASAAPGSAARTGRRDRRRKKRSAHSDDEGHVLAVEGALRATRKGRPASDKKKEAGAPGRERPTGKWCSVHNTSLHDLADCRAVKSLAERTRKWEEERRQERREGKSPAVPSGNQRSEAKQKAPAEDIDDGDDDLGFQEPGATIATVDGGACAHVSRWSLKAMKRELLAAAPTHEATRRARWSEVALTFDQTDHPPCVARGGQIAMVVSPTVCNVKLGRVLIDGRGGAALNILSPAAFDAIKAPGMVLRPSQPIIGVTPGHTWPLGHIDLLVTFGGSANFRTERVNFDVADLSLPYNAVLGRPALVKFMAAVHYAYLQMKMPGPGGPISVHGDLKVALACMEQRADHLAAAAKPEGGDERLATSVPAAPRQRMITCDEVPEDALVSFLRANADVFAWRPADMPGVPREVIEHRLAVRPGARPIRQKVRRQVPERQAFIREEVARLLEAGFIREVIHPEWLANPVVVPKANGKLRICIDYTDLNKACPKDPYPLPRIDQIVDSTAGCDLLCFLDAYSGYHQIRMAREDEEKTAFITPIGTYCYTTMPFGLKNAGPTFQRTTRISLGSQIGRNAEAYVDDLVVKTRNQETLLSDLAETFESLRSTRIKLNPDKCVFGVPAGKLLGFLVSARGIEANPEKIRAIERMRPPSKLRDVQCVTGCMAALSRFISRLGEKALPLFKLLKRSGPFTWTEEAERALTQLKAYLSSPPVLVAPEPDEPLLLYLAATPQVVSAALVVERDEDNPHSAHPHPMLAWPGREQGGEAPEPNGGPRPPTTGVGPLPACPTTPGAPDPQDGPEATVGRPRLSSSDPEVVGTEDECAPRGRLDEERPWDVAPGEEDRPHRKAHRVTVVTSYPLGQILHNREGTGRVVKWAIELSEFDLHFEPRHAIKSQALADFVAEWTPAPEPVSVPEASSGPSQPPHTAHWVMQFDGSLSLQGAGAGVTLTSPSGDILRYLVRLDFRATNNMAKYEGLLAGLRVAAGLGIRRLLVLGDSQLVVNQVCKEYRCSDPQMDAYVRQVRRMKRHFDGIELRHVPRRDNTIADELSRLASSRAQTPPCAFEERLAQPSARPNPLGETDAPDRPPRPVGVQASGPEGSAPSSLRLIAWIAEIQAYLTDKTLPEDREGSERVQRISKRYVLVEGTLYQRAANGILLKCIPREQGVELLADIHEGECGAHSASRTLVGKTFRQGFYWPTALNDAVDLVRRCRACQFHAKQIHQPAQALQIIPLSWPFAVWGLDILGPFRRAPGGFEYLYVAIDKFTKWPEAYPVVKIDKHSALKFIKGITARFGVPNRIITYNGTQFTSELFGDYCEDMGIKLCFASPAHPRSNGQVERANAEILRGLKTKTFNILKKHGDSWIEELPAVLWANRTTPSRATGEMLFFLVYGAEAVLPSELTLRSPRTTMYCEADQDQLRRDDLDYLEERRRRAALRAARYQQSLRRYHQRHVRARSLCVDDLVLRRVQTRAGLSKLSPMWEGPYRVIGVPWPGSVRLATGDGTELPNPWNIEHLRRFYP

SEQ ID NO: 125437 - protein, 249 aa, Oryza sativa
  Clone ID: PAT_MRT4530_28080C.1.pep
MAMQMNSVVHVSTSPSPSPATSPPPEGKQEHGEVAAVHVVGVGDDEAVMVVKDEEAFGGGGVDYSGRAQWLRAAVLGANDGLVSVASLMIGVGAVSESGRAMLVSGVAGLVAGACSMAIGEFVSVYAQYDIEVAAARRRRRQRRRRCDGDGEEEGSGRLPSPFKAAAASALAFTVGALLPLLAGGFVRPWAPRVAAVCAATSAALAGFGALGAALGGASPARSAARVLLGGWAAMAACYGVLRLFANLY

SEQ ID NO: 125438 - protein, 707 aa, Oryza sativa
  Clone ID: PAT_MRT4530_28081C.1.pep
MPELRGGVWRARLRSKKVYDVQDADPAASPVSPAPRGRTGRRGGAAAGRGNKTVAEGGGRKALKPRGKGCRAVDLCEDQPCKDLPEGIARKAVTGKAQEDLGLNKVADRAANLMMDGESGDKFAAAEDESTTTPVPERVQVGNSPEYITDRKLGKGGFGQVYVGRRVSGGGSRTGPDAQEVALKFEHRSSKGCNYGPPYEWQVYHTLNGCYGIPSVHYKGRLGDYYILVMDMLGPSLWDVWNSVGQAMSAHMVACIAVEAISILEKLHSKGFVHGDVKPENFLLGHPGSVDEKKLFLIDLGLASRWKEASSGQHVDYDQRPDVFRGTIRYASVHAHLGRTGSRRDDLESLAYTLIFLIRGRLPWQGYQGDNKSFLVCKKKMATSPELLCCFCPAPFKHFLEMVTNMKFDEEPNYPKLISLFDGLIEGPASRPIRIDGALKVGQKRGRMVVNLDDDEQPKKKVRLGSPATQWISVYNARRPMKQRYHYNVADSRLHQHIEKGNEDGLYISCVSSSANFWALIMDAGTGFCSQVYELSQVFLHKDWIMEQWEKNYYITAIAGATNGSSLVVMSKGTPYTQQSYKVSESFPYKWINKKWKEGFHVTSMATAGNRWGVVMSRNAGYSHQVVELDFLYPSEGIHRRWETGYRITSTAATPDQAAFILSIPKRKPMDETQETLRTSSFPSNHVKEKWSKNLYIASICYGRTVC

SEQ ID NO: 125439 - protein, 158 aa, Oryza sativa
  Clone ID: PAT_MRT4530_28082C.1.pep
SASRRSAAGAASASSAVGGATASTRWSRRWRRRRRRRRCAPSRSPSSRTATAGRSPRSSSTACRRRHGAPPDASFNTSTAAAAATTTDTDTTAGPTTSATRSSAPTTASSSWRTPATSAATPSCCSTAPPASASWSNRRRRRRRSSAGRRRSASRTTR

SEQ ID NO: 125440 - protein, 122 aa, Oryza sativa
  unsure (1)..(122): unsure at all Xaa locations
  Clone ID: PAT_MRT4530_28083C.1.pep
PSXPLLHRAXXLNLPPQLDPXLSHPTPHLTATLGGTPTLGNLPPVRYPGTPITHXKLRHTTVFGXHSGDSTPPPATXYLGPTATPGGASTGHDPTPSVWXLXXPTTTPADXXARPLTRWATP

SEQ ID NO: 125441 - protein, 111 aa, Oryza sativa
  Clone ID: PAT_MRT4530_28084C.1.pep
KNHEPLLKFQVLNLTYDYMWTEGDADQTAYHTGGDHSHAASSSLVCPYLALRGFLHSVHVPSSFSSGAENSSFHRHPTSLEGHAAHDLSHTQVFHAPESRNYDHDPRFLNH

SEQ ID NO: 125442 - protein, 58 aa, Oryza sativa
  Clone ID: PAT_MRT4530_28085C.1.pep
AVRCLSLLVSIDQWCTRSLSRGRVSRLCWDATSSGSLSPFASIETISPSCYLDLHRYI

SEQ ID NO: 125443 - protein, 61 aa, Oryza sativa
  Clone ID: PAT_MRT4530_28086C.1.pep
QRTLLKEMRQVKMTGLQRWTIWKLMLVKTKLRLKRTRLTCRSDLITMTSSITGYIGSVVLK

SEQ ID NO: 125444 - protein, 213 aa, Oryza sativa
  Clone ID: PAT_MRT4530_28087C.1.pep
MAENMVMVSSSDENHNQVAIDLCSASPVDRSLSAAAGGSTTPRSPGFSMVVVPVESPEKTTGKPQTDDHDQQQGRAKEVPLVKKAAAEFIGTFILVFTVLSTVVMDARHGGAETLVGVAASAGLAVVAVVLSVVHISGSHLNPASKELVAIAIAAAIMMNALVGGPSTGPSMNPARTIGAAVATGEYRQMWIYLVAPPLGAIAGAATYTLIKP

SEQ ID NO: 125445 - protein, 212 aa, Oryza sativa
  Clone ID: PAT_MRT4530_28088C.1.pep
MEDTNKIRGDLKCDSLSIGRQQGPSHQQSSVPVVTSSRKDGQPQEYSCIQSPSPVATSNREHIIPNWVPQIEMTFSSVVEAQQFSNHYGGQIGFDVRKRFENTSKLDGKAISAEFVCNKEGFRTNDKRDPLIKTPRAVTRTGCKVHMGVTLNRVLGKYEIHDLVLEHNQILQTLETCHLLPSQRRITEVHDYYVQTPFEQRMNEGFLLSFCI

SEQ ID NO: 125446 - protein, 44 aa, Oryza sativa
  Clone ID: PAT_MRT4530_28089C.1.pep
MCVIIRITFQASIGANGAIPSCTMSCSGLAYEFMRTRSRTYGST

SEQ ID NO: 125447 - protein, 630 aa, Oryza sativa
  Clone ID: PAT_MRT4530_2808C.1.pep
MDPGKHNGMSLKDRRELVYEVSQWPQGASEILQCWTRRDLLELICAELGKERKYTNVPKSKMIAYLLKLVLRKNGQPKDDNANASILGQNNKDDTEKKENEEQPHHFSRSAKSDSSMCREAQAGSTAVCRNVACQATLNSGDAYCKRCSCCICHKYDENKDPSLWLVCSSDTPYSGYSCGTSCHLKCALKNKKAGIFKNGCNKKSDGSFYCVWCGKMNWLMRNLRKQLAIARESRRVDVLCERLSLTHKMVKGSERYRELANIINSAVKILEKEVGCALDQVSAITGRGIVNRLCCGADVQKLCSCALEMVDSTLSSTLDFETNNNLEAPGPQPQVFFVEITPFSVLVVLKYQDNIAEEIDGCKVWHRSANMANYPAEPTCHVLRPNTRSLFSGLSPSTEYFFKVLPFGCSQGYGEWEVKCSTRSLNHGSSQCSTQNSESMSIKEDLEQHQKNELNLKNKQWWGIQYDSPSANSNENDVCPDLHPKRAKLAKLDGASDNDESQLLPTSEVLPFMSSNSSLSEVPSKPDWVSSTPDSACKNHVERQYEYSVKVIRWLEHEGHMDKDFRVKFLTWFSLKASAQERRIVNAFVDALVSDPASLVAQLIDSFMEVVCSKEKPAQPNGGCCNLWH

SEQ ID NO: 125448 - protein, 97 aa, Oryza sativa
  Clone ID: PAT_MRT4530_28090C.1.pep
PILSYQNKTTILWTKKHHGFWSTTGSYGITFQDHCSLCLPPIAMINDNASFQMVSDRIAAECSFKCKGEASPPNYICSPFMTHSTETEARTSMVSLS

SEQ ID NO: 125449 - protein, 65 aa, Oryza sativa
  Clone ID: PAT_MRT4530_28091C.1.pep
CDAMACVACVHGWGWLTMLSWLRHLVDGMAHHGSLTRNPACCWVPVPNGCVHGWADACGGEAVDV

SEQ ID NO: 125450 - protein, 545 aa, Oryza sativa
  Clone ID: PAT_MRT4530_28092C.1.pep
MGDMVLLATRQGVVCHRHRLPVISCATNTKPSRLKLPPGPSTLPLIGSIHHFVSSSESVHSVMRRLAREHGPVMQLWFGEVPTVVASSPEAAQEILRSKDLAFADRHLTSGTDAFSFGGRDVALAPYGERWRHLRRLLTQELLTAARVRSFQRIREEEVARLVRDVSAAAAAAPGTAVNLTEMITRLINDIVLRCSVGSRSKYSDEYLAALNDMVGQTFSLSVADLFPSSKLASMVATAPRRALETRNKMERVIQQIIQERRDQIEADMASGDQVTAAAGSKSCSLDVLLRLQKEGGAPMPITNDVIVVLLMWDYETSLRVQKNELLRSNEQSIHNSTDIFAGGTDTSSTTLTWTMAELIRSPRVMAKAQAEVRQAFEGKNTITEDDLAQLSYLKMVIKESLRLHCPAPLLAPRKCRETCTIMGYDVPKGTSVFVNAWAICRDSKYWEDAEEFKPERFENNNIEYKGSNFEFLPFGSGHRICPGINLGLANMEFALANLLYHFDWKLPNGMLHKDLDMREAPGLIAAKHTSLNVCPVTHIAPSCS

SEQ ID NO: 125451 - protein, 512 aa, Oryza sativa
  unsure (1)..(512): unsure at all Xaa locations
  Clone ID: PAT_MRT4530_28093C.1.pep
MGDMVLLATRPGVVCHRHRLPVISCAANTKPSRLNLPPGPSRLPXFGSSVHLVPSSESVHGVMRRLARAHGPVMQLWFGEVPTVVASSPEAAQEVLRSKDLAFADRHLTSATAAFSFGGRDVALAPYGERWRHLRRLLTQELLTAARVRSFRRVREEDWARLVSAAAASGGTAVNLTEMAAKLINDIVLRCSVGSRSKYSDEYLAALHAMVVQSFSLSVADLFPSSKLASMVAMAPRRALANRKKMERIIEQIIQERKDQMETDTGDQAAAAERKSCSLDVLLRLQKEGGGPMPITNDVIIVLLMDMFAAGTDTSSTTLIWTMAELIRSPRVMAKAQAEVRQAFEGKNTITEDDLAQLSYLKMVIKESLRLHCPVPLLAPRKCRETCTIMGYDVPKGTSVFVNVWAICRDSKYWEDAEEFKPERFENNNIEYKGSNFEFLPFGSGHRICPGINLGLANMEFALANLLYHFDWKLPNGMLHNDLDMREAPGLIAAKHTSLNVCPVTHIAPSCS

SEQ ID NO: 125452 - protein, 80 aa, Oryza sativa
  Clone ID: PAT_MRT4530_28094C.1.pep
SASRPSRSPCTPWTSSSSLSAPSPRRARCESSAVRSSSAPHPQPRSRPSGAAALSTSRRRRVGRAWRTRVALSSSFTTDV

SEQ ID NO: 125453 - protein, 60 aa, Oryza sativa
  unsure (1)..(60): unsure at all Xaa locations
  Clone ID: PAT_MRT4530_28095C.1.pep
KFVCVEQIDVMGKVESLEKNFGTKQXLCHSSLVLIFDFLFFAQREYKPANRLENRISEEI

SEQ ID NO: 125454 - protein, 130 aa, Oryza sativa
  Clone ID: PAT_MRT4530_28096C.1.pep
MTTMEDAGGRGMTAFALRLAKRLAGGGGSSGNNNKKNIVFSPVSLYAVLALAVAGARGTTLDELLALHGAASLDDLTESIHRVMEVDLADESASGEPPISYACSAWHDETLMLSYSSMVTLSPCCRHRWW

SEQ ID NO: 125455 - protein, 50 aa, Oryza sativa
  Clone ID: PAT_MRT4530_28097C.1.pep
MDPQQPEPVSYLCGDCGAENTLKPGDVIQCRECGYRILYKKRTRRSMFNP

SEQ ID NO: 125456 - protein, 95 aa, Oryza sativa
  Clone ID: PAT_MRT4530_28098C.1.pep
CMPIFWSGVRSSTVSLPGRFTAPHCRLRLGMVKSSRKNLVRYDRSLNHSTNIMSAGDEHHGEQLGAEEVDAPHNRPLPVHRQPVRRHYCRRRAAP

SEQ ID NO: 125457 - protein, 68 aa, Oryza sativa
  Clone ID: PAT_MRT4530_28099C.1.pep
HLAVDLNWCLSEGRISHSKFLVIPMGFLIWGISRGNFWFRVEGKLLRRETGSLRRHLGGSFNLLKKVL

SEQ ID NO: 125458 - protein, 143 aa, Oryza sativa
  unsure (1)..(143): unsure at all Xaa locations
  Clone ID: PAT_MRT4530_2809C.1.pep
PCSWRRNAATLSPPPPPPXPPPPPRPRRRPAPPRXPSSPPRRPPPSPRRGPPARSSPRPAAASTPTAPPARRXSSSSPPSPRPPPPSGSAXAAPPRCPAPAARTRTWRSRRRGRRAASSPPPRSRRTPARRGRRPAEKEKEKP

SEQ ID NO: 125459 - protein, 60 aa, Oryza sativa
  unsure (1)..(60): unsure at all Xaa locations
  Clone ID: PAT_MRT4530_280C.1.pep
NXIIXRPGRFTPSHXAGSRXPXPXGPAILXCXRQIGLTMMSYTNXXXXAESARSGHPELL

SEQ ID NO: 125460 - protein, 142 aa, Oryza sativa
  Clone ID: PAT_MRT4530_28100C.1.pep
MENDEKENGEEKFMACDANTDAYKNNVGPTDMWGSHWALKGPSGGRGEREGGRCLRDGAVMTRPRGRCAGRQWKKVTENGGSIDLVTMKSNVSKQGFMSPLTQIMSQPAPRFGRCILDSARSMGKRGDEVAAKEQQGWKLGA

SEQ ID NO: 125461 - protein, 54 aa, Oryza sativa
  Clone ID: PAT_MRT4530_28101C.1.pep
RAEVIPWPRRQECGTHDRKPLDLIFFFVLSAQLNSARSQRWRAGKVRVRFGQRE

SEQ ID NO: 125462 - protein, 61 aa, Oryza sativa
  Clone ID: PAT_MRT4530_28102C.1.pep
NNLKVCFQKIDGFEYTFRPSKAPSIVVYSVPAIKPWVKCSCKYPYMLYFVVKKLSAALCDL

SEQ ID NO: 125463 - protein, 133 aa, Oryza sativa
  Clone ID: PAT_MRT4530_28103C.1.pep
MGISNALQWWEEWQLRVLLLGSLAFQYFLFITASRHKFPIRSYLRSFIWFVYLGSDALAIYALATLFNRHKKQDVGHTHNNDVLEILWAPILLIHLGGQDSITAYNIEDNELWMRHVLTALSQITVAIYVGIL

SEQ ID NO: 125464 - protein, 1419 aa, Oryza sativa
  Clone ID: PAT_MRT4530_28104C.1.pep
MSIRSNARRLSPVNRKSLKTGQKLYTQLITRAKNSCLCPDDNFLFDVIHQVLYRPETLVENSPVSFLPNQPAYQYEEAVKGRSVAHPATCSVLQPPVRQSISFISWNCEERDQESLGGKCKVNWQQVCSPTIHGGLGIPCLEKFSQSLRLRWLWYEWTSPEKPWIGTPPPCDDTDRALFAAATKIGDQPLKYLAPNLFKHSKRKNRSVLEAITNDAWIEDIRGGVTIQLLQEYICVWEVLHNAGEVIHEGAEDTILWRWSASGLYTAKSAYVMQFMGKTFSDSTELVWETWAPGKHKFFAWLLAQNRIWTADHLQCRGWPNNYFCQLCFRNLETVQHLFMECPFTQQVWRDIGRKFRPQRFLHVTTDNTLLNWWREQTDEAEKLQQKGLRSAVLTTLWEIWMERNDRIFRGKESTPSALASKIIDELRLWEMSNKPHIHDKDAKSEFATFLNQLAHTPLKTDPSSCIADVSMDITGCSLSANVTDSCWILDSGASFHMTPDISQLQSCSLTKASSVQTADGTILPVSLQGTLQTKEYTIPDVFYVPNLSMKLISVGQLTDMKCHVVFDEAACYVLDRATGNLVGAGHRLNGPRGLYVLDHLHLPTSTSSGFPGNSASATSITSNSSVYSSLSASFPQWHHRLGHLCGSRLSTLVQQGVLGNVSIETDFVCKGCKLGKQVQLPYRSSMSRSTSPFALVHSDVWGPAPFHSKGGHRYYVIFVDDFSRYTWIYFMKHRSELYQVYKSFASMVHTQFSTSIKNFRSDSGGEYLSNAFRQLLSDHGTLPQLSCPGAHAQNGVAERKHRHIIETARTLLIASHVPPHFWAEAVSTSVYLINLQPSSILQGRSAGDQSPSRLTKSSELSIDDSNELPVDDMPIPSSPSSPAARYGLRDRSKIMPHPRYSCAIADGVQEPRTYQEAVTINEWKLAMNEELSALEHTGTWDVVPLPHHAVPITCKWVFKVKTRSNGSIERYKARLVARGFQQEYGRDYDETFAPVAHITTVRTLIAVAATRQWEISQMDVKNAFLHGDLQEEVYMQPPPGLTCPSGHVLRLRRALYGLKQSPRAWFERFSSVVLKAGFVASEHDSALFIHTSSRGRTILLLYVDDMIITGDDASHVAFVKQRLSEQFMMTDLGPLKYFLGIEVASTPNGFHLSQHRYTLDLLSRSGLSDDKTAATPMELHLKIRPTDGNPLSDPSRYRHIVGSLVYLAVTRPDISHAVHVLSQFTSAPTSVHYAHLLRVLRYLRGTPSRGIFFSRDSSLELQAYSDSTWASDPVDRCSITGYCIFLGSSLLAWKSKKQTAISRSSAEAELRALATTTAEVIWLRWLLADLGVVLSQPTSLFCDNTSAIQIASNPVKHELSKHIGTDASFTRFHYQHRTICLHYLPSELQVADFFTKPQTRDQHDFLLSKLKAVDPPRV

SEQ ID NO: 125465 - protein, 71 aa, Oryza sativa
  unsure (1)..(71): unsure at all Xaa locations
  Clone ID: PAT_MRT4530_28105C.1.pep
LRRPPLLLRRRRIRVPGRGGVGVGGGKKGEVXGLEGLPWEAAARQWAADRAGGEAPAAAPEPRGWRMAVGG

SEQ ID NO: 125466 - protein, 293 aa, Oryza sativa
  unsure (1)..(293): unsure at all Xaa locations
  Clone ID: PAT_MRT4530_28106C.1.pep
RVDLEAAAAAVGSKPPADDDDDLTTATTVVEKMAAVLSRIRLSWVRIFAVRDLAPNLFKHSKRKNMSVLEAITNDSXIEDIRGGVTIQLLQEYICVWEVLHNAGEVIHEGAEDTILWWWLASGLYTAKSAYVMQFMGKMFSXLLSLYVVWETWALGKHKFFAWLLAQNRIWTADRLQCRGWPNNYFCQLCFRNLETVQHLFMECPFTQXVWRDIANKLIFWIRHCLHVTTDNTLLNWWHEQTDEAEKLQQKGLRSAVLTTLWEIWMERNNRIFREKESTASALASKIIDELHL

SEQ ID NO: 125467 - protein, 265 aa, Oryza sativa
  unsure (1)..(265): unsure at all Xaa locations
  Clone ID: PAT_MRT4530_28107C.1.pep
MGGWKNKLVYQSGRKVLVQSVLNAIPTYLLTVLKPPKGFLNDVDKAQRKFLWAGDQESLGGKCXRWLWYEWTSPEKXWIGTPPPCDDTDRALFAAATKVSVGDGRKAKFWESNWIGDQPLKYLAPNLFKHSKRKNRSVLEAITNDAWIEDIRGGVTIQLLQEYICVWEVLHNAGEVIHEGAEDTILWRWSASGLYTAKSAYVMQFMGKTFSDSAELVWKXWAPGKHKFFAWLLAQNRIWTADRLQCRGWPNNYFCQLCFRNLETV

SEQ ID NO: 125468 - protein, 134 aa, Oryza sativa
  unsure (1)..(134): unsure at all Xaa locations
  Clone ID: PAT_MRT4530_28108C.1.pep
RKRKRRRKGGEEEKRKEGWKRRGGRRKRKKGEGKEKRKERTRRRKGKGKREKEKEGKVRXKEVRKRERRTRNGKERKGDRKRKVKEKEEEKGKEVKXKERRKSKRKEEKEGKWGKKERDKTRHETKQRVKKQRQ

SEQ ID NO: 125469 - protein, 86 aa, Oryza sativa
  Clone ID: PAT_MRT4530_28109C.1.pep
THQEMCKGLLPRPWGGVPLKNGKVGKIKWGFGFHGPTRVKTHPGFGPPQKVALVPHRPEPKSGSVFSFSPQTRKKKKKKKKQKKKR

SEQ ID NO: 125470 - protein, 1857 aa, Oryza sativa
  Clone ID: PAT_MRT4530_2810C.1.pep
MAERAVAHNLSPSASGDDSEQNPRRRARTPPPPSRRSLRREEALEGVERSATSPRAGDGEGRRDGERRLLIYGDGSTPQGALQAAGALLRHPPVVPDPETPTRRWLDDVANLVMTAQQRLGAGGRSSATKATGAATAGSVSSRRRARRAAAVTRRSSAIPMSMPPTQEDVREGPDARLNIERRRNDRRAAHASEGASSSGAPLRFGHGGQPPVSPVGGAGCRAFVASLRNVRWPPRFRPTITEKYDGSVNPAKFLQIYTTGIEAAGGDDRVMANFFPMALKGPARGWLMNLPPASVHSWEDLCQQFTMNFQGTYPRPSEEADLHAVQRGDDESLRSYIQRFCQVRNTIPCIPTHAVIYAFRGGVRHNRMLEKIASKEPQTTAELFQLADRVARKEEAWTWNSSGSGVAASVAPGSAARSGRRDRRRKKRSAHSDDEGHVLAVEGASRATRKGRPASDKKKEAGAPSRERPTGKWCSVHNTSLYDLADCRAVKSLAERTRKWEEERRQERREGKSPAAPAGNRRSEAKQKAPAEDIDDGDDDLGFQEPGATIATVDGGACAHVSHRSLKAMKRELLAAAPTHEAMRRARWSEVALTFDQTDHPPCVARGGQIAMVVSPTVCNVKLGRVLIDGGAALNILSPTAFDAIKAPGMVLRPSQPIIGVTPGHTWPLGHIDLPVTFGGSANFRTERVNFDVADLSLPYNAVLGRPTLVKFMAAVHYAYLQMKMPGPGGPISVHGDLKVALACMEQRADHLAAASKPEGGDERLGTSIPAAPRQRMITCDEVLEDALVSFLRANADVFAWRPADMPGVPREVIEHRLAVRPGARPVRQKVRRQALERQAFIREEVARLLEAGFIREVIHPEWLANPVVVPKANGKLRMCIDYTDLNKACPKDPYPLPRIDQIVDSTAGCDLLCFLNAYSGYHQIRMAREDEEKTAFITPIGTYCYTTMPFGLKNAGPTFQRTTRISLGSQIGRNVEAYVDDLVVKTRNQETLLSDLAETFESLRSARIKLNPDKCVFGVLAGKLLGFLVSARGIEANPEKIRAIERMRPPSKLRDVQCVTGCMAALSRFISRLGEKALPLFKLLKRSGPFTWTEEAERALTQLKAYLSSPPVLVAPEPDEPLLLYLAATPQVVSAALVVERDEDNPYSAHPHPASTRPGREQGGEAPESNGGPRPPTAGAGPPPACPTVPGAPDPQDGPEATAGRPRLSPSDPEVVGTEAECAPRGLLDEERPRNAAPSEEDRPRRKAHRVTVVTSYPLGEILHNREGTGRVVKWAIELSEFDLHFEPRHAIKSQALADFVAEWTPAPEPIFVPEAGSGPSQLPHTAYWVMQFDGSLSLQGAGAGVTLTSPSGDVLKYLVRLDFRATNNMAEYEGLLAGLRVAAGLGIRRLLVLGDSQLVVNQVSKEYQCSDPQMDAYVRHVRRMERHFDGIELRHVPRRDNTVADELSRLASSRAQTPPGAFEERLAQPSARPDPLGETDAPERPPRPVGVQASGPEGSAPSSLRLIAWIAEIQAYLTDKTLPEDREGSERVQRISKRYVLVEGTLYRRAANGVLLKCIPREQGVELLADIHEGECGAHSASRTLVGKAFRQGFYWPTALNDAVDLVRRCRACQFHAKQTHQPAQALQTIPLSWPFTVWGLDILGPFRRAPGGFEYLYVAIDKFTKWPEAYPVIKIDKHSALKFIRGITAQFGVPNRIITDNGTQFTSELFGDYCEDMGIKLCFASPTHPKSNGQVERANAEILKGLKTKTFNILKKHGDSWIEELPAVLWANRTTPSRATGETPFFLVYGAEAVLPSELTLRSPRATMYCEADQDQLRRADLDYLEERRRRAALRAARYQQSLRRYHQRHVRA

SEQ ID NO: 125471 - protein, 88 aa, Oryza sativa
  unsure (1)..(88): unsure at all Xaa locations
  Clone ID: PAT_MRT4530_28110C.1.pep
LVAPXHSQAQLNSTRIRKRDRXIRWRRRREEGRGRRWCTWRTGGQAERYEEMVEFMEXVVTAAAAGRGWELTVEEXNXLSWRXKTLSA

SEQ ID NO: 125472 - protein, 352 aa, Oryza sativa
  unsure (1)..(352): unsure at all Xaa locations
  Clone ID: PAT_MRT4530_28111C.1.pep
MKMAHMVTNCSFSPSPAVKTYSKSPGYCCNVTQFQSSKCSNLVLKSCTATRPNRPFVARASAAVQGQTQTPLTGSQQASGHSSSKPKKVMVIGGDGYCGWATALHLSNKGYEVAILDNLVRRLFDHQLGLDSLTPIASIQNRIRRWKALTGKTIQLYVGDICDFDFLSEAFKSFEPDSAVHFGEQRSAPYSMIDRSRAVFTQHNNVIGTLNVLFAIKEFSEECHLVKLGTMGEYGTPNIDIEEGFITITHNGRTDTLPYPKQASSFYHLSKVHDSHNIAFTCKAWGIRATDLNQGVVYGVRTDETAMHEELSNRFDYDXAAFGXALXRFCXQXVVGHPLTVYGKGXQTRGYL

SEQ ID NO: 125473 - protein, 64 aa, Oryza sativa
  Clone ID: PAT_MRT4530_28112C.1.pep
LIGTYINHTDMGGYYCGLIMDCDYPQQSVPMLREFTRRTRRTCMSRWSQTSRLRSTGQEGLTLR

SEQ ID NO: 125474 - protein, 118 aa, Oryza sativa
  unsure (1)..(118): unsure at all Xaa locations
  Clone ID: PAT_MRT4530_28113C.1.pep
XXGKQXGVEKTQCNKAXXQSXGNGXQADSXPTPGGISAMATKWXEPFXHSLLGGPWPQVKKPFSLGNGNFWEVQKGGKXSPLXPCGKKFXPGKXPXGKGTQFPSFXLSKGGVKPTGKX

SEQ ID NO: 125475 - protein, 331 aa, Oryza sativa
  Clone ID: PAT_MRT4530_28114C.1.pep
MGVWDSILRGGGGGGGRRFIKRKDSDAGEAGRALEELRGSLYNEFHTSEGAKRQQQRFCGPSVALTFNFFVAVGIIMANKMVMGAVGFNFPVALSLIHYIAAWVLMAVLKAFYLLPIAPPSKSTPFSSLFALGAVMSFSTGLANISLKHNSVGFYQMAKIAVTPTIVAAEFILFKKKVSLRKVITLAVVSCGVAVATVTDLEFNLFGACVAVAWIIPSAVNKILWSNLQQSGNWTALAATSALAHVVLGQFKTIVIMLSSYLVFNSDPGFTSLCGAIIALGGMSVYTYLGLKESASGGKRAPSTSRQNSHLLKSKVIVDGEKPETRPIDSV

SEQ ID NO: 125476 - protein, 613 aa, Oryza sativa
  Clone ID: PAT_MRT4530_28115C.1.pep
MWVCNATAALPPDCDLRQLARIEALVLLCSVVLALLVFLGSSRRYSGSAMVRFILWGAFAVSYPLAAYTIGLMQSTPMHHELFLVWSCFFLFVLASSDTITAYSLADVKSPGIILLNRGLQVIYVTVLLQYYSNVLSAKLKLFVFGVWLVSLGKIALSALSYRQALQSDGLQRDNQLITDYMINQTESSHGGAEDPNTNTNTNPDPMLLRRRCGNFPLAESGLPKTRNLVLNRLLEQGSTRAFQVIEVELGFLYDLFYTRYPFVCHAVTTTLPHLAMCAIMVTVGVLTLLSPALRHYHPTHHRSIMLYDINLDVVLTMAIIVLVIVLEAYQFVAVLFSDWQKVKVLCRYVLWPSSLQNNPFIEVLLGVLCYCGSGKYWTRKMRQYSIIRHAILGHPVKDWLSGVTRGWLDNLMFNSGKTRSAKLSGDLQNALASPLKKSGGVLSDGAAGGGGDQQRRHREIAMSLSRYCAYLVSSAPDLLPDHQYTTQTIAEAVLLDLRRCLHGCTSNEAAVLKLQDTAKLAIRTPSTSAPDSIHVLGVRLAEDLMKIGEAKRWEVLADFWAELMLFVTPADNAMAHVEHLTMGGELITHLWALLTHAGIVQRPSHATQSQSV

SEQ ID NO: 125477 - protein, 187 aa, Oryza sativa
  Clone ID: PAT_MRT4530_28116C.1.pep
MDLETENHLASLLLEEARRLQLEADREGVHAYLRKPNVRHRLNSRFLTATVRGVQQANRVVEVNKMWRAREKELELESKTKRRSINRGDSRGKKRRSDVRNQSSSPRMEQDSTSYNSSYLDLEGALGDDEIEMFLHSRVKRGRGAVGSRMDETGPYLNASSRSQDNVPSLDIRVEEKWELQIVDTKS

SEQ ID NO: 125478 - protein, 243 aa, Oryza sativa
  Clone ID: PAT_MRT4530_28117C.1.pep
MDEVAAAAHGADGRVGEDGRPHARALHFFPSLLCFSRWRGGGGERSVVLVVGIVAVQPRPPANAEQARATGDGGGEFGRSAVEAEAERVLGSPQPRVLSSYAHPREDVPSPSTAIAVAASKHGRRFRHSCSPQARPPVAARAVLKLGRHRGSFEMQPPRSSRRFNRLLRHASRVKPRGPLEQPPQRCRPRPRRREYRLQKVQVRCSVTRVTTGCAPRRPSTSPRRVPDVAPPGCSGRTPCPGH

SEQ ID NO: 125479 - protein, 163 aa, Oryza sativa
  unsure (1)..(163): unsure at all Xaa locations
  Clone ID: PAT_MRT4530_28118C.1.pep
GRRLRRRRGAARAVAAGSWCEGGSCGIGGAELRNRQLRRQRRAARAAAVAWSCEGGGCGGGVEPRGRWRRXWCEGGDAANHELVASLRSGRPRRSHTRGEESSLCARAATAWSRTRSSSSSTSAAASLSLSSSSPSSSSSTGELEHGEDGVMELLEPAGEVDL

SEQ ID NO: 125480 - protein, 200 aa, Oryza sativa
  Clone ID: PAT_MRT4530_28119C.1.pep
MDTGEAFLGWEPGIPSKGMEGPLPSQPLSTAVAFATRAVPKLGRQSPLARSSSSADTVAALRCSHHARAADSTSTHHCRLVQPLREHKHAESSLAGPSNNRLSAAVRDLVVGNTGCRKSRLFGKNTVSGTWPVDESKGASRTKVRAGESPGKETLEAAPQARKFLGSARRDYSLFVNIYFIFTNMSNTGDKEKETPINTN

SEQ ID NO: 125481 - protein, 138 aa, Oryza sativa
  unsure (1)..(138): unsure at all Xaa locations
  Clone ID: PAT_MRT4530_2811C.1.pep
MILNQHNLIGKSKHNNRRKSNSRKKXKGKGKAPQPRDNSNKHSNICGSNYHVAXDCRIPKHLVLLYQKYFKEKKSSXPRYEAHFNLTNEARPKVGSSQHAPIXPENNLDLLSEDIASLSAMDDMLIVYCSTDPLGDLL

SEQ ID NO: 125482 - protein, 81 aa, Oryza sativa
  unsure (1)..(81): unsure at all Xaa locations
  Clone ID: PAT_MRT4530_28120C.1.pep
RRRGVEDPNWRSDPCVYLLPPWCXRPLCLCDDRCQLMASRNLLRMCLGAPAGAGRPLHCVLGWPQRRMRGSDFLVFRTPSP

SEQ ID NO: 125483 - protein, 105 aa, Oryza sativa
  Clone ID: PAT_MRT4530_28121C.1.pep
KAIPAPLLPPLPTPPASVMLATPFTPRGSDRQVVQALHGAPTILMSRCQVVLAKKLEVDADDVPPLPPQPTNNALQQYTEIFDNELSIDHLLDISLPGPAGQLAR

SEQ ID NO: 125484 - protein, 431 aa, Oryza sativa
  Clone ID: PAT_MRT4530_28122C.1.pep
MAMPLRDPTDRAAMSAPLLPRSAFVSSASFSSFSSVASFSSTSSSFSDPAVPSDVVEALPMSRDSFKALAVLRDHQGSVSSLSLCGEFLLSASTGADIVAWQQPDLRRFARFGHGEGSVKALAAAGGRVFSAHQDGRVRVWRVSRRSENAFKLVAALPTTRDYLGKIFRHASYVQTRRNHRRLWIEHADSISCLAVHDGVVYSGSWDKTLKVWRISDLKCLESIHAHDDAINAVAADSGTIYSASADGHVKAWGKGKAAHFLQGILISRDGVSWNALVASADAGARRVYAAGSDGHVVGWDRVGGRGSRWSLSCDVKAHDMAVLCLCVAGDLVFTGSADKTIGLWRWQTSGDGDGAAAAALARVGVIRGHEGPVKCIQASWCRVSNGCMVYSGGLDKSIRVWWVPNGWKANEQKQQQENDTKDHKNCVFLR

SEQ ID NO: 125485 - protein, 85 aa, Oryza sativa
  Clone ID: PAT_MRT4530_28123C.1.pep
PGCRNSARGLLPLWVGSSLLLPANLQIILAPSAKEQATATSFPQRPRRLPHRHRRHSSFTNTRQACDAATTENAAPRGEGRDEAR

SEQ ID NO: 125486 - protein, 53 aa, Oryza sativa
  Clone ID: PAT_MRT4530_28124C.1.pep
SVKLFCFSNRPLYYTHTYILFCCMYIVSTPDGTLRAHARCMRPLTYRATTGRL

SEQ ID NO: 125487 - protein, 150 aa, Oryza sativa
  Clone ID: PAT_MRT4530_28125C.1.pep
MAAARGLDADLTKDTQINAKRQPSGCATLGSGSDKGGSRLQELVEVTVDLSARRGGAASEELARAMVVDQVEVDVAQRAQQCLPEVEYWSSSPRPSTTARHALHTPRDVARLRARRRPRMSASGQARRRTAPASLSPHRCHPRHAPLMQP

SEQ ID NO: 125488 - protein, 99 aa, Oryza sativa
  Clone ID: PAT_MRT4530_28126C.1.pep
MRQAKCRQDYMAIVKQSRQLIEKLDAKNEPKKRQKRSKNSEKEKAVAPSSSKKMDREELEKTIRGFLKELDSTEAAPMRTTGCTSAMRPSTIDQDFNTQ

SEQ ID NO: 125489 - protein, 107 aa, Oryza sativa
  Clone ID: PAT_MRT4530_28127C.1.pep
MGPYIFAVGGGRSTHGLSCFLFEESTGGAICLLFHLHTPPEEWNTAVLVAPIVLTVDAPKVRSGAGAGRNGRDKLHPLVWEEVGSAWDEREEEVLRHNKHARQCHLV

SEQ ID NO: 125490 - protein, 212 aa, Oryza sativa
  Clone ID: PAT_MRT4530_28128C.1.pep
MNTFTRKPLQSAVHVQFLRSSGRAFHGLIDQLCSKCPKHDDGATLQSETTSSKFMCLYKFFRTSSEGDTAAVDNVLRNDGNTEVVAIQSKENGRNSNNILEDGEKSVLSSDHSKKLSAHHRLKIWITSGHSGIIGRYGKKLELNAANVPKQFPSEHVNTVWPDWLMKVAPEAVQGWFPRRAESFEKLGKIGEGTYSSVYKARDLKTGKIVAL

SEQ ID NO: 125491 - protein, 386 aa, Oryza sativa
  Clone ID: PAT_MRT4530_28129C.1.pep
MEVAAADYAGGVRVKKEAGGCGGSGDMFLVDDLLDLPCDEEEEETGLCGAYGGGGAGLGAGVVGGGGDDRAAGNASADSSTVTAVDSCSNSFSGLADGDFSGGLCEPYEQLAELEWVSTYMGEETLPTEDLRKLQLISGIPAAPRAPPALAVSAVQLPAGGAGALPTEAPVPGKARSKRSRVAPCSWSSRLMVLPPPPASPPSPASAVISPSESGTAAPAFPAKKAAKSAKKKDGPSPAPAPNAAAQAAAEGRRCLHCETDKTPQWRTGPMGPKTLCNACGVRYKSGRLVPEYRPAASPTFVVSKHSNSHRKVVELRRQKEMQLLHHHQQPPPHVGAGGGGAAGGLLHVTSPLLFDGPTSSAPLFAGADEFLIHNRISPDYRRQAT

SEQ ID NO: 125492 - protein, 94 aa, Oryza sativa
  Clone ID: PAT_MRT4530_2812C.1.pep
MKPGGSSGRLHALRFESQRFRLLTIVVGCFLISLTFLLSSRPDATVFSTLSPRESLEDARMPAMKMLHRSSSGGLIRDFHVDILPQQGERHAHM

SEQ ID NO: 125493 - protein, 182 aa, Oryza sativa
  unsure (1)..(182): unsure at all Xaa locations
  Clone ID: PAT_MRT4530_28130C.1.pep
IACGGRWGGQGGGAELGTAVGHXVSVLRGSSDGRRRRQIWSPRLAGVIGDGLGRRRRRSADLAGRWLAAAMVADVAATKLATTVADCGACRDAGPHQEPHHHEGGAAPSDGGGWTVVVGQGCPWWWRWRXCRRWYLXRRWLKAIIRLTVRRRRRRYVEAGKGSSGREEGVRVRARRQRREQL

SEQ ID NO: 125494 - protein, 201 aa, Oryza sativa
  unsure (1)..(201): unsure at all Xaa locations
  Clone ID: PAT_MRT4530_28131C.1.pep
MFLRPWRRGRHGDGAELGVAVGRXVSALRGSSDGRRRRQIWSPRLAGVTGDGLGRRRRRSTDLAGGWLAAAMVAGVAAMKLATTAADCGACRDAGPRQEPRCHEGGVAPSDGGGXTVVAGRGCPWRWRWRWWLTVAAGDGGRCGSGGGGCRRWYLWRRWLKAIIRLTVHRRRRRYVEAGKGSGGGEGGVQVRARRRRREQL

SEQ ID NO: 125495 - protein, 227 aa, Oryza sativa
  Clone ID: PAT_MRT4530_28132C.1.pep
VVFGLKLFGADLMAIPGLYRFVQETIKKQVASMYLWPKTLEVPIMDPSKASKKPVGILLVKVLRAQNLRKKDLLGKSDPYVKLKMSDDKLPSKKTTVKRSNLNPEWNEDFKFVVTDPETQALEINVFDWEQVGKHEKMGMNNILLKELPADETKVMTVNLLKTMDPNDVQNEKSRGQLTLEVTYKPFKEEDMEKEGIDNADVVEKAPDGTPAGGGLLYVVVMKLKIL

SEQ ID NO: 125496 - protein, 48 aa, Oryza sativa
  Clone ID: PAT_MRT4530_28133C.1.pep
FLYKTRRIKRSPHLFVRSEKKNIMIQENFVTCLHVKHQEAAAVISAPL

SEQ ID NO: 125497 - protein, 190 aa, Oryza sativa
  Clone ID: PAT_MRT4530_28134C.1.pep
MAIMAARALLVVAMAAAVLGTALGATYTVGAPSGSWDLRTNYDQWVSNINFRAGDQIVFKYSPAAHDVVEVNKADYDSCSSSSPIATFNSGDDTIPLTATGTRYFICGFNGHCTGGMKVAVKVEAATGSNPAPSPMTPRPRTPTAMAPNAMPPTAGGRPVPPSNSASQPAGVASLVGLSLGAIVVGLMAF

SEQ ID NO: 125498 - protein, 83 aa, Oryza sativa
  unsure (1)..(83): unsure at all Xaa locations
  Clone ID: PAT_MRT4530_28135C.1.pep
PTLSPTRPGKLKFTPDNSFKIPTINLTTSSQLLIHYNPLSIXIIDFHPESINLCFSVGIVYLTLLLFMIYYPMTIRSIMTTYG

SEQ ID NO: 125499 - protein, 62 aa, Oryza sativa
  Clone ID: PAT_MRT4530_28136C.1.pep
TCRLALVSSCTPSAARLTPGSRTCPPWHDKKHFSIHRSSPFATSIPPAGRGLGRRAMQDGLA

SEQ ID NO: 125500 - protein, 62 aa, Oryza sativa
  Clone ID: PAT_MRT4530_28137C.1.pep
AYVRVKPSAIRCATKAQLPITSTRHIHTLWQSFKTVVRMIEAVHMSLLPLQSYKLPLNCSCR

SEQ ID NO: 125501 - protein, 395 aa, Oryza sativa
  Clone ID: PAT_MRT4530_28138C.1.pep
MGGAAAAAAVALLAATRRRPAAGPLAFLLPRAARAGLHEAAAPAAEEEKGRTRRRRRRRSSSSRLLGPDIPDTWDSPPRAAARPSPPSGAGVDYDSTATIIDGKSVAEDIRFQIAEEVRQMKNAVGHVPGLAVVLVGDRRDSESYVRYKIKGCEEVGIKSLLAELPGNCTEDVVVDSVSRFNEDPSVHGILVQLPLPQHMDEERILSAISLEKDVDGFHPLNVGNLALRSRKPLFVPCAAKACLELLLQSGIELMGKHVTVIGRSKVVGLPTSLLLQRHHATVSIIHAFTTNPEEITRQSDIVISAAGVANLVRGSWLKKGAVVIDVGTNPIEDPTSDYGYRLTGDVCFEEAVKLASAITPVPGGVGPVTIAMLLANTLDSAKLAYGLATESPEL

SEQ ID NO: 125502 - protein, 114 aa, Oryza sativa
  Clone ID: PAT_MRT4530_28139C.1.pep
VVRRGILFGMTRGTRGSGGSPDAGRTDPSSSSPSERPPGAHKEMARKALRVVLRPGDDSERDTAGLHEQCTQRQRHPVHPPSIPAPATGAAHSCPDTTECPSMAISMHRLKFAS

SEQ ID NO: 125503 - protein, 739 aa, Oryza sativa
  Clone ID: PAT_MRT4530_2813C.1.pep
MAWSMPPLALFAAVLALQQAIAAAAAAGDCPTTCGDVAVPFPFGIGAGCYHLPGFNLTCDRSSDPPRLLLGDAAAFQVLNVSIVNATVRAARVGGINITYGGGNTSSADEGRGAWRGLGDGGPFALSEDRNELVVVWGCDVVALLTDGGGSGNSSNVTISGCASFCPGTDAGGQAIAAPAGSTMSLTEDRRCTGVGCCQMPISVGRDSYQVRLRRLNPSPPQPPPPQGAGDPTVVLIAEQGWVAEASRSTRGYPLPVTFDETAVPVLLGWMIASTRVGADGEVPVNSTCPADAARSACKSSHSSCRNVSSSARAGYVCDCDAGFHGNPYLATGCQGLSIGVGVSSAASLILIVIMAIFIIRKQKRRRAKKIRQKYFKQNRGQLLQQLVAQRADIAERMIIPLGELKKATNNFDRARELGGGGHGTVYKGILSDLHVVAIKKSKIAVQREIDEFINEVAILSQINHRNVVKLFGCCLETEVPLLVYEFVSNGTLYSHLHVSGPRSLPWSDRLRIATETAKAIAYLHSSVSIPIIHRDIKSTNILLDDTLTSKVSDFGASRCIPVDQTGVTTKVQGTLGYMDPAYYYTQRLTEKSDVYSFGVILVELLTRKKPFSHLTPEGEGLVAHFVTSFTEGNLVGVLDLQIMEEADMKVVEVVATLAVTCVNLRGEDRPTMRQVEMALEGIQASRENVSGNLSAEKLGESNNVARDFMPSQEGRSMTEGTRQYSLEEEFLLSSRYPR

SEQ ID NO: 125504 - protein, 91 aa, Oryza sativa
  Clone ID: PAT_MRT4530_28140C.1.pep
TYHLHKPKFQTQFAYVMFTILTRKVSRNSKFIGEEYDLPPRRWLQAYNDVVRSSPTKERRPVEVKRIIEYAYKRDLIATTFKPFEITHILY

SEQ ID NO: 125505 - protein, 343 aa, Oryza sativa
  Clone ID: PAT_MRT4530_28141C.1.pep
MPGAATTAVVDSRRGTQHAEGPATILAIGTANPTNIVPQDEFTDYYFGVTKSEHLTELKDKMKRICLKSGIEKRYIHLDEEIICAHPNIIDKQQPSLETRVEIAATEVPKLAESAARKAIAEWGRPATDITHLIFSTYSALSELTLVCFSTPNESKIVGHGLFGDGAGAIIVGAGSLADGERPLFKMVAASQTTIPGTGHALGMQATDSGIDFHLSIQVPTLIKDNIQQTLLDTFRSVGNNNPNWNDLFWAVHPGGRAILDNIEGKLQLQPWKLAASRQVLHDYGNMSGATIAFVLDELRRRREKEEHELQQHEWGVMLAFGPGITIEAIVMRNPQLSGLKEN

SEQ ID NO: 125506 - protein, 64 aa, Oryza sativa
  Clone ID: PAT_MRT4530_28142C.1.pep
HMPSSLPLHHQPTHHHCSPPTSFIHHHRNSKLPHIPTGSHACPPPSPMHPKSKQLHCQSYSSPS

SEQ ID NO: 125507 - protein, 574 aa, Oryza sativa
  Clone ID: PAT_MRT4530_28143C.1.pep
MDPLDTLPVRFHYNGEFVLHRRDKSYCGGSEAMSYLERDKVSLPEIIGHLRDHTKVMERTMLHWLFPGKDLNSGLRVLVDDRVCSYMSDCIVEGGVAEVYVVEPIVVDLSEDEEDSDYEVEMDEGAETDSEGEDDSGDDVEVFKDKYVQEQAGKGKIKEGAERAVVEGGDAAERVVVEGGEQADKRMEEEYHTETDSDYMPGDESPSDDEEEAANIHKEYKKVKKKIKTGFILGIDGAGLEGSQSNPNVHADQGKSGNETPYEESDSKRSIDELESDGEVTTRSSKFPRYKKKQGVPVFELGMKFSSKKLFRKAVTAYALSERKVINFIKSDPRRVRAKCDWPSCPWVCLLSKTTRRDNKLVTSRRIAEKYEKFILSNPSWNLAHMKATVQEEMFADASFSKLKRAKKLVMLKAMDARKGQYQKLYNYQQELLRSNPGSTVVITTWSFQTLHRVLCRAKKRKRLAGATTSAVSLTNTTSATKQKGQQSNIVSMNAKAKLATQAGGSATVNLQAIVPYSKGSASASIQVTSGKACVSVSAQEPAKKTKIGGPPPPKKAKTPGSILIQPPWESDKL

SEQ ID NO: 125508 - protein, 47 aa, Oryza sativa
  Clone ID: PAT_MRT4530_28144C.1.pep
MALGTTVGSGDGVWWWCTHPSKPRRRLRGGDEEEKAEEVVCGEDAVE

SEQ ID NO: 125509 - protein, 187 aa, Oryza sativa
  Clone ID: PAT_MRT4530_28145C.1.pep
LFVATARRYGVRVALRDGACSEDRAAHGKEVRAPGDAARTGLLGSWCRYRPPAGSGRSGKWRCGRRLEVGVLEPRRGDSGEVRRAGGKDETLDDDCAGGGGGIAPPSEGRTTAAPAKGGCAVARRKRSAEARRSGVAVSQSSVWEDVRSGVRNARRRHPRMAPRRCYRADGAAAEIACLVPNSCSPG

SEQ ID NO: 125510 - protein, 89 aa, Oryza sativa
  Clone ID: PAT_MRT4530_28146C.1.pep
ASLRGHGMVFDGVYVVSDLTRLFTELNFGRGDWVISGMAQPMLATFLVRCRNTDGEDPVAASMLLPPPVMERFAKEIAGLMTTSSSSRL

SEQ ID NO: 125511 - protein, 107 aa, Oryza sativa
  Clone ID: PAT_MRT4530_28147C.1.pep
MSWHRAGVLLLGAQSCLPVPGVPAVGGVGSVLLSMARMGWKLCHVFRLYTVVLPKFPKFERELDDKSMENIQRDMCYFIHYECAHQLGRFFDKDGVLDLPENESLSN

SEQ ID NO: 125512 - protein, 163 aa, Oryza sativa
  unsure (1)..(163): unsure at all Xaa locations
  Clone ID: PAT_MRT4530_28148C.1.pep
WPRGAEEGGDDDSXKHQRGGPGGWGGTVAATPLDXRRERACDGHRAKRRAGRGRGCGCDAEDGDSTAYRRTGEEGEAAGDGWRRPAAXRERTTAGRGGAATGRRGRRLKRENGRRGFHFIGAGREPATEEGGTEAGMAAGGHGRWPGMARLFRAINGAIQGGN

SEQ ID NO: 125513 - protein, 63 aa, Oryza sativa
  Clone ID: PAT_MRT4530_28149C.1.pep
LSSTRARSIHRCLRSCRSSSLSFSLRHHHQFLINGDPGSAAGLSLTIGSVQWSCSWPPHQQQG

SEQ ID NO: 125514 - protein, 177 aa, Oryza sativa
  unsure (1)..(177): unsure at all Xaa locations
  Clone ID: PAT_MRT4530_2814C.1.pep
MEQRDSERSRRRRGTVRVQAAAAAGLWRRRRRQGAVWGGPRELRDGVGEGGLRARARRRRATARGGGKQSNGERKAHCAARGGIWWGAHXEGGAARWSRRRGGAAPRGRGRGRREGEVAPGAPRHASTHAPAPPVLGGGQRRRGRDERQQGGDGCSAAMAQWGRDNERGRWEGLGFL

SEQ ID NO: 125515 - protein, 50 aa, Oryza sativa
  unsure (1)..(50): unsure at all Xaa locations
  Clone ID: PAT_MRT4530_28150C.1.pep
XPHAYNTDHSKRLWXXTYTHTTNGSVTLGDYTTFTTLPSQHYGGWXGTFA

SEQ ID NO: 125516 - protein, 223 aa, Oryza sativa
  Clone ID: PAT_MRT4530_28151C.1.pep
MAENHPGSQVVDEQRPGADMDNEDKEKIVLEKYLKKYKYMHFNEAAAPSPPRGMAGAAAAVEDAGMDEVQKRLMFDDDHPLYRESELIQENYLGVRNAAQRKLLDELGIPAEDVPVDQFTPLGRMLYKAPSDGKWGEHELDYLLFIVRDVKVVPNPDEVADVKYVSREQLKELIRKADAGEEGLKLSPWFRLVVDNFLMGWWDHVEKGTLNEAVDMETIHKLK

SEQ ID NO: 125517 - protein, 43 aa, Oryza sativa
  Clone ID: PAT_MRT4530_28153C.1.pep
LTNRRCNLLLVHNINMVRGSGHHQTLQQSDNMQKLIRENTRDN

SEQ ID NO: 125518 - protein, 90 aa, Oryza sativa
  unsure (1)..(90): unsure at all Xaa locations
  Clone ID: PAT_MRT4530_28154C.1.pep
MAERDRNTRPGVAEGDRRDRRGNAMDGVPDACGDRGSVATRRPVSEGRSRXAWRGTADVQGRXDDEIADGEHEGCDCGICERIQKKDKKD

SEQ ID NO: 125519 - protein, 74 aa, Oryza sativa
  unsure (1)..(74): unsure at all Xaa locations
  Clone ID: PAT_MRT4530_28155C.1.pep
VPTVATVCVFLASKIEDTPCPLQRVIIVAYETMYRKDCNAAHRIYQKEVLEKQKELILVGETLXLSTIRFDFNI

SEQ ID NO: 125520 - protein, 139 aa, Oryza sativa
  unsure (1)..(139): unsure at all Xaa locations
  Clone ID: PAT_MRT4530_28156C.1.pep
HQRYLTRCCPEHFLHAIAALVFTVRNLVVXALHVRRAAPCSSTSPFRHWPSCRHGSTIAACVGHAVHGVTPPISPIAFGHARPRIPVTFRHCRSDREXGRRLRNVLVVAINLIATTDDLLSMPDPHLVFPPPHVFLIQF

SEQ ID NO: 125521 - protein, 63 aa, Oryza sativa
  Clone ID: PAT_MRT4530_28157C.1.pep
HAKVRKLKKLLTYTSKEQSILIQVRLPSHCCSQQFQKVNFCKSVARSLTSVMTASSQSSFACT

SEQ ID NO: 125522 - protein, 1532 aa, Oryza sativa
  Clone ID: PAT_MRT4530_28158C.1.pep
MSTNQIHDIMKRVYNMHGGNIDNLPKAPNNVQHPQPRDRSMDTGIIVARWVVGKALNPVLDGLVEAWAASQKLGPNVDALKMELLYARAMLNNVRGREIHNTDLNELLQKLRDLAYNADDVLDELDYFRIQDELDDTSEAAAEHAKGCVSDLFLNAHHTAKAAGKLLGFSSSCSSCATNNGPGDSITAACCGSPHNTIHAIGKRLCFSTSLVDDCDHDYGCVHDERDHVKGKSTPKLKFDRVGLSKKMKIIVEQLQPVCAKVTAILNLELMGSHLSIESSTAKSRPITAPTSIEPTLYGRDAVMKRIIDSITQGTCCEEYLTVLPIIGPGGIGKTTLIQHIYNSQQVQNHFQIMVWTCVSQSFSVDKLIEEIKEKLPSVEGEKKGSAEELIVQRLKSKRFLFILDDIWKCESDDWKRLLVPLRKGQTKGNIIIVTTRFLVVTETVKTSDNKIQLEGIDDEAFWELFLAYVFGPEKSKNDKDLLCIGKDIVKKLKGSPLAAKTVGKLLSNHLDRVHWMRVLDSKEWELQAGDHDIMPALKLSYDYLPFHLQQCFSYCALFPEDYKFNNKELIRFWIGLDILHSESQNKAFEDIALSNIDSLVSHGFFKREETDGHPCYIIHDLLHNLALKVASLECVSLHSSNVKSVEIRPSIRHLSIITDGANDTDGITDENFKSELIKLKKRLKVENVQTLMIFGEVDKSFIGCFHDLFKEASALRVLYLPKMPFAVGSILDEFTTLVHLRYLRLGTTIGNNFHLPINLSRFYHLRILDLEKWDNCFQLPGDISNLAKLHNFLVPGYPIHSNISNVGKLQFLQELKGFQVNRKDVGFELKQLGYLMELRELRIDNLEKVHTKEEAAEAKLLSKTRLRKLELNWKQGRTSTNAFNEDQILEKLQPHSSLQELSIHGHGGSSCPKWLGTELSVKFLETFRLKNVVWNILPPLGEVFLVGGPGEESIGQKTSQNFRSLKRLELVKLPNLRKWVAKEIFPTFFSVLEVLIVRKCNELAELPFSYHTYCTSEEDVKATCFPRLRELEIHNCPKIVSLPPIPYTQTLCSVNITDVGTGLESLVYSSKSSKLEIKGNKDLKVLDDNVLASRNLHKLQNLTIEGFPPLEERHLQMLTSLKRFSLFSSSIAFNPTVERSDVEWRLSIENLMIQDWNGSGKELTQLLFHLPKLSLLSLGGCRKKTLLSVALTQQQTSAQVESTQVTASNHRQQQKAEDLDLLEEEEVTQLDVDGEDEDDDRLLLTNSLEQLWIVNYKELILVSHPLPIGHHNKEEEGTGGGWGLQALCSLRQLGITGCPLLLSAYEAPACLFPSSLQYLQITGPMEGVQMLDLSNLTSLTKLFIEDCGEYLRKGLLPLLAQGQLSNLIVYKTYGLFAGVLDSILRGAQEEQEQLHLLEHSSKLRVLETDDLAGILVKPICRLLSSSLTNLTLQGNSEVERFTNEQEEALQLLTFLQDLKFIHYDKLRCLPAGLHRLTNLKRLMIMNCPSIQSLPKDGLPGSLKYFIVRDNEKLVKQCKKLKKTNPEIELIL

SEQ ID NO: 125523 - protein, 57 aa, Oryza sativa
  Clone ID: PAT_MRT4530_28159C.1.pep
MMEWLSVSPLVRSEPKLKLLQHRPVEHLPQHVHRNSFRRHGRGLRASTIHPSRSEDA

SEQ ID NO: 125524 - protein, 88 aa, Oryza sativa
  Clone ID: PAT_MRT4530_2815C.1.pep
TPHAWPPIFSGGGLLFLGPPPLGGSGVQFFGFLPEVFFLCESPFALKGGAPPIRFPCVLLKVFFKGPFPLGLCPSVFAIKILQGRFWF

SEQ ID NO: 125525 - protein, 525 aa, Oryza sativa
  Clone ID: PAT_MRT4530_28160C.1.pep
MAVNVLVVAGRVDKALEFAERMRRVGVEPDVYTYNCLIKGLCGARRVVDAMEMIGVMLQNGCPPDKISYYTVMSFLCKEKRVEEVRGLLQRMRNDAGLFPDQVTYNVLIHGLAKHGHADEALEFLRESEGKRFRVDEVGYSAIVHSFCLNGRMAEAKEIVGEMISKGCQPDVVTYSTVVDGFCRIGELDQARKMMKHMYKNDCKPNTVTHTALLNGLCKVGKTSEAWELLNKSEEEWWTPSDITYSVVMHGFRREGKLKESCDVVVQMLQKGFFPTTVEINLLIHALCKDRKPAEAKDFMEQCQSKGCTINVVNFTTVIHGFSRQGDLESALSLMDDMYLSNRHPDVVTYTVVVDALGKKGRLKEATGLVEKMLNRGVLPTPVTYRTVIHRYCEKGNLEDLLNLLEKMLARQEMKSAYNQVVEKLCAFGKLNEAYSLLYKILRTASVRDAQTCHILMESFLNRGLGLQAYNVACRMFRRNLIPDVKLCQKVDNQLASEKNKPVPGKLMVKFAERGLLKQVKQDSN

SEQ ID NO: 125526 - protein, 421 aa, Oryza sativa
  Clone ID: PAT_MRT4530_28161C.1.pep
MAAPGDGEEKKAGSGRNKHGFPRGFRFVPRDQELLDILDDKLRGAPLDRALDAVFHDTRILDFHPAKLYGMYAEDEENGYIYFFSTIEFKAAKPKQKKWPRRAAQGGRWKAVLGSSQMVEVGGVPVGRKLSMEFYVKGVRTNWGMHEFVRIIGPNIEVADLAVYRLHKLWTNGEEKPGDLAADVAKSTNQSGQASAADYYQTYQNAVSQAYAYAPPYVLQPGWSQGYPYDVAAAPPTAPWPVCWAPPSAPGSYDCCYASTFSRPPPPPPIAASTLDKAPITSTDHGASTNTSAATPVANNKPPPPPVAATATTLGKKGEGKGKAPTTTSTDHAGSTNTSAPPAANYQPPPTTTTPPLQGTQHVFAPGVVVGHEDEEGYLIVDEVNTWRNTQQLVLEDDDDDDDGRAAGAGAGEGGASASGR

SEQ ID NO: 125527 - protein, 304 aa, Oryza sativa
  Clone ID: PAT_MRT4530_28162C.1.pep
MELVVGASEATMKALLGKLGNLLAQEYALIRGVRGDIQYISDEMASIHAFLTNLSSSGNDDGHDAQTKDWMKQVRDIAYDMEDCVDDFAHRLRHDPRGDGCLVEVYRALYEIYTCRPRCDIAAKLAELKNRAQQVGERRLRYGVVLNPIPPQRGETRNGDQTTGENQVAGRRLITVKEPIGVARAIEKLEAWMKSQSHKNRGVLAIHGFGGGGKSTIAAALYRKHGQNFDCRAWVTMPQKFDDRAVLRSILSQVMLPATASGGGDRRRRGGSRHAKIETMSQEQLIKGLKNHLQNKSPKRRGGK

SEQ ID NO: 125528 - protein, 48 aa, Oryza sativa
  Clone ID: PAT_MRT4530_28163C.1.pep
MPPQERCATLGDKARARWNESAQQSGSERKLRRWTGLDRDLEHGDAHS

SEQ ID NO: 125529 - protein, 530 aa, Oryza sativa
  Clone ID: PAT_MRT4530_28164C.1.pep
MTSIYHDFIHNKLQSFGRIGRYFVNFVVLAHRFIALHIHPFWIQLSYFLLISILGSVLLMFLKPSNPEFRPGYIDMLFLSTSALTLSSLITIEMEVLSSSQIVVITLLMLLGGEVFVSFLGLMLRLNHKHNPEFSGDKVSSVPIELDTINSASTVISCEELQLEAAIPEVPSSTIKDLKRSKRLRWFLGFVVFSYFVVIHVAGFLLVLWYISRVSSAKAPLKKKGINIALFSFSVTVSSFANVGLVPTNENMAIFSKNPGLLLLFIGQILAGNTLYPLFLRLLIWFLGKVTKLRELKLMIKNPEELQYDYLLPKLPTAFLASTVIGLMASLVTLFGAVDWNSSVFDGLSSYQKIINALFMAVNARHSGENSIDCSLIAPAVLVLFIILMYLPPSTTFALSNGDEKTANKKAKRKLGLVVQNLAFSQLACISVFVIVAFITERSRLRNDPLNFSALNMIFEIISAYGNVGLSTGYSCSRLQKLHPGSICQDKPYSLSGWWSDEGKLLLVFVMLYGRLKAFTKGTGEYWRLW

SEQ ID NO: 125530 - protein, 137 aa, Oryza sativa
  Clone ID: PAT_MRT4530_28165C.1.pep
MPPPPLAPQRRAKARPPLPLPKPPRKPRRHHQSEPPPPPGASRHRASPRSAMPPPPTAPRPPLLFPNALPKRRRHVHHLSPPPLPPPAVPRRLSGPPRAAQSPSPAPQPSCAARHPLHLPPPPPKHYSYREPKPPLP

SEQ ID NO: 125531 - protein, 456 aa, Oryza sativa
  Clone ID: PAT_MRT4530_28166C.1.pep
MTLYISNLIRNKMHLSLKKKKKKKNVISGLGKALQKKGHLVEIILPKYDCMQNDQVNNLKVLDVVVQSYFEGNLFNNKIWTGTVEGLPVYFIEPQHPAKFFWRAQYYGEHDDFKRFAYFSRAALELLYQSQKKIDIIHCHDWQTAFVAPLYWEAYANLGFNSARICFTCHNFEYQGAAPAQDLACCGLDVQQLDREDRMRDNSHGRINVVKGAIVYSNIVTTVSPTYALEVRSEGGRGLQDSLKLHSRKFVGILNGIDTDTWNPSTDRHLKVQYNANDLQGKAANKAALRKQLNLSSTNASQPLREFEGIADHFQNNNNIRLLLKYDDSLSHWIYAASDMFIVPSMFEPCGLTQMIAMRYGSVPIVRKTGGLNDSVFDFDDETIPKELRNGFTFVHPDEKALSGAMERAFNYYNRKPEVWKQLVQKDMRIDFSWASSASQYEDIYQRAVARARAAA

SEQ ID NO: 125532 - protein, 429 aa, Oryza sativa
  Clone ID: PAT_MRT4530_28167C.1.pep
MAAAQRWLPGILRRGDGLARRLYSSASSLLFDDTQEQFKESVHKFAQETIAPHAAVIDASNHFPKDVNLWKLMGDFNLHGLTAPEEYGGMGLGYMYHCIAMEEISRASGSVGLSYGAHSNLCINQLVRHGSPAQKLKYLPKLISGEHVGALAMSEPNSGSDVVSMKCKAEKVDGGYVINGNKMWCTNGPSAQTLVVYAKTDIAAGSKGITAFIIEKGMPGFSTAQKLDKLGMRGSDTCELVFENCFVPHENVLGEEGKGVYVMMSGLDLERLVLAAGPIGLMQACLDVAVPYVRQREQFGRPIGEFQFIQVQHFVNRRLVPTITSYLLMQGKLADMYTSLQSSRSFVYSVARDCDNGKVDRKDCAGVILFAAERATQVALQAIQCLGGNGYINEYPTGRLLRDAKLFEIGAGTSEIRRMIIGRELFKEE

SEQ ID NO: 125533 - protein, 64 aa, Oryza sativa
  Clone ID: PAT_MRT4530_28168C.1.pep
MMRTCLFYGSVREEMQGADPKVYQNGPVEVAFTVYEDFAHYKSGVYKHITGGGSSRVDLQACKL

SEQ ID NO: 125534 - protein, 358 aa, Oryza sativa
  Clone ID: PAT_MRT4530_28169C.1.pep
CRNSARGRNSTYGGSGFGCTQPFELQSQRIVPDSEEESLPSSPETSSTSNYDMPDLAEQNLEHIYNVLGEMVDKEGPVVLSPEYVMCGTTSHVEPRLTFSADGFKIEYWDSCENDEMAAQYWKISDITCIDCKWAQSVGSVLITLHVGSGTETGNSSHDRIQFCLIDSQWPRKQQNIWHLASRYQEIWNNIPSGDFASENWNIEPSLFFPKQYFSDTEEFEDVIYPKGDHDAVSISKRDVELLLPETFVNDTIIDFYVKHLSTRIEPAEKHRYHFFNSFFFRKLADLDKDQGRAPEDGDTNISAKIPCILHMDSLKGSHSGLKDIIQSYLWEEWKERHPESASDCSDKFLNLRFISLE

SEQ ID NO: 125535 - protein, 57 aa, Oryza sativa
  Clone ID: PAT_MRT4530_2816C.1.pep
MWKQLLGKISWKAPKSGGGGGGSPTAKSPLTKGAGNGEPPAPPAAAAGGGGGAEGET

SEQ ID NO: 125536 - protein, 306 aa, Oryza sativa
  Clone ID: PAT_MRT4530_28170C.1.pep
MAIAAARRRLWRGLTTAAAASVGVEADTSALLARLVAEPEYRVKATMEEASGGSSAAAAFWEPLAAALLRASSPTKANLVLEWKLEKLIKEGIRDCEPYSVIIRFCRETKNAEFAMKVFEFVEELGIQLNTGIFNALINAFLSVGDLLAAMTLYEAMEDIEDCKPNSATYDAFISAFSRLGSGHAMMSWYLASKDAGFTPSIKAFEYLITGLFYANADRLSDMEHAIFQMLDNGMVFAHSEDVEAVICSYFRHKDFDRLDLFLNRIRSLYKLTRSTYDILISGYQRLNLHGRLDLAIKDMREAGFA

SEQ ID NO: 125537 - protein, 164 aa, Oryza sativa
  Clone ID: PAT_MRT4530_28171C.1.pep
FFFFFFWMEIYVHVQLGRRRKNTRVISKGLSKVPRRHSTASRQATIHIVFIRIHTSTAQPTHPFTLIHTKLASQQLQFNFLPTCHDMHPPPPLRCIQFTQHSISYARLPARTHAHDDPRHALVSDPVQFRHRSPCQAYTQLSLISRVVIQQLGCQSMAHRLFPV

SEQ ID NO: 125538 - protein, 40 aa, Oryza sativa
  Clone ID: PAT_MRT4530_28172C.1.pep
MRYVEQNCILIAHFGASNKHSSSINAEGCKRSGDHLIMSV

SEQ ID NO: 125539 - protein, 193 aa, Oryza sativa
  unsure (1)..(193): unsure at all Xaa locations
  Clone ID: PAT_MRT4530_28173C.1.pep
FTARRLLPPLPPRAATSPPXPPRAASSPRFHRAPPPLPLPPRAATSPPSTARCLLPPLPPRAGTSPPSTARRLLPPLPPRAATSPPSTARRLLPPLPPRAASSPXPPRAATSPPSTLLPIHWAPPPPPWPNPPRAATSLPIHRAPLPPLPRRNPPTSSTPSSKSAAAASSKFEAAKRGGSLSQRRSVSIWAEP

SEQ ID NO: 125540 - protein, 95 aa, Oryza sativa
  unsure (1)..(95): unsure at all Xaa locations
  Clone ID: PAT_MRT4530_28174C.1.pep
TSQKGHGQGTRGAKKKGEKLKAETEQGQSPPAQQMVRPKGAPTQISERPRARQQVINHGLESGNSMRVRAHXTCMGXPKKKKKKKKGRADRDTRT

SEQ ID NO: 125541 - protein, 63 aa, Oryza sativa
  Clone ID: PAT_MRT4530_28175C.1.pep
PPHGMSGLSSCTSGRKEACPRVSGNADSEVVSSHDKEQATASIAEDLETALAFFDVVLADEKV

SEQ ID NO: 125542 - protein, 104 aa, Oryza sativa
  Clone ID: PAT_MRT4530_28176C.1.pep
MVDLKHTAGHAGARRVKLFRVAWRPARAVVEVGAPLVPPPCDRARLGCGAGGRRWLFGAFRQLRVRWLAMLYTQILPSVTASNMSGNSGPSQGSHLNRGEKVLD

SEQ ID NO: 125543 - protein, 98 aa, Oryza sativa
  Clone ID: PAT_MRT4530_28177C.1.pep
ASPPPPGSVSHRCRSGSFWAYPQVRSLSGKTWWRRYVEYRCFVGGLAWATDDLCLEAAFSTYGEILESKIINDRKTGRSRGVLFSERFRASKAMRDGI

SEQ ID NO: 125544 - protein, 430 aa, Oryza sativa
  Clone ID: PAT_MRT4530_28178C.1.pep
HRLRRPLLTPPPIPYPTASRSHPLATATLAGGSVPAMRIRRNASRVLGSAYFTTQSEASRAYMSNLPPTSSAPAPVAYGGGGGDLGGPMVTPDDACQLSLSPWDLPYELEDPDPLEAPFDRYMACIPFRASFVSDSDNNDDDQMEVDEDKSWNQVENEEVNDQQQPADHKVDQSGDPAARKMKGKMNESSMVVMEMQDADKQAGVWYCNKNDGKKWHCRNIVDGPKTLCDYHLAKSRSYYTRTGEAGAAASSKSGRAKAPAIAKPKSSSKRTPAGESSAQNNSIAAAAAAAVSVLPTISSQPSKRKASNGLLGGDAYYFYDMFVPYRKKDRGGSSSKQQAGAEEKEILPQDNAVAMEEKMDGKKLYDGVYNSSDYSSDTASDDESDEDYTVGGASKRRTKKRKMKLSVKKVQFSKMTKKRVKERSLKSLL

SEQ ID NO: 125545 - protein, 73 aa, Oryza sativa
  unsure (1)..(73): unsure at all Xaa locations
  Clone ID: PAT_MRT4530_28179C.1.pep
ILLKLDKAKSFDSVNWPYLLDRLRDLGFGXWINWVTSIIASTSSKDILSPFPAQQKNFSKLLPPTSSTHQENS

SEQ ID NO: 125546 - protein, 126 aa, Oryza sativa
  Clone ID: PAT_MRT4530_2817C.1.pep
MARTAAGGVERTAAAAWGSLDALVGRLRAAFEEHGGHPEANPFGARAVRLYLARSAIARPKRPPTSSYSQAAAAATSPASPAASPTSPERSAEVGACVAIAVTMGCAPLSPAAHHRGSYRTLARRR

SEQ ID NO: 125547 - protein, 505 aa, Oryza sativa
  unsure (1)..(505): unsure at all Xaa locations
  Clone ID: PAT_MRT4530_28180C.1.pep
GEFELGTPYIALLPKKXNACRVGDFRPISFIHAFGKMFSKLLANXLTPKLQQLVSKNQSAFIKRRNIKDNFPVVNNMVKELHSSKILAILLKLDKAKSFDSVNWPYLLDRFEXKGFLARWINWVTSIIASTSSKVILNGRAGTGFQHDRGLRQRDPLSPMLLILAIDPLQKLXSAAQQTCILQPLHGRTHXFNIALCADDGVVFTRPDKXELQAVHAILQNFGRATTMTTNLEKSKVYAIRCNDPNLQDILSPFPAQQKXTFPSSYLRLPLHIRKIRKLDVQPLIDWFAARLPTWKGRLLNKTSQLVLIKSTLSALPTYXHLTVSHLKKWTENNMDKFHRGFLXTGSEQTRXRLDAYDKPWXGSILPCDETDRXACEGPMIDGRSPKELIPCLYQLVTXKRKNRTVAREFQGHFWLRQMRRMNSTTQVREFILLRQLIQQVHLHKEREDKLTWRWTSNGAYSANSAYRVQFLGSIQDDRFGYTFGRQRWKINANFSAGSWCKGKS

SEQ ID NO: 125548 - protein, 68 aa, Oryza sativa
  Clone ID: PAT_MRT4530_28181C.1.pep
RPADGCFFGHFQGFFVGKIIHSLCWKWQYVISLPVSAPDGGIDFGHFPNLFMGNSQLKVGELGSCQLP

SEQ ID NO: 125549 - protein, 80 aa, Oryza sativa
  Clone ID: PAT_MRT4530_28182C.1.pep
MPSPPPHNSGRPMRPPTHHAARHPLLYKACASTLPQKLPTARTESSHRMGGAPPKGYWSAGNREESVTATSRLLAHVASC

SEQ ID NO: 125550 - protein, 68 aa, Oryza sativa
  unsure (1)..(68): unsure at all Xaa locations
  Clone ID: PAT_MRT4530_28183C.1.pep
RRPSLVMSYLYYIQQNXSSFNHYYIHTPTNFLFVGRGIYVRAHCTNFDQRGSWWRPSIYMTQQASSSA

SEQ ID NO: 125551 - protein, 490 aa, Oryza sativa
  Clone ID: PAT_MRT4530_28184C.1.pep
MPLAFRFSRILNPRLNPSTNLGLALASSFSSSSRPEQPELPGARGGGGGFPATIREGRAEIFADDSNSVFYNKAQVNNRDLSIAVLRSFISRRREEHDIQLRRGSHAELPPKHHAEELGHIRGSSEDKALSEEISYRAPKVLEALAASGLRAIRYALEVDGIGEVIAVDNNEGNNYNLATHTIYKKLVFKVDLDPYGSPAAFLDSAVQCVADGGILMCSATDMAVLAGGNAEVCFSKYGSYPLKGKHCHEMALRILLACIESHAIRHKRYIVPIISVHMDFYIRDKRNIALPNFSPLVPQECAECGHNFVMGGPIWSDPMHDKEWAASILSSIQAMSCAYSAYAKISAIMTSVSEELPKAPLFVSLHNLCATLKCTNPTIATFQSAIRNAGYQISGSHVDPLALKTDAPMSVIWDIMRCWVKIHAVKYRPGNHPGTRILSQEPKLQAKFSHVPGGLAVQKSPRFVPNPEKYWGPKTKAGRQPKRLPVDNL

SEQ ID NO: 125552 - protein, 71 aa, Oryza sativa
  Clone ID: PAT_MRT4530_28185C.1.pep
MADIEAALPPPPPQQAPPQPPRWASAAAALRGVADVLVYSYVTAMWVNAAVFSRWACGEDSPAAAVTMDSW

SEQ ID NO: 125553 - protein, 79 aa, Oryza sativa
  Clone ID: PAT_MRT4530_28186C.1.pep
MQAGARFVSPAMKRTSDWILSQELPSDITIKVDDAAFNLHKLPLASRCGYIKKQVSGVGGNKATHLEIAGMPGGSKSIE

SEQ ID NO: 125554 - protein, 266 aa, Oryza sativa
  Clone ID: PAT_MRT4530_28187C.1.pep
MDDVGGGKVKKAAGGRKAGRPRKKAVTRSVKAGLQLPVSRIGRYLKKSRPVDLLSAASSPSAASTLFHAASMMPPTLFRTACLRNSVRLRTCTGRRAIKFLGSASSATALVLRGYCCCIGAFTKMSTEIGDKKMNDINGGNTALKSSAPSQPPKKGMKGYGSATAARPLPRLHLTNLAAAAAPDLRCPSRAARCPRPSRASTTASRSSPTRRPPPPGGPSPLPPPTGGPPRPRLRARRYDVVDESGTDNGEEYDATDDGECDPKTQ

SEQ ID NO: 125555 - protein, 177 aa, Oryza sativa
  Clone ID: PAT_MRT4530_28188C.1.pep
MAGGGRCGSPNSPLPQVYSPSAARNGGSGNGDTRGLWIRRWRREGAADPATETDPVMSVFFLAVMVVVFFVVMEAAARPPSGSGGGTAPLPSLSPDHALPDLADGRWQWRDQRGKGRQRRGWKCEVRADLAIVVCRRNLHYTLVNATTHGYFGDILKDDILSMTKSAIEHLRFVDLA

SEQ ID NO: 125556 - protein, 73 aa, Oryza sativa
  Clone ID: PAT_MRT4530_28189C.1.pep
MAKAVEQRRLRPKSRVGTSQDQSYGAKGVDFALADVESLESVEQEYMAGSEGTHVMDDNQEGLYDDAEIDYDN

SEQ ID NO: 125557 - protein, 58 aa, Oryza sativa
  Clone ID: PAT_MRT4530_2818C.1.pep
PHPAEKRPGKAASLDPLPLASQTFIFCIFACVCELKQRLQEKNQSVQATSSLSPYIDR

SEQ ID NO: 125558 - protein, 247 aa, Oryza sativa
  Clone ID: PAT_MRT4530_28190C.1.pep
MASPPPPPPQPPSPSAATAGAAAAPVDALFLQNLMSRVQLRPPFLDTNSFLTQDLDEFLLNEFAALSAAAGASDDDDDGEDGEGEGSDGEVVSGEARRRRTLAREEAKLEKEIVRLVLAGEAEEALKPNSGQSVAVGDHHICVGFHDDSGGVYRVWEWHGHVMIFDDEDGYSAEYIYGNHFEPLAAATARAKEKEREKREKELSSGLRDLILGDTGSGANGSKENGKGGAPRVVRRNVVNAPAAPAR

SEQ ID NO: 125559 - protein, 217 aa, Oryza sativa
  Clone ID: PAT_MRT4530_28191C.1.pep
MGWVGTFFPGTVGSKPIPCTCVIPKMSLKSRMPPNFDAYACPRRRPPPRVPCGRQVVPAIAVVVQGSTEEGRQDAIRLGDSFPQAVVAPLAAGACETKPHHAAPHSLLDLSIRRLKVEEEGWTLHLHRECGGAPTPNSRGFFGCAGSNGVVYIADGYDETKNALSFTGCLLADSLRRRASRRRLRVVRVRGARSRYCCLLREDFGKVRRIVADERLH

SEQ ID NO: 125560 - protein, 110 aa, Oryza sativa
  Clone ID: PAT_MRT4530_28192C.1.pep
MAKHHPDLIMCRKQPGIAIGRLCEKCDGKCVICDSYVRPCTLVRVCDECNYGSFQGRCVICGGVGISDAYYCKECTQQEKDRDGCPKIVNLGSAKTDLFYERKKYGFKKR

SEQ ID NO: 125561 - protein, 53 aa, Oryza sativa
  Clone ID: PAT_MRT4530_28193C.1.pep
LGVVPVGCGEGYGGDDPLSLVVPVPCEDLISGYKGLGELHANAISSKLEALST

SEQ ID NO: 125562 - protein, 75 aa, Oryza sativa
  Clone ID: PAT_MRT4530_28194C.1.pep
TGRRPQKAPAPAEIMLYEAKTLTAILESGHNKSRQPPPRARWAHHWEPTGARQCASSARQVQCRTWNAPSTANAR

SEQ ID NO: 125563 - protein, 87 aa, Oryza sativa
  Clone ID: PAT_MRT4530_28195C.1.pep
MPRRPSGGGGGAGPAAAAVRKVPLRKLLRAASVACGVQFGWALQLSLLTPYVQELGIPHAFASLVWLCGPLSGLLVQPLVGHLSDRI

SEQ ID NO: 125564 - protein, 43 aa, Oryza sativa
  Clone ID: PAT_MRT4530_28196C.1.pep
LFLFTNEWGWRILRRGIHTIQTFRIQNLIIIKYNKSYILSSIL

SEQ ID NO: 125565 - protein, 137 aa, Oryza sativa
  unsure (1)..(137): unsure at all Xaa locations
  Clone ID: PAT_MRT4530_28197C.1.pep
MPPPAMVEQRRGASAGMVSAAASSMRSSSSWSKSTASTSVSRRSSXSSPSSPTTSASATSSAQRSSTSTASASTTASASFDGVLVASLTPPVSLCSPPTSSLPIRPVAHGLHCSSKRVPSRPLPSPLDFGARRTTSS

SEQ ID NO: 125566 - protein, 56 aa, Oryza sativa
  Clone ID: PAT_MRT4530_28198C.1.pep
MGFSKHKHLDGRMKHKLLKGYSLYTVSQGFVAILVLPPQNCSLPMTLTNGLGLLLL

SEQ ID NO: 125567 - protein, 73 aa, Oryza sativa
  Clone ID: PAT_MRT4530_28199C.1.pep
LDNLNIRYWSWNYRGVDQNCLQWILVKDLDVSFQLQTLKRRYVLCTTPVSGWVFGAGASWMCSGSGPLGIELF

SEQ ID NO: 125568 - protein, 576 aa, Oryza sativa
  Clone ID: PAT_MRT4530_2819C.1.pep
MASSALICDTEQWKGLQIGRAHYDFVFWCGEQAHVGEIQKTHLRHLMHDVERCKAMTACLLIDSEYEGIYLDYSRQRATGETMEKLFKLAEAAKLKEKIEKMFRGDKINSTENRSVLHVALRAPRDEVINSNGVNVVPEVWGVKDKIKQFSETFRSGSWVGATGKALTNVVSVGIGGSFLGPLFVHAALQTDPEAAESAKGRQLRFLANVDPVDVARSIKDLDPETTLVVVVSKTFTTAETMLNARTLKEWIVSSLGPDAVAKHMIAVSTNLELVEKFGIDPKNAFAFWDWVGGRYSVCSAVGVLPLSLQYGFPIVQKFLEGAASIDKHFRSSSFEKNIPAILPYSQALEKFAPHIQQLSMESNGKGVSIDGVQLPFESGEIDFGEPGTNGQHSFYQLIHQGRVIPCDFIGVVKSQQPVYLKGEIVSNHDELMSNFFAQPDALAYGKQFTGYFQTPEQLHSEKVPEHLIPHKTFQGNRPSLSLLLPSLSAYEIGQLLAIYEHRIAVQGFLWGINSFDQWGVELGKSLASQVRKSLHASRVEGKPVLGFNSSTTSLLTRYLAVEPSTPYNTTTLPKV

SEQ ID NO: 125569 - protein, 90 aa, Oryza sativa
  Clone ID: PAT_MRT4530_281C.1.pep
MPQVIMKKRGGRQVTILATKEIERQFPLEGVPRVEGQWTGERDPNNDKVQFSVVNDKEEEKQLMGEQRVGSMVEVAAGETCTNYQKGTQQ

SEQ ID NO: 125570 - protein, 104 aa, Oryza sativa
  unsure (1)..(104): unsure at all Xaa locations
  Clone ID: PAT_MRT4530_28200C.1.pep
MRSPGFRRRRRGWRRSRAHLRDCDELQNCVGQNASARAQLYWMLWWASASQPLLDXATVPRRIQVINLNFLVPDCHTTTPGEVSCGGLLLTLCQASMKVIHFLH

SEQ ID NO: 125571 - protein, 255 aa, Oryza sativa
  Clone ID: PAT_MRT4530_28201C.1.pep
MRSPGFRRRRRGWRRSRAHLRDCDELQNCVGQNASARAQLYWMLWWASASQPLLDWTERSLVRNNPYPLPGRRRWRSAVSVHHHARRRPRAPRWDSLDATVPRRIQVINLNFLVPDCHTTTPGEVSCGGLLLTLCQASMKLPGDQEEQRIEVETEMLRQACPRRRPPILEGAQPVTGNATAAPRLIAGTSTTTTAAAVIAVDLTGAASTSSRDDNDDVRRLFLHELLNRSVSKPSPFHLQCRSSNPNRTTRLDLT

SEQ ID NO: 125572 - protein, 113 aa, Oryza sativa
  Clone ID: PAT_MRT4530_28202C.1.pep
IVAKLHCTTTKQLRLHLEENEESWTLTTSKNGTQEVKASPGAHERPSLHGKVLVVREGAITTPPRRETTPNGAAVVKPIKGQPRLSPASSKTTQPTRTSYIAGPPHRPSSHQA

SEQ ID NO: 125573 - protein, 53 aa, Oryza sativa
  Clone ID: PAT_MRT4530_28203C.1.pep
FFCSLLVIHHFFGLTCMWVRSISVRLFGGPSFPVSTVSFPCRFVLQWHLIVTI

SEQ ID NO: 125574 - protein, 104 aa, Oryza sativa
  Clone ID: PAT_MRT4530_28204C.1.pep
RGEKANCLASRMDRAPGAKAPGKEAQENLAVGNLASLQYAIVLVKKLLHVRYGDTGEGEELLGHGRSDDGRRGRPVYSVLRTMRSDLADLLCAPSPRAEAARGC

SEQ ID NO: 125575 - protein, 53 aa, Oryza sativa
  Clone ID: PAT_MRT4530_28205C.1.pep
LGPLEGFSRAAARSPAASSAATASAFARLSATPRVGCGGWPLGPGVSAVVARA

SEQ ID NO: 125576 - protein, 173 aa, Oryza sativa
  Clone ID: PAT_MRT4530_28206C.1.pep
MPSPPSPPPSPPLRLPLAAAPSRAMSSLPRVRKREGHLVCKLSVVNRHREQPFTAHHATTTASCAAARHGWPAQDRAVPVPLQPSDLPLGRLGPFGCRPRGCHVNATCVCHVVRRTPVLGLGPLRTGALVHRQVGPAGRLRFPPDDISRMEVMLLEGVGFIRAVKDACGMKVI

SEQ ID NO: 125577 - protein, 301 aa, Oryza sativa
  Clone ID: PAT_MRT4530_28207C.1.pep
MSSSAGPSTAPSAEYAEHLANLIVIPSLSREHQYFLGPIGNSHRAEFISAEINRIPYRIANPSLGHWKNTFKSWPSLEKSWPAWYKRISASKQSHWDELGIGQALALTIANSAKDEPLIASAAYFWSNTLNAFMFNQGPMTPTLLDITMITGLDITSSANHMNLNSKNKFDFKTKSIGGWSGFISANMGQGSVNPREHTAYLLVWLEKIKPTSMPFHPEARFVPALELNRSLKIFDGENKGLSPAFIGGEGGGGREADDSTARLWERGGGACRFSNGRQWRLSGRRWLTAARGIAQWLAMA

SEQ ID NO: 125578 - protein, 136 aa, Oryza sativa
  Clone ID: PAT_MRT4530_28208C.1.pep
MEQQAQLRDALNDALKQEVERLKIATGEMAKSNDAYNTGMQQVPYSPSFFQLSDQHAVQHHAGVQQLPHQFQQPHPSVPSHQMLSHPNSLSDMMQQDSLGRLQGLDIGKGPVAVKNEAEVVVKSEGSSISAGGEGH

SEQ ID NO: 125579 - protein, 82 aa, Oryza sativa
  Clone ID: PAT_MRT4530_28209C.1.pep
KTGARKRVCSPRSKVSTELKPFSKNPFFQILKKGWGPLFIGFLRIHPPCPEVMTFPFFFFFKKKKTNFFFLKKGIKFTPVFL

SEQ ID NO: 125580 - protein, 567 aa, Oryza sativa
  Clone ID: PAT_MRT4530_2820C.1.pep
MASSALICDTEQWKGLQAHVGAIQKTHLRDLMDDAERCKAMTAEYEGIFLDYSRQRATGETMEKLFKLAEAAKLKEKIEKMFSGDKINSTENRSVLHVALRAPRDEVIKSDGVNVVPEVWGVKDKIKQFSETFRSGSWVGATGKALTNVVSVGIGGSFLGPLFVHAALQTDPEAAESAKGRQLRFLANVDPVDVARSIKDLDPETTLVVVVSKTFTTAETMLNARTLKEWIVSSLGPDAVAKHMIAVSTNLELVEKFGIDPKNAFAFWDWVGGRYSVCSAVGVLPLSLQYGFPIVQKFLEGAASIDKHFRSSSFEKNIPVLLGLLSVWNVSFLGYPARAILPYSQALEKFAPHIQQLSMESNGKGVSIDGVQLSFETGEIDFGEPGTNGQHSFYQLIHQGRVIPCDFIGVVKSQQPVYLKGEIVSNHDELMSNFFAQPDALAYGKTPEQLHSEKVPEHLISHKTFQGNRPSLSLLLPSLSAYEIGQLLSIYEHRIAVQGFLWGINSFDQWGVELGKSLASQVRKSLHASRMEGKPVQGFNSSTASLLTRYLAVEPSTPYNTTTMPKV

SEQ ID NO: 125581 - protein, 313 aa, Oryza sativa
  Clone ID: PAT_MRT4530_28210C.1.pep
MDLDTPSCSSTRSAVPPSVTSKVSSPGDWGVHRPWSLAPETACGLSLCRARLRSLRYMLWNPCSTACATVSPPGPAATAAMRFHPLHRFRQSPQGTRSVVLHWLVAAAEAGIWRPTREGDRQRERRVGGEGGRGRRGAVTRMGRRERKGTREVALAAAAGGRGDGVDGEEDARHGRRARRTRGGPRKVAGTTMRGGGARIWTADCGGGATEVEQRDLAASPSPANAGDLVVVRPEARTRASEHADYHHNRLLLLWIAAATSSPAIPLERRLLAAPKAAATLRMEDMGRRPWPHRPPALEKRKAEHRLGPAVLR

SEQ ID NO: 125582 - protein, 107 aa, Oryza sativa
  Clone ID: PAT_MRT4530_28211C.1.pep
TIGVRDQGVFALIPYEVGLKKNKMKVCMVAPPNMFNMSLMLLPLLGIPLAQLNKSSVVLRNKMFKRPCFMTKDLETGLLMPHPQVVLTFLSPLANCPCFCKVCFRSL
